(19) United States
(12) Patent Application Publication
(10) Pub. No.: US 2007/0298491 A1
(43) Pub. Date: Dec. 27, 2007

(54) Human Secreted Proteins

(75) Inventors: Craig A. Rosen, Laytonsville, MD (US); Steven M. Ruben, Brookeville, MD (US)

Correspondence Address: HUMAN GENOME SCIENCES INC.;INTELLECTUAL PROPERTY DEPT., 14200 SHADY GROVE ROAD, ROCKVILLE, MD, 20850, US

(73) Assignee: Human Genome Sciences, Inc., Rockville, MD (US)

(21) Appl. No.: 11/781,665

(22) Filed: Jul. 23, 2007

Related U.S. Application Data
(63) Continuation of application No. 10/994,608, filed on Nov. 23, 2004.
Application No. 10/994,608 is a division of application No. 10/105,299, filed on Mar. 26, 2002.
Application No. 10/994,608 is a continuation-in-part of application No. 09/950,082, filed on Sep. 12, 2001, now abandoned.
Application No. 09/950,082 is a continuation-in-part of application No. PCT/US00/06043, filed on Mar. 9, 2000.
Application No. 09/950,082 is a continuation-in-part of application No. PCT/US00/06012, filed on Mar. 9, 2000.
Application No. 09/950,082 is a continuation-in-part of application No. PCT/US00/06058, filed on Mar. 9, 2000.
Application No. 09/950,082 is a continuation-in-part of application No. PCT/US00/06044, filed on Mar. 9, 2000.
Application No. 09/950,082 is a continuation-in-part of application No. PCT/US00/06059, filed on Mar. 9, 2000.
Application No. 09/950,082 is a continuation-in-part of application No. PCT/US00/06042, filed on Mar. 9, 2000.
Application No. 09/950,082 is a continuation-in-part of application No. PCT/US00/06014, filed on Mar. 9, 2000.
Application No. 09/950,082 is a continuation-in-part of application No. PCT/US00/06013, filed on Mar. 9, 2000.
Application No. 09/950,082 is a continuation-in-part of application No. PCT/US00/06049, filed on Mar. 9, 2000.
Application No. 09/950,082 is a continuation-in-part of application No. PCT/US00/06057, filed on Mar. 9, 2000.
Application No. 09/950,082 is a continuation-in-part of application No. PCT/US00/06824, filed on Mar. 16, 2000.
Application No. 09/950,082 is a continuation-in-part of application No. PCT/US00/06765, filed on Mar. 16, 2000.
Application No. 09/950,082 is a continuation-in-part of application No. PCT/US00/06792, filed on Mar. 16, 2000.
Application No. 09/950,082 is a continuation-in-part of application No. PCT/US00/06830, filed on Mar. 16, 2000.
Application No. 09/950,082 is a continuation-in-part of application No. PCT/US00/06782, filed on Mar. 16, 2000.
Application No. 09/950,082 is a continuation-in-part of application No. PCT/US00/06822, filed on Mar. 16, 2000.
Application No. 09/950,082 is a continuation-in-part of application No. PCT/US00/06791, filed on Mar. 16, 2000.
Application No. 09/950,082 is a continuation-in-part of application No. PCT/US00/06828, filed on Mar. 16, 2000.
Application No. 09/950,082 is a continuation-in-part of application No. PCT/US00/06823, filed on Mar. 16, 2000.
Application No. 09/950,082 is a continuation-in-part of application No. PCT/US00/06781, filed on Mar. 16, 2000.
Application No. 09/950,082 is a continuation-in-part of application No. PCT/US00/07505, filed on Mar. 22, 2000.
Application No. 09/950,082 is a continuation-in-part of application No. PCT/US00/07440, filed on Mar. 22, 2000.
Application No. 09/950,082 is a continuation-in-part of application No. PCT/US00/07506, filed on Mar. 22, 2000.
Application No. 09/950,082 is a continuation-in-part of application No. PCT/US00/07507, filed on Mar. 22, 2000.
Application No. 09/950,082 is a continuation-in-part of application No. PCT/US00/07535, filed on Mar. 22, 2000.
Application No. 09/950,082 is a continuation-in-part of application No. PCT/US00/07525, filed on Mar. 22, 2000.
Application No. 09/950,082 is a continuation-in-part of application No. PCT/US00/07534, filed on Mar. 22, 2000.
Application No. 09/950,082 is a continuation-in-part of application No. PCT/US00/07483, filed on Mar. 22, 2000.
Application No. 09/950,082 is a continuation-in-part of application No. PCT/US00/07526, filed on Mar. 22, 2000.
Application No. 09/950,082 is a continuation-in-part of application No. PCT/US00/07527, filed on Mar. 22, 2000.
Application No. 09/950,082 is a continuation-in-part of application No. PCT/US00/07661, filed on Mar. 23, 2000.
Application No. 09/950,082 is a continuation-in-part of application No. PCT/US00/07579, filed on Mar. 23, 2000.
Application No. 09/950,082 is a continuation-in-part of application No. PCT/US00/07723, filed on Mar. 23, 2000.
Application No. 09/950,082 is a continuation-in-part of application No. PCT/US00/07724, filed on Mar. 23, 2000.
Application No. 09/950,082 is a continuation-in-part of application No. PCT/US00/14929, filed on Jun. 1, 2000.
Application No. 09/950,082 is a continuation-in-part of application No. PCT/US00/07722, filed on Mar. 23, 2000.
Application No. 09/950,082 is a continuation-in-part of application No. PCT/US00/07578, filed on Mar. 23, 2000.
Application No. 09/950,082 is a continuation-in-part of application No. PCT/US00/07726, filed on Mar. 23, 2000.
Application No. 09/950,082 is a continuation-in-part of application No. PCT/US00/07677, filed on Mar. 23, 2000.
Application No. 09/950,082 is a continuation-in-part of application No. PCT/US00/07725, filed on Mar. 23, 2000.
Application No. 09/950,082 is a continuation-in-part of application No. PCT/US00/09070, filed on Apr. 6, 2000.
Application No. 09/950,082 is a continuation-in-part of application No. PCT/US00/08982, filed on Apr. 6, 2000.
Application No. 09/950,082 is a continuation-in-part of application No. PCT/US00/08983, filed on Apr. 6, 2000.
Application No. 09/950,082 is a continuation-in-part of application No. PCT/US00/09067, filed on Apr. 6, 2000.
Application No. 09/950,082 is a continuation-in-part of application No. PCT/US00/09066, filed on Apr. 6, 2000.
Application No. 09/950,082 is a continuation-in-part of application No. PCT/US00/09068, filed on Apr. 6, 2000.
Application No. 09/950,082 is a continuation-in-part of application No. PCT/US00/08981, filed on Apr. 6, 2000.
Application No. 09/950,082 is a continuation-in-part of application No. PCT/US00/08980, filed on Apr. 6, 2000.
Application No. 09/950,082 is a continuation-in-part of application No. PCT/US00/09071, filed on Apr. 6, 2000.
Application No. 09/950,082 is a continuation-in-part of application No. PCT/US00/09069, filed on Apr. 6, 2000.
Application No. 09/950,082 is a continuation-in-part of application No. PCT/US00/15136, filed on Jun. 1, 2000.
Application No. 09/950,082 is a continuation-in-part of application No. PCT/US00/14926, filed on Jun. 1, 2000.
Application No. 09/950,082 is a continuation-in-part of application No. PCT/US00/14963, filed on Jun. 1, 2000.
Application No. 09/950,082 is a continuation-in-part of application No. PCT/US00/15135, filed on Jun. 1, 2000.
Application No. 09/950,082 is a continuation-in-part of application No. PCT/US00/14934, filed on Jun. 1, 2000.
Application No. 09/950,082 is a continuation-in-part of application No. PCT/US00/14933, filed on Jun. 1, 2000.
Application No. 09/950,082 is a continuation-in-part of application No. PCT/US00/15137, filed on Jun. 1, 2000.
Application No. 09/950,082 is a continuation-in-part of application No. PCT/US00/14928, filed on Jun. 1, 2000.
Application No. 09/950,082 is a continuation-in-part of application No. PCT/US00/14973, filed on Jun. 1, 2000.
Application No. 09/950,082 is a continuation-in-part of application No. PCT/US00/14964, filed on Jun. 1, 2000.
Application No. 09/950,082 is a continuation-in-part of application No. PCT/US00/26376, filed on Sep. 26, 2000.
Application No. 09/950,082 is a continuation-in-part of application No. PCT/US00/26371, filed on Sep. 26, 2000.
Application No. 09/950,082 is a continuation-in-part of application No. PCT/US00/26324, filed on Sep. 26, 2000.
Application No. 09/950,082 is a continuation-in-part of application No. PCT/US00/26323, filed on Sep. 26, 2000.
Application No. 09/950,082 is a continuation-in-part of application No. PCT/US00/26337, filed on Sep. 26, 2000.
Application No. 09/950,082 is a continuation-in-part of application No. PCT/US01/13318, filed on Apr. 26, 2001.
Application No. 10/105,299 is a continuation-in-part of application No. 09/950,083, filed on Sep. 12, 2001, now abandoned.
Application No. 09/950,083 is a continuation-in-part of application No. PCT/US00/06043, filed on Mar. 9, 2000.
Application No. 09/950,083 is a continuation-in-part of application No. PCT/US00/06012, filed on Mar. 9, 2000.
Application No. 09/950,083 is a continuation-in-part of application No. PCT/US00/06058, filed on Mar. 9, 2000.
Application No. 09/950,083 is a continuation-in-part of application No. PCT/US00/06044, filed on Mar. 9, 2000.
Application No. 09/950,083 is a continuation-in-part of application No. PCT/US00/06059, filed on Mar. 9, 2000.
Application No. 09/950,083 is a continuation-in-part of application No. PCT/US00/06042, filed on Mar. 9, 2000.
Application No. 09/950,083 is a continuation-in-part of application No. PCT/US00/06014, filed on Mar. 9, 2000.
Application No. 09/950,083 is a continuation-in-part of application No. PCT/US00/06013, filed on Mar. 9, 2000.
Application No. 09/950,083 is a continuation-in-part of application No. PCT/US00/06049, filed on Mar. 9, 2000.
Application No. 09/950,083 is a continuation-in-part of application No. PCT/US00/06057, filed on Mar. 9, 2000.
Application No. 09/950,083 is a continuation-in-part of application No. PCT/US00/06824, filed on Mar. 16, 2000.
Application No. 09/950,083 is a continuation-in-part of application No. PCT/US00/06765, filed on Mar. 16, 2000.
Application No. 09/950,083 is a continuation-in-part of application No. PCT/US00/06792, filed on Mar. 16, 2000.
Application No. 09/950,083 is a continuation-in-part of application No. PCT/US00/06830, filed on Mar. 16, 2000.
Application No. 09/950,083 is a continuation-in-part of application No. PCT/US00/06782, filed on Mar. 16, 2000.
Application No. 09/950,083 is a continuation-in-part of application No. PCT/US00/06822, filed on Mar. 16, 2000.
Application No. 09/950,083 is a continuation-in-part of application No. PCT/US00/06791, filed on Mar. 16, 2000.
Application No. 09/950,083 is a continuation-in-part of application No. PCT/US00/06828, filed on Mar. 16, 2000.
Application No. 09/950,083 is a continuation-in-part of application No. PCT/US00/06823, filed on Mar. 16, 2000.
Application No. 09/950,083 is a continuation-in-part of application No. PCT/US00/06781, filed on Mar. 16, 2000.
Application No. 09/950,083 is a continuation-in-part of application No. PCT/US00/07505, filed on Mar. 22, 2000.
Application No. 09/950,083 is a continuation-in-part of application No. PCT/US00/07440, filed on Mar. 22, 2000.
Application No. 09/950,083 is a continuation-in-part of application No. PCT/US00/07506, filed on Mar. 22, 2000.
Application No. 09/950,083 is a continuation-in-part of application No. PCT/US00/07507, filed on Mar. 22, 2000.
Application No. 09/950,083 is a continuation-in-part of application No. PCT/US00/07535, filed on Mar. 22, 2000.
Application No. 09/950,083 is a continuation-in-part of application No. PCT/US00/07525, filed on Mar. 22, 2000.
Application No. 09/950,083 is a continuation-in-part of application No. PCT/US00/07534, filed on Mar. 22, 2000.
Application No. 09/950,083 is a continuation-in-part of application No. PCT/US00/07483, filed on Mar. 22, 2000.
Application No. 09/950,083 is a continuation-in-part of application No. PCT/US00/07526, filed on Mar. 22, 2000.
Application No. 09/950,083 is a continuation-in-part of application No. PCT/US00/07527, filed on Mar. 22, 2000.
Application No. 09/950,083 is a continuation-in-part of application No. PCT/US00/07661, filed on Mar. 23, 2000.
Application No. 09/950,083 is a continuation-in-part of application No. PCT/US00/07579, filed on Mar. 23, 2000.
Application No. 09/950,083 is a continuation-in-part of application No. PCT/US00/07723, filed on Mar. 23, 2000.
Application No. 09/950,083 is a continuation-in-part of application No. PCT/US00/07724, filed on Mar. 23, 2000.
Application No. 09/950,083 is a continuation-in-part of application No. PCT/US00/14929, filed on Jun. 1, 2000.
Application No. 09/950,083 is a continuation-in-part of application No. PCT/US00/07722, filed on Mar. 23, 2000.
Application No. 09/950,083 is a continuation-in-part of application No. PCT/US00/07578, filed on Mar. 23, 2000.
Application No. 09/950,083 is a continuation-in-part of application No. PCT/US00/07726, filed on Mar. 23, 2000.
Application No. 09/950,083 is a continuation-in-part of application No. PCT/US00/07677, filed on Mar. 23, 2000.
Application No. 09/950,083 is a continuation-in-part of application No. PCT/US00/07725, filed on Mar. 23, 2000.
Application No. 09/950,083 is a continuation-in-part of application No. PCT/US00/09070, filed on Apr. 6, 2000.
Application No. 09/950,083 is a continuation-in-part of application No. PCT/US00/08982, filed on Apr. 6, 2000.
Application No. 09/950,083 is a continuation-in-part of application No. PCT/US00/08983, filed on Apr. 6, 2000.
Application No. 09/950,083 is a continuation-in-part of application No. PCT/US00/09067, filed on Apr. 6, 2000.
Application No. 09/950,083 is a continuation-in-part of application No. PCT/US00/09066, filed on Apr. 6, 2000.
Application No. 09/950,083 is a continuation-in-part of application No. PCT/US00/09068, filed on Apr. 6, 2000.
Application No. 09/950,083 is a continuation-in-part of application No. PCT/US00/08981, filed on Apr. 6, 2000.
Application No. 09/950,083 is a continuation-in-part of application No. PCT/US00/08980, filed on Apr. 6, 2000.
Application No. 09/950,083 is a continuation-in-part of application No. PCT/US00/09071, filed on Apr. 6, 2000.
Application No. 09/950,083 is a continuation-in-part of application No. PCT/US00/09069, filed on Apr. 6, 2000.
Application No. 09/950,083 is a continuation-in-part of application No. PCT/US00/15136, filed on Jun. 1, 2000.
Application No. 09/950,083 is a continuation-in-part of application No. PCT/US00/14926, filed on Jun. 1, 2000.
Application No. 09/950,083 is a continuation-in-part of application No. PCT/US00/14963, filed on Jun. 1, 2000.
Application No. 09/950,083 is a continuation-in-part of application No. PCT/US00/15135, filed on Jun. 1, 2000.
Application No. 09/950,083 is a continuation-in-part of application No. PCT/US00/14934, filed on Jun. 1, 2000.
Application No. 09/950,083 is a continuation-in-part of application No. PCT/US00/14933, filed on Jun. 1, 2000.
Application No. 09/950,083 is a continuation-in-part of application No. PCT/US00/15137, filed on Jun. 1, 2000.
Application No. 09/950,083 is a continuation-in-part of application No. PCT/US00/14928, filed on Jun. 1, 2000.
Application No. 09/950,083 is a continuation-in-part of application No. PCT/US00/14973, filed on Jun. 1, 2000.
Application No. 09/950,083 is a continuation-in-part of application No. PCT/US00/14964, filed on Jun. 1, 2000.
Application No. 09/950,083 is a continuation-in-part of application No. PCT/US00/26376, filed on Sep. 26, 2000.
Application No. 09/950,083 is a continuation-in-part of application No. PCT/US00/26371, filed on Sep. 26, 2000.
Application No. 09/950,083 is a continuation-in-part of application No. PCT/US00/26324, filed on Sep. 26, 2000.
Application No. 09/950,083 is a continuation-in-part of application No. PCT/US00/26323, filed on Sep. 26, 2000.
Application No. 09/950,083 is a continuation-in-part of application No. PCT/US00/26337, filed on Sep. 26, 2000.
Application No. 09/950,083 is a continuation-in-part of application No. PCT/US01/13318, filed on Apr. 26, 2001.
(60) Provisional application No. 60/278,650, filed on Mar. 27, 2001.
(60) Provisional application No. 60/167,061, filed on Nov. 23, 1999.
(60) Provisional application No. 60/124,146, filed on Mar. 12, 1999.
(60) Provisional application No. 60/166,989, filed on Nov. 23, 1999.
(60) Provisional application No. 60/124,093, filed on Mar. 12, 1999.
(60) Provisional application No. 60/168,654, filed on Dec. 3, 1999.
(60) Provisional application No. 60/124,145, filed on Mar. 12, 1999.
(60) Provisional application No. 60/168,661, filed on Dec. 3, 1999.
(60) Provisional application No. 60/124,099, filed on Mar. 12, 1999.
(60) Provisional application No. 60/168,622, filed on Dec. 3, 1999.
(60) Provisional application No. 60/124,096, filed on Mar. 12, 1999.
(60) Provisional application No. 60/168,663, filed on Dec. 3, 1999.
(60) Provisional application No. 60/124,143, filed on Mar. 12, 1999.
(60) Provisional application No. 60/168,665, filed on Dec. 3, 1999.
(60) Provisional application No. 60/138,598, filed on Jun. 11, 1999.
(60) Provisional application No. 60/124,095, filed on Mar. 12, 1999.
(60) Provisional application No. 60/168,662, filed on Dec. 3, 1999.
(60) Provisional application No. 60/138,626, filed on Jun. 11, 1999.
(60) Provisional application No. 60/125,360, filed on Mar. 19, 1999.
(60) Provisional application No. 60/168,667, filed on Dec. 3, 1999.
(60) Provisional application No. 60/138,574, filed on Jun. 11, 1999.
(60) Provisional application No. 60/124,144, filed on Mar. 12, 1999.
(60) Provisional application No. 60/168,666, filed on Dec. 3, 1999.
(60) Provisional application No. 60/138,597, filed on Jun. 11, 1999.
(60) Provisional application No. 60/124,142, filed on Mar. 12, 1999.
(60) Provisional application No. 60/168,664, filed on Dec. 3, 1999.
(60) Provisional application No. 60/125,359, filed on Mar. 19, 1999.
(60) Provisional application No. 60/169,906, filed on Dec. 10, 1999.
(60) Provisional application No. 60/126,051, filed on Mar. 23, 1999.
(60) Provisional application No. 60/169,980, filed on Dec. 10, 1999.
(60) Provisional application No. 60/125,362, filed on Mar. 19, 1999.
(60) Provisional application No. 60/169,910, filed on Dec. 10, 1999.
(60) Provisional application No. 60/125,361, filed on Mar. 19, 1999.
(60) Provisional application No. 60/169,936, filed on Dec. 10, 1999.
(60) Provisional application No. 60/125,812, filed on Mar. 23, 1999.
(60) Provisional application No. 60/169,916, filed on Dec. 10, 1999.
(60) Provisional application No. 60/126,054, filed on Mar. 23, 1999.
(60) Provisional application No. 60/169,946, filed on Dec. 10, 1999.
(60) Provisional application No. 60/125,815, filed on Mar. 23, 1999.
(60) Provisional application No. 60/169,616, filed on Dec. 8, 1999.
(60) Provisional application No. 60/125,358, filed on Mar. 19, 1999.
(60) Provisional application No. 60/169,623, filed on Dec. 8, 1999.
(60) Provisional application No. 60/125,364, filed on Mar. 19, 1999.
(60) Provisional application No. 60/169,617, filed on Dec. 8, 1999.
(60) Provisional application No. 60/125,363, filed on Mar. 19, 1999.
(60) Provisional application No. 60/172,410, filed on Dec. 17, 1999.
(60) Provisional application No. 60/126,502, filed on Mar. 26, 1999.
(60) Provisional application No. 60/172,409, filed on Dec. 17, 1999.
(60) Provisional application No. 60/126,503, filed on Mar. 26, 1999.
(60) Provisional application No. 60/172,412, filed on Dec. 17, 1999.
(60) Provisional application No. 60/126,505, filed on Mar. 26, 1999.
(60) Provisional application No. 60/172,408, filed on Dec. 17, 1999.
(60) Provisional application No. 60/126,594, filed on Mar. 26, 1999.
(60) Provisional application No. 60/172,413, filed on Dec. 17, 1999.
(60) Provisional application No. 60/126,511, filed on Mar. 26, 1999.
(60) Provisional application No. 60/171,549, filed on Dec. 22, 1999.
(60) Provisional application No. 60/126,595, filed on Mar. 26, 1999.
(60) Provisional application No. 60/171,504, filed on Dec. 22, 1999.
(60) Provisional application No. 60/126,598, filed on Mar. 26, 1999.
(60) Provisional application No. 60/171,552, filed on Dec. 22, 1999.
(60) Provisional application No. 60/126,596, filed on Mar. 26, 1999.
(60) Provisional application No. 60/171,550, filed on Dec. 22, 1999.
(60) Provisional application No. 60/126,600, filed on Mar. 26, 1999.
(60) Provisional application No. 60/171,551, filed on Dec. 22, 1999.
(60) Provisional application No. 60/126,501, filed on Mar. 26, 1999.
(60) Provisional application No. 60/174,847, filed on Jan. 7, 2000.
(60) Provisional application No. 60/126,504, filed on Mar. 26, 1999.
(60) Provisional application No. 60/174,853, filed on Jan. 7, 2000.
(60) Provisional application No. 60/126,509, filed on Mar. 26, 1999.
(60) Provisional application No. 60/174,852, filed on Jan. 7, 2000.
(60) Provisional application No. 60/126,506, filed on Mar. 26, 1999.
(60) Provisional application No. 60/174,850, filed on Jan. 7, 2000.
(60) Provisional application No. 60/126,510, filed on Mar. 26, 1999.
(60) Provisional application No. 60/174,851, filed on Jan. 7, 2000.
(60) Provisional application No. 60/138,573, filed on Jun. 11, 1999.
(60) Provisional application No. 60/174,871, filed on Jan. 7, 2000.
(60) Provisional application No. 60/126,508, filed on Mar. 26, 1999.
(60) Provisional application No. 60/174,872, filed on Jan. 7, 2000.
(60) Provisional application No. 60/126,507, filed on Mar. 26, 1999.
(60) Provisional application No. 60/174,877, filed on Jan. 7, 2000.
(60) Provisional application No. 60/126,597, filed on Mar. 26, 1999.
(60) Provisional application No. 60/176,064, filed on Jan. 14, 2000.
(60) Provisional application No. 60/154,373, filed on Sep. 17, 1999.
(60) Provisional application No. 60/126,601, filed on Mar. 26, 1999.
(60) Provisional application No. 60/176,063, filed on Jan. 14, 2000.
(60) Provisional application No. 60/126,602, filed on Mar. 26, 1999.
(60) Provisional application No. 60/176,052, filed on Jan. 14, 2000.
(60) Provisional application No. 60/128,695, filed on Apr. 9, 1999.
(60) Provisional application No. 60/176,069, filed on Jan. 14, 2000.
(60) Provisional application No. 60/128,696, filed on Apr. 9, 1999.
(60) Provisional application No. 60/176,068, filed on Jan. 14, 2000.
(60) Provisional application No. 60/128,703, filed on Apr. 9, 1999.
(60) Provisional application No. 60/176,929, filed on Jan. 20, 2000.
(60) Provisional application No. 60/128,697, filed on Apr. 9, 1999.
(60) Provisional application No. 60/176,926, filed on Jan. 20, 2000.
(60) Provisional application No. 60/128,698, filed on Apr. 9, 1999.
(60) Provisional application No. 60/177,050, filed on Jan. 20, 2000.
(60) Provisional application No. 60/128,699, filed on Apr. 9, 1999.
(60) Provisional application No. 60/177,166, filed on Jan. 20, 2000.
(60) Provisional application No. 60/128,701, filed on Apr. 9, 1999.
(60) Provisional application No. 60/176,930, filed on Jan. 20, 2000.
(60) Provisional application No. 60/128,700, filed on Apr. 9, 1999.
(60) Provisional application No. 60/176,931, filed on Jan. 20, 2000.
(60) Provisional application No. 60/128,694, filed on Apr. 9, 1999.
(60) Provisional application No. 60/177,049, filed on Jan. 20, 2000.
(60) Provisional application No. 60/128,702, filed on Apr. 9, 1999.
(60) Provisional application No. 60/138,629, filed on Jun. 11, 1999.
(60) Provisional application No. 60/138,628, filed on Jun. 11, 1999.
(60) Provisional application No. 60/138,631, filed on Jun. 11, 1999.
(60) Provisional application No. 60/138,632, filed on Jun. 11, 1999.
(60) Provisional application No. 60/138,599, filed on Jun. 11, 1999.
(60) Provisional application No. 60/138,572, filed on Jun. 11, 1999.
(60) Provisional application No. 60/138,625, filed on Jun. 11, 1999.
(60) Provisional application No. 60/138,633, filed on Jun. 11, 1999.
(60) Provisional application No. 60/138,630, filed on Jun. 11, 1999.
(60) Provisional application No. 60/138,627, filed on Jun. 11, 1999.
(60) Provisional application No. 60/155,808, filed on Sep. 27, 1999.
(60) Provisional application No. 60/155,804, filed on Sep. 27, 1999.
(60) Provisional application No. 60/155,807, filed on Sep. 27, 1999.
(60) Provisional application No. 60/155,805, filed on Sep. 27, 1999.
(60) Provisional application No. 60/155,806, filed on Sep. 27, 1999.
(60) Provisional application No. 60/212,142, filed on Jun. 16, 2000.
(60) Provisional application No. 60/201,194, filed on May 2, 2000.
(60) Provisional application No. 60/167,061, filed on Nov. 23, 1999.
(60) Provisional application No. 60/124,146, filed on Mar. 12, 1999.
(60) Provisional application No. 60/166,989, filed on Nov. 23, 1999.
(60) Provisional application No. 60/124,093, filed on Mar. 12, 1999.
(60) Provisional application No. 60/168,654, filed on Dec. 3, 1999.
(60) Provisional application No. 60/124,145, filed on Mar. 12, 1999.
(60) Provisional application No. 60/168,661, filed on Dec. 3, 1999.
(60) Provisional application No. 60/124,099, filed on Mar. 12, 1999.
(60) Provisional application No. 60/168,622, filed on Dec. 3, 1999.
(60) Provisional application No. 60/124,096, filed on Mar. 12, 1999.
(60) Provisional application No. 60/168,663, filed on Dec. 3, 1999.
(60) Provisional application No. 60/124,143, filed on Mar. 12, 1999.
(60) Provisional application No. 60/168,665, filed on Dec. 3, 1999.
(60) Provisional application No. 60/138,598, filed on Jun. 11, 1999.
(60) Provisional application No. 60/124,095, filed on Mar. 12, 1999.
(60) Provisional application No. 60/168,662, filed on Dec. 3, 1999.
(60) Provisional application No. 60/138,626, filed on Jun. 11, 1999.
(60) Provisional application No. 60/125,360, filed on Mar. 19, 1999.
(60) Provisional application No. 60/168,667, filed on Dec. 3, 1999.
(60) Provisional application No. 60/138,574, filed on Jun. 11, 1999.
(60) Provisional application No. 60/124,144, filed on Mar. 12, 1999.
(60) Provisional application No. 60/168,666, filed on Dec. 3, 1999.
(60) Provisional application No. 60/138,597, filed on Jun. 11, 1999.
(60) Provisional application No. 60/124,142, filed on Mar. 12, 1999.
(60) Provisional application No. 60/168,664, filed on Dec. 3, 1999.
(60) Provisional application No. 60/125,359, filed on Mar. 19, 1999.
(60) Provisional application No. 60/169,906, filed on Dec. 10, 1999.
(60) Provisional application No. 60/126,051, filed on Mar. 23, 1999.
(60) Provisional application No. 60/169,980, filed on Dec. 10, 1999.
(60) Provisional application No. 60/125,362, filed on Mar. 19, 1999.
(60) Provisional application No. 60/169,910, filed on Dec. 10, 1999.
(60) Provisional application No. 60/125,361, filed on Mar. 19, 1999.
(60) Provisional application No. 60/169,936, filed on Dec. 10, 1999.
(60) Provisional application No. 60/125,812, filed on Mar. 23, 1999.
(60) Provisional application No. 60/169,916, filed on Dec. 10, 1999.
(60) Provisional application No. 60/126,054, filed on Mar. 23, 1999.
(60) Provisional application No. 60/169,946, filed on Dec. 10, 1999.
(60) Provisional application No. 60/125,815, filed on Mar. 23, 1999.
(60) Provisional application No. 60/169,616, filed on Dec. 8, 1999.
(60) Provisional application No. 60/125,358, filed on Mar. 19, 1999.
(60) Provisional application No. 60/169,623, filed on Dec. 8, 1999.
(60) Provisional application No. 60/125,364, filed on Mar. 19, 1999.
(60) Provisional application No. 60/169,617, filed on Dec. 8, 1999.
(60) Provisional application No. 60/125,363, filed on Mar. 19, 1999.
(60) Provisional application No. 60/172,410, filed on Dec. 17, 1999.
(60) Provisional application No. 60/126,502, filed on Mar. 26, 1999.
(60) Provisional application No. 60/172,409, filed on Dec. 17, 1999.
(60) Provisional application No. 60/126,503, filed on Mar. 26, 1999.
(60) Provisional application No. 60/172,412, filed on Dec. 17, 1999.
(60) Provisional application No. 60/126,505, filed on Mar. 26, 1999.
(60) Provisional application No. 60/172,408, filed on Dec. 17, 1999.
(60) Provisional application No. 60/126,594, filed on Mar. 26, 1999.
(60) Provisional application No. 60/172,413, filed on Dec. 17, 1999.
(60) Provisional application No. 60/126,511, filed on Mar. 26, 1999.
(60) Provisional application No. 60/171,549, filed on Dec. 22, 1999.
(60) Provisional application No. 60/126,595, filed on Mar. 26, 1999.
(60) Provisional application No. 60/171,504, filed on Dec. 22, 1999.
(60) Provisional application No. 60/126,598, filed on Mar. 26, 1999.
(60) Provisional application No. 60/171,552, filed on Dec. 22, 1999.
(60) Provisional application No. 60/126,596, filed on Mar. 26, 1999.
(60) Provisional application No. 60/171,550, filed on Dec. 22, 1999.
(60) Provisional application No. 60/126,600, filed on Mar. 26, 1999.
(60) Provisional application No. 60/171,551, filed on Dec. 22, 1999.
(60) Provisional application No. 60/126,501, filed on Mar. 26, 1999.
(60) Provisional application No. 60/174,847, filed on Jan. 7, 2000.
(60) Provisional application No. 60/126,504, filed on Mar. 26, 1999.
(60) Provisional application No. 60/174,853, filed on Jan. 7, 2000.
(60) Provisional application No. 60/126,509, filed on Mar. 26, 1999.
(60) Provisional application No. 60/174,852, filed on Jan. 7, 2000.
(60) Provisional application No. 60/126,506, filed on Mar. 26, 1999.
(60) Provisional application No. 60/174,850, filed on Jan. 7, 2000.
(60) Provisional application No. 60/126,510, filed on Mar. 26, 1999.
(60) Provisional application No. 60/174,851, filed on Jan. 7, 2000.
(60) Provisional application No. 60/138,573, filed on Jun. 11, 1999.
(60) Provisional application No. 60/174,871, filed on Jan. 7, 2000.
(60) Provisional application No. 60/126,508, filed on Mar. 26, 1999.
(60) Provisional application No. 60/174,872, filed on Jan. 7, 2000.
(60) Provisional application No. 60/126,507, filed on Mar. 26, 1999.
(60) Provisional application No. 60/174,877, filed on Jan. 7, 2000.
(60) Provisional application No. 60/126,597, filed on Mar. 26, 1999.
(60) Provisional application No. 60/176,064, filed on Jan. 14, 2000.
(60) Provisional application No. 60/154,373, filed on Sep. 17, 1999.
(60) Provisional application No. 60/126,601, filed on Mar. 26, 1999.
(60) Provisional application No. 60/176,063, filed on Jan. 14, 2000.
(60) Provisional application No. 60/126,602, filed on Mar. 26, 1999.
(60) Provisional application No. 60/176,052, filed on Jan. 14, 2000.
(60) Provisional application No. 60/128,695, filed on Apr. 9, 1999.
(60) Provisional application No. 60/176,069, filed on Jan. 14, 2000.
(60) Provisional application No. 60/128,696, filed on Apr. 9, 1999.
(60) Provisional application No. 60/176,068, filed on Jan. 14, 2000.
(60) Provisional application No. 60/128,703, filed on Apr. 9, 1999.
(60) Provisional application No. 60/176,929, filed on Jan. 20, 2000.
(60) Provisional application No. 60/128,697, filed on Apr. 9, 1999.
(60) Provisional application No. 60/176,926, filed on Jan. 20, 2000.
(60) Provisional application No. 60/128,698, filed on Apr. 9, 1999.
(60) Provisional application No. 60/177,050, filed on Jan. 20, 2000.
(60) Provisional application No. 60/128,699, filed on Apr. 9, 1999.
(60) Provisional application No. 60/177,166, filed on Jan. 20, 2000.
(60) Provisional application No. 60/128,701, filed on Apr. 9, 1999.
(60) Provisional application No. 60/176,930, filed on Jan. 20, 2000.
(60) Provisional application No. 60/128,700, filed on Apr. 9, 1999.
(60) Provisional application No. 60/176,931, filed on Jan. 20, 2000.
(60) Provisional application No. 60/128,694, filed on Apr. 9, 1999.
(60) Provisional application No. 60/177,049, filed on Jan. 20, 2000.
(60) Provisional application No. 60/128,702, filed on Apr. 9, 1999.
(60) Provisional application No. 60/138,629, filed on Jun. 11, 1999.
(60) Provisional application No. 60/138,628, filed on Jun. 11, 1999.
(60) Provisional application No. 60/138,631, filed on Jun. 11, 1999.
(60) Provisional application No. 60/138,632, filed on Jun. 11, 1999.
(60) Provisional application No. 60/138,599, filed on Jun. 11, 1999.
(60) Provisional application No. 60/138,572, filed on Jun. 11, 1999.
(60) Provisional application No. 60/138,625, filed on Jun. 11, 1999.
(60) Provisional application No. 60/138,633, filed on Jun. 11, 1999.
(60) Provisional application No. 60/138,630, filed on Jun. 11, 1999.
(60) Provisional application No. 60/138,627, filed on Jun. 11, 1999.
(60) Provisional application No. 60/155,808, filed on Sep. 27, 1999.
(60) Provisional application No. 60/155,804, filed on Sep. 27, 1999.
(60) Provisional application No. 60/155,807, filed on Sep. 27, 1999.
(60) Provisional application No. 60/155,805, filed on Sep. 27, 1999.
(60) Provisional application No. 60/155,806, filed on Sep. 27, 1999.
(60) Provisional application No. 60/212,142, filed on Jun. 16, 2000.
(60) Provisional application No. 60/201,194, filed on May 2, 2000.

(51) Int. Cl. C12N 5/00; C07H 21/00; C07K 14/00; C07K 16/00; G01N 33/53; C12N 1/00; C12N 15/63

(52) U.S. Cl. 435/325; 435/243; 435/320.1; 436/501; 530/350; 530/387.9; 536/23.5

(57) ABSTRACT

The present invention relates to human secreted polypeptides, and isolated nucleic acid molecules encoding said polypeptides, useful for diagnosing and treating diseases, disorders, and/or conditions related to said human secreted proteins. Antibodies that bind these polypeptides are also encompassed by the present invention. Also encompassed by the invention are vectors, host cells, and recombinant and synthetic methods for producing said polynucleotides, polypeptides, and/or antibodies. The invention further encompasses screening methods for identifying agonists and antagonists of polynucleotides and polypeptides of the invention. The present invention further encompasses methods and compositions for inhibiting or enhancing the production and function of the polypeptides of the present invention.

### STATEMENT UNDER 37 C.F.R. § 1.77(b)(5)

[0001] This application refers to a “Sequence Listing” listed below, which is provided as a text document. The document is entitled “PS950D1C1_SeqList.txt” (7,454,808 bytes, created on Mar. 20, 2002), which is hereby incorporated by reference in its entirety herein.

### FIELD OF THE INVENTION

[0002] The present invention relates to human secreted proteins/polypeptides, and isolated nucleic acid molecules encoding said proteins/polypeptides, useful for detecting, preventing, diagnosing, prognosticating, treating, and/or ameliorating diseases and disorders related to said proteins/polypeptides (relatedness may be by direct or indirect association, by cause, by consequence, or by effect on said diseases and disorders). Antibodies that bind these polypeptides are also encompassed by the present invention. Also encompassed by the invention are vectors, host cells, and recombinant and synthetic methods for producing said polynucleotides, polypeptides, and/or antibodies. The invention further encompasses screening methods for identifying agonists and antagonists of polynucleotides and polypeptides of the invention. The present invention further encompasses methods and compositions for inhibiting or enhancing the production and function of the polypeptides of the present invention.

### BACKGROUND OF THE INVENTION

[0003] Unlike bacterium, which exist as a single compartment surrounded by a membrane, human cells and other eukaryotes are subdivided by membranes into many functionally distinct compartments. Each membrane-bounded compartment, or organelle, contains different proteins essential for the function of the organelle. The cell uses “sorting signals,” which are amino acid motifs located within the protein, to target proteins to particular cellular organelles.

[0004] One type of sorting signal, called a signal sequence, a signal peptide, or a leader sequence, directs a class of proteins to an organelle called the endoplasmic reticulum (ER). The ER separates the membrane-bounded proteins from all other types of proteins. Once localized to the ER, both groups of proteins can be further directed to another organelle called the Golgi apparatus. Here, the Golgi distributes the proteins to vesicles, including secretory vesicles, the cell membrane, lysosomes, and the other organelles.

[0005] Proteins targeted to the ER by a signal sequence can be released into the extracellular space as a secreted protein. For example, vesicles containing secreted proteins can fuse with the cell membrane and release their contents into the extracellular space—a process called exocytosis. Exocytosis can occur constitutively or after receipt of a triggering signal. In the latter case, the proteins are stored in secretory vesicles (or secretory granules) until exocytosis is triggered. Similarly, proteins residing on the cell membrane can also be secreted into the extracellular space by proteolytic cleavage of a “linker” holding the protein to the membrane.

[0006] Thus there exists a clear need for identifying and using novel secreted polynucleotides and polypeptides. Identification and sequencing of human genes is a major goal of modern scientific research. For example, by identifying genes and determining their sequences, scientists have been able to make large quantities of valuable human “gene products.” These include human insulin, interferon, Factor VIII, tumor necrosis factor, human growth hormone, tissue plasminogen activator, and numerous other compounds. Additionally, knowledge of gene sequences can provide the key to treatment or cure of genetic diseases (such as muscular dystrophy and cystic fibrosis).

### SUMMARY OF THE INVENTION

[0007] The present invention relates to human secreted proteins/polypeptides, and isolated nucleic acid molecules encoding said proteins/polypeptides, useful for detecting, preventing, diagnosing, prognosticating, treating, and/or ameliorating diseases and disorders related to said proteins/polypeptides (relatedness may be by direct or indirect association, or by cause, consequence, or effect on said diseases and disorders). Antibodies that bind these polypeptides are also encompassed by the present invention. Also encompassed by the invention are vectors, host cells, and recombinant and synthetic methods for producing said polynucleotides, polypeptides, and/or antibodies. The invention further encompasses screening methods for identifying agonists and antagonists of polynucleotides and polypeptides of the invention. The present invention further encompasses methods and compositions for inhibiting or enhancing the production and function of the polypeptides of the present invention.

### DETAILED DESCRIPTION

Polynucleotides and Polypeptides of the Invention

Description of Table 1A

[0008] Table 1A summarizes information concerning certain polynucleotides and polypeptides of the invention. The first column provides the gene number in the application for each clone identifier. The second column provides a unique clone identifier, “Clone ID:”, for a cDNA clone related to each contig sequence disclosed in Table 1A. Third column, the cDNA Clones identified in the second column were deposited as indicated in the third column (i.e. by ATCC Deposit No:Z and deposit date). Some of the deposits contain multiple different clones corresponding to the same gene. In the fourth column, “Vector” refers to the type of vector contained in the corresponding cDNA Clone identified in the second column. In the fifth column, the nucleotide sequence identified as “NT SEQ ID NO:X” was assembled from partially homologous (“overlapping”) sequences obtained from the corresponding cDNA clone identified in the second column and, in some cases, from additional related cDNA clones. The overlapping sequences were assembled into a single contiguous sequence of high redundancy (usually three to five overlapping sequences at each nucleotide position), resulting in a final sequence identified as SEQ ID NO:X. In the sixth column, “Total NT Seq.” refers to the total number of nucleotides in the contig sequence identified as SEQ ID NO:X.” The deposited clone may contain all or most of these sequences, reflected by the nucleotide position indicated as “5′ NT of Clone Seq.” (seventh column) and the “3′ NT of Clone Seq.” (eighth column) of SEQ ID NO:X. In the ninth column, the nucleotide position of SEQ ID NO:X of the putative start codon (methionine) is identified as “5′ NT of Start Codon.” Similarly, in column ten, the nucleotide position of SEQ ID NO:X of the predicted signal sequence is identified as “5′ NT of First AA of Signal Pep.” In the eleventh column, the translated amino acid sequence, beginning with the methionine, is identified as “AA SEQ ID NO:Y,” although other reading frames can also be routinely translated using known molecular biology techniques. The polypeptides produced by these alternative open reading frames are specifically contemplated by the present invention.

[0009] In the twelfth and thirteenth columns of Table 1A, the first and last amino acid position of SEQ ID NO:Y of the predicted signal peptide is identified as “First AA of Sig Pep” and “Last AA of Sig Pep.” In the fourteenth column, the predicted first amino acid position of SEQ ID NO:Y of the secreted portion is identified as “Predicted First AA of Secreted Portion”. The amino acid position of SEQ ID NO:Y of the last amino acid encoded by the open reading frame is identified in the fifteenth column as “Last AA of ORF”.

[0010] SEQ ID NO:X (where X may be any of the polynucleotide sequences disclosed in the sequence listing) and the translated SEQ ID NO:Y (where Y may be any of the polypeptide sequences disclosed in the sequence listing) are sufficiently accurate and otherwise suitable for a variety of uses well known in the art and described further below. For instance, SEQ ID NO:X is useful for designing nucleic acid hybridization probes that will detect nucleic acid sequences contained in SEQ ID NO:X or the cDNA contained in the deposited clone. These probes will also hybridize to nucleic acid molecules in biological samples, thereby enabling a variety of forensic and diagnostic methods of the invention. Similarly, polypeptides identified from SEQ ID NO:Y may be used, for example, to generate antibodies which bind specifically to proteins containing the polypeptides and the secreted proteins encoded by the cDNA clones identified in Table 1A and/or elsewhere herein

[0011] Nevertheless, DNA sequences generated by sequencing reactions can contain sequencing errors. The errors exist as misidentified nucleotides, or as insertions or deletions of nucleotides in the generated DNA sequence. The erroneously inserted or deleted nucleotides cause frame shifts in the reading frames of the predicted amino acid sequence. In these cases, the predicted amino acid sequence diverges from the actual amino acid sequence, even though the generated DNA sequence may be greater than 99.9% identical to the actual DNA sequence (for example, one base insertion or deletion in an open reading frame of over 1000 bases).

[0012] Accordingly, for those applications requiring precision in the nucleotide sequence or the amino acid sequence, the present invention provides not only the generated nucleotide sequence identified as SEQ ID NO:X, and the predicted translated amino acid sequence identified as SEQ ID NO:Y, but also a sample of plasmid DNA containing a human cDNA of the invention deposited with the ATCC, as set forth in Table 1A. The nucleotide sequence of each deposited plasmid can readily be determined by sequencing the deposited plasmid in accordance with known methods

[0013] The predicted amino acid sequence can then be verified from such deposits. Moreover, the amino acid sequence of the protein encoded by a particular plasmid can also be directly determined by peptide sequencing or by expressing the protein in a suitable host cell containing the deposited human cDNA, collecting the protein, and determining its sequence.

[0014] Also provided in Table 1A is the name of the vector which contains the cDNA plasmid. Each vector is routinely used in the art. The following additional information is provided for convenience.

[0015] Vectors Lambda Zap (U.S. Pat. Nos. 5,128,256 and 5,286,636), Uni-Zap XR (U.S. Pat. Nos. 5,128,256 and 5,286,636), Zap Express (U.S. Pat. Nos. 5,128,256 and 5,286,636), pbluescript (pBS) (Short, J. M. et al., Nucleic Acids Res. 16:7583-7600 (1988); Alting-Mees, M. A. and Short, J. M., Nucleic Acids Res. 17:9494 (1989)) and pBK (Alting-Mees, M. A. et al., Strategies 5:58-61 (1992)) are commercially available from Stratagene Cloning Systems, Inc., 11011 N. Torrey Pines Road, La Jolla, Calif., 92037. pBS contains an ampicillin resistance gene and pBK contains a neomycin resistance gene. Phagemid pBS may be excised from the Lambda Zap and Uni-Zap XR vectors, and phagemid pBK may be excised from the Zap Express vector. Both phagemids may be transformed into E. coli strain XL-1 Blue, also available from Stratagene

[0016] Vectors pSport1, pCMVSport 1.0, pCMVSport 2.0 and pCMVSport 3.0, were obtained from Life Technologies, Inc., P.O. Box 6009, Gaithersburg, Md. 20897. All Sport vectors contain an ampicillin resistance gene and may be transformed into E. coli strain DH10B, also available from Life Technologies. See, for instance, Gruber, C. E., et al., Focus 15:59 (1993). Vector lafmid BA (Bento Soares, Columbia University, New York, N.Y.) contains an ampicillin resistance gene and can be transformed into E. coli strain XL-1 Blue. Vector pCR®2.1, which is available from Invitrogen, 1600 Faraday Avenue, Carlsbad, Calif. 92008, contains an ampicillin resistance gene and may be transformed into E. coli strain DH10B, available from Life Technologies. See, for instance, Clark, J. M., Nuc. Acids Res. 16:9677-9686 (1988) and Mead, D. et al., Bio/Technology 9: (1991).

[0017] The present invention also relates to the genes corresponding to SEQ ID NO:X, SEQ ID NO:Y, and/or a deposited cDNA (cDNA Clone ID). The corresponding gene can be isolated in accordance with known methods using the sequence information disclosed herein. Such methods include, but are not limited to, preparing probes or primers from the disclosed sequence and identifying or amplifying the corresponding gene from appropriate sources of genomic material.

[0018] Also provided in the present invention are allelic variants, orthologs, and/or species homologs. Procedures known in the art can be used to obtain full-length genes, allelic variants, splice variants, full-length coding portions, orthologs, and/or species homologs of genes corresponding to SEQ ID NO:X and SEQ ID NO:Y using information from the sequences disclosed herein or the clones deposited with the ATCC. For example, allelic variants and/or species homologs may be isolated and identified by making suitable probes or primers from the sequences provided herein and screening a suitable nucleic acid source for allelic variants and/or the desired homologue.

[0019] The present invention provides a polynucleotide comprising, or alternatively consisting of, the nucleic acid sequence of SEQ ID NO:X and/or a cDNA contained in ATCC Deposit No. Z. The present invention also provides a polypeptide comprising, or alternatively, consisting of, the polypeptide sequence of SEQ ID NO:Y, a polypeptide encoded by SEQ ID NO:X, and/or a polypeptide encoded by a cDNA contained in ATCC deposit No. Z. Polynucleotides encoding a polypeptide comprising, or alternatively consisting of the polypeptide sequence of SEQ ID NO:Y, a polypeptide encoded by SEQ ID NO:X and/or a polypeptide encoded by the cDNA contained in ATCC Deposit No. Z, are also encompassed by the invention. The present invention further encompasses a polynucleotide comprising, or alternatively consisting of the complement of the nucleic acid sequence of SEQ ID NO:X, and/or the complement of the coding strand of the cDNA contained in ATCC Deposit No. Z.

Description of Table 1B (Comprised of Tables 1B.1 and 1B.2)

[0020] Table 1B.1 and Table 1B.2 summarize some of the polynucleotides encompassed by the invention (including cDNA clones related to the sequences (Clone ID:), contig sequences (contig identifier (Contig ID:) and contig nucleotide sequence identifiers (SEQ ID NO:X)) and further summarizes certain characteristics of these polynucleotides and the polypeptides encoded thereby. The first column of Tables 1B.1 and 1B.2 provide the gene numbers in the application for each clone identifier. The second column of Tables 1B.1 and 1B.2 provide unique clone identifiers, “Clone ID:”, for cDNA clones related to each contig sequence disclosed in Table 1A and/or Table 1B. The third column of Tables 1B.1 and 1B.2 provide unique contig identifiers, “Contig ID:” for each of the contig sequences disclosed in these tables. The fourth column of Tables 1B.1 and 1B.2 provide the sequence identifiers, “SEQ ID NO:X”, for each of the contig sequences disclosed in Table 1A and/or 1B.

[0021] Table 1B.1

[0022] The fifth column of Table 1B.1, “ORF (From-To)”, provides the location (i.e., nucleotide position numbers) within the polynucleotide sequence of SEQ ID NO:X that delineates the preferred open reading frame (ORF) that encodes the amino acid sequence shown in the sequence listing and referenced in Table 1B.1 as SEQ ID NO:Y (column 6). Column 7 of Table 1B.1 lists residues comprising predicted epitopes contained in the polypeptides encoded by each of the preferred ORFs (SEQ ID NO:Y). Identification of potential immunogenic regions was performed according to the method of Jameson and Wolf (CABIOS, 4; 181-186 (1988)); specifically, the Genetics Computer Group (GCG) implementation of this algorithm, embodied in the program PEPTIDESTRUCTURE (Wisconsin Package v10.0, Genetics Computer Group (GCG), Madison, Wisc.). This method returns a measure of the probability that a given residue is found on the surface of the protein. Regions where the antigenic index score is greater than 0.9 over at least 6 amino acids are indicated in Table 1B.1 as “Predicted Epitopes”. In particular embodiments, polypeptides of the invention comprise, or alternatively consist of, one, two, three, four, five or more of the predicted epitopes described in Table 1B.1. It will be appreciated that depending on the analytical criteria used to predict antigenic determinants, the exact address of the determinant may vary slightly. Column 8 of Table 1B.1 (“Cytologic Band”) provides the chromosomal location of polynucleotides corresponding to SEQ ID NO:X. Chromosomal location was determined by finding exact matches to EST and cDNA sequences contained in the NCBI (National Center for Biotechnology Information) UniGene database. Given a presumptive chromosomal location, disease locus association was determined by comparison with the Morbid Map, derived from Online Mendelian Inheritance in Man (Online Mendelian Inheritance in Man, OMIM™. McKusick-Nathans Institute for Genetic Medicine, Johns Hopkins University (Baltimore, Md.) and National Center for Biotechnology Information, National Library of Medicine (Bethesda, Md.) 2000. World Wide Web URL: http://www.ncbi.nlm.nih.gov/omim/). If the putative chromosomal location of the Query overlaps with the chromosomal location of a Morbid Map entry, an OMIM identification number is disclosed in Table 1B.1, column 9 labeled “OMIM Disease Reference(s)”. A key to the OMIM reference identification numbers is provided in Table 5.

[0023] Table 1B.2

[0024] Column 5 of Table 1B.2, “Tissue Distribution” shows the expression profile of tissue, cells, and/or cell line libraries which express the polynucleotides of the invention. The first code number shown in Table 1B.2 column 5 (preceding the colon), represents the tissue/cell source identifier code corresponding to the key provided in Table 4. Expression of these polynucleotides was not observed in the other tissues and/or cell libraries tested. The second number in column 5 (following the colon), represents the number of times a sequence corresponding to the reference polynucleotide sequence (e.g., SEQ ID NO:X) was identified in the corresponding tissue/cell source. Those tissue/cell source identifier codes in which the first two letters are “AR” designate information generated using DNA array technology. Utilizing this technology, cDNAs were amplified by PCR and then transferred, in duplicate, onto the array. Gene expression was assayed through hybridization of first strand cDNA probes to the DNA array. cDNA probes were generated from total RNA extracted from a variety of different tissues and cell lines. Probe synthesis was performed in the presence of ³³P dCTP, using oligo(dT) to prime reverse transcription. After hybridization, high stringency washing conditions were employed to remove non-specific hybrids from the array. The remaining signal, emanating from each gene target, was measured using a Phosphorimager. Gene expression was reported as Phosphor Stimulating Luminescence (PSL) which reflects the level of phosphor signal generated from the probe hybridized to each of the gene targets represented on the array. A local background signal subtraction was performed before the total signal generated from each array was used to normalize gene expression between the different hybridizations. The value presented after “[array code]:” represents the mean of the duplicate values, following background subtraction and probe normalization. One of skill in the art could routinely use this information to identify normal and/or diseased tissue(s) which show a predominant expression pattern of the corresponding polynucleotide of the invention or to identify polynucleotides which show predominant and/or specific tissue and/or cell expression.

Description of Table 1C

[0025] Table 1C summarizes additional polynucleotides encompassed by the invention (including cDNA clones related to the sequences (Clone ID:), contig sequences (contig identifier (Contig ID:) contig nucleotide sequence identifiers (SEQ ID NO:X)), and genomic sequences (SEQ ID NO:B). The first column provides a unique clone identifier, “Clone ID:”, for a cDNA clone related to each contig sequence. The second column provides the sequence identifier, “SEQ ID NO:X”, for each contig sequence. The third column provides a unique contig identifier, “Contig ID:” for each contig sequence. The fourth column, provides a BAC identifier “BAC ID NO:A” for the BAC clone referenced in the corresponding row of the table. The fifth column provides the nucleotide sequence identifier, “SEQ ID NO:B” for a fragment of the BAC clone identified in column four of the corresponding row of the table. The sixth column, “Exon From-To”, provides the location (i.e., nucleotide position numbers) within the polynucleotide sequence of SEQ ID NO:B which delineate certain polynucleotides of the invention that are also exemplary members of polynucleotide sequences that encode polypeptides of the invention (e.g., polypeptides containing amino acid sequences encoded by the polynucleotide sequences delineated in column six, and fragments and variants thereof).

Description of Table 1D

[0026] Table 1D: In preferred embodiments, the present invention encompasses a method of detecting, preventing, treating, and/or ameliorating a disease or disorder listed as listed in the “Preferred Indications” column of Table 1D (below); comprising administering to a patient (in which such detection, prevention, treatment, and/or amelioration is desired) a protein, nucleic acid, or antibody of the invention (or fragment or variant thereof) represented by Table 1A and Table 1D (in the same row as the disease or disorder to be treated is listed in the “Preferred Indications” column of Table 1D) in an amount effective to detect, prevent, treat, or ameliorate the disease or disorder.

[0027] As indicated in Table 1D, the polynucleotides, polypeptides, agonists, or antagonists of the present invention (including antibodies) can be used in assays to test for one or more biological activities. If these polynucleotides and polypeptides do exhibit activity in a particular assay, it is likely that these molecules may be involved in the diseases associated with the biological activity. Thus, the polynucleotides or polypeptides, or agonists or antagonists thereof (including antibodies) could be used to prevent, treat, or ameliorate the associated disease.

[0028] The present invention encompasses methods of detecting, preventing, diagnosing, prognosticating, treating, and/or ameliorating a disease or disorder. In preferred embodiments, the present invention encompasses a method of detecting, diagnosing, treating, preventing, or ameliorating a disease or disorder listed in the “Preferred Indications” column of Table 1D; comprising administering to a patient in which such treatment, prevention, or amelioration is desired a protein, nucleic acid, or antibody of the invention (or fragment or variant thereof) in an amount effective to treat, prevent, or ameliorate the disease or disorder. The first and second columns of Table 1D show the “Gene No.” and “cDNA Clone ID No.”, respectively, indicating certain nucleic acids and proteins (or antibodies against the same) of the invention (including polynucleotide, polypeptide, and antibody fragments or variants thereof) that may be used in detecting, preventing, diagnosing, prognosticating, treating, and/or ameliorating the disease(s) or disorder(s) indicated in the corresponding row in Column 3 of Table 1D.

[0029] In another embodiment, the present invention also encompasses methods of preventing, treating, diagnosing, or ameliorating a disease or disorder listed in the “Preferred Indications” column of Table 1D; comprising administering to a patient combinations of the proteins, nucleic acids, or antibodies of the invention (or fragments or variants thereof), sharing similar indications as shown in the corresponding rows in Column 3 of Table 1D.

[0030] The “Preferred Indication” column describes diseases, disorders, and/or conditions that may be treated, prevented, diagnosed, or ameliorated by a protein, nucleic acid, or antibody of the invention (or fragment or variant thereof).

[0031] The recitation of “Cancer” in the “Preferred Indication” column indicates that the corresponding nucleic acid and protein, or antibody against the same, of the invention (or fragment or variant thereof) may be used for example, to diagnose, treat, prevent, and/or ameliorate diseases and/or disorders relating to neoplastic diseases (e.g., leukemias, cancers, and/or as described below under “Hyperproliferative Disorders”).

[0032] In specific embodiments, a protein, nucleic acid, or antibody of the invention (or fragment or variant thereof) having a “Cancer” recitation in the “Preferred Indication” column of Table 1D may be used for example, to diagnose, treat, prevent, and/or ameliorate a neoplasm located in a tissue selected from the group consisting of: colon, abdomen, bone, breast, digestive system, liver, pancreas, prostate, peritoneum, lung, blood (e.g., leukemia), endocrine glands (adrenal, parathyroid, pituitary, testicles, ovary, thymus, thyroid), uterus, eye, head and neck, nervous (central and peripheral), lymphatic system, pelvic, skin, soft tissue, spleen, thoracic, and urogenital.

[0033] In specific embodiments, a protein, nucleic acid, or antibody of the invention (or fragment or variant thereof) having a “Cancer” recitation in the “Preferred Indication” column of Table 1D, may be used for example, to diagnose, treat, prevent, and/or ameliorate a pre-neoplastic condition, selected from the group consisting of: hyperplasia (e.g., endometrial hyperplasia and/or as described in the section entitled “Hyperproliferative Disorders”), metaplasia (e.g., connective tissue metaplasia, atypical metaplasia, and/or as described in the section entitled “Hyperproliferative Disorders”), and/or dysplasia (e.g., cervical dysplasia, and bronchopulmonary dysplasia).

[0034] In another specific embodiment, a protein, nucleic acid, or antibody of the invention (or fragment or variant thereof) having a “Cancer” recitation in the “Preferred Indication” column of Table 1D, may be used for example, to diagnose, treat, prevent, and/or ameliorate a benign dysproliferative disorder selected from the group consisting of: benign tumors, fibrocystic conditions, tissue hypertrophy, and/or as described in the section entitled “Hyperproliferative Disorders”.

[0035] The recitation of “Immune/Hematopoietic” in the “Preferred Indication” column indicates that the corresponding nucleic acid and protein, or antibody against the same, of the invention (or fragment or variant thereof), may be used for example, to diagnose, treat, prevent, and/or ameliorate diseases and/or disorders relating to neoplastic diseases (e.g., as described below under “Hyperproliferative Disorders”), blood disorders (e.g., as described below under “Immune Activity” “Cardiovascular Disorders” and/or “Blood-Related Disorders”), and infections (e.g., as described below under “Infectious Disease”).

[0036] In specific embodiments, a protein, nucleic acid, or antibody of the invention (or fragment or variant thereof) having the “Immune/Hematopoietic” recitation in the “Preferred Indication” column of Table 1D, may be used for example, to diagnose, treat, prevent, and/or ameliorate a disease or disorder selected from the group consisting of: anemia, pancytopenia, leukopenia, thrombocytopenia, leukemias, Hodgkin's disease, non-Hodgkin's lymphoma, acute lymphocytic anemia (ALL), plasmacytomas, multiple myeloma, Burkitt's lymphoma, arthritis, asthma, AIDS, autoimmune disease, rheumatoid arthritis, granulomatous disease, immune deficiency, inflammatory bowel disease, sepsis, neutropenia, neutrophilia, psoriasis, immune reactions to transplanted organs and tissues, systemic lupus erythematosis, hemophilia, hypercoagulation, diabetes mellitus, endocarditis, meningitis, Lyme Disease, and allergies.

[0037] The recitation of “Reproductive” in the “Preferred Indication” column indicates that the corresponding nucleic acid and protein, or antibody against the same, of the invention (or fragment or variant thereof), may be used for example, to diagnose, treat, prevent, and/or ameliorate diseases and/or disorders relating to neoplastic diseases (e.g., as described below under “Hyperproliferative Disorders”), and disorders of the reproductive system (e.g., as described below under “Reproductive System Disorders”).

[0038] In specific embodiments, a protein, nucleic acid, or antibody of the invention (or fragment or variant thereof) having a “Reproductive” recitation in the “Preferred Indication” column of Table 1D, may be used for example, to diagnose, treat, prevent, and/or ameliorate a disease or disorder selected from the group consisting of: cryptorchism, prostatitis, inguinal hernia, varicocele, leydig cell tumors, verrucous carcinoma, prostatitis, malacoplakia, Peyronie's disease, penile carcinoma, squamous cell hyperplasia, dysmenorrhea, ovarian adenocarcinoma, Turner's syndrome, mucop lent cervicitis, Sertoli-leydig tumors, ovarian cancer, uterine cancer, pelvic inflammatory disease, testicular cancer, prostate cancer, Klinefelter's syndrome, Young's syndrome, premature ejaculation, diabetes mellitus, cystic fibrosis, Kartagener's syndrome, testicular atrophy, testicular feminization, anorchia, ectopic testis, epididymitis, orchitis, gonorrhea, syphilis, testicular torsion, vasitis nodosa, germ cell tumors, stromal tumors, dysmenorrhea, retroverted uterus, endometriosis, fibroids, adenomyosis, anovulatory bleeding, amenorrhea, Cushing's syndrome, hydatidiform moles, Asherman's syndrome, premature menopause, precocious puberty, uterine polyps, dysfunctional uterine bleeding, cervicitis, chronic cervicitis, mucopurulent cervicitis, cervical dysplasia, cervical polyps, Nabothian cysts, cervical erosion, cervical incompetence, cervical neoplasms, pseudohermaphroditism, and premenstrual syndrome.

[0039] The recitation of “Musculoskeletal” in the “Preferred Indication” column indicates that the corresponding nucleic acid and protein, or antibody against the same, of the invention (or fragment or variant thereof), may be used for example, to diagnose, treat, prevent, and/or ameliorate diseases and/or disorders relating to neoplastic diseases (e.g., as described below under “Hyperproliferative Disorders”), and disorders of the immune system (e.g., as described below under “Immune Activity”).

[0040] In specific embodiments, a protein, nucleic acid, or antibody of the invention (or fragment or variant thereof) having a “Musculoskeletal” recitation in the “Preferred Indication” column of Table 1D, may be used for example, to diagnose, treat, prevent, and/or ameliorate a disease or disorder selected from the group consisting of: bone cancers (e.g., osteochondromas, benign chondromas, chondroblastoma, chondromyxoid fibromas, osteoid osteomas, giant cell tumors, multiple myeloma, osteosarcomas), Paget's Disease, rheumatoid arthritis, systemic lupus erythematosus, osteomyelitis, Lyme Disease, gout, bursitis, tendonitis, osteoporosis, osteoarthritis, muscular dystrophy, mitochondrial myopathy, cachexia, and multiple sclerosis.

[0041] The recitation of “Cardiovascular” in the “Preferred Indication” column indicates that the corresponding nucleic acid and protein, or antibody against the same, of the invention (or fragment or variant thereof), may be used for example, to diagnose, treat, prevent, and/or ameliorate diseases and/or disorders relating to neoplastic diseases (e.g., as described below under “Hyperproliferative Disorders”), and disorders of the cardiovascular system (e.g., as described below under “Cardiovascular Disorders”).

[0042] In specific embodiments, a protein, nucleic acid, or antibody of the invention (or fragment or variant thereof) having a “Cardiovascular” recitation in the “Preferred Indication” column of Table 1D, may be used for example, to diagnose, treat, prevent, and/or ameliorate a disease or disorder selected from the group consisting of: myxomas, fibromas, rhabdomyomas, cardiovascular abnormalities (e.g., congenital heart defects, cerebral arteriovenous malformations, septal defects), heart disease (e.g., heart failure, congestive heart disease, arrhythmia, tachycardia, fibrillation, pericardial Disease, endocarditis), cardiac arrest, heart valve disease (e.g., stenosis, regurgitation, prolapse), vascular disease (e.g., hypertension, coronary artery disease, angina, aneurysm, arteriosclerosis, peripheral vascular disease), hyponatremia, hypernatremia, hypokalemia, and hyperkalemia.

[0043] The recitation of “Mixed Fetal” in the “Preferred Indication” column indicates that the corresponding nucleic acid and protein, or antibody against the same, of the invention (or fragment or variant thereof), may be used for example, to diagnose, treat, prevent, and/or ameliorate diseases and/or disorders relating to neoplastic diseases (e.g., as described below under “Hyperproliferative Disorders”).

[0044] In specific embodiments, a protein, nucleic acid, or antibody of the invention (or fragment or variant thereof) having a “Mixed Fetal” recitation in the “Preferred Indication” column of Table 1D, may be used for example, to diagnose, treat, prevent, and/or ameliorate a disease or disorder selected from the group consisting of: spina bifida, hydranencephaly, neurofibromatosis, fetal alcohol syndrome, diabetes mellitus, PKU, Down's syndrome, Patau syndrome, Edwards syndrome, Turner syndrome, Apert syndrome, Carpenter syndrome, Conradi syndrome, Crouzon syndrome, cutis laxa, Cornelia de Lange syndrome, Ellis-van Creveld syndrome, Holt-Oram syndrome, Kartagener syndrome, Meckel-Gruber syndrome, Noonan syndrome, Pallister-Hall syndrome, Rubinstein-Taybi syndrome, Scimitar syndrome, Smith-Lemli-Opitz syndrome, thromocytopenia-absent radius (TAR) syndrome, Treacher Collins syndrome, Williams syndrome, Hirschsprung's disease, Meckel's diverticulum, polycystic kidney disease, Turner's syndrome, and gonadal dysgenesis, Klippel-Feil syndrome, Ostogenesis imperfecta, muscular dystrophy, Tay-Sachs disease, Wilm's tumor, neuroblastoma, and retinoblastoma.

[0045] The recitation of “Excretory” in the “Preferred Indication” column indicates that the corresponding nucleic acid and protein, or antibody against the same, of the invention (or fragment or variant thereof), may be used for example, to diagnose, treat, prevent, and/or ameliorate diseases and/or disorders relating to neoplastic diseases (e.g., as described below under “Hyperproliferative Disorders”) and renal disorders (e.g., as described below under “Renal Disorders”).

[0046] In specific embodiments, a protein, nucleic acid, or antibody of the invention (or fragment or variant thereof) having a “Excretory” recitation in the “Preferred Indication” column of Table 1D, may be used for example, to diagnose, treat, prevent, and/or ameliorate a disease or disorder selected from the group consisting of: bladder cancer, prostate cancer, benign prostatic hyperplasia, bladder disorders (e.g., urinary incontinence, urinary retention, urinary obstruction, urinary tract Infections, interstitial cystitis, prostatitis, neurogenic bladder, hematuria), renal disorders (e.g., hydronephrosis, proteinuria, renal failure, pyelonephritis, urolithiasis, reflux nephropathy, and unilateral obstructive uropathy).

[0047] The recitation of “Neural/Sensory” in the “Preferred Indication” column indicates that the corresponding nucleic acid and protein, or antibody against the same, of the invention (or fragment or variant thereof), may be used for example, to diagnose, treat, prevent, and/or ameliorate diseases and/or disorders relating to neoplastic diseases (e.g., as described below under “Hyperproliferative Disorders”) and diseases or disorders of the nervous system (e.g., as described below under “Neural Activity and Neurological Diseases”).

[0048] In specific embodiments, a protein, nucleic acid, or antibody of the invention (or fragment or variant thereof) having a “Neural/Sensory” recitation in the “Preferred Indication” column of Table 1D, may be used for example, to diagnose, treat, prevent, and/or ameliorate a disease or disorder selected from the group consisting of: brain cancer (e.g., brain stem glioma, brain tumors, central nervous system (Primary) lymphoma, central nervous system lymphoma, cerebellar astrocytoma, and cerebral astrocytoma, neurodegenerative disorders (e.g., Alzheimer's Disease, Creutzfeldt-Jakob Disease, Parkinson's Disease, and Idiopathic Presenile Dementia), encephalomyelitis, cerebral malaria, meningitis, metabolic brain diseases (e.g., phenylketonuria and pyruvate carboxylase deficiency), cerebellar ataxia, ataxia telangiectasia, and AIDS Dementia Complex, schizophrenia, attention deficit disorder, hyperactive attention deficit disorder, autism, and obsessive compulsive disorders.

[0049] The recitation of “Respiratory” in the “Preferred Indication” column indicates that the corresponding nucleic acid and protein, or antibody against the same, of the invention (or fragment or variant thereof), may be used for example, to diagnose, treat, prevent, and/or ameliorate diseases and/or disorders relating to neoplastic diseases (e.g., as described below under “Hyperproliferative Disorders”) and diseases or disorders of the respiratory system (e.g., as described below under “Respiratory Disorders”).

[0050] In specific embodiments, a protein, nucleic acid, or antibody of the invention (or fragment or variant thereof) having a “Respiratory” recitation in the “Preferred Indication” column of Table 1D, may be used for example, to diagnose, treat, prevent, and/or ameliorate a disease or disorder selected from the group consisting of: cancers of the respiratory system such as larynx cancer, pharynx cancer, trachea cancer, epiglottis cancer, lung cancer, squamous cell carcinomas, small cell (oat cell) carcinomas, large cell carcinomas, and adenocarcinomas. Allergic reactions, cystic fibrosis, sarcoidosis, histiocytosis X, infiltrative lung diseases (e.g., pulmonary fibrosis and lymphoid interstitial pneumonia), obstructive airway diseases (e.g., asthma, emphysema, chronic or acute bronchitis), occupational lung diseases (e.g., silicosis and asbestosis), pneumonia, and pleurisy.

[0051] The recitation of “Endocrine” in the “Preferred Indication” column indicates that the corresponding nucleic acid and protein, or antibody against the same, of the invention (or fragment or variant thereof), may be used for example, to diagnose, treat, prevent, and/or ameliorate diseases and/or disorders relating to neoplastic diseases (e.g., as described below under “Hyperproliferative Disorders”) and diseases or disorders of the respiratory system (e.g., as described below under “Respiratory Disorders”), renal disorders (e.g., as described below under “Renal Disorders”), and disorders of the endocrine system (e.g., as described below under “Endocrine Disorders”.

[0052] In specific embodiments, a protein, nucleic acid, or antibody of the invention (or fragment or variant thereof) having an “Endocrine” recitation in the “Preferred Indication” column of Table 1D, may be used for example, to diagnose, treat, prevent, and/or ameliorate a disease or disorder selected from the group consisting of: cancers of endocrine tissues and organs (e.g., cancers of the hypothalamus, pituitary gland, thyroid gland, parathyroid glands, pancreas, adrenal glands, ovaries, and testes), diabetes (e.g., diabetes insipidus, type I and type II diabetes mellitus), obesity, disorders related to pituitary glands (e.g., hyperpituitarism, hypopituitarism, and pituitary dwarfism), hypothyroidism, hyperthyroidism, goiter, reproductive disorders (e.g. male and female infertility), disorders related to adrenal glands (e.g., Addison's Disease, corticosteroid deficiency, and Cushing's Syndrome), kidney cancer (e.g., hypemephroma, transitional cell cancer, and Wilm's tumor), diabetic nephropathy, interstitial nephritis, polycystic kidney disease, glomerulonephritis (e.g., IgM mesangial proliferative glomerulonephritis and glomerulonephritis caused by autoimmune disorders; such as Goodpasture's syndrome), and nephrocalcinosis.

[0053] The recitation of “Digestive” in the “Preferred Indication” column indicates that the corresponding nucleic acid and protein, or antibody against the same, of the invention (or fragment or variant thereof), may be used for example, to diagnose, treat, prevent, and/or ameliorate diseases and/or disorders relating to neoplastic diseases (e.g., as described below under “Hyperproliferative Disorders”) and diseases or disorders of the gastrointestinal system (e.g., as described below under “Gastrointestinal Disorders”.

[0054] In specific embodiments, a protein, nucleic acid, or antibody of the invention (or fragment or variant thereof) having a “Digestive” recitation in the “Preferred Indication” column of Table 1D, may be used for example, to diagnose, treat, prevent, and/or ameliorate a disease or disorder selected from the group consisting of: ulcerative colitis, appendicitis, Crohn's disease, hepatitis, hepatic encephalopathy, portal hypertension, cholelithiasis, cancer of the digestive system (e.g., biliary tract cancer, stomach cancer, colon cancer, gastric cancer, pancreatic cancer, cancer of the bile duct, tumors of the colon (e.g., polyps or cancers), and cirrhosis), pancreatitis, ulcerative disease, pyloric stenosis, gastroenteritis, gastritis, gastric atropy, benign tumors of the duodenum, distension, irritable bowel syndrome, malabsorption, congenital disorders of the small intestine, bacterial and parasitic infection, megacolon, Hirschsprung's disease, aganglionic megacolon, acquired megacolon, colitis, anorectal disorders (e.g., anal fistulas, hemorrhoids), congenital disorders of the liver (e.g., Wilson's disease, hemochromatosis, cystic fibrosis, biliary atresia, and alpha1-antitrypsin deficiency), portal hypertension, cholelithiasis, and jaundice.

[0055] The recitation of “Connective/Epithelial” in the “Preferred Indication” column indicates that the corresponding nucleic acid and protein, or antibody against the same, of the invention (or fragment or variant thereof), may be used for example, to diagnose, treat, prevent, and/or ameliorate diseases and/or disorders relating to neoplastic diseases (e.g., as described below under “Hyperproliferative Disorders”), cellular and genetic abnormalities (e.g., as described below under “Diseases at the Cellular Level”), angiogenesis (e.g., as described below under “Anti-Angiogenesis Activity”), and or to promote or inhibit regeneration (e.g., as described below under “Regeneration”), and wound healing (e.g., as described below under “Wound Healing and Epithelial Cell Proliferation”).

[0056] In specific embodiments, a protein, nucleic acid, or antibody of the invention (or fragment or variant thereof) having a “Connective/Epithelial” recitation in the “Preferred Indication” column of Table 1D, may be used for example, to diagnose, treat, prevent, and/or ameliorate a disease or disorder selected from the group consisting of: connective tissue metaplasia, mixed connective tissue disease, focal epithelial hyperplasia, epithelial metaplasia, mucoepithelial dysplasia, graft v. host disease, polymyositis, cystic hyperplasia, cerebral dysplasia, tissue hypertrophy, Alzheimer's disease, lymphoproliferative disorder, Waldenstron's macroglobulinemia, Crohn's disease, pernicious anemia, idiopathic Addison's disease, glomerulonephritis, bullous pemphigoid, Sjogren's syndrome, diabetes mellitus, cystic fibrosis, osteoblastoma, osteoclastoma, osteosarcoma, chondrosarcoma, osteoporosis, osteocarthritis, periodontal disease, wound healing, relapsing polychondritis, vasculitis, polyarteritis nodosa, Wegener's granulomatosis, cellulitis, rheumatoid arthritis, psoriatic arthritis, discoid lupus erythematosus, systemic lupus erythematosus, scleroderma, CREST syndrome, Sjogren's syndrome, polymyositis, dermatomyositis, mixed connective tissue disease, relapsing polychondritis, vasculitis, Henoch-Schonlein syndrome, erythema nodosum, polyarteritis nodosa, temporal (giant cell) arteritis, Takayasu's arteritis, Wegener's granulomatosis, Reiter's syndrome, Behcet's syndrome, ankylosing spondylitis, cellulitis, keloids, Ehler Danlos syndrome, Marfan syndrome, pseudoxantoma elasticum, osteogenese imperfecta, chondrodysplasias, epidermolysis bullosa, Alport syndrome, and cutis laxa.

Description of Table 1E

[0057] Table 1E provides information related to biological activities and preferred indications for polynucleotides and polypeptides of the invention (including antibodies, agonists, and/or antagonists thereof). Table 1E also provides information related to assays which may be used to test polynucleotides and polypeptides of the invention (including antibodies, agonists, and/or antagonists thereof) for the corresponding biological activities. The first column (“Gene No.”) provides the gene number in the application for each clone identifier. The second column (“cDNA Clone ID:”) provides the unique clone identifier for each clone as previously described and indicated in Tables 1A, 1B, 1C, and 1D. The third column (“AA SEQ ID NO:Y”) indicates the Sequence Listing SEQ ID Number for polypeptide sequences encoded by the corresponding cDNA clones (also as indicated in Tables 1A, 1B, and 2). The fourth column (“Biological Activity”) indicates a biological activity corresponding to the indicated polypeptides (or polynucleotides encoding said polypeptides). The fifth column (“Exemplary Activity Assay”) further describes the corresponding biological activity and provides information pertaining to the various types of assays which may be performed to test, demonstrate, or quantify the corresponding biological activity. The sixth column (“Preferred Indications”) describes particular embodiments of the invention and indications (e.g. pathologies, diseases, disorders, abnormalities, etc.) for which polynucleotides and polypeptides of the invention (including antibodies, agonists, and/or antagonists thereof) may be used in detecting, preventing, diagnosing, prognosticating, treating, and/or ameliorating.

[0058] Table 1E describes the use of FMAT technology, inter alia, for testing or demonstrating various biological activities. Fluorometric microvolume assay technology (FMAT) is a fluorescence-based system which provides a means to perform nonradioactive cell- and bead-based assays to detect activation of cell signal transduction pathways. This technology was designed specifically for ligand binding and immunological assays. Using this technology, fluorescent cells or beads at the bottom of the well are detected as localized areas of concentrated fluorescence using a data processing system. Unbound flurophore comprising the background signal is ignored, allowing for a wide variety of homogeneous assays. FMAT technology may be used for peptide ligand binding assays, immunofluorescence, apoptosis, cytotoxicity, and bead-based immunocapture assays. See, Miraglia S et. al., “Homogeneous cell and bead based assays for highthroughput screening using flourometric microvolume assay technology,” Journal of Biomolecular Screening; 4:193-204 (1999). In particular, FMAT technology may be used to test, confirm, and/or identify the ability of polypeptides (including polypeptide fragments and variants) to activate signal transduction pathways. For example, FMAT technology may be used to test, confirm, and/or identify the ability of polypeptides to upregulate production of immunomodulatory proteins (such as, for example, interleukins, GM-CSF, Rantes, and Tumor Necrosis factors, as well as other cellular regulators (e.g. insulin)).

[0059] Table 1E also describes the use of kinase assays for testing, demonstrating, or quantifying biological activity. In this regard, the phosphorylation and de-phosphorylation of specific amino acid residues (e.g. Tyrosine, Serine, Threonine) on cell-signal transduction proteins provides a fast, reversible means for activation and de-activation of cellular signal transduction pathways. Moreover, cell signal transduction via phosphorylation/de-phosphorylation is crucial to the regulation of a wide variety of cellular processes (e.g. proliferation, differentiation, migration, apoptosis, etc.). Accordingly, kinase assays provide a powerful tool useful for testing, confirming, and/or identifying polypeptides (including polypeptide fragments and variants) that mediate cell signal transduction events via protein phosphorylation. See e.g., Forrer, P., Tamaskovic R., and Jaussi, R. “Enzyme-Linked Immunosorbent Assay for Measurement of JNK, ERK, and p38 Kinase Activities” Biol. Chem. 379(8-9): 1101-1110 (1998).

Description of Table 1F

[0060] Polynucleotides encoding polypeptides of the present invention can be used in assays to test for one or more biological activities. One such biological activity which may be tested includes the ability of polynucleotides and polypeptides of the invention to stimulate up-regulation or down-regulation of expression of particular genes and proteins. Hence, if polynucleotides and polypeptides of the present invention exhibit activity in altering particular gene and protein expression patterns, it is likely that these polynucleotides and polypeptides of the present invention may be involved in, or capable of effecting changes in, diseases associated with the altered gene and protein expression profiles. Hence, polynucleotides, polypeptides, or antibodies of the present invention could be used to treat said associated diseases.

[0061] TaqMan® assays may be performed to assess the ability of polynucleotides (and polypeptides they encode) to alter the expression pattern of particular “target” genes. TaqMan® reactions are performed to evaluate the ability of a test agent to induce or repress expression of specific genes in different cell types. TaqMan® gene expression quantification assays (“TaqMan® assays”) are well known to, and routinely performed by, those of ordinary skill in the art. TaqMan® assays are performed in a two step reverse transcription/polymerase chain reaction (RT-PCR). In the first (RT) step, cDNA is reverse transcribed from total RNA samples using random hexamer primers. In the second (PCR) step, PCR products are synthesized from the cDNA using gene specific primers.

[0062] To quantify gene expression the Taqman® PCR reaction exploits the 5′ nuclease activity of AmpliTaq Gold DNA Polymerase to cleave a Taqman® probe (distinct from the primers) during PCR. The Taqman® probe contains a reporter dye at the 5′-end of the probe and a quencher dye at the 3′ end of the probe. When the probe is intact, the proximity of the reporter dye to the quencher dye results in suppression of the reporter fluorescence. During PCR, if the target of interest is present, the probe specifically anneals between the forward and reverse primer sites. AmpliTaq Fold DNA Polymerase then cleaves the probe between the reporter and quencher when the probe hybridizes to the target, resulting in increased fluorescence of the reporter (see FIG. 2). Accumulation of PCR products is detected directly by monitoring the increase in fluorescence of the reporter dye.

[0063] After the probe fragments are displaced from the target, polymerization of the strand continues. The 3′-end of the probe is blocked to prevent extension of the probe during PCR. This process occurs in every cycle and does not interfere with the exponential accumulation of product. The increase in fluorescence signal is detected only if the target sequence is complementary to the probe and is amplified during PCR. Because of these requirements, any nonspecific amplification is not detected.

[0064] For test sample preparation, vector controls or constructs containing the coding sequence for the gene of interest are transfected into cells, such as for example 293T cells, and supernatants collected after 48 hours. For cell treatment and RNA isolation, multiple primary human cells or human cell lines are used; such cells may include but are not limited to, Normal Human Dermal Fibroblasts, Aortic Smooth Muscle, Human Umbilical Vein Endothelial Cells, HepG2, Daudi, Jurkat, U937, Caco, and THP-1 cell lines. Cells are plated in growth media and growth is arrested by culturing without media change for 3 days, or by switching cells to low serum media and incubating overnight. Cells are treated for 1, 6, or 24 hours with either vector control supernatant or sample supernatant (or purified/partially purified protein preparations in buffer). Total RNA is isolated; for example, by using Trizol extraction or by using the Ambion RNAqueous™-4PCR RNA isolation system. Expression levels of multiple genes are analyzed using Taqman®, and expression in the test sample is compared to control vector samples to identify genes induced or repressed. Each of the above described techniques are well known to, and routinely performed by, those of ordinary skill in the art.

[0065] Table 1F indicates particular disease classes and preferred indications for which polynucleotides, polypeptides, or antibodies of the present invention may be used in detecting, diagnosing, preventing, treating and/or ameliorating said diseases and disorders based on “target” gene expression patterns which may be up- or down-regulated by polynucleotides (and the encoded polypeptides) corresponding to each indicated cDNA Clone ID (shown in Table 1F, Column 2).

[0066] Thus, in preferred embodiments, the present invention encompasses a method of detecting, diagnosing, preventing, treating, and/or ameliorating a disease or disorder listed in the “Disease Class” and/or “Preferred Indication” columns of Table 1F; comprising administering to a patient in which such detection, diagnosis, prevention, or treatment is desired a protein, nucleic acid, or antibody of the invention (or fragment or variant thereof) in an amount effective to detect, diagnose, prevent, treat, or ameliorate the disease or disorder. The first and second columns of Table 1D show the “Gene No.” and “cDNA Clone ID No.”, respectively, indicating certain nucleic acids and proteins (or antibodies against the same) of the invention (including polynucleotide, polypeptide, and antibody fragments or variants thereof) that may be used in detecting, diagnosing, preventing, treating, or ameliorating the disease(s) or disorder(s) indicated in the corresponding row in the “Disease Class” or “Preferred Indication” Columns of Table 1F.

[0067] In another embodiment, the present invention also encompasses methods of detecting, diagnosing, preventing, treating, or ameliorating a disease or disorder listed in the “Disease Class” or “Preferred Indication” Columns of Table 1F; comprising administering to a patient combinations of the proteins, nucleic acids, or antibodies of the invention (or fragments or variants thereof), sharing similar indications as shown in the corresponding rows in the “Disease Class” or “Preferred Indication” Columns of Table 1F.

[0068] The “Disease Class” Column of Table 1F provides a categorized descriptive heading for diseases, disorders, and/or conditions (more fully described below) that may be detected, diagnosed, prevented, treated, or ameliorated by a protein, nucleic acid, or antibody of the invention (or fragment or variant thereof).

[0069] The “Preferred Indication” Column of Table 1F describes diseases, disorders, and/or conditions that may be detected, diagnosed, prevented, treated, or ameliorated by a protein, nucleic acid, or antibody of the invention (or fragment or variant thereof).

[0070] The “Cell Line” and “Exemplary Targets” Columns of Table 1F indicate particular cell lines and target genes, respectively, which may show altered gene expression patterns (i.e., up- or down-regulation of the indicated target gene) in Taqman® assays, performed as described above, utilizing polynucleotides of the cDNA Clone ID shown in the corresponding row. Alteration of expression patterns of the indicated “Exemplary Target” genes is correlated with a particular “Disease Class” and/or “Preferred Indication” as shown in the corresponding row under the respective column headings.

[0071] The “Exemplary Accessions” Column indicates GenBank Accessions (available online through the National Center for Biotechnology Information (NCBI) at A which correspond to the “Exemplary Targets” shown in the adjacent row.

[0072] The recitation of “Cancer” in the “Disease Class” Column indicates that the corresponding nucleic acid and protein, or antibody against the same, of the invention (or fragment or variant thereof) may be used for example, to detect, diagnose, prevent, treat, and/or ameliorate neoplastic diseases and/or disorders (e.g., leukemias, cancers, etc., as described below under “Hyperproliferative Disorders”).

[0073] The recitation of “Immune” in the “Disease Class” column indicates that the corresponding nucleic acid and protein, or antibody against the same, of the invention (or fragment or variant thereof), may be used for example, to detect, diagnose, prevent, treat, and/or ameliorate diseases and/or disorders relating to neoplastic diseases (e.g., as described below under “Hyperproliferative Disorders”), blood disorders (e.g., as described below under “Immune Activity” “Cardiovascular Disorders” and/or “Blood-Related Disorders”), and infections (e.g., as described below under “Infectious Disease”).

[0074] The recitation of “Angiogenesis” in the “Disease Class” column indicates that the corresponding nucleic acid and protein, or antibody against the same, of the invention (or fragment or variant thereof), may be used for example, to detect, diagnose, treat, prevent, and/or ameliorate diseases and/or disorders relating to neoplastic diseases (e.g., as described below under “Hyperproliferative Disorders”), diseases and/or disorders of the cardiovascular system (e.g., as described below under “Cardiovascular Disorders”), diseases and/or disorders involving cellular and genetic abnormalities (e.g., as described below under “Diseases at the Cellular Level”), diseases and/or disorders involving angiogenesis (e.g., as described below under “Anti-Angiogenesis Activity”), to promote or inhibit cell or tissue regeneration (e.g., as described below under “Regeneration”), or to promote wound healing (e.g., as described below under “Wound Healing and Epithelial Cell Proliferation”).

[0075] The recitation of “Diabetes” in the “Disease Class” column indicates that the corresponding nucleic acid and protein, or antibody against the same, of the invention (or fragment or variant thereof), may be used for example, to detect, diagnose, treat, prevent, and/or ameliorate diabetes (including diabetes mellitus types I and II), as well as diseases and/or disorders associated with, or consequential to, diabetes (e.g. as described below under “Endocrine Disorders,” “Renal Disorders,” and “Gastrointestinal Disorders”).

Description of Table 1F

[0076] Polynucleotides encoding polypeptides of the present invention can be used in assays to test for one or more biological activities. One such biological activity which may be tested includes the ability of polynucleotides and polypeptides of the invention to stimulate up-regulation or down-regulation of expression of particular genes and proteins. Hence, if polynucleotides and polypeptides of the present invention exhibit activity in altering particular gene and protein expression patterns, it is likely that these polynucleotides and polypeptides of the present invention may be involved in, or capable of effecting changes in, diseases associated with the altered gene and protein expression profiles. Hence, polynucleotides, polypeptides, or antibodies of the present invention could be used to treat said associated diseases.

[0077] TaqMan® assays may be performed to assess the ability of polynucleotides (and polypeptides they encode) to alter the expression pattern of particular “target” genes. TaqMan® reactions are performed to evaluate the ability of a test agent to induce or repress expression of specific genes in different cell types. TaqMan® gene expression quantification assays (“TaqMan® assays”) are well known to, and routinely performed by, those of ordinary skill in the art. TaqMan® assays are performed in a two step reverse transcription/polymerase chain reaction (RT-PCR). In the first (RT) step, cDNA is reverse transcribed from total RNA samples using random hexamer primers. In the second (PCR) step, PCR products are synthesized from the cDNA using gene specific primers.

[0078] To quantify gene expression the Taqman® PCR reaction exploits the 5′ nuclease activity of AmpliTaq Gold DNA Polymerase to cleave a Taqman® probe (distinct from the primers) during PCR. The Taqman® probe contains a reporter dye at the 5′-end of the probe and a quencher dye at the 3′ end of the probe. When the probe is intact, the proximity of the reporter dye to the quencher dye results in suppression of the reporter fluorescence. During PCR, if the target of interest is present, the probe specifically anneals between the forward and reverse primer sites. AmpliTaq Fold DNA Polymerase then cleaves the probe between the reporter and quencher when the probe hybridizes to the target, resulting in increased fluorescence of the reporter (see FIG. 2). Accumulation of PCR products is detected directly by monitoring the increase in fluorescence of the reporter dye.

[0079] After the probe fragments are displaced from the target, polymerization of the strand continues. The 3′-end of the probe is blocked to prevent extension of the probe during PCR. This process occurs in every cycle and does not interfere with the exponential accumulation of product. The increase in fluorescence signal is detected only if the target sequence is complementary to the probe and is amplified during PCR. Because of these requirements, any nonspecific amplification is not detected.

[0080] For test sample preparation, vector controls or constructs containing the coding sequence for the gene of interest are transfected into cells, such as for example 293T cells, and supernatants collected after 48 hours. For cell treatment and RNA isolation, multiple primary human cells or human cell lines are used; such cells may include but are not limited to, Normal Human Dermal Fibroblasts, Aortic Smooth Muscle, Human Umbilical Vein Endothelial Cells, HepG2, Daudi, Jurkat, U937, Caco, and THP-1 cell lines. Cells are plated in growth media and growth is arrested by culturing without media change for 3 days, or by switching cells to low serum media and incubating overnight. Cells are treated for 1, 6, or 24 hours with either vector control supernatant or sample supernatant (or purified/partially purified protein preparations in buffer). Total RNA is isolated; for example, by using Trizol extraction or by using the Ambion RNAqueous™-4PCR RNA isolation system. Expression levels of multiple genes are analyzed using Taqman®, and expression in the test sample is compared to control vector samples to identify genes induced or repressed. Each of the above described techniques are well known to, and routinely performed by, those of ordinary skill in the art.

[0081] Table 1F indicates particular disease classes and preferred indications for which polynucleotides, polypeptides, or antibodies of the present invention may be used in detecting, diagnosing, preventing, treating and/or ameliorating said diseases and disorders based on “target” gene expression patterns which may be up- or down-regulated by polynucleotides (and the encoded polypeptides) corresponding to each indicated cDNA Clone ID (shown in Table 1F, Column 2).

[0082] Thus, in preferred embodiments, the present invention encompasses a method of detecting, diagnosing, preventing, treating, and/or ameliorating a disease or disorder listed in the “Disease Class” and/or “Preferred Indication” columns of Table 1F; comprising administering to a patient in which such detection, diagnosis, prevention, or treatment is desired a protein, nucleic acid, or antibody of the invention (or fragment or variant thereof) in an amount effective to detect, diagnose, prevent, treat, or ameliorate the disease or disorder. The first and second columns of Table 1D show the “Gene No.” and “cDNA Clone ID No.”, respectively, indicating certain nucleic acids and proteins (or antibodies against the same) of the invention (including polynucleotide, polypeptide, and antibody fragments or variants thereof) that may be used in detecting, diagnosing, preventing, treating, or ameliorating the disease(s) or disorder(s) indicated in the corresponding row in the “Disease Class” or “Preferred Indication” Columns of Table 1F.

[0083] In another embodiment, the present invention also encompasses methods of detecting, diagnosing, preventing, treating, or ameliorating a disease or disorder listed in the “Disease Class” or “Preferred Indication” Columns of Table 1F; comprising administering to a patient combinations of the proteins, nucleic acids, or antibodies of the invention (or fragments or variants thereof), sharing similar indications as shown in the corresponding rows in the “Disease Class” or “Preferred Indication” Columns of Table 1F.

[0084] The “Disease Class” Column of Table 1F provides a categorized descriptive heading for diseases, disorders, and/or conditions (more fully described below) that may be detected, diagnosed, prevented, treated, or ameliorated by a protein, nucleic acid, or antibody of the invention (or fragment or variant thereof).

[0085] The “Preferred Indication” Column of Table 1F describes diseases, disorders, and/or conditions that may be detected, diagnosed, prevented, treated, or ameliorated by a protein, nucleic acid, or antibody of the invention (or fragment or variant thereof).

[0086] The “Cell Line” and “Exemplary Targets” Columns of Table 1F indicate particular cell lines and target genes, respectively, which may show altered gene expression patterns (i.e., up- or down-regulation of the indicated target gene) in Taqman® assays, performed as described above, utilizing polynucleotides of the cDNA Clone ID shown in the corresponding row. Alteration of expression patterns of the indicated “Exemplary Target” genes is correlated with a particular “Disease Class” and/or “Preferred Indication” as shown in the corresponding row under the respective column headings.

[0087] The “Exemplary Accessions” Column indicates GenBank Accessions (available online through the National Center for Biotechnology Information (NCBI) at http://www.ncbi.nlm.nih.gov/) which correspond to the “Exemplary Targets” shown in the adjacent row.

[0088] The recitation of “Cancer” in the “Disease Class” Column indicates that the corresponding nucleic acid and protein, or antibody against the same, of the invention (or fragment or variant thereof) may be used for example, to detect, diagnose, prevent, treat, and/or ameliorate neoplastic diseases and/or disorders (e.g., leukemias, cancers, etc., as described below under “Hyperproliferative Disorders”).

[0089] The recitation of “Immune” in the “Disease Class” column indicates that the corresponding nucleic acid and protein, or antibody against the same, of the invention (or fragment or variant thereof), may be used for example, to detect, diagnose, prevent, treat, and/or ameliorate diseases and/or disorders relating to neoplastic diseases (e.g., as described below under “Hyperproliferative Disorders”), blood disorders (e.g., as described below under “Immune Activity” “Cardiovascular Disorders” and/or “Blood-Related Disorders”), and infections (e.g., as described below under “Infectious Disease”).

[0090] The recitation of “Angiogenesis” in the “Disease Class” column indicates that the corresponding nucleic acid and protein, or antibody against the same, of the invention (or fragment or variant thereof), may be used for example, to detect, diagnose, treat, prevent, and/or ameliorate diseases and/or disorders relating to neoplastic diseases (e.g., as described below under “Hyperproliferative Disorders”), diseases and/or disorders of the cardiovascular system (e.g., as described below under “Cardiovascular Disorders”), diseases and/or disorders involving cellular and genetic abnormalities (e.g., as described below under “Diseases at the Cellular Level”), diseases and/or disorders involving angiogenesis (e.g., as described below under “Anti-Angiogenesis Activity”), to promote or inhibit cell or tissue regeneration (e.g., as described below under “Regeneration”), or to promote wound healing (e.g., as described below under “Wound Healing and Epithelial Cell Proliferation”).

[0091] The recitation of “Diabetes” in the “Disease Class” column indicates that the corresponding nucleic acid and protein, or antibody against the same, of the invention (or fragment or variant thereof), may be used for example, to detect, diagnose, treat, prevent, and/or ameliorate diabetes (including diabetes mellitus types I and II), as well as diseases and/or disorders associated with, or consequential to, diabetes (e.g. as described below under “Endocrine Disorders,” “Renal Disorders,” and “Gastrointestinal Disorders”).

Description of Table 2

[0092] Table 2 summarizes homology and features of some of the polypeptides of the invention. The first column provides a unique clone identifier, “Clone ID:”, corresponding to a cDNA clone disclosed in Table 1A or 1B. The second column provides the unique contig identifier, “Contig ID:” corresponding to contigs in Table 1B and allowing for correlation with the information in Table 1B. The third column provides the sequence identifier, “SEQ ID NO:X”, for the contig polynucleotide sequence. The fourth column provides the analysis method by which the homology/identity disclosed in the Table was determined. Comparisons were made between polypeptides encoded by the polynucleotides of the invention and either a non-redundant protein database (herein referred to as “NR”), or a database of protein families (herein referred to as “PFAM”) as further described below. The fifth column provides a description of the PFAM/NR hit having a significant match to a polypeptide of the invention. Column six provides the accession number of the PFAM/NR hit disclosed in the fifth column. Column seven, “Score/Percent Identity”, provides a quality score or the percent identity, of the hit disclosed in columns five and six. Columns 8 and 9, “NT From” and “NT To” respectively, delineate the polynucleotides in “SEQ ID NO:X” that encode a polypeptide having a significant match to the PFAM/NR database as disclosed in the fifth and sixth columns. In specific embodiments polypeptides of the invention comprise, or alternatively consist of, an amino acid sequence encoded by a polynucleotide in SEQ ID NO:X as delineated in columns 8 and 9, or fragments or variants thereof.

Description of Table 3

[0093] Table 3 provides polynucleotide sequences that may be disclaimed according to certain embodiments of the invention. The first column provides a unique clone identifier, “Clone ID”, for a cDNA clone related to contig sequences disclosed in Table 1B. The second column provides the sequence identifier, “SEQ ID NO:X”, for contig sequences disclosed in Table 1A and/or 1B. The third column provides the unique contig identifier, “Contig ID:”, for contigs disclosed in Table 1B. The fourth column provides a unique integer ‘a’ where ‘a’ is any integer between 1 and the final nucleotide minus 15 of SEQ ID NO:X, and the fifth column provides a unique integer ‘b’ where ‘b’ is any integer between 15 and the final nucleotide of SEQ ID NO:X, where both a and b correspond to the positions of nucleotide residues shown in SEQ ID NO:X, and where b is greater than or equal to a+14. For each of the polynucleotides shown as SEQ ID NO:X, the uniquely defined integers can be substituted into the general formula of a−b, and used to describe polynucleotides which may be preferably excluded from the invention. In certain embodiments, preferably excluded from the invention are at least one, two, three, four, five, ten, or more of the polynucleotide sequence(s) having the accession number(s) disclosed in the sixth column of this Table (including for example, published sequence in connection with a particular BAC clone). In further embodiments, preferably excluded from the invention are the specific polynucleotide sequence(s) contained in the clones corresponding to at least one, two, three, four, five, ten, or more of the available material having the accession numbers identified in the sixth column of this Table (including for example, the actual sequence contained in an identified BAC clone).

Description of Table 4

[0094] Table 4 provides a key to the tissue/cell source identifier code disclosed in Table 1B.2, column 5. Column 1 provides the tissue/cell source identifier code disclosed in Table 1B.2, Column 5. Columns 2-5 provide a description of the tissue or cell source. Note that “Description” and “Tissue” sources (i.e. columns 2 and 3) having the prefix “a-” indicates organs, tissues, or cells derived from “adult” sources. Codes corresponding to diseased tissues are indicated in column 6 with the word “disease.” The use of the word “disease” in column 6 is non-limiting. The tissue or cell source may be specific (e.g. a neoplasm), or may be disease-associated (e.g., a tissue sample from a normal portion of a diseased organ). Furthermore, tissues and/or cells lacking the “disease” designation may still be derived from sources directly or indirectly involved in a disease state or disorder, and therefore may have a further utility in that disease state or disorder. In numerous cases where the tissue/cell source is a library, column 7 identifies the vector used to generate the library.

Description of Table 5

[0095] Table 5 provides a key to the OMIM reference identification numbers disclosed in Table 1B.1, column 9. OMIM reference identification numbers (Table 5, Column 1) were derived from Online Mendelian Inheritance in Man (Online Mendelian Inheritance in Man, OMIM. McKusick-Nathans Institute for Genetic Medicine, Johns Hopkins University (Baltimore, Md.) and National Center for Biotechnology Information, National Library of Medicine, (Bethesda, Md.) 2000. World Wide Web URL: http://www.ncbi.nlm.nih.gov/omim/). Column 2 provides diseases associated with the cytologic band disclosed in Table 1B.1, column 8, as determined using the Morbid Map database.

Description of Table 6

[0096] Table 6 summarizes some of the ATCC Deposits, Deposit dates, and ATCC designation numbers of deposits made with the ATCC in connection with the present application. These deposits were made in addition to those described in the Table 1A.

Description of Table 7

[0097] Table 7 shows the cDNA libraries sequenced, and ATCC designation numbers and vector information relating to these cDNA libraries.

[0098] The first column shows the first four letters indicating the Library from which each library clone was derived. The second column indicates the catalogued tissue description for the corresponding libraries. The third column indicates the vector containing the corresponding clones. The fourth column shows the ATCC deposit designation for each library clone as indicated by the deposit information in Table 6.

Definitions

[0099] The following definitions are provided to facilitate understanding of certain terms used throughout this specification.

[0100] In the present invention, “isolated” refers to material removed from its original environment (e.g., the natural environment if it is naturally occurring), and thus is altered “by the hand of man” from its natural state. For example, an isolated polynucleotide could be part of a vector or a composition of matter, or could be contained within a cell, and still be “isolated” because that vector, composition of matter, or particular cell is not the original environment of the polynucleotide. The term “isolated” does not refer to genomic or cDNA libraries, whole cell total or mRNA preparations, genomic DNA preparations (including those separated by electrophoresis and transferred onto blots), sheared whole cell genomic DNA preparations or other compositions where the art demonstrates no distinguishing features of the polynucleotide/sequences of the present invention.

[0101] In the present invention, a “secreted” protein refers to those proteins capable of being directed to the ER, secretory vesicles, or the extracellular space as a result of a signal sequence, as well as those proteins released into the extracellular space without necessarily containing a signal sequence. If the secreted protein is released into the extracellular space, the secreted protein can undergo extracellular processing to produce a “mature” protein. Release into the extracellular space can occur by many mechanisms, including exocytosis and proteolytic cleavage.

[0102] As used herein, a “polynucleotide” refers to a molecule having a nucleic acid sequence encoding SEQ ID NO:Y or a fragment or variant thereof (e.g., the polypeptide delinated in columns fourteen and fifteen of Table 1A); a nucleic acid sequence contained in SEQ ID NO:X (as described in column 5 of Table 1A and/or column 3 of Table 1B) or the complement thereof; a cDNA sequence contained in Clone ID: (as described in column 2 of Table 1A and/or 1B and contained within a library deposited with the ATCC); a nucleotide sequence encoding the polypeptide encoded by a nucleotide sequence in SEQ ID NO:B as defined in column 6 (EXON From-To) of Table 1C or a fragment or variant thereof; or a nucleotide coding sequence in SEQ ID NO:B as defined in column 6 of Table 1C or the complement thereof. For example, the polynucleotide can contain the nucleotide sequence of the full length cDNA sequence, including the 5′ and 3′ untranslated sequences, the coding region, as well as fragments, epitopes, domains, and variants of the nucleic acid sequence. Moreover, as used herein, a “polypeptide” refers to a molecule having an amino acid sequence encoded by a polynucleotide of the invention as broadly defined (obviously excluding poly-Phenylalanine or poly-Lysine peptide sequences which result from translation of a polyA tail of a sequence corresponding to a cDNA).

[0103] In the present invention, “SEQ ID NO:X” was often generated by overlapping sequences contained in multiple clones (contig analysis). A representative clone containing all or most of the sequence for SEQ ID NO:X is deposited at Human Genome Sciences, Inc. (HGS) in a catalogued and archived library. As shown, for example, in column 2 of Table 1B, each clone is identified by a cDNA Clone ID (identifier generally referred to herein as Clone ID:). Each Clone ID is unique to an individual clone and the Clone ID is all the information needed to retrieve a given clone from the HGS library. Table 7 provides a list of the deposited cDNA libraries. One can use the Clone ID: to determine the library source by reference to Tables 6 and 7. Table 7 lists the deposited cDNA libraries by name and links each library to an ATCC Deposit. Library names contain four characters, for example, “HTWE.” The name of a cDNA clone (Clone ID) isolated from that library begins with the same four characters, for example “HTWEP07”. As mentioned below, Table 1A and/or 1B correlates the Clone ID names with SEQ ID NO:X. Thus, starting with an SEQ ID NO:X, one can use Tables 1A, 1B, 6, 7, and 9 to determine the corresponding Clone ID, which library it came from and which ATCC deposit the library is contained in. Furthermore, it is possible to retrieve a given cDNA clone from the source library by techniques known in the art and described elsewhere herein. The ATCC is located at 10801 University Boulevard, Manassas, Va. 20110-2209, USA. The ATCC deposits were made pursuant to the terms of the Budapest Treaty on the international recognition of the deposit of microorganisms for the purposes of patent procedure.

[0104] In specific embodiments, the polynucleotides of the invention are at least 15, at least 30, at least 50, at least 100, at least 125, at least 500, or at least 1000 continuous nucleotides but are less than or equal to 300 kb, 200 kb, 100 kb, 50 kb, 15 kb, 10 kb, 7.5 kb, 5 kb, 2.5 kb, 2.0 kb, or 1 kb, in length. In a further embodiment, polynucleotides of the invention comprise a portion of the coding sequences, as disclosed herein, but do not comprise all or a portion of any intron. In another embodiment, the polynucleotides comprising coding sequences do not contain coding sequences of a genomic flanking gene (i.e., 5′ or 3′ to the gene of interest in the genome). In other embodiments, the polynucleotides of the invention do not contain the coding sequence of more than 1000, 500, 250, 100, 50, 25, 20, 15, 10, 5, 4, 3, 2, or 1 genomic flanking gene(s).

[0105] A “polynucleotide” of the present invention also includes those polynucleotides capable of hybridizing, under stringent hybridization conditions, to sequences contained in SEQ ID NO:X, or the complement thereof (e.g., the complement of any one, two, three, four, or more of the polynucleotide fragments described herein), the polynucleotide sequence delineated in columns 7 and 8 of Table 1A or the complement thereof, the polynucleotide sequence delineated in columns 8 and 9 of Table 2 or the complement thereof, and/or cDNA sequences contained in Clone ID: (e.g., the complement of any one, two, three, four, or more of the polynucleotide fragments, or the cDNA clone within the pool of cDNA clones deposited with the ATCC, described herein), and/or the polynucleotide sequence delineated in column 6 of Table 1C or the complement thereof. “Stringent hybridization conditions” refers to an overnight incubation at 42 degree C. in a solution comprising 50% formamide, 5×SSC (750 mM NaCl, 75 mM trisodium citrate), 50 mM sodium phosphate (pH 7.6), 5×Denhardt's solution, 10% dextran sulfate, and 20 μg/ml denatured, sheared salmon sperm DNA, followed by washing the filters in 0.1×SSC at about 65 degree C.

[0106] Also contemplated are nucleic acid molecules that hybridize to the polynucleotides of the present invention at lower stringency hybridization conditions. Changes in the stringency of hybridization and signal detection are primarily accomplished through the manipulation of formamide concentration (lower percentages of formamide result in lowered stringency); salt conditions, or temperature. For example, lower stringency conditions include an overnight incubation at 37 degree C. in a solution comprising 6×SSPE (20×SSPE=3M NaCl; 0.2M NaH₂PO₄; 0.02M EDTA, pH 7.4), 0.5% SDS, 30% formamide, 100 ug/ml salmon sperm blocking DNA; followed by washes at 50 degree C. with 1×SSPE, 0.1% SDS. In addition, to achieve even lower stringency, washes performed following stringent hybridization can be done at higher salt concentrations (e.g. 5×SSC).

[0107] Note that variations in the above conditions may be accomplished through the inclusion and/or substitution of alternate blocking reagents used to suppress background in hybridization experiments. Typical blocking reagents include Denhardt's reagent, BLOTTO, heparin, denatured salmon sperm DNA, and commercially available proprietary formulations. The inclusion of specific blocking reagents may require modification of the hybridization conditions described above, due to problems with compatibility.

[0108] Of course, a polynucleotide which hybridizes only to polyA+ sequences (such as any 3′ terminal polyA+ tract of a cDNA shown in the sequence listing), or to a complementary stretch of T (or U) residues, would not be included in the definition of “polynucleotide,” since such a polynucleotide would hybridize to any nucleic acid molecule containing a poly (A) stretch or the complement thereof (e.g., practically any double-stranded cDNA clone generated using oligo dT as a primer).

[0109] The polynucleotide of the present invention can be composed of any polyribonucleotide or polydeoxribonucleotide, which may be unmodified RNA or DNA or modified RNA or DNA. For example, polynucleotides can be composed of single- and double-stranded DNA, DNA that is a mixture of single- and double-stranded regions, single- and double-stranded RNA, and RNA that is mixture of single- and double-stranded regions, hybrid molecules comprising DNA and RNA that may be single-stranded or, more typically, double-stranded or a mixture of single- and double-stranded regions. In addition, the polynucleotide can be composed of triple-stranded regions comprising RNA or DNA or both RNA and DNA. A polynucleotide may also contain one or more modified bases or DNA or RNA backbones modified for stability or for other reasons. “Modified” bases include, for example, tritylated bases and unusual bases such as inosine. A variety of modifications can be made to DNA and RNA; thus, “polynucleotide” embraces chemically, enzymatically, or metabolically modified forms.

[0110] In specific embodiments, the polynucleotides of the invention are at least 15, at least 30, at least 50, at least 100, at least 125, at least 500, or at least 1000 continuous nucleotides but are less than or equal to 300 kb, 200 kb, 100 kb, 50 kb, 15 kb, 10 kb, 7.5 kb, 5 kb, 2.5 kb, 2.0 kb, or 1 kb, in length. In a further embodiment, polynucleotides of the invention comprise a portion of the coding sequences, as disclosed herein, but do not comprise all or a portion of any intron. In another embodiment, the polynucleotides comprising coding sequences do not contain coding sequences of a genomic flanking gene (i.e., 5′ or 3′ to the gene of interest in the genome). In other embodiments, the polynucleotides of the invention do not contain the coding sequence of more than 1000, 500, 250, 100, 50, 25, 20, 15, 10, 5, 4, 3, 2, or 1 genomic flanking gene(s).

[0111] “SEQ ID NO:X” refers to a polynucleotide sequence described in column 5 of Table 1A, while “SEQ ID NO:Y” refers to a polypeptide sequence described in column 10 of Table 1A. SEQ ID NO:X is identified by an integer specified in column 6 of Table 1A. The polypeptide sequence SEQ ID NO:Y is a translated open reading frame (ORF) encoded by polynucleotide SEQ ID NO:X. The polynucleotide sequences are shown in the sequence listing immediately followed by all of the polypeptide sequences. Thus, a polypeptide sequence corresponding to polynucleotide sequence SEQ ID NO:2 is the first polypeptide sequence shown in the sequence listing. The second polypeptide sequence corresponds to the polynucleotide sequence shown as SEQ ID NO:3, and so on.

[0112] The polypeptide of the present invention can be composed of amino acids joined to each other by peptide bonds or modified peptide bonds, i.e., peptide isosteres, and may contain amino acids other than the 20 gene-encoded amino acids. The polypeptides may be modified by either natural processes, such as posttranslational processing, or by chemical modification techniques which are well known in the art. Such modifications are well described in basic texts and in more detailed monographs, as well as in a voluminous research literature. Modifications can occur anywhere in a polypeptide, including the peptide backbone, the amino acid side-chains and the amino or carboxyl termini. It will be appreciated that the same type of modification may be present in the same or varying degrees at several sites in a given polypeptide. Also, a given polypeptide may contain many types of modifications. Polypeptides may be branched, for example, as a result of ubiquitination, and they may be cyclic, with or without branching. Cyclic, branched, and branched cyclic polypeptides may result from posttranslation natural processes or may be made by synthetic methods. Modifications include acetylation, acylation, ADP-ribosylation, amidation, covalent attachment of flavin, covalent attachment of a heme moiety, covalent attachment of a nucleotide or nucleotide derivative, covalent attachment of a lipid or lipid derivative, covalent attachment of phosphotidylinositol, cross-linking, cyclization, disulfide bond formation, demethylation, formation of covalent cross-links, formation of cysteine, formation of pyroglutamate, formylation, gamma-carboxylation, glycosylation, GPI anchor formation, hydroxylation, iodination, methylation, myristoylation, oxidation, pegylation, proteolytic processing, phosphorylation, prenylation, racemization, selenoylation, sulfation, transfer-RNA mediated addition of amino acids to proteins such as arginylation, and ubiquitination. (See, for instance, PROTEINS—STRUCTURE AND MOLECULAR PROPERTIES, 2nd Ed., T. E. Creighton, W. H. Freeman and Company, New York (1993); POSTTRANSLATIONAL COVALENT MODIFICATION OF PROTEINS, B. C. Johnson, Ed., Academic Press, New York, pgs. 1-12 (1983); Seifter et al., Meth. Enzymol. 182:626-646 (1990); Rattan et al., Ann. N.Y. Acad. Sci. 663:48-62 (1992)).

[0113] “SEQ ID NO:X” refers to a polynucleotide sequence described, for example, in Tables 1A, 1B or 2, while “SEQ ID NO:Y” refers to a polypeptide sequence described in column 11 of Table 1A and or column 6 of Table 1B.1. SEQ ID NO:X is identified by an integer specified in column 4 of Table 1B.1. The polypeptide sequence SEQ ID NO:Y is a translated open reading frame (ORF) encoded by polynucleotide SEQ ID NO:X. “Clone ID:” refers to a cDNA clone described in column 2 of Table 1A and/or 1B.

[0114] “A polypeptide having functional activity” refers to a polypeptide capable of displaying one or more known functional activities associated with a full-length (complete) protein. Such functional activities include, but are not limited to, biological activity, antigenicity [ability to bind (or compete with a polypeptide for binding) to an anti-polypeptide antibody], immunogenicity (ability to generate antibody which binds to a specific polypeptide of the invention), ability to form multimers with polypeptides of the invention, and ability to bind to a receptor or ligand for a polypeptide.

[0115] The polypeptides of the invention can be assayed for functional activity (e.g. biological activity) using or routinely modifying assays known in the art, as well as assays described herein. Specifically, one of skill in the art may routinely assay secreted polypeptides (including fragments and variants) of the invention for activity using assays as described in the examples section below.

[0116] “A polypeptide having biological activity” refers to a polypeptide exhibiting activity similar to, but not necessarily identical to, an activity of a polypeptide of the present invention, including mature forms, as measured in a particular biological assay, with or without dose dependency. In the case where dose dependency does exist, it need not be identical to that of the polypeptide, but rather substantially similar to the dose-dependence in a given activity as compared to the polypeptide of the present invention (i.e., the candidate polypeptide will exhibit greater activity or not more than about 25-fold less and, preferably, not more than about tenfold less activity, and most preferably, not more than about three-fold less activity relative to the polypeptide of the present invention).

Tables

Table 1A

[0117] Table 1A summarizes information concerning certain polynucleotides and polypeptides of the invention. The first column provides the gene number in the application for each clone identifier. The second column provides a unique clone identifier, “Clone ID:”, for a cDNA clone related to each contig sequence disclosed in Table 1A. Third column, the cDNA Clones identified in the second column were deposited as indicated in the third column (i.e. by ATCC Deposit No:Z and deposit date). Some of the deposits contain multiple different clones corresponding to the same gene. In the fourth column, “Vector” refers to the type of vector contained in the corresponding cDNA Clone identified in the second column. In the fifth column, the nucleotide sequence identified as “NT SEQ ID NO:X” was assembled from partially homologous (“overlapping”) sequences obtained from the corresponding cDNA clone identified in the second column and, in some cases, from additional related cDNA clones. The overlapping sequences were assembled into a single contiguous sequence of high redundancy (usually three to five overlapping sequences at each nucleotide position), resulting in a final sequence identified as SEQ ID NO:X. In the sixth column, “Total NT Seq.” refers to the total number of nucleotides in the contig sequence identified as SEQ ID NO:X.” The deposited clone may contain all or most of these sequences, reflected by the nucleotide position indicated as “5′ NT of Clone Seq.” (seventh column) and the “3′ NT of Clone Seq.” (eighth column) of SEQ ID NO:X. In the ninth column, the nucleotide position of SEQ ID NO:X of the putative start codon (methionine) is identified as “5′ NT of Start Codon.” Similarly, in column ten, the nucleotide position of SEQ ID NO:X of the predicted signal sequence is identified as “5′ NT of First AA of Signal Pep.” In the eleventh column, the translated amino acid sequence, beginning with the methionine, is identified as “AA SEQ ID NO:Y,” although other reading frames can also be routinely translated using known molecular biology techniques. The polypeptides produced by these alternative open reading frames are specifically contemplated by the present invention.

[0118] In the twelfth and thirteenth columns of Table 1A, the first and last amino acid position of SEQ ID NO:Y of the predicted signal peptide is identified as “First AA of Sig Pep” and “Last AA of Sig Pep.” In the fourteenth column, the predicted first amino acid position of SEQ ID NO:Y of the secreted portion is identified as “Predicted First AA of Secreted Portion”. The amino acid position of SEQ ID NO:Y of the last amino acid encoded by the open reading frame is identified in the fifteenth column as “Last AA of ORF”.

[0119] SEQ ID NO:X (where X may be any of the polynucleotide sequences disclosed in the sequence listing) and the translated SEQ ID NO:Y (where Y may be any of the polypeptide sequences disclosed in the sequence listing) are sufficiently accurate and otherwise suitable for a variety of uses well known in the art and described further below. For instance, SEQ ID NO:X is useful for designing nucleic acid hybridization probes that will detect nucleic acid sequences contained in SEQ ID NO:X or the cDNA contained in the deposited clone. These probes will also hybridize to nucleic acid molecules in biological samples, thereby enabling a variety of forensic and diagnostic methods of the invention. Similarly, polypeptides identified from SEQ ID NO:Y may be used, for example, to generate antibodies which bind specifically to proteins containing the polypeptides and the secreted proteins encoded by the cDNA clones identified in Table 1A and/or elsewhere herein

[0120] Nevertheless, DNA sequences generated by sequencing reactions can contain sequencing errors. The errors exist as misidentified nucleotides, or as insertions or deletions of nucleotides in the generated DNA sequence. The erroneously inserted or deleted nucleotides cause frame shifts in the reading frames of the predicted amino acid sequence. In these cases, the predicted amino acid sequence diverges from the actual amino acid sequence, even though the generated DNA sequence may be greater than 99.9% identical to the actual DNA sequence (for example, one base insertion or deletion in an open reading frame of over 1000 bases).

[0121] Accordingly, for those applications requiring precision in the nucleotide sequence or the amino acid sequence, the present invention provides not only the generated nucleotide sequence identified as SEQ ID NO:X, and the predicted translated amino acid sequence identified as SEQ ID NO:Y, but also a sample of plasmid DNA containing a human cDNA of the invention deposited with the ATCC, as set forth in Table 1A. The nucleotide sequence of each deposited plasmid can readily be determined by sequencing the deposited plasmid in accordance with known methods

[0122] The predicted amino acid sequence can then be verified from such deposits. Moreover, the amino acid sequence of the protein encoded by a particular plasmid can also be directly determined by peptide sequencing or by expressing the protein in a suitable host cell containing the deposited human cDNA, collecting the protein, and determining its sequence.

[0123] Also provided in Table 1A is the name of the vector which contains the cDNA plasmid. Each vector is routinely used in the art. The following additional information is provided for convenience.

[0124] Vectors Lambda Zap (U.S. Pat. Nos. 5,128,256 and 5,286,636), Uni-Zap XR (U.S. Pat. Nos. 5,128,256 and 5,286,636), Zap Express (U.S. Pat. Nos. 5,128,256 and 5,286,636), pbluescript (pBS) (Short, J. M. et al., Nucleic Acids Res. 16:7583-7600 (1988); Alting-Mees, M. A. and Short, J. M., Nucleic Acids Res. 17:9494 (1989)) and pBK (Alting-Mees, M. A. et al., Strategies 5:58-61 (1992)) are commercially available from Stratagene Cloning Systems, Inc., 11011 N. Torrey Pines Road, La Jolla, Calif., 92037. pBS contains an ampicillin resistance gene and pBK contains a neomycin resistance gene. Phagemid pBS may be excised from the Lambda Zap and Uni-Zap XR vectors, and phagemid pBK may be excised from the Zap Express vector. Both phagemids may be transformed into E. coli strain XL-1 Blue, also available from Stratagene

[0125] Vectors pSport1, pCMVSport 1.0, pCMVSport 2.0 and pCMVSport 3.0, were obtained from Life Technologies, Inc., P.O. Box 6009, Gaithersburg, Md. 20897. All Sport vectors contain an ampicillin resistance gene and may be transformed into E. coli strain DH10B, also available from Life Technologies. See, for instance, Gruber, C. E., et al., Focus 15:59 (1993). Vector lafmid BA (Bento Soares, Columbia University, New York, N.Y.) contains an ampicillin resistance gene and can be transformed into E. coli strain XL-1 Blue. Vector pCR®2.1, which is available from Invitrogen, 1600 Faraday Avenue, Carlsbad, Calif. 92008, contains an ampicillin resistance gene and may be transformed into E. coli strain DH10B, available from Life Technologies. See, for instance, Clark, J. M., Nuc. Acids Res. 16:9677-9686 (1988) and Mead, D. et al., Bio/Technology 9: (1991).

[0126] The present invention also relates to the genes corresponding to SEQ ID NO:X, SEQ ID NO:Y, and/or a deposited cDNA (cDNA Clone ID). The corresponding gene can be isolated in accordance with known methods using the sequence information disclosed herein. Such methods include, but are not limited to, preparing probes or primers from the disclosed sequence and identifying or amplifying the corresponding gene from appropriate sources of genomic material.

[0127] Also provided in the present invention are allelic variants, orthologs, and/or species homologs. Procedures known in the art can be used to obtain full-length genes, allelic variants, splice variants, full-length coding portions, orthologs, and/or species homologs of genes corresponding to SEQ ID NO:X and SEQ ID NO:Y using information from the sequences disclosed herein or the clones deposited with the ATCC. For example, allelic variants and/or species homologs may be isolated and identified by making suitable probes or primers from the sequences provided herein and screening a suitable nucleic acid source for allelic variants and/or the desired homologue.

[0128] The present invention provides a polynucleotide comprising, or alternatively consisting of, the nucleic acid sequence of SEQ ID NO:X and/or a cDNA contained in ATCC Deposit No. Z. The present invention also provides a polypeptide comprising, or alternatively, consisting of, the polypeptide sequence of SEQ ID NO:Y, a polypeptide encoded by SEQ ID NO:X, and/or a polypeptide encoded by a cDNA contained in ATCC deposit No. Z. Polynucleotides encoding a polypeptide comprising, or alternatively consisting of the polypeptide sequence of SEQ ID NO:Y, a polypeptide encoded by SEQ ID NO:X and/or a polypeptide encoded by the cDNA contained in ATCC Deposit No. Z, are also encompassed by the invention. The present invention further encompasses a polynucleotide comprising, or alternatively consisting of the complement of the nucleic acid sequence of SEQ ID NO:X, and/or the complement of the coding strand of the cDNA contained in ATCC Deposit No. Z.

| | | | | | | | | | | | | | | |
|---|---|---|---|---|---|---|---|---|---|---|---|---|---|---|
| | | | | | | | | | 5′ NT | | | | | |
| | | | | | | | | | of | | | Last | | |
| | | ATCC | | NT | | 5′ | 3′ | 5′ | First | AA | First | AA | First | |
| | cDNA | Deposit | | SEQ | Total | NT of | NT of | NT of | AA of | SEQ | AA of | of | AA of | Last |
| Gene | Clone | No:Z | | ID | NT | Clone | Clone | Start | Signal | ID | Sig | Sig | Secreted | AA of |
| No. | ID | and Date | Vector | NO:X | Seq. | Seq. | Seq. | Codon | Pep | NO:Y | Pep | Pep | Portion | ORF |

| | | | | | | | | | | | | | | |
|---|---|---|---|---|---|---|---|---|---|---|---|---|---|---|
| 1 | H6BSF56 | 203917 | Uni-ZAP XR | 11 | 605 | 44 | 605 | | 83 | 3112 | 1 | 6 | 7 | 141 |
| | | 04/08/99 | | | | | | | | | | | | |
| 2 | H6EDM64 | 203959 | Uni-ZAP XR | 12 | 2610 | 1275 | 2377 | 1448 | 1448 | 3113 | 1 | | | 6 |
| | | 04/26/99 | | | | | | | | | | | | |
| 3 | H6EEC72 | PTA-793 | Uni-ZAP XR | 13 | 1493 | 1 | 1493 | | 263 | 3114 | 1 | 13 | 14 | 18 |
| | | 09/27/99 | | | | | | | | | | | | |
| 4 | HACAB68 | 203917 | Uni-ZAP XR | 14 | 1300 | 1 | 1300 | 135 | 135 | 3115 | 1 | 26 | 27 | 78 |
| | | 04/08/99 | | | | | | | | | | | | |
| 5 | HACBJ56 | 203979 | Uni-ZAP XR | 15 | 888 | 1 | 888 | | 250 | 3116 | 1 | 9 | 10 | 25 |
| | | 04/29/99 | | | | | | | | | | | | |
| 6 | HACBS22 | 203979 | Uni-ZAP XR | 16 | 3239 | 1 | 3239 | 217 | 217 | 3117 | 1 | 23 | 24 | 41 |
| | | 04/29/99 | | | | | | | | | | | | |
| 7 | HADDE71 | 203917 | pSport1 | 17 | 667 | 1 | 667 | 250 | 250 | 3118 | 1 | 28 | 29 | 139 |
| | | 04/08/99 | | | | | | | | | | | | |
| 8 | HADDJ13 | 203917 | pSport1 | 18 | 2318 | 1 | 2318 | 347 | 347 | 3119 | 1 | 20 | 21 | 30 |
| | | 04/08/99 | | | | | | | | | | | | |
| 9 | HADMB15 | 203979 | pBluescript | 19 | 330 | 1 | 330 | | 238 | 3120 | 1 | 11 | 12 | 20 |
| | | 04/29/99 | | | | | | | | | | | | |
| 10 | HAGBQ12 | 203917 | Uni-ZAP XR | 20 | 743 | 1 | 743 | 171 | 171 | 3121 | 1 | 19 | 20 | 21 |
| | | 04/08/99 | | | | | | | | | | | | |
| 11 | HAGDW20 | 203917 | Uni-ZAP XR | 21 | 1284 | 1 | 1284 | 238 | 238 | 3122 | 1 | 16 | 17 | 17 |
| | | 04/08/99 | | | | | | | | | | | | |
| 12 | HAGEG10 | 203917 | Uni-ZAP XR | 22 | 5684 | 100 | 2890 | 146 | 146 | 3123 | 1 | 29 | 30 | 55 |
| | | 04/08/99 | | | | | | | | | | | | |
| 13 | HAGEQ79 | 203917 | Uni-ZAP XR | 23 | 785 | 1 | 785 | 515 | 515 | 3124 | 1 | | | 11 |
| | | 04/08/99 | | | | | | | | | | | | |
| 14 | HAGFS57 | 203979 | Uni-ZAP XR | 24 | 874 | 1 | 874 | 241 | 241 | 3125 | 1 | 26 | 27 | 54 |
| | | 04/29/99 | | | | | | | | | | | | |
| 15 | HAGHN57 | 203917 | Uni-ZAP XR | 25 | 2440 | 843 | 2440 | 900 | 900 | 3126 | 1 | | | 10 |
| | | 04/08/99 | | | | | | | | | | | | |
| 16 | HAHEA15 | 203979 | Uni-ZAP XR | 26 | 1346 | 1 | 1346 | 196 | 196 | 3127 | 1 | | | 13 |
| | | 04/29/99 | | | | | | | | | | | | |
| 17 | HAJAA47 | 203917 | pCMVSport 3.0 | 27 | 1237 | 1 | 1237 | | 192 | 3128 | 1 | 15 | 16 | 38 |
| | | 04/08/99 | | | | | | | | | | | | |
| 18 | HAJAY92 | 203959 | pCMVSport 3.0 | 28 | 2345 | 1 | 2345 | 12 | 12 | 3129 | 1 | 20 | 21 | 94 |
| | | 04/26/99 | | | | | | | | | | | | |
| 19 | HAJBV67 | PTA-181 | pCMVSport 3.0 | 29 | 2536 | 1 | 2536 | 605 | 605 | 3130 | 1 | 19 | 20 | 359 |
| | | 06/07/99 | | | | | | | | | | | | |
| 20 | HAJCH70 | 203917 | pCMVSport 3.0 | 30 | 2182 | 1 | 2182 | 284 | 284 | 3131 | 1 | 32 | 33 | 38 |
| | | 04/08/99 | | | | | | | | | | | | |
| 21 | HAOAG15 | 203979 | pSport1 | 31 | 5143 | 7 | 4802 | | 8 | 3132 | 1 | 22 | 23 | 1167 |
| | | 04/29/99 | | | | | | | | | | | | |
| 22 | HAQAI92 | 203917 | Uni-ZAP XR | 32 | 607 | 1 | 602 | 250 | 250 | 3133 | 1 | 15 | 16 | 23 |
| | | 04/08/99 | | | | | | | | | | | | |
| 23 | HAQCE11 | 203917 | Uni-ZAP XR | 33 | 596 | 1 | 596 | | 262 | 3134 | 1 | | | 3 |
| | | 04/08/99 | | | | | | | | | | | | |
| 24 | HATBI94 | 203917 | Uni-ZAP XR | 34 | 1380 | 1 | 1380 | 18 | 18 | 3135 | 1 | 20 | 21 | 68 |
| | | 04/08/99 | | | | | | | | | | | | |
| 25 | HATCB45 | 203917 | Uni-ZAP XR | 35 | 903 | 1 | 903 | 268 | 268 | 3136 | 1 | 16 | 17 | 42 |
| | | 04/08/99 | | | | | | | | | | | | |
| 26 | HATCD80 | 203917 | Uni-ZAP XR | 36 | 1809 | 95 | 1809 | 296 | 296 | 3137 | 1 | 23 | 24 | 37 |
| | | 04/08/99 | | | | | | | | | | | | |
| 27 | HATCI03 | 203917 | Uni-ZAP XR | 37 | 934 | 1 | 934 | 271 | 271 | 3138 | 1 | | | 17 |
| | | 04/08/99 | | | | | | | | | | | | |
| 28 | HATEH20 | 203917 | Uni-ZAP XR | 38 | 850 | 1 | 850 | 93 | 93 | 3139 | 1 | 19 | 20 | 42 |
| | | 04/08/99 | | | | | | | | | | | | |
| 29 | HBAGD86 | 203917 | pSport1 | 39 | 1713 | 293 | 1596 | 521 | 521 | 3140 | 1 | 18 | 19 | 19 |
| | | 04/08/99 | | | | | | | | | | | | |
| 30 | HBCJL35 | PTA-794 | pSport1 | 40 | 720 | 1 | 720 | 17 | 17 | 3141 | 1 | 27 | 28 | 124 |
| | | 09/27/99 | | | | | | | | | | | | |
| 30 | HBCJL35 | PTA-794 | pSport1 | 3098 | 2878 | 1027 | 1747 | 1033 | 1033 | 6199 | 1 | 27 | 28 | 124 |
| | | 09/27/99 | | | | | | | | | | | | |
| 31 | HBDAB91 | 203917 | pSport1 | 41 | 687 | 1 | 687 | 351 | 351 | 3142 | 1 | 19 | 20 | 29 |
| | | 04/08/99 | | | | | | | | | | | | |
| 32 | HBDAB91 | 203917 | pSport1 | 42 | 1007 | 320 | 1007 | 671 | 671 | 3143 | 1 | 19 | 20 | 29 |
| | | 04/08/99 | | | | | | | | | | | | |
| 33 | HBGBC29 | 203917 | Uni-ZAP XR | 43 | 1856 | 764 | 1829 | | 1016 | 3144 | 1 | | | 2 |
| | | 04/08/99 | | | | | | | | | | | | |
| 34 | HBGNC72 | PTA-793 | Uni-ZAP XR | 44 | 802 | 1 | 802 | | 550 | 3145 | 1 | 8 | 9 | 76 |
| | | 09/27/99 | | | | | | | | | | | | |
| 35 | HBHAA05 | 203917 | Uni-ZAP XR | 45 | 690 | 1 | 690 | | 110 | 3146 | 1 | 16 | 17 | 58 |
| | | 04/08/99 | | | | | | | | | | | | |
| 36 | HBHAA81 | 203959 | Uni-ZAP XR | 46 | 1647 | 1 | 1647 | 28 | 28 | 3147 | 1 | 24 | 25 | 203 |
| | | 04/26/99 | | | | | | | | | | | | |
| 37 | HBIAA59 | 203917 | Uni-ZAP XR | 47 | 2392 | 1612 | 2392 | 1877 | 1877 | 3148 | 1 | 15 | 16 | 136 |
| | | 04/08/99 | | | | | | | | | | | | |
| 38 | HBIAC29 | 203917 | Uni-ZAP XR | 48 | 1782 | 808 | 1545 | 1036 | 1036 | 3149 | 1 | 24 | 25 | 29 |
| | | 04/08/99 | | | | | | | | | | | | |
| 39 | HBICW51 | 203917 | Uni-ZAP XR | 49 | 619 | 1 | 619 | | 289 | 3150 | 1 | 16 | 17 | 42 |
| | | 04/08/99 | | | | | | | | | | | | |
| 40 | HBJAB02 | 203917 | Uni-ZAP XR | 50 | 1693 | 1 | 1665 | 84 | 84 | 3151 | 1 | 27 | 28 | 34 |
| | | 04/08/99 | | | | | | | | | | | | |
| 41 | HBJAC65 | 203917 | Uni-ZAP XR | 51 | 1685 | 1 | 892 | 137 | 137 | 3152 | 1 | 13 | 14 | 23 |
| | | 04/08/99 | | | | | | | | | | | | |
| 42 | HBJBM12 | 203917 | Uni-ZAP XR | 52 | 1135 | 1 | 1135 | 47 | 47 | 3153 | 1 | | | 31 |
| | | 04/08/99 | | | | | | | | | | | | |
| 43 | HBJCR46 | 203917 | Uni-ZAP XR | 53 | 3208 | 2270 | 3202 | 589 | 589 | 3154 | 1 | 1 | 2 | 733 |
| | | 04/08/99 | | | | | | | | | | | | |
| 44 | HBJDS79 | 203917 | Uni-ZAP XR | 54 | 2325 | 896 | 2325 | 1032 | 1032 | 3155 | 1 | 37 | 38 | 107 |
| | | 04/08/99 | | | | | | | | | | | | |
| 45 | HBJDW56 | 203917 | Uni-ZAP XR | 55 | 637 | 1 | 637 | | 121 | 3156 | 1 | | | 8 |
| | | 04/08/99 | | | | | | | | | | | | |
| 46 | HBJEL16 | 203949 | Uni-ZAP XR | 56 | 750 | 1 | 750 | 115 | 115 | 3157 | 1 | 24 | 25 | 36 |
| | | 04/29/99 | | | | | | | | | | | | |
| 47 | HBJFK45 | 203917 | Uni-ZAP XR | 57 | 543 | 1 | 543 | | 430 | 3158 | 1 | | | 8 |
| | | 04/08/99 | | | | | | | | | | | | |
| 48 | HBJIG20 | PTA-181 | Uni-ZAP XR | 58 | 637 | 1 | 637 | | 321 | 3159 | 1 | 16 | 17 | 77 |
| | | 06/07/99 | | | | | | | | | | | | |
| 49 | HBJKD16 | 203979 | Uni-ZAP XR | 59 | 1629 | 1 | 1629 | 78 | 78 | 3160 | 1 | 18 | 19 | 31 |
| | | 04/29/99 | | | | | | | | | | | | |
| 50 | HBMBM96 | 203917 | pBluescript | 60 | 1076 | 1 | 1076 | | 170 | 3161 | 1 | | | 4 |
| | | 04/08/99 | | | | | | | | | | | | |
| 51 | HBMBX01 | 203917 | pBluescript | 61 | 1652 | 179 | 1458 | 363 | 363 | 3162 | 1 | 18 | 19 | 28 |
| | | 04/08/99 | | | | | | | | | | | | |
| 52 | HBMTM11 | 203917 | Uni-ZAP XR | 62 | 1639 | 1 | 1639 | 125 | 125 | 3163 | 1 | 19 | 20 | 31 |
| | | 04/08/99 | | | | | | | | | | | | |
| 53 | HBMTX26 | 203917 | Uni-ZAP XR | 63 | 1308 | 1 | 1308 | 107 | 107 | 3164 | 1 | 46 | 47 | 89 |
| | | 04/08/99 | | | | | | | | | | | | |
| 54 | HBMTY48 | 203917 | Uni-ZAP XR | 64 | 1891 | 1 | 1891 | 660 | 660 | 3165 | 1 | 36 | 37 | 94 |
| | | 04/08/99 | | | | | | | | | | | | |
| 55 | HBMUH74 | PTA-181 | Uni-ZAP XR | 65 | 726 | 1 | 726 | 344 | 344 | 3166 | 1 | 13 | 14 | 28 |
| | | 06/07/99 | | | | | | | | | | | | |
| 56 | HBMWE61 | 203917 | Uni-ZAP XR | 66 | 1118 | 1 | 1118 | 238 | 238 | 3167 | 1 | | | 9 |
| | | 04/08/99 | | | | | | | | | | | | |
| 57 | HBNAX40 | 203917 | Uni-ZAP XR | 67 | 2793 | 2455 | 2793 | 2497 | 2497 | 3168 | 1 | 18 | 19 | 49 |
| | | 04/08/99 | | | | | | | | | | | | |
| 58 | HBNBJ76 | 203917 | Uni-ZAP XR | 68 | 1974 | 1469 | 1974 | | 1603 | 3169 | 1 | 29 | 30 | 68 |
| | | 04/08/99 | | | | | | | | | | | | |
| 59 | HBQAB79 | 203917 | Lambda ZAP II | 69 | 1331 | 1 | 1331 | 190 | 190 | 3170 | 1 | | | 11 |
| | | 04/08/99 | | | | | | | | | | | | |
| 60 | HBQAC57 | 203917 | Lambda ZAP II | 70 | 2111 | 1 | 2111 | 146 | 146 | 3171 | 1 | | | 29 |
| | | 04/08/99 | | | | | | | | | | | | |
| 61 | HBSAK32 | PTA-181 | Uni-ZAP XR | 71 | 592 | 129 | 592 | 447 | 447 | 3172 | 1 | 27 | 28 | 48 |
| | | 06/07/99 | | | | | | | | | | | | |
| 62 | HBXCM66 | 203917 | ZAP Express | 72 | 1010 | 41 | 1010 | 119 | 119 | 3173 | 1 | | | 16 |
| | | 04/08/99 | | | | | | | | | | | | |
| 63 | HBXCX15 | 203917 | ZAP Express | 73 | 1219 | 1 | 1219 | | 1148 | 3174 | 1 | | | 1 |
| | | 04/08/99 | | | | | | | | | | | | |
| 64 | HCDCY76 | 203917 | Uni-ZAP XR | 74 | 1392 | 628 | 1392 | | 860 | 3175 | 1 | 17 | 18 | 35 |
| | | 04/08/99 | | | | | | | | | | | | |
| 65 | HCDDL48 | 203917 | Uni-ZAP XR | 75 | 813 | 1 | 813 | 333 | 333 | 3176 | 1 | 12 | 13 | 40 |
| | | 04/08/99 | | | | | | | | | | | | |
| 66 | HCE1G78 | 203917 | Uni-ZAP XR | 76 | 1896 | 1 | 1896 | 77 | 77 | 3177 | 1 | 17 | 18 | 254 |
| | | 04/08/99 | | | | | | | | | | | | |
| 67 | HCE2H52 | 203979 | Uni-ZAP XR | 77 | 1276 | 1 | 1276 | | 29 | 3178 | 1 | 15 | 16 | 23 |
| | | 04/29/99 | | | | | | | | | | | | |
| 68 | HCE3B04 | 203917 | Uni-ZAP XR | 78 | 1807 | 1347 | 1806 | | 1588 | 3179 | 1 | 13 | 14 | 32 |
| | | 04/08/99 | | | | | | | | | | | | |
| 69 | HCE5F78 | 203917 | Uni-ZAP XR | 79 | 1732 | 282 | 1732 | | 566 | 3180 | 1 | 8 | 9 | 32 |
| | | 04/08/99 | | | | | | | | | | | | |
| 70 | HCEDR26 | 203917 | Uni-ZAP XR | 80 | 1419 | 1 | 1419 | 177 | 177 | 3181 | 1 | 26 | 27 | 55 |
| | | 04/08/99 | | | | | | | | | | | | |
| 71 | HCEEE79 | 203917 | Uni-ZAP XR | 81 | 1052 | 1 | 1052 | 131 | 131 | 3182 | 1 | 15 | 16 | 55 |
| | | 04/08/99 | | | | | | | | | | | | |
| 72 | HCEEQ25 | 203917 | Uni-ZAP XR | 82 | 992 | 1 | 992 | | 111 | 3183 | 1 | 15 | 16 | 23 |
| | | 04/08/99 | | | | | | | | | | | | |
| 73 | HCEEU18 | 203917 | Uni-ZAP XR | 83 | 1229 | 1 | 1229 | 209 | 209 | 3184 | 1 | 30 | 31 | 43 |
| | | 04/08/99 | | | | | | | | | | | | |
| 74 | HCEFZ82 | 203917 | Uni-ZAP XR | 84 | 1811 | 44 | 1781 | 215 | 215 | 3185 | 1 | 16 | 17 | 265 |
| | | 04/08/99 | | | | | | | | | | | | |
| 75 | HCEGX05 | 203917 | Uni-ZAP XR | 85 | 1305 | 1 | 1305 | 237 | 237 | 3186 | 1 | | | 15 |
| | | 04/08/99 | | | | | | | | | | | | |
| 76 | HCFLN88 | 203917 | pSport1 | 86 | 1434 | 1 | 1434 | 101 | 101 | 3187 | 1 | 16 | 17 | 25 |
| | | 04/08/99 | | | | | | | | | | | | |
| 77 | HCFLT90 | 203917 | pSport1 | 87 | 910 | 1 | 735 | | 384 | 3188 | 1 | | | 1 |
| | | 04/08/99 | | | | | | | | | | | | |
| 78 | HCHAB84 | 203979 | pSport1 | 88 | 1359 | 62 | 1359 | | 304 | 3189 | 1 | 23 | 24 | 147 |
| | | 04/29/99 | | | | | | | | | | | | |
| 79 | HCMSX51 | 203917 | Uni-ZAP XR | 89 | 2253 | 334 | 2190 | | 539 | 3190 | 1 | 31 | 32 | 80 |
| | | 04/08/99 | | | | | | | | | | | | |
| 80 | HCNCO11 | 203917 | Lambda ZAP II | 90 | 746 | 1 | 746 | 101 | 101 | 3191 | 1 | | | 14 |
| | | 04/08/99 | | | | | | | | | | | | |
| 81 | HCNSD29 | PTA-181 | pBluescript | 91 | 1728 | 1031 | 1633 | 1145 | 1145 | 3192 | 1 | 19 | 20 | 31 |
| | | 06/07/99 | | | | | | | | | | | | |
| 82 | HCQBH72 | 203917 | Lambda ZAP II | 92 | 1796 | 776 | 1796 | 31 | 31 | 3193 | 1 | 25 | 26 | 47 |
| | | 04/08/99 | | | | | | | | | | | | |
| 83 | HCQCC96 | 203949 | Lambda ZAP II | 93 | 2166 | 632 | 1455 | 782 | 782 | 3194 | 1 | 20 | 21 | 45 |
| | | 04/29/99 | | | | | | | | | | | | |
| 84 | HCQCJ56 | 203917 | Lambda ZAP II | 94 | 1287 | 1 | 1287 | | 728 | 3195 | 1 | | | 1 |
| | | 04/08/99 | | | | | | | | | | | | |
| 85 | HCQCM24 | 203949 | Lambda ZAP II | 95 | 1929 | 606 | 1929 | 815 | 815 | 3196 | 1 | | | 38 |
| | | 04/29/99 | | | | | | | | | | | | |
| 86 | HCRAY10 | 203917 | Uni-ZAP XR | 96 | 788 | 1 | 788 | | 141 | 3197 | 1 | 36 | 37 | 145 |
| | | 04/08/99 | | | | | | | | | | | | |
| 87 | HCRBF72 | 203917 | Uni-ZAP XR | 97 | 1264 | 101 | 1142 | 191 | 191 | 3198 | 1 | 1 | 2 | 211 |
| | | 04/08/99 | | | | | | | | | | | | |
| 88 | HCRNF78 | 203917 | pSport1 | 98 | 892 | 1 | 892 | 363 | 363 | 3199 | 1 | 22 | 23 | 46 |
| | | 04/08/99 | | | | | | | | | | | | |
| 89 | HCUAF85 | 203917 | ZAP Express | 99 | 597 | 1 | 597 | 230 | 230 | 3200 | 1 | 23 | 24 | 122 |
| | | 04/08/99 | | | | | | | | | | | | |
| 90 | HCUCF89 | 203917 | ZAP Express | 100 | 530 | 1 | 530 | 189 | 189 | 3201 | 1 | 18 | 19 | 29 |
| | | 04/08/99 | | | | | | | | | | | | |
| 91 | HCUCK44 | 203957 | ZAP Express | 101 | 1143 | 578 | 1136 | 598 | 598 | 3202 | 1 | 30 | 31 | 60 |
| | | 04/26/99 | | | | | | | | | | | | |
| 92 | HCUDD64 | 203917 | ZAP Express | 102 | 402 | 150 | 389 | 256 | 256 | 3203 | 1 | 35 | 36 | 49 |
| | | 04/08/99 | | | | | | | | | | | | |
| 93 | HCWAE64 | 203917 | ZAP Express | 103 | 471 | 1 | 471 | | 410 | 3204 | 1 | | | 5 |
| | | 04/08/99 | | | | | | | | | | | | |
| 94 | HCWFU39 | 203917 | ZAP Express | 104 | 467 | 1 | 467 | 282 | 282 | 3205 | 1 | 9 | 10 | 22 |
| | | 04/08/99 | | | | | | | | | | | | |
| 95 | HCWUL09 | 203917 | ZAP Express | 105 | 761 | 3 | 761 | 333 | 333 | 3206 | 1 | | | 11 |
| | | 04/08/99 | | | | | | | | | | | | |
| 96 | HDHAA42 | 203917 | pCMVSport 2.0 | 106 | 943 | 1 | 943 | 48 | 48 | 3207 | 1 | 25 | 26 | 26 |
| | | 04/08/99 | | | | | | | | | | | | |
| 97 | HDHEB76 | 203917 | pCMVSport 2.0 | 107 | 497 | 1 | 497 | | 416 | 3208 | 1 | 11 | 12 | 12 |
| | | 04/08/99 | | | | | | | | | | | | |
| 98 | HDPCW16 | 203960 | pCMVSport 3.0 | 108 | 1536 | 1 | 1536 | 172 | 172 | 3209 | 1 | 38 | 39 | 55 |
| | | 04/26/99 | | | | | | | | | | | | |
| 99 | HDPDI72 | PTA-794 | pCMVSport 3.0 | 109 | 1550 | 1 | 1550 | 23 | 23 | 3210 | 1 | 17 | 18 | 120 |
| | | 09/27/99 | | | | | | | | | | | | |
| 100 | HDPDJ58 | 203960 | pCMVSport 3.0 | 110 | 1997 | 1 | 1997 | 279 | 279 | 3211 | 1 | | | 20 |
| | | 04/26/99 | | | | | | | | | | | | |
| 101 | HDPFF10 | PTA-181 | pCMVSport 3.0 | 111 | 2582 | 3 | 2582 | 186 | 186 | 3212 | 1 | 19 | 20 | 425 |
| | | 06/07/99 | | | | | | | | | | | | |
| 102 | HDPFU43 | 203960 | pCMVSport 3.0 | 112 | 1904 | 1 | 1889 | 220 | 220 | 3213 | 1 | 28 | 29 | 52 |
| | | 04/26/99 | | | | | | | | | | | | |
| 103 | HDPFY18 | 203918 | pCMVSport 3.0 | 113 | 2187 | 1 | 2187 | 161 | 161 | 3214 | 1 | | | 7 |
| | | 04/08/99 | | | | | | | | | | | | |
| 104 | HDPGE24 | 203960 | pCMVSport 3.0 | 114 | 2625 | 1 | 2625 | 173 | 173 | 3215 | 1 | 11 | 12 | 73 |
| | | 04/26/99 | | | | | | | | | | | | |
| 105 | HDPIU94 | 203960 | pCMVSport 3.0 | 115 | 2196 | 21 | 2196 | 208 | 208 | 3216 | 1 | 21 | 22 | 23 |
| | | 04/26/99 | | | | | | | | | | | | |
| 106 | HDPOC24 | 203960 | pCMVSport 3.0 | 116 | 1777 | 302 | 1725 | 418 | 418 | 3217 | 1 | 23 | 24 | 133 |
| | | 04/26/99 | | | | | | | | | | | | |
| 107 | HDPOL37 | 203960 | pCMVSport 3.0 | 117 | 1489 | 1 | 1489 | 189 | 189 | 3218 | 1 | 32 | 33 | 62 |
| | | 04/26/99 | | | | | | | | | | | | |
| 108 | HDPOO76 | 203960 | pCMVSport 3.0 | 118 | 645 | 1 | 645 | | 109 | 3219 | 1 | 15 | 16 | 16 |
| | | 04/26/99 | | | | | | | | | | | | |
| 109 | HDPPD93 | 203960 | pCMVSport 3.0 | 119 | 701 | 1 | 701 | 28 | 28 | 3220 | 1 | | | 12 |
| | | 04/26/99 | | | | | | | | | | | | |
| 110 | HDPPQ30 | 203960 | pCMVSport 3.0 | 120 | 1063 | 1 | 1063 | 220 | 220 | 3221 | 1 | 22 | 23 | 38 |
| | | 04/26/99 | | | | | | | | | | | | |
| 111 | HDPPW82 | 203959 | pCMVSport 3.0 | 121 | 552 | 1 | 552 | 395 | 395 | 3222 | 1 | | | 29 |
| | | 04/26/99 | | | | | | | | | | | | |
| 112 | HDPXN20 | 203960 | pCMVSport 3.0 | 122 | 1756 | 1 | 1756 | 61 | 61 | 3223 | 1 | 20 | 21 | 41 |
| | | 04/26/99 | | | | | | | | | | | | |
| 113 | HDQHM36 | PTA-181 | pCMVSport 3.0 | 123 | 1547 | 1 | 1547 | 129 | 129 | 3224 | 1 | 18 | 19 | 48 |
| | | 06/07/99 | | | | | | | | | | | | |
| 114 | HDTAU35 | 203960 | pCMVSport 2.0 | 124 | 377 | 1 | 377 | 260 | 260 | 3225 | 1 | 12 | 13 | 17 |
| | | 04/26/99 | | | | | | | | | | | | |
| 115 | HDTAV54 | 203960 | pCMVSport 2.0 | 125 | 660 | 1 | 660 | 191 | 191 | 3226 | 1 | 22 | 23 | 33 |
| | | 04/26/99 | | | | | | | | | | | | |
| 116 | HDTFX18 | 203960 | pCMVSport 2.0 | 126 | 678 | 1 | 678 | 164 | 164 | 3227 | 1 | 16 | 17 | 20 |
| | | 04/26/99 | | | | | | | | | | | | |
| 117 | HDTGW48 | 203960 | pCMVSport 2.0 | 127 | 2261 | 1 | 2261 | | 375 | 3228 | 1 | 17 | 18 | 29 |
| | | 04/26/99 | | | | | | | | | | | | |
| 118 | HDTLM18 | 203960 | pCMVSport 2.0 | 128 | 525 | 1 | 525 | 345 | 345 | 3229 | 1 | 18 | 19 | 60 |
| | | 04/26/99 | | | | | | | | | | | | |
| 119 | HE2CA60 | 203960 | Uni-ZAP XR | 129 | 1663 | 308 | 1663 | 360 | 360 | 3230 | 1 | | | 7 |
| | | 04/26/99 | | | | | | | | | | | | |
| 120 | HE2CA60 | 203960 | Uni-ZAP XR | 130 | 3034 | 1679 | 3034 | 1731 | 1731 | 3231 | 1 | | | 7 |
| | | 04/26/99 | | | | | | | | | | | | |
| 121 | HE2CH58 | 203960 | Uni-ZAP XR | 131 | 809 | 1 | 809 | 321 | 321 | 3232 | 1 | 8 | 9 | 52 |
| | | 04/26/99 | | | | | | | | | | | | |
| 122 | HE2CM39 | 203960 | Uni-ZAP XR | 132 | 566 | 1 | 566 | | 10 | 3233 | 1 | | | 13 |
| | | 04/26/99 | | | | | | | | | | | | |
| 123 | HE2HC60 | 203960 | Uni-ZAP XR | 133 | 1569 | 236 | 1569 | 273 | 273 | 3234 | 1 | 16 | 17 | 39 |
| | | 04/26/99 | | | | | | | | | | | | |
| 124 | HE2PO93 | 203960 | Uni-ZAP XR | 134 | 1323 | 638 | 1323 | 770 | 770 | 3235 | 1 | 27 | 28 | 42 |
| | | 04/26/99 | | | | | | | | | | | | |
| 125 | HE6AU52 | 203960 | Uni-ZAP XR | 135 | 845 | 1 | 845 | 41 | 41 | 3236 | 1 | 18 | 19 | 41 |
| | | 04/26/99 | | | | | | | | | | | | |
| 126 | HE6CS65 | 203960 | Uni-ZAP XR | 136 | 1526 | 1 | 1526 | | 295 | 3237 | 1 | 10 | 11 | 62 |
| | | 04/26/99 | | | | | | | | | | | | |
| 127 | HE6DO92 | 203960 | Uni-ZAP XR | 137 | 941 | 1 | 941 | 38 | 38 | 3238 | 1 | 20 | 21 | 25 |
| | | 04/26/99 | | | | | | | | | | | | |
| 128 | HE6EY13 | 203949 | Uni-ZAP XR | 138 | 867 | 1 | 867 | 171 | 171 | 3239 | 1 | 14 | 15 | 46 |
| | | 04/29/99 | | | | | | | | | | | | |
| 129 | HE6FU11 | 203979 | Uni-ZAP XR | 139 | 2000 | 1 | 1994 | 145 | 145 | 3240 | 1 | 26 | 27 | 226 |
| | | 04/29/99 | | | | | | | | | | | | |
| 130 | HE6FV29 | 203960 | Uni-ZAP XR | 140 | 1526 | 1 | 1526 | 210 | 210 | 3241 | 1 | 18 | 19 | 33 |
| | | 04/26/99 | | | | | | | | | | | | |
| 131 | HE8FC45 | 203979 | Uni-ZAP XR | 141 | 1887 | 1 | 1887 | 155 | 155 | 3242 | 1 | 33 | 34 | 47 |
| | | 04/29/99 | | | | | | | | | | | | |
| 132 | HE8FC45 | 203979 | Uni-ZAP XR | 142 | 1887 | 1 | 1887 | 155 | 155 | 3243 | 1 | 33 | 34 | 47 |
| | | 04/29/99 | | | | | | | | | | | | |
| 133 | HE8FD92 | 203979 | Uni-ZAP XR | 143 | 1995 | 1 | 1978 | 157 | 157 | 3244 | 1 | 25 | 26 | 43 |
| | | 04/29/99 | | | | | | | | | | | | |
| 134 | HE8FD92 | 203979 | Uni-ZAP XR | 144 | 2908 | 918 | 2891 | 1074 | 1074 | 3245 | 1 | 25 | 26 | 43 |
| | | 04/29/99 | | | | | | | | | | | | |
| 135 | HE8FD92 | 203979 | Uni-ZAP XR | 145 | 4907 | 2918 | 4890 | | 2 | 3246 | 1 | 1 | 2 | 471 |
| | | 04/29/99 | | | | | | | | | | | | |
| 136 | HE8FD92 | 203949 | Uni-ZAP XR | 146 | 4102 | 2114 | 4085 | 2268 | 2268 | 3247 | 1 | 25 | 26 | 43 |
| | | 04/29/99 | | | | | | | | | | | | |
| 137 | HE8FD92 | 203949 | Uni-ZAP XR | 147 | 3977 | 1986 | 3960 | 2141 | 2141 | 3248 | 1 | 25 | 26 | 43 |
| | | 04/29/99 | | | | | | | | | | | | |
| 138 | HE8SG96 | PTA-181 | Uni-ZAP XR | 148 | 2036 | 1 | 2036 | 118 | 118 | 3249 | 1 | 17 | 18 | 24 |
| | | 06/07/99 | | | | | | | | | | | | |
| 139 | HE8TY46 | PTA-1838 | Uni-ZAP XR | 149 | 2204 | 1400 | 2204 | 1413 | 1413 | 3250 | 1 | 18 | 19 | 187 |
| | | 05/09/00 | | | | | | | | | | | | |
| 140 | HE9CY05 | 203960 | Uni-ZAP XR | 150 | 1047 | 47 | 1047 | 55 | 55 | 3251 | 1 | 21 | 22 | 235 |
| | | 04/26/99 | | | | | | | | | | | | |
| 141 | HE9EA10 | 203960 | Uni-ZAP XR | 151 | 2114 | 1 | 2111 | | 212 | 3252 | 1 | 28 | 29 | 78 |
| | | 04/26/99 | | | | | | | | | | | | |
| 142 | HE9GG20 | 203960 | Uni-ZAP XR | 152 | 676 | 1 | 676 | 319 | 319 | 3253 | 1 | | | 9 |
| | | 04/26/99 | | | | | | | | | | | | |
| 143 | HEBCI18 | 203960 | Uni-ZAP XR | 153 | 1121 | 713 | 1050 | 855 | 855 | 3254 | 1 | 43 | 44 | 69 |
| | | 04/26/99 | | | | | | | | | | | | |
| 144 | HEBCY54 | 203960 | Uni-ZAP XR | 154 | 1189 | 1 | 1189 | 172 | 172 | 3255 | 1 | 24 | 25 | 118 |
| | | 04/26/99 | | | | | | | | | | | | |
| 145 | HEBDF77 | 203960 | Uni-ZAP XR | 155 | 1820 | 1 | 1820 | 681 | 681 | 3256 | 1 | 29 | 30 | 36 |
| | | 04/26/99 | | | | | | | | | | | | |
| 146 | HEBDQ91 | 203960 | Uni-ZAP XR | 156 | 1573 | 1007 | 1573 | | 1211 | 3257 | 1 | 29 | 30 | 41 |
| | | 04/26/99 | | | | | | | | | | | | |
| 147 | HEBFR46 | 203949 | Uni-ZAP XR | 157 | 1304 | 1 | 1304 | 200 | 200 | 3258 | 1 | 26 | 27 | 29 |
| | | 04/29/99 | | | | | | | | | | | | |
| 148 | HEBGE07 | 203960 | Uni-ZAP XR | 158 | 1867 | 1 | 1867 | 106 | 106 | 3259 | 1 | 25 | 26 | 42 |
| | | 04/26/99 | | | | | | | | | | | | |
| 149 | HEGAU15 | 203960 | Uni-ZAP XR | 159 | 1125 | 1 | 1125 | 59 | 59 | 3260 | 1 | 30 | 31 | 34 |
| | | 04/26/99 | | | | | | | | | | | | |
| 150 | HELAT35 | 203960 | Uni-ZAP XR | 160 | 2168 | 1 | 2168 | 215 | 215 | 3261 | 1 | | | 20 |
| | | 04/26/99 | | | | | | | | | | | | |
| 151 | HELBU54 | 203960 | Uni-ZAP XR | 161 | 1260 | 1 | 1260 | 82 | 82 | 3262 | 1 | | | 17 |
| | | 04/26/99 | | | | | | | | | | | | |
| 152 | HELGG84 | 203960 | Uni-ZAP XR | 162 | 1109 | 12 | 1109 | 147 | 147 | 3263 | 1 | 16 | 17 | 22 |
| | | 04/26/99 | | | | | | | | | | | | |
| 153 | HELGG84 | 203960 | Uni-ZAP XR | 163 | 1109 | 12 | 1109 | 147 | 147 | 3264 | 1 | 16 | 17 | 22 |
| | | 04/26/99 | | | | | | | | | | | | |
| 154 | HEMEY47 | 203979 | Uni-ZAP XR | 164 | 1614 | 204 | 1614 | 440 | 440 | 3265 | 1 | | | 10 |
| | | 04/29/99 | | | | | | | | | | | | |
| 155 | HEOMC46 | PTA-181 | pSport1 | 165 | 939 | 1 | 939 | | 154 | 3266 | 1 | 40 | 41 | 51 |
| | | 06/07/99 | | | | | | | | | | | | |
| 156 | HEPBA14 | PTA-181 | Uni-ZAP XR | 166 | 746 | 1 | 746 | | 664 | 3267 | 1 | 13 | 14 | 15 |
| | | 06/07/99 | | | | | | | | | | | | |
| 157 | HEQAH80 | 203960 | pCMVSport 3.0 | 167 | 1647 | 1 | 1647 | 150 | 150 | 3268 | 1 | 26 | 27 | 32 |
| | | 04/26/99 | | | | | | | | | | | | |
| 158 | HEQBF89 | 203960 | pCMVSport 3.0 | 168 | 859 | 1 | 859 | 306 | 306 | 3269 | 1 | 18 | 19 | 50 |
| | | 04/26/99 | | | | | | | | | | | | |
| 159 | HETCI16 | 203949 | Uni-ZAP XR | 169 | 2285 | 73 | 2285 | 237 | 237 | 3270 | 1 | 27 | 28 | 40 |
| | | 04/29/99 | | | | | | | | | | | | |
| 160 | HETDW58 | 203979 | Uni-ZAP XR | 170 | 1533 | 328 | 1533 | 541 | 541 | 3271 | 1 | 16 | 17 | 22 |
| | | 04/29/99 | | | | | | | | | | | | |
| 161 | HETEY67 | 203960 | Uni-ZAP XR | 171 | 1778 | 1 | 1778 | | 292 | 3272 | 1 | 13 | 14 | 66 |
| | | 04/26/99 | | | | | | | | | | | | |
| 162 | HFCDW95 | 203979 | Uni-ZAP XR | 172 | 871 | 1 | 871 | | 151 | 3273 | 1 | | | 2 |
| | | 04/29/99 | | | | | | | | | | | | |
| 163 | HFCEI04 | 203960 | Uni-ZAP XR | 173 | 887 | 1 | 887 | | 136 | 3274 | 1 | 17 | 18 | 42 |
| | | 04/26/99 | | | | | | | | | | | | |
| 164 | HFCFD04 | 203960 | Uni-ZAP XR | 174 | 1437 | 1 | 1437 | 170 | 170 | 3275 | 1 | | | 15 |
| | | 04/26/99 | | | | | | | | | | | | |
| 165 | HFCFE20 | 203960 | Uni-ZAP XR | 175 | 1205 | 1 | 1205 | 216 | 216 | 3276 | 1 | | | 18 |
| | | 04/26/99 | | | | | | | | | | | | |
| 166 | HFEAY59 | 203960 | Uni-ZAP XR | 176 | 1153 | 1 | 1153 | 154 | 154 | 3277 | 1 | 24 | 25 | 40 |
| | | 04/26/99 | | | | | | | | | | | | |
| 167 | HFGAJ16 | 203960 | Uni-ZAP XR | 177 | 866 | 1 | 866 | 40 | 40 | 3278 | 1 | 22 | 23 | 31 |
| | | 04/26/99 | | | | | | | | | | | | |
| 168 | HFIHZ75 | 203960 | pSport1 | 178 | 1280 | 454 | 1165 | 700 | 700 | 3279 | 1 | 21 | 22 | 51 |
| | | 04/26/99 | | | | | | | | | | | | |
| 169 | HFIJA29 | 203960 | pSport1 | 179 | 1275 | 110 | 1275 | 175 | 175 | 3280 | 1 | 27 | 28 | 82 |
| | | 04/26/99 | | | | | | | | | | | | |
| 170 | HFIJA68 | 203979 | pSport1 | 180 | 1157 | 1 | 1157 | 283 | 283 | 3281 | 1 | 22 | 23 | 43 |
| | | 04/29/99 | | | | | | | | | | | | |
| 171 | HFKES05 | 203960 | Uni-ZAP XR | 181 | 1885 | 1 | 1885 | 243 | 243 | 3282 | 1 | 17 | 18 | 42 |
| | | 04/26/99 | | | | | | | | | | | | |
| 172 | HFKEU12 | 203960 | Uni-ZAP XR | 182 | 1031 | 1 | 1031 | 6 | 6 | 3283 | 1 | 16 | 17 | 55 |
| | | 04/26/99 | | | | | | | | | | | | |
| 173 | HFPCZ55 | 203960 | Uni-ZAP XR | 183 | 2735 | 341 | 2735 | 676 | 676 | 3284 | 1 | 24 | 25 | 44 |
| | | 04/26/99 | | | | | | | | | | | | |
| 174 | HFPDR62 | 203960 | Uni-ZAP XR | 184 | 2644 | 1 | 2644 | 414 | 414 | 3285 | 1 | 28 | 29 | 35 |
| | | 04/26/99 | | | | | | | | | | | | |
| 175 | HFPDS07 | 203960 | Uni-ZAP XR | 185 | 3115 | 2302 | 3114 | 2546 | 2546 | 3286 | 1 | 23 | 24 | 25 |
| | | 04/26/99 | | | | | | | | | | | | |
| 176 | HFRAB10 | 203960 | Uni-ZAP XR | 186 | 1419 | 1 | 1419 | 203 | 203 | 3287 | 1 | 27 | 28 | 45 |
| | | 04/26/99 | | | | | | | | | | | | |
| 177 | HFTBM38 | 203960 | Uni-ZAP XR | 187 | 1941 | 322 | 1941 | 577 | 577 | 3288 | 1 | 18 | 19 | 30 |
| | | 04/26/99 | | | | | | | | | | | | |
| 178 | HFTDH56 | PTA-181 | Uni-ZAP XR | 188 | 820 | 1 | 820 | 67 | 67 | 3289 | 1 | | | 10 |
| | | 06/07/99 | | | | | | | | | | | | |
| 179 | HFVGK35 | 203960 | pBluescript | 189 | 1236 | 1 | 1236 | | 14 | 3290 | 1 | | | 5 |
| | | 04/26/99 | | | | | | | | | | | | |
| 180 | HFVHW43 | 203960 | pBluescript | 190 | 1233 | 1 | 1233 | 92 | 92 | 3291 | 1 | 30 | 31 | 39 |
| | | 04/26/99 | | | | | | | | | | | | |
| 181 | HFXAV37 | 203960 | Lambda ZAP II | 191 | 1520 | 40 | 1520 | | 163 | 3292 | 1 | 13 | 14 | 36 |
| | | 04/26/99 | | | | | | | | | | | | |
| 182 | HFXBN86 | PTA-181 | Lambda ZAP II | 192 | 1379 | 1 | 1379 | 149 | 149 | 3293 | 1 | 25 | 26 | 65 |
| | | 06/07/99 | | | | | | | | | | | | |
| 183 | HFXBT66 | 203960 | Lambda ZAP II | 193 | 1001 | 1 | 1001 | 172 | 172 | 3294 | 1 | 15 | 16 | 26 |
| | | 04/26/99 | | | | | | | | | | | | |
| 184 | HFXFZ46 | 203960 | Lambda ZAP II | 194 | 1378 | 1 | 1378 | 258 | 258 | 3295 | 1 | | | 6 |
| | | 04/26/99 | | | | | | | | | | | | |
| 185 | HGBER72 | 203960 | Uni-ZAP XR | 195 | 1316 | 1 | 1316 | 43 | 43 | 3296 | 1 | 16 | 17 | 19 |
| | | 04/26/99 | | | | | | | | | | | | |
| 186 | HGBEY14 | 203960 | Uni-ZAP XR | 196 | 1738 | 1 | 1738 | 233 | 233 | 3297 | 1 | 18 | 19 | 39 |
| | | 04/26/99 | | | | | | | | | | | | |
| 187 | HGBGN34 | 203960 | Uni-ZAP XR | 197 | 528 | 1 | 528 | | 280 | 3298 | 1 | 32 | 33 | 48 |
| | | 04/26/99 | | | | | | | | | | | | |
| 188 | HGBHP91 | 203960 | Uni-ZAP XR | 198 | 1054 | 1 | 1054 | | 50 | 3299 | 1 | 14 | 15 | 52 |
| | | 04/26/99 | | | | | | | | | | | | |
| 189 | HGCAC19 | 203960 | pSport1 | 199 | 5061 | 23 | 1475 | | 317 | 3300 | 1 | | | 9 |
| | | 04/26/99 | | | | | | | | | | | | |
| 190 | HGCAC19 | 203960 | pSport1 | 200 | 1534 | 23 | 1534 | | 317 | 3301 | 1 | | | 9 |
| | | 04/26/99 | | | | | | | | | | | | |
| 191 | HGCAC19 | 203960 | pSport1 | 201 | 1771 | 21 | 1473 | | 315 | 3302 | 1 | | | 9 |
| | | 04/26/99 | | | | | | | | | | | | |
| 192 | HHEAK45 | 203960 | pCMVSport 3.0 | 202 | 2014 | 87 | 1935 | | 813 | 3303 | 1 | | | 3 |
| | | 04/26/99 | | | | | | | | | | | | |
| 193 | HHEGS55 | PTA-181 | pCMVSport 3.0 | 203 | 594 | 2 | 594 | 159 | 159 | 3304 | 1 | 16 | 17 | 36 |
| | | 06/07/99 | | | | | | | | | | | | |
| 194 | HHEOW19 | PTA-793 | pCMVSport 3.0 | 204 | 1589 | 1 | 1589 | 183 | 183 | 3305 | 1 | 18 | 19 | 64 |
| | | 09/27/99 | | | | | | | | | | | | |
| 195 | HHFFF87 | 203960 | Uni-ZAP XR | 205 | 1547 | 1 | 1547 | 229 | 229 | 3306 | 1 | | | 41 |
| | | 04/26/99 | | | | | | | | | | | | |
| 196 | HHFFL34 | 203960 | Uni-ZAP XR | 206 | 2632 | 1 | 2632 | 42 | 42 | 3307 | 1 | 21 | 22 | 223 |
| | | 04/26/99 | | | | | | | | | | | | |
| 197 | HHFFS40 | 203960 | Uni-ZAP XR | 207 | 1816 | 1 | 1816 | 37 | 37 | 3308 | 1 | 18 | 19 | 47 |
| | | 04/26/99 | | | | | | | | | | | | |
| 198 | HHGCS78 | 203960 | Lambda ZAP II | 208 | 575 | 46 | 575 | 290 | 290 | 3309 | 1 | 17 | 18 | 24 |
| | | 04/26/99 | | | | | | | | | | | | |
| 199 | HHGDT26 | 203960 | Lambda ZAP II | 209 | 1584 | 1 | 1584 | 181 | 181 | 3310 | 1 | | | 8 |
| | | 04/26/99 | | | | | | | | | | | | |
| 200 | HHPFU28 | 203960 | Uni-ZAP XR | 210 | 1838 | 1 | 1838 | | 156 | 3311 | 1 | 18 | 19 | 27 |
| | | 04/26/99 | | | | | | | | | | | | |
| 201 | HHPSA85 | 203960 | pBluescript | 211 | 1147 | 1 | 1147 | 157 | 157 | 3312 | 1 | 28 | 29 | 38 |
| | | 04/26/99 | | | | | | | | | | | | |
| 202 | HHSBI06 | 203959 | Uni-ZAP XR | 212 | 1049 | 27 | 803 | | 690 | 3313 | 1 | | | 5 |
| | | 04/26/99 | | | | | | | | | | | | |
| 203 | HHSBI65 | 203917 | Uni-ZAP XR | 213 | 1444 | 1 | 1431 | 62 | 62 | 3314 | 1 | 17 | 18 | 55 |
| | | 04/08/99 | | | | | | | | | | | | |
| 204 | HHSDI53 | PTA-181 | Uni-ZAP XR | 214 | 1277 | 1 | 1277 | 221 | 221 | 3315 | 1 | 14 | 15 | 24 |
| | | 06/07/99 | | | | | | | | | | | | |
| 205 | HHSFC09 | 203960 | Uni-ZAP XR | 215 | 531 | 1 | 531 | | 380 | 3316 | 1 | 10 | 11 | 32 |
| | | 04/26/99 | | | | | | | | | | | | |
| 206 | HHSGL28 | 203960 | Uni-ZAP XR | 216 | 1093 | 1 | 1093 | 453 | 453 | 3317 | 1 | | | 6 |
| | | 04/26/99 | | | | | | | | | | | | |
| 207 | HILCA24 | 203960 | pBluescript | 217 | 1980 | 151 | 1976 | 189 | 189 | 3318 | 1 | 29 | 30 | 327 |
| | | 04/26/99 | SK- | | | | | | | | | | | |
| 208 | HILCA24 | 203960 | pBluescript | 218 | 1982 | 153 | 1982 | 191 | 191 | 3319 | 1 | 29 | 30 | 327 |
| | | 04/26/99 | SK- | | | | | | | | | | | |
| 209 | HISAT67 | 203959 | pSport1 | 219 | 2154 | 1061 | 2142 | 1239 | 1239 | 3320 | 1 | 35 | 36 | 56 |
| | | 04/26/99 | | | | | | | | | | | | |
| 210 | HJBCU75 | 203957 | pBluescript | 220 | 1009 | 1 | 1009 | 61 | 61 | 3321 | 1 | | | 5 |
| | | 04/26/99 | SK- | | | | | | | | | | | |
| 211 | HJMAA03 | 203957 | pCMVSport 3.0 | 221 | 665 | 1 | 665 | | 527 | 3322 | 1 | | | 9 |
| | | 04/26/99 | | | | | | | | | | | | |
| 212 | HJMAV41 | PTA-181 | pCMVSport 3.0 | 222 | 1017 | 1 | 1017 | 207 | 207 | 3323 | 1 | | | 27 |
| | | 06/07/99 | | | | | | | | | | | | |
| 213 | HJMAY90 | 203959 | pCMVSport 3.0 | 223 | 2886 | 2233 | 2886 | | 2492 | 3324 | 1 | 22 | 23 | 34 |
| | | 04/26/99 | | | | | | | | | | | | |
| 214 | HJPBE39 | 203957 | Uni-ZAP XR | 224 | 1298 | 69 | 1298 | | 170 | 3325 | 1 | | | 18 |
| | | 04/26/99 | | | | | | | | | | | | |
| 215 | HJPBK28 | 203957 | Uni-ZAP XR | 225 | 989 | 1 | 989 | | 256 | 3326 | 1 | 21 | 22 | 43 |
| | | 04/26/99 | | | | | | | | | | | | |
| 216 | HJPCH08 | 203959 | Uni-ZAP XR | 226 | 879 | 1 | 879 | | 374 | 3327 | 1 | 10 | 11 | 117 |
| | | 04/26/99 | | | | | | | | | | | | |
| 217 | HKABU43 | 203959 | pCMVSport 2.0 | 227 | 1919 | 581 | 1919 | 755 | 755 | 3328 | 1 | 20 | 21 | 281 |
| | | 04/26/99 | | | | | | | | | | | | |
| 218 | HKACI79 | PTA-181 | pCMVSport 2.0 | 228 | 1181 | 1 | 1181 | 207 | 207 | 3329 | 1 | 14 | 15 | 50 |
| | | 06/07/99 | | | | | | | | | | | | |
| 219 | HKAFF50 | 203957 | pCMVSport 2.0 | 229 | 1801 | 1 | 1801 | 343 | 343 | 3330 | 1 | 13 | 14 | 50 |
| | | 04/26/99 | | | | | | | | | | | | |
| 220 | HKGBF25 | 203957 | pSport1 | 230 | 2007 | 1 | 2007 | 261 | 261 | 3331 | 1 | 18 | 19 | 36 |
| | | 04/26/99 | | | | | | | | | | | | |
| 221 | HKIXC44 | 203957 | pBluescript | 231 | 788 | 343 | 750 | 572 | 572 | 3332 | 1 | 26 | 27 | 36 |
| | | 04/26/99 | | | | | | | | | | | | |
| 222 | HKMLK03 | 203957 | pBluescript | 232 | 1049 | 1 | 1049 | 214 | 214 | 3333 | 1 | | | 11 |
| | | 04/26/99 | | | | | | | | | | | | |
| 223 | HKMLM95 | 203957 | pBluescript | 233 | 1098 | 1 | 1098 | | 390 | 3334 | 1 | | | 4 |
| | | 04/26/99 | | | | | | | | | | | | |
| 224 | HKTAB41 | 203957 | Uni-ZAP XR | 234 | 797 | 1 | 797 | 172 | 172 | 3335 | 1 | | | 10 |
| | | 04/26/99 | | | | | | | | | | | | |
| 225 | HLDBG17 | PTA-181 | pCMVSport 3.0 | 235 | 652 | 1 | 652 | 184 | 184 | 3336 | 1 | 23 | 24 | 41 |
| | | 06/07/99 | | | | | | | | | | | | |
| 226 | HLDCA54 | 203949 | pCMVSport 3.0 | 236 | 1815 | 425 | 1815 | 550 | 550 | 3337 | 1 | 26 | 27 | 46 |
| | | 04/29/99 | | | | | | | | | | | | |
| 227 | HLDQU79 | 203959 | pCMVSport 3.0 | 237 | 1488 | 1 | 1488 | 99 | 99 | 3338 | 1 | 23 | 24 | 348 |
| | | 04/26/99 | | | | | | | | | | | | |
| 227 | HLDQU79 | 203959 | pCMVSport 3.0 | 3099 | 3179 | 163 | 1474 | 75 | 75 | 6200 | 1 | 29 | 30 | 348 |
| | | 04/26/99 | | | | | | | | | | | | |
| 228 | HLDRT09 | 203957 | pCMVSport 3.0 | 238 | 721 | 254 | 665 | 522 | 522 | 3339 | 1 | 20 | 21 | 66 |
| | | 04/26/99 | | | | | | | | | | | | |
| 229 | HLHAP05 | 203957 | Uni-ZAP XR | 239 | 1842 | 12 | 1842 | 45 | 45 | 3340 | 1 | | | 14 |
| | | 04/26/99 | | | | | | | | | | | | |
| 230 | HLHCS23 | 203957 | Uni-ZAP XR | 240 | 1427 | 1 | 1427 | 25 | 25 | 3341 | 1 | 24 | 25 | 34 |
| | | 04/26/99 | | | | | | | | | | | | |
| 231 | HLIBO72 | PTA-792 | pCMVSport 1 | 241 | 1768 | 1 | 1768 | 167 | 167 | 3342 | 1 | 46 | 47 | 127 |
| | | 09/27/99 | | | | | | | | | | | | |
| 232 | HLICE88 | 203957 | pCMVSport 1 | 242 | 840 | 401 | 824 | | 708 | 3343 | 1 | | | 2 |
| | | 04/26/99 | | | | | | | | | | | | |
| 233 | HLICO10 | 203957 | pCMVSport 1 | 243 | 903 | 1 | 903 | 441 | 441 | 3344 | 1 | 23 | 24 | 72 |
| | | 04/26/99 | | | | | | | | | | | | |
| 234 | HLJBS28 | 203957 | pCMVSport 1 | 244 | 976 | 1 | 976 | 359 | 359 | 3345 | 1 | | | 17 |
| | | 04/26/99 | | | | | | | | | | | | |
| 235 | HLMBW89 | 203957 | Lambda ZAP II | 245 | 622 | 1 | 622 | 47 | 47 | 3346 | 1 | 19 | 20 | 21 |
| | | 04/26/99 | | | | | | | | | | | | |
| 236 | HLMGP50 | 203957 | Lambda ZAP II | 246 | 1063 | 1 | 1063 | 214 | 214 | 3347 | 1 | | | 10 |
| | | 04/26/99 | | | | | | | | | | | | |
| 237 | HLMJB64 | 203957 | Lambda ZAP II | 247 | 804 | 1 | 804 | 12 | 12 | 3348 | 1 | 29 | 30 | 49 |
| | | 04/26/99 | | | | | | | | | | | | |
| 238 | HLMMX62 | 203957 | Lambda ZAP II | 248 | 268 | 1 | 268 | 185 | 185 | 3349 | 1 | 17 | 18 | 28 |
| | | 04/26/99 | | | | | | | | | | | | |
| 239 | HLQAS12 | PTA-793 | Lambda ZAP II | 249 | 2450 | 1 | 2450 | 305 | 305 | 3350 | 1 | 11 | 12 | 12 |
| | | 09/27/99 | | | | | | | | | | | | |
| 240 | HLQCL64 | PTA-181 | Lambda ZAP II | 250 | 2385 | 1652 | 2385 | | 3 | 3351 | 1 | 1 | 2 | 182 |
| | | 06/07/99 | | | | | | | | | | | | |
| 241 | HLQCX36 | 203957 | Lambda ZAP II | 251 | 1243 | 1 | 1243 | 89 | 89 | 3352 | 1 | 16 | 17 | 52 |
| | | 04/26/99 | | | | | | | | | | | | |
| 242 | HLWAF06 | 203957 | pCMVSport 3.0 | 252 | 2564 | 1 | 2564 | 192 | 192 | 3353 | 1 | 18 | 19 | 30 |
| | | 04/26/99 | | | | | | | | | | | | |
| 243 | HLWAU42 | 203957 | pCMVSport 3.0 | 253 | 2495 | 1542 | 2488 | 1751 | 1751 | 3354 | 1 | 17 | 18 | 57 |
| | | 04/26/99 | | | | | | | | | | | | |
| 244 | HLWAU42 | 203957 | pCMVSport 3.0 | 254 | 947 | 1 | 947 | 220 | 220 | 3355 | 1 | 17 | 18 | 57 |
| | | 04/26/99 | | | | | | | | | | | | |
| 245 | HLWAV47 | PTA-795 | pCMVSport 3.0 | 255 | 2062 | 1 | 2062 | 200 | 200 | 3356 | 1 | 29 | 30 | 32 |
| | | 09/27/99 | | | | | | | | | | | | |
| 246 | HLWBB73 | 203957 | pCMVSport 3.0 | 256 | 1716 | 1 | 1716 | 122 | 122 | 3357 | 1 | 32 | 33 | 50 |
| | | 04/26/99 | | | | | | | | | | | | |
| 247 | HLWCN37 | 203957 | pCMVSport 3.0 | 257 | 788 | 1 | 788 | 81 | 81 | 3358 | 1 | 40 | 41 | 43 |
| | | 04/26/99 | | | | | | | | | | | | |
| 248 | HLWDB73 | 203957 | pCMVSport 3.0 | 258 | 1611 | 1 | 1611 | 95 | 95 | 3359 | 1 | 27 | 28 | 35 |
| | | 04/26/99 | | | | | | | | | | | | |
| 249 | HLYDF73 | 203957 | pSport1 | 259 | 626 | 1 | 626 | | 363 | 3360 | 1 | 11 | 12 | 23 |
| | | 04/26/99 | | | | | | | | | | | | |
| 250 | HLYEU59 | 203957 | pSport1 | 260 | 1146 | 1 | 1146 | 258 | 258 | 3361 | 1 | 24 | 25 | 43 |
| | | 04/26/99 | | | | | | | | | | | | |
| 251 | HLYGB19 | 203959 | pSport1 | 261 | 2967 | 1527 | 2966 | 1863 | 1863 | 3362 | 1 | | | 14 |
| | | 04/26/99 | | | | | | | | | | | | |
| 252 | HLYGE16 | 203957 | pSport1 | 262 | 752 | 1 | 752 | 406 | 406 | 3363 | 1 | 17 | 18 | 73 |
| | | 04/26/99 | | | | | | | | | | | | |
| 253 | HLYGY91 | 203957 | pSport1 | 263 | 640 | 1 | 640 | 211 | 211 | 3364 | 1 | 20 | 21 | 42 |
| | | 04/26/99 | | | | | | | | | | | | |
| 254 | HMCAZ04 | 203917 | Uni-ZAP XR | 264 | 1733 | 405 | 1670 | 106 | 106 | 3365 | 1 | 25 | 26 | 450 |
| | | 04/08/99 | | | | | | | | | | | | |
| 255 | HMCAZ04 | 203917 | Uni-ZAP XR | 265 | 1733 | 405 | 1670 | 497 | 497 | 3366 | 1 | 20 | 21 | 35 |
| | | 04/08/99 | | | | | | | | | | | | |
| 256 | HMCAZ04 | 203917 | Uni-ZAP XR | 266 | 1733 | 406 | 1670 | 106 | 106 | 3367 | 1 | 25 | 26 | 450 |
| | | 04/08/99 | | | | | | | | | | | | |
| 257 | HMCAZ04 | 203917 | Uni-ZAP XR | 267 | 1735 | 407 | 1671 | 498 | 498 | 3368 | 1 | 20 | 21 | 35 |
| | | 04/08/99 | | | | | | | | | | | | |
| 258 | HMCAZ04 | 203917 | Uni-ZAP XR | 268 | 1301 | 1 | 1301 | 97 | 97 | 3369 | 1 | 20 | 21 | 35 |
| | | 04/08/99 | | | | | | | | | | | | |
| 259 | HMCFH60 | 203957 | Uni-ZAP XR | 269 | 443 | 1 | 443 | 211 | 211 | 3370 | 1 | 17 | 18 | 48 |
| | | 04/26/99 | | | | | | | | | | | | |
| 260 | HMDAB29 | 203957 | Uni-ZAP XR | 270 | 1190 | 1 | 1190 | 97 | 97 | 3371 | 1 | 17 | 18 | 26 |
| | | 04/26/99 | | | | | | | | | | | | |
| 261 | HMDAD44 | 203957 | Uni-ZAP XR | 271 | 1204 | 1 | 1204 | 135 | 135 | 3372 | 1 | | | 8 |
| | | 04/26/99 | | | | | | | | | | | | |
| 262 | HMEBB82 | 203957 | Lambda ZAP II | 272 | 2641 | 1 | 2641 | 30 | 30 | 3373 | 1 | 19 | 20 | 34 |
| | | 04/26/99 | | | | | | | | | | | | |
| 263 | HMEDE24 | 203957 | Lambda ZAP II | 273 | 2836 | 884 | 2806 | 900 | 900 | 3374 | 1 | 16 | 17 | 33 |
| | | 04/26/99 | | | | | | | | | | | | |
| 264 | HMEDI90 | 203957 | Lambda ZAP II | 274 | 2276 | 362 | 2219 | | 622 | 3375 | 1 | 12 | 13 | 17 |
| | | 04/26/99 | | | | | | | | | | | | |
| 265 | HMELM75 | 203957 | Lambda ZAP II | 275 | 1607 | 1 | 1607 | 113 | 113 | 3376 | 1 | 18 | 19 | 93 |
| | | 04/26/99 | | | | | | | | | | | | |
| 266 | HMIAK10 | 203957 | Uni-ZAP XR | 276 | 1064 | 1 | 1064 | 195 | 195 | 3377 | 1 | 22 | 23 | 31 |
| | | 04/26/99 | | | | | | | | | | | | |
| 267 | HMIBF07 | 203957 | Uni-ZAP XR | 277 | 1738 | 1 | 1738 | 229 | 229 | 3378 | 1 | | | 6 |
| | | 04/26/99 | | | | | | | | | | | | |
| 268 | HMICI80 | 203957 | Uni-ZAP XR | 278 | 1772 | 1 | 1772 | | 1149 | 3379 | 1 | 10 | 11 | 32 |
| | | 04/26/99 | | | | | | | | | | | | |
| 269 | HMICP65 | 203979 | Uni-ZAP XR | 279 | 2048 | 1 | 2048 | 249 | 249 | 3380 | 1 | 16 | 17 | 30 |
| | | 04/29/99 | | | | | | | | | | | | |
| 270 | HMJAK70 | 203957 | pSport1 | 280 | 799 | 1 | 799 | 273 | 273 | 3381 | 1 | | | 10 |
| | | 04/26/99 | | | | | | | | | | | | |
| 271 | HMSBE04 | 203957 | Uni-ZAP XR | 281 | 1396 | 1 | 1396 | 295 | 295 | 3382 | 1 | | | 27 |
| | | 04/26/99 | | | | | | | | | | | | |
| 272 | HMSCL38 | 203957 | Uni-ZAP XR | 282 | 2945 | 1 | 2945 | 120 | 120 | 3383 | 1 | 25 | 26 | 35 |
| | | 04/26/99 | | | | | | | | | | | | |
| 273 | HMSCR69 | 203959 | Uni-ZAP XR | 283 | 1667 | 442 | 1667 | 107 | 107 | 3384 | 1 | 1 | 2 | 381 |
| | | 04/26/99 | | | | | | | | | | | | |
| 274 | HMSHC86 | 203957 | Uni-ZAP XR | 284 | 1724 | 1 | 1724 | 37 | 37 | 3385 | 1 | 20 | 21 | 93 |
| | | 04/26/99 | | | | | | | | | | | | |
| 275 | HMSHU20 | 203979 | Uni-ZAP XR | 285 | 2249 | 1 | 2249 | 50 | 50 | 3386 | 1 | 24 | 25 | 113 |
| | | 04/29/99 | | | | | | | | | | | | |
| 276 | HMSHY25 | PTA-793 | Uni-ZAP XR | 286 | 2205 | 1 | 2205 | | 656 | 3387 | 1 | 11 | 12 | 35 |
| | | 09/27/99 | | | | | | | | | | | | |
| 277 | HMTAB77 | 203949 | pCMVSport 3.0 | 287 | 3839 | 1 | 3839 | 769 | 769 | 3388 | 1 | 24 | 25 | 48 |
| | | 04/29/99 | | | | | | | | | | | | |
| 278 | HMUAE26 | 203957 | pCMVSport 3.0 | 288 | 2000 | 660 | 2000 | 710 | 710 | 3389 | 1 | 20 | 21 | 30 |
| | | 04/26/99 | | | | | | | | | | | | |
| 279 | HMUAN45 | 203918 | pCMVSport 3.0 | 289 | 2709 | 1 | 2709 | 239 | 239 | 3390 | 1 | 25 | 26 | 227 |
| | | 04/08/99 | | | | | | | | | | | | |
| 280 | HMVBC31 | 203957 | pSport1 | 290 | 2556 | 1327 | 2546 | 1437 | 1437 | 3391 | 1 | 32 | 33 | 40 |
| | | 04/26/99 | | | | | | | | | | | | |
| 281 | HMVDU15 | 203979 | pSport1 | 291 | 1351 | 1 | 1351 | 274 | 274 | 3392 | 1 | 21 | 22 | 25 |
| | | 04/29/99 | | | | | | | | | | | | |
| 282 | HMWBL03 | 203957 | Uni-ZAP XR | 292 | 2596 | 80 | 2596 | 137 | 137 | 3393 | 1 | 1 | 2 | 397 |
| | | 04/26/99 | | | | | | | | | | | | |
| 283 | HMWJF53 | 203957 | Uni-ZAP XR | 293 | 2288 | 927 | 2101 | 1015 | 1015 | 3394 | 1 | 30 | 31 | 38 |
| | | 04/26/99 | | | | | | | | | | | | |
| 284 | HNEAK81 | 203957 | Uni-ZAP XR | 294 | 1224 | 1 | 1224 | 288 | 288 | 3395 | 1 | 21 | 22 | 23 |
| | | 04/26/99 | | | | | | | | | | | | |
| 285 | HNECL22 | 203957 | Uni-ZAP XR | 295 | 2710 | 225 | 2710 | 472 | 472 | 3396 | 1 | 23 | 24 | 34 |
| | | 04/26/99 | | | | | | | | | | | | |
| 286 | HNECW49 | 203957 | Uni-ZAP XR | 296 | 489 | 1 | 463 | 316 | 316 | 3397 | 1 | 20 | 21 | 58 |
| | | 04/26/99 | | | | | | | | | | | | |
| 287 | HNEDH88 | 203957 | Uni-ZAP XR | 297 | 2073 | 1 | 2073 | 70 | 70 | 3398 | 1 | 19 | 20 | 33 |
| | | 04/26/99 | | | | | | | | | | | | |
| 288 | HNFAC50 | 203957 | Uni-ZAP XR | 298 | 1442 | 428 | 1442 | 676 | 676 | 3399 | 1 | 22 | 23 | 32 |
| | | 04/26/99 | | | | | | | | | | | | |
| 289 | HNFGR08 | 203957 | Uni-ZAP XR | 299 | 1436 | 1 | 1436 | | 314 | 3400 | 1 | 17 | 18 | 43 |
| | | 04/26/99 | | | | | | | | | | | | |
| 290 | HNFHF34 | 203957 | Uni-ZAP XR | 300 | 728 | 1 | 728 | 178 | 178 | 3401 | 1 | 20 | 21 | 30 |
| | | 04/26/99 | | | | | | | | | | | | |
| 291 | HNGAK51 | 203957 | Uni-ZAP XR | 301 | 915 | 1 | 915 | 248 | 248 | 3402 | 1 | 23 | 24 | 32 |
| | | 04/26/99 | | | | | | | | | | | | |
| 292 | HNGAM58 | 203957 | Uni-ZAP XR | 302 | 1156 | 1 | 1156 | | 68 | 3403 | 1 | 27 | 28 | 114 |
| | | 04/26/99 | | | | | | | | | | | | |
| 293 | HNGBH53 | 203957 | Uni-ZAP XR | 303 | 636 | 1 | 636 | | 47 | 3404 | 1 | 17 | 18 | 46 |
| | | 04/26/99 | | | | | | | | | | | | |
| 294 | HNGDQ38 | 203957 | Uni-ZAP XR | 304 | 1045 | 1 | 1045 | | 205 | 3405 | 1 | 22 | 23 | 59 |
| | | 04/26/99 | | | | | | | | | | | | |
| 295 | HNGDX18 | PTA-181 | Uni-ZAP XR | 305 | 1425 | 1 | 1425 | 237 | 237 | 3406 | 1 | 30 | 31 | 243 |
| | | 06/07/99 | | | | | | | | | | | | |
| 295 | HNGDX18 | PTA-181 | Uni-ZAP XR | 3100 | 1411 | 1 | 1411 | 231 | 231 | 6201 | 1 | 18 | 19 | 132 |
| | | 06/07/99 | | | | | | | | | | | | |
| 296 | HNGDY34 | 203957 | Uni-ZAP XR | 306 | 1002 | 1 | 1002 | | 73 | 3407 | 1 | | | 17 |
| | | 04/26/99 | | | | | | | | | | | | |
| 297 | HNGEA34 | 203957 | Uni-ZAP XR | 307 | 1103 | 1 | 1103 | | 58 | 3408 | 1 | 24 | 25 | 44 |
| | | 04/26/99 | | | | | | | | | | | | |
| 298 | HNGEQ75 | 203957 | Uni-ZAP XR | 308 | 1029 | 1 | 1029 | | 30 | 3409 | 1 | 21 | 22 | 22 |
| | | 04/26/99 | | | | | | | | | | | | |
| 299 | HNGGA68 | 203957 | Uni-ZAP XR | 309 | 585 | 1 | 585 | 184 | 184 | 3410 | 1 | | | 32 |
| | | 04/26/99 | | | | | | | | | | | | |
| 300 | HNGGP65 | 203957 | Uni-ZAP XR | 310 | 541 | 1 | 541 | 181 | 181 | 3411 | 1 | 15 | 16 | 68 |
| | | 04/26/99 | | | | | | | | | | | | |
| 301 | HNGHZ69 | PTA-795 | Uni-ZAP XR | 311 | 1195 | 1 | 1195 | | 25 | 3412 | 1 | | | 9 |
| | | 09/27/99 | | | | | | | | | | | | |
| 302 | HNGIV64 | 203957 | Uni-ZAP XR | 312 | 1047 | 1 | 1047 | | 221 | 3413 | 1 | | | 8 |
| | | 04/26/99 | | | | | | | | | | | | |
| 303 | HNGJB41 | PTA-181 | Uni-ZAP XR | 313 | 1246 | 1 | 1246 | 252 | 252 | 3414 | 1 | 46 | 47 | 73 |
| | | 06/07/99 | | | | | | | | | | | | |
| 304 | HNGKT41 | 203959 | Uni-ZAP XR | 314 | 1048 | 1 | 1048 | 415 | 415 | 3415 | 1 | 17 | 18 | 45 |
| | | 04/26/99 | | | | | | | | | | | | |
| 305 | HNGMW45 | 203959 | Uni-ZAP XR | 315 | 1530 | 1 | 1530 | 452 | 452 | 3416 | 1 | 26 | 27 | 43 |
| | | 04/26/99 | | | | | | | | | | | | |
| 306 | HNGNK44 | 203959 | Uni-ZAP XR | 316 | 1178 | 302 | 1178 | 611 | 611 | 3417 | 1 | 18 | 19 | 74 |
| | | 04/26/99 | | | | | | | | | | | | |
| 307 | HNGNO53 | 203959 | Uni-ZAP XR | 317 | 825 | 1 | 825 | 467 | 467 | 3418 | 1 | 15 | 16 | 34 |
| | | 04/26/99 | | | | | | | | | | | | |
| 308 | HNGPJ25 | 203959 | Uni-ZAP XR | 318 | 853 | 129 | 853 | 544 | 544 | 3419 | 1 | 20 | 21 | 25 |
| | | 04/26/99 | | | | | | | | | | | | |
| 309 | HNHEN82 | 203918 | Uni-ZAP XR | 319 | 573 | 1 | 573 | | 78 | 3420 | 1 | 13 | 14 | 17 |
| | | 04/08/99 | | | | | | | | | | | | |
| 310 | HNHFE71 | 203959 | Uni-ZAP XR | 320 | 903 | 1 | 903 | 598 | 598 | 3421 | 1 | | | 21 |
| | | 04/26/99 | | | | | | | | | | | | |
| 311 | HNHGK22 | 203918 | Uni-ZAP XR | 321 | 909 | 1 | 909 | 239 | 239 | 3422 | 1 | 26 | 27 | 64 |
| | | 04/08/99 | | | | | | | | | | | | |
| 312 | HNHHB10 | 203959 | Uni-ZAP XR | 322 | 901 | 1 | 901 | 215 | 215 | 3423 | 1 | 28 | 29 | 59 |
| | | 04/26/99 | | | | | | | | | | | | |
| 313 | HNHKS19 | 203959 | Uni-ZAP XR | 323 | 790 | 1 | 790 | 192 | 192 | 3424 | 1 | 26 | 27 | 41 |
| | | 04/26/99 | | | | | | | | | | | | |
| 314 | HNTBT17 | PTA-181 | pCMVSport 3.0 | 324 | 1959 | 1 | 1959 | 91 | 91 | 3425 | 1 | | | 6 |
| | | 06/07/99 | | | | | | | | | | | | |
| 315 | HNTMH79 | 203959 | pSport1 | 325 | 922 | 1 | 922 | 48 | 48 | 3426 | 1 | 35 | 36 | 38 |
| | | 04/26/99 | | | | | | | | | | | | |
| 316 | HOABP31 | 203959 | Uni-ZAP XR | 326 | 927 | 1 | 890 | | 148 | 3427 | 1 | 19 | 20 | 123 |
| | | 04/26/99 | | | | | | | | | | | | |
| 317 | HOABP31 | 203959 | Uni-ZAP XR | 327 | 929 | 1 | 892 | | 148 | 3428 | 1 | 19 | 20 | 124 |
| | | 04/26/99 | | | | | | | | | | | | |
| 318 | HOACG07 | 203959 | Uni-ZAP XR | 328 | 1298 | 772 | 1249 | 778 | 778 | 3429 | 1 | 21 | 22 | 123 |
| | | 04/26/99 | | | | | | | | | | | | |
| 319 | HODAG07 | 203918 | Uni-ZAP XR | 329 | 900 | 1 | 900 | 43 | 43 | 3430 | 1 | 35 | 36 | 43 |
| | | 04/08/99 | | | | | | | | | | | | |
| 320 | HODBB70 | 203918 | Uni-ZAP XR | 330 | 604 | 1 | 604 | | 173 | 3431 | 1 | 7 | 8 | 27 |
| | | 04/08/99 | | | | | | | | | | | | |
| 321 | HODBV05 | 203917 | Uni-ZAP XR | 331 | 1119 | 1 | 1117 | 101 | 101 | 3432 | 1 | 17 | 18 | 33 |
| | | 04/08/99 | | | | | | | | | | | | |
| 322 | HODCZ32 | 203959 | Uni-ZAP XR | 332 | 927 | 1 | 927 | | 248 | 3433 | 1 | | | 10 |
| | | 04/26/99 | | | | | | | | | | | | |
| 323 | HOEBK60 | 203959 | Uni-ZAP XR | 333 | 2218 | 1449 | 2216 | 1714 | 1714 | 3434 | 1 | 39 | 40 | 43 |
| | | 04/26/99 | | | | | | | | | | | | |
| 324 | HOFAA78 | 203959 | pSport1 | 334 | 1356 | 1 | 1356 | | 48 | 3435 | 1 | 25 | 26 | 71 |
| | | 04/26/99 | | | | | | | | | | | | |
| 325 | HOFNB74 | 203959 | pCMVSport 2.0 | 335 | 1036 | 1 | 1036 | 138 | 138 | 3436 | 1 | 24 | 25 | 39 |
| | | 04/26/99 | | | | | | | | | | | | |
| 326 | HOFNU55 | PTA-795 | pCMVSport 2.0 | 336 | 1365 | 1 | 1349 | 230 | 230 | 3437 | 1 | 28 | 29 | 51 |
| | | 09/27/99 | | | | | | | | | | | | |
| 327 | HOGBF01 | 203918 | pCMVSport 2.0 | 337 | 1478 | 1 | 1478 | 309 | 309 | 3438 | 1 | 10 | 11 | 20 |
| | | 04/08/99 | | | | | | | | | | | | |
| 328 | HORBS82 | 203959 | Uni-ZAP XR | 338 | 1125 | 1 | 1125 | | 21 | 3439 | 1 | 19 | 20 | 39 |
| | | 04/26/99 | | | | | | | | | | | | |
| 329 | HORBV76 | 203959 | Uni-ZAP XR | 339 | 1157 | 1 | 1157 | 183 | 183 | 3440 | 1 | 25 | 26 | 198 |
| | | 04/26/99 | | | | | | | | | | | | |
| 330 | HOSDO75 | PTA-181 | Uni-ZAP XR | 340 | 902 | 1 | 902 | 88 | 88 | 3441 | 1 | | | 28 |
| | | 06/07/99 | | | | | | | | | | | | |
| 331 | HOSEC25 | 203959 | Uni-ZAP XR | 341 | 1552 | 1 | 1552 | 17 | 17 | 3442 | 1 | 18 | 19 | 24 |
| | | 04/26/99 | | | | | | | | | | | | |
| 332 | HOSEI81 | 203918 | Uni-ZAP XR | 342 | 897 | 1 | 897 | 203 | 203 | 3443 | 1 | 22 | 23 | 83 |
| | | 04/08/99 | | | | | | | | | | | | |
| 333 | HOSEJ94 | 203979 | Uni-ZAP XR | 343 | 1767 | 622 | 1750 | 848 | 848 | 3444 | 1 | 21 | 22 | 28 |
| | | 04/29/99 | | | | | | | | | | | | |
| 334 | HOUCA21 | 203918 | Uni-ZAP XR | 344 | 1129 | 1 | 1129 | 200 | 200 | 3445 | 1 | 27 | 28 | 33 |
| | | 04/08/99 | | | | | | | | | | | | |
| 335 | HOUDE92 | 203918 | Uni-ZAP XR | 345 | 1284 | 1 | 1282 | | 70 | 3446 | 1 | 6 | 7 | 88 |
| | | 04/08/99 | | | | | | | | | | | | |
| 336 | HOUDR07 | 203959 | Uni-ZAP XR | 346 | 1911 | 1 | 1911 | 170 | 170 | 3447 | 1 | 27 | 28 | 65 |
| | | 04/26/99 | | | | | | | | | | | | |
| 337 | HOUED72 | PTA-181 | Uni-ZAP XR | 347 | 833 | 76 | 799 | | 144 | 3448 | 1 | | | 11 |
| | | 06/07/99 | | | | | | | | | | | | |
| 338 | HOUFS04 | 203959 | Uni-ZAP XR | 348 | 2927 | 457 | 2882 | 520 | 520 | 3449 | 1 | 42 | 43 | 72 |
| | | 04/26/99 | | | | | | | | | | | | |
| 339 | HOUHI25 | PTA-793 | Uni-ZAP XR | 349 | 1249 | 45 | 1102 | 188 | 188 | 3450 | 1 | | | 20 |
| | | 09/27/99 | | | | | | | | | | | | |
| 340 | HOVBD85 | 203918 | pSport1 | 350 | 1129 | 1 | 1129 | 252 | 252 | 3451 | 1 | 19 | 20 | 26 |
| | | 04/08/99 | | | | | | | | | | | | |
| 341 | HPCAB41 | 203918 | Uni-ZAP XR | 351 | 2587 | 1 | 2587 | 184 | 184 | 3452 | 1 | | | 25 |
| | | 04/08/99 | | | | | | | | | | | | |
| 342 | HPCAL26 | 203917 | Uni-ZAP XR | 352 | 3097 | 803 | 3097 | 1021 | 1021 | 3453 | 1 | 23 | 24 | 30 |
| | | 04/08/99 | | | | | | | | | | | | |
| 343 | HPEAD23 | 203959 | Uni-ZAP XR | 353 | 582 | 1 | 582 | 188 | 188 | 3454 | 1 | 13 | 14 | 93 |
| | | 04/26/99 | | | | | | | | | | | | |
| 344 | HPFBA54 | 203959 | Uni-ZAP XR | 354 | 835 | 1 | 835 | 258 | 258 | 3455 | 1 | 39 | 40 | 45 |
| | | 04/26/99 | | | | | | | | | | | | |
| 345 | HPFCI36 | PTA-181 | Uni-ZAP XR | 355 | 879 | 1 | 879 | 94 | 94 | 3456 | 1 | 17 | 18 | 19 |
| | | 06/07/99 | | | | | | | | | | | | |
| 346 | HPFDI37 | PTA-181 | Uni-ZAP XR | 356 | 352 | 1 | 352 | 38 | 38 | 3457 | 1 | | | 17 |
| | | 06/07/99 | | | | | | | | | | | | |
| 347 | HPIAA80 | 203959 | Uni-ZAP XR | 357 | 919 | 312 | 919 | | 314 | 3458 | 1 | 13 | 14 | 37 |
| | | 04/26/99 | | | | | | | | | | | | |
| 348 | HPJBJ51 | 203959 | Uni-ZAP XR | 358 | 2793 | 522 | 2421 | 715 | 715 | 3459 | 1 | 14 | 15 | 69 |
| | | 04/26/99 | | | | | | | | | | | | |
| 349 | HPJBJ51 | 203959 | Uni-ZAP XR | 359 | 2795 | 523 | 2422 | 716 | 716 | 3460 | 1 | 14 | 15 | 69 |
| | | 04/26/99 | | | | | | | | | | | | |
| 350 | HPJBU43 | PTA-181 | Uni-ZAP XR | 360 | 575 | 1 | 575 | | 242 | 3461 | 1 | | | 17 |
| | | 06/07/99 | | | | | | | | | | | | |
| 351 | HPJCW58 | 203918 | Uni-ZAP XR | 361 | 1165 | 1 | 1165 | 177 | 177 | 3462 | 1 | 19 | 20 | 28 |
| | | 04/08/99 | | | | | | | | | | | | |
| 352 | HPMBX22 | 203959 | Uni-ZAP XR | 362 | 454 | 1 | 454 | | 211 | 3463 | 1 | | | 19 |
| | | 04/26/99 | | | | | | | | | | | | |
| 353 | HPMCJ84 | 203918 | Uni-ZAP XR | 363 | 788 | 1 | 788 | 83 | 83 | 3464 | 1 | 22 | 23 | 38 |
| | | 04/08/99 | | | | | | | | | | | | |
| 354 | HPMCV30 | 203918 | Uni-ZAP XR | 364 | 908 | 1 | 908 | 52 | 52 | 3465 | 1 | 27 | 28 | 47 |
| | | 04/08/99 | | | | | | | | | | | | |
| 355 | HPMFH77 | 203918 | Uni-ZAP XR | 365 | 1891 | 1 | 1891 | | 251 | 3466 | 1 | 11 | 12 | 35 |
| | | 04/08/99 | | | | | | | | | | | | |
| 356 | HPQAX38 | 203949 | Lambda ZAP II | 366 | 1157 | 41 | 1157 | | 295 | 3467 | 1 | 10 | 11 | 16 |
| | | 04/29/99 | | | | | | | | | | | | |
| 357 | HPQAX38 | 203949 | Lambda ZAP II | 367 | 1158 | 41 | 1158 | | 295 | 3468 | 1 | 10 | 11 | 16 |
| | | 04/29/99 | | | | | | | | | | | | |
| 358 | HPQCB83 | 203918 | Lambda ZAP II | 368 | 2267 | 1 | 2267 | 85 | 85 | 3469 | 1 | 30 | 31 | 34 |
| | | 04/08/99 | | | | | | | | | | | | |
| 359 | HPQCC53 | 203918 | Lambda ZAP II | 369 | 434 | 1 | 434 | 16 | 16 | 3470 | 1 | 33 | 34 | 35 |
| | | 04/08/99 | | | | | | | | | | | | |
| 360 | HPRBH85 | 203959 | Uni-ZAP XR | 370 | 1673 | 558 | 1648 | 684 | 684 | 3471 | 1 | 18 | 19 | 134 |
| | | 04/26/99 | | | | | | | | | | | | |
| 361 | HPRCA64 | 203959 | Uni-ZAP XR | 371 | 2805 | 1701 | 2757 | 1810 | 1810 | 3472 | 1 | 22 | 23 | 39 |
| | | 04/26/99 | | | | | | | | | | | | |
| 362 | HPRCD35 | PTA-181 | Uni-ZAP XR | 372 | 709 | 1 | 689 | | 265 | 3473 | 1 | 16 | 17 | 35 |
| | | 06/07/99 | | | | | | | | | | | | |
| 363 | HPTRM02 | 203959 | pBluescript | 373 | 1760 | 658 | 1680 | 885 | 885 | 3474 | 1 | 16 | 17 | 80 |
| | | 04/26/99 | | | | | | | | | | | | |
| 364 | HPWBA29 | 203918 | Uni-ZAP XR | 374 | 325 | 1 | 325 | 194 | 194 | 3475 | 1 | | | 13 |
| | | 04/08/99 | | | | | | | | | | | | |
| 365 | HPWDK06 | 203959 | Uni-ZAP XR | 375 | 878 | 240 | 854 | 405 | 405 | 3476 | 1 | | | 26 |
| | | 04/26/99 | | | | | | | | | | | | |
| 366 | HRAAD30 | PTA-181 | pCMVSport 3.0 | 376 | 1496 | 1 | 1496 | | 220 | 3477 | 1 | 19 | 20 | 25 |
| | | 06/07/99 | | | | | | | | | | | | |
| 367 | HRADA42 | 203959 | pCMVSport 3.0 | 377 | 1135 | 1 | 1135 | | 122 | 3478 | 1 | 24 | 25 | 44 |
| | | 04/26/99 | | | | | | | | | | | | |
| 368 | HRADF49 | PTA-181 | pCMVSport 3.0 | 378 | 2704 | 1 | 2684 | 169 | 169 | 3479 | 1 | 39 | 40 | 253 |
| | | 06/07/99 | | | | | | | | | | | | |
| 369 | HRADN25 | 203959 | pCMVSport 3.0 | 379 | 1225 | 17 | 1206 | 198 | 198 | 3480 | 1 | 17 | 18 | 65 |
| | | 04/26/99 | | | | | | | | | | | | |
| 370 | HRADT25 | 203959 | pCMVSport 3.0 | 380 | 1324 | 1 | 1324 | 233 | 233 | 3481 | 1 | 28 | 29 | 63 |
| | | 04/26/99 | | | | | | | | | | | | |
| 371 | HRDAI17 | 203918 | Uni-ZAP XR | 381 | 1500 | 547 | 1500 | 578 | 578 | 3482 | 1 | 27 | 28 | 31 |
| | | 04/08/99 | | | | | | | | | | | | |
| 372 | HRDDQ39 | 203959 | Uni-ZAP XR | 382 | 776 | 1 | 773 | | 215 | 3483 | 1 | 17 | 18 | 46 |
| | | 04/26/99 | | | | | | | | | | | | |
| 373 | HRDER22 | 203959 | Uni-ZAP XR | 383 | 543 | 1 | 543 | | 32 | 3484 | 1 | | | 9 |
| | | 04/26/99 | | | | | | | | | | | | |
| 374 | HRDEX93 | 203959 | Uni-ZAP XR | 384 | 1681 | 711 | 1638 | 649 | 649 | 3485 | 1 | 20 | 21 | 72 |
| | | 04/26/99 | | | | | | | | | | | | |
| 375 | HRDFK37 | 203959 | Uni-ZAP XR | 385 | 728 | 1 | 726 | 120 | 120 | 3486 | 1 | | | 10 |
| | | 04/26/99 | | | | | | | | | | | | |
| 376 | HRGBD54 | 203959 | Uni-ZAP XR | 386 | 2301 | 1687 | 2271 | | 1958 | 3487 | 1 | | | 10 |
| | | 04/26/99 | | | | | | | | | | | | |
| 377 | HROEA08 | PTA-181 | Uni-ZAP XR | 387 | 281 | 1 | 281 | 50 | 50 | 3488 | 1 | 25 | 26 | 33 |
| | | 06/07/99 | | | | | | | | | | | | |
| 378 | HSAVA08 | 203918 | Uni-ZAP XR | 388 | 1061 | 1 | 1061 | | 66 | 3489 | 1 | 17 | 18 | 26 |
| | | 04/08/99 | | | | | | | | | | | | |
| 379 | HSAVW42 | 203959 | Uni-ZAP XR | 389 | 595 | 1 | 595 | 129 | 129 | 3490 | 1 | 16 | 17 | 22 |
| | | 04/26/99 | | | | | | | | | | | | |
| 380 | HSAWN53 | 203959 | Uni-ZAP XR | 390 | 349 | 1 | 349 | | 159 | 3491 | 1 | 29 | 30 | 63 |
| | | 04/26/99 | | | | | | | | | | | | |
| 381 | HSAWZ40 | 203959 | Uni-ZAP XR | 391 | 1019 | 1 | 1019 | 124 | 124 | 3492 | 1 | | | 37 |
| | | 04/26/99 | | | | | | | | | | | | |
| 382 | HSAYC41 | 203959 | Uni-ZAP XR | 392 | 214 | 1 | 214 | 106 | 106 | 3493 | 1 | 16 | 17 | 36 |
| | | 04/26/99 | | | | | | | | | | | | |
| 383 | HSDZM54 | 203959 | pBluescript | 393 | 554 | 1 | 554 | 445 | 445 | 3494 | 1 | 15 | 16 | 36 |
| | | 04/26/99 | | | | | | | | | | | | |
| 384 | HSHBF76 | 203959 | Uni-ZAP XR | 394 | 1273 | 1 | 1213 | | 129 | 3495 | 1 | 7 | 8 | 10 |
| | | 04/26/99 | | | | | | | | | | | | |
| 385 | HSIFG47 | 203959 | Uni-ZAP XR | 395 | 882 | 1 | 882 | 304 | 304 | 3496 | 1 | | | 13 |
| | | 04/26/99 | | | | | | | | | | | | |
| 386 | HSJBY32 | 203918 | Uni-ZAP XR | 396 | 1648 | 1 | 1648 | 257 | 257 | 3497 | 1 | 19 | 20 | 91 |
| | | 04/08/99 | | | | | | | | | | | | |
| 387 | HSKDR27 | 203918 | Uni-ZAP XR | 397 | 762 | 1 | 762 | | 473 | 3498 | 1 | 11 | 12 | 27 |
| | | 04/08/99 | | | | | | | | | | | | |
| 388 | HSLHG78 | 203979 | Uni-ZAP XR | 398 | 1474 | 452 | 1474 | 647 | 647 | 3499 | 1 | 20 | 21 | 70 |
| | | 04/29/99 | | | | | | | | | | | | |
| 389 | HSLHX15 | 203959 | Uni-ZAP XR | 399 | 655 | 1 | 655 | 485 | 485 | 3500 | 1 | 20 | 21 | 41 |
| | | 04/26/99 | | | | | | | | | | | | |
| 390 | HSNAP85 | 203959 | Uni-ZAP XR | 400 | 1286 | 735 | 1286 | | 941 | 3501 | 1 | | | 4 |
| | | 04/26/99 | | | | | | | | | | | | |
| 391 | HSNAZ09 | 203918 | Uni-ZAP XR | 401 | 626 | 1 | 626 | | 164 | 3502 | 1 | | | 14 |
| | | 04/08/99 | | | | | | | | | | | | |
| 392 | HSNBM34 | 203959 | Uni-ZAP XR | 402 | 2186 | 1391 | 1765 | | 1508 | 3503 | 1 | 14 | 15 | 62 |
| | | 04/26/99 | | | | | | | | | | | | |
| 393 | HSOAH16 | 203959 | Uni-ZAP XR | 403 | 721 | 1 | 721 | | 206 | 3504 | 1 | 11 | 12 | 42 |
| | | 04/26/99 | | | | | | | | | | | | |
| 394 | HSQBF66 | 203918 | Uni-ZAP XR | 404 | 1024 | 1 | 1024 | | 229 | 3505 | 1 | 28 | 29 | 66 |
| | | 04/08/99 | | | | | | | | | | | | |
| 395 | HSQDO85 | PTA-181 | Uni-ZAP XR | 405 | 1210 | 1 | 1210 | 133 | 133 | 3506 | 1 | | | 11 |
| | | 06/07/99 | | | | | | | | | | | | |
| 396 | HSQES57 | 203959 | Uni-ZAP XR | 406 | 1445 | 1012 | 1428 | 195 | 195 | 3507 | 1 | 14 | 15 | 265 |
| | | 04/26/99 | | | | | | | | | | | | |
| 397 | HSRBE06 | PTA-791 | Uni-ZAP XR | 407 | 1633 | 13 | 1633 | | 128 | 3508 | 1 | | | 21 |
| | | 09/27/99 | | | | | | | | | | | | |
| 398 | HSSDI26 | 203918 | Uni-ZAP XR | 408 | 1406 | 1 | 1406 | 253 | 253 | 3509 | 1 | | | 21 |
| | | 04/08/99 | | | | | | | | | | | | |
| 399 | HSSEA64 | PTA-181 | Uni-ZAP XR | 409 | 1282 | 1 | 1274 | 58 | 58 | 3510 | 1 | 16 | 17 | 62 |
| | | 06/07/99 | | | | | | | | | | | | |
| 400 | HSSEF77 | 203959 | Uni-ZAP XR | 410 | 1053 | 1 | 1053 | | 184 | 3511 | 1 | 25 | 26 | 60 |
| | | 04/26/99 | | | | | | | | | | | | |
| 401 | HSSFE38 | 203959 | Uni-ZAP XR | 411 | 1238 | 85 | 1133 | | 264 | 3512 | 1 | 19 | 20 | 125 |
| | | 04/26/99 | | | | | | | | | | | | |
| 402 | HSSGJ58 | 203918 | Uni-ZAP XR | 412 | 1954 | 1 | 1954 | 245 | 245 | 3513 | 1 | 17 | 18 | 38 |
| | | 04/08/99 | | | | | | | | | | | | |
| 403 | HSWBE76 | 203959 | pCMVSport 3.0 | 413 | 874 | 250 | 710 | 380 | 380 | 3514 | 1 | 34 | 35 | 59 |
| | | 04/26/99 | | | | | | | | | | | | |
| 404 | HSXCP38 | PTA-795 | Uni-ZAP XR | 414 | 2206 | 1 | 2206 | | 211 | 3515 | 1 | | | 14 |
| | | 09/27/99 | | | | | | | | | | | | |
| 405 | HSYBI06 | 203918 | pCMVSport 3.0 | 415 | 956 | 1 | 956 | 232 | 232 | 3516 | 1 | 21 | 22 | 33 |
| | | 04/08/99 | | | | | | | | | | | | |
| 406 | HTISC27 | 203959 | Uni-ZAP XR | 416 | 1198 | 1 | 1198 | 366 | 366 | 3517 | 1 | 19 | 20 | 27 |
| | | 04/26/99 | | | | | | | | | | | | |
| 407 | HT3BF49 | 203959 | Uni-ZAP XR | 417 | 2174 | 1 | 2174 | | 306 | 3518 | 1 | | | 4 |
| | | 04/26/99 | | | | | | | | | | | | |
| 408 | HT4FV41 | PTA-181 | Uni-ZAP XR | 418 | 1764 | 1 | 1764 | | 39 | 3519 | 1 | 16 | 17 | 137 |
| | | 06/07/99 | | | | | | | | | | | | |
| 409 | HT5FX79 | 203959 | Uni-ZAP XR | 419 | 682 | 59 | 682 | | 228 | 3520 | 1 | 17 | 18 | 50 |
| | | 04/26/99 | | | | | | | | | | | | |
| 410 | HT5GR59 | 203959 | Uni-ZAP XR | 420 | 1743 | 1 | 1743 | 135 | 135 | 3521 | 1 | 23 | 24 | 31 |
| | | 04/26/99 | | | | | | | | | | | | |
| 411 | HTAEI78 | 203918 | Uni-ZAP XR | 421 | 1623 | 1 | 1623 | 632 | 632 | 3522 | 1 | | | 4 |
| | | 04/08/99 | | | | | | | | | | | | |
| 412 | HTDAA78 | 203918 | pSport1 | 422 | 825 | 1 | 825 | 151 | 151 | 3523 | 1 | | | 20 |
| | | 04/08/99 | | | | | | | | | | | | |
| 413 | HTEAG62 | 203959 | Uni-ZAP XR | 423 | 2221 | 57 | 2221 | 1017 | 1017 | 3524 | 1 | 20 | 21 | 22 |
| | | 04/26/99 | | | | | | | | | | | | |
| 414 | HTECB02 | 203959 | Uni-ZAP XR | 424 | 1662 | 106 | 1662 | 196 | 196 | 3525 | 1 | 22 | 23 | 56 |
| | | 04/26/99 | | | | | | | | | | | | |
| 415 | HTECC15 | PTA-181 | Uni-ZAP XR | 425 | 2055 | 1 | 2055 | 211 | 211 | 3526 | 1 | 19 | 20 | 23 |
| | | 06/07/99 | | | | | | | | | | | | |
| 416 | HTEDF18 | 203959 | Uni-ZAP XR | 426 | 829 | 1 | 829 | 325 | 325 | 3527 | 1 | | | 5 |
| | | 04/26/99 | | | | | | | | | | | | |
| 417 | HTEDJ28 | 203959 | Uni-ZAP XR | 427 | 1247 | 1 | 1247 | | 287 | 3528 | 1 | 18 | 19 | 45 |
| | | 04/26/99 | | | | | | | | | | | | |
| 418 | HTEDS12 | 203918 | Uni-ZAP XR | 428 | 1587 | 1 | 1587 | 260 | 260 | 3529 | 1 | 24 | 25 | 36 |
| | | 04/08/99 | | | | | | | | | | | | |
| 419 | HTEED26 | 203959 | Uni-ZAP XR | 429 | 2179 | 1 | 2179 | 261 | 261 | 3530 | 1 | 19 | 20 | 32 |
| | | 04/26/99 | | | | | | | | | | | | |
| 420 | HTEED26 | 203959 | Uni-ZAP XR | 430 | 2167 | 1 | 2159 | 259 | 259 | 3531 | 1 | 19 | 20 | 32 |
| | | 04/26/99 | | | | | | | | | | | | |
| 421 | HTEEF26 | 203959 | Uni-ZAP XR | 431 | 1015 | 45 | 984 | 262 | 262 | 3532 | 1 | | | 7 |
| | | 04/26/99 | | | | | | | | | | | | |
| 422 | HTEEF26 | 203959 | Uni-ZAP XR | 432 | 1273 | 45 | 984 | 262 | 262 | 3533 | 1 | | | 7 |
| | | 04/26/99 | | | | | | | | | | | | |
| 423 | HTEEW69 | 203959 | Uni-ZAP XR | 433 | 1282 | 110 | 1263 | 182 | 182 | 3534 | 1 | 30 | 31 | 323 |
| | | 04/26/99 | | | | | | | | | | | | |
| 424 | HTEGS07 | 203959 | Uni-ZAP XR | 434 | 806 | 1 | 806 | | 493 | 3535 | 1 | 20 | 21 | 37 |
| | | 04/26/99 | | | | | | | | | | | | |
| 425 | HTEGS11 | PTA-181 | Uni-ZAP XR | 435 | 981 | 1 | 981 | | 173 | 3536 | 1 | | | 7 |
| | | 06/07/99 | | | | | | | | | | | | |
| 426 | HTEHA56 | 203959 | Uni-ZAP XR | 436 | 1402 | 529 | 1400 | | 280 | 3537 | 1 | 5 | 6 | 88 |
| | | 04/26/99 | | | | | | | | | | | | |
| 427 | HTEHU59 | 203959 | Uni-ZAP XR | 437 | 1523 | 1 | 1504 | 170 | 170 | 3538 | 1 | 19 | 20 | 34 |
| | | 04/26/99 | | | | | | | | | | | | |
| 428 | HTEJD29 | 203959 | Uni-ZAP XR | 438 | 1324 | 1 | 1324 | 101 | 101 | 3539 | 1 | | | 23 |
| | | 04/26/99 | | | | | | | | | | | | |
| 429 | HTEKM46 | PTA-181 | Uni-ZAP XR | 439 | 2116 | 1 | 2116 | 171 | 171 | 3540 | 1 | 24 | 25 | 38 |
| | | 06/07/99 | | | | | | | | | | | | |
| 430 | HTEMQ17 | 203959 | Uni-ZAP XR | 440 | 1768 | 1 | 1768 | 446 | 446 | 3541 | 1 | | | 12 |
| | | 04/26/99 | | | | | | | | | | | | |
| 431 | HTENR63 | PTA-792 | Uni-ZAP XR | 441 | 1591 | 1 | 1591 | 132 | 132 | 3542 | 1 | 20 | 21 | 56 |
| | | 09/27/99 | | | | | | | | | | | | |
| 432 | HTGGM44 | 203959 | Uni-ZAP XR | 442 | 3016 | 1 | 2761 | 179 | 179 | 3543 | 1 | 18 | 19 | 84 |
| | | 04/26/99 | | | | | | | | | | | | |
| 433 | HTHBZ06 | 203959 | Uni-ZAP XR | 443 | 623 | 193 | 619 | 318 | 318 | 3544 | 1 | | | 1 |
| | | 04/26/99 | | | | | | | | | | | | |
| 434 | HTLAP64 | 203918 | Uni-ZAP XR | 444 | 1092 | 1 | 1092 | 173 | 173 | 3545 | 1 | 19 | 20 | 20 |
| | | 04/08/99 | | | | | | | | | | | | |
| 435 | HTLBT80 | 203959 | Uni-ZAP XR | 445 | 2101 | 817 | 1881 | 912 | 912 | 3546 | 1 | 27 | 28 | 129 |
| | | 04/26/99 | | | | | | | | | | | | |
| 436 | HTLDA84 | 203918 | Uni-ZAP XR | 446 | 1444 | 1 | 1444 | | 225 | 3547 | 1 | | | 13 |
| | | 04/08/99 | | | | | | | | | | | | |
| 437 | HTLDN29 | 203959 | Uni-ZAP XR | 447 | 1374 | 1 | 1348 | 175 | 175 | 3548 | 1 | 23 | 24 | 33 |
| | | 04/26/99 | | | | | | | | | | | | |
| 438 | HTLDU78 | 203918 | Uni-ZAP XR | 448 | 1318 | 1 | 1318 | 219 | 219 | 3549 | 1 | | | 8 |
| | | 04/08/99 | | | | | | | | | | | | |
| 439 | HTLEC82 | 203959 | Uni-ZAP XR | 449 | 1260 | 217 | 1119 | 530 | 530 | 3550 | 1 | 34 | 35 | 36 |
| | | 04/26/99 | | | | | | | | | | | | |
| 440 | HTLEM16 | 203959 | Uni-ZAP XR | 450 | 1915 | 1158 | 1755 | 1220 | 1220 | 3551 | 1 | 27 | 28 | 69 |
| | | 04/26/99 | | | | | | | | | | | | |
| 441 | HTLEV48 | 203918 | Uni-ZAP XR | 451 | 1070 | 1 | 1070 | 205 | 205 | 3552 | 1 | 30 | 31 | 207 |
| | | 04/08/99 | | | | | | | | | | | | |
| 441 | HTLEV48 | 203918 | Uni-ZAP XR | 3101 | 1065 | 1 | 1065 | 91 | 91 | 6202 | 1 | | | 9 |
| | | 04/08/99 | | | | | | | | | | | | |
| 442 | HTLFA13 | 203918 | Uni-ZAP XR | 452 | 1160 | 1 | 1160 | | 209 | 3553 | 1 | 8 | 9 | 31 |
| | | 04/08/99 | | | | | | | | | | | | |
| 443 | HTLFI73 | 203949 | Uni-ZAP XR | 453 | 1159 | 1 | 1159 | 340 | 340 | 3554 | 1 | | | 23 |
| | | 04/29/99 | | | | | | | | | | | | |
| 444 | HTLGI89 | 203959 | Uni-ZAP XR | 454 | 2377 | 1205 | 2377 | 1802 | 1802 | 3555 | 1 | 16 | 17 | 37 |
| | | 04/26/99 | | | | | | | | | | | | |
| 445 | HILIF11 | 203959 | Uni-ZAP XR | 455 | 1968 | 860 | 1968 | 933 | 933 | 3556 | 1 | 33 | 34 | 38 |
| | | 04/26/99 | | | | | | | | | | | | |
| 446 | HTLIF12 | 203959 | Uni-ZAP XR | 456 | 1100 | 140 | 1100 | 642 | 642 | 3557 | 1 | 19 | 20 | 75 |
| | | 04/26/99 | | | | | | | | | | | | |
| 447 | HTLIF12 | 203959 | Uni-ZAP XR | 457 | 1081 | 142 | 1033 | 644 | 644 | 3558 | 1 | 19 | 20 | 75 |
| | | 04/26/99 | | | | | | | | | | | | |
| 448 | HTLIF12 | 203959 | Uni-ZAP XR | 458 | 1044 | 142 | 1033 | 644 | 644 | 3559 | 1 | 19 | 20 | 75 |
| | | 04/26/99 | | | | | | | | | | | | |
| 449 | HTLIF12 | 203959 | Uni-ZAP XR | 459 | 1081 | 142 | 1033 | 644 | 644 | 3560 | 1 | 19 | 20 | 75 |
| | | 04/26/99 | | | | | | | | | | | | |
| 450 | HTLIF12 | 203959 | Uni-ZAP XR | 460 | 1081 | 142 | 1033 | 644 | 644 | 3561 | 1 | 19 | 20 | 75 |
| | | 04/26/99 | | | | | | | | | | | | |
| 451 | HTLIF12 | 203959 | Uni-ZAP XR | 461 | 1081 | 142 | 1033 | 644 | 644 | 3562 | 1 | 19 | 20 | 75 |
| | | 04/26/99 | | | | | | | | | | | | |
| 452 | HTNAM63 | 203918 | pBluescript | 462 | 1006 | 1 | 1006 | | 193 | 3563 | 1 | 15 | 16 | 30 |
| | | 04/08/99 | SK- | | | | | | | | | | | |
| 453 | HTNBK13 | 203959 | pBluescript | 463 | 1160 | 295 | 1148 | 534 | 534 | 3564 | 1 | 16 | 17 | 21 |
| | | 04/26/99 | SK- | | | | | | | | | | | |
| 454 | HTOAI50 | 203959 | Uni-ZAP XR | 464 | 1258 | 1 | 1258 | 61 | 61 | 3565 | 1 | 17 | 18 | 27 |
| | | 04/26/99 | | | | | | | | | | | | |
| 455 | HTOAM11 | 203918 | Uni-ZAP XR | 465 | 1200 | 1 | 1200 | 89 | 89 | 3566 | 1 | 24 | 25 | 34 |
| | | 04/08/99 | | | | | | | | | | | | |
| 456 | HTODH57 | 203918 | Uni-ZAP XR | 466 | 1652 | 1 | 1652 | | 228 | 3567 | 1 | 18 | 19 | 71 |
| | | 04/08/99 | | | | | | | | | | | | |
| 457 | HTODH83 | 203918 | Uni-ZAP XR | 467 | 1981 | 1 | 1981 | 103 | 103 | 3568 | 1 | 21 | 22 | 32 |
| | | 04/08/99 | | | | | | | | | | | | |
| 458 | HTOEV16 | PTA-181 | Uni-ZAP XR | 468 | 1640 | 1 | 1640 | 201 | 201 | 3569 | 1 | 39 | 40 | 118 |
| | | 06/07/99 | | | | | | | | | | | | |
| 459 | HTOGR38 | 203959 | Uni-ZAP XR | 469 | 776 | 138 | 776 | | 314 | 3570 | 1 | 23 | 24 | 42 |
| | | 04/26/99 | | | | | | | | | | | | |
| 460 | HTOHO21 | 203918 | Uni-ZAP XR | 470 | 727 | 1 | 727 | | 439 | 3571 | 1 | 5 | 6 | 63 |
| | | 04/08/99 | | | | | | | | | | | | |
| 461 | HTOHQ05 | PTA-181 | Uni-ZAP XR | 471 | 1860 | 1 | 1860 | 198 | 198 | 3572 | 1 | 19 | 20 | 54 |
| | | 06/07/99 | | | | | | | | | | | | |
| 462 | HTOJL95 | 203959 | Uni-ZAP XR | 472 | 1854 | 1 | 1818 | 134 | 134 | 3573 | 1 | 26 | 27 | 58 |
| | | 04/26/99 | | | | | | | | | | | | |
| 463 | HTOJL95 | 203959 | Uni-ZAP XR | 473 | 1947 | 1 | 1947 | 221 | 221 | 3574 | 1 | 26 | 27 | 58 |
| | | 04/26/99 | | | | | | | | | | | | |
| 464 | HTPDU17 | 203959 | Uni-ZAP XR | 474 | 2078 | 1 | 2078 | | 52 | 3575 | 1 | 17 | 18 | 33 |
| | | 04/26/99 | | | | | | | | | | | | |
| 465 | HTSFJ32 | 203918 | pBluescript | 475 | 1257 | 517 | 1257 | 93 | 93 | 3576 | 1 | | | 18 |
| | | 04/08/99 | | | | | | | | | | | | |
| 466 | HTTCB60 | PTA-181 | Uni-ZAP XR | 476 | 1504 | 1 | 1504 | 84 | 84 | 3577 | 1 | 17 | 18 | 266 |
| | | 06/07/99 | | | | | | | | | | | | |
| 467 | HTTEE41 | 203959 | Uni-ZAP XR | 477 | 1973 | 864 | 1968 | | 1171 | 3578 | 1 | | | 8 |
| | | 04/26/99 | | | | | | | | | | | | |
| 468 | HTTEZ02 | 203918 | Uni-ZAP XR | 478 | 1880 | 1 | 1880 | 250 | 250 | 3579 | 1 | 21 | 22 | 28 |
| | | 04/08/99 | | | | | | | | | | | | |
| 469 | HTWEH94 | 203918 | pSport1 | 479 | 1361 | 1 | 1361 | 66 | 66 | 3580 | 1 | 43 | 44 | 81 |
| | | 04/08/99 | | | | | | | | | | | | |
| 470 | HTXBD09 | 203959 | Uni-ZAP XR | 480 | 1921 | 22 | 1900 | | 350 | 3581 | 1 | | | 12 |
| | | 04/26/99 | | | | | | | | | | | | |
| 471 | HTXDB22 | PTA-181 | Uni-ZAP XR | 481 | 1211 | 1 | 1135 | | 229 | 3582 | 1 | 10 | 11 | 22 |
| | | 06/07/99 | | | | | | | | | | | | |
| 472 | HTXDC38 | 203959 | Uni-ZAP XR | 482 | 820 | 106 | 806 | 359 | 359 | 3583 | 1 | | | 18 |
| | | 04/26/99 | | | | | | | | | | | | |
| 473 | HTXDC77 | 203949 | Uni-ZAP XR | 483 | 1441 | 159 | 1400 | 65 | 65 | 3584 | 1 | 18 | 19 | 151 |
| | | 04/29/99 | | | | | | | | | | | | |
| 474 | HTXDD61 | PTA-181 | Uni-ZAP XR | 484 | 1140 | 1 | 1140 | | 49 | 3585 | 1 | 17 | 18 | 132 |
| | | 06/07/99 | | | | | | | | | | | | |
| 475 | HTXDG92 | 203959 | Uni-ZAP XR | 485 | 1162 | 1 | 1162 | | 216 | 3586 | 1 | 24 | 25 | 66 |
| | | 04/26/99 | | | | | | | | | | | | |
| 476 | HTXET11 | 203918 | Uni-ZAP XR | 486 | 989 | 1 | 989 | 178 | 178 | 3587 | 1 | 22 | 23 | 29 |
| | | 04/08/99 | | | | | | | | | | | | |
| 477 | HTXFA72 | PTA-181 | Uni-ZAP XR | 487 | 1861 | 1 | 1861 | 192 | 192 | 3588 | 1 | 17 | 18 | 29 |
| | | 06/07/99 | | | | | | | | | | | | |
| 478 | HTXJY08 | 203959 | Uni-ZAP XR | 488 | 1187 | 12 | 1187 | 108 | 108 | 3589 | 1 | | | 16 |
| | | 04/26/99 | | | | | | | | | | | | |
| 479 | HTXKF95 | 203959 | Uni-ZAP XR | 489 | 884 | 79 | 875 | 330 | 330 | 3590 | 1 | 28 | 29 | 78 |
| | | 04/26/99 | | | | | | | | | | | | |
| 480 | HTXMZ07 | 203959 | Uni-ZAP XR | 490 | 1652 | 189 | 1640 | 319 | 319 | 3591 | 1 | 22 | 23 | 37 |
| | | 04/26/99 | | | | | | | | | | | | |
| 481 | HUFCL31 | 203959 | pSport1 | 491 | 1460 | 1 | 1460 | | 287 | 3592 | 1 | | | 26 |
| | | 04/26/99 | | | | | | | | | | | | |
| 482 | HUKBT67 | 203959 | Lambda ZAP II | 492 | 2069 | 74 | 2052 | | 273 | 3593 | 1 | 21 | 22 | 39 |
| | | 04/26/99 | | | | | | | | | | | | |
| 483 | HUKDF20 | 203918 | Lambda ZAP II | 493 | 1105 | 1 | 1105 | 214 | 214 | 3594 | 1 | 20 | 21 | 33 |
| | | 04/08/99 | | | | | | | | | | | | |
| 484 | HUKDY82 | 203918 | Lambda ZAP II | 494 | 1435 | 1 | 1435 | 187 | 187 | 3595 | 1 | 17 | 18 | 32 |
| | | 04/08/99 | | | | | | | | | | | | |
| 485 | HUSCJ14 | PTA-1838 | Lambda ZAP II | 495 | 3342 | 1 | 3342 | 74 | 74 | 3596 | 1 | 30 | 31 | 196 |
| | | 05/09/00 | | | | | | | | | | | | |
| 486 | HUSGL67 | 203918 | pSport1 | 496 | 1008 | 65 | 1008 | 350 | 350 | 3597 | 1 | 21 | 22 | 47 |
| | | 04/08/99 | | | | | | | | | | | | |
| 487 | HUSGU40 | 203959 | pSport1 | 497 | 1054 | 1 | 1054 | | 500 | 3598 | 1 | 20 | 21 | 46 |
| | | 04/26/99 | | | | | | | | | | | | |
| 488 | HUSIR18 | 203959 | pSport1 | 498 | 876 | 1 | 876 | 83 | 83 | 3599 | 1 | 16 | 17 | 22 |
| | | 04/26/99 | | | | | | | | | | | | |
| 489 | HUVDJ48 | 203918 | Uni-ZAP XR | 499 | 1827 | 1 | 1827 | 196 | 196 | 3600 | 1 | | | 5 |
| | | 04/08/99 | | | | | | | | | | | | |
| 490 | HWAAI12 | 203959 | pCMVSport 3.0 | 500 | 3303 | 1 | 1838 | 223 | 223 | 3601 | 1 | | | 29 |
| | | 04/26/99 | | | | | | | | | | | | |
| 491 | HWBBQ70 | 203959 | pCMVSport 3.0 | 501 | 1948 | 1 | 1948 | 222 | 222 | 3602 | 1 | 21 | 22 | 43 |
| | | 04/26/99 | | | | | | | | | | | | |
| 492 | HWBCN36 | 203959 | pCMVSport 3.0 | 502 | 1008 | 1 | 1008 | 378 | 378 | 3603 | 1 | 23 | 24 | 90 |
| | | 04/26/99 | | | | | | | | | | | | |
| 493 | HWBDJ08 | 203959 | pCMVSport 3.0 | 503 | 2085 | 1 | 2085 | 253 | 253 | 3604 | 1 | 29 | 30 | 50 |
| | | 04/26/99 | | | | | | | | | | | | |
| 494 | HWBFX16 | 203959 | pCMVSport 3.0 | 504 | 1497 | 1 | 1497 | | 267 | 3605 | 1 | | | 3 |
| | | 04/26/99 | | | | | | | | | | | | |
| 495 | HWDAC26 | 203959 | pCMVSport 3.0 | 505 | 1958 | 1 | 1958 | 242 | 242 | 3606 | 1 | 25 | 26 | 35 |
| | | 04/26/99 | | | | | | | | | | | | |
| 496 | HWDAG96 | 203959 | pCMVSport 3.0 | 506 | 1147 | 300 | 1147 | 866 | 866 | 3607 | 1 | 18 | 19 | 32 |
| | | 04/26/99 | | | | | | | | | | | | |
| 497 | HWDAJ01 | 203959 | pCMVSport 3.0 | 507 | 781 | 1 | 781 | 288 | 288 | 3608 | 1 | | | 24 |
| | | 04/26/99 | | | | | | | | | | | | |
| 498 | HWHPB78 | 203959 | pCMVSport 3.0 | 508 | 1346 | 1 | 1346 | 200 | 200 | 3609 | 1 | 23 | 24 | 66 |
| | | 04/26/99 | | | | | | | | | | | | |
| 499 | HYABC84 | 203959 | pCMVSport 3.0 | 509 | 1338 | 768 | 1238 | 1015 | 1015 | 3610 | 1 | 28 | 29 | 62 |
| | | 04/26/99 | | | | | | | | | | | | |
| 500 | HYABC84 | 203959 | pCMVSport 3.0 | 510 | 1478 | 833 | 1306 | 1080 | 1080 | 3611 | 1 | 28 | 29 | 62 |
| | | 04/26/99 | | | | | | | | | | | | |
| 501 | H2CBD20 | 203917 | pBluescript | 511 | 1256 | 1 | 1256 | | 27 | 3612 | 1 | | | 17 |
| | | 04/08/99 | SK- | | | | | | | | | | | |
| 502 | H2CBH91 | 203917 | pBluescript | 512 | 1760 | 225 | 1760 | 309 | 309 | 3613 | 1 | 36 | 37 | 40 |
| | | 04/08/99 | SK- | | | | | | | | | | | |
| 503 | H2LBA54 | 203917 | pBluescript | 513 | 1529 | 1 | 1529 | 386 | 386 | 3614 | 1 | | | 5 |
| | | 04/08/99 | SK- | | | | | | | | | | | |
| 504 | H2LBB09 | 203917 | pBluescript | 514 | 2114 | 1 | 2114 | 197 | 197 | 3615 | 1 | 17 | 18 | 36 |
| | | 04/08/99 | SK- | | | | | | | | | | | |
| 505 | H2LBB09 | 203917 | pBluescript | 515 | 2158 | 109 | 2158 | 236 | 236 | 3616 | 1 | 17 | 18 | 36 |
| | | 04/08/99 | SK- | | | | | | | | | | | |
| 506 | H2MAC63 | 203917 | pBluescript | 516 | 443 | 1 | 443 | 172 | 172 | 3617 | 1 | 23 | 24 | 32 |
| | | 04/08/99 | SK- | | | | | | | | | | | |
| 507 | H2MBA76 | 203917 | pBluescript | 517 | 1315 | 482 | 1302 | 717 | 717 | 3618 | 1 | 20 | 21 | 112 |
| | | 04/08/99 | SK- | | | | | | | | | | | |
| 508 | H2MBF60 | 203917 | pBluescript | 518 | 1174 | 1 | 1174 | 320 | 320 | 3619 | 1 | 25 | 26 | 40 |
| | | 04/08/99 | SK- | | | | | | | | | | | |
| 509 | H6BSM88 | 203917 | Uni-ZAP XR | 519 | 916 | 1 | 916 | 95 | 95 | 3620 | 1 | 38 | 39 | 40 |
| | | 04/08/99 | | | | | | | | | | | | |
| 510 | H6EEA48 | 203949 | Uni-ZAP XR | 520 | 1228 | 1 | 1228 | 196 | 196 | 3621 | 1 | 20 | 21 | 246 |
| | | 04/29/99 | | | | | | | | | | | | |
| 511 | H6EEN71 | 203918 | Uni-ZAP XR | 521 | 1960 | 1 | 1083 | | 1434 | 3622 | 1 | 4 | 5 | 27 |
| | | 04/08/99 | | | | | | | | | | | | |
| 512 | H6EEO05 | PTA-181 | Uni-ZAP XR | 522 | 1425 | 1 | 1397 | 190 | 190 | 3623 | 1 | 34 | 35 | 111 |
| | | 06/07/99 | | | | | | | | | | | | |
| 513 | H6EEU40 | 203917 | Uni-ZAP XR | 523 | 951 | 1 | 951 | 175 | 175 | 3624 | 1 | 27 | 28 | 47 |
| | | 04/08/99 | | | | | | | | | | | | |
| 514 | H7TDB54 | 203959 | PCR II | 524 | 229 | 1 | 229 | 86 | 86 | 3625 | 1 | 24 | 25 | 48 |
| | | 04/26/99 | | | | | | | | | | | | |
| 515 | H7TMB95 | 203917 | Other | 525 | 508 | 1 | 508 | 275 | 275 | 3626 | 1 | | | 25 |
| | | 04/08/99 | | | | | | | | | | | | |
| 516 | HAAAT06 | PTA-794 | pSport1 | 526 | 1099 | 1 | 1085 | 329 | 329 | 3627 | 1 | 21 | 22 | 104 |
| | | 09/27/99 | | | | | | | | | | | | |
| 517 | HACAD42 | 203917 | Uni-ZAP XR | 527 | 990 | 463 | 990 | | 683 | 3628 | 1 | 7 | 8 | 19 |
| | | 04/08/99 | | | | | | | | | | | | |
| 518 | HACBJ11 | 203917 | Uni-ZAP XR | 528 | 3152 | 889 | 3152 | 1060 | 1060 | 3629 | 1 | 19 | 20 | 83 |
| | | 04/08/99 | | | | | | | | | | | | |
| 519 | HACBS86 | 203917 | Uni-ZAP XR | 529 | 1402 | 1 | 1402 | 654 | 654 | 3630 | 1 | 35 | 36 | 104 |
| | | 04/08/99 | | | | | | | | | | | | |
| 520 | HACBT91 | 203917 | Uni-ZAP XR | 530 | 841 | 1 | 841 | | 329 | 3631 | 1 | 7 | 8 | 59 |
| | | 04/08/99 | | | | | | | | | | | | |
| 521 | HACBZ73 | 203917 | Uni-ZAP XR | 531 | 966 | 1 | 966 | 105 | 105 | 3632 | 1 | 25 | 26 | 36 |
| | | 04/08/99 | | | | | | | | | | | | |
| 522 | HACCK29 | 203917 | Uni-ZAP XR | 532 | 1005 | 1 | 1005 | 205 | 205 | 3633 | 1 | 25 | 26 | 29 |
| | | 04/08/99 | | | | | | | | | | | | |
| 523 | HADAB60 | 203917 | pSport1 | 533 | 464 | 1 | 464 | 202 | 202 | 3634 | 1 | 30 | 31 | 51 |
| | | 04/08/99 | | | | | | | | | | | | |
| 524 | HADAM31 | 203917 | pSport1 | 534 | 839 | 1 | 839 | 161 | 161 | 3635 | 1 | 13 | 14 | 27 |
| | | 04/08/99 | | | | | | | | | | | | |
| 525 | HADCL19 | 203917 | pSport1 | 535 | 1102 | 1 | 1102 | 140 | 140 | 3636 | 1 | 14 | 15 | 15 |
| | | 04/08/99 | | | | | | | | | | | | |
| 526 | HADCZ65 | 203917 | pSport1 | 536 | 1112 | 1 | 1112 | 240 | 240 | 3637 | 1 | | | 3 |
| | | 04/08/99 | | | | | | | | | | | | |
| 527 | HADDC04 | 203917 | pSport1 | 537 | 2531 | 1 | 2531 | 254 | 254 | 3638 | 1 | 28 | 29 | 32 |
| | | 04/08/99 | | | | | | | | | | | | |
| 528 | HADDP23 | 203979 | pSport1 | 538 | 954 | 1 | 954 | 238 | 238 | 3639 | 1 | 24 | 25 | 39 |
| | | 04/29/99 | | | | | | | | | | | | |
| 529 | HADDP51 | 203979 | pSport1 | 539 | 3342 | 1 | 3342 | 324 | 324 | 3640 | 1 | 31 | 32 | 126 |
| | | 04/29/99 | | | | | | | | | | | | |
| 530 | HADDR24 | 203917 | pSport1 | 540 | 620 | 1 | 620 | 230 | 230 | 3641 | 1 | 31 | 32 | 35 |
| | | 04/08/99 | | | | | | | | | | | | |
| 531 | HADET62 | 203917 | pSport1 | 541 | 830 | 1 | 830 | 154 | 154 | 3642 | 1 | 18 | 19 | 31 |
| | | 04/08/99 | | | | | | | | | | | | |
| 532 | HADEY08 | 203917 | pSport1 | 542 | 4054 | 1 | 4054 | 201 | 201 | 3643 | 1 | | | 15 |
| | | 04/08/99 | | | | | | | | | | | | |
| 533 | HADEY22 | 203917 | pSport1 | 543 | 452 | 1 | 452 | 169 | 169 | 3644 | 1 | 18 | 19 | 32 |
| | | 04/08/99 | | | | | | | | | | | | |
| 534 | HADEY22 | 203917 | pSport1 | 544 | 625 | 1 | 625 | 169 | 169 | 3645 | 1 | 18 | 19 | 32 |
| | | 04/08/99 | | | | | | | | | | | | |
| 535 | HADFB84 | 203917 | pSport1 | 545 | 1193 | 1 | 1193 | 94 | 94 | 3646 | 1 | 28 | 29 | 46 |
| | | 04/08/99 | | | | | | | | | | | | |
| 536 | HADFD01 | 203917 | pSport1 | 546 | 1594 | 1 | 1594 | 377 | 377 | 3647 | 1 | 19 | 20 | 66 |
| | | 04/08/99 | | | | | | | | | | | | |
| 537 | HADFD10 | 203979 | pSport1 | 547 | 1762 | 1 | 1762 | 212 | 212 | 3648 | 1 | 30 | 31 | 38 |
| | | 04/29/99 | | | | | | | | | | | | |
| 538 | HADFK11 | 203917 | pSport1 | 548 | 1042 | 1 | 1042 | 24 | 24 | 3649 | 1 | 19 | 20 | 57 |
| | | 04/08/99 | | | | | | | | | | | | |
| 539 | HADFT44 | 203917 | pSport1 | 549 | 855 | 15 | 852 | 147 | 147 | 3650 | 1 | 25 | 26 | 55 |
| | | 04/08/99 | | | | | | | | | | | | |
| 540 | HADFW20 | 203917 | pSport1 | 550 | 1120 | 1 | 1120 | 223 | 223 | 3651 | 1 | 20 | 21 | 27 |
| | | 04/08/99 | | | | | | | | | | | | |
| 541 | HADFX10 | 203917 | pSport1 | 551 | 1278 | 1 | 1278 | 187 | 187 | 3652 | 1 | 18 | 19 | 36 |
| | | 04/08/99 | | | | | | | | | | | | |
| 542 | HADFY80 | 203917 | pSport1 | 552 | 742 | 1 | 742 | 83 | 83 | 3653 | 1 | 23 | 24 | 34 |
| | | 04/08/99 | | | | | | | | | | | | |
| 543 | HADGD93 | 203917 | pSport1 | 553 | 1033 | 1 | 899 | 47 | 47 | 3654 | 1 | 25 | 26 | 45 |
| | | 04/08/99 | | | | | | | | | | | | |
| 544 | HADMA77 | 203917 | pBluescript | 554 | 1913 | 763 | 1913 | | 992 | 3655 | 1 | 14 | 15 | 23 |
| | | 04/08/99 | | | | | | | | | | | | |
| 545 | HADXA10 | 203960 | pSport1 | 555 | 1992 | 1149 | 1927 | 1327 | 1327 | 3656 | 1 | 48 | 49 | 123 |
| | | 04/26/99 | | | | | | | | | | | | |
| 546 | HADXA10 | 203960 | pSport1 | 556 | 1386 | 553 | 1331 | 731 | 731 | 3657 | 1 | 48 | 49 | 123 |
| | | 04/26/99 | | | | | | | | | | | | |
| 547 | HAFBB15 | 203917 | pBluescript | 557 | 1733 | 1 | 1733 | 186 | 186 | 3658 | 1 | 50 | 51 | 87 |
| | | 04/08/99 | SK- | | | | | | | | | | | |
| 548 | HAFBL14 | 203917 | pBluescript | 558 | 2722 | 364 | 2722 | 542 | 542 | 3659 | 1 | 17 | 18 | 31 |
| | | 04/08/99 | SK- | | | | | | | | | | | |
| 549 | HAGAB62 | 203917 | Uni-ZAP XR | 559 | 1094 | 1 | 1094 | 82 | 82 | 3660 | 1 | 35 | 36 | 41 |
| | | 04/08/99 | | | | | | | | | | | | |
| 550 | HAGAB83 | 203917 | Uni-ZAP XR | 560 | 1839 | 1 | 1839 | 35 | 35 | 3661 | 1 | 22 | 23 | 35 |
| | | 04/08/99 | | | | | | | | | | | | |
| 551 | HAGAE84 | 203949 | Uni-ZAP XR | 561 | 1964 | 1 | 1964 | | 205 | 3662 | 1 | 10 | 11 | 17 |
| | | 04/29/99 | | | | | | | | | | | | |
| 552 | HAGAF75 | 203917 | Uni-ZAP XR | 562 | 1330 | 1 | 1330 | 106 | 106 | 3663 | 1 | 26 | 27 | 58 |
| | | 04/08/99 | | | | | | | | | | | | |
| 553 | HAGAK40 | 203917 | Uni-ZAP XR | 563 | 1504 | 1 | 1504 | | 187 | 3664 | 1 | 15 | 16 | 19 |
| | | 04/08/99 | | | | | | | | | | | | |
| 554 | HAGAU43 | 203918 | Uni-ZAP XR | 564 | 1828 | 1 | 1828 | 285 | 285 | 3665 | 1 | 20 | 21 | 32 |
| | | 04/08/99 | | | | | | | | | | | | |
| 555 | HAGAZ36 | 203917 | Uni-ZAP XR | 565 | 1280 | 1 | 1280 | 128 | 128 | 3666 | 1 | 15 | 16 | 65 |
| | | 04/08/99 | | | | | | | | | | | | |
| 556 | HAGBC57 | 203917 | Uni-ZAP XR | 566 | 1528 | 1 | 1528 | 358 | 358 | 3667 | 1 | 15 | 16 | 18 |
| | | 04/08/99 | | | | | | | | | | | | |
| 557 | HAGBL31 | 203917 | Uni-ZAP XR | 567 | 1458 | 1 | 1458 | 27 | 27 | 3668 | 1 | 27 | 28 | 30 |
| | | 04/08/99 | | | | | | | | | | | | |
| 558 | HAGBO09 | 203979 | Uni-ZAP XR | 568 | 1538 | 1 | 1538 | 59 | 59 | 3669 | 1 | 28 | 29 | 32 |
| | | 04/29/99 | | | | | | | | | | | | |
| 559 | HAGBO12 | 203917 | Uni-ZAP XR | 569 | 557 | 1 | 557 | 54 | 54 | 3670 | 1 | 18 | 19 | 32 |
| | | 04/08/99 | | | | | | | | | | | | |
| 560 | HAGBO51 | 203917 | Uni-ZAP XR | 570 | 1568 | 1 | 1568 | 132 | 132 | 3671 | 1 | 29 | 30 | 37 |
| | | 04/08/99 | | | | | | | | | | | | |
| 561 | HAGBS89 | 203918 | Uni-ZAP XR | 571 | 1228 | 1 | 1228 | 98 | 98 | 3672 | 1 | 24 | 25 | 36 |
| | | 04/08/99 | | | | | | | | | | | | |
| 562 | HAGBV06 | 203917 | Uni-ZAP XR | 572 | 1715 | 1 | 1715 | 98 | 98 | 3673 | 1 | 21 | 22 | 25 |
| | | 04/08/99 | | | | | | | | | | | | |
| 563 | HAGBV25 | 203917 | Uni-ZAP XR | 573 | 1896 | 456 | 1846 | 725 | 725 | 3674 | 1 | | | 17 |
| | | 04/08/99 | | | | | | | | | | | | |
| 564 | HAGBV29 | 203917 | Uni-ZAP XR | 574 | 2075 | 8 | 2075 | 16 | 16 | 3675 | 1 | 21 | 22 | 65 |
| | | 04/08/99 | | | | | | | | | | | | |
| 565 | HAGCC87 | 203917 | Uni-ZAP XR | 575 | 1592 | 479 | 1592 | 509 | 509 | 3676 | 1 | | | 9 |
| | | 04/08/99 | | | | | | | | | | | | |
| 566 | HAGCH67 | 203917 | Uni-ZAP XR | 576 | 1324 | 1 | 1324 | 150 | 150 | 3677 | 1 | 30 | 31 | 41 |
| | | 04/08/99 | | | | | | | | | | | | |
| 567 | HAGCI69 | 203917 | Uni-ZAP XR | 577 | 1214 | 1 | 1214 | | 31 | 3678 | 1 | 17 | 18 | 66 |
| | | 04/08/99 | | | | | | | | | | | | |
| 568 | HAGCT33 | 203917 | Uni-ZAP XR | 578 | 1338 | 1 | 1338 | 42 | 42 | 3679 | 1 | 26 | 27 | 39 |
| | | 04/08/99 | | | | | | | | | | | | |
| 569 | HAGCZ70 | 203917 | Uni-ZAP XR | 579 | 1686 | 54 | 1686 | 91 | 91 | 3680 | 1 | 18 | 19 | 35 |
| | | 04/08/99 | | | | | | | | | | | | |
| 570 | HAGDC73 | 203917 | Uni-ZAP XR | 580 | 1634 | 577 | 1634 | 744 | 744 | 3681 | 1 | 16 | 17 | 30 |
| | | 04/08/99 | | | | | | | | | | | | |
| 571 | HAGDG84 | 203917 | Uni-ZAP XR | 581 | 2012 | 1 | 2012 | 297 | 297 | 3682 | 1 | 16 | 17 | 39 |
| | | 04/08/99 | | | | | | | | | | | | |
| 572 | HAGDH85 | 203917 | Uni-ZAP XR | 582 | 1322 | 1 | 1322 | 45 | 45 | 3683 | 1 | 31 | 32 | 33 |
| | | 04/08/99 | | | | | | | | | | | | |
| 573 | HAGDI69 | 203917 | Uni-ZAP XR | 583 | 941 | 1 | 941 | 110 | 110 | 3684 | 1 | | | 3 |
| | | 04/08/99 | | | | | | | | | | | | |
| 574 | HAGDJ53 | 203917 | Uni-ZAP XR | 584 | 1874 | 2 | 1874 | 130 | 130 | 3685 | 1 | 18 | 19 | 33 |
| | | 04/08/99 | | | | | | | | | | | | |
| 575 | HAGDJ56 | 203917 | Uni-ZAP XR | 585 | 643 | 1 | 643 | 81 | 81 | 3686 | 1 | 24 | 25 | 34 |
| | | 04/08/99 | | | | | | | | | | | | |
| 576 | HAGDL51 | 203917 | Uni-ZAP XR | 586 | 1669 | 1 | 1669 | 218 | 218 | 3687 | 1 | 21 | 22 | 33 |
| | | 04/08/99 | | | | | | | | | | | | |
| 577 | HAGDO70 | 203917 | Uni-ZAP XR | 587 | 948 | 144 | 945 | 338 | 338 | 3688 | 1 | 27 | 28 | 180 |
| | | 04/08/99 | | | | | | | | | | | | |
| 578 | HAGDT30 | 203917 | Uni-ZAP XR | 588 | 2007 | 1 | 2007 | 198 | 198 | 3689 | 1 | 22 | 23 | 35 |
| | | 04/08/99 | | | | | | | | | | | | |
| 579 | HAGDW68 | 203917 | Uni-ZAP XR | 589 | 1687 | 1 | 1687 | 90 | 90 | 3690 | 1 | 18 | 19 | 39 |
| | | 04/08/99 | | | | | | | | | | | | |
| 580 | HAGDX84 | 203917 | Uni-ZAP XR | 590 | 952 | 1 | 952 | 223 | 223 | 3691 | 1 | | | 5 |
| | | 04/08/99 | | | | | | | | | | | | |
| 581 | HAGEK37 | 203917 | Uni-ZAP XR | 591 | 1410 | 744 | 1388 | 932 | 932 | 3692 | 1 | 23 | 24 | 39 |
| | | 04/08/99 | | | | | | | | | | | | |
| 582 | HAGEK86 | 203917 | Uni-ZAP XR | 592 | 1759 | 1 | 1759 | 165 | 165 | 3693 | 1 | 24 | 25 | 31 |
| | | 04/08/99 | | | | | | | | | | | | |
| 583 | HAGEP30 | 203917 | Uni-ZAP XR | 593 | 810 | 1 | 810 | 120 | 120 | 3694 | 1 | 18 | 19 | 35 |
| | | 04/08/99 | | | | | | | | | | | | |
| 584 | HAGEQ58 | 203917 | Uni-ZAP XR | 594 | 1675 | 1 | 1675 | 162 | 162 | 3695 | 1 | | | 17 |
| | | 04/08/99 | | | | | | | | | | | | |
| 585 | HAGEQ67 | 203917 | Uni-ZAP XR | 595 | 1205 | 1 | 1205 | 226 | 226 | 3696 | 1 | 16 | 17 | 37 |
| | | 04/08/99 | | | | | | | | | | | | |
| 586 | HAGEU26 | 203917 | Uni-ZAP XR | 596 | 484 | 1 | 484 | 175 | 175 | 3697 | 1 | 20 | 21 | 53 |
| | | 04/08/99 | | | | | | | | | | | | |
| 587 | HAGEW83 | 203917 | Uni-ZAP XR | 597 | 1069 | 1 | 1069 | 18 | 18 | 3698 | 1 | 24 | 25 | 31 |
| | | 04/08/99 | | | | | | | | | | | | |
| 588 | HAGEX49 | 203917 | Uni-ZAP XR | 598 | 1475 | 373 | 1434 | 606 | 606 | 3699 | 1 | | | 16 |
| | | 04/08/99 | | | | | | | | | | | | |
| 589 | HAGEX49 | 203917 | Uni-ZAP XR | 599 | 1475 | 373 | 1434 | 606 | 606 | 3700 | 1 | | | 16 |
| | | 04/08/99 | | | | | | | | | | | | |
| 590 | HAGFD75 | 203979 | Uni-ZAP XR | 600 | 1067 | 1 | 1067 | 13 | 13 | 3701 | 1 | 16 | 17 | 61 |
| | | 04/29/99 | | | | | | | | | | | | |
| 591 | HAGFF43 | 203917 | Uni-ZAP XR | 601 | 1844 | 1 | 1844 | 266 | 266 | 3702 | 1 | | | 5 |
| | | 04/08/99 | | | | | | | | | | | | |
| 592 | HAGFJ67 | PTA-181 | Uni-ZAP XR | 602 | 2122 | 1 | 2122 | 208 | 208 | 3703 | 1 | 26 | 27 | 92 |
| | | 06/07/99 | | | | | | | | | | | | |
| 593 | HAGFM58 | 203917 | Uni-ZAP XR | 603 | 931 | 1 | 931 | 243 | 243 | 3704 | 1 | | | 11 |
| | | 04/08/99 | | | | | | | | | | | | |
| 594 | HAGFT48 | 203979 | Uni-ZAP XR | 604 | 1683 | 633 | 1683 | | 830 | 3705 | 1 | 22 | 23 | 120 |
| | | 04/29/99 | | | | | | | | | | | | |
| 595 | HAGFU31 | 203917 | Uni-ZAP XR | 605 | 1270 | 1 | 1270 | 105 | 105 | 3706 | 1 | 21 | 22 | 44 |
| | | 04/08/99 | | | | | | | | | | | | |
| 596 | HAGFW13 | 203917 | Uni-ZAP XR | 606 | 911 | 1 | 911 | 183 | 183 | 3707 | 1 | 20 | 21 | 34 |
| | | 04/08/99 | | | | | | | | | | | | |
| 597 | HAGHE85 | 203917 | Uni-ZAP XR | 607 | 1697 | 1 | 1697 | | 342 | 3708 | 1 | | | 5 |
| | | 04/08/99 | | | | | | | | | | | | |
| 598 | HAGHR18 | 203917 | Uni-ZAP XR | 608 | 1142 | 1 | 1142 | 28 | 28 | 3709 | 1 | 17 | 18 | 32 |
| | | 04/08/99 | | | | | | | | | | | | |
| 599 | HAGIB90 | 203959 | Uni-ZAP XR | 609 | 976 | 1 | 976 | 59 | 59 | 3710 | 1 | 22 | 23 | 23 |
| | | 04/26/99 | | | | | | | | | | | | |
| 600 | HAHEM51 | 203917 | Uni-ZAP XR | 610 | 658 | 1 | 658 | 185 | 185 | 3711 | 1 | 31 | 32 | 39 |
| | | 04/08/99 | | | | | | | | | | | | |
| 601 | HAHSA76 | 203979 | pBluescript | 611 | 1588 | 425 | 1588 | 595 | 595 | 3712 | 1 | | | 1 |
| | | 04/29/99 | | | | | | | | | | | | |
| 602 | HAHSD51 | 203979 | pBluescript | 612 | 593 | 1 | 593 | 85 | 85 | 3713 | 1 | 22 | 23 | 49 |
| | | 04/29/99 | | | | | | | | | | | | |
| 603 | HAIBR76 | PTA-791 | Uni-ZAP XR | 613 | 2355 | 1 | 1903 | 137 | 137 | 3714 | 1 | 18 | 19 | 72 |
| | | 09/27/99 | | | | | | | | | | | | |
| 604 | HAIBT20 | 203917 | Uni-ZAP XR | 614 | 1437 | 1 | 1437 | 286 | 286 | 3715 | 1 | 25 | 26 | 35 |
| | | 04/08/99 | | | | | | | | | | | | |
| 605 | HAIBV91 | 203979 | Uni-ZAP XR | 615 | 2050 | 1 | 2050 | 90 | 90 | 3716 | 1 | 17 | 18 | 34 |
| | | 04/29/99 | | | | | | | | | | | | |
| 606 | HAICE62 | 203917 | Uni-ZAP XR | 616 | 1968 | 38 | 1361 | 363 | 363 | 3717 | 1 | | | 5 |
| | | 04/08/99 | | | | | | | | | | | | |
| 607 | HAICL90 | 203917 | Uni-ZAP XR | 617 | 754 | 1 | 754 | 140 | 140 | 3718 | 1 | 23 | 24 | 39 |
| | | 04/08/99 | | | | | | | | | | | | |
| 608 | HAICV44 | 203917 | Uni-ZAP XR | 618 | 1324 | 1 | 1324 | 232 | 232 | 3719 | 1 | 23 | 24 | 26 |
| | | 04/08/99 | | | | | | | | | | | | |
| 609 | HAIDP45 | 203979 | Uni-ZAP XR | 619 | 1182 | 1 | 1182 | 255 | 255 | 3720 | 1 | 15 | 16 | 25 |
| | | 04/29/99 | | | | | | | | | | | | |
| 610 | HAJAB88 | 203918 | pCMVSport 3.0 | 620 | 911 | 213 | 891 | 126 | 126 | 3721 | 1 | 14 | 15 | 92 |
| | | 04/08/99 | | | | | | | | | | | | |
| 611 | HAJAZ56 | 203917 | pCMVSport 3.0 | 621 | 1099 | 267 | 1099 | 300 | 300 | 3722 | 1 | 19 | 20 | 35 |
| | | 04/08/99 | | | | | | | | | | | | |
| 612 | HAMFC67 | 203917 | pCMVSport 3.0 | 622 | 1379 | 1 | 1379 | 282 | 282 | 3723 | 1 | 29 | 30 | 72 |
| | | 04/08/99 | | | | | | | | | | | | |
| 613 | HAMFQ38 | 203917 | pCMVSport 3.0 | 623 | 581 | 1 | 581 | 90 | 90 | 3724 | 1 | 25 | 26 | 37 |
| | | 04/08/99 | | | | | | | | | | | | |
| 614 | HAMGG01 | 203917 | pCMVSport 3.0 | 624 | 1284 | 323 | 1259 | 644 | 644 | 3725 | 1 | | | 17 |
| | | 04/08/99 | | | | | | | | | | | | |
| 615 | HANGB24 | 203917 | pSport1 | 625 | 431 | 1 | 431 | 199 | 199 | 3726 | 1 | 21 | 22 | 66 |
| | | 04/08/99 | | | | | | | | | | | | |
| 616 | HANKC93 | 203979 | pSport1 | 626 | 876 | 1 | 876 | 198 | 198 | 3727 | 1 | 17 | 18 | 39 |
| | | 04/29/99 | | | | | | | | | | | | |
| 617 | HAPAD35 | 203918 | Uni-ZAP XR | 627 | 2157 | 1 | 2157 | 50 | 50 | 3728 | 1 | 17 | 18 | 34 |
| | | 04/08/99 | | | | | | | | | | | | |
| 618 | HAPBR13 | 203917 | Uni-ZAP XR | 628 | 1585 | 1 | 1585 | 125 | 125 | 3729 | 1 | 22 | 23 | 52 |
| | | 04/08/99 | | | | | | | | | | | | |
| 619 | HAPBU09 | 203917 | Uni-ZAP XR | 629 | 792 | 1 | 792 | 247 | 247 | 3730 | 1 | 19 | 20 | 45 |
| | | 04/08/99 | | | | | | | | | | | | |
| 620 | HAPBU86 | 203917 | Uni-ZAP XR | 630 | 1351 | 255 | 1351 | 403 | 403 | 3731 | 1 | 23 | 24 | 35 |
| | | 04/08/99 | | | | | | | | | | | | |
| 621 | HAPBU86 | 203917 | Uni-ZAP XR | 631 | 1371 | 255 | 1348 | 403 | 403 | 3732 | 1 | 23 | 24 | 35 |
| | | 04/08/99 | | | | | | | | | | | | |
| 622 | HAPNJ33 | 203979 | Uni-ZAP XR | 632 | 3397 | 1593 | 3376 | 1872 | 1872 | 3733 | 1 | 36 | 37 | 70 |
| | | 04/29/99 | | | | | | | | | | | | |
| 623 | HAPNL62 | 203917 | Uni-ZAP XR | 633 | 2812 | 433 | 2239 | 701 | 701 | 3734 | 1 | 41 | 42 | 102 |
| | | 04/08/99 | | | | | | | | | | | | |
| 624 | HAPNO50 | 203917 | Uni-ZAP XR | 634 | 1145 | 1 | 1134 | 205 | 205 | 3735 | 1 | 20 | 21 | 36 |
| | | 04/08/99 | | | | | | | | | | | | |
| 625 | HAPNY10 | 203917 | Uni-ZAP XR | 635 | 1509 | 1 | 1509 | | 33 | 3736 | 1 | 40 | 41 | 44 |
| | | 04/08/99 | | | | | | | | | | | | |
| 626 | HAPPW83 | 203979 | Uni-ZAP XR | 636 | 1365 | 35 | 1365 | 66 | 66 | 3737 | 1 | | | 10 |
| | | 04/29/99 | | | | | | | | | | | | |
| 627 | HAPQJ73 | 203917 | Uni-ZAP XR | 637 | 1857 | 1 | 1857 | | 286 | 3738 | 1 | | | 16 |
| | | 04/08/99 | | | | | | | | | | | | |
| 628 | HAPQK26 | 203917 | Uni-ZAP XR | 638 | 1810 | 1 | 1810 | | 300 | 3739 | 1 | | | 12 |
| | | 04/08/99 | | | | | | | | | | | | |
| 629 | HAPQU71 | 203917 | Uni-ZAP XR | 639 | 1879 | 1264 | 1807 | 1324 | 1324 | 3740 | 1 | 20 | 21 | 53 |
| | | 04/08/99 | | | | | | | | | | | | |
| 630 | HAPQU71 | 203917 | Uni-ZAP XR | 640 | 1879 | 1264 | 1807 | 1324 | 1324 | 3741 | 1 | 20 | 21 | 53 |
| | | 04/08/99 | | | | | | | | | | | | |
| 631 | HAPQW18 | 203917 | Uni-ZAP XR | 641 | 556 | 1 | 556 | 20 | 20 | 3742 | 1 | 29 | 30 | 37 |
| | | 04/08/99 | | | | | | | | | | | | |
| 632 | HAPQX44 | 203918 | Uni-ZAP XR | 642 | 1632 | 285 | 1623 | 515 | 515 | 3743 | 1 | | | 17 |
| | | 04/08/99 | | | | | | | | | | | | |
| 633 | HAPRK55 | 203917 | Uni-ZAP XR | 643 | 1380 | 1 | 1380 | 172 | 172 | 3744 | 1 | 28 | 29 | 38 |
| | | 04/08/99 | | | | | | | | | | | | |
| 634 | HAPSH37 | 203979 | Uni-ZAP XR | 644 | 1380 | 1 | 1380 | 251 | 251 | 3745 | 1 | 21 | 22 | 56 |
| | | 04/29/99 | | | | | | | | | | | | |
| 635 | HAQBG57 | 203917 | Uni-ZAP XR | 645 | 1048 | 1 | 1031 | | 170 | 3746 | 1 | 15 | 16 | 56 |
| | | 04/08/99 | | | | | | | | | | | | |
| 636 | HAQBY85 | 203917 | Uni-ZAP XR | 646 | 1882 | 1 | 1882 | 192 | 192 | 3747 | 1 | 22 | 23 | 33 |
| | | 04/08/99 | | | | | | | | | | | | |
| 637 | HAQBZ15 | 203959 | Uni-ZAP XR | 647 | 2254 | 521 | 2121 | | 671 | 3748 | 1 | 21 | 22 | 51 |
| | | 04/26/99 | | | | | | | | | | | | |
| 638 | HAQCE18 | 203917 | Uni-ZAP XR | 648 | 284 | 1 | 284 | 79 | 79 | 3749 | 1 | | | 10 |
| | | 04/08/99 | | | | | | | | | | | | |
| 639 | HAQCF94 | 203917 | Uni-ZAP XR | 649 | 1615 | 7 | 1495 | 89 | 89 | 3750 | 1 | | | 25 |
| | | 04/08/99 | | | | | | | | | | | | |
| 640 | HARAE26 | 203917 | pBluescript | 650 | 1245 | 1 | 1245 | 225 | 225 | 3751 | 1 | 30 | 31 | 97 |
| | | 04/08/99 | SK- | | | | | | | | | | | |
| 641 | HARAT69 | 203917 | pBluescript | 651 | 1961 | 189 | 1961 | 422 | 422 | 3752 | 1 | 21 | 22 | 334 |
| | | 04/08/99 | SK- | | | | | | | | | | | |
| 642 | HARAZ81 | 203918 | pBluescript | 652 | 936 | 242 | 936 | 435 | 435 | 3753 | 1 | 18 | 19 | 33 |
| | | 04/08/99 | SK- | | | | | | | | | | | |
| 643 | HASAU26 | 203949 | Uni-ZAP XR | 653 | 3853 | 1557 | 2090 | 1767 | 1767 | 3754 | 1 | 25 | 26 | 50 |
| | | 04/29/99 | | | | | | | | | | | | |
| 644 | HASAX57 | 203917 | Uni-ZAP XR | 654 | 1357 | 1 | 1357 | 136 | 136 | 3755 | 1 | 30 | 31 | 38 |
| | | 04/08/99 | | | | | | | | | | | | |
| 645 | HASAY07 | 203917 | Uni-ZAP XR | 655 | 810 | 1 | 810 | | 699 | 3756 | 1 | | | 5 |
| | | 04/08/99 | | | | | | | | | | | | |
| 646 | HATAE01 | 203917 | Uni-ZAP XR | 656 | 811 | 1 | 811 | 76 | 76 | 3757 | 1 | 27 | 28 | 30 |
| | | 04/08/99 | | | | | | | | | | | | |
| 647 | HATAG52 | 203917 | Uni-ZAP XR | 657 | 1010 | 1 | 1010 | 154 | 154 | 3758 | 1 | 22 | 23 | 29 |
| | | 04/08/99 | | | | | | | | | | | | |
| 648 | HATAL05 | 203979 | Uni-ZAP XR | 658 | 1199 | 1 | 1199 | 134 | 134 | 3759 | 1 | | | 45 |
| | | 04/29/99 | | | | | | | | | | | | |
| 649 | HATBA90 | 203917 | Uni-ZAP XR | 659 | 434 | 1 | 434 | 97 | 97 | 3760 | 1 | 23 | 24 | 38 |
| | | 04/08/99 | | | | | | | | | | | | |
| 650 | HATBM71 | 203917 | Uni-ZAP XR | 660 | 716 | 1 | 716 | 196 | 196 | 3761 | 1 | 36 | 37 | 38 |
| | | 04/08/99 | | | | | | | | | | | | |
| 651 | HATCF80 | 203918 | Uni-ZAP XR | 661 | 2503 | 506 | 2485 | 620 | 620 | 3762 | 1 | 19 | 20 | 52 |
| | | 04/08/99 | | | | | | | | | | | | |
| 652 | HATCI67 | 203949 | Uni-ZAP XR | 662 | 1108 | 1 | 1108 | 158 | 158 | 3763 | 1 | 18 | 19 | 31 |
| | | 04/29/99 | | | | | | | | | | | | |
| 653 | HATCJ27 | 203949 | Uni-ZAP XR | 663 | 930 | 1 | 930 | | 237 | 3764 | 1 | | | 15 |
| | | 04/29/99 | | | | | | | | | | | | |
| 654 | HATCS79 | 203979 | Uni-ZAP XR | 664 | 794 | 1 | 794 | 259 | 259 | 3765 | 1 | 16 | 17 | 40 |
| | | 04/29/99 | | | | | | | | | | | | |
| 655 | HATCX03 | PTA-794 | Uni-ZAP XR | 665 | 1145 | 1 | 1145 | | 196 | 3766 | 1 | 10 | 11 | 45 |
| | | 09/27/99 | | | | | | | | | | | | |
| 656 | HATDE03 | 203917 | Uni-ZAP XR | 666 | 1927 | 282 | 1276 | 428 | 428 | 3767 | 1 | 18 | 19 | 46 |
| | | 04/08/99 | | | | | | | | | | | | |
| 657 | HATDF41 | 203917 | Uni-ZAP XR | 667 | 1316 | 729 | 1292 | 1066 | 1066 | 3768 | 1 | 15 | 16 | 31 |
| | | 04/08/99 | | | | | | | | | | | | |
| 658 | HATDH23 | 203917 | Uni-ZAP XR | 668 | 1340 | 1 | 1340 | | 98 | 3769 | 1 | | | 2 |
| | | 04/08/99 | | | | | | | | | | | | |
| 659 | HATDH55 | 203979 | Uni-ZAP XR | 669 | 2097 | 1 | 2097 | 50 | 50 | 3770 | 1 | | | 33 |
| | | 04/29/99 | | | | | | | | | | | | |
| 660 | HATDO84 | 203917 | Uni-ZAP XR | 670 | 958 | 1 | 958 | 75 | 75 | 3771 | 1 | 22 | 23 | 32 |
| | | 04/08/99 | | | | | | | | | | | | |
| 661 | HATDU01 | 203949 | Uni-ZAP XR | 671 | 1302 | 1 | 1302 | 23 | 23 | 3772 | 1 | 16 | 17 | 20 |
| | | 04/29/99 | | | | | | | | | | | | |
| 662 | HATDW05 | 203917 | Uni-ZAP XR | 672 | 558 | 1 | 558 | 232 | 232 | 3773 | 1 | 13 | 14 | 46 |
| | | 04/08/99 | | | | | | | | | | | | |
| 663 | HATEF13 | 203917 | Uni-ZAP XR | 673 | 1679 | 1 | 1679 | 139 | 139 | 3774 | 1 | 24 | 25 | 37 |
| | | 04/08/99 | | | | | | | | | | | | |
| 664 | HATEF64 | 203917 | Uni-ZAP XR | 674 | 1335 | 1 | 1335 | 154 | 154 | 3775 | 1 | | | 28 |
| | | 04/08/99 | | | | | | | | | | | | |
| 665 | HATEH40 | 203917 | Uni-ZAP XR | 675 | 563 | 1 | 563 | | 230 | 3776 | 1 | 20 | 21 | 32 |
| | | 04/08/99 | | | | | | | | | | | | |
| 666 | HATEI22 | PTA-181 | Uni-ZAP XR | 676 | 2418 | 2100 | 2394 | 2203 | 2203 | 3777 | 1 | 33 | 34 | 41 |
| | | 06/07/99 | | | | | | | | | | | | |
| 667 | HAUCC84 | 203979 | Uni-ZAP XR | 677 | 1308 | 25 | 1279 | | 265 | 3778 | 1 | 31 | 32 | 82 |
| | | 04/29/99 | | | | | | | | | | | | |
| 668 | HAWAS41 | PTA-791 | pBluescript | 678 | 1009 | 1 | 1009 | 140 | 140 | 3779 | 1 | 25 | 26 | 39 |
| | | 09/27/99 | SK- | | | | | | | | | | | |
| 669 | HAWBA65 | 203917 | pBluescript | 679 | 561 | 1 | 561 | 228 | 228 | 3780 | 1 | 16 | 17 | 45 |
| | | 04/08/99 | SK- | | | | | | | | | | | |
| 670 | HBAGH64 | 203917 | pSport1 | 680 | 1718 | 1 | 1718 | | 645 | 3781 | 1 | | | 1 |
| | | 04/08/99 | | | | | | | | | | | | |
| 671 | HBAGV01 | PTA-181 | pSport1 | 681 | 422 | 1 | 422 | 17 | 17 | 3782 | 1 | 22 | 23 | 30 |
| | | 06/07/99 | | | | | | | | | | | | |
| 672 | HBAMC50 | PTA-791 | pSport1 | 682 | 2234 | 1 | 2234 | 101 | 101 | 3783 | 1 | 23 | 24 | 47 |
| | | 09/27/99 | | | | | | | | | | | | |
| 673 | HBAMC57 | 203917 | pSport1 | 683 | 307 | 1 | 307 | | 168 | 3784 | 1 | 8 | 9 | 10 |
| | | 04/08/99 | | | | | | | | | | | | |
| 674 | HBBBA42 | 203917 | pCMVSport 1 | 684 | 1758 | 585 | 1758 | | 646 | 3785 | 1 | 14 | 15 | 41 |
| | | 04/08/99 | | | | | | | | | | | | |
| 675 | HBBBB08 | 203917 | pCMVSport 1 | 685 | 1056 | 1 | 1056 | | 805 | 3786 | 1 | | | 11 |
| | | 04/08/99 | | | | | | | | | | | | |
| 676 | HBBBE83 | 203917 | pCMVSport 1 | 686 | 470 | 1 | 470 | 106 | 106 | 3787 | 1 | 17 | 18 | 63 |
| | | 04/08/99 | | | | | | | | | | | | |
| 677 | HBBMA11 | 203917 | pCMVSport 1 | 687 | 932 | 1 | 932 | 199 | 199 | 3788 | 1 | 11 | 12 | 59 |
| | | 04/08/99 | | | | | | | | | | | | |
| 678 | HBCAK10 | 203917 | Uni-ZAP XR | 688 | 1953 | 1 | 1953 | 96 | 96 | 3789 | 1 | | | 10 |
| | | 04/08/99 | | | | | | | | | | | | |
| 679 | HBCAK80 | 203917 | Uni-ZAP XR | 689 | 1008 | 1 | 1008 | 124 | 124 | 3790 | 1 | 17 | 18 | 39 |
| | | 04/08/99 | | | | | | | | | | | | |
| 680 | HBCAQ48 | 203917 | Uni-ZAP XR | 690 | 421 | 1 | 421 | 320 | 320 | 3791 | 1 | 30 | 31 | 34 |
| | | 04/08/99 | | | | | | | | | | | | |
| 681 | HBCAY17 | 203917 | Uni-ZAP XR | 691 | 1086 | 1 | 1086 | 281 | 281 | 3792 | 1 | 22 | 23 | 31 |
| | | 04/08/99 | | | | | | | | | | | | |
| 682 | HBCGE46 | 203917 | pSport1 | 692 | 1038 | 1 | 1038 | 225 | 225 | 3793 | 1 | 21 | 22 | 46 |
| | | 04/08/99 | | | | | | | | | | | | |
| 683 | HBGBA14 | 203917 | Uni-ZAP XR | 693 | 765 | 267 | 718 | 298 | 298 | 3794 | 1 | 24 | 25 | 36 |
| | | 04/08/99 | | | | | | | | | | | | |
| 684 | HBGBE75 | PTA-794 | Uni-ZAP XR | 694 | 668 | 1 | 646 | 161 | 161 | 3795 | 1 | 18 | 19 | 55 |
| | | 09/27/99 | | | | | | | | | | | | |
| 685 | HBGBP22 | 203917 | Uni-ZAP XR | 695 | 893 | 68 | 893 | 109 | 109 | 3796 | 1 | | | 7 |
| | | 04/08/99 | | | | | | | | | | | | |
| 686 | HBGFQ34 | 203917 | Uni-ZAP XR | 696 | 519 | 1 | 519 | 86 | 86 | 3797 | 1 | 21 | 22 | 37 |
| | | 04/08/99 | | | | | | | | | | | | |
| 687 | HBGML95 | 203917 | Uni-ZAP XR | 697 | 453 | 1 | 453 | | 90 | 3798 | 1 | 27 | 28 | 113 |
| | | 04/08/99 | | | | | | | | | | | | |
| 688 | HBGMT60 | 203917 | Uni-ZAP XR | 698 | 415 | 1 | 414 | 163 | 163 | 3799 | 1 | 24 | 25 | 38 |
| | | 04/08/99 | | | | | | | | | | | | |
| 689 | HBHAA53 | 203917 | Uni-ZAP XR | 699 | 674 | 1 | 674 | 53 | 53 | 3800 | 1 | 28 | 29 | 162 |
| | | 04/08/99 | | | | | | | | | | | | |
| 690 | HBIAU43 | 203959 | Uni-ZAP XR | 700 | 1246 | 1 | 1246 | 202 | 202 | 3801 | 1 | 15 | 16 | 18 |
| | | 04/26/99 | | | | | | | | | | | | |
| 691 | HBIAW58 | 203917 | Uni-ZAP XR | 701 | 1510 | 1 | 1510 | 17 | 17 | 3802 | 1 | 18 | 19 | 30 |
| | | 04/08/99 | | | | | | | | | | | | |
| 692 | HBIBB20 | PTA-794 | Uni-ZAP XR | 702 | 1259 | 1 | 1259 | | 153 | 3803 | 1 | 30 | 31 | 71 |
| | | 09/27/99 | | | | | | | | | | | | |
| 693 | HBIBF26 | 203979 | Uni-ZAP XR | 703 | 2101 | 591 | 2089 | 655 | 655 | 3804 | 1 | 19 | 20 | 183 |
| | | 04/29/99 | | | | | | | | | | | | |
| 694 | HBIBM33 | 203979 | Uni-ZAP XR | 704 | 725 | 1 | 725 | | 2 | 3805 | 1 | 8 | 9 | 24 |
| | | 04/29/99 | | | | | | | | | | | | |
| 695 | HBIBN67 | 203917 | Uni-ZAP XR | 705 | 926 | 1 | 926 | 71 | 71 | 3806 | 1 | 22 | 23 | 38 |
| | | 04/08/99 | | | | | | | | | | | | |
| 696 | HBIBQ69 | 203917 | Uni-ZAP XR | 706 | 1248 | 1 | 1248 | | 112 | 3807 | 1 | 28 | 29 | 35 |
| | | 04/08/99 | | | | | | | | | | | | |
| 697 | HBIBR38 | 203917 | Uni-ZAP XR | 707 | 824 | 1 | 824 | | 27 | 3808 | 1 | 13 | 14 | 15 |
| | | 04/08/99 | | | | | | | | | | | | |
| 698 | HBIBR61 | 203917 | Uni-ZAP XR | 708 | 2206 | 1 | 2206 | | 235 | 3809 | 1 | | | 2 |
| | | 04/08/99 | | | | | | | | | | | | |
| 699 | HBIBS33 | 203917 | Uni-ZAP XR | 709 | 1421 | 1 | 1421 | 234 | 234 | 3810 | 1 | | | 23 |
| | | 04/08/99 | | | | | | | | | | | | |
| 700 | HBIBT13 | 203917 | Uni-ZAP XR | 710 | 630 | 1 | 630 | 65 | 65 | 3811 | 1 | 21 | 22 | 33 |
| | | 04/08/99 | | | | | | | | | | | | |
| 701 | HBIBZ20 | 203917 | Uni-ZAP XR | 711 | 1408 | 1 | 1408 | | 146 | 3812 | 1 | | | 18 |
| | | 04/08/99 | | | | | | | | | | | | |
| 702 | HBICB80 | 203917 | Uni-ZAP XR | 712 | 785 | 1 | 785 | 190 | 190 | 3813 | 1 | 18 | 19 | 20 |
| | | 04/08/99 | | | | | | | | | | | | |
| 703 | HBJAC40 | 203979 | Uni-ZAP XR | 713 | 1767 | 184 | 1729 | | 329 | 3814 | 1 | | | 13 |
| | | 04/29/99 | | | | | | | | | | | | |
| 704 | HBJAV56 | 203917 | Uni-ZAP XR | 714 | 781 | 1 | 781 | 274 | 274 | 3815 | 1 | | | 4 |
| | | 04/08/99 | | | | | | | | | | | | |
| 705 | HBJAY14 | 203917 | Uni-ZAP XR | 715 | 2115 | 1 | 2115 | 90 | 90 | 3816 | 1 | 25 | 26 | 39 |
| | | 04/08/99 | | | | | | | | | | | | |
| 706 | HBJBQ69 | 203917 | Uni-ZAP XR | 716 | 1148 | 1 | 1148 | 173 | 173 | 3817 | 1 | | | 8 |
| | | 04/08/99 | | | | | | | | | | | | |
| 707 | HBJBR40 | 203917 | Uni-ZAP XR | 717 | 1131 | 1 | 1131 | 50 | 50 | 3818 | 1 | | | 40 |
| | | 04/08/99 | | | | | | | | | | | | |
| 708 | HBJCH46 | 203917 | Uni-ZAP XR | 718 | 1117 | 1 | 1117 | 146 | 146 | 3819 | 1 | 22 | 23 | 62 |
| | | 04/08/99 | | | | | | | | | | | | |
| 709 | HBJCR17 | 203979 | Uni-ZAP XR | 719 | 963 | 1 | 935 | 55 | 55 | 3820 | 1 | 18 | 19 | 36 |
| | | 04/29/99 | | | | | | | | | | | | |
| 710 | HBJCS26 | 203949 | Uni-ZAP XR | 720 | 2884 | 1 | 1997 | 369 | 369 | 3821 | 1 | 15 | 16 | 33 |
| | | 04/29/99 | | | | | | | | | | | | |
| 711 | HBJCW24 | 203917 | Uni-ZAP XR | 721 | 1014 | 1 | 1014 | 323 | 323 | 3822 | 1 | 23 | 24 | 26 |
| | | 04/08/99 | | | | | | | | | | | | |
| 712 | HBJDC57 | 203917 | Uni-ZAP XR | 722 | 743 | 1 | 743 | 173 | 173 | 3823 | 1 | | | 9 |
| | | 04/08/99 | | | | | | | | | | | | |
| 713 | HBJDR18 | 203917 | Uni-ZAP XR | 723 | 1118 | 1 | 1118 | | 265 | 3824 | 1 | 16 | 17 | 17 |
| | | 04/08/99 | | | | | | | | | | | | |
| 714 | HBJDR83 | 203917 | Uni-ZAP XR | 724 | 1485 | 1 | 1485 | | 141 | 3825 | 1 | 23 | 24 | 25 |
| | | 04/08/99 | | | | | | | | | | | | |
| 715 | HBJEE51 | 203917 | Uni-ZAP XR | 725 | 1249 | 1 | 1249 | 56 | 56 | 3826 | 1 | | | 18 |
| | | 04/08/99 | | | | | | | | | | | | |
| 716 | HBJEL21 | PTA-181 | Uni-ZAP XR | 726 | 2082 | 1 | 2082 | 48 | 48 | 3827 | 1 | 21 | 22 | 45 |
| | | 06/07/99 | | | | | | | | | | | | |
| 717 | HBJFH84 | 203959 | Uni-ZAP XR | 727 | 2294 | 1580 | 2294 | 1663 | 1663 | 3828 | 1 | | | 7 |
| | | 04/26/99 | | | | | | | | | | | | |
| 718 | HBJFJ14 | 203949 | Uni-ZAP XR | 728 | 1255 | 1 | 1254 | | 264 | 3829 | 1 | 10 | 11 | 14 |
| | | 04/29/99 | | | | | | | | | | | | |
| 719 | HBJFJ26 | PTA-792 | Uni-ZAP XR | 729 | 895 | 1 | 895 | 180 | 180 | 3830 | 1 | 20 | 21 | 59 |
| | | 09/27/99 | | | | | | | | | | | | |
| 719 | HBJFJ26 | PTA-792 | Uni-ZAP XR | 3102 | 2178 | 672 | 1552 | 851 | 851 | 6203 | 1 | 20 | 21 | 59 |
| | | 09/27/99 | | | | | | | | | | | | |
| 720 | HBJFJ83 | 203917 | Uni-ZAP XR | 730 | 1208 | 1 | 1208 | 246 | 246 | 3831 | 1 | 30 | 31 | 34 |
| | | 04/08/99 | | | | | | | | | | | | |
| 721 | HBJFJ83 | 203917 | Uni-ZAP XR | 731 | 1165 | 1 | 1165 | 246 | 246 | 3832 | 1 | 30 | 31 | 34 |
| | | 04/08/99 | | | | | | | | | | | | |
| 722 | HBJFP47 | 203917 | Uni-ZAP XR | 732 | 1021 | 335 | 1021 | 423 | 423 | 3833 | 1 | 27 | 28 | 38 |
| | | 04/08/99 | | | | | | | | | | | | |
| 723 | HBJFR77 | 203917 | Uni-ZAP XR | 733 | 1661 | 190 | 1661 | 354 | 354 | 3834 | 1 | 27 | 28 | 31 |
| | | 04/08/99 | | | | | | | | | | | | |
| 724 | HBJFU30 | 203917 | Uni-ZAP XR | 734 | 477 | 1 | 477 | | 14 | 3835 | 1 | 22 | 23 | 77 |
| | | 04/08/99 | | | | | | | | | | | | |
| 725 | HBJFX41 | 203917 | Uni-ZAP XR | 735 | 779 | 1 | 779 | 181 | 181 | 3836 | 1 | | | 13 |
| | | 04/08/99 | | | | | | | | | | | | |
| 726 | HBJHO83 | 203917 | Uni-ZAP XR | 736 | 972 | 1 | 972 | 189 | 189 | 3837 | 1 | 34 | 35 | 67 |
| | | 04/08/99 | | | | | | | | | | | | |
| 727 | HBJHS92 | 203917 | Uni-ZAP XR | 737 | 1885 | 64 | 1885 | 121 | 121 | 3838 | 1 | | | 18 |
| | | 04/08/99 | | | | | | | | | | | | |
| 728 | HBJHT01 | 203917 | Uni-ZAP XR | 738 | 1251 | 1 | 1251 | 200 | 200 | 3839 | 1 | 20 | 21 | 21 |
| | | 04/08/99 | | | | | | | | | | | | |
| 729 | HBJHT01 | 203917 | Uni-ZAP XR | 739 | 1252 | 1 | 1252 | 193 | 193 | 3840 | 1 | 21 | 22 | 47 |
| | | 04/08/99 | | | | | | | | | | | | |
| 730 | HBJHW06 | 203917 | Uni-ZAP XR | 740 | 1256 | 224 | 1256 | 443 | 443 | 3841 | 1 | 14 | 15 | 35 |
| | | 04/08/99 | | | | | | | | | | | | |
| 731 | HBJIR14 | 203917 | Uni-ZAP XR | 741 | 2858 | 1522 | 2809 | 1800 | 1800 | 3842 | 1 | 12 | 13 | 19 |
| | | 04/08/99 | | | | | | | | | | | | |
| 732 | HBJJA26 | 203917 | Uni-ZAP XR | 742 | 1363 | 1 | 1257 | 236 | 236 | 3843 | 1 | 15 | 16 | 29 |
| | | 04/08/99 | | | | | | | | | | | | |
| 733 | HBJJX02 | 203917 | Uni-ZAP XR | 743 | 724 | 1 | 724 | 228 | 228 | 3844 | 1 | 20 | 21 | 36 |
| | | 04/08/99 | | | | | | | | | | | | |
| 734 | HBJLH78 | 203917 | Uni-ZAP XR | 744 | 1099 | 128 | 1099 | 284 | 284 | 3845 | 1 | | | 18 |
| | | 04/08/99 | | | | | | | | | | | | |
| 735 | HBJND04 | 203917 | Uni-ZAP XR | 745 | 1703 | 98 | 1701 | | 309 | 3846 | 1 | 18 | 19 | 348 |
| | | 04/08/99 | | | | | | | | | | | | |
| 736 | HBJND57 | 203917 | Uni-ZAP XR | 746 | 1120 | 1 | 1120 | 20 | 20 | 3847 | 1 | 28 | 29 | 34 |
| | | 04/08/99 | | | | | | | | | | | | |
| 737 | HBKDF66 | 203917 | pSport1 | 747 | 1832 | 1 | 1832 | | 222 | 3848 | 1 | 17 | 18 | 29 |
| | | 04/08/99 | | | | | | | | | | | | |
| 738 | HBKEA94 | 203917 | pSport1 | 748 | 1247 | 1 | 1247 | 56 | 56 | 3849 | 1 | 30 | 31 | 58 |
| | | 04/08/99 | | | | | | | | | | | | |
| 739 | HBKEE60 | 203917 | pSport1 | 749 | 621 | 1 | 621 | | 47 | 3850 | 1 | 14 | 15 | 82 |
| | | 04/08/99 | | | | | | | | | | | | |
| 740 | HBKEI41 | 203917 | pSport1 | 750 | 866 | 1 | 866 | | 441 | 3851 | 1 | 21 | 22 | 123 |
| | | 04/08/99 | | | | | | | | | | | | |
| 741 | HBMBD51 | 203979 | pBluescript | 751 | 3057 | 242 | 2779 | 413 | 413 | 3852 | 1 | 26 | 27 | 72 |
| | | 04/29/99 | | | | | | | | | | | | |
| 742 | HBMBD73 | 203917 | pBluescript | 752 | 5279 | 4063 | 5091 | | 4310 | 3853 | 1 | | | 13 |
| | | 04/08/99 | | | | | | | | | | | | |
| 743 | HBMBE33 | 203917 | pBluescript | 753 | 931 | 1 | 931 | 45 | 45 | 3854 | 1 | | | 37 |
| | | 04/08/99 | | | | | | | | | | | | |
| 744 | HBMBM17 | 203917 | pBluescript | 754 | 1162 | 1 | 1162 | 31 | 31 | 3855 | 1 | 22 | 23 | 37 |
| | | 04/08/99 | | | | | | | | | | | | |
| 745 | HBMCL59 | 203917 | pBluescript | 755 | 807 | 1 | 807 | 69 | 69 | 3856 | 1 | 16 | 17 | 31 |
| | | 04/08/99 | | | | | | | | | | | | |
| 746 | HBMCM96 | 203917 | pBluescript | 756 | 2284 | 2 | 2284 | 100 | 100 | 3857 | 1 | 15 | 16 | 20 |
| | | 04/08/99 | | | | | | | | | | | | |
| 747 | HBMCQ74 | PTA-181 | pBluescript | 757 | 4043 | 1563 | 3480 | | 1815 | 3858 | 1 | | | 20 |
| | | 06/07/99 | | | | | | | | | | | | |
| 748 | HBMCQ74 | PTA-181 | pBluescript | 758 | 4044 | 1563 | 3480 | | 1815 | 3859 | 1 | | | 20 |
| | | 06/07/99 | | | | | | | | | | | | |
| 749 | HBMCT40 | 203917 | pBluescript | 759 | 711 | 1 | 711 | 184 | 184 | 3860 | 1 | 19 | 20 | 82 |
| | | 04/08/99 | | | | | | | | | | | | |
| 750 | HBMDM08 | 203979 | pBluescript | 760 | 1113 | 629 | 692 | 505 | 505 | 3861 | 1 | 28 | 29 | 156 |
| | | 04/29/99 | | | | | | | | | | | | |
| 751 | HBMSN62 | 203917 | Uni-ZAP XR | 761 | 982 | 1 | 973 | 193 | 193 | 3862 | 1 | 22 | 23 | 31 |
| | | 04/08/99 | | | | | | | | | | | | |
| 752 | HBMSO30 | 203959 | Uni-ZAP XR | 762 | 778 | 1 | 778 | 172 | 172 | 3863 | 1 | 16 | 17 | 17 |
| | | 04/26/99 | | | | | | | | | | | | |
| 753 | HBMTM50 | 203917 | Uni-ZAP XR | 763 | 1234 | 1 | 1234 | 44 | 44 | 3864 | 1 | | | 4 |
| | | 04/08/99 | | | | | | | | | | | | |
| 754 | HBMUD59 | 203917 | Uni-ZAP XR | 764 | 876 | 1 | 876 | 270 | 270 | 3865 | 1 | 21 | 22 | 126 |
| | | 04/08/99 | | | | | | | | | | | | |
| 755 | HBMUI10 | 203917 | Uni-ZAP XR | 765 | 822 | 1 | 822 | 249 | 249 | 3866 | 1 | 28 | 29 | 39 |
| | | 04/08/99 | | | | | | | | | | | | |
| 756 | HBMUJ48 | 203917 | Uni-ZAP XR | 766 | 513 | 1 | 513 | 180 | 180 | 3867 | 1 | 17 | 18 | 24 |
| | | 04/08/99 | | | | | | | | | | | | |
| 757 | HBMUR39 | 203917 | Uni-ZAP XR | 767 | 888 | 1 | 888 | 135 | 135 | 3868 | 1 | 18 | 19 | 23 |
| | | 04/08/99 | | | | | | | | | | | | |
| 758 | HBMVF65 | 203917 | Uni-ZAP XR | 768 | 1064 | 175 | 1063 | 179 | 179 | 3869 | 1 | 16 | 17 | 38 |
| | | 04/08/99 | | | | | | | | | | | | |
| 759 | HBMVF65 | 203917 | Uni-ZAP XR | 769 | 1282 | 378 | 1265 | 382 | 382 | 3870 | 1 | 16 | 17 | 38 |
| | | 04/08/99 | | | | | | | | | | | | |
| 760 | HBMWC39 | 203917 | Uni-ZAP XR | 770 | 1154 | 1 | 1154 | | 112 | 3871 | 1 | 16 | 17 | 18 |
| | | 04/08/99 | | | | | | | | | | | | |
| 761 | HBMWJ92 | 203917 | Uni-ZAP XR | 771 | 1810 | 1 | 1810 | 82 | 82 | 3872 | 1 | 17 | 18 | 40 |
| | | 04/08/99 | | | | | | | | | | | | |
| 762 | HBMWS52 | PTA-791 | Uni-ZAP XR | 772 | 1345 | 1 | 1345 | 19 | 19 | 3873 | 1 | 16 | 17 | 35 |
| | | 09/27/99 | | | | | | | | | | | | |
| 763 | HBMXE34 | 203917 | Uni-ZAP XR | 773 | 1831 | 906 | 1831 | 301 | 301 | 3874 | 1 | | | 11 |
| | | 04/08/99 | | | | | | | | | | | | |
| 764 | HBMXG01 | 203917 | Uni-ZAP XR | 774 | 1139 | 1 | 1139 | | 261 | 3875 | 1 | 13 | 14 | 24 |
| | | 04/08/99 | | | | | | | | | | | | |
| 765 | HBMXG76 | 203917 | Uni-ZAP XR | 775 | 618 | 1 | 618 | 71 | 71 | 3876 | 1 | 20 | 21 | 26 |
| | | 04/08/99 | | | | | | | | | | | | |
| 766 | HBMXM05 | 203979 | Uni-ZAP XR | 776 | 1121 | 1 | 1119 | 20 | 20 | 3877 | 1 | 30 | 31 | 37 |
| | | 04/29/99 | | | | | | | | | | | | |
| 767 | HBMXW83 | 203917 | Uni-ZAP XR | 777 | 1233 | 1 | 1233 | 16 | 16 | 3878 | 1 | 33 | 34 | 39 |
| | | 04/08/99 | | | | | | | | | | | | |
| 768 | HBNAE74 | 203917 | Uni-ZAP XR | 778 | 426 | 1 | 426 | | 203 | 3879 | 1 | | | 1 |
| | | 04/08/99 | | | | | | | | | | | | |
| 769 | HBNAX16 | 203979 | Uni-ZAP XR | 779 | 3244 | 2578 | 3231 | 2711 | 2711 | 3880 | 1 | 35 | 36 | 148 |
| | | 04/29/99 | | | | | | | | | | | | |
| 770 | HBNAZ35 | 203917 | Uni-ZAP XR | 780 | 894 | 295 | 894 | 519 | 519 | 3881 | 1 | | | 7 |
| | | 04/08/99 | | | | | | | | | | | | |
| 771 | HBODK40 | 203979 | pSport1 | 781 | 1778 | 1 | 1599 | 338 | 338 | 3882 | 1 | | | 10 |
| | | 04/29/99 | | | | | | | | | | | | |
| 772 | HBODV76 | PTA-181 | pSport1 | 782 | 2498 | 1 | 2498 | 303 | 303 | 3883 | 1 | | | 8 |
| | | 06/07/99 | | | | | | | | | | | | |
| 773 | HBPAD89 | 203917 | Uni-ZAP XR | 783 | 195 | 1 | 195 | 74 | 74 | 3884 | 1 | 14 | 15 | 15 |
| | | 04/08/99 | | | | | | | | | | | | |
| 774 | HBPAF39 | 203949 | Uni-ZAP XR | 784 | 1262 | 1 | 1262 | 119 | 119 | 3885 | 1 | | | 18 |
| | | 04/29/99 | | | | | | | | | | | | |
| 775 | HBQAC45 | 203917 | Lambda ZAP II | 785 | 1371 | 1 | 1371 | | 292 | 3886 | 1 | | | 7 |
| | | 04/08/99 | | | | | | | | | | | | |
| 776 | HBQAC72 | 203917 | Lambda ZAP II | 786 | 2345 | 1 | 2345 | 741 | 741 | 3887 | 1 | 29 | 30 | 77 |
| | | 04/08/99 | | | | | | | | | | | | |
| 777 | HBQAE37 | 203917 | Lambda ZAP II | 787 | 1015 | 1 | 1015 | 208 | 208 | 3888 | 1 | | | 37 |
| | | 04/08/99 | | | | | | | | | | | | |
| 778 | HBSAJ63 | 203917 | Uni-ZAP XR | 788 | 1708 | 1079 | 1587 | | 1256 | 3889 | 1 | 20 | 21 | 62 |
| | | 04/08/99 | | | | | | | | | | | | |
| 779 | HBSAJ63 | 203917 | Uni-ZAP XR | 789 | 540 | 1 | 540 | | 183 | 3890 | 1 | 20 | 21 | 62 |
| | | 04/08/99 | | | | | | | | | | | | |
| 780 | HBSDD24 | 203917 | Uni-ZAP XR | 790 | 1494 | 710 | 1494 | 833 | 833 | 3891 | 1 | 21 | 22 | 42 |
| | | 04/08/99 | | | | | | | | | | | | |
| 781 | HBWBD25 | 203917 | ZAP Express | 791 | 1504 | 1 | 1504 | 182 | 182 | 3892 | 1 | 22 | 23 | 48 |
| | | 04/08/99 | | | | | | | | | | | | |
| 782 | HBXAS93 | 203917 | ZAP Express | 792 | 1759 | 1 | 1759 | 215 | 215 | 3893 | 1 | | | 11 |
| | | 04/08/99 | | | | | | | | | | | | |
| 783 | HBXAT27 | 203959 | ZAP Express | 793 | 2406 | 958 | 2385 | | 1097 | 3894 | 1 | 17 | 18 | 40 |
| | | 04/26/99 | | | | | | | | | | | | |
| 784 | HBXAW57 | 203917 | ZAP Express | 794 | 1377 | 1 | 1377 | 152 | 152 | 3895 | 1 | 30 | 31 | 36 |
| | | 04/08/99 | | | | | | | | | | | | |
| 785 | HBXBI29 | 203979 | ZAP Express | 795 | 2043 | 1 | 2043 | 87 | 87 | 3896 | 1 | 27 | 28 | 28 |
| | | 04/29/99 | | | | | | | | | | | | |
| 786 | HBXBM24 | 203917 | ZAP Express | 796 | 713 | 1 | 713 | | 85 | 3897 | 1 | 30 | 31 | 46 |
| | | 04/08/99 | | | | | | | | | | | | |
| 787 | HBXBM78 | 203917 | ZAP Express | 797 | 2791 | 2044 | 2791 | 2163 | 2163 | 3898 | 1 | 21 | 22 | 119 |
| | | 04/08/99 | | | | | | | | | | | | |
| 788 | HBXCD59 | PTA-181 | ZAP Express | 798 | 2017 | 1 | 2017 | 165 | 165 | 3899 | 1 | 22 | 23 | 65 |
| | | 06/07/99 | | | | | | | | | | | | |
| 789 | HBXCE43 | 203917 | ZAP Express | 799 | 1273 | 1 | 1273 | 349 | 349 | 3900 | 1 | | | 4 |
| | | 04/08/99 | | | | | | | | | | | | |
| 790 | HBXCG08 | 203917 | ZAP Express | 800 | 1879 | 1 | 1879 | 260 | 260 | 3901 | 1 | 13 | 14 | 17 |
| | | 04/08/99 | | | | | | | | | | | | |
| 791 | HBXCM52 | 203917 | ZAP Express | 801 | 2520 | 355 | 2513 | 366 | 366 | 3902 | 1 | 14 | 15 | 37 |
| | | 04/08/99 | | | | | | | | | | | | |
| 792 | HBXCQ03 | 203917 | ZAP Express | 802 | 968 | 1 | 968 | 231 | 231 | 3903 | 1 | 30 | 31 | 55 |
| | | 04/08/99 | | | | | | | | | | | | |
| 793 | HBXCR15 | 203917 | ZAP Express | 803 | 1235 | 1 | 1235 | 158 | 158 | 3904 | 1 | 22 | 23 | 33 |
| | | 04/08/99 | | | | | | | | | | | | |
| 794 | HBXDL52 | PTA-791 | ZAP Express | 804 | 2311 | 885 | 2307 | 1040 | 1040 | 3905 | 1 | | | 8 |
| | | 09/27/99 | | | | | | | | | | | | |
| 795 | HBXDL52 | PTA-791 | ZAP Express | 805 | 2311 | 885 | 2307 | 1040 | 1040 | 3906 | 1 | | | 8 |
| | | 09/27/99 | | | | | | | | | | | | |
| 796 | HBXDN08 | 203917 | ZAP Express | 806 | 1057 | 1 | 1057 | 67 | 67 | 3907 | 1 | 22 | 23 | 24 |
| | | 04/08/99 | | | | | | | | | | | | |
| 797 | HBXDN65 | 203918 | ZAP Express | 807 | 1948 | 1 | 1948 | 187 | 187 | 3908 | 1 | 25 | 26 | 36 |
| | | 04/08/99 | | | | | | | | | | | | |
| 798 | HBXFA04 | 203959 | ZAP Express | 808 | 622 | 1 | 617 | 411 | 411 | 3909 | 1 | 20 | 21 | 41 |
| | | 04/26/99 | | | | | | | | | | | | |
| 799 | HBXFE64 | 203917 | ZAP Express | 809 | 1647 | 1 | 1647 | | 15 | 3910 | 1 | 17 | 18 | 33 |
| | | 04/08/99 | | | | | | | | | | | | |
| 800 | HBXFI33 | 203917 | ZAP Express | 810 | 598 | 1 | 598 | 124 | 124 | 3911 | 1 | 21 | 22 | 123 |
| | | 04/08/99 | | | | | | | | | | | | |
| 801 | HBXFP72 | 203917 | ZAP Express | 811 | 1467 | 1 | 1467 | 122 | 122 | 3912 | 1 | 26 | 27 | 37 |
| | | 04/08/99 | | | | | | | | | | | | |
| 802 | HBXFS31 | 203917 | ZAP Express | 812 | 1551 | 1 | 1551 | 20 | 20 | 3913 | 1 | | | 16 |
| | | 04/08/99 | | | | | | | | | | | | |
| 803 | HBXFW01 | 203949 | ZAP Express | 813 | 1252 | 1 | 1252 | 125 | 125 | 3914 | 1 | 1 | 2 | 182 |
| | | 04/29/99 | | | | | | | | | | | | |
| 804 | HBXGE12 | 203917 | ZAP Express | 814 | 2516 | 1 | 2516 | | 52 | 3915 | 1 | 32 | 33 | 120 |
| | | 04/08/99 | | | | | | | | | | | | |
| 804 | HBXGE12 | 203917 | ZAP Express | 3103 | 2469 | 1 | 2469 | | 31 | 6204 | 1 | 32 | 33 | 120 |
| | | 04/08/99 | | | | | | | | | | | | |
| 805 | HBXGL91 | PTA-1838 | ZAP Express | 815 | 2483 | 1 | 2483 | 80 | 80 | 3916 | 1 | 34 | 35 | 36 |
| | | 05/09/00 | | | | | | | | | | | | |
| 806 | HBXGM24 | 203917 | ZAP Express | 816 | 1663 | 1 | 1663 | 268 | 268 | 3917 | 1 | | | 15 |
| | | 04/08/99 | | | | | | | | | | | | |
| 807 | HBZAI75 | 203917 | pSport1 | 817 | 1531 | 1 | 1531 | | 260 | 3918 | 1 | 21 | 22 | 48 |
| | | 04/08/99 | | | | | | | | | | | | |
| 808 | HCABP33 | PTA-181 | Uni-ZAP XR | 818 | 223 | 1 | 223 | 9 | 9 | 3919 | 1 | 29 | 30 | 37 |
| | | 06/07/99 | | | | | | | | | | | | |
| 809 | HCABW10 | 203918 | Uni-ZAP XR | 819 | 2015 | 1 | 2015 | 76 | 76 | 3920 | 1 | 24 | 25 | 40 |
| | | 04/08/99 | | | | | | | | | | | | |
| 810 | HCACZ65 | 203979 | Uni-ZAP XR | 820 | 1964 | 1 | 1964 | 30 | 30 | 3921 | 1 | 30 | 31 | 36 |
| | | 04/29/99 | | | | | | | | | | | | |
| 811 | HCBAB34 | 203979 | Uni-ZAP XR | 821 | 1650 | 1 | 1650 | 93 | 93 | 3922 | 1 | 25 | 26 | 39 |
| | | 04/29/99 | | | | | | | | | | | | |
| 812 | HCDAA24 | 203917 | Uni-ZAP XR | 822 | 924 | 288 | 767 | 342 | 342 | 3923 | 1 | 25 | 26 | 182 |
| | | 04/08/99 | | | | | | | | | | | | |
| 813 | HCDAA24 | 203917 | Uni-ZAP XR | 823 | 1015 | 373 | 853 | 427 | 427 | 3924 | 1 | 25 | 26 | 142 |
| | | 04/08/99 | | | | | | | | | | | | |
| 814 | HCDAF17 | 203917 | Uni-ZAP XR | 824 | 803 | 1 | 803 | 12 | 12 | 3925 | 1 | 17 | 18 | 35 |
| | | 04/08/99 | | | | | | | | | | | | |
| 815 | HCDAH02 | 203917 | Uni-ZAP XR | 825 | 665 | 267 | 665 | 495 | 495 | 3926 | 1 | 18 | 19 | 57 |
| | | 04/08/99 | | | | | | | | | | | | |
| 816 | HCDAP33 | 203917 | Uni-ZAP XR | 826 | 1454 | 1 | 1454 | 126 | 126 | 3927 | 1 | 26 | 27 | 27 |
| | | 04/08/99 | | | | | | | | | | | | |
| 817 | HCDAR40 | 203917 | Uni-ZAP XR | 827 | 853 | 1 | 853 | | 102 | 3928 | 1 | 28 | 29 | 40 |
| | | 04/08/99 | | | | | | | | | | | | |
| 818 | HCDAS02 | PTA-794 | Uni-ZAP XR | 828 | 1117 | 1 | 1117 | 136 | 136 | 3929 | 1 | 18 | 19 | 244 |
| | | 09/27/99 | | | | | | | | | | | | |
| 819 | HCDBE76 | 203917 | Uni-ZAP XR | 829 | 685 | 1 | 685 | | 260 | 3930 | 1 | 15 | 16 | 48 |
| | | 04/08/99 | | | | | | | | | | | | |
| 820 | HCDBO32 | 203917 | Uni-ZAP XR | 830 | 2630 | 1480 | 2630 | 1669 | 1669 | 3931 | 1 | 25 | 26 | 71 |
| | | 04/08/99 | | | | | | | | | | | | |
| 821 | HCDBW67 | 203917 | Uni-ZAP XR | 831 | 677 | 409 | 677 | | 498 | 3932 | 1 | 10 | 11 | 44 |
| | | 04/08/99 | | | | | | | | | | | | |
| 822 | HCDBZ31 | 203917 | Uni-ZAP XR | 832 | 858 | 21 | 858 | | 565 | 3933 | 1 | 7 | 8 | 14 |
| | | 04/08/99 | | | | | | | | | | | | |
| 823 | HCDCB03 | 203917 | Uni-ZAP XR | 833 | 1538 | 1 | 1538 | 32 | 32 | 3934 | 1 | 35 | 36 | 139 |
| | | 04/08/99 | | | | | | | | | | | | |
| 824 | HCDCE51 | 203917 | Uni-ZAP XR | 834 | 1085 | 1 | 1085 | 46 | 46 | 3935 | 1 | | | 2 |
| | | 04/08/99 | | | | | | | | | | | | |
| 825 | HCDCI42 | 203979 | Uni-ZAP XR | 835 | 1046 | 1 | 1046 | 216 | 216 | 3936 | 1 | | | 9 |
| | | 04/29/99 | | | | | | | | | | | | |
| 826 | HCDDB15 | 203917 | Uni-ZAP XR | 836 | 1422 | 514 | 1202 | 668 | 668 | 3937 | 1 | | | 12 |
| | | 04/08/99 | | | | | | | | | | | | |
| 827 | HCDDX81 | 203917 | Uni-ZAP XR | 837 | 419 | 1 | 419 | 274 | 274 | 3938 | 1 | 15 | 16 | 48 |
| | | 04/08/99 | | | | | | | | | | | | |
| 828 | HCDDY28 | PTA-793 | Uni-ZAP XR | 838 | 1691 | 1 | 1691 | 75 | 75 | 3939 | 1 | 28 | 29 | 31 |
| | | 09/27/99 | | | | | | | | | | | | |
| 829 | HCDEB19 | 203917 | Uni-ZAP XR | 839 | 1744 | 1 | 1744 | | 266 | 3940 | 1 | 31 | 32 | 48 |
| | | 04/08/99 | | | | | | | | | | | | |
| 830 | HCDEN46 | 203917 | Uni-ZAP XR | 840 | 957 | 1 | 957 | 83 | 83 | 3941 | 1 | 33 | 34 | 59 |
| | | 04/08/99 | | | | | | | | | | | | |
| 831 | HCDES69 | 203917 | Uni-ZAP XR | 841 | 1032 | 1 | 1032 | | 271 | 3942 | 1 | | | 1 |
| | | 04/08/99 | | | | | | | | | | | | |
| 832 | HCE1D45 | 203917 | Uni-ZAP XR | 842 | 1390 | 1 | 1390 | 101 | 101 | 3943 | 1 | 28 | 29 | 44 |
| | | 04/08/99 | | | | | | | | | | | | |
| 833 | HCE1N56 | 203917 | Uni-ZAP XR | 843 | 1590 | 1 | 1587 | 106 | 106 | 3944 | 1 | 37 | 38 | 38 |
| | | 04/08/99 | | | | | | | | | | | | |
| 834 | HCE1T53 | 203959 | Uni-ZAP XR | 844 | 1461 | 1 | 1461 | 23 | 23 | 3945 | 1 | 21 | 22 | 40 |
| | | 04/26/99 | | | | | | | | | | | | |
| 835 | HCE1Y27 | 203917 | Uni-ZAP XR | 845 | 1651 | 1 | 1651 | 374 | 374 | 3946 | 1 | 10 | 11 | 133 |
| | | 04/08/99 | | | | | | | | | | | | |
| 836 | HCE1Y34 | 203917 | Uni-ZAP XR | 846 | 1720 | 1 | 1720 | | 757 | 3947 | 1 | | | 8 |
| | | 04/08/99 | | | | | | | | | | | | |
| 837 | HCE2B57 | 203917 | Uni-ZAP XR | 847 | 1247 | 1 | 1247 | | 279 | 3948 | 1 | | | 9 |
| | | 04/08/99 | | | | | | | | | | | | |
| 838 | HCE2E47 | PTA-792 | Uni-ZAP XR | 848 | 1830 | 1 | 1830 | | 102 | 3949 | 1 | 21 | 22 | 29 |
| | | 09/27/99 | | | | | | | | | | | | |
| 839 | HCE2I23 | 203917 | Uni-ZAP XR | 849 | 977 | 1 | 977 | 56 | 56 | 3950 | 1 | 32 | 33 | 90 |
| | | 04/08/99 | | | | | | | | | | | | |
| 840 | HCE2P90 | 203917 | Uni-ZAP XR | 850 | 1893 | 1 | 1893 | | 142 | 3951 | 1 | 16 | 17 | 42 |
| | | 04/08/99 | | | | | | | | | | | | |
| 841 | HCE3A54 | 203917 | Uni-ZAP XR | 851 | 847 | 1 | 847 | 51 | 51 | 3952 | 1 | 18 | 19 | 42 |
| | | 04/08/99 | | | | | | | | | | | | |
| 842 | HCE3C46 | 203917 | Uni-ZAP XR | 852 | 1230 | 1 | 1230 | | 290 | 3953 | 1 | | | 6 |
| | | 04/08/99 | | | | | | | | | | | | |
| 843 | HCE3D58 | PTA-791 | Uni-ZAP XR | 853 | 2575 | 501 | 2575 | 682 | 682 | 3954 | 1 | 18 | 19 | 66 |
| | | 09/27/99 | | | | | | | | | | | | |
| 844 | HCE3D89 | 203917 | Uni-ZAP XR | 854 | 1100 | 17 | 1100 | 73 | 73 | 3955 | 1 | 33 | 34 | 87 |
| | | 04/08/99 | | | | | | | | | | | | |
| 845 | HCE3J43 | 203917 | Uni-ZAP XR | 855 | 2129 | 836 | 2087 | 1075 | 1075 | 3956 | 1 | | | 22 |
| | | 04/08/99 | | | | | | | | | | | | |
| 846 | HCE3L04 | 203918 | Uni-ZAP XR | 856 | 709 | 1 | 709 | 221 | 221 | 3957 | 1 | 16 | 17 | 46 |
| | | 04/08/99 | | | | | | | | | | | | |
| 847 | HCE3N23 | 203917 | Uni-ZAP XR | 857 | 3145 | 595 | 3114 | 789 | 789 | 3958 | 1 | 14 | 15 | 51 |
| | | 04/08/99 | | | | | | | | | | | | |
| 848 | HCE3R01 | 203917 | Uni-ZAP XR | 858 | 2746 | 1245 | 2736 | 1386 | 1386 | 3959 | 1 | 32 | 33 | 66 |
| | | 04/08/99 | | | | | | | | | | | | |
| 849 | HCE3R01 | 203917 | Uni-ZAP XR | 859 | 2736 | 1245 | 2736 | 1386 | 1386 | 3960 | 1 | 32 | 33 | 66 |
| | | 04/08/99 | | | | | | | | | | | | |
| 850 | HCE3R01 | 203917 | Uni-ZAP XR | 860 | 2736 | 1245 | 2736 | 1386 | 1386 | 3961 | 1 | 32 | 33 | 66 |
| | | 04/08/99 | | | | | | | | | | | | |
| 851 | HCE3R46 | 203979 | Uni-ZAP XR | 861 | 2046 | 58 | 2025 | 376 | 376 | 3962 | 1 | | | 22 |
| | | 04/29/99 | | | | | | | | | | | | |
| 852 | HCE4H32 | 203979 | Uni-ZAP XR | 862 | 2636 | 1344 | 2605 | 1403 | 1403 | 3963 | 1 | 46 | 47 | 60 |
| | | 04/29/99 | | | | | | | | | | | | |
| 853 | HCE4H32 | 203979 | Uni-ZAP XR | 863 | 2047 | 755 | 2016 | 814 | 814 | 3964 | 1 | 46 | 47 | 60 |
| | | 04/29/99 | | | | | | | | | | | | |
| 854 | HCE4T64 | 203917 | Uni-ZAP XR | 864 | 840 | 1 | 840 | | 91 | 3965 | 1 | 33 | 34 | 76 |
| | | 04/08/99 | | | | | | | | | | | | |
| 855 | HCE4W88 | 203917 | Uni-ZAP XR | 865 | 4151 | 23 | 1597 | | 286 | 3966 | 1 | 16 | 17 | 32 |
| | | 04/08/99 | | | | | | | | | | | | |
| 856 | HCE5B62 | 203917 | Uni-ZAP XR | 866 | 1714 | 1 | 1714 | 204 | 204 | 3967 | 1 | 23 | 24 | 29 |
| | | 04/08/99 | | | | | | | | | | | | |
| 857 | HCE5H86 | 203949 | Uni-ZAP XR | 867 | 2329 | 1 | 2328 | 288 | 288 | 3968 | 1 | 28 | 29 | 64 |
| | | 04/29/99 | | | | | | | | | | | | |
| 858 | HCE5J64 | 203917 | Uni-ZAP XR | 868 | 2207 | 1 | 2207 | 114 | 114 | 3969 | 1 | 31 | 32 | 39 |
| | | 04/08/99 | | | | | | | | | | | | |
| 859 | HCEBF54 | 203979 | Uni-ZAP XR | 869 | 1069 | 1 | 1069 | 197 | 197 | 3970 | 1 | 30 | 31 | 129 |
| | | 04/29/99 | | | | | | | | | | | | |
| 860 | HCECO77 | 203917 | Uni-ZAP XR | 870 | 1436 | 1 | 1436 | 124 | 124 | 3971 | 1 | 28 | 29 | 66 |
| | | 04/08/99 | | | | | | | | | | | | |
| 861 | HCEDH42 | 203917 | Uni-ZAP XR | 871 | 1419 | 1 | 1419 | 71 | 71 | 3972 | 1 | 20 | 21 | 55 |
| | | 04/08/99 | | | | | | | | | | | | |
| 862 | HCEDJ05 | 203917 | Uni-ZAP XR | 872 | 2396 | 1 | 2396 | 67 | 67 | 3973 | 1 | 23 | 24 | 46 |
| | | 04/08/99 | | | | | | | | | | | | |
| 863 | HCEDJ26 | 203917 | Uni-ZAP XR | 873 | 1984 | 34 | 1984 | | 981 | 3974 | 1 | | | 1 |
| | | 04/08/99 | | | | | | | | | | | | |
| 864 | HCEDN07 | 203979 | Uni-ZAP XR | 874 | 1425 | 1 | 1425 | 126 | 126 | 3975 | 1 | 16 | 17 | 40 |
| | | 04/29/99 | | | | | | | | | | | | |
| 865 | HCEDO17 | 203917 | Uni-ZAP XR | 875 | 1953 | 255 | 1953 | | 608 | 3976 | 1 | 11 | 12 | 34 |
| | | 04/08/99 | | | | | | | | | | | | |
| 866 | HCEEG48 | PTA-794 | Uni-ZAP XR | 876 | 996 | 1 | 996 | | 242 | 3977 | 1 | | | 21 |
| | | 09/27/99 | | | | | | | | | | | | |
| 867 | HCEEM33 | 203917 | Uni-ZAP XR | 877 | 1165 | 1 | 1165 | 244 | 244 | 3978 | 1 | 26 | 27 | 35 |
| | | 04/08/99 | | | | | | | | | | | | |
| 868 | HCEEP16 | 203917 | Uni-ZAP XR | 878 | 1381 | 1 | 1381 | 276 | 276 | 3979 | 1 | | | 1 |
| | | 04/08/99 | | | | | | | | | | | | |
| 869 | HCEER60 | 203917 | Uni-ZAP XR | 879 | 775 | 1 | 775 | 18 | 18 | 3980 | 1 | 24 | 25 | 28 |
| | | 04/08/99 | | | | | | | | | | | | |
| 870 | HCEFA10 | 203917 | Uni-ZAP XR | 880 | 1474 | 1 | 1474 | | 282 | 3981 | 1 | | | 4 |
| | | 04/08/99 | | | | | | | | | | | | |
| 871 | HCEFA50 | 203917 | Uni-ZAP XR | 881 | 2100 | 1 | 2100 | 223 | 223 | 3982 | 1 | | | 1 |
| | | 04/08/99 | | | | | | | | | | | | |
| 872 | HCEFA94 | 203917 | Uni-ZAP XR | 882 | 1607 | 1 | 1607 | 232 | 232 | 3983 | 1 | 8 | 9 | 17 |
| | | 04/08/99 | | | | | | | | | | | | |
| 873 | HCEFC27 | 203917 | Uni-ZAP XR | 883 | 1432 | 1 | 1432 | 224 | 224 | 3984 | 1 | 22 | 23 | 38 |
| | | 04/08/99 | | | | | | | | | | | | |
| 874 | HCEFG93 | 203917 | Uni-ZAP XR | 884 | 2280 | 1 | 2280 | | 166 | 3985 | 1 | | | 13 |
| | | 04/08/99 | | | | | | | | | | | | |
| 875 | HCEFH31 | 203917 | Uni-ZAP XR | 885 | 2261 | 99 | 2241 | 260 | 260 | 3986 | 1 | 31 | 32 | 59 |
| | | 04/08/99 | | | | | | | | | | | | |
| 876 | HCEFK56 | PTA-791 | Uni-ZAP XR | 886 | 2455 | 1 | 2455 | | 79 | 3987 | 1 | 20 | 21 | 670 |
| | | 09/27/99 | | | | | | | | | | | | |
| 877 | HCEFN51 | 203917 | Uni-ZAP XR | 887 | 639 | 1 | 639 | 113 | 113 | 3988 | 1 | 18 | 19 | 45 |
| | | 04/08/99 | | | | | | | | | | | | |
| 878 | HCEGG08 | 203949 | Uni-ZAP XR | 888 | 2534 | 979 | 2025 | 1114 | 1114 | 3989 | 1 | 15 | 16 | 27 |
| | | 04/29/99 | | | | | | | | | | | | |
| 879 | HCEGH74 | 203949 | Uni-ZAP XR | 889 | 1124 | 1 | 1124 | 203 | 203 | 3990 | 1 | 20 | 21 | 56 |
| | | 04/29/99 | | | | | | | | | | | | |
| 880 | HCEGK81 | 203949 | Uni-ZAP XR | 890 | 1786 | 1 | 1786 | 72 | 72 | 3991 | 1 | 25 | 26 | 60 |
| | | 04/29/99 | | | | | | | | | | | | |
| 881 | HCEGS49 | 203918 | Uni-ZAP XR | 891 | 1688 | 1 | 1688 | 145 | 145 | 3992 | 1 | 24 | 25 | 61 |
| | | 04/08/99 | | | | | | | | | | | | |
| 882 | HCEGU75 | 203917 | Uni-ZAP XR | 892 | 1487 | 1 | 1487 | 84 | 84 | 3993 | 1 | | | 31 |
| | | 04/08/99 | | | | | | | | | | | | |
| 883 | HCEGY33 | 203917 | Uni-ZAP XR | 893 | 2834 | 1 | 2803 | 174 | 174 | 3994 | 1 | | | 15 |
| | | 04/08/99 | | | | | | | | | | | | |
| 884 | HCEHW24 | 203917 | Uni-ZAP XR | 894 | 1380 | 1 | 1380 | 29 | 29 | 3995 | 1 | | | 6 |
| | | 04/08/99 | | | | | | | | | | | | |
| 885 | HCEJL08 | 203917 | Uni-ZAP XR | 895 | 1140 | 1 | 1110 | 175 | 175 | 3996 | 1 | 20 | 21 | 149 |
| | | 04/08/99 | | | | | | | | | | | | |
| 886 | HCEJP93 | 203917 | Uni-ZAP XR | 896 | 1305 | 1 | 1305 | 20 | 20 | 3997 | 1 | | | 23 |
| | | 04/08/99 | | | | | | | | | | | | |
| 887 | HCELB04 | 203979 | Uni-ZAP XR | 897 | 1962 | 1 | 1962 | | 108 | 3998 | 1 | 18 | 19 | 58 |
| | | 04/29/99 | | | | | | | | | | | | |
| 888 | HCEMA08 | 203959 | Uni-ZAP XR | 898 | 1880 | 1 | 1880 | 37 | 37 | 3999 | 1 | 22 | 23 | 60 |
| | | 04/26/99 | | | | | | | | | | | | |
| 889 | HCENN67 | 203917 | Uni-ZAP XR | 899 | 878 | 1 | 878 | | 56 | 4000 | 1 | 15 | 16 | 53 |
| | | 04/08/99 | | | | | | | | | | | | |
| 890 | HCENQ22 | 203917 | Uni-ZAP XR | 900 | 2320 | 1 | 2320 | 263 | 263 | 4001 | 1 | 31 | 32 | 35 |
| | | 04/08/99 | | | | | | | | | | | | |
| 891 | HCEOF01 | 203917 | Uni-ZAP XR | 901 | 1669 | 1 | 1669 | 242 | 242 | 4002 | 1 | 32 | 33 | 38 |
| | | 04/08/99 | | | | | | | | | | | | |
| 892 | HCEOF01 | 203917 | Uni-ZAP XR | 902 | 1668 | 1 | 1668 | 242 | 242 | 4003 | 1 | 32 | 33 | 38 |
| | | 04/08/99 | | | | | | | | | | | | |
| 893 | HCEON94 | 203917 | Uni-ZAP XR | 903 | 1677 | 477 | 1677 | 603 | 603 | 4004 | 1 | 14 | 15 | 27 |
| | | 04/08/99 | | | | | | | | | | | | |
| 894 | HCEOQ67 | 203979 | Uni-ZAP XR | 904 | 992 | 1 | 992 | 18 | 18 | 4005 | 1 | 29 | 30 | 32 |
| | | 04/29/99 | | | | | | | | | | | | |
| 895 | HCEOV48 | PTA-181 | Uni-ZAP XR | 905 | 2150 | 1376 | 2150 | 1563 | 1563 | 4006 | 1 | 22 | 23 | 59 |
| | | 06/07/99 | | | | | | | | | | | | |
| 896 | HCEPC90 | 203917 | Uni-ZAP XR | 906 | 939 | 1 | 939 | 232 | 232 | 4007 | 1 | 33 | 34 | 40 |
| | | 04/08/99 | | | | | | | | | | | | |
| 897 | HCEPO08 | 203917 | Uni-ZAP XR | 907 | 641 | 1 | 641 | | 190 | 4008 | 1 | | | 2 |
| | | 04/08/99 | | | | | | | | | | | | |
| 898 | HCESB03 | 203917 | pBluescript | 908 | 883 | 1 | 883 | 228 | 228 | 4009 | 1 | 20 | 21 | 28 |
| | | 04/08/99 | | | | | | | | | | | | |
| 899 | HCESK44 | 203917 | pBluescript | 909 | 1350 | 1 | 1350 | 223 | 223 | 4010 | 1 | | | 8 |
| | | 04/08/99 | | | | | | | | | | | | |
| 900 | HCETE08 | 203917 | pBluescript | 910 | 2541 | 201 | 2541 | 227 | 227 | 4011 | 1 | 17 | 18 | 20 |
| | | 04/08/99 | | | | | | | | | | | | |
| 901 | HCETL19 | 203917 | pBluescript | 911 | 647 | 1 | 647 | 114 | 114 | 4012 | 1 | 33 | 34 | 40 |
| | | 04/08/99 | | | | | | | | | | | | |
| 902 | HCEWD90 | 203917 | Uni-ZAP XR | 912 | 1203 | 210 | 635 | 223 | 223 | 4013 | 1 | | | 4 |
| | | 04/08/99 | | | | | | | | | | | | |
| 903 | HCEWE62 | 203917 | Uni-ZAP XR | 913 | 1561 | 1 | 1561 | 158 | 158 | 4014 | 1 | 20 | 21 | 38 |
| | | 04/08/99 | | | | | | | | | | | | |
| 904 | HCEZW14 | 203917 | Uni-ZAP XR | 914 | 2071 | 1 | 2071 | | 141 | 4015 | 1 | | | 1 |
| | | 04/08/99 | | | | | | | | | | | | |
| 905 | HCFAT42 | 203917 | pSport1 | 915 | 990 | 1 | 990 | 147 | 147 | 4016 | 1 | 35 | 36 | 65 |
| | | 04/08/99 | | | | | | | | | | | | |
| 906 | HCFAT66 | 203917 | pSport1 | 916 | 1780 | 1 | 1780 | 119 | 119 | 4017 | 1 | 27 | 28 | 40 |
| | | 04/08/99 | | | | | | | | | | | | |
| 907 | HCFBA30 | 203917 | pSport1 | 917 | 869 | 1 | 869 | 120 | 120 | 4018 | 1 | | | 15 |
| | | 04/08/99 | | | | | | | | | | | | |
| 908 | HCFBM77 | 203917 | pSport1 | 918 | 929 | 1 | 929 | 93 | 93 | 4019 | 1 | 22 | 23 | 39 |
| | | 04/08/99 | | | | | | | | | | | | |
| 909 | HCFBV39 | 203959 | pSport1 | 919 | 1759 | 890 | 1759 | | 419 | 4020 | 1 | | | 3 |
| | | 04/26/99 | | | | | | | | | | | | |
| 910 | HCFCB72 | 203917 | pSport1 | 920 | 1718 | 1 | 1718 | 92 | 92 | 4021 | 1 | 31 | 32 | 36 |
| | | 04/08/99 | | | | | | | | | | | | |
| 911 | HCFCG91 | PTA-794 | pSport1 | 921 | 2927 | 1720 | 2921 | 1854 | 1854 | 4022 | 1 | 33 | 34 | 295 |
| | | 09/27/99 | | | | | | | | | | | | |
| 912 | HCFCM81 | 203979 | pSport1 | 922 | 1677 | 1 | 1677 | 390 | 390 | 4023 | 1 | 28 | 29 | 36 |
| | | 04/29/99 | | | | | | | | | | | | |
| 913 | HCFCW39 | 203979 | pSport1 | 923 | 1343 | 1 | 1343 | 32 | 32 | 4024 | 1 | 14 | 15 | 37 |
| | | 04/29/99 | | | | | | | | | | | | |
| 914 | HCFCY49 | 203917 | pSport1 | 924 | 1523 | 1 | 1523 | 53 | 53 | 4025 | 1 | 27 | 28 | 34 |
| | | 04/08/99 | | | | | | | | | | | | |
| 915 | HCFDD18 | 203917 | pSport1 | 925 | 1691 | 57 | 1691 | 191 | 191 | 4026 | 1 | 27 | 28 | 34 |
| | | 04/08/99 | | | | | | | | | | | | |
| 916 | HCFLB10 | 203917 | pSport1 | 926 | 870 | 168 | 870 | | 52 | 4027 | 1 | 5 | 6 | 6 |
| | | 04/08/99 | | | | | | | | | | | | |
| 917 | HCFLC03 | 203917 | pSport1 | 927 | 1622 | 1 | 1591 | | 621 | 4028 | 1 | 13 | 14 | 16 |
| | | 04/08/99 | | | | | | | | | | | | |
| 918 | HCFLJ52 | 203917 | pSport1 | 928 | 1482 | 1 | 1482 | 121 | 121 | 4029 | 1 | 32 | 33 | 319 |
| | | 04/08/99 | | | | | | | | | | | | |
| 918 | HCFLJ52 | 203917 | pSport1 | 3104 | 1464 | 1 | 1443 | | 437 | 6205 | 1 | 15 | 16 | 101 |
| | | 04/08/99 | | | | | | | | | | | | |
| 919 | HCFLL33 | 203917 | pSport1 | 929 | 1041 | 1 | 1041 | 78 | 78 | 4030 | 1 | 19 | 20 | 30 |
| | | 04/08/99 | | | | | | | | | | | | |
| 920 | HCFLP48 | 203917 | pSport1 | 930 | 1783 | 1 | 1783 | | 44 | 4031 | 1 | 28 | 29 | 60 |
| | | 04/08/99 | | | | | | | | | | | | |
| 921 | HCFLQ12 | 203917 | pSport1 | 931 | 2208 | 119 | 2208 | 167 | 167 | 4032 | 1 | 36 | 37 | 49 |
| | | 04/08/99 | | | | | | | | | | | | |
| 922 | HCFLY20 | 203917 | pSport1 | 932 | 1097 | 27 | 845 | 385 | 385 | 4033 | 1 | | | 8 |
| | | 04/08/99 | | | | | | | | | | | | |
| 923 | HCFLY20 | 203917 | pSport1 | 933 | 1123 | 38 | 857 | 95 | 95 | 4034 | 1 | 1 | 2 | 158 |
| | | 04/08/99 | | | | | | | | | | | | |
| 924 | HCFMA39 | 203917 | pSport1 | 934 | 382 | 1 | 382 | 217 | 217 | 4035 | 1 | 21 | 22 | 42 |
| | | 04/08/99 | | | | | | | | | | | | |
| 925 | HCFMJ40 | 203917 | pSport1 | 935 | 750 | 1 | 750 | | 321 | 4036 | 1 | 10 | 11 | 22 |
| | | 04/08/99 | | | | | | | | | | | | |
| 926 | HCFML07 | 203917 | pSport1 | 936 | 1238 | 1 | 1238 | 110 | 110 | 4037 | 1 | 27 | 28 | 94 |
| | | 04/08/99 | | | | | | | | | | | | |
| 927 | HCFMR75 | PTA-794 | pSport1 | 937 | 829 | 1 | 829 | 112 | 112 | 4038 | 1 | 23 | 24 | 32 |
| | | 09/27/99 | | | | | | | | | | | | |
| 928 | HCFMX16 | 203917 | pSport1 | 938 | 802 | 1 | 802 | 354 | 354 | 4039 | 1 | 27 | 28 | 28 |
| | | 04/08/99 | | | | | | | | | | | | |
| 929 | HCFMX88 | 203917 | pSport1 | 939 | 1148 | 1 | 1148 | 191 | 191 | 4040 | 1 | 19 | 20 | 49 |
| | | 04/08/99 | | | | | | | | | | | | |
| 930 | HCFNM40 | 203917 | pSport1 | 940 | 1095 | 1 | 1095 | 448 | 448 | 4041 | 1 | 22 | 23 | 31 |
| | | 04/08/99 | | | | | | | | | | | | |
| 931 | HCFNM50 | 203917 | pSport1 | 941 | 1393 | 1 | 1393 | | 335 | 4042 | 1 | | | 25 |
| | | 04/08/99 | | | | | | | | | | | | |
| 932 | HCFNN16 | 203917 | pSport1 | 942 | 1597 | 1 | 1597 | 183 | 183 | 4043 | 1 | 30 | 31 | 46 |
| | | 04/08/99 | | | | | | | | | | | | |
| 933 | HCFNN75 | 203917 | pSport1 | 943 | 1641 | 1 | 1641 | 241 | 241 | 4044 | 1 | 19 | 20 | 49 |
| | | 04/08/99 | | | | | | | | | | | | |
| 934 | HCFOG17 | 203917 | pSport1 | 944 | 1470 | 1 | 1470 | 27 | 27 | 4045 | 1 | 28 | 29 | 34 |
| | | 04/08/99 | | | | | | | | | | | | |
| 935 | HCFOH93 | 203917 | pSport1 | 945 | 604 | 1 | 604 | 3 | 3 | 4046 | 1 | 23 | 24 | 31 |
| | | 04/08/99 | | | | | | | | | | | | |
| 936 | HCGBA15 | 203917 | pSport1 | 946 | 981 | 1 | 981 | 83 | 83 | 4047 | 1 | 26 | 27 | 32 |
| | | 04/08/99 | | | | | | | | | | | | |
| 937 | HCHAC68 | 203917 | pSport1 | 947 | 1653 | 1 | 1653 | 201 | 201 | 4048 | 1 | 33 | 34 | 216 |
| | | 04/08/99 | | | | | | | | | | | | |
| 938 | HCHBP49 | PTA-793 | pSport1 | 948 | 939 | 1 | 939 | 234 | 234 | 4049 | 1 | 11 | 12 | 36 |
| | | 09/27/99 | | | | | | | | | | | | |
| 939 | HCHCA79 | 203917 | pSport1 | 949 | 737 | 1 | 737 | 267 | 267 | 4050 | 1 | 18 | 19 | 59 |
| | | 04/08/99 | | | | | | | | | | | | |
| 940 | HCHCG33 | PTA-181 | pSport1 | 950 | 2286 | 549 | 2286 | 576 | 576 | 4051 | 1 | 26 | 27 | 55 |
| | | 06/07/99 | | | | | | | | | | | | |
| 941 | HCHMY57 | 203917 | pSport1 | 951 | 1875 | 1 | 1875 | 168 | 168 | 4052 | 1 | 48 | 49 | 347 |
| | | 04/08/99 | | | | | | | | | | | | |
| 942 | HCHOC06 | 203917 | pSport1 | 952 | 518 | 1 | 518 | | 341 | 4053 | 1 | | | 28 |
| | | 04/08/99 | | | | | | | | | | | | |
| 943 | HCHOY52 | 203917 | pSport1 | 953 | 1413 | 25 | 1393 | 24 | 24 | 4054 | 1 | 2 | 3 | 410 |
| | | 04/08/99 | | | | | | | | | | | | |
| 944 | HCHQB93 | 203917 | pSport1 | 954 | 2163 | 996 | 2163 | 1321 | 1321 | 4055 | 1 | 47 | 48 | 66 |
| | | 04/08/99 | | | | | | | | | | | | |
| 945 | HCHQB93 | 203917 | pSport1 | 955 | 2163 | 996 | 2163 | 1321 | 1321 | 4056 | 1 | 47 | 48 | 66 |
| | | 04/08/99 | | | | | | | | | | | | |
| 946 | HCLBK61 | 203949 | Lambda ZAP II | 956 | 1588 | 574 | 1563 | | 1050 | 4057 | 1 | 18 | 19 | 29 |
| | | 04/29/99 | | | | | | | | | | | | |
| 947 | HCLCU75 | PTA-181 | Lambda ZAP II | 957 | 682 | 1 | 682 | | 228 | 4058 | 1 | 23 | 24 | 83 |
| | | 06/07/99 | | | | | | | | | | | | |
| 948 | HCMSA37 | 203917 | Uni-ZAP XR | 958 | 907 | 1 | 907 | 90 | 90 | 4059 | 1 | 26 | 27 | 61 |
| | | 04/08/99 | | | | | | | | | | | | |
| 949 | HCMSR07 | 203917 | Uni-ZAP XR | 959 | 1508 | 1 | 1508 | | 309 | 4060 | 1 | 11 | 12 | 36 |
| | | 04/08/99 | | | | | | | | | | | | |
| 950 | HCNAI74 | 203917 | Lambda ZAP II | 960 | 1003 | 1 | 1003 | 168 | 168 | 4061 | 1 | 16 | 17 | 61 |
| | | 04/08/99 | | | | | | | | | | | | |
| 951 | HCNCT01 | 203917 | Lambda ZAP II | 961 | 678 | 1 | 678 | 241 | 241 | 4062 | 1 | | | 7 |
| | | 04/08/99 | | | | | | | | | | | | |
| 952 | HCNDR39 | 203949 | Lambda ZAP II | 962 | 3281 | 2461 | 2841 | 2671 | 2671 | 4063 | 1 | | | 11 |
| | | 04/29/99 | | | | | | | | | | | | |
| 953 | HCNSD91 | 203917 | pBluescript | 963 | 870 | 1 | 870 | 309 | 309 | 4064 | 1 | | | 16 |
| | | 04/08/99 | | | | | | | | | | | | |
| 954 | HCNSF01 | PTA-1838 | pBluescript | 964 | 1735 | 771 | 1725 | 1011 | 1011 | 4065 | 1 | 20 | 21 | 47 |
| | | 05/09/00 | | | | | | | | | | | | |
| 955 | HCNSG06 | 203917 | pBluescript | 965 | 509 | 1 | 509 | 23 | 23 | 4066 | 1 | 20 | 21 | 31 |
| | | 04/08/99 | | | | | | | | | | | | |
| 956 | HCNSG32 | 203917 | pBluescript | 966 | 917 | 1 | 917 | | 568 | 4067 | 1 | | | 8 |
| | | 04/08/99 | | | | | | | | | | | | |
| 957 | HCPAE41 | 203917 | Uni-ZAP XR | 967 | 676 | 1 | 676 | 46 | 46 | 4068 | 1 | 29 | 30 | 42 |
| | | 04/08/99 | | | | | | | | | | | | |
| 958 | HCQAK36 | 203917 | Lambda ZAP II | 968 | 1232 | 100 | 1192 | 385 | 385 | 4069 | 1 | | | 19 |
| | | 04/08/99 | | | | | | | | | | | | |
| 959 | HCQAQ47 | 203917 | Lambda ZAP II | 969 | 862 | 1 | 862 | 113 | 113 | 4070 | 1 | 24 | 25 | 39 |
| | | 04/08/99 | | | | | | | | | | | | |
| 960 | HCQAS72 | 203917 | Lambda ZAP II | 970 | 1388 | 620 | 1388 | 140 | 140 | 4071 | 1 | 1 | 2 | 305 |
| | | 04/08/99 | | | | | | | | | | | | |
| 961 | HCQBM95 | 203917 | Lambda ZAP II | 971 | 692 | 1 | 692 | 253 | 253 | 4072 | 1 | | | 4 |
| | | 04/08/99 | | | | | | | | | | | | |
| 962 | HCQCM95 | 203917 | Lambda ZAP II | 972 | 2629 | 1 | 1909 | 395 | 395 | 4073 | 1 | | | 21 |
| | | 04/08/99 | | | | | | | | | | | | |
| 963 | HCQCM95 | 203917 | Lambda ZAP II | 973 | 2017 | 183 | 1996 | 481 | 481 | 4074 | 1 | | | 21 |
| | | 04/08/99 | | | | | | | | | | | | |
| 964 | HCQCV23 | 203949 | Lambda ZAP II | 974 | 1414 | 396 | 1414 | 516 | 516 | 4075 | 1 | | | 25 |
| | | 04/29/99 | | | | | | | | | | | | |
| 965 | HCQCV23 | 203949 | Lambda ZAP II | 975 | 1412 | 396 | 1412 | 516 | 516 | 4076 | 1 | | | 25 |
| | | 04/29/99 | | | | | | | | | | | | |
| 966 | HCQDD32 | 203917 | Lambda ZAP II | 976 | 884 | 1 | 884 | 72 | 72 | 4077 | 1 | 20 | 21 | 39 |
| | | 04/08/99 | | | | | | | | | | | | |
| 967 | HCQDD61 | 203959 | Lambda ZAP II | 977 | 875 | 1 | 875 | 292 | 292 | 4078 | 1 | | | 9 |
| | | 04/26/99 | | | | | | | | | | | | |
| 968 | HCQDT67 | 203917 | Lambda ZAP II | 978 | 753 | 1 | 753 | 142 | 142 | 4079 | 1 | 21 | 22 | 44 |
| | | 04/08/99 | | | | | | | | | | | | |
| 969 | HCRAI29 | 203918 | Uni-ZAP XR | 979 | 690 | 1 | 690 | 175 | 175 | 4080 | 1 | 38 | 39 | 39 |
| | | 04/08/99 | | | | | | | | | | | | |
| 970 | HCRBI79 | 203917 | Uni-ZAP XR | 980 | 1512 | 104 | 1512 | 199 | 199 | 4081 | 1 | 20 | 21 | 46 |
| | | 04/08/99 | | | | | | | | | | | | |
| 971 | HCRBL20 | 203979 | Uni-ZAP XR | 981 | 2120 | 318 | 2100 | 394 | 394 | 4082 | 1 | 33 | 34 | 95 |
| | | 04/29/99 | | | | | | | | | | | | |
| 972 | HCRBX84 | 203917 | Uni-ZAP XR | 982 | 846 | 45 | 846 | 87 | 87 | 4083 | 1 | 32 | 33 | 194 |
| | | 04/08/99 | | | | | | | | | | | | |
| 972 | HCRBX84 | 203917 | Uni-ZAP XR | 3105 | 1122 | 1 | 1122 | 41 | 41 | 6206 | 1 | | | 32 |
| | | 04/08/99 | | | | | | | | | | | | |
| 973 | HCRMA24 | PTA-794 | pSport1 | 983 | 652 | 1 | 652 | 86 | 86 | 4084 | 1 | 18 | 19 | 22 |
| | | 09/27/99 | | | | | | | | | | | | |
| 974 | HCRMR35 | PTA-181 | pSport1 | 984 | 2909 | 1842 | 2577 | 2164 | 2164 | 4085 | 1 | 28 | 29 | 58 |
| | | 06/07/99 | | | | | | | | | | | | |
| 975 | HCRMR35 | PTA-181 | pSport1 | 985 | 2918 | 1842 | 2577 | 2164 | 2164 | 4086 | 1 | 28 | 29 | 58 |
| | | 06/07/99 | | | | | | | | | | | | |
| 976 | HCRMR35 | PTA-181 | pSport1 | 986 | 2918 | 1842 | 2577 | 2164 | 2164 | 4087 | 1 | 28 | 29 | 58 |
| | | 06/07/99 | | | | | | | | | | | | |
| 977 | HCROC18 | PTA-792 | pSport1 | 987 | 1891 | 1 | 1891 | 367 | 367 | 4088 | 1 | 18 | 19 | 443 |
| | | 09/27/99 | | | | | | | | | | | | |
| 978 | HCUAE53 | 203917 | ZAP Express | 988 | 1487 | 1 | 1487 | 309 | 309 | 4089 | 1 | 14 | 15 | 31 |
| | | 04/08/99 | | | | | | | | | | | | |
| 979 | HCUAO46 | 203917 | ZAP Express | 989 | 262 | 1 | 262 | 169 | 169 | 4090 | 1 | 24 | 25 | 31 |
| | | 04/08/99 | | | | | | | | | | | | |
| 980 | HCUAT74 | 203917 | ZAP Express | 990 | 773 | 1 | 767 | | 405 | 4091 | 1 | 15 | 16 | 32 |
| | | 04/08/99 | | | | | | | | | | | | |
| 981 | HCUBA28 | 203918 | ZAP Express | 991 | 218 | 1 | 218 | 65 | 65 | 4092 | 1 | 26 | 27 | 51 |
| | | 04/08/99 | | | | | | | | | | | | |
| 982 | HCUBC45 | 203917 | ZAP Express | 992 | 488 | 1 | 488 | 98 | 98 | 4093 | 1 | 28 | 29 | 37 |
| | | 04/08/99 | | | | | | | | | | | | |
| 983 | HCUBM41 | 203917 | ZAP Express | 993 | 1269 | 1 | 1269 | 27 | 27 | 4094 | 1 | 21 | 22 | 59 |
| | | 04/08/99 | | | | | | | | | | | | |
| 984 | HCUBN69 | 203917 | ZAP Express | 994 | 858 | 1 | 858 | | 152 | 4095 | 1 | 22 | 23 | 39 |
| | | 04/08/99 | | | | | | | | | | | | |
| 985 | HCUBY47 | 203918 | ZAP Express | 995 | 1107 | 1 | 1107 | | 337 | 4096 | 1 | 18 | 19 | 120 |
| | | 04/08/99 | | | | | | | | | | | | |
| 986 | HCUCV66 | 203917 | ZAP Express | 996 | 1114 | 547 | 1114 | 744 | 744 | 4097 | 1 | 20 | 21 | 45 |
| | | 04/08/99 | | | | | | | | | | | | |
| 987 | HCUDJ41 | 203917 | ZAP Express | 997 | 371 | 1 | 371 | 229 | 229 | 4098 | 1 | 19 | 20 | 20 |
| | | 04/08/99 | | | | | | | | | | | | |
| 988 | HCUEC55 | 203917 | ZAP Express | 998 | 360 | 1 | 360 | 227 | 227 | 4099 | 1 | 26 | 27 | 44 |
| | | 04/08/99 | | | | | | | | | | | | |
| 989 | HCUEG85 | 203917 | ZAP Express | 999 | 505 | 1 | 505 | 200 | 200 | 4100 | 1 | 31 | 32 | 35 |
| | | 04/08/99 | | | | | | | | | | | | |
| 990 | HCUES35 | 203917 | ZAP Express | 1000 | 499 | 1 | 499 | | 25 | 4101 | 1 | 23 | 24 | 33 |
| | | 04/08/99 | | | | | | | | | | | | |
| 991 | HCUFC77 | 203917 | ZAP Express | 1001 | 1545 | 1 | 1545 | 65 | 65 | 4102 | 1 | 27 | 28 | 39 |
| | | 04/08/99 | | | | | | | | | | | | |
| 992 | HCUFD17 | 203949 | ZAP Express | 1002 | 552 | 1 | 552 | 230 | 230 | 4103 | 1 | 17 | 18 | 29 |
| | | 04/29/99 | | | | | | | | | | | | |
| 993 | HCUFD46 | 203917 | ZAP Express | 1003 | 600 | 88 | 354 | 101 | 101 | 4104 | 1 | 21 | 22 | 33 |
| | | 04/08/99 | | | | | | | | | | | | |
| 994 | HCUFE33 | 203917 | ZAP Express | 1004 | 522 | 1 | 522 | 90 | 90 | 4105 | 1 | 14 | 15 | 48 |
| | | 04/08/99 | | | | | | | | | | | | |
| 995 | HCUFJ09 | 203917 | ZAP Express | 1005 | 573 | 226 | 573 | 352 | 352 | 4106 | 1 | 24 | 25 | 49 |
| | | 04/08/99 | | | | | | | | | | | | |
| 996 | HCUFQ58 | 203917 | ZAP Express | 1006 | 597 | 250 | 597 | 295 | 295 | 4107 | 1 | 23 | 24 | 34 |
| | | 04/08/99 | | | | | | | | | | | | |
| 997 | HCUFQ58 | 203917 | ZAP Express | 1007 | 594 | 248 | 594 | 293 | 293 | 4108 | 1 | 23 | 24 | 34 |
| | | 04/08/99 | | | | | | | | | | | | |
| 998 | HCUFX08 | 203917 | ZAP Express | 1008 | 1333 | 1 | 1333 | | 280 | 4109 | 1 | 9 | 10 | 21 |
| | | 04/08/99 | | | | | | | | | | | | |
| 999 | HCUGB76 | 203917 | ZAP Express | 1009 | 391 | 1 | 391 | 263 | 263 | 4110 | 1 | 35 | 36 | 36 |
| | | 04/08/99 | | | | | | | | | | | | |
| 1000 | HCUGK79 | 203917 | ZAP Express | 1010 | 182 | 1 | 182 | 80 | 80 | 4111 | 1 | | | 4 |
| | | 04/08/99 | | | | | | | | | | | | |
| 1001 | HCUGQ19 | 203917 | ZAP Express | 1011 | 587 | 1 | 587 | | 359 | 4112 | 1 | 5 | 6 | 29 |
| | | 04/08/99 | | | | | | | | | | | | |
| 1002 | HCUGR26 | 203917 | ZAP Express | 1012 | 1630 | 1 | 1630 | | 27 | 4113 | 1 | 19 | 20 | 49 |
| | | 04/08/99 | | | | | | | | | | | | |
| 1003 | HCUGR86 | 203917 | ZAP Express | 1013 | 2139 | 1 | 2139 | | 831 | 4114 | 1 | 13 | 14 | 36 |
| | | 04/08/99 | | | | | | | | | | | | |
| 1004 | HCUHE27 | 203917 | ZAP Express | 1014 | 819 | 1 | 819 | 213 | 213 | 4115 | 1 | | | 10 |
| | | 04/08/99 | | | | | | | | | | | | |
| 1005 | HCUHL82 | 203917 | ZAP Express | 1015 | 174 | 1 | 174 | 50 | 50 | 4116 | 1 | 22 | 23 | 31 |
| | | 04/08/99 | | | | | | | | | | | | |
| 1006 | HCUHM71 | 203917 | ZAP Express | 1016 | 622 | 1 | 622 | 80 | 80 | 4117 | 1 | 21 | 22 | 84 |
| | | 04/08/99 | | | | | | | | | | | | |
| 1007 | HCWAK88 | 203917 | ZAP Express | 1017 | 1993 | 40 | 1993 | 115 | 115 | 4118 | 1 | 39 | 40 | 46 |
| | | 04/08/99 | | | | | | | | | | | | |
| 1008 | HCWAL10 | 203917 | ZAP Express | 1018 | 1094 | 7 | 1094 | | 362 | 4119 | 1 | | | 10 |
| | | 04/08/99 | | | | | | | | | | | | |
| 1009 | HCWAT71 | 203917 | ZAP Express | 1019 | 2439 | 1 | 2439 | 142 | 142 | 4120 | 1 | 22 | 23 | 35 |
| | | 04/08/99 | | | | | | | | | | | | |
| 1010 | HCWBQ52 | 203917 | ZAP Express | 1020 | 859 | 1 | 859 | 284 | 284 | 4121 | 1 | | | 28 |
| | | 04/08/99 | | | | | | | | | | | | |
| 1011 | HCWCH16 | 203949 | ZAP Express | 1021 | 2295 | 1 | 2295 | 166 | 166 | 4122 | 1 | | | 7 |
| | | 04/29/99 | | | | | | | | | | | | |
| 1012 | HCWDM69 | 203917 | ZAP Express | 1022 | 1055 | 150 | 1055 | | 328 | 4123 | 1 | | | 4 |
| | | 04/08/99 | | | | | | | | | | | | |
| 1013 | HCWEB38 | PTA-1838 | ZAP Express | 1023 | 1179 | 8 | 1179 | 223 | 223 | 4124 | 1 | 24 | 25 | 60 |
| | | 05/09/00 | | | | | | | | | | | | |
| 1014 | HCWEB72 | 203917 | ZAP Express | 1024 | 883 | 1 | 883 | 86 | 86 | 4125 | 1 | 23 | 24 | 27 |
| | | 04/08/99 | | | | | | | | | | | | |
| 1015 | HCWEF04 | PTA-1838 | ZAP Express | 1025 | 383 | 1 | 356 | 25 | 25 | 4126 | 1 | 24 | 25 | 119 |
| | | 05/09/00 | | | | | | | | | | | | |
| 1016 | HCWEI82 | 203917 | ZAP Express | 1026 | 657 | 1 | 657 | 135 | 135 | 4127 | 1 | | | 6 |
| | | 04/08/99 | | | | | | | | | | | | |
| 1017 | HCWEM96 | 203917 | ZAP Express | 1027 | 1901 | 1 | 1901 | | 1156 | 4128 | 1 | 7 | 8 | 36 |
| | | 04/08/99 | | | | | | | | | | | | |
| 1018 | HCWFJ16 | 203917 | ZAP Express | 1028 | 375 | 12 | 358 | 227 | 227 | 4129 | 1 | 18 | 19 | 49 |
| | | 04/08/99 | | | | | | | | | | | | |
| 1019 | HCWFJ16 | 203917 | ZAP Express | 1029 | 375 | 12 | 358 | 227 | 227 | 4130 | 1 | 18 | 19 | 49 |
| | | 04/08/99 | | | | | | | | | | | | |
| 1020 | HCWFK03 | 203917 | ZAP Express | 1030 | 303 | 1 | 303 | 149 | 149 | 4131 | 1 | 27 | 28 | 43 |
| | | 04/08/99 | | | | | | | | | | | | |
| 1021 | HCWHD30 | 203917 | ZAP Express | 1031 | 810 | 1 | 810 | 262 | 262 | 4132 | 1 | | | 12 |
| | | 04/08/99 | | | | | | | | | | | | |
| 1022 | HCWHT34 | 203917 | ZAP Express | 1032 | 1256 | 1 | 1256 | 190 | 190 | 4133 | 1 | 22 | 23 | 32 |
| | | 04/08/99 | | | | | | | | | | | | |
| 1023 | HCWHT52 | 203917 | ZAP Express | 1033 | 657 | 1 | 657 | 527 | 527 | 4134 | 1 | 18 | 19 | 43 |
| | | 04/08/99 | | | | | | | | | | | | |
| 1024 | HCWKO32 | 203917 | ZAP Express | 1034 | 626 | 1 | 626 | 146 | 146 | 4135 | 1 | 23 | 24 | 41 |
| | | 04/08/99 | | | | | | | | | | | | |
| 1025 | HCWLE50 | 203917 | ZAP Express | 1035 | 342 | 1 | 342 | 244 | 244 | 4136 | 1 | 18 | 19 | 33 |
| | | 04/08/99 | | | | | | | | | | | | |
| 1026 | HCWUF93 | 203917 | ZAP Express | 1036 | 808 | 366 | 792 | 609 | 609 | 4137 | 1 | 45 | 46 | 66 |
| | | 04/08/99 | | | | | | | | | | | | |
| 1027 | HCWUW24 | 203917 | ZAP Express | 1037 | 1300 | 1 | 1144 | 27 | 27 | 4138 | 1 | 24 | 25 | 39 |
| | | 04/08/99 | | | | | | | | | | | | |
| 1028 | HCYBA32 | 203979 | pBluescript | 1038 | 2092 | 1 | 2092 | 173 | 173 | 4139 | 1 | 18 | 19 | 30 |
| | | 04/29/99 | SK- | | | | | | | | | | | |
| 1029 | HDAAV67 | 203917 | pSport1 | 1039 | 643 | 1 | 643 | 54 | 54 | 4140 | 1 | 29 | 30 | 38 |
| | | 04/08/99 | | | | | | | | | | | | |
| 1030 | HDABR74 | PTA-181 | pSport1 | 1040 | 1896 | 1 | 1896 | | 419 | 4141 | 1 | 14 | 15 | 243 |
| | | 06/07/99 | | | | | | | | | | | | |
| 1031 | HDABW45 | 203917 | pSport1 | 1041 | 3362 | 1 | 3362 | 95 | 95 | 4142 | 1 | 20 | 21 | 33 |
| | | 04/08/99 | | | | | | | | | | | | |
| 1032 | HDACJ52 | 203917 | pSport1 | 1042 | 842 | 1 | 842 | | 178 | 4143 | 1 | 17 | 18 | 44 |
| | | 04/08/99 | | | | | | | | | | | | |
| 1033 | HDCBM09 | PTA-794 | pSport1 | 1043 | 419 | 1 | 419 | 69 | 69 | 4144 | 1 | 17 | 18 | 117 |
| | | 09/27/99 | | | | | | | | | | | | |
| 1034 | HDFAB86 | 203917 | pCMVSport 2.0 | 1044 | 1262 | 1 | 1262 | 155 | 155 | 4145 | 1 | 17 | 18 | 39 |
| | | 04/08/99 | | | | | | | | | | | | |
| 1035 | HDFIB37 | 203917 | pCMVSport 2.0 | 1045 | 1624 | 1 | 1624 | 357 | 357 | 4146 | 1 | 20 | 21 | 32 |
| | | 04/08/99 | | | | | | | | | | | | |
| 1036 | HDFMB91 | 203917 | pCMVSport 2.0 | 1046 | 224 | 1 | 224 | 53 | 53 | 4147 | 1 | 20 | 21 | 31 |
| | | 04/08/99 | | | | | | | | | | | | |
| 1037 | HDHAA55 | 203917 | pCMVSport 2.0 | 1047 | 1567 | 1 | 1567 | 93 | 93 | 4148 | 1 | 31 | 32 | 50 |
| | | 04/08/99 | | | | | | | | | | | | |
| 1038 | HDHEA33 | 203949 | pCMVSport 2.0 | 1048 | 1681 | 1 | 1681 | 414 | 414 | 4149 | 1 | 18 | 19 | 85 |
| | | 04/29/99 | | | | | | | | | | | | |
| 1039 | HDHEB12 | 203917 | pCMVSport 2.0 | 1049 | 697 | 1 | 697 | 294 | 294 | 4150 | 1 | 21 | 22 | 67 |
| | | 04/08/99 | | | | | | | | | | | | |
| 1040 | HDHEB80 | 203917 | pCMVSport 2.0 | 1050 | 733 | 1 | 733 | 302 | 302 | 4151 | 1 | 20 | 21 | 28 |
| | | 04/08/99 | | | | | | | | | | | | |
| 1041 | HDHIA16 | 203917 | pCMVSport 2.0 | 1051 | 680 | 1 | 680 | 249 | 249 | 4152 | 1 | 15 | 16 | 39 |
| | | 04/08/99 | | | | | | | | | | | | |
| 1042 | HDHIA26 | 203917 | pCMVSport 2.0 | 1052 | 1661 | 1 | 1661 | 146 | 146 | 4153 | 1 | 34 | 35 | 54 |
| | | 04/08/99 | | | | | | | | | | | | |
| 1043 | HDHMA71 | 203917 | pCMVSport 2.0 | 1053 | 1336 | 71 | 1336 | 210 | 210 | 4154 | 1 | 20 | 21 | 38 |
| | | 04/08/99 | | | | | | | | | | | | |
| 1044 | HDLAL94 | 203949 | pCMVSport 2.0 | 1054 | 3569 | 548 | 3569 | 192 | 192 | 4155 | 1 | 15 | 16 | 179 |
| | | 04/29/99 | | | | | | | | | | | | |
| 1045 | HDPAB86 | PTA-1838 | pCMVSport 3.0 | 1055 | 2074 | 1 | 2074 | 389 | 389 | 4156 | 1 | 22 | 23 | 81 |
| | | 05/09/00 | | | | | | | | | | | | |
| 1046 | HDPAE80 | 203917 | pCMVSport 3.0 | 1056 | 2010 | 1 | 2010 | 181 | 181 | 4157 | 1 | 24 | 25 | 55 |
| | | 04/08/99 | | | | | | | | | | | | |
| 1047 | HDPAQ86 | 203917 | pCMVSport 3.0 | 1057 | 1426 | 1 | 1426 | 90 | 90 | 4158 | 1 | | | 29 |
| | | 04/08/99 | | | | | | | | | | | | |
| 1048 | HDPBD56 | 203917 | pCMVSport 3.0 | 1058 | 2382 | 247 | 2379 | 371 | 371 | 4159 | 1 | 20 | 21 | 31 |
| | | 04/08/99 | | | | | | | | | | | | |
| 1049 | HDPBN48 | 203960 | pCMVSport 3.0 | 1059 | 1735 | 1 | 1735 | 126 | 126 | 4160 | 1 | 19 | 20 | 33 |
| | | 04/26/99 | | | | | | | | | | | | |
| 1050 | HDPCG79 | 203960 | pCMVSport 3.0 | 1060 | 1581 | 1 | 1581 | 240 | 240 | 4161 | 1 | 22 | 23 | 24 |
| | | 04/26/99 | | | | | | | | | | | | |
| 1051 | HDPCV29 | 203960 | pCMVSport 3.0 | 1061 | 1226 | 1 | 1226 | 95 | 95 | 4162 | 1 | | | 43 |
| | | 04/26/99 | | | | | | | | | | | | |
| 1052 | HDPDA36 | 203960 | pCMVSport 3.0 | 1062 | 3840 | 1 | 3840 | 305 | 305 | 4163 | 1 | 31 | 32 | 32 |
| | | 04/26/99 | | | | | | | | | | | | |
| 1053 | HDPDC59 | PTA-791 | pCMVSport 3.0 | 1063 | 2243 | 1 | 2243 | 320 | 320 | 4164 | 1 | 21 | 22 | 56 |
| | | 09/27/99 | | | | | | | | | | | | |
| 1054 | HDPFG13 | 203960 | pCMVSport 3.0 | 1064 | 1635 | 11 | 1635 | 170 | 170 | 4165 | 1 | 43 | 44 | 63 |
| | | 04/26/99 | | | | | | | | | | | | |
| 1055 | HDPFK27 | 203960 | pCMVSport 3.0 | 1065 | 1533 | 1 | 1533 | | 283 | 4166 | 1 | 14 | 15 | 34 |
| | | 04/26/99 | | | | | | | | | | | | |
| 1056 | HDPFZ05 | 203960 | pCMVSport 3.0 | 1066 | 2185 | 1 | 2185 | 172 | 172 | 4167 | 1 | 15 | 16 | 42 |
| | | 04/26/99 | | | | | | | | | | | | |
| 1057 | HDPGA84 | 203960 | pCMVSport 3.0 | 1067 | 1119 | 1 | 1119 | 17 | 17 | 4168 | 1 | 19 | 20 | 100 |
| | | 04/26/99 | | | | | | | | | | | | |
| 1058 | HDPGR80 | 203949 | pCMVSport 3.0 | 1068 | 2608 | 67 | 1756 | | 1690 | 4169 | 1 | 6 | 7 | 41 |
| | | 04/29/99 | | | | | | | | | | | | |
| 1059 | HDPGU14 | 203918 | pCMVSport 3.0 | 1069 | 2322 | 898 | 2321 | 1202 | 1202 | 4170 | 1 | | | 3 |
| | | 04/08/99 | | | | | | | | | | | | |
| 1060 | HDPGX09 | 203960 | pCMVSport 3.0 | 1070 | 1371 | 1 | 1371 | 90 | 90 | 4171 | 1 | 19 | 20 | 30 |
| | | 04/26/99 | | | | | | | | | | | | |
| 1061 | HDPIE44 | PTA-794 | pCMVSport 3.0 | 1071 | 4115 | 1 | 4115 | 169 | 169 | 4172 | 1 | 35 | 36 | 60 |
| | | 09/27/99 | | | | | | | | | | | | |
| 1062 | HDPIE73 | PTA-793 | pCMVSport 3.0 | 1072 | 2251 | 1 | 2251 | 212 | 212 | 4173 | 1 | 19 | 20 | 38 |
| | | 09/27/99 | | | | | | | | | | | | |
| 1063 | HDPIF35 | 203959 | pCMVSport 3.0 | 1073 | 1011 | 1 | 826 | | 102 | 4174 | 1 | 7 | 8 | 21 |
| | | 04/26/99 | | | | | | | | | | | | |
| 1064 | HDPIF65 | 203949 | pCMVSport 3.0 | 1074 | 1646 | 1 | 1646 | 38 | 38 | 4175 | 1 | 36 | 37 | 57 |
| | | 04/29/99 | | | | | | | | | | | | |
| 1065 | HDPIH25 | 203960 | pCMVSport 3.0 | 1075 | 2729 | 1 | 2729 | 181 | 181 | 4176 | 1 | 48 | 49 | 51 |
| | | 04/26/99 | | | | | | | | | | | | |
| 1066 | HDPIY31 | PTA-793 | pCMVSport 3.0 | 1076 | 1978 | 1 | 1978 | 268 | 268 | 4177 | 1 | 16 | 17 | 35 |
| | | 09/27/99 | | | | | | | | | | | | |
| 1067 | HDPJH72 | 203949 | pCMVSport 3.0 | 1077 | 1990 | 12 | 1348 | | 603 | 4178 | 1 | 13 | 14 | 186 |
| | | 04/29/99 | | | | | | | | | | | | |
| 1068 | HDPJV53 | 203960 | pCMVSport 3.0 | 1078 | 2816 | 1 | 2816 | 145 | 145 | 4179 | 1 | 16 | 17 | 57 |
| | | 04/26/99 | | | | | | | | | | | | |
| 1069 | HDPJV75 | 203960 | pCMVSport 3.0 | 1079 | 1250 | 1 | 1250 | | 382 | 4180 | 1 | | | 23 |
| | | 04/26/99 | | | | | | | | | | | | |
| 1070 | HDPKC55 | 203960 | pCMVSport 3.0 | 1080 | 1795 | 1 | 1795 | 102 | 102 | 4181 | 1 | 28 | 29 | 453 |
| | | 04/26/99 | | | | | | | | | | | | |
| 1071 | HDPKD16 | PTA-794 | pCMVSport 3.0 | 1081 | 2486 | 1 | 2486 | 274 | 274 | 4182 | 1 | | | 21 |
| | | 09/27/99 | | | | | | | | | | | | |
| 1072 | HDPMC52 | 203949 | pCMVSport 3.0 | 1082 | 554 | 1 | 554 | 214 | 214 | 4183 | 1 | 50 | 51 | 78 |
| | | 04/29/99 | | | | | | | | | | | | |
| 1073 | HDPML04 | 203960 | pCMVSport 3.0 | 1083 | 1422 | 1 | 1422 | 98 | 98 | 4184 | 1 | 24 | 25 | 32 |
| | | 04/26/99 | | | | | | | | | | | | |
| 1074 | HDPMM22 | 203960 | pCMVSport 3.0 | 1084 | 1181 | 1 | 1181 | 332 | 332 | 4185 | 1 | 15 | 16 | 35 |
| | | 04/26/99 | | | | | | | | | | | | |
| 1075 | HDPNC21 | 203960 | pCMVSport 3.0 | 1085 | 1430 | 1 | 1430 | | 40 | 4186 | 1 | 9 | 10 | 68 |
| | | 04/26/99 | | | | | | | | | | | | |
| 1076 | HDPNJ26 | PTA-181 | pCMVSport 3.0 | 1086 | 1719 | 394 | 1719 | 422 | 422 | 4187 | 1 | 20 | 21 | 50 |
| | | 06/07/99 | | | | | | | | | | | | |
| 1077 | HDPOD73 | PTA-794 | pCMVSport 3.0 | 1087 | 797 | 1 | 797 | 446 | 446 | 4188 | 1 | | | 8 |
| | | 09/27/99 | | | | | | | | | | | | |
| 1078 | HDPOT33 | PTA-1838 | pCMVSport 3.0 | 1088 | 1868 | 551 | 1868 | | 691 | 4189 | 1 | 17 | 18 | 97 |
| | | 05/09/00 | | | | | | | | | | | | |
| 1079 | HDPPB70 | PTA-791 | pCMVSport 3.0 | 1089 | 2444 | 82 | 2414 | 257 | 257 | 4190 | 1 | 20 | 21 | 310 |
| | | 09/27/99 | | | | | | | | | | | | |
| 1080 | HDPPC19 | 203960 | pCMVSport 3.0 | 1090 | 686 | 1 | 686 | 271 | 271 | 4191 | 1 | 19 | 20 | 64 |
| | | 04/26/99 | | | | | | | | | | | | |
| 1081 | HDPPE05 | 203960 | pCMVSport 3.0 | 1091 | 1112 | 1 | 1112 | 303 | 303 | 4192 | 1 | | | 16 |
| | | 04/26/99 | | | | | | | | | | | | |
| 1082 | HDPSA70 | 203960 | pCMVSport 3.0 | 1092 | 1254 | 1 | 1254 | 252 | 252 | 4193 | 1 | 13 | 14 | 16 |
| | | 04/26/99 | | | | | | | | | | | | |
| 1083 | HDPSS56 | 203949 | pCMVSport 3.0 | 1093 | 1240 | 1 | 1240 | 186 | 186 | 4194 | 1 | 24 | 25 | 31 |
| | | 04/29/99 | | | | | | | | | | | | |
| 1084 | HDPSZ07 | 203960 | pCMVSport 3.0 | 1094 | 1337 | 1 | 1009 | 244 | 244 | 4195 | 1 | 27 | 28 | 39 |
| | | 04/26/99 | | | | | | | | | | | | |
| 1085 | HDPSZ07 | 203960 | pCMVSport 3.0 | 1095 | 1337 | 1 | 1009 | 244 | 244 | 4196 | 1 | 27 | 28 | 39 |
| | | 04/26/99 | | | | | | | | | | | | |
| 1086 | HDPSZ07 | 203960 | pCMVSport 3.0 | 1096 | 1337 | 1 | 1009 | 244 | 244 | 4197 | 1 | 27 | 28 | 39 |
| | | 04/26/99 | | | | | | | | | | | | |
| 1087 | HDPTI49 | 203949 | pCMVSport 3.0 | 1097 | 1724 | 1 | 1724 | 182 | 182 | 4198 | 1 | 17 | 18 | 35 |
| | | 04/29/99 | | | | | | | | | | | | |
| 1088 | HDPTP22 | 203960 | pCMVSport 3.0 | 1098 | 1519 | 1 | 1519 | 236 | 236 | 4199 | 1 | 26 | 27 | 37 |
| | | 04/26/99 | | | | | | | | | | | | |
| 1089 | HDPYE25 | 203960 | pCMVSport 3.0 | 1099 | 1108 | 33 | 1108 | 301 | 301 | 4200 | 1 | 22 | 23 | 23 |
| | | 04/26/99 | | | | | | | | | | | | |
| 1090 | HDQGD06 | 203960 | pCMVSport 3.0 | 1100 | 1579 | 53 | 1437 | 469 | 469 | 4201 | 1 | 19 | 20 | 310 |
| | | 04/26/99 | | | | | | | | | | | | |
| 1091 | HDQGD06 | 203960 | pCMVSport 3.0 | 1101 | 1561 | 53 | 1437 | 469 | 469 | 4202 | 1 | 19 | 20 | 310 |
| | | 04/26/99 | | | | | | | | | | | | |
| 1092 | HDQGD06 | 203960 | pCMVSport 3.0 | 1102 | 1581 | 53 | 1439 | 470 | 470 | 4203 | 1 | 19 | 20 | 370 |
| | | 04/26/99 | | | | | | | | | | | | |
| 1093 | HDQGN08 | 203960 | pCMVSport 3.0 | 1103 | 1960 | 1 | 1960 | 96 | 96 | 4204 | 1 | 31 | 32 | 137 |
| | | 04/26/99 | | | | | | | | | | | | |
| 1094 | HDQGO62 | 203960 | pCMVSport 3.0 | 1104 | 1077 | 482 | 1077 | 728 | 728 | 4205 | 1 | | | 10 |
| | | 04/26/99 | | | | | | | | | | | | |
| 1095 | HDQPM16 | PTA-793 | pCMVSport 3.0 | 1105 | 2054 | 1 | 2054 | 473 | 473 | 4206 | 1 | 26 | 27 | 39 |
| | | 09/27/99 | | | | | | | | | | | | |
| 1096 | HDRAA17 | 203960 | pCMVSport 2.0 | 1106 | 788 | 1 | 788 | 77 | 77 | 4207 | 1 | 27 | 28 | 50 |
| | | 04/26/99 | | | | | | | | | | | | |
| 1097 | HDRAC68 | 203960 | pCMVSport 2.0 | 1107 | 782 | 1 | 782 | 65 | 65 | 4208 | 1 | 22 | 23 | 50 |
| | | 04/26/99 | | | | | | | | | | | | |
| 1098 | HDSAC78 | 203960 | Uni-ZAP XR | 1108 | 1387 | 1 | 1387 | 11 | 11 | 4209 | 1 | 24 | 25 | 32 |
| | | 04/26/99 | | | | | | | | | | | | |
| 1099 | HDSAH37 | 203960 | Uni-ZAP XR | 1109 | 545 | 1 | 545 | 239 | 239 | 4210 | 1 | 17 | 18 | 55 |
| | | 04/26/99 | | | | | | | | | | | | |
| 1100 | HDSAM57 | 203960 | Uni-ZAP XR | 1110 | 924 | 1 | 924 | 226 | 226 | 4211 | 1 | 20 | 21 | 23 |
| | | 04/26/99 | | | | | | | | | | | | |
| 1101 | HDSAO14 | 203979 | Uni-ZAP XR | 1111 | 1433 | 1 | 1433 | | 208 | 4212 | 1 | 21 | 22 | 49 |
| | | 04/29/99 | | | | | | | | | | | | |
| 1102 | HDSAO64 | 203960 | Uni-ZAP XR | 1112 | 477 | 1 | 477 | | 351 | 4213 | 1 | 11 | 12 | 29 |
| | | 04/26/99 | | | | | | | | | | | | |
| 1103 | HDSAP15 | 203960 | Uni-ZAP XR | 1113 | 1857 | 851 | 1417 | 976 | 976 | 4214 | 1 | 28 | 29 | 126 |
| | | 04/26/99 | | | | | | | | | | | | |
| 1104 | HDTAR39 | 203949 | pCMVSport 2.0 | 1114 | 1267 | 1 | 1267 | 199 | 199 | 4215 | 1 | 21 | 22 | 52 |
| | | 04/29/99 | | | | | | | | | | | | |
| 1105 | HDTAS57 | 203960 | pCMVSport 2.0 | 1115 | 915 | 1 | 915 | 62 | 62 | 4216 | 1 | 46 | 47 | 50 |
| | | 04/26/99 | | | | | | | | | | | | |
| 1106 | HDTBP62 | 203960 | pCMVSport 2.0 | 1116 | 1358 | 1 | 1358 | 203 | 203 | 4217 | 1 | 30 | 31 | 37 |
| | | 04/26/99 | | | | | | | | | | | | |
| 1107 | HDTBQ77 | 203960 | pCMVSport 2.0 | 1117 | 1335 | 1 | 1335 | 348 | 348 | 4218 | 1 | 30 | 31 | 34 |
| | | 04/26/99 | | | | | | | | | | | | |
| 1108 | HDTDA48 | 203960 | pCMVSport 2.0 | 1118 | 932 | 1 | 932 | 105 | 105 | 4219 | 1 | 20 | 21 | 37 |
| | | 04/26/99 | | | | | | | | | | | | |
| 1109 | HDTDE66 | 203960 | pCMVSport 2.0 | 1119 | 697 | 1 | 697 | 223 | 223 | 4220 | 1 | 33 | 34 | 75 |
| | | 04/26/99 | | | | | | | | | | | | |
| 1110 | HDTDG75 | 203960 | pCMVSport 2.0 | 1120 | 611 | 1 | 611 | 410 | 410 | 4221 | 1 | 13 | 14 | 35 |
| | | 04/26/99 | | | | | | | | | | | | |
| 1111 | HDTDS09 | 203960 | pCMVSport 2.0 | 1121 | 676 | 1 | 676 | | 443 | 4222 | 1 | | | 25 |
| | | 04/26/99 | | | | | | | | | | | | |
| 1112 | HDTFF53 | 203960 | pCMVSport 2.0 | 1122 | 572 | 1 | 572 | 19 | 19 | 4223 | 1 | | | 9 |
| | | 04/26/99 | | | | | | | | | | | | |
| 1113 | HDTGW76 | PTA-181 | pCMVSport 2.0 | 1123 | 2235 | 1 | 2235 | 156 | 156 | 4224 | 1 | 33 | 34 | 37 |
| | | 06/07/99 | | | | | | | | | | | | |
| 1114 | HDTGZ56 | 203960 | pCMVSport 2.0 | 1124 | 1476 | 1 | 1476 | 250 | 250 | 4225 | 1 | 15 | 16 | 36 |
| | | 04/26/99 | | | | | | | | | | | | |
| 1115 | HDTHZ85 | PTA-793 | pCMVSport 2.0 | 1125 | 596 | 1 | 596 | 114 | 114 | 4226 | 1 | | | 31 |
| | | 09/27/99 | | | | | | | | | | | | |
| 1116 | HDTIM39 | PTA-793 | pCMVSport 2.0 | 1126 | 1735 | 1 | 1735 | 401 | 401 | 4227 | 1 | 29 | 30 | 85 |
| | | 09/27/99 | | | | | | | | | | | | |
| 1117 | HDTKJ29 | 203960 | pCMVSport 2.0 | 1127 | 1388 | 1 | 1388 | 112 | 112 | 4228 | 1 | 22 | 23 | 207 |
| | | 04/26/99 | | | | | | | | | | | | |
| 1118 | HDUAB12 | 203960 | pSport1 | 1128 | 887 | 1 | 887 | 294 | 294 | 4229 | 1 | 12 | 13 | 33 |
| | | 04/26/99 | | | | | | | | | | | | |
| 1119 | HDUAD68 | 203960 | pSport1 | 1129 | 804 | 1 | 804 | 35 | 35 | 4230 | 1 | 31 | 32 | 34 |
| | | 04/26/99 | | | | | | | | | | | | |
| 1120 | HE2AC74 | PTA-181 | Uni-ZAP XR | 1130 | 3264 | 1713 | 3206 | 1869 | 1869 | 4231 | 1 | 26 | 27 | 31 |
| | | 06/07/99 | | | | | | | | | | | | |
| 1121 | HE2AC74 | PTA-181 | Uni-ZAP XR | 1131 | 4417 | 2866 | 4359 | 3022 | 3022 | 4232 | 1 | 26 | 27 | 31 |
| | | 06/07/99 | | | | | | | | | | | | |
| 1122 | HE2AC75 | 203960 | Uni-ZAP XR | 1132 | 324 | 1 | 324 | 14 | 14 | 4233 | 1 | 15 | 16 | 33 |
| | | 04/26/99 | | | | | | | | | | | | |
| 1123 | HE2AI94 | 203960 | Uni-ZAP XR | 1133 | 765 | 1 | 765 | | 144 | 4234 | 1 | 25 | 26 | 55 |
| | | 04/26/99 | | | | | | | | | | | | |
| 1124 | HE2AT61 | 203960 | Uni-ZAP XR | 1134 | 853 | 1 | 853 | 487 | 487 | 4235 | 1 | 21 | 22 | 75 |
| | | 04/26/99 | | | | | | | | | | | | |
| 1125 | HE2AX36 | 203960 | Uni-ZAP XR | 1135 | 1293 | 5 | 1293 | | 34 | 4236 | 1 | | | 6 |
| | | 04/26/99 | | | | | | | | | | | | |
| 1126 | HE2AY96 | 203960 | Uni-ZAP XR | 1136 | 1771 | 579 | 1261 | | 1394 | 4237 | 1 | 7 | 8 | 12 |
| | | 04/26/99 | | | | | | | | | | | | |
| 1127 | HE2BD72 | 203960 | Uni-ZAP XR | 1137 | 699 | 1 | 699 | 217 | 217 | 4238 | 1 | 15 | 16 | 59 |
| | | 04/26/99 | | | | | | | | | | | | |
| 1128 | HE2BH50 | 203979 | Uni-ZAP XR | 1138 | 1453 | 1 | 1453 | 129 | 129 | 4239 | 1 | 18 | 19 | 24 |
| | | 04/29/99 | | | | | | | | | | | | |
| 1129 | HE2CB53 | 203960 | Uni-ZAP XR | 1139 | 1140 | 1 | 1140 | 121 | 121 | 4240 | 1 | 20 | 21 | 38 |
| | | 04/26/99 | | | | | | | | | | | | |
| 1130 | HE2CC17 | 203960 | Uni-ZAP XR | 1140 | 1397 | 1 | 1397 | 70 | 70 | 4241 | 1 | 20 | 21 | 32 |
| | | 04/26/99 | | | | | | | | | | | | |
| 1131 | HE2CJ53 | 203960 | Uni-ZAP XR | 1141 | 1883 | 1 | 1883 | 123 | 123 | 4242 | 1 | 21 | 22 | 79 |
| | | 04/26/99 | | | | | | | | | | | | |
| 1132 | HE2CK47 | 203960 | Uni-ZAP XR | 1142 | 2220 | 915 | 1746 | 960 | 960 | 4243 | 1 | 17 | 18 | 55 |
| | | 04/26/99 | | | | | | | | | | | | |
| 1133 | HE2CM34 | 203960 | Uni-ZAP XR | 1143 | 432 | 1 | 432 | 175 | 175 | 4244 | 1 | | | 4 |
| | | 04/26/99 | | | | | | | | | | | | |
| 1134 | HE2DG46 | 203960 | Uni-ZAP XR | 1144 | 1799 | 1 | 1799 | 132 | 132 | 4245 | 1 | 16 | 17 | 30 |
| | | 04/26/99 | | | | | | | | | | | | |
| 1135 | HE2DI16 | 203960 | Uni-ZAP XR | 1145 | 1521 | 1 | 1521 | 95 | 95 | 4246 | 1 | 16 | 17 | 20 |
| | | 04/26/99 | | | | | | | | | | | | |
| 1136 | HE2DJ84 | 203960 | Uni-ZAP XR | 1146 | 1185 | 563 | 1185 | | 842 | 4247 | 1 | 13 | 14 | 59 |
| | | 04/26/99 | | | | | | | | | | | | |
| 1137 | HE2DY23 | PTA-791 | Uni-ZAP XR | 1147 | 1649 | 1 | 1649 | 175 | 175 | 4248 | 1 | 14 | 15 | 30 |
| | | 09/27/99 | | | | | | | | | | | | |
| 1138 | HE2DY25 | 203918 | Uni-ZAP XR | 1148 | 3484 | 279 | 2191 | 493 | 493 | 4249 | 1 | 28 | 29 | 34 |
| | | 04/08/99 | | | | | | | | | | | | |
| 1139 | HE2EE80 | 203949 | Uni-ZAP XR | 1149 | 1593 | 1 | 1593 | 181 | 181 | 4250 | 1 | 20 | 21 | 44 |
| | | 04/29/99 | | | | | | | | | | | | |
| 1140 | HE2EH45 | 203960 | Uni-ZAP XR | 1150 | 933 | 1 | 914 | 213 | 213 | 4251 | 1 | 14 | 15 | 16 |
| | | 04/26/99 | | | | | | | | | | | | |
| 1141 | HE2FE89 | 203918 | Uni-ZAP XR | 1151 | 1685 | 1 | 1609 | 117 | 117 | 4252 | 1 | 28 | 29 | 68 |
| | | 04/08/99 | | | | | | | | | | | | |
| 1142 | HE2FR49 | 203960 | Uni-ZAP XR | 1152 | 526 | 77 | 526 | 96 | 96 | 4253 | 1 | 27 | 28 | 38 |
| | | 04/26/99 | | | | | | | | | | | | |
| 1143 | HE2GB19 | 203960 | Uni-ZAP XR | 1153 | 1582 | 1 | 1582 | 374 | 374 | 4254 | 1 | | | 29 |
| | | 04/26/99 | | | | | | | | | | | | |
| 1144 | HE2GO81 | 203960 | Uni-ZAP XR | 1154 | 268 | 1 | 268 | 79 | 79 | 4255 | 1 | | | 10 |
| | | 04/26/99 | | | | | | | | | | | | |
| 1145 | HE2HB61 | 203960 | Uni-ZAP XR | 1155 | 755 | 1 | 755 | 154 | 154 | 4256 | 1 | 28 | 29 | 31 |
| | | 04/26/99 | | | | | | | | | | | | |
| 1146 | HE2HB64 | 203960 | Uni-ZAP XR | 1156 | 1875 | 1 | 1875 | 225 | 225 | 4257 | 1 | | | 36 |
| | | 04/26/99 | | | | | | | | | | | | |
| 1147 | HE2HF76 | 203960 | Uni-ZAP XR | 1157 | 1222 | 1 | 1222 | 111 | 111 | 4258 | 1 | 18 | 19 | 42 |
| | | 04/26/99 | | | | | | | | | | | | |
| 1148 | HE2ID09 | 203960 | Uni-ZAP XR | 1158 | 2048 | 1 | 2048 | | 1331 | 4259 | 1 | 13 | 14 | 23 |
| | | 04/26/99 | | | | | | | | | | | | |
| 1149 | HE2IE66 | 203918 | Uni-ZAP XR | 1159 | 1746 | 601 | 1746 | 861 | 861 | 4260 | 1 | | | 14 |
| | | 04/08/99 | | | | | | | | | | | | |
| 1150 | HE2NW57 | 203960 | Uni-ZAP XR | 1160 | 516 | 1 | 516 | 101 | 101 | 4261 | 1 | 29 | 30 | 118 |
| | | 04/26/99 | | | | | | | | | | | | |
| 1151 | HE2OA95 | 203960 | Uni-ZAP XR | 1161 | 1671 | 1 | 1671 | | 1224 | 4262 | 1 | 9 | 10 | 35 |
| | | 04/26/99 | | | | | | | | | | | | |
| 1152 | HE2OC39 | 203960 | Uni-ZAP XR | 1162 | 1356 | 1 | 1356 | 79 | 79 | 4263 | 1 | | | 1 |
| | | 04/26/99 | | | | | | | | | | | | |
| 1153 | HE2PB61 | 203979 | Uni-ZAP XR | 1163 | 880 | 1 | 880 | 19 | 19 | 4264 | 1 | 17 | 18 | 23 |
| | | 04/29/99 | | | | | | | | | | | | |
| 1154 | HE2PI43 | 203979 | Uni-ZAP XR | 1164 | 1003 | 1 | 1003 | 69 | 69 | 4265 | 1 | 14 | 15 | 113 |
| | | 04/29/99 | | | | | | | | | | | | |
| 1155 | HE2PJ56 | 203960 | Uni-ZAP XR | 1165 | 1061 | 135 | 1061 | 142 | 142 | 4266 | 1 | 25 | 26 | 42 |
| | | 04/26/99 | | | | | | | | | | | | |
| 1156 | HE6CJ41 | 203960 | Uni-ZAP XR | 1166 | 1080 | 1 | 1080 | | 231 | 4267 | 1 | | | 10 |
| | | 04/26/99 | | | | | | | | | | | | |
| 1157 | HE6DC37 | 203960 | Uni-ZAP XR | 1167 | 464 | 1 | 464 | 107 | 107 | 4268 | 1 | 15 | 16 | 23 |
| | | 04/26/99 | | | | | | | | | | | | |
| 1158 | HE6DN83 | 203960 | Uni-ZAP XR | 1168 | 1708 | 1 | 1708 | 257 | 257 | 4269 | 1 | | | 13 |
| | | 04/26/99 | | | | | | | | | | | | |
| 1159 | HE6EI30 | 203949 | Uni-ZAP XR | 1169 | 603 | 1 | 603 | 48 | 48 | 4270 | 1 | 20 | 21 | 86 |
| | | 04/29/99 | | | | | | | | | | | | |
| 1160 | HE6ET70 | 203960 | Uni-ZAP XR | 1170 | 1415 | 1 | 1415 | 176 | 176 | 4271 | 1 | 25 | 26 | 35 |
| | | 04/26/99 | | | | | | | | | | | | |
| 1161 | HE6GO65 | 203960 | Uni-ZAP XR | 1171 | 780 | 8 | 774 | | 364 | 4272 | 1 | 14 | 15 | 17 |
| | | 04/26/99 | | | | | | | | | | | | |
| 1162 | HE8AN83 | 203918 | Uni-ZAP XR | 1172 | 3334 | 1 | 3334 | 285 | 285 | 4273 | 1 | 15 | 16 | 25 |
| | | 04/08/99 | | | | | | | | | | | | |
| 1163 | HE8AU68 | 203960 | Uni-ZAP XR | 1173 | 918 | 1 | 918 | 68 | 68 | 4274 | 1 | | | 18 |
| | | 04/26/99 | | | | | | | | | | | | |
| 1164 | HE8BE20 | 203960 | Uni-ZAP XR | 1174 | 3193 | 1 | 2270 | 289 | 289 | 4275 | 1 | 16 | 17 | 118 |
| | | 04/26/99 | | | | | | | | | | | | |
| 1165 | HE8BP05 | 203918 | Uni-ZAP XR | 1175 | 1859 | 1 | 1859 | | 202 | 4276 | 1 | 10 | 11 | 14 |
| | | 04/08/99 | | | | | | | | | | | | |
| 1166 | HE8BP64 | 203979 | Uni-ZAP XR | 1176 | 2867 | 1 | 2867 | 208 | 208 | 4277 | 1 | 20 | 21 | 380 |
| | | 04/29/99 | | | | | | | | | | | | |
| 1167 | HE8BQ49 | 203960 | Uni-ZAP XR | 1177 | 1875 | 12 | 1875 | 133 | 133 | 4278 | 1 | | | 11 |
| | | 04/26/99 | | | | | | | | | | | | |
| 1168 | HE8BR18 | 203960 | Uni-ZAP XR | 1178 | 1651 | 1 | 1651 | 207 | 207 | 4279 | 1 | 18 | 19 | 31 |
| | | 04/26/99 | | | | | | | | | | | | |
| 1169 | HE8BR30 | 203960 | Uni-ZAP XR | 1179 | 2292 | 1 | 2292 | 168 | 168 | 4280 | 1 | | | 28 |
| | | 04/26/99 | | | | | | | | | | | | |
| 1170 | HE8BT58 | 203960 | Uni-ZAP XR | 1180 | 3560 | 2277 | 3533 | 2371 | 2371 | 4281 | 1 | 26 | 27 | 105 |
| | | 04/26/99 | | | | | | | | | | | | |
| 1171 | HE8BU60 | 203960 | Uni-ZAP XR | 1181 | 1902 | 1 | 1902 | | 244 | 4282 | 1 | | | 22 |
| | | 04/26/99 | | | | | | | | | | | | |
| 1172 | HE8CA13 | 203960 | Uni-ZAP XR | 1182 | 1538 | 1 | 1322 | 111 | 111 | 4283 | 1 | 17 | 18 | 39 |
| | | 04/26/99 | | | | | | | | | | | | |
| 1173 | HE8CC34 | 203960 | Uni-ZAP XR | 1183 | 2148 | 1 | 2148 | 163 | 163 | 4284 | 1 | | | 28 |
| | | 04/26/99 | | | | | | | | | | | | |
| 1174 | HE8CH08 | 203960 | Uni-ZAP XR | 1184 | 2608 | 1 | 2556 | 347 | 347 | 4285 | 1 | 15 | 16 | 36 |
| | | 04/26/99 | | | | | | | | | | | | |
| 1175 | HE8DG02 | 203960 | Uni-ZAP XR | 1185 | 1642 | 1 | 1642 | 235 | 235 | 4286 | 1 | | | 22 |
| | | 04/26/99 | | | | | | | | | | | | |
| 1176 | HE8DK52 | 203960 | Uni-ZAP XR | 1186 | 1783 | 1 | 1783 | 137 | 137 | 4287 | 1 | 17 | 18 | 32 |
| | | 04/26/99 | | | | | | | | | | | | |
| 1177 | HE8DZ94 | PTA-791 | Uni-ZAP XR | 1187 | 1799 | 1 | 1799 | 29 | 29 | 4288 | 1 | 27 | 28 | 38 |
| | | 09/27/99 | | | | | | | | | | | | |
| 1178 | HE8EN79 | 203960 | Uni-ZAP XR | 1188 | 3198 | 1 | 3198 | 65 | 65 | 4289 | 1 | 14 | 15 | 21 |
| | | 04/26/99 | | | | | | | | | | | | |
| 1179 | HE8EX86 | 203960 | Uni-ZAP XR | 1189 | 4185 | 39 | 2576 | 914 | 914 | 4290 | 1 | 16 | 17 | 71 |
| | | 04/26/99 | | | | | | | | | | | | |
| 1180 | HE8FC10 | 203960 | Uni-ZAP XR | 1190 | 1054 | 1 | 1054 | | 315 | 4291 | 1 | 26 | 27 | 145 |
| | | 04/26/99 | | | | | | | | | | | | |
| 1181 | HE8FG15 | 203960 | Uni-ZAP XR | 1191 | 2472 | 2 | 2472 | 138 | 138 | 4292 | 1 | | | 32 |
| | | 04/26/99 | | | | | | | | | | | | |
| 1182 | HE8FG24 | 203960 | Uni-ZAP XR | 1192 | 1606 | 83 | 1606 | 172 | 172 | 4293 | 1 | 23 | 24 | 117 |
| | | 04/26/99 | | | | | | | | | | | | |
| 1183 | HE8FK78 | PTA-181 | Uni-ZAP XR | 1193 | 2505 | 28 | 2505 | 187 | 187 | 4294 | 1 | 26 | 27 | 30 |
| | | 06/07/99 | | | | | | | | | | | | |
| 1184 | HE8FL24 | 203960 | Uni-ZAP XR | 1194 | 1271 | 1 | 1271 | 251 | 251 | 4295 | 1 | 19 | 20 | 50 |
| | | 04/26/99 | | | | | | | | | | | | |
| 1185 | HE8FL68 | 203918 | Uni-ZAP XR | 1195 | 1748 | 1 | 1748 | 223 | 223 | 4296 | 1 | | | 14 |
| | | 04/08/99 | | | | | | | | | | | | |
| 1186 | HE8FR53 | 203979 | Uni-ZAP XR | 1196 | 3707 | 1171 | 3685 | 1206 | 1206 | 4297 | 1 | 22 | 23 | 37 |
| | | 04/29/99 | | | | | | | | | | | | |
| 1187 | HE8MA27 | 203960 | Uni-ZAP XR | 1197 | 1307 | 1 | 1307 | 90 | 90 | 4298 | 1 | 44 | 45 | 56 |
| | | 04/26/99 | | | | | | | | | | | | |
| 1188 | HE8MG56 | 203960 | Uni-ZAP XR | 1198 | 2304 | 12 | 2303 | 276 | 276 | 4299 | 1 | 22 | 23 | 90 |
| | | 04/26/99 | | | | | | | | | | | | |
| 1189 | HE8MQ01 | PTA-793 | Uni-ZAP XR | 1199 | 2719 | 1 | 2719 | 127 | 127 | 4300 | 1 | 25 | 26 | 37 |
| | | 09/27/99 | | | | | | | | | | | | |
| 1190 | HE8MS43 | 203960 | Uni-ZAP XR | 1200 | 2600 | 1 | 2600 | 1387 | 1387 | 4301 | 1 | | | 6 |
| | | 04/26/99 | | | | | | | | | | | | |
| 1191 | HE8MY77 | 203979 | Uni-ZAP XR | 1201 | 2721 | 1 | 2721 | 61 | 61 | 4302 | 1 | 23 | 24 | 32 |
| | | 04/29/99 | | | | | | | | | | | | |
| 1192 | HE8NC81 | PTA-181 | Uni-ZAP XR | 1202 | 2626 | 1 | 2626 | 74 | 74 | 4303 | 1 | | | 13 |
| | | 06/07/99 | | | | | | | | | | | | |
| 1192 | HE8NC81 | PTA-181 | Uni-ZAP XR | 3106 | 3357 | 1 | 3357 | 419 | 419 | 6207 | 1 | 24 | 25 | 282 |
| | | 06/07/99 | | | | | | | | | | | | |
| 1193 | HE8NO09 | 203960 | Uni-ZAP XR | 1203 | 1034 | 574 | 997 | 837 | 837 | 4304 | 1 | | | 35 |
| | | 04/26/99 | | | | | | | | | | | | |
| 1194 | HE8QU21 | 203960 | Uni-ZAP XR | 1204 | 1589 | 1 | 1589 | 4 | 4 | 4305 | 1 | 24 | 25 | 62 |
| | | 04/26/99 | | | | | | | | | | | | |
| 1195 | HE8SH74 | 203960 | Uni-ZAP XR | 1205 | 3161 | 1 | 3161 | 47 | 47 | 4306 | 1 | 20 | 21 | 28 |
| | | 04/26/99 | | | | | | | | | | | | |
| 1196 | HE8UX34 | 203960 | Uni-ZAP XR | 1206 | 1409 | 8 | 1409 | 142 | 142 | 4307 | 1 | 22 | 23 | 74 |
| | | 04/26/99 | | | | | | | | | | | | |
| 1197 | HE9AE05 | PTA-181 | Uni-ZAP XR | 1207 | 1931 | 476 | 1931 | 654 | 654 | 4308 | 1 | 16 | 17 | 18 |
| | | 06/07/99 | | | | | | | | | | | | |
| 1198 | HE9BJ14 | 203960 | Uni-ZAP XR | 1208 | 2128 | 1 | 1934 | 188 | 188 | 4309 | 1 | 17 | 18 | 30 |
| | | 04/26/99 | | | | | | | | | | | | |
| 1199 | HE9CI81 | 203960 | Uni-ZAP XR | 1209 | 2283 | 1696 | 2283 | | 1629 | 4310 | 1 | 18 | 19 | 26 |
| | | 04/26/99 | | | | | | | | | | | | |
| 1200 | HE9CJ38 | 203960 | Uni-ZAP XR | 1210 | 2742 | 1 | 2742 | 85 | 85 | 4311 | 1 | | | 20 |
| | | 04/26/99 | | | | | | | | | | | | |
| 1201 | HE9CM11 | 203960 | Uni-ZAP XR | 1211 | 1294 | 1 | 1294 | 6 | 6 | 4312 | 1 | 22 | 23 | 34 |
| | | 04/26/99 | | | | | | | | | | | | |
| 1202 | HE9CN58 | 203960 | Uni-ZAP XR | 1212 | 930 | 1 | 930 | 139 | 139 | 4313 | 1 | 14 | 15 | 16 |
| | | 04/26/99 | | | | | | | | | | | | |
| 1203 | HE9CV59 | 203979 | Uni-ZAP XR | 1213 | 1393 | 1 | 1393 | 152 | 152 | 4314 | 1 | | | 27 |
| | | 04/29/99 | | | | | | | | | | | | |
| 1204 | HE9DG54 | 203960 | Uni-ZAP XR | 1214 | 1913 | 1 | 1913 | 295 | 295 | 4315 | 1 | 16 | 17 | 68 |
| | | 04/26/99 | | | | | | | | | | | | |
| 1205 | HE9DH59 | PTA-793 | Uni-ZAP XR | 1215 | 2502 | 400 | 2443 | 701 | 701 | 4316 | 1 | | | 12 |
| | | 09/27/99 | | | | | | | | | | | | |
| 1206 | HE9DZ47 | 203960 | Uni-ZAP XR | 1216 | 1276 | 1 | 1219 | 239 | 239 | 4317 | 1 | 35 | 36 | 44 |
| | | 04/26/99 | | | | | | | | | | | | |
| 1207 | HE9EC36 | 203960 | Uni-ZAP XR | 1217 | 1279 | 318 | 1279 | | 541 | 4318 | 1 | | | 6 |
| | | 04/26/99 | | | | | | | | | | | | |
| 1208 | HE9EM54 | 203960 | Uni-ZAP XR | 1218 | 1086 | 1 | 1086 | 125 | 125 | 4319 | 1 | 24 | 25 | 26 |
| | | 04/26/99 | | | | | | | | | | | | |
| 1209 | HE9FH28 | 203960 | Uni-ZAP XR | 1219 | 1276 | 1 | 1276 | 159 | 159 | 4320 | 1 | 20 | 21 | 30 |
| | | 04/26/99 | | | | | | | | | | | | |
| 1210 | HE9HE13 | 203960 | Uni-ZAP XR | 1220 | 2757 | 1804 | 2735 | 1949 | 1949 | 4321 | 1 | | | 5 |
| | | 04/26/99 | | | | | | | | | | | | |
| 1211 | HE9HE13 | 203960 | Uni-ZAP XR | 1221 | 1547 | 594 | 1525 | 739 | 739 | 4322 | 1 | | | 5 |
| | | 04/26/99 | | | | | | | | | | | | |
| 1212 | HE9HF59 | 203960 | Uni-ZAP XR | 1222 | 1614 | 1 | 1614 | 412 | 412 | 4323 | 1 | | | 6 |
| | | 04/26/99 | | | | | | | | | | | | |
| 1213 | HE9HV71 | 203960 | Uni-ZAP XR | 1223 | 937 | 1 | 937 | 200 | 200 | 4324 | 1 | 20 | 21 | 31 |
| | | 04/26/99 | | | | | | | | | | | | |
| 1214 | HE9NB82 | 203960 | Uni-ZAP XR | 1224 | 1329 | 10 | 1329 | 60 | 60 | 4325 | 1 | 26 | 27 | 109 |
| | | 04/26/99 | | | | | | | | | | | | |
| 1215 | HE9NE43 | PTA-181 | Uni-ZAP XR | 1225 | 2455 | 1 | 2455 | 276 | 276 | 4326 | 1 | | | 19 |
| | | 06/07/99 | | | | | | | | | | | | |
| 1216 | HE9RN58 | 203960 | Uni-ZAP XR | 1226 | 834 | 1 | 834 | 515 | 515 | 4327 | 1 | 22 | 23 | 26 |
| | | 04/26/99 | | | | | | | | | | | | |
| 1217 | HE9TA42 | 203960 | Uni-ZAP XR | 1227 | 3371 | 2187 | 3359 | 2540 | 2540 | 4328 | 1 | 28 | 29 | 36 |
| | | 04/26/99 | | | | | | | | | | | | |
| 1218 | HEAAC21 | 203960 | Uni-ZAP XR | 1228 | 1094 | 1 | 1094 | 68 | 68 | 4329 | 1 | 15 | 16 | 63 |
| | | 04/26/99 | | | | | | | | | | | | |
| 1219 | HEAAC39 | 203960 | Uni-ZAP XR | 1229 | 1243 | 1 | 1243 | | 299 | 4330 | 1 | | | 5 |
| | | 04/26/99 | | | | | | | | | | | | |
| 1220 | HEAAC48 | 203960 | Uni-ZAP XR | 1230 | 818 | 1 | 818 | 178 | 178 | 4331 | 1 | | | 30 |
| | | 04/26/99 | | | | | | | | | | | | |
| 1221 | HEAAD63 | 203960 | Uni-ZAP XR | 1231 | 847 | 1 | 847 | 107 | 107 | 4332 | 1 | | | 10 |
| | | 04/26/99 | | | | | | | | | | | | |
| 1222 | HEAAE19 | 203960 | Uni-ZAP XR | 1232 | 662 | 1 | 662 | 296 | 296 | 4333 | 1 | | | 14 |
| | | 04/26/99 | | | | | | | | | | | | |
| 1223 | HEAAM54 | 203960 | Uni-ZAP XR | 1233 | 2254 | 1 | 2254 | | 219 | 4334 | 1 | 18 | 19 | 41 |
| | | 04/26/99 | | | | | | | | | | | | |
| 1224 | HEAAM96 | 203960 | Uni-ZAP XR | 1234 | 1079 | 1 | 1079 | | 217 | 4335 | 1 | | | 15 |
| | | 04/26/99 | | | | | | | | | | | | |
| 1225 | HEAAN52 | PTA-181 | Uni-ZAP XR | 1235 | 2166 | 1 | 2166 | 377 | 377 | 4336 | 1 | 12 | 13 | 15 |
| | | 06/07/99 | | | | | | | | | | | | |
| 1226 | HEAAU28 | 203960 | Uni-ZAP XR | 1236 | 632 | 1 | 632 | 73 | 73 | 4337 | 1 | 35 | 36 | 40 |
| | | 04/26/99 | | | | | | | | | | | | |
| 1227 | HEAAW54 | 203918 | Uni-ZAP XR | 1237 | 1104 | 1 | 1104 | 196 | 196 | 4338 | 1 | 23 | 24 | 53 |
| | | 04/08/99 | | | | | | | | | | | | |
| 1228 | HEAAW94 | 203949 | Uni-ZAP XR | 1238 | 924 | 1 | 924 | 189 | 189 | 4339 | 1 | | | 11 |
| | | 04/29/99 | | | | | | | | | | | | |
| 1229 | HEBAP51 | 203960 | Uni-ZAP XR | 1239 | 1492 | 868 | 1492 | | 1060 | 4340 | 1 | 34 | 35 | 37 |
| | | 04/26/99 | | | | | | | | | | | | |
| 1230 | HEBAT05 | 203960 | Uni-ZAP XR | 1240 | 638 | 1 | 638 | 216 | 216 | 4341 | 1 | 24 | 25 | 55 |
| | | 04/26/99 | | | | | | | | | | | | |
| 1231 | HEBBF78 | 203960 | Uni-ZAP XR | 1241 | 944 | 298 | 933 | | 590 | 4342 | 1 | | | 19 |
| | | 04/26/99 | | | | | | | | | | | | |
| 1232 | HEBBK04 | 203960 | Uni-ZAP XR | 1242 | 408 | 1 | 408 | | 280 | 4343 | 1 | 10 | 11 | 29 |
| | | 04/26/99 | | | | | | | | | | | | |
| 1233 | HEBCN80 | 203960 | Uni-ZAP XR | 1243 | 1687 | 1 | 1687 | | 322 | 4344 | 1 | 14 | 15 | 50 |
| | | 04/26/99 | | | | | | | | | | | | |
| 1234 | HEBCW57 | PTA-181 | Uni-ZAP XR | 1244 | 1266 | 30 | 1266 | 1080 | 1080 | 4345 | 1 | 27 | 28 | 62 |
| | | 06/07/99 | | | | | | | | | | | | |
| 1235 | HEBDF90 | 203960 | Uni-ZAP XR | 1245 | 2902 | 1273 | 2710 | 1461 | 1461 | 4346 | 1 | 19 | 20 | 40 |
| | | 04/26/99 | | | | | | | | | | | | |
| 1236 | HEBDW31 | 203960 | Uni-ZAP XR | 1246 | 1328 | 486 | 1305 | 734 | 734 | 4347 | 1 | 21 | 22 | 142 |
| | | 04/26/99 | | | | | | | | | | | | |
| 1237 | HEBFL36 | 203960 | Uni-ZAP XR | 1247 | 590 | 1 | 590 | 381 | 381 | 4348 | 1 | 25 | 26 | 43 |
| | | 04/26/99 | | | | | | | | | | | | |
| 1238 | HEBGC01 | 203960 | Uni-ZAP XR | 1248 | 752 | 1 | 752 | 201 | 201 | 4349 | 1 | 21 | 22 | 36 |
| | | 04/26/99 | | | | | | | | | | | | |
| 1239 | HEBGE23 | 203960 | Uni-ZAP XR | 1249 | 419 | 1 | 419 | 153 | 153 | 4350 | 1 | 31 | 32 | 81 |
| | | 04/26/99 | | | | | | | | | | | | |
| 1240 | HEBGE85 | 203960 | Uni-ZAP XR | 1250 | 949 | 380 | 949 | 615 | 615 | 4351 | 1 | | | 7 |
| | | 04/26/99 | | | | | | | | | | | | |
| 1241 | HEBGJ94 | 203979 | Uni-ZAP XR | 1251 | 440 | 1 | 440 | 158 | 158 | 4352 | 1 | 19 | 20 | 51 |
| | | 04/29/99 | | | | | | | | | | | | |
| 1242 | HEBGM06 | 203918 | Uni-ZAP XR | 1252 | 1504 | 9 | 1504 | 26 | 26 | 4353 | 1 | 32 | 33 | 40 |
| | | 04/08/99 | | | | | | | | | | | | |
| 1243 | HEEAB58 | 203960 | Uni-ZAP XR | 1253 | 1635 | 942 | 1607 | 1157 | 1157 | 4354 | 1 | | | 17 |
| | | 04/26/99 | | | | | | | | | | | | |
| 1244 | HEEAF49 | PTA-792 | Uni-ZAP XR | 1254 | 2141 | 1 | 2141 | 38 | 38 | 4355 | 1 | 16 | 17 | 41 |
| | | 09/27/99 | | | | | | | | | | | | |
| 1245 | HEEAJ46 | 203960 | Uni-ZAP XR | 1255 | 2414 | 1 | 2414 | 291 | 291 | 4356 | 1 | | | 7 |
| | | 04/26/99 | | | | | | | | | | | | |
| 1246 | HEGAI20 | 203960 | Uni-ZAP XR | 1256 | 929 | 1 | 929 | 111 | 111 | 4357 | 1 | 34 | 35 | 57 |
| | | 04/26/99 | | | | | | | | | | | | |
| 1247 | HEIAC52 | 203960 | Uni-ZAP XR | 1257 | 3940 | 680 | 1336 | 760 | 760 | 4358 | 1 | 18 | 19 | 52 |
| | | 04/26/99 | | | | | | | | | | | | |
| 1248 | HELAC55 | 203960 | Uni-ZAP XR | 1258 | 979 | 1 | 979 | 188 | 188 | 4359 | 1 | 35 | 36 | 38 |
| | | 04/26/99 | | | | | | | | | | | | |
| 1249 | HELAT58 | 203960 | Uni-ZAP XR | 1259 | 2105 | 1 | 2105 | 215 | 215 | 4360 | 1 | 21 | 22 | 22 |
| | | 04/26/99 | | | | | | | | | | | | |
| 1250 | HELAW94 | 203960 | Uni-ZAP XR | 1260 | 1491 | 1 | 1491 | | 182 | 4361 | 1 | | | 15 |
| | | 04/26/99 | | | | | | | | | | | | |
| 1251 | HELDF80 | 203960 | Uni-ZAP XR | 1261 | 1460 | 1 | 1460 | 37 | 37 | 4362 | 1 | | | 10 |
| | | 04/26/99 | | | | | | | | | | | | |
| 1252 | HELDH39 | 203959 | Uni-ZAP XR | 1262 | 2653 | 967 | 2448 | 1121 | 1121 | 4363 | 1 | 36 | 37 | 43 |
| | | 04/26/99 | | | | | | | | | | | | |
| 1253 | HELDK79 | 203960 | Uni-ZAP XR | 1263 | 896 | 1 | 896 | | 316 | 4364 | 1 | 15 | 16 | 68 |
| | | 04/26/99 | | | | | | | | | | | | |
| 1254 | HELDQ42 | 203960 | Uni-ZAP XR | 1264 | 2070 | 49 | 2070 | 712 | 712 | 4365 | 1 | | | 26 |
| | | 04/26/99 | | | | | | | | | | | | |
| 1255 | HELEE85 | 203960 | Uni-ZAP XR | 1265 | 569 | 1 | 569 | 75 | 75 | 4366 | 1 | | | 10 |
| | | 04/26/99 | | | | | | | | | | | | |
| 1256 | HELEL76 | 203960 | Uni-ZAP XR | 1266 | 1123 | 119 | 1008 | 165 | 165 | 4367 | 1 | 20 | 21 | 218 |
| | | 04/26/99 | | | | | | | | | | | | |
| 1257 | HELEL76 | 203960 | Uni-ZAP XR | 1267 | 1255 | 1 | 1255 | 42 | 42 | 4368 | 1 | 20 | 21 | 195 |
| | | 04/26/99 | | | | | | | | | | | | |
| 1258 | HELEO45 | 203979 | Uni-ZAP XR | 1268 | 1965 | 1 | 1965 | 80 | 80 | 4369 | 1 | | | 21 |
| | | 04/29/99 | | | | | | | | | | | | |
| 1259 | HELFA57 | 203959 | Uni-ZAP XR | 1269 | 1901 | 1 | 1901 | | 118 | 4370 | 1 | 6 | 7 | 18 |
| | | 04/26/99 | | | | | | | | | | | | |
| 1260 | HELFO30 | 203960 | Uni-ZAP XR | 1270 | 2354 | 565 | 2354 | 607 | 607 | 4371 | 1 | 16 | 17 | 41 |
| | | 04/26/99 | | | | | | | | | | | | |
| 1261 | HELGF28 | 203960 | Uni-ZAP XR | 1271 | 2298 | 1 | 2298 | 255 | 255 | 4372 | 1 | 12 | 13 | 21 |
| | | 04/26/99 | | | | | | | | | | | | |
| 1262 | HELGP60 | 203960 | Uni-ZAP XR | 1272 | 1296 | 1 | 1296 | 171 | 171 | 4373 | 1 | 20 | 21 | 29 |
| | | 04/26/99 | | | | | | | | | | | | |
| 1263 | HELHN47 | PTA-793 | Uni-ZAP XR | 1273 | 3147 | 842 | 3147 | 935 | 935 | 4374 | 1 | 36 | 37 | 45 |
| | | 09/27/99 | | | | | | | | | | | | |
| 1264 | HELHP11 | 203960 | Uni-ZAP XR | 1274 | 1432 | 1 | 1302 | 293 | 293 | 4375 | 1 | 21 | 22 | 38 |
| | | 04/26/99 | | | | | | | | | | | | |
| 1265 | HELHP11 | 203960 | Uni-ZAP XR | 1275 | 1483 | 1 | 1483 | 293 | 293 | 4376 | 1 | 21 | 22 | 38 |
| | | 04/26/99 | | | | | | | | | | | | |
| 1266 | HEMAE30 | PTA-181 | Uni-ZAP XR | 1276 | 1443 | 1 | 1443 | 169 | 169 | 4377 | 1 | 15 | 16 | 30 |
| | | 06/07/99 | | | | | | | | | | | | |
| 1267 | HEMBV40 | 203979 | Uni-ZAP XR | 1277 | 1213 | 1 | 1213 | 276 | 276 | 4378 | 1 | 27 | 28 | 35 |
| | | 04/29/99 | | | | | | | | | | | | |
| 1268 | HEMCJ80 | 203960 | Uni-ZAP XR | 1278 | 2667 | 195 | 2512 | 323 | 323 | 4379 | 1 | 24 | 25 | 78 |
| | | 04/26/99 | | | | | | | | | | | | |
| 1269 | HEMCL55 | 203960 | Uni-ZAP XR | 1279 | 1356 | 1 | 1356 | 270 | 270 | 4380 | 1 | | | 8 |
| | | 04/26/99 | | | | | | | | | | | | |
| 1270 | HEMDB07 | 203960 | Uni-ZAP XR | 1280 | 850 | 1 | 850 | 99 | 99 | 4381 | 1 | 25 | 26 | 34 |
| | | 04/26/99 | | | | | | | | | | | | |
| 1271 | HEMDR05 | 203960 | Uni-ZAP XR | 1281 | 1018 | 1 | 1018 | 92 | 92 | 4382 | 1 | 20 | 21 | 76 |
| | | 04/26/99 | | | | | | | | | | | | |
| 1272 | HEMGK71 | 203979 | Uni-ZAP XR | 1282 | 1693 | 1 | 1693 | 234 | 234 | 4383 | 1 | | | 12 |
| | | 04/29/99 | | | | | | | | | | | | |
| 1273 | HEOMF59 | 203960 | pSport1 | 1283 | 1136 | 1 | 1136 | 21 | 21 | 4384 | 1 | 31 | 32 | 49 |
| | | 04/26/99 | | | | | | | | | | | | |
| 1274 | HEOMJ73 | 203960 | pSport1 | 1284 | 2405 | 1 | 2405 | 148 | 148 | 4385 | 1 | | | 20 |
| | | 04/26/99 | | | | | | | | | | | | |
| 1275 | HEOMR67 | 203960 | pSport1 | 1285 | 2937 | 1 | 2937 | 216 | 216 | 4386 | 1 | 16 | 17 | 30 |
| | | 04/26/99 | | | | | | | | | | | | |
| 1276 | HEOMU25 | 203960 | pSport1 | 1286 | 1709 | 1 | 1709 | 84 | 84 | 4387 | 1 | 25 | 26 | 34 |
| | | 04/26/99 | | | | | | | | | | | | |
| 1277 | HEOMU44 | 203960 | pSport1 | 1287 | 1885 | 1 | 1885 | | 167 | 4388 | 1 | 21 | 22 | 28 |
| | | 04/26/99 | | | | | | | | | | | | |
| 1278 | HEONI85 | 203960 | pSport1 | 1288 | 1078 | 1 | 1078 | 136 | 136 | 4389 | 1 | 25 | 26 | 37 |
| | | 04/26/99 | | | | | | | | | | | | |
| 1279 | HEONK04 | 203960 | pSport1 | 1289 | 1553 | 1 | 1553 | 64 | 64 | 4390 | 1 | 19 | 20 | 31 |
| | | 04/26/99 | | | | | | | | | | | | |
| 1280 | HEONP08 | 203960 | pSport1 | 1290 | 1258 | 1 | 1258 | 38 | 38 | 4391 | 1 | 13 | 14 | 73 |
| | | 04/26/99 | | | | | | | | | | | | |
| 1281 | HEPAD15 | 203960 | Uni-ZAP XR | 1291 | 346 | 1 | 346 | 223 | 223 | 4392 | 1 | 16 | 17 | 41 |
| | | 04/26/99 | | | | | | | | | | | | |
| 1282 | HEPBC23 | 203960 | Uni-ZAP XR | 1292 | 541 | 220 | 269 | | 123 | 4393 | 1 | 6 | 7 | 8 |
| | | 04/26/99 | | | | | | | | | | | | |
| 1283 | HEPBV09 | 203960 | Uni-ZAP XR | 1293 | 464 | 1 | 464 | 294 | 294 | 4394 | 1 | 17 | 18 | 40 |
| | | 04/26/99 | | | | | | | | | | | | |
| 1284 | HEPCF35 | 203960 | Uni-ZAP XR | 1294 | 453 | 1 | 453 | 259 | 259 | 4395 | 1 | 22 | 23 | 37 |
| | | 04/26/99 | | | | | | | | | | | | |
| 1285 | HEPCU48 | 203960 | Uni-ZAP XR | 1295 | 2212 | 1185 | 2212 | 1218 | 1218 | 4396 | 1 | 25 | 26 | 91 |
| | | 04/26/99 | | | | | | | | | | | | |
| 1286 | HEQAH47 | PTA-791 | pCMVSport 3.0 | 1296 | 1518 | 1 | 1518 | | 3 | 4397 | 1 | 1 | 2 | 361 |
| | | 09/27/99 | | | | | | | | | | | | |
| 1287 | HEQAP92 | 203960 | pCMVSport 3.0 | 1297 | 1498 | 1 | 1498 | | 843 | 4398 | 1 | 25 | 26 | 43 |
| | | 04/26/99 | | | | | | | | | | | | |
| 1288 | HEQAV53 | 203960 | pCMVSport 3.0 | 1298 | 1626 | 15 | 1016 | 130 | 130 | 4399 | 1 | 32 | 33 | 38 |
| | | 04/26/99 | | | | | | | | | | | | |
| 1289 | HEQBJ01 | 203960 | pCMVSport 3.0 | 1299 | 669 | 1 | 662 | 505 | 505 | 4400 | 1 | | | 19 |
| | | 04/26/99 | | | | | | | | | | | | |
| 1290 | HEQBJ01 | 203960 | pCMVSport 3.0 | 1300 | 2791 | 2346 | 2731 | 2603 | 2603 | 4401 | 1 | | | 19 |
| | | 04/26/99 | | | | | | | | | | | | |
| 1291 | HEQBJ01 | 203960 | pCMVSport 3.0 | 1301 | 2791 | 2346 | 2731 | 2603 | 2603 | 4402 | 1 | | | 19 |
| | | 04/26/99 | | | | | | | | | | | | |
| 1292 | HEQBM94 | 203960 | pCMVSport 3.0 | 1302 | 1025 | 1 | 1025 | 76 | 76 | 4403 | 1 | 50 | 51 | 134 |
| | | 04/26/99 | | | | | | | | | | | | |
| 1293 | HEQCB93 | 203960 | pCMVSport 3.0 | 1303 | 920 | 1 | 920 | 81 | 81 | 4404 | 1 | 22 | 23 | 35 |
| | | 04/26/99 | | | | | | | | | | | | |
| 1294 | HERAI63 | 203960 | Uni-ZAP XR | 1304 | 815 | 1 | 815 | 227 | 227 | 4405 | 1 | 17 | 18 | 24 |
| | | 04/26/99 | | | | | | | | | | | | |
| 1295 | HERAQ22 | 203960 | Uni-ZAP XR | 1305 | 586 | 1 | 586 | 95 | 95 | 4406 | 1 | 18 | 19 | 39 |
| | | 04/26/99 | | | | | | | | | | | | |
| 1296 | HERAS61 | 203960 | Uni-ZAP XR | 1306 | 246 | 1 | 246 | | 98 | 4407 | 1 | | | 12 |
| | | 04/26/99 | | | | | | | | | | | | |
| 1297 | HESAG57 | PTA-181 | Uni-ZAP XR | 1307 | 1701 | 1 | 1701 | 453 | 453 | 4408 | 1 | | | 13 |
| | | 06/07/99 | | | | | | | | | | | | |
| 1298 | HETAA62 | 203960 | Uni-ZAP XR | 1308 | 2593 | 1019 | 2458 | 1198 | 1198 | 4409 | 1 | 25 | 26 | 43 |
| | | 04/26/99 | | | | | | | | | | | | |
| 1299 | HETBB70 | 203960 | Uni-ZAP XR | 1309 | 728 | 14 | 728 | | 263 | 4410 | 1 | | | 17 |
| | | 04/26/99 | | | | | | | | | | | | |
| 1300 | HETBJ88 | PTA-181 | Uni-ZAP XR | 1310 | 1697 | 1 | 1697 | 183 | 183 | 4411 | 1 | 41 | 42 | 74 |
| | | 06/07/99 | | | | | | | | | | | | |
| 1301 | HETCM67 | PTA-181 | Uni-ZAP XR | 1311 | 2047 | 1 | 2047 | 14 | 14 | 4412 | 1 | 21 | 22 | 435 |
| | | 06/07/99 | | | | | | | | | | | | |
| 1302 | HETDD61 | 203979 | Uni-ZAP XR | 1312 | 1805 | 2 | 1805 | 148 | 148 | 4413 | 1 | 24 | 25 | 32 |
| | | 04/29/99 | | | | | | | | | | | | |
| 1303 | HETDD61 | 203979 | Uni-ZAP XR | 1313 | 1804 | 2 | 1804 | 148 | 148 | 4414 | 1 | 24 | 25 | 32 |
| | | 04/29/99 | | | | | | | | | | | | |
| 1304 | HETDJ34 | 203960 | Uni-ZAP XR | 1314 | 1238 | 1 | 1238 | 64 | 64 | 4415 | 1 | | | 27 |
| | | 04/26/99 | | | | | | | | | | | | |
| 1305 | HETDM73 | 203979 | Uni-ZAP XR | 1315 | 2272 | 26 | 2272 | 177 | 177 | 4416 | 1 | | | 14 |
| | | 04/29/99 | | | | | | | | | | | | |
| 1306 | HETDP76 | 203960 | Uni-ZAP XR | 1316 | 2811 | 1117 | 2810 | 1323 | 1323 | 4417 | 1 | 15 | 16 | 105 |
| | | 04/26/99 | | | | | | | | | | | | |
| 1307 | HETFO57 | 203949 | Uni-ZAP XR | 1317 | 1758 | 64 | 1755 | 195 | 195 | 4418 | 1 | 24 | 25 | 36 |
| | | 04/29/99 | | | | | | | | | | | | |
| 1308 | HETGZ31 | 203979 | Uni-ZAP XR | 1318 | 1918 | 1 | 1918 | | 127 | 4419 | 1 | | | 21 |
| | | 04/29/99 | | | | | | | | | | | | |
| 1309 | HETHD26 | 203960 | Uni-ZAP XR | 1319 | 1817 | 172 | 1817 | 229 | 229 | 4420 | 1 | | | 29 |
| | | 04/26/99 | | | | | | | | | | | | |
| 1310 | HETHM27 | 203960 | Uni-ZAP XR | 1320 | 960 | 1 | 960 | 121 | 121 | 4421 | 1 | 20 | 21 | 30 |
| | | 04/26/99 | | | | | | | | | | | | |
| 1311 | HETIN36 | 203960 | Uni-ZAP XR | 1321 | 636 | 1 | 615 | | 252 | 4422 | 1 | 16 | 17 | 51 |
| | | 04/26/99 | | | | | | | | | | | | |
| 1312 | HFAAI17 | 203960 | Uni-ZAP XR | 1322 | 1095 | 1 | 1095 | 16 | 16 | 4423 | 1 | 19 | 20 | 30 |
| | | 04/26/99 | | | | | | | | | | | | |
| 1313 | HFAAJ45 | 203960 | Uni-ZAP XR | 1323 | 513 | 182 | 513 | 344 | 344 | 4424 | 1 | 18 | 19 | 30 |
| | | 04/26/99 | | | | | | | | | | | | |
| 1314 | HFADF41 | 203960 | Uni-ZAP XR | 1324 | 796 | 1 | 796 | 233 | 233 | 4425 | 1 | | | 6 |
| | | 04/26/99 | | | | | | | | | | | | |
| 1315 | HFADM09 | PTA-1838 | Uni-ZAP XR | 1325 | 2238 | 1 | 2238 | 236 | 236 | 4426 | 1 | 22 | 23 | 39 |
| | | 05/09/00 | | | | | | | | | | | | |
| 1316 | HFAUA23 | 203960 | Uni-ZAP XR | 1326 | 499 | 1 | 499 | 52 | 52 | 4427 | 1 | 26 | 27 | 56 |
| | | 04/26/99 | | | | | | | | | | | | |
| 1317 | HFCAG75 | 203960 | Uni-ZAP XR | 1327 | 788 | 1 | 788 | 153 | 153 | 4428 | 1 | 25 | 26 | 44 |
| | | 04/26/99 | | | | | | | | | | | | |
| 1318 | HFCAI40 | PTA-181 | Uni-ZAP XR | 1328 | 3011 | 1 | 3011 | | 2 | 4429 | 1 | 1 | 2 | 756 |
| | | 06/07/99 | | | | | | | | | | | | |
| 1319 | HFCAQ17 | 203960 | Uni-ZAP XR | 1329 | 1445 | 1 | 1445 | 20 | 20 | 4430 | 1 | 49 | 50 | 81 |
| | | 04/26/99 | | | | | | | | | | | | |
| 1320 | HFCBC16 | 203960 | Uni-ZAP XR | 1330 | 1003 | 1 | 1003 | 141 | 141 | 4431 | 1 | | | 29 |
| | | 04/26/99 | | | | | | | | | | | | |
| 1321 | HFCBL53 | 203979 | Uni-ZAP XR | 1331 | 1901 | 237 | 1838 | 307 | 307 | 4432 | 1 | 17 | 18 | 39 |
| | | 04/29/99 | | | | | | | | | | | | |
| 1322 | HFCBL53 | 203979 | Uni-ZAP XR | 1332 | 1901 | 237 | 1838 | 307 | 307 | 4433 | 1 | 17 | 18 | 39 |
| | | 04/29/99 | | | | | | | | | | | | |
| 1323 | HFCBL53 | 203979 | Uni-ZAP XR | 1333 | 1901 | 237 | 1838 | 307 | 307 | 4434 | 1 | 17 | 18 | 39 |
| | | 04/29/99 | | | | | | | | | | | | |
| 1324 | HFCBT29 | 203960 | Uni-ZAP XR | 1334 | 1177 | 1 | 1177 | 230 | 230 | 4435 | 1 | 23 | 24 | 32 |
| | | 04/26/99 | | | | | | | | | | | | |
| 1325 | HFCCZ31 | 203960 | Uni-ZAP XR | 1335 | 1731 | 1 | 1568 | 169 | 169 | 4436 | 1 | | | 10 |
| | | 04/26/99 | | | | | | | | | | | | |
| 1326 | HFCDN13 | 203960 | Uni-ZAP XR | 1336 | 1098 | 1 | 1098 | 21 | 21 | 4437 | 1 | 19 | 20 | 92 |
| | | 04/26/99 | | | | | | | | | | | | |
| 1327 | HFCDT67 | 203960 | Uni-ZAP XR | 1337 | 1122 | 1 | 1122 | 138 | 138 | 4438 | 1 | 21 | 22 | 103 |
| | | 04/26/99 | | | | | | | | | | | | |
| 1328 | HFCDY36 | 203960 | Uni-ZAP XR | 1338 | 829 | 1 | 829 | 628 | 628 | 4439 | 1 | 15 | 16 | 30 |
| | | 04/26/99 | | | | | | | | | | | | |
| 1329 | HFCEC45 | 203979 | Uni-ZAP XR | 1339 | 1227 | 1 | 1227 | 164 | 164 | 4440 | 1 | 15 | 16 | 93 |
| | | 04/29/99 | | | | | | | | | | | | |
| 1330 | HFCET43 | 203960 | Uni-ZAP XR | 1340 | 1513 | 1 | 1513 | 238 | 238 | 4441 | 1 | 18 | 19 | 46 |
| | | 04/26/99 | | | | | | | | | | | | |
| 1331 | HFEAG55 | 203960 | Uni-ZAP XR | 1341 | 650 | 1 | 650 | 43 | 43 | 4442 | 1 | 21 | 22 | 161 |
| | | 04/26/99 | | | | | | | | | | | | |
| 1332 | HFEAU63 | 203960 | Uni-ZAP XR | 1342 | 3652 | 1 | 3652 | 9 | 9 | 4443 | 1 | | | 11 |
| | | 04/26/99 | | | | | | | | | | | | |
| 1333 | HFEBA88 | 203957 | Uni-ZAP XR | 1343 | 814 | 205 | 814 | 385 | 385 | 4444 | 1 | 29 | 30 | 57 |
| | | 04/26/99 | | | | | | | | | | | | |
| 1334 | HFEBK75 | PTA-181 | Uni-ZAP XR | 1344 | 1059 | 1 | 1059 | | 228 | 4445 | 1 | 16 | 17 | 68 |
| | | 06/07/99 | | | | | | | | | | | | |
| 1335 | HFEBO15 | 203960 | Uni-ZAP XR | 1345 | 968 | 359 | 934 | | 542 | 4446 | 1 | | | 3 |
| | | 04/26/99 | | | | | | | | | | | | |
| 1336 | HFEBO17 | PTA-181 | Uni-ZAP XR | 1346 | 990 | 1 | 990 | 136 | 136 | 4447 | 1 | 17 | 18 | 27 |
| | | 06/07/99 | | | | | | | | | | | | |
| 1337 | HFFAE46 | 203960 | Lambda ZAP II | 1347 | 968 | 1 | 968 | 93 | 93 | 4448 | 1 | 19 | 20 | 34 |
| | | 04/26/99 | | | | | | | | | | | | |
| 1338 | HFFAH01 | 203918 | Lambda ZAP II | 1348 | 818 | 1 | 769 | 72 | 72 | 4449 | 1 | 18 | 19 | 50 |
| | | 04/08/99 | | | | | | | | | | | | |
| 1339 | HFFAL70 | 203960 | Lambda ZAP II | 1349 | 1134 | 1 | 1134 | 178 | 178 | 4450 | 1 | 24 | 25 | 26 |
| | | 04/26/99 | | | | | | | | | | | | |
| 1340 | HFFAV61 | 203960 | Lambda ZAP II | 1350 | 1643 | 1 | 1643 | 56 | 56 | 4451 | 1 | 29 | 30 | 50 |
| | | 04/26/99 | | | | | | | | | | | | |
| 1341 | HFGAB50 | 203960 | Uni-ZAP XR | 1351 | 2298 | 1567 | 2298 | 1833 | 1833 | 4452 | 1 | 23 | 24 | 27 |
| | | 04/26/99 | | | | | | | | | | | | |
| 1342 | HFGAE28 | 203960 | Uni-ZAP XR | 1352 | 1952 | 91 | 1952 | | 347 | 4453 | 1 | | | 12 |
| | | 04/26/99 | | | | | | | | | | | | |
| 1343 | HFGAN63 | 203960 | Uni-ZAP XR | 1353 | 1076 | 347 | 1076 | 507 | 507 | 4454 | 1 | 34 | 35 | 43 |
| | | 04/26/99 | | | | | | | | | | | | |
| 1344 | HFHDN80 | PTA-1838 | Other | 1354 | 561 | 1 | 561 | 259 | 259 | 4455 | 1 | 24 | 25 | 101 |
| | | 05/09/00 | | | | | | | | | | | | |
| 1345 | HFIAB78 | 203960 | pSport1 | 1355 | 1629 | 1 | 1629 | 183 | 183 | 4456 | 1 | 20 | 21 | 21 |
| | | 04/26/99 | | | | | | | | | | | | |
| 1346 | HFIAD23 | 203960 | pSport1 | 1356 | 1018 | 1 | 1018 | 30 | 30 | 4457 | 1 | 20 | 21 | 27 |
| | | 04/26/99 | | | | | | | | | | | | |
| 1347 | HFIAK06 | 203960 | pSport1 | 1357 | 892 | 1 | 892 | 302 | 302 | 4458 | 1 | 22 | 23 | 37 |
| | | 04/26/99 | | | | | | | | | | | | |
| 1348 | HFICH70 | 203960 | pSport1 | 1358 | 651 | 1 | 651 | 120 | 120 | 4459 | 1 | 25 | 26 | 47 |
| | | 04/26/99 | | | | | | | | | | | | |
| 1349 | HFIHQ57 | 203960 | pSport1 | 1359 | 1270 | 1 | 1270 | 322 | 322 | 4460 | 1 | 19 | 20 | 47 |
| | | 04/26/99 | | | | | | | | | | | | |
| 1350 | HFIIK29 | 203979 | pSport1 | 1360 | 3145 | 1366 | 3145 | 1611 | 1611 | 4461 | 1 | 18 | 19 | 26 |
| | | 04/29/99 | | | | | | | | | | | | |
| 1351 | HFIIK29 | 203979 | pSport1 | 1361 | 3145 | 1366 | 3145 | 1611 | 1611 | 4462 | 1 | 18 | 19 | 26 |
| | | 04/29/99 | | | | | | | | | | | | |
| 1352 | HFIIK29 | 203979 | pSport1 | 1362 | 3195 | 1366 | 3145 | 1611 | 1611 | 4463 | 1 | 18 | 19 | 26 |
| | | 04/29/99 | | | | | | | | | | | | |
| 1353 | HFIIK29 | 203979 | pSport1 | 1363 | 3195 | 1366 | 3145 | 1611 | 1611 | 4464 | 1 | 18 | 19 | 26 |
| | | 04/29/99 | | | | | | | | | | | | |
| 1354 | HFIIQ27 | 203960 | pSport1 | 1364 | 1262 | 1 | 1262 | 280 | 280 | 4465 | 1 | 17 | 18 | 37 |
| | | 04/26/99 | | | | | | | | | | | | |
| 1355 | HFIIQ64 | 203960 | pSport1 | 1365 | 388 | 1 | 388 | 268 | 268 | 4466 | 1 | 18 | 19 | 19 |
| | | 04/26/99 | | | | | | | | | | | | |
| 1356 | HFIIZ61 | PTA-181 | pSport1 | 1366 | 408 | 1 | 408 | | 2 | 4467 | 1 | 17 | 18 | 90 |
| | | 06/07/99 | | | | | | | | | | | | |
| 1357 | HFIJD81 | 203960 | pSport1 | 1367 | 3014 | 1227 | 2967 | 1274 | 1274 | 4468 | 1 | 38 | 39 | 40 |
| | | 04/26/99 | | | | | | | | | | | | |
| 1358 | HFIJF44 | 203918 | pSport1 | 1368 | 1572 | 9 | 1510 | 82 | 82 | 4469 | 1 | 21 | 22 | 35 |
| | | 04/08/99 | | | | | | | | | | | | |
| 1359 | HFITA02 | 203979 | pSport1 | 1369 | 1207 | 57 | 1207 | 306 | 306 | 4470 | 1 | 27 | 28 | 32 |
| | | 04/29/99 | | | | | | | | | | | | |
| 1360 | HFITF80 | 203960 | pSport1 | 1370 | 839 | 1 | 839 | 87 | 87 | 4471 | 1 | 27 | 28 | 34 |
| | | 04/26/99 | | | | | | | | | | | | |
| 1361 | HFIUK66 | 203960 | pSport1 | 1371 | 1332 | 1 | 1332 | 51 | 51 | 4472 | 1 | 23 | 24 | 74 |
| | | 04/26/99 | | | | | | | | | | | | |
| 1362 | HFTUT21 | 203960 | pSport1 | 1372 | 1978 | 171 | 1978 | | 404 | 4473 | 1 | 11 | 12 | 24 |
| | | 04/26/99 | | | | | | | | | | | | |
| 1363 | HFIVB04 | 203979 | pSport1 | 1373 | 626 | 1 | 626 | 227 | 227 | 4474 | 1 | 27 | 28 | 38 |
| | | 04/29/99 | | | | | | | | | | | | |
| 1364 | HFIXC39 | 203960 | pSport1 | 1374 | 1882 | 531 | 1882 | 774 | 774 | 4475 | 1 | 32 | 33 | 59 |
| | | 04/26/99 | | | | | | | | | | | | |
| 1365 | HFIXC69 | 203960 | pSport1 | 1375 | 820 | 1 | 820 | 98 | 98 | 4476 | 1 | 28 | 29 | 65 |
| | | 04/26/99 | | | | | | | | | | | | |
| 1366 | HFIXE39 | 203918 | pSport1 | 1376 | 2485 | 1 | 2461 | 69 | 69 | 4477 | 1 | 18 | 19 | 31 |
| | | 04/08/99 | | | | | | | | | | | | |
| 1367 | HFIYP15 | 203960 | pSport1 | 1377 | 1793 | 1 | 1793 | 68 | 68 | 4478 | 1 | 18 | 19 | 35 |
| | | 04/26/99 | | | | | | | | | | | | |
| 1368 | HFIZE10 | 203960 | pSport1 | 1378 | 1005 | 203 | 1005 | 243 | 243 | 4479 | 1 | 22 | 23 | 36 |
| | | 04/26/99 | | | | | | | | | | | | |
| 1369 | HFIZF51 | 203960 | pSport1 | 1379 | 384 | 1 | 384 | 186 | 186 | 4480 | 1 | 25 | 26 | 66 |
| | | 04/26/99 | | | | | | | | | | | | |
| 1370 | HFIZK42 | PTA-181 | pSport1 | 1380 | 548 | 128 | 548 | 435 | 435 | 4481 | 1 | 23 | 24 | 24 |
| | | 06/07/99 | | | | | | | | | | | | |
| 1371 | HFIZM89 | 203960 | pSport1 | 1381 | 499 | 1 | 499 | 143 | 143 | 4482 | 1 | 24 | 25 | 37 |
| | | 04/26/99 | | | | | | | | | | | | |
| 1372 | HFKBA62 | 203979 | Uni-ZAP XR | 1382 | 1289 | 1 | 1289 | 120 | 120 | 4483 | 1 | 24 | 25 | 35 |
| | | 04/29/99 | | | | | | | | | | | | |
| 1373 | HFKBC47 | 203979 | Uni-ZAP XR | 1383 | 1182 | 1 | 1182 | | 6 | 4484 | 1 | 16 | 17 | 30 |
| | | 04/29/99 | | | | | | | | | | | | |
| 1374 | HFKDX53 | 203960 | Uni-ZAP XR | 1384 | 1648 | 1 | 1648 | | 964 | 4485 | 1 | 10 | 11 | 111 |
| | | 04/26/99 | | | | | | | | | | | | |
| 1375 | HFKEB14 | 203960 | Uni-ZAP XR | 1385 | 1058 | 1 | 1058 | | 218 | 4486 | 1 | 19 | 20 | 32 |
| | | 04/26/99 | | | | | | | | | | | | |
| 1376 | HFKEG63 | 203960 | Uni-ZAP XR | 1386 | 1332 | 1 | 1332 | | 211 | 4487 | 1 | 28 | 29 | 113 |
| | | 04/26/99 | | | | | | | | | | | | |
| 1377 | HFKES35 | 203957 | Uni-ZAP XR | 1387 | 2010 | 1 | 2010 | | 414 | 4488 | 1 | 9 | 10 | 172 |
| | | 04/26/99 | | | | | | | | | | | | |
| 1378 | HFKES35 | 203957 | Uni-ZAP XR | 1388 | 2059 | 7 | 2023 | | 414 | 4489 | 1 | 9 | 10 | 172 |
| | | 04/26/99 | | | | | | | | | | | | |
| 1379 | HFKEU17 | 203960 | Uni-ZAP XR | 1389 | 1284 | 1 | 1284 | 229 | 229 | 4490 | 1 | 19 | 20 | 34 |
| | | 04/26/99 | | | | | | | | | | | | |
| 1380 | HFKEV77 | PTA-181 | Uni-ZAP XR | 1390 | 1288 | 69 | 531 | 382 | 382 | 4491 | 1 | 23 | 24 | 68 |
| | | 06/07/99 | | | | | | | | | | | | |
| 1381 | HFKFI15 | 203960 | Uni-ZAP XR | 1391 | 1980 | 687 | 1980 | | 1033 | 4492 | 1 | 11 | 12 | 23 |
| | | 04/26/99 | | | | | | | | | | | | |
| 1382 | HFKFI35 | 203960 | Uni-ZAP XR | 1392 | 2501 | 1 | 2501 | 211 | 211 | 4493 | 1 | 16 | 17 | 65 |
| | | 04/26/99 | | | | | | | | | | | | |
| 1383 | HFKFK49 | 203979 | Uni-ZAP XR | 1393 | 672 | 1 | 672 | 181 | 181 | 4494 | 1 | | | 19 |
| | | 04/29/99 | | | | | | | | | | | | |
| 1384 | HFKFV88 | 203917 | Uni-ZAP XR | 1394 | 1947 | 1 | 1942 | 335 | 335 | 4495 | 1 | 22 | 23 | 34 |
| | | 04/08/99 | | | | | | | | | | | | |
| 1385 | HFKFV88 | 203917 | Uni-ZAP XR | 1395 | 2311 | 360 | 2306 | 695 | 695 | 4496 | 1 | 22 | 23 | 35 |
| | | 04/08/99 | | | | | | | | | | | | |
| 1386 | HFKFV88 | 203917 | Uni-ZAP XR | 1396 | 2311 | 360 | 2306 | 695 | 695 | 4497 | 1 | 22 | 23 | 35 |
| | | 04/08/99 | | | | | | | | | | | | |
| 1387 | HFKFX64 | 203960 | Uni-ZAP XR | 1397 | 779 | 1 | 779 | 127 | 127 | 4498 | 1 | | | 14 |
| | | 04/26/99 | | | | | | | | | | | | |
| 1388 | HFOXD49 | 203918 | pSport1 | 1398 | 715 | 1 | 715 | 56 | 56 | 4499 | 1 | 22 | 23 | 32 |
| | | 04/08/99 | | | | | | | | | | | | |
| 1389 | HFOXE28 | 203979 | pSport1 | 1399 | 2053 | 1 | 2053 | | 331 | 4500 | 1 | 22 | 23 | 47 |
| | | 04/29/99 | | | | | | | | | | | | |
| 1390 | HFOYH74 | 203960 | pSport1 | 1400 | 396 | 1 | 396 | 278 | 278 | 4501 | 1 | | | 19 |
| | | 04/26/99 | | | | | | | | | | | | |
| 1391 | HFOYP02 | 203960 | pSport1 | 1401 | 916 | 1 | 916 | 13 | 13 | 4502 | 1 | 20 | 21 | 31 |
| | | 04/26/99 | | | | | | | | | | | | |
| 1392 | HFOYR24 | PTA-181 | pSport1 | 1402 | 1860 | 1 | 1860 | 202 | 202 | 4503 | 1 | 18 | 19 | 31 |
| | | 06/07/99 | | | | | | | | | | | | |
| 1393 | HFOYR54 | 203960 | pSport1 | 1403 | 1490 | 2 | 1490 | 8 | 8 | 4504 | 1 | 23 | 24 | 39 |
| | | 04/26/99 | | | | | | | | | | | | |
| 1394 | HFOZB26 | 203960 | pSport1 | 1404 | 783 | 1 | 783 | 199 | 199 | 4505 | 1 | | | 10 |
| | | 04/26/99 | | | | | | | | | | | | |
| 1395 | HFPBF54 | 203960 | Uni-ZAP XR | 1405 | 1900 | 1 | 1900 | | 347 | 4506 | 1 | 13 | 14 | 17 |
| | | 04/26/99 | | | | | | | | | | | | |
| 1396 | HFPBF54 | 203960 | Uni-ZAP XR | 1406 | 1900 | 1 | 1900 | | 347 | 4507 | 1 | 13 | 14 | 17 |
| | | 04/26/99 | | | | | | | | | | | | |
| 1397 | HFPBI93 | PTA-181 | Uni-ZAP XR | 1407 | 732 | 1 | 732 | 205 | 205 | 4508 | 1 | | | 29 |
| | | 06/07/99 | | | | | | | | | | | | |
| 1398 | HFPBJ64 | 203960 | Uni-ZAP XR | 1408 | 802 | 1 | 802 | 230 | 230 | 4509 | 1 | 19 | 20 | 41 |
| | | 04/26/99 | | | | | | | | | | | | |
| 1399 | HFPBQ55 | 203960 | Uni-ZAP XR | 1409 | 846 | 1 | 846 | 317 | 317 | 4510 | 1 | | | 15 |
| | | 04/26/99 | | | | | | | | | | | | |
| 1400 | HFPCK22 | 203960 | Uni-ZAP XR | 1410 | 1434 | 1 | 1434 | 56 | 56 | 4511 | 1 | 22 | 23 | 35 |
| | | 04/26/99 | | | | | | | | | | | | |
| 1401 | HFPCM32 | 203960 | Uni-ZAP XR | 1411 | 761 | 1 | 761 | 194 | 194 | 4512 | 1 | 22 | 23 | 26 |
| | | 04/26/99 | | | | | | | | | | | | |
| 1402 | HFPCM36 | 203960 | Uni-ZAP XR | 1412 | 441 | 1 | 441 | 57 | 57 | 4513 | 1 | 20 | 21 | 33 |
| | | 04/26/99 | | | | | | | | | | | | |
| 1403 | HFPCS84 | 203960 | Uni-ZAP XR | 1413 | 452 | 1 | 452 | | 101 | 4514 | 1 | | | 3 |
| | | 04/26/99 | | | | | | | | | | | | |
| 1404 | HFPCU47 | 203960 | Uni-ZAP XR | 1414 | 1699 | 1 | 1699 | 12 | 12 | 4515 | 1 | 15 | 16 | 31 |
| | | 04/26/99 | | | | | | | | | | | | |
| 1405 | HFPCY66 | 203960 | Uni-ZAP XR | 1415 | 1612 | 1 | 1612 | 292 | 292 | 4516 | 1 | 22 | 23 | 38 |
| | | 04/26/99 | | | | | | | | | | | | |
| 1406 | HFPDC65 | 203960 | Uni-ZAP XR | 1416 | 963 | 1 | 963 | 277 | 277 | 4517 | 1 | 28 | 29 | 33 |
| | | 04/26/99 | | | | | | | | | | | | |
| 1407 | HFPDE42 | 203979 | Uni-ZAP XR | 1417 | 2234 | 1 | 2210 | 88 | 88 | 4518 | 1 | 22 | 23 | 80 |
| | | 04/29/99 | | | | | | | | | | | | |
| 1408 | HFPDE88 | 203960 | Uni-ZAP XR | 1418 | 1661 | 1 | 1661 | 238 | 238 | 4519 | 1 | 30 | 31 | 35 |
| | | 04/26/99 | | | | | | | | | | | | |
| 1409 | HFPDO25 | 203960 | Uni-ZAP XR | 1419 | 533 | 1 | 533 | 401 | 401 | 4520 | 1 | 20 | 21 | 21 |
| | | 04/26/99 | | | | | | | | | | | | |
| 1410 | HFPDP70 | 203960 | Uni-ZAP XR | 1420 | 2099 | 1 | 2099 | 168 | 168 | 4521 | 1 | 24 | 25 | 38 |
| | | 04/26/99 | | | | | | | | | | | | |
| 1411 | HFPDR39 | 203960 | Uni-ZAP XR | 1421 | 1861 | 1080 | 1837 | 1455 | 1455 | 4522 | 1 | 29 | 30 | 83 |
| | | 04/26/99 | | | | | | | | | | | | |
| 1412 | HFPDX08 | 203960 | Uni-ZAP XR | 1422 | 993 | 19 | 922 | 64 | 64 | 4523 | 1 | 34 | 35 | 98 |
| | | 04/26/99 | | | | | | | | | | | | |
| 1413 | HFPEP69 | 203960 | Uni-ZAP XR | 1423 | 1080 | 1 | 1080 | 150 | 150 | 4524 | 1 | 19 | 20 | 36 |
| | | 04/26/99 | | | | | | | | | | | | |
| 1414 | HFRAU40 | 203960 | Uni-ZAP XR | 1424 | 955 | 1 | 955 | | 218 | 4525 | 1 | | | 14 |
| | | 04/26/99 | | | | | | | | | | | | |
| 1415 | HFRAY90 | 203979 | Uni-ZAP XR | 1425 | 1164 | 1 | 1164 | 12 | 12 | 4526 | 1 | 15 | 16 | 24 |
| | | 04/29/99 | | | | | | | | | | | | |
| 1416 | HFSAY91 | 203960 | Uni-ZAP XR | 1426 | 1929 | 1 | 1929 | 132 | 132 | 4527 | 1 | 34 | 35 | 49 |
| | | 04/26/99 | | | | | | | | | | | | |
| 1417 | HFSBC10 | 203960 | Uni-ZAP XR | 1427 | 1444 | 1 | 1444 | 100 | 100 | 4528 | 1 | 43 | 44 | 48 |
| | | 04/26/99 | | | | | | | | | | | | |
| 1418 | HFSBE94 | 203960 | Uni-ZAP XR | 1428 | 878 | 1 | 878 | 130 | 130 | 4529 | 1 | 35 | 36 | 41 |
| | | 04/26/99 | | | | | | | | | | | | |
| 1419 | HFTAN11 | 203960 | Uni-ZAP XR | 1429 | 793 | 1 | 793 | 212 | 212 | 4530 | 1 | 26 | 27 | 32 |
| | | 04/26/99 | | | | | | | | | | | | |
| 1420 | HFTAR27 | 203960 | Uni-ZAP XR | 1430 | 1441 | 1 | 1441 | 284 | 284 | 4531 | 1 | 19 | 20 | 36 |
| | | 04/26/99 | | | | | | | | | | | | |
| 1421 | HFTAR30 | 203960 | Uni-ZAP XR | 1431 | 626 | 1 | 626 | 242 | 242 | 4532 | 1 | 15 | 16 | 56 |
| | | 04/26/99 | | | | | | | | | | | | |
| 1422 | HFTAS49 | 203979 | Uni-ZAP XR | 1432 | 518 | 1 | 518 | 249 | 249 | 4533 | 1 | 19 | 20 | 23 |
| | | 04/29/99 | | | | | | | | | | | | |
| 1423 | HFTBB50 | 203960 | Uni-ZAP XR | 1433 | 1830 | 1 | 1830 | 94 | 94 | 4534 | 1 | 16 | 17 | 136 |
| | | 04/26/99 | | | | | | | | | | | | |
| 1424 | HFTBL17 | 203979 | Uni-ZAP XR | 1434 | 1022 | 1 | 1000 | 49 | 49 | 4535 | 1 | 24 | 25 | 33 |
| | | 04/29/99 | | | | | | | | | | | | |
| 1425 | HFTBL17 | 203979 | Uni-ZAP XR | 1435 | 1077 | 1 | 1077 | 49 | 49 | 4536 | 1 | 24 | 25 | 33 |
| | | 04/29/99 | | | | | | | | | | | | |
| 1426 | HFTCF02 | 203960 | Uni-ZAP XR | 1436 | 1077 | 123 | 1077 | 363 | 363 | 4537 | 1 | 19 | 20 | 20 |
| | | 04/26/99 | | | | | | | | | | | | |
| 1427 | HFTCI85 | 203960 | Uni-ZAP XR | 1437 | 1309 | 1 | 1309 | 250 | 250 | 4538 | 1 | | | 8 |
| | | 04/26/99 | | | | | | | | | | | | |
| 1428 | HFTCJ32 | 203960 | Uni-ZAP XR | 1438 | 910 | 1 | 910 | 206 | 206 | 4539 | 1 | 30 | 31 | 35 |
| | | 04/26/99 | | | | | | | | | | | | |
| 1429 | HFTCO17 | 203959 | Uni-ZAP XR | 1439 | 2894 | 1572 | 2894 | 1672 | 1672 | 4540 | 1 | | | 13 |
| | | 04/26/99 | | | | | | | | | | | | |
| 1430 | HFTCW07 | 203960 | Uni-ZAP XR | 1440 | 837 | 1 | 837 | 36 | 36 | 4541 | 1 | 20 | 21 | 32 |
| | | 04/26/99 | | | | | | | | | | | | |
| 1431 | HFTDF32 | 203960 | Uni-ZAP XR | 1441 | 1377 | 1 | 1377 | | 344 | 4542 | 1 | 8 | 9 | 14 |
| | | 04/26/99 | | | | | | | | | | | | |
| 1432 | HFTDF79 | 203960 | Uni-ZAP XR | 1442 | 1319 | 242 | 1319 | 617 | 617 | 4543 | 1 | 18 | 19 | 31 |
| | | 04/26/99 | | | | | | | | | | | | |
| 1433 | HFTDK11 | 203960 | Uni-ZAP XR | 1443 | 2014 | 321 | 1996 | 139 | 139 | 4544 | 1 | 18 | 19 | 187 |
| | | 04/26/99 | | | | | | | | | | | | |
| 1434 | HFTDU08 | 203960 | Uni-ZAP XR | 1444 | 1200 | 1 | 1200 | 216 | 216 | 4545 | 1 | 23 | 24 | 25 |
| | | 04/26/99 | | | | | | | | | | | | |
| 1435 | HFVGK67 | 203960 | pBluescript | 1445 | 1295 | 84 | 1295 | 375 | 375 | 4546 | 1 | | | 21 |
| | | 04/26/99 | | | | | | | | | | | | |
| 1436 | HFVHD38 | 203960 | pBluescript | 1446 | 2163 | 249 | 2163 | | 2083 | 4547 | 1 | 13 | 14 | 27 |
| | | 04/26/99 | | | | | | | | | | | | |
| 1437 | HFVHY57 | 203960 | pBluescript | 1447 | 1781 | 1 | 1781 | | 1198 | 4548 | 1 | | | 6 |
| | | 04/26/99 | | | | | | | | | | | | |
| 1438 | HFVIC33 | 203917 | pBluescript | 1448 | 2151 | 62 | 2151 | | 462 | 4549 | 1 | 24 | 25 | 93 |
| | | 04/08/99 | | | | | | | | | | | | |
| 1439 | HFXAK32 | 203960 | Lambda ZAP II | 1449 | 1829 | 1 | 1829 | 46 | 46 | 4550 | 1 | | | 12 |
| | | 04/26/99 | | | | | | | | | | | | |
| 1440 | HFXAK59 | 203960 | Lambda ZAP II | 1450 | 1581 | 731 | 1581 | | 962 | 4551 | 1 | 12 | 13 | 13 |
| | | 04/26/99 | | | | | | | | | | | | |
| 1441 | HFXBI64 | 203960 | Lambda ZAP II | 1451 | 1263 | 1 | 1263 | | 146 | 4552 | 1 | 21 | 22 | 39 |
| | | 04/26/99 | | | | | | | | | | | | |
| 1442 | HFXBL05 | 203960 | Lambda ZAP II | 1452 | 1347 | 1 | 1347 | 203 | 203 | 4553 | 1 | 27 | 28 | 62 |
| | | 04/26/99 | | | | | | | | | | | | |
| 1443 | HFXBM52 | 203960 | Lambda ZAP II | 1453 | 1277 | 1 | 1277 | 232 | 232 | 4554 | 1 | 27 | 28 | 30 |
| | | 04/26/99 | | | | | | | | | | | | |
| 1444 | HFXBR58 | 203960 | Lambda ZAP II | 1454 | 1456 | 1 | 1456 | 263 | 263 | 4555 | 1 | 17 | 18 | 24 |
| | | 04/26/99 | | | | | | | | | | | | |
| 1445 | HFXBV67 | 203960 | Lambda ZAP II | 1455 | 1728 | 1 | 1728 | 52 | 52 | 4556 | 1 | 28 | 29 | 45 |
| | | 04/26/99 | | | | | | | | | | | | |
| 1446 | HFXBY20 | 203960 | Lambda ZAP II | 1456 | 498 | 1 | 498 | 89 | 89 | 4557 | 1 | 24 | 25 | 136 |
| | | 04/26/99 | | | | | | | | | | | | |
| 1447 | HFXCB70 | 203960 | Lambda ZAP II | 1457 | 502 | 1 | 502 | 179 | 179 | 4558 | 1 | 17 | 18 | 19 |
| | | 04/26/99 | | | | | | | | | | | | |
| 1448 | HFXCI42 | 203960 | Lambda ZAP II | 1458 | 1099 | 1 | 1099 | | 275 | 4559 | 1 | 9 | 10 | 26 |
| | | 04/26/99 | | | | | | | | | | | | |
| 1449 | HFXCL59 | 203960 | Lambda ZAP II | 1459 | 1757 | 171 | 1757 | 278 | 278 | 4560 | 1 | 13 | 14 | 14 |
| | | 04/26/99 | | | | | | | | | | | | |
| 1450 | HFXCM22 | 203960 | Lambda ZAP II | 1460 | 1326 | 1 | 1326 | 49 | 49 | 4561 | 1 | | | 4 |
| | | 04/26/99 | | | | | | | | | | | | |
| 1451 | HFXCN18 | 203960 | Lambda ZAP II | 1461 | 1237 | 1 | 1237 | 48 | 48 | 4562 | 1 | | | 8 |
| | | 04/26/99 | | | | | | | | | | | | |
| 1452 | HFXCS53 | 203960 | Lambda ZAP II | 1462 | 1127 | 1 | 606 | 237 | 237 | 4563 | 1 | 15 | 16 | 36 |
| | | 04/26/99 | | | | | | | | | | | | |
| 1453 | HFXDB37 | 203960 | Lambda ZAP II | 1463 | 1391 | 1 | 1391 | 159 | 159 | 4564 | 1 | 18 | 19 | 21 |
| | | 04/26/99 | | | | | | | | | | | | |
| 1454 | HFXDI32 | 203960 | Lambda ZAP II | 1464 | 1856 | 1 | 1856 | 204 | 204 | 4565 | 1 | | | 26 |
| | | 04/26/99 | | | | | | | | | | | | |
| 1455 | HFXDJ43 | 203960 | Lambda ZAP II | 1465 | 1558 | 1 | 1558 | 186 | 186 | 4566 | 1 | | | 26 |
| | | 04/26/99 | | | | | | | | | | | | |
| 1456 | HFXDL76 | 203960 | Lambda ZAP II | 1466 | 1858 | 1 | 1858 | 11 | 11 | 4567 | 1 | 18 | 19 | 30 |
| | | 04/26/99 | | | | | | | | | | | | |
| 1457 | HFXDM75 | 203960 | Lambda ZAP II | 1467 | 1760 | 1 | 1760 | 71 | 71 | 4568 | 1 | 19 | 20 | 21 |
| | | 04/26/99 | | | | | | | | | | | | |
| 1458 | HFXDO18 | 203960 | Lambda ZAP II | 1468 | 588 | 1 | 588 | | 308 | 4569 | 1 | | | 9 |
| | | 04/26/99 | | | | | | | | | | | | |
| 1459 | HFXDP44 | 203960 | Lambda ZAP II | 1469 | 1453 | 1 | 1453 | 258 | 258 | 4570 | 1 | 23 | 24 | 25 |
| | | 04/26/99 | | | | | | | | | | | | |
| 1460 | HFXDR08 | 203960 | Lambda ZAP II | 1470 | 775 | 68 | 775 | 79 | 79 | 4571 | 1 | 18 | 19 | 34 |
| | | 04/26/99 | | | | | | | | | | | | |
| 1461 | HFXDR28 | 203960 | Lambda ZAP II | 1471 | 824 | 1 | 824 | | 338 | 4572 | 1 | 10 | 11 | 21 |
| | | 04/26/99 | | | | | | | | | | | | |
| 1462 | HFXDR28 | 203960 | Lambda ZAP II | 1472 | 1298 | 749 | 1298 | | 1086 | 4573 | 1 | 10 | 11 | 21 |
| | | 04/26/99 | | | | | | | | | | | | |
| 1463 | HFXDR47 | 203959 | Lambda ZAP II | 1473 | 1808 | 1 | 1808 | 207 | 207 | 4574 | 1 | 33 | 34 | 78 |
| | | 04/26/99 | | | | | | | | | | | | |
| 1464 | HFXDZ03 | 203918 | Lambda ZAP II | 1474 | 1349 | 1 | 1349 | 251 | 251 | 4575 | 1 | | | 11 |
| | | 04/08/99 | | | | | | | | | | | | |
| 1465 | HFXED33 | 203960 | Lambda ZAP II | 1475 | 1953 | 1 | 1953 | 112 | 112 | 4576 | 1 | 19 | 20 | 34 |
| | | 04/26/99 | | | | | | | | | | | | |
| 1466 | HFXEE88 | 203960 | Lambda ZAP II | 1476 | 1632 | 1 | 1632 | 59 | 59 | 4577 | 1 | 21 | 22 | 28 |
| | | 04/26/99 | | | | | | | | | | | | |
| 1467 | HFXGR32 | 203960 | Lambda ZAP II | 1477 | 1363 | 1 | 1363 | | 267 | 4578 | 1 | | | 16 |
| | | 04/26/99 | | | | | | | | | | | | |
| 1468 | HFXGT51 | 203960 | Lambda ZAP II | 1478 | 1302 | 1 | 1302 | 42 | 42 | 4579 | 1 | 24 | 25 | 73 |
| | | 04/26/99 | | | | | | | | | | | | |
| 1469 | HFXGW16 | 203960 | Lambda ZAP II | 1479 | 1230 | 1 | 1230 | 125 | 125 | 4580 | 1 | 17 | 18 | 91 |
| | | 04/26/99 | | | | | | | | | | | | |
| 1470 | HFXHC15 | 203960 | Lambda ZAP II | 1480 | 361 | 1 | 361 | 158 | 158 | 4581 | 1 | 23 | 24 | 32 |
| | | 04/26/99 | | | | | | | | | | | | |
| 1471 | HFXHI33 | PTA-793 | Lambda ZAP II | 1481 | 1603 | 1 | 1603 | 240 | 240 | 4582 | 1 | 16 | 17 | 39 |
| | | 09/27/99 | | | | | | | | | | | | |
| 1472 | HFXHL21 | 203960 | Lambda ZAP II | 1482 | 1647 | 1 | 1647 | 70 | 70 | 4583 | 1 | 24 | 25 | 29 |
| | | 04/26/99 | | | | | | | | | | | | |
| 1473 | HFXHL83 | 203960 | Lambda ZAP II | 1483 | 1497 | 1 | 1497 | 217 | 217 | 4584 | 1 | 22 | 23 | 62 |
| | | 04/26/99 | | | | | | | | | | | | |
| 1474 | HFXHM49 | 203960 | Lambda ZAP II | 1484 | 1566 | 1 | 1566 | 302 | 302 | 4585 | 1 | 39 | 40 | 76 |
| | | 04/26/99 | | | | | | | | | | | | |
| 1475 | HFXHM93 | PTA-181 | Lambda ZAP II | 1485 | 1782 | 1 | 1782 | 307 | 307 | 4586 | 1 | 28 | 29 | 70 |
| | | 06/07/99 | | | | | | | | | | | | |
| 1476 | HFXHN89 | 203960 | Lambda ZAP II | 1486 | 1406 | 1 | 1406 | 138 | 138 | 4587 | 1 | 23 | 24 | 34 |
| | | 04/26/99 | | | | | | | | | | | | |
| 1477 | HFXJB21 | 203960 | Lambda ZAP II | 1487 | 1311 | 1 | 1311 | 232 | 232 | 4588 | 1 | 20 | 21 | 54 |
| | | 04/26/99 | | | | | | | | | | | | |
| 1478 | HFXJN93 | 203960 | Lambda ZAP II | 1488 | 1742 | 1 | 1742 | 197 | 197 | 4589 | 1 | 23 | 24 | 44 |
| | | 04/26/99 | | | | | | | | | | | | |
| 1479 | HFXJS15 | 203959 | Lambda ZAP II | 1489 | 1877 | 62 | 1877 | 356 | 356 | 4590 | 1 | | | 7 |
| | | 04/26/99 | | | | | | | | | | | | |
| 1480 | HFXJT53 | 203960 | Lambda ZAP II | 1490 | 3013 | 105 | 3013 | 111 | 111 | 4591 | 1 | 39 | 40 | 361 |
| | | 04/26/99 | | | | | | | | | | | | |
| 1481 | HFXKG56 | 203960 | Lambda ZAP II | 1491 | 766 | 1 | 766 | 273 | 273 | 4592 | 1 | 25 | 26 | 37 |
| | | 04/26/99 | | | | | | | | | | | | |
| 1482 | HFXKL60 | PTA-795 | Lambda ZAP II | 1492 | 3138 | 200 | 3104 | 210 | 210 | 4593 | 1 | 30 | 31 | 33 |
| | | 09/27/99 | | | | | | | | | | | | |
| 1483 | HFXLG08 | PTA-793 | Lambda ZAP II | 1493 | 1698 | 1 | 1698 | 306 | 306 | 4594 | 1 | 25 | 26 | 104 |
| | | 09/27/99 | | | | | | | | | | | | |
| 1484 | HFXLK91 | 203960 | Lambda ZAP II | 1494 | 1848 | 1 | 1848 | 120 | 120 | 4595 | 1 | 20 | 21 | 399 |
| | | 04/26/99 | | | | | | | | | | | | |
| 1485 | HFXLM32 | PTA-181 | Lambda ZAP II | 1495 | 740 | 1 | 740 | 378 | 378 | 4596 | 1 | | | 23 |
| | | 06/07/99 | | | | | | | | | | | | |
| 1486 | HGBAX83 | 203960 | Uni-ZAP XR | 1496 | 1015 | 1 | 1012 | 151 | 151 | 4597 | 1 | 32 | 33 | 39 |
| | | 04/26/99 | | | | | | | | | | | | |
| 1487 | HGBBR29 | 203959 | Uni-ZAP XR | 1497 | 1906 | 1 | 1693 | 251 | 251 | 4598 | 1 | 16 | 17 | 61 |
| | | 04/26/99 | | | | | | | | | | | | |
| 1488 | HGBDL51 | PTA-181 | Uni-ZAP XR | 1498 | 1216 | 1 | 1216 | 25 | 25 | 4599 | 1 | 31 | 32 | 48 |
| | | 06/07/99 | | | | | | | | | | | | |
| 1489 | HGBDV35 | 203960 | Uni-ZAP XR | 1499 | 1191 | 1 | 1191 | 52 | 52 | 4600 | 1 | 25 | 26 | 71 |
| | | 04/26/99 | | | | | | | | | | | | |
| 1490 | HGBDX28 | 203960 | Uni-ZAP XR | 1500 | 1418 | 1 | 1409 | | 231 | 4601 | 1 | | | 7 |
| | | 04/26/99 | | | | | | | | | | | | |
| 1491 | HGBGX31 | 203960 | Uni-ZAP XR | 1501 | 1854 | 454 | 1838 | 548 | 548 | 4602 | 1 | 24 | 25 | 60 |
| | | 04/26/99 | | | | | | | | | | | | |
| 1492 | HGBHE23 | 203917 | Uni-ZAP XR | 1502 | 695 | 27 | 695 | 243 | 243 | 4603 | 1 | 23 | 24 | 71 |
| | | 04/08/99 | | | | | | | | | | | | |
| 1493 | HGBHI15 | 203960 | Uni-ZAP XR | 1503 | 686 | 1 | 686 | 30 | 30 | 4604 | 1 | 20 | 21 | 30 |
| | | 04/26/99 | | | | | | | | | | | | |
| 1494 | HGCMW39 | 203917 | pSport1 | 1504 | 2310 | 816 | 2310 | 1005 | 1005 | 4605 | 1 | 23 | 24 | 32 |
| | | 04/08/99 | | | | | | | | | | | | |
| 1495 | HGLAG32 | 203960 | Uni-ZAP XR | 1505 | 774 | 1 | 774 | 39 | 39 | 4606 | 1 | 18 | 19 | 34 |
| | | 04/26/99 | | | | | | | | | | | | |
| 1496 | HGLAH08 | 203960 | Uni-ZAP XR | 1506 | 614 | 1 | 614 | 162 | 162 | 4607 | 1 | 27 | 28 | 28 |
| | | 04/26/99 | | | | | | | | | | | | |
| 1497 | HGLAH86 | 203960 | Uni-ZAP XR | 1507 | 849 | 1 | 849 | 161 | 161 | 4608 | 1 | 15 | 16 | 42 |
| | | 04/26/99 | | | | | | | | | | | | |
| 1498 | HGLBC33 | 203960 | Uni-ZAP XR | 1508 | 762 | 1 | 762 | 91 | 91 | 4609 | 1 | 9 | 10 | 30 |
| | | 04/26/99 | | | | | | | | | | | | |
| 1499 | HGLBG15 | 203960 | Uni-ZAP XR | 1509 | 778 | 1 | 778 | | 191 | 4610 | 1 | | | 26 |
| | | 04/26/99 | | | | | | | | | | | | |
| 1500 | HGLBM55 | 203960 | Uni-ZAP XR | 1510 | 1621 | 291 | 1619 | 546 | 546 | 4611 | 1 | 18 | 19 | 37 |
| | | 04/26/99 | | | | | | | | | | | | |
| 1501 | HGLDA95 | PTA-181 | Uni-ZAP XR | 1511 | 962 | 1 | 962 | 39 | 39 | 4612 | 1 | 36 | 37 | 72 |
| | | 06/07/99 | | | | | | | | | | | | |
| 1502 | HGLDB06 | PTA-181 | Uni-ZAP XR | 1512 | 841 | 1 | 841 | | 310 | 4613 | 1 | 17 | 18 | 39 |
| | | 06/07/99 | | | | | | | | | | | | |
| 1503 | HGLDE15 | 203960 | Uni-ZAP XR | 1513 | 458 | 1 | 458 | | 254 | 4614 | 1 | 20 | 21 | 28 |
| | | 04/26/99 | | | | | | | | | | | | |
| 1504 | HHBEI14 | PTA-181 | pCMVSport 1 | 1514 | 1537 | 1 | 1537 | 268 | 268 | 4615 | 1 | 41 | 42 | 48 |
| | | 06/07/99 | | | | | | | | | | | | |
| 1505 | HHBGL33 | PTA-181 | pCMVSport 1 | 1515 | 519 | 1 | 519 | 219 | 219 | 4616 | 1 | 18 | 19 | 21 |
| | | 06/07/99 | | | | | | | | | | | | |
| 1506 | HHEAW44 | 203960 | pCMVSport 3.0 | 1516 | 1734 | 1 | 1734 | 58 | 58 | 4617 | 1 | 9 | 10 | 36 |
| | | 04/26/99 | | | | | | | | | | | | |
| 1507 | HHEBP28 | 203960 | pCMVSport 3.0 | 1517 | 1908 | 8 | 1830 | 72 | 72 | 4618 | 1 | 19 | 20 | 54 |
| | | 04/26/99 | | | | | | | | | | | | |
| 1508 | HHECK41 | PTA-795 | pCMVSport 3.0 | 1518 | 513 | 1 | 513 | 51 | 51 | 4619 | 1 | 34 | 35 | 116 |
| | | 09/27/99 | | | | | | | | | | | | |
| 1509 | HHECR10 | 203960 | pCMVSport 3.0 | 1519 | 1030 | 1 | 1030 | 128 | 128 | 4620 | 1 | 14 | 15 | 32 |
| | | 04/26/99 | | | | | | | | | | | | |
| 1510 | HHEMC55 | 203960 | pCMVSport 3.0 | 1520 | 1063 | 1 | 1063 | 54 | 54 | 4621 | 1 | 19 | 20 | 46 |
| | | 04/26/99 | | | | | | | | | | | | |
| 1511 | HHEMM20 | 203960 | pCMVSport 3.0 | 1521 | 1749 | 1 | 1749 | 282 | 282 | 4622 | 1 | 25 | 26 | 42 |
| | | 04/26/99 | | | | | | | | | | | | |
| 1512 | HHEMM80 | 203960 | pCMVSport 3.0 | 1522 | 138 | 1 | 138 | 31 | 31 | 4623 | 1 | 20 | 21 | 36 |
| | | 04/26/99 | | | | | | | | | | | | |
| 1513 | HHEMP35 | 203960 | pCMVSport 3.0 | 1523 | 1985 | 1320 | 1985 | 1334 | 1334 | 4624 | 1 | 20 | 21 | 51 |
| | | 04/26/99 | | | | | | | | | | | | |
| 1514 | HHEMZ08 | 203960 | pCMVSport 3.0 | 1524 | 1576 | 1 | 1576 | 70 | 70 | 4625 | 1 | 21 | 22 | 106 |
| | | 04/26/99 | | | | | | | | | | | | |
| 1515 | HHENC17 | 203960 | pCMVSport 3.0 | 1525 | 2238 | 77 | 1699 | 187 | 187 | 4626 | 1 | 31 | 32 | 36 |
| | | 04/26/99 | | | | | | | | | | | | |
| 1516 | HHENF95 | 203960 | pCMVSport 3.0 | 1526 | 1126 | 1 | 1126 | | 206 | 4627 | 1 | | | 18 |
| | | 04/26/99 | | | | | | | | | | | | |
| 1517 | HHENR74 | 203960 | pCMVSport 3.0 | 1527 | 1141 | 1 | 1141 | 5 | 5 | 4628 | 1 | 18 | 19 | 62 |
| | | 04/26/99 | | | | | | | | | | | | |
| 1518 | HHENU33 | 203960 | pCMVSport 3.0 | 1528 | 1580 | 1 | 1580 | 143 | 143 | 4629 | 1 | 24 | 25 | 30 |
| | | 04/26/99 | | | | | | | | | | | | |
| 1519 | HHENY07 | 203960 | pCMVSport 3.0 | 1529 | 2138 | 1 | 2138 | 87 | 87 | 4630 | 1 | 16 | 17 | 18 |
| | | 04/26/99 | | | | | | | | | | | | |
| 1520 | HHEOK77 | 203960 | pCMVSport 3.0 | 1530 | 2489 | 537 | 1154 | 790 | 790 | 4631 | 1 | 42 | 43 | 54 |
| | | 04/26/99 | | | | | | | | | | | | |
| 1521 | HHEPE72 | 203960 | pCMVSport 3.0 | 1531 | 1060 | 1 | 1060 | 344 | 344 | 4632 | 1 | | | 10 |
| | | 04/26/99 | | | | | | | | | | | | |
| 1522 | HHEPE81 | 203960 | pCMVSport 3.0 | 1532 | 3333 | 1017 | 1973 | 1393 | 1393 | 4633 | 1 | | | 7 |
| | | 04/26/99 | | | | | | | | | | | | |
| 1523 | HHEPM64 | 203918 | pCMVSport 3.0 | 1533 | 2020 | 520 | 2020 | 559 | 559 | 4634 | 1 | 20 | 21 | 34 |
| | | 04/08/99 | | | | | | | | | | | | |
| 1524 | HHEQI04 | 203960 | pCMVSport 3.0 | 1534 | 747 | 1 | 747 | 476 | 476 | 4635 | 1 | 39 | 40 | 45 |
| | | 04/26/99 | | | | | | | | | | | | |
| 1525 | HHEQY60 | 203960 | pCMVSport 3.0 | 1535 | 735 | 1 | 735 | 180 | 180 | 4636 | 1 | | | 2 |
| | | 04/26/99 | | | | | | | | | | | | |
| 1526 | HHFBA31 | 203960 | Uni-ZAP XR | 1536 | 1723 | 1 | 1723 | 131 | 131 | 4637 | 1 | 23 | 24 | 44 |
| | | 04/26/99 | | | | | | | | | | | | |
| 1527 | HHFCI81 | 203979 | Uni-ZAP XR | 1537 | 1054 | 1 | 1054 | 68 | 68 | 4638 | 1 | 18 | 19 | 37 |
| | | 04/29/99 | | | | | | | | | | | | |
| 1528 | HHFCN78 | 203960 | Uni-ZAP XR | 1538 | 1401 | 1 | 1401 | 161 | 161 | 4639 | 1 | 24 | 25 | 31 |
| | | 04/26/99 | | | | | | | | | | | | |
| 1529 | HHFCT95 | 203960 | Uni-ZAP XR | 1539 | 1447 | 1 | 1447 | 24 | 24 | 4640 | 1 | 18 | 19 | 22 |
| | | 04/26/99 | | | | | | | | | | | | |
| 1530 | HHFDN16 | 203960 | Uni-ZAP XR | 1540 | 1821 | 1 | 1821 | 183 | 183 | 4641 | 1 | 26 | 27 | 30 |
| | | 04/26/99 | | | | | | | | | | | | |
| 1531 | HHFEB79 | PTA-181 | Uni-ZAP XR | 1541 | 3168 | 1 | 3168 | 120 | 120 | 4642 | 1 | 18 | 19 | 756 |
| | | 06/07/99 | | | | | | | | | | | | |
| 1531 | HHFEB79 | PTA-181 | Uni-ZAP XR | 3107 | 2443 | 1 | 2443 | 715 | 715 | 6208 | 1 | 18 | 19 | 571 |
| | | 06/07/99 | | | | | | | | | | | | |
| 1532 | HHFEC39 | 203960 | Uni-ZAP XR | 1542 | 1302 | 1 | 1302 | 1211 | 4643 | 1 | | | 1 | |
| | | 04/26/99 | | | | | | | | | | | | |
| 1533 | HHFEN34 | 203960 | Uni-ZAP XR | 1543 | 1158 | 1 | 1158 | 270 | 4644 | 1 | | | 7 | |
| | | 04/26/99 | | | | | | | | | | | | |
| 1534 | HHFFZ01 | 203979 | Uni-ZAP XR | 1544 | 2046 | 232 | 2046 | | 288 | 4645 | 1 | 22 | 23 | 35 |
| | | 04/29/99 | | | | | | | | | | | | |
| 1535 | HHFGI71 | 203960 | Uni-ZAP XR | 1545 | 1590 | 1 | 1590 | 62 | 62 | 4646 | 1 | 24 | 25 | 32 |
| | | 04/26/99 | | | | | | | | | | | | |
| 1536 | HHFGJ54 | 203960 | Uni-ZAP XR | 1546 | 1711 | 1 | 1710 | 68 | 68 | 4647 | 1 | | | 17 |
| | | 04/26/99 | | | | | | | | | | | | |
| 1537 | HHFGL38 | 203960 | Uni-ZAP XR | 1547 | 2764 | 1 | 2764 | 19 | 19 | 4648 | 1 | | | 34 |
| | | 04/26/99 | | | | | | | | | | | | |
| 1538 | HHFGR75 | 203960 | Uni-ZAP XR | 1548 | 1019 | 1 | 1019 | | 213 | 4649 | 1 | 16 | 17 | 37 |
| | | 04/26/99 | | | | | | | | | | | | |
| 1539 | HHFGZ23 | 203960 | Uni-ZAP XR | 1549 | 1279 | 1 | 1097 | 17 | 17 | 4650 | 1 | 16 | 17 | 28 |
| | | 04/26/99 | | | | | | | | | | | | |
| 1540 | HHFHG26 | 203960 | Uni-ZAP XR | 1550 | 724 | 1 | 724 | 200 | 200 | 4651 | 1 | 21 | 22 | 31 |
| | | 04/26/99 | | | | | | | | | | | | |
| 1541 | HHFHM47 | 203960 | Uni-ZAP XR | 1551 | 859 | 1 | 859 | | 231 | 4652 | 1 | | | 1 |
| | | 04/26/99 | | | | | | | | | | | | |
| 1542 | HHGAA76 | 203960 | Lambda ZAP II | 1552 | 1932 | 1 | 1932 | 223 | 223 | 4653 | 1 | | | 17 |
| | | 04/26/99 | | | | | | | | | | | | |
| 1543 | HHGAD46 | 203960 | Lambda ZAP II | 1553 | 1302 | 201 | 1302 | 363 | 363 | 4654 | 1 | | | 9 |
| | | 04/26/99 | | | | | | | | | | | | |
| 1544 | HHGAT09 | 203960 | Lambda ZAP II | 1554 | 545 | 1 | 545 | | 314 | 4655 | 1 | | | 16 |
| | | 04/26/99 | | | | | | | | | | | | |
| 1545 | HHGBC21 | 203960 | Lambda ZAP II | 1555 | 1141 | 1 | 1141 | 121 | 121 | 4656 | 1 | 28 | 29 | 34 |
| | | 04/26/99 | | | | | | | | | | | | |
| 1546 | HHGBF91 | 203960 | Lambda ZAP II | 1556 | 656 | 1 | 655 | 36 | 36 | 4657 | 1 | 12 | 13 | 46 |
| | | 04/26/99 | | | | | | | | | | | | |
| 1547 | HHGBG63 | 203960 | Lambda ZAP II | 1557 | 798 | 1 | 798 | 25 | 25 | 4658 | 1 | 26 | 27 | 126 |
| | | 04/26/99 | | | | | | | | | | | | |
| 1548 | HHGBV02 | 203960 | Lambda ZAP II | 1558 | 1221 | 1 | 1221 | 220 | 220 | 4659 | 1 | 18 | 19 | 66 |
| | | 04/26/99 | | | | | | | | | | | | |
| 1549 | HHGBW55 | 203960 | Lambda ZAP II | 1559 | 438 | 1 | 438 | | 122 | 4660 | 1 | 21 | 22 | 49 |
| | | 04/26/99 | | | | | | | | | | | | |
| 1550 | HHGBX88 | PTA-181 | Lambda ZAP II | 1560 | 442 | 1 | 293 | 234 | 234 | 4661 | 1 | 22 | 23 | 69 |
| | | 06/07/99 | | | | | | | | | | | | |
| 1551 | HHGCA26 | 203960 | Lambda ZAP II | 1561 | 542 | 1 | 542 | 137 | 137 | 4662 | 1 | 15 | 16 | 38 |
| | | 04/26/99 | | | | | | | | | | | | |
| 1552 | HHGDA81 | 203960 | Lambda ZAP II | 1562 | 1060 | 446 | 1026 | 676 | 676 | 4663 | 1 | | | 19 |
| | | 04/26/99 | | | | | | | | | | | | |
| 1553 | HHGDI12 | 203960 | Lambda ZAP II | 1563 | 1240 | 1 | 1240 | 21 | 21 | 4664 | 1 | 26 | 27 | 84 |
| | | 04/26/99 | | | | | | | | | | | | |
| 1554 | HHGDR05 | 203960 | Lambda ZAP II | 1564 | 826 | 1 | 826 | 73 | 73 | 4665 | 1 | 19 | 20 | 36 |
| | | 04/26/99 | | | | | | | | | | | | |
| 1555 | HHGDR92 | 203960 | Lambda ZAP II | 1565 | 1174 | 1 | 1174 | 113 | 113 | 4666 | 1 | 15 | 16 | 20 |
| | | 04/26/99 | | | | | | | | | | | | |
| 1556 | HHGDS56 | 203960 | Lambda ZAP II | 1566 | 1502 | 1 | 1502 | 224 | 224 | 4667 | 1 | 17 | 18 | 27 |
| | | 04/26/99 | | | | | | | | | | | | |
| 1557 | HHGDW65 | 203960 | Lambda ZAP II | 1567 | 814 | 1 | 814 | | 223 | 4668 | 1 | 29 | 30 | 32 |
| | | 04/26/99 | | | | | | | | | | | | |
| 1558 | HHLBA86 | 203959 | pBluescript | 1568 | 1303 | 1 | 1303 | 363 | 363 | 4669 | 1 | 27 | 28 | 39 |
| | | 04/26/99 | SK- | | | | | | | | | | | |
| 1559 | HHNAC56 | 203960 | pBluescript | 1569 | 1522 | 1 | 1522 | 131 | 131 | 4670 | 1 | 34 | 35 | 36 |
| | | 04/26/99 | SK- | | | | | | | | | | | |
| 1560 | HHPBG90 | 203960 | Uni-ZAP XR | 1570 | 1572 | 1 | 1572 | 127 | 127 | 4671 | 1 | 46 | 47 | 77 |
| | | 04/26/99 | | | | | | | | | | | | |
| 1561 | HHPDE28 | PTA-791 | Uni-ZAP XR | 1571 | 1631 | 1 | 1625 | 290 | 290 | 4672 | 1 | | | 26 |
| | | 09/27/99 | | | | | | | | | | | | |
| 1562 | HHPDJ11 | 203960 | Uni-ZAP XR | 1572 | 1902 | 1 | 1902 | 113 | 113 | 4673 | 1 | | | 10 |
| | | 04/26/99 | | | | | | | | | | | | |
| 1563 | HHPDX86 | 203960 | Uni-ZAP XR | 1573 | 2054 | 1 | 2054 | 350 | 350 | 4674 | 1 | 23 | 24 | 31 |
| | | 04/26/99 | | | | | | | | | | | | |
| 1564 | HHPEA17 | 203960 | Uni-ZAP XR | 1574 | 1003 | 1 | 1003 | 278 | 278 | 4675 | 1 | 14 | 15 | 39 |
| | | 04/26/99 | | | | | | | | | | | | |
| 1565 | HHPEB61 | 203960 | Uni-ZAP XR | 1575 | 1832 | 1 | 1832 | 56 | 56 | 4676 | 1 | 29 | 30 | 42 |
| | | 04/26/99 | | | | | | | | | | | | |
| 1566 | HHPFP26 | 203960 | Uni-ZAP XR | 1576 | 2352 | 1 | 2352 | | 24 | 4677 | 1 | 27 | 28 | 80 |
| | | 04/26/99 | | | | | | | | | | | | |
| 1567 | HHPFS11 | 203960 | Uni-ZAP XR | 1577 | 1050 | 1 | 1050 | 125 | 125 | 4678 | 1 | 21 | 22 | 37 |
| | | 04/26/99 | | | | | | | | | | | | |
| 1568 | HHPFS15 | 203949 | Uni-ZAP XR | 1578 | 746 | 1 | 746 | 139 | 139 | 4679 | 1 | 26 | 27 | 30 |
| | | 04/29/99 | | | | | | | | | | | | |
| 1569 | HHPFS18 | 203960 | Uni-ZAP XR | 1579 | 2608 | 1 | 2608 | 127 | 127 | 4680 | 1 | 28 | 29 | 38 |
| | | 04/26/99 | | | | | | | | | | | | |
| 1570 | HHPGH34 | 203960 | Uni-ZAP XR | 1580 | 1067 | 1 | 1067 | | 219 | 4681 | 1 | | | 5 |
| | | 04/26/99 | | | | | | | | | | | | |
| 1571 | HHPGU74 | 203960 | Uni-ZAP XR | 1581 | 2466 | 1 | 2466 | 77 | 77 | 4682 | 1 | 25 | 26 | 77 |
| | | 04/26/99 | | | | | | | | | | | | |
| 1572 | HHPGU87 | 203960 | Uni-ZAP XR | 1582 | 2549 | 1 | 2549 | 242 | 242 | 4683 | 1 | | | 28 |
| | | 04/26/99 | | | | | | | | | | | | |
| 1573 | HHPSD42 | 203960 | pBluescript | 1583 | 1068 | 1 | 1068 | 79 | 79 | 4684 | 1 | 16 | 17 | 34 |
| | | 04/26/99 | | | | | | | | | | | | |
| 1574 | HHPSE03 | 203960 | pBluescript | 1584 | 1546 | 1 | 1546 | 86 | 86 | 4685 | 1 | 37 | 38 | 66 |
| | | 04/26/99 | | | | | | | | | | | | |
| 1575 | HHPSE55 | 203960 | pBluescript | 1585 | 1392 | 18 | 1213 | 122 | 122 | 4686 | 1 | 28 | 29 | 33 |
| | | 04/26/99 | | | | | | | | | | | | |
| 1576 | HHPSF70 | 203917 | pBluescript | 1586 | 1250 | 330 | 1250 | | 465 | 4687 | 1 | 14 | 15 | 34 |
| | | 04/08/99 | | | | | | | | | | | | |
| 1577 | HHPSH74 | 203960 | pBluescript | 1587 | 2107 | 1 | 2107 | 167 | 167 | 4688 | 1 | 26 | 27 | 29 |
| | | 04/26/99 | | | | | | | | | | | | |
| 1578 | HHPSL14 | 203979 | pBluescript | 1588 | 1174 | 1 | 1174 | 65 | 65 | 4689 | 1 | 38 | 39 | 39 |
| | | 04/29/99 | | | | | | | | | | | | |
| 1579 | HHPSM40 | 203960 | pBluescript | 1589 | 2029 | 1 | 2029 | 23 | 23 | 4690 | 1 | 25 | 26 | 30 |
| | | 04/26/99 | | | | | | | | | | | | |
| 1580 | HHPTF26 | PTA-181 | Uni-ZAP XR | 1590 | 1035 | 162 | 1035 | 248 | 248 | 4691 | 1 | 18 | 19 | 38 |
| | | 06/07/99 | | | | | | | | | | | | |
| 1581 | HHSAD31 | 203960 | Uni-ZAP XR | 1591 | 458 | 1 | 458 | 333 | 333 | 4692 | 1 | | | 6 |
| | | 04/26/99 | | | | | | | | | | | | |
| 1582 | HHSAE74 | 203918 | Uni-ZAP XR | 1592 | 1610 | 1 | 1610 | | 151 | 4693 | 1 | | | 22 |
| | | 04/08/99 | | | | | | | | | | | | |
| 1583 | HHSAG62 | 203979 | Uni-ZAP XR | 1593 | 1085 | 1 | 1085 | | 78 | 4694 | 1 | 16 | 17 | 28 |
| | | 04/29/99 | | | | | | | | | | | | |
| 1584 | HHSAK17 | 203960 | Uni-ZAP XR | 1594 | 910 | 1 | 910 | 161 | 161 | 4695 | 1 | | | 16 |
| | | 04/26/99 | | | | | | | | | | | | |
| 1585 | HHSBJ92 | 203960 | Uni-ZAP XR | 1595 | 1654 | 1 | 1654 | | 310 | 4696 | 1 | 13 | 14 | 74 |
| | | 04/26/99 | | | | | | | | | | | | |
| 1586 | HHSBN84 | 203960 | Uni-ZAP XR | 1596 | 1193 | 357 | 1192 | 432 | 432 | 4697 | 1 | 17 | 18 | 27 |
| | | 04/26/99 | | | | | | | | | | | | |
| 1587 | HHSCL24 | 203960 | Uni-ZAP XR | 1597 | 983 | 1 | 983 | | 275 | 4698 | 1 | 7 | 8 | 25 |
| | | 04/26/99 | | | | | | | | | | | | |
| 1588 | HHSCQ67 | 203960 | Uni-ZAP XR | 1598 | 847 | 1 | 847 | 112 | 112 | 4699 | 1 | 29 | 30 | 40 |
| | | 04/26/99 | | | | | | | | | | | | |
| 1589 | HHSCU12 | 203960 | Uni-ZAP XR | 1599 | 282 | 1 | 282 | 175 | 175 | 4700 | 1 | 17 | 18 | 36 |
| | | 04/26/99 | | | | | | | | | | | | |
| 1590 | HHSDB43 | 203960 | Uni-ZAP XR | 1600 | 2707 | 1 | 1366 | 46 | 46 | 4701 | 1 | 17 | 18 | 433 |
| | | 04/26/99 | | | | | | | | | | | | |
| 1591 | HHSDL07 | PTA-1838 | Uni-ZAP XR | 1601 | 429 | 1 | 429 | 22 | 22 | 4702 | 1 | 23 | 24 | 38 |
| | | 05/09/00 | | | | | | | | | | | | |
| 1592 | HHSDX07 | 203979 | Uni-ZAP XR | 1602 | 1721 | 23 | 1721 | 40 | 40 | 4703 | 1 | 16 | 17 | 39 |
| | | 04/29/99 | | | | | | | | | | | | |
| 1593 | HHSFF54 | 203960 | Uni-ZAP XR | 1603 | 1287 | 1 | 1287 | 591 | 591 | 4704 | 1 | 21 | 22 | 28 |
| | | 04/26/99 | | | | | | | | | | | | |
| 1594 | HHSGB85 | 203960 | Uni-ZAP XR | 1604 | 1290 | 1 | 1288 | 145 | 145 | 4705 | 1 | 18 | 19 | 31 |
| | | 04/26/99 | | | | | | | | | | | | |
| 1595 | HHSGL84 | 203960 | Uni-ZAP XR | 1605 | 1037 | 454 | 1037 | 847 | 847 | 4706 | 1 | 15 | 16 | 17 |
| | | 04/26/99 | | | | | | | | | | | | |
| 1596 | HHTLH79 | 203960 | ZAP Express | 1606 | 946 | 1 | 946 | 55 | 55 | 4707 | 1 | 21 | 22 | 50 |
| | | 04/26/99 | | | | | | | | | | | | |
| 1597 | HIABC70 | 203960 | Uni-ZAP XR | 1607 | 1636 | 1 | 1636 | 130 | 130 | 4708 | 1 | 31 | 32 | 65 |
| | | 04/26/99 | | | | | | | | | | | | |
| 1598 | HIATG10 | PTA-181 | pBluescript | 1608 | 409 | 133 | 409 | 140 | 140 | 4709 | 1 | 30 | 31 | 34 |
| | | 06/07/99 | | | | | | | | | | | | |
| 1599 | HIBCO70 | PTA-181 | Other | 1609 | 1652 | 1 | 1652 | 124 | 124 | 4710 | 1 | 23 | 24 | 43 |
| | | 06/07/99 | | | | | | | | | | | | |
| 1600 | HIBCR82 | 203960 | Other | 1610 | 1528 | 1 | 1528 | 104 | 104 | 4711 | 1 | 27 | 28 | 55 |
| | | 04/26/99 | | | | | | | | | | | | |
| 1601 | HIBDA41 | 203960 | Other | 1611 | 1790 | 1 | 1790 | 47 | 47 | 4712 | 1 | | | 24 |
| | | 04/26/99 | | | | | | | | | | | | |
| 1602 | HIBEC45 | 203960 | Other | 1612 | 2324 | 517 | 2324 | 779 | 779 | 4713 | 1 | 23 | 24 | 53 |
| | | 04/26/99 | | | | | | | | | | | | |
| 1603 | HILBW03 | 203979 | pBluescript | 1613 | 2913 | 1 | 2913 | 331 | 331 | 4714 | 1 | 22 | 23 | 35 |
| | | 04/29/99 | SK- | | | | | | | | | | | |
| 1604 | HISAE16 | 203959 | pSport1 | 1614 | 424 | 1 | 424 | 73 | 73 | 4715 | 1 | | | 11 |
| | | 04/26/99 | | | | | | | | | | | | |
| 1605 | HISAG53 | 203918 | pSport1 | 1615 | 1844 | 817 | 1844 | 944 | 944 | 4716 | 1 | 19 | 20 | 28 |
| | | 04/08/99 | | | | | | | | | | | | |
| 1606 | HISAN63 | 203957 | pSport1 | 1616 | 2124 | 1 | 2124 | 597 | 597 | 4717 | 1 | 22 | 23 | 38 |
| | | 04/26/99 | | | | | | | | | | | | |
| 1607 | HISAT78 | 203957 | pSport1 | 1617 | 2312 | 835 | 2287 | 967 | 967 | 4718 | 1 | 29 | 30 | 66 |
| | | 04/26/99 | | | | | | | | | | | | |
| 1608 | HISBA38 | 203957 | pSport1 | 1618 | 1058 | 1 | 1058 | 169 | 169 | 4719 | 1 | 32 | 33 | 36 |
| | | 04/26/99 | | | | | | | | | | | | |
| 1609 | HISBB66 | 203957 | pSport1 | 1619 | 2732 | 1309 | 2732 | 1536 | 1536 | 4720 | 1 | 17 | 18 | 25 |
| | | 04/26/99 | | | | | | | | | | | | |
| 1610 | HISCJ20 | 203957 | pSport1 | 1620 | 372 | 1 | 372 | 257 | 257 | 4721 | 1 | 24 | 25 | 38 |
| | | 04/26/99 | | | | | | | | | | | | |
| 1611 | HISCK41 | 203957 | pSport1 | 1621 | 2043 | 1 | 2043 | 82 | 82 | 4722 | 1 | 28 | 29 | 33 |
| | | 04/26/99 | | | | | | | | | | | | |
| 1612 | HISCO45 | 203957 | pSport1 | 1622 | 1557 | 116 | 1541 | 315 | 315 | 4723 | 1 | | | 32 |
| | | 04/26/99 | | | | | | | | | | | | |
| 1613 | HISEJ52 | 203957 | pSport1 | 1623 | 1699 | 1 | 1699 | 480 | 480 | 4724 | 1 | 1 | 2 | 406 |
| | | 04/26/99 | | | | | | | | | | | | |
| 1613 | HISEJ52 | 203957 | pSport1 | 3108 | 1599 | 1 | 1599 | 369 | 369 | 6209 | 1 | 1 | 2 | 317 |
| | | 04/26/99 | | | | | | | | | | | | |
| 1614 | HJABC58 | 203957 | pBluescript | 1624 | 1796 | 1 | 1796 | 193 | 193 | 4725 | 1 | 26 | 27 | 58 |
| | | 04/26/99 | SK- | | | | | | | | | | | |
| 1615 | HJABG59 | PTA-181 | pBluescript | 1625 | 1535 | 1 | 1535 | | 311 | 4726 | 1 | | | 14 |
| | | 06/07/99 | SK- | | | | | | | | | | | |
| 1616 | HJABR75 | 203957 | pBluescript | 1626 | 1328 | 1 | 1328 | 324 | 324 | 4727 | 1 | 18 | 19 | 37 |
| | | 04/26/99 | SK- | | | | | | | | | | | |
| 1617 | HJABS31 | 203957 | pBluescript | 1627 | 1232 | 42 | 1232 | | 1 | 4728 | 1 | 1 | 2 | 410 |
| | | 04/26/99 | SK- | | | | | | | | | | | |
| 1618 | HJABT12 | 203957 | pBluescript | 1628 | 557 | 1 | 557 | 30 | 30 | 4729 | 1 | 16 | 17 | 37 |
| | | 04/26/99 | SK- | | | | | | | | | | | |
| 1619 | HJACE25 | 203957 | pBluescript | 1629 | 1320 | 1 | 1320 | 322 | 322 | 4730 | 1 | | | 26 |
| | | 04/26/99 | SK- | | | | | | | | | | | |
| 1620 | HJACK21 | 203957 | pBluescript | 1630 | 1271 | 1 | 1271 | 139 | 139 | 4731 | 1 | 21 | 22 | 35 |
| | | 04/26/99 | SK- | | | | | | | | | | | |
| 1621 | HJBCG74 | 203957 | pBluescript | 1631 | 2455 | 12 | 2428 | 33 | 33 | 4732 | 1 | 30 | 31 | 224 |
| | | 04/26/99 | SK- | | | | | | | | | | | |
| 1622 | HJBCO21 | 203957 | pBluescript | 1632 | 587 | 1 | 553 | 289 | 289 | 4733 | 1 | | | 11 |
| | | 04/26/99 | SK- | | | | | | | | | | | |
| 1623 | HJBCQ40 | 203957 | pBluescript | 1633 | 1069 | 1 | 1069 | 161 | 161 | 4734 | 1 | 20 | 21 | 51 |
| | | 04/26/99 | SK- | | | | | | | | | | | |
| 1624 | HJBDM36 | 203957 | pBluescript | 1634 | 2777 | 1716 | 2760 | 1954 | 1954 | 4735 | 1 | 18 | 19 | 40 |
| | | 04/26/99 | SK- | | | | | | | | | | | |
| 1625 | HJMAF30 | 203957 | pCMVSport 3.0 | 1635 | 603 | 1 | 603 | 193 | 193 | 4736 | 1 | 24 | 25 | 34 |
| | | 04/26/99 | | | | | | | | | | | | |
| 1626 | HJMAM72 | 203957 | pCMVSport 3.0 | 1636 | 403 | 1 | 403 | 300 | 300 | 4737 | 1 | 17 | 18 | 25 |
| | | 04/26/99 | | | | | | | | | | | | |
| 1627 | HJMAZ60 | 203979 | pCMVSport 3.0 | 1637 | 2968 | 1393 | 2915 | 1441 | 1441 | 4738 | 1 | 25 | 26 | 45 |
| | | 04/29/99 | | | | | | | | | | | | |
| 1628 | HJMBB20 | 203957 | pCMVSport 3.0 | 1638 | 3021 | 1305 | 3021 | 1376 | 1376 | 4739 | 1 | 25 | 26 | 36 |
| | | 04/26/99 | | | | | | | | | | | | |
| 1629 | HJMBB20 | 203957 | pCMVSport 3.0 | 1639 | 3953 | 2237 | 3953 | 2308 | 2308 | 4740 | 1 | 25 | 26 | 36 |
| | | 04/26/99 | | | | | | | | | | | | |
| 1630 | HJMBB20 | 203957 | pCMVSport 3.0 | 1640 | 3953 | 2237 | 3953 | 2308 | 2308 | 4741 | 1 | 25 | 26 | 36 |
| | | 04/26/99 | | | | | | | | | | | | |
| 1631 | HJMBK59 | 203957 | pCMVSport 3.0 | 1641 | 658 | 1 | 658 | 42 | 42 | 4742 | 1 | 24 | 25 | 70 |
| | | 04/26/99 | | | | | | | | | | | | |
| 1632 | HJMBP01 | 203957 | pCMVSport 3.0 | 1642 | 633 | 1 | 633 | 58 | 58 | 4743 | 1 | 42 | 43 | 45 |
| | | 04/26/99 | | | | | | | | | | | | |
| 1633 | HJMBQ17 | 203957 | pCMVSport 3.0 | 1643 | 275 | 1 | 275 | 145 | 145 | 4744 | 1 | 15 | 16 | 29 |
| | | 04/26/99 | | | | | | | | | | | | |
| 1634 | HJMBW62 | 203957 | pCMVSport 3.0 | 1644 | 1439 | 1 | 1439 | 105 | 105 | 4745 | 1 | 18 | 19 | 58 |
| | | 04/26/99 | | | | | | | | | | | | |
| 1635 | HJMBX54 | 203957 | pCMVSport 3.0 | 1645 | 1020 | 1 | 1020 | 81 | 81 | 4746 | 1 | 17 | 18 | 33 |
| | | 04/26/99 | | | | | | | | | | | | |
| 1636 | HJPAF69 | 203957 | Uni-ZAP XR | 1646 | 1076 | 1 | 1076 | 25 | 25 | 4747 | 1 | 16 | 17 | 33 |
| | | 04/26/99 | | | | | | | | | | | | |
| 1637 | HJPAQ19 | 203957 | Uni-ZAP XR | 1647 | 1109 | 1 | 1109 | 66 | 66 | 4748 | 1 | 50 | 51 | 290 |
| | | 04/26/99 | | | | | | | | | | | | |
| 1638 | HJPAZ35 | 203979 | Uni-ZAP XR | 1648 | 1963 | 665 | 1940 | 832 | 832 | 4749 | 1 | | | 24 |
| | | 04/29/99 | | | | | | | | | | | | |
| 1639 | HJPBI77 | 203957 | Uni-ZAP XR | 1649 | 808 | 1 | 538 | 68 | 68 | 4750 | 1 | 23 | 24 | 25 |
| | | 04/26/99 | | | | | | | | | | | | |
| 1640 | HJPBN96 | 203957 | Uni-ZAP XR | 1650 | 1036 | 1 | 1036 | 70 | 70 | 4751 | 1 | 27 | 28 | 73 |
| | | 04/26/99 | | | | | | | | | | | | |
| 1641 | HJPBU47 | 203959 | Uni-ZAP XR | 1651 | 938 | 234 | 936 | 370 | 370 | 4752 | 1 | 45 | 46 | 55 |
| | | 04/26/99 | | | | | | | | | | | | |
| 1642 | HJPCQ19 | 203957 | Uni-ZAP XR | 1652 | 902 | 1 | 902 | 188 | 188 | 4753 | 1 | | | 27 |
| | | 04/26/99 | | | | | | | | | | | | |
| 1643 | HJPDJ08 | 203957 | Uni-ZAP XR | 1653 | 1044 | 1 | 1044 | 134 | 134 | 4754 | 1 | 19 | 20 | 33 |
| | | 04/26/99 | | | | | | | | | | | | |
| 1644 | HJPDK61 | 203918 | Uni-ZAP XR | 1654 | 1417 | 78 | 1417 | 320 | 320 | 4755 | 1 | 11 | 12 | 67 |
| | | 04/08/99 | | | | | | | | | | | | |
| 1645 | HKABI53 | 203917 | pCMVSport 2.0 | 1655 | 1377 | 324 | 1377 | | 642 | 4756 | 1 | | | 7 |
| | | 04/08/99 | | | | | | | | | | | | |
| 1646 | HKABN63 | 203957 | pCMVSport 2.0 | 1656 | 905 | 1 | 905 | 269 | 269 | 4757 | 1 | 22 | 23 | 144 |
| | | 04/26/99 | | | | | | | | | | | | |
| 1647 | HKACA25 | 203917 | pCMVSport 2.0 | 1657 | 1888 | 145 | 1813 | | 213 | 4758 | 1 | 12 | 13 | 18 |
| | | 04/08/99 | | | | | | | | | | | | |
| 1648 | HKACO64 | PTA-795 | pCMVSport 2.0 | 1658 | 1899 | 1 | 1898 | 290 | 290 | 4759 | 1 | 24 | 25 | 96 |
| | | 09/27/99 | | | | | | | | | | | | |
| 1649 | HKACP50 | 203957 | pCMVSport 2.0 | 1659 | 1987 | 466 | 1941 | 530 | 530 | 4760 | 1 | | | 15 |
| | | 04/26/99 | | | | | | | | | | | | |
| 1650 | HKACX90 | 203957 | pCMVSport 2.0 | 1660 | 906 | 1 | 906 | | 146 | 4761 | 1 | | | 24 |
| | | 04/26/99 | | | | | | | | | | | | |
| 1651 | HKADI27 | 203918 | pCMVSport 2.0 | 1661 | 4597 | 708 | 4597 | 125 | 125 | 4762 | 1 | 25 | 26 | 148 |
| | | 04/08/99 | | | | | | | | | | | | |
| 1651 | HKADI27 | 203918 | pCMVSport 2.0 | 3109 | 2175 | 1 | 2175 | 243 | 243 | 6210 | 1 | | | 18 |
| | | 04/08/99 | | | | | | | | | | | | |
| 1652 | HKADN26 | 203957 | pCMVSport 2.0 | 1662 | 558 | 206 | 558 | 335 | 335 | 4763 | 1 | | | 14 |
| | | 04/26/99 | | | | | | | | | | | | |
| 1653 | HKADP79 | 203957 | pCMVSport 2.0 | 1663 | 1442 | 78 | 1442 | 462 | 462 | 4764 | 1 | 19 | 20 | 36 |
| | | 04/26/99 | | | | | | | | | | | | |
| 1654 | HKADT55 | 203957 | pCMVSport 2.0 | 1664 | 1228 | 1 | 1228 | 62 | 62 | 4765 | 1 | 20 | 21 | 25 |
| | | 04/26/99 | | | | | | | | | | | | |
| 1655 | HKAEK58 | 203957 | pCMVSport 2.0 | 1665 | 2241 | 1 | 2241 | 154 | 154 | 4766 | 1 | 1 | 2 | 377 |
| | | 04/26/99 | | | | | | | | | | | | |
| 1656 | HKAEK72 | 203957 | pCMVSport 2.0 | 1666 | 1577 | 1 | 1577 | 78 | 78 | 4767 | 1 | 19 | 20 | 175 |
| | | 04/26/99 | | | | | | | | | | | | |
| 1657 | HKAFJ47 | 203918 | pCMVSport 2.0 | 1667 | 2110 | 1 | 2110 | 145 | 145 | 4768 | 1 | 24 | 25 | 31 |
| | | 04/08/99 | | | | | | | | | | | | |
| 1658 | HKAFQ41 | 203949 | pCMVSport 2.0 | 1668 | 1825 | 315 | 1791 | 487 | 487 | 4769 | 1 | 25 | 26 | 59 |
| | | 04/29/99 | | | | | | | | | | | | |
| 1659 | HKAHH71 | 203949 | pCMVSport 2.0 | 1669 | 1349 | 1 | 1349 | 462 | 462 | 4770 | 1 | 21 | 22 | 48 |
| | | 04/29/99 | | | | | | | | | | | | |
| 1660 | HKAJA95 | 203957 | pCMVSport 2.0 | 1670 | 1273 | 29 | 1273 | 73 | 73 | 4771 | 1 | | | 11 |
| | | 04/26/99 | | | | | | | | | | | | |
| 1661 | HKAKU90 | 203957 | pCMVSport 2.0 | 1671 | 1468 | 1 | 1468 | | 1 | 4772 | 1 | 1 | 2 | 417 |
| | | 04/26/99 | | | | | | | | | | | | |
| 1662 | HKCSZ54 | 203957 | pBluescript | 1672 | 1176 | 1 | 1176 | 33 | 33 | 4773 | 1 | 26 | 27 | 38 |
| | | 04/26/99 | | | | | | | | | | | | |
| 1663 | HKFAA15 | 203957 | ZAP Express | 1673 | 1779 | 1 | 1779 | 114 | 114 | 4774 | 1 | 15 | 16 | 19 |
| | | 04/26/99 | | | | | | | | | | | | |
| 1664 | HKFBB08 | 203957 | ZAP Express | 1674 | 1473 | 1 | 1473 | 142 | 142 | 4775 | 1 | 29 | 30 | 30 |
| | | 04/26/99 | | | | | | | | | | | | |
| 1665 | HKGAG59 | 203957 | pSport1 | 1675 | 779 | 1 | 779 | 290 | 290 | 4776 | 1 | 20 | 21 | 31 |
| | | 04/26/99 | | | | | | | | | | | | |
| 1666 | HKGAJ81 | 203957 | pSport1 | 1676 | 1332 | 1 | 1332 | 151 | 151 | 4777 | 1 | 16 | 17 | 37 |
| | | 04/26/99 | | | | | | | | | | | | |
| 1667 | HKGAK45 | 203957 | pSport1 | 1677 | 2129 | 1 | 2129 | 762 | 762 | 4778 | 1 | 22 | 23 | 44 |
| | | 04/26/99 | | | | | | | | | | | | |
| 1668 | HKGAP04 | 203979 | pSport1 | 1678 | 2332 | 1 | 2332 | 213 | 213 | 4779 | 1 | 32 | 33 | 33 |
| | | 04/29/99 | | | | | | | | | | | | |
| 1669 | HKGAP57 | 203918 | pSport1 | 1679 | 1907 | 73 | 1907 | 1155 | 1155 | 4780 | 1 | 30 | 31 | 44 |
| | | 04/08/99 | | | | | | | | | | | | |
| 1670 | HKGAW41 | PTA-181 | pSport1 | 1680 | 1639 | 102 | 1639 | | 379 | 4781 | 1 | 22 | 23 | 25 |
| | | 06/07/99 | | | | | | | | | | | | |
| 1671 | HKGBA21 | 203957 | pSport1 | 1681 | 1858 | 1 | 1858 | 109 | 109 | 4782 | 1 | 26 | 27 | 38 |
| | | 04/26/99 | | | | | | | | | | | | |
| 1672 | HKGBC33 | 203957 | pSport1 | 1682 | 1036 | 1 | 1036 | 43 | 43 | 4783 | 1 | 21 | 22 | 39 |
| | | 04/26/99 | | | | | | | | | | | | |
| 1673 | HKGBC73 | 203957 | pSport1 | 1683 | 849 | 1 | 849 | 301 | 301 | 4784 | 1 | 16 | 17 | 32 |
| | | 04/26/99 | | | | | | | | | | | | |
| 1674 | HKGBF61 | 203957 | pSport1 | 1684 | 1759 | 1 | 1759 | 225 | 225 | 4785 | 1 | 18 | 19 | 25 |
| | | 04/26/99 | | | | | | | | | | | | |
| 1675 | HKGBH54 | 203957 | pSport1 | 1685 | 2220 | 1 | 2220 | 351 | 351 | 4786 | 1 | 41 | 42 | 45 |
| | | 04/26/99 | | | | | | | | | | | | |
| 1676 | HKGBP52 | PTA-795 | pSport1 | 1686 | 2702 | 1 | 2702 | 36 | 36 | 4787 | 1 | 25 | 26 | 42 |
| | | 09/27/99 | | | | | | | | | | | | |
| 1677 | HKGCE23 | 203957 | pSport1 | 1687 | 1785 | 1 | 1410 | 136 | 136 | 4788 | 1 | 21 | 22 | 29 |
| | | 04/26/99 | | | | | | | | | | | | |
| 1678 | HKGCE62 | 203957 | pSport1 | 1688 | 1162 | 1 | 1162 | 44 | 44 | 4789 | 1 | 32 | 33 | 40 |
| | | 04/26/99 | | | | | | | | | | | | |
| 1679 | HKGCK41 | 203957 | pSport1 | 1689 | 1024 | 1 | 1024 | 308 | 308 | 4790 | 1 | 50 | 51 | 102 |
| | | 04/26/99 | | | | | | | | | | | | |
| 1680 | HKGCK41 | 203957 | pSport1 | 1690 | 2191 | 1 | 1040 | 316 | 316 | 4791 | 1 | 50 | 51 | 102 |
| | | 04/26/99 | | | | | | | | | | | | |
| 1681 | HKGCN96 | 203957 | pSport1 | 1691 | 1103 | 1 | 1103 | 303 | 303 | 4792 | 1 | | | 14 |
| | | 04/26/99 | | | | | | | | | | | | |
| 1682 | HKGCX05 | 203957 | pSport1 | 1692 | 1658 | 1 | 1658 | 329 | 329 | 4793 | 1 | 22 | 23 | 57 |
| | | 04/26/99 | | | | | | | | | | | | |
| 1683 | HKGDA95 | 203957 | pSport1 | 1693 | 1167 | 1 | 1167 | | 302 | 4794 | 1 | 49 | 50 | 122 |
| | | 04/26/99 | | | | | | | | | | | | |
| 1684 | HKGDO12 | PTA-181 | pSport1 | 1694 | 1671 | 1 | 1671 | 145 | 145 | 4795 | 1 | 18 | 19 | 65 |
| | | 06/07/99 | | | | | | | | | | | | |
| 1685 | HKIME53 | 203957 | Lambda ZAP II | 1695 | 506 | 1 | 506 | 26 | 26 | 4796 | 1 | 20 | 21 | 40 |
| | | 04/26/99 | | | | | | | | | | | | |
| 1686 | HKIMG23 | 203957 | Lambda ZAP II | 1696 | 1721 | 732 | 1696 | 751 | 751 | 4797 | 1 | 22 | 23 | 55 |
| | | 04/26/99 | | | | | | | | | | | | |
| 1687 | HKIXB73 | 203957 | pBluescript | 1697 | 1994 | 1 | 1994 | 235 | 235 | 4798 | 1 | 18 | 19 | 30 |
| | | 04/26/99 | | | | | | | | | | | | |
| 1688 | HKIXD68 | 203957 | pBluescript | 1698 | 443 | 1 | 443 | 133 | 133 | 4799 | 1 | 26 | 27 | 38 |
| | | 04/26/99 | | | | | | | | | | | | |
| 1689 | HKIXR91 | 203957 | pBluescript | 1699 | 1560 | 1 | 1560 | | 10 | 4800 | 1 | 23 | 24 | 46 |
| | | 04/26/99 | | | | | | | | | | | | |
| 1690 | HKIXS19 | 203957 | pBluescript | 1700 | 463 | 1 | 463 | 183 | 183 | 4801 | 1 | 30 | 31 | 31 |
| | | 04/26/99 | | | | | | | | | | | | |
| 1691 | HKIXW45 | 203957 | pBluescript | 1701 | 477 | 1 | 477 | 196 | 196 | 4802 | 1 | 22 | 23 | 32 |
| | | 04/26/99 | | | | | | | | | | | | |
| 1692 | HKIYU90 | 203957 | pBluescript | 1702 | 687 | 1 | 687 | | 396 | 4803 | 1 | 14 | 15 | 17 |
| | | 04/26/99 | | | | | | | | | | | | |
| 1693 | HKMLB81 | 203957 | pBluescript | 1703 | 1877 | 1 | 1877 | 59 | 59 | 4804 | 1 | 24 | 25 | 33 |
| | | 04/26/99 | | | | | | | | | | | | |
| 1694 | HKMLF77 | 203957 | pBluescript | 1704 | 782 | 1 | 782 | 203 | 203 | 4805 | 1 | 17 | 18 | 30 |
| | | 04/26/99 | | | | | | | | | | | | |
| 1695 | HKMLM32 | 203957 | pBluescript | 1705 | 1003 | 1 | 1003 | 287 | 287 | 4806 | 1 | 13 | 14 | 15 |
| | | 04/26/99 | | | | | | | | | | | | |
| 1696 | HKMLR17 | 203979 | pBluescript | 1706 | 1692 | 1 | 1692 | 329 | 329 | 4807 | 1 | 29 | 30 | 294 |
| | | 04/29/99 | | | | | | | | | | | | |
| 1697 | HKMLT89 | 203957 | pBluescript | 1707 | 1274 | 1 | 1274 | 87 | 87 | 4808 | 1 | 30 | 31 | 40 |
| | | 04/26/99 | | | | | | | | | | | | |
| 1698 | HKMLV05 | 203957 | pBluescript | 1708 | 1601 | 223 | 1601 | 494 | 494 | 4809 | 1 | 18 | 19 | 32 |
| | | 04/26/99 | | | | | | | | | | | | |
| 1699 | HKMLV25 | 203957 | pBluescript | 1709 | 766 | 1 | 766 | 251 | 251 | 4810 | 1 | 26 | 27 | 31 |
| | | 04/26/99 | | | | | | | | | | | | |
| 1700 | HKMMB79 | 203917 | pBluescript | 1710 | 3237 | 900 | 3230 | 1109 | 1109 | 4811 | 1 | 16 | 17 | 37 |
| | | 04/08/99 | | | | | | | | | | | | |
| 1701 | HKMMC69 | PTA-181 | pBluescript | 1711 | 2070 | 1 | 2070 | 150 | 150 | 4812 | 1 | 20 | 21 | 33 |
| | | 06/07/99 | | | | | | | | | | | | |
| 1702 | HKMMD91 | 203979 | pBluescript | 1712 | 1259 | 1 | 1259 | | 312 | 4813 | 1 | 8 | 9 | 26 |
| | | 04/29/99 | | | | | | | | | | | | |
| 1703 | HKMMP90 | 203957 | pBluescript | 1713 | 1905 | 1 | 1905 | 361 | 361 | 4814 | 1 | | | 21 |
| | | 04/26/99 | | | | | | | | | | | | |
| 1704 | HKMMU76 | 203957 | pBluescript | 1714 | 1147 | 101 | 1147 | 228 | 228 | 4815 | 1 | 29 | 30 | 55 |
| | | 04/26/99 | | | | | | | | | | | | |
| 1705 | HKPAC10 | 203957 | Uni-ZAP XR | 1715 | 998 | 1 | 998 | | 126 | 4816 | 1 | | | 12 |
| | | 04/26/99 | | | | | | | | | | | | |
| 1706 | HKPAC50 | 203957 | Uni-ZAP XR | 1716 | 810 | 31 | 810 | | 334 | 4817 | 1 | 11 | 12 | 25 |
| | | 04/26/99 | | | | | | | | | | | | |
| 1707 | HKPMA08 | 203957 | pBluescript | 1717 | 436 | 1 | 436 | 181 | 181 | 4818 | 1 | 31 | 32 | 37 |
| | | 04/26/99 | | | | | | | | | | | | |
| 1708 | HKTAC18 | 203957 | Uni-ZAP XR | 1718 | 3714 | 1908 | 3714 | 2010 | 2010 | 4819 | 1 | 17 | 18 | 23 |
| | | 04/26/99 | | | | | | | | | | | | |
| 1709 | HL1SA89 | 203957 | pBluescript | 1719 | 1263 | 1017 | 1219 | 1030 | 1030 | 4820 | 1 | | | 18 |
| | | 04/26/99 | | | | | | | | | | | | |
| 1710 | HL2AB60 | 203957 | Uni-ZAP XR | 1720 | 1476 | 1 | 1476 | | 145 | 4821 | 1 | 27 | 28 | 383 |
| | | 04/26/99 | | | | | | | | | | | | |
| 1711 | HL3AE69 | 203957 | Uni-ZAP XR | 1721 | 475 | 1 | 475 | | 41 | 4822 | 1 | 16 | 17 | 44 |
| | | 04/26/99 | | | | | | | | | | | | |
| 1712 | HL3AF32 | 203957 | Uni-ZAP XR | 1722 | 2708 | 77 | 2708 | | 281 | 4823 | 1 | 19 | 20 | 37 |
| | | 04/26/99 | | | | | | | | | | | | |
| 1713 | HLDAV70 | 203957 | pCMVSport 3.0 | 1723 | 1314 | 1 | 1314 | 38 | 38 | 4824 | 1 | | | 29 |
| | | 04/26/99 | | | | | | | | | | | | |
| 1714 | HLDBL62 | PTA-1838 | pCMVSport 3.0 | 1724 | 1022 | 1 | 1022 | | 372 | 4825 | 1 | 20 | 21 | 123 |
| | | 05/09/00 | | | | | | | | | | | | |
| 1715 | HLDBV18 | 203957 | pCMVSport 3.0 | 1725 | 2820 | 888 | 2820 | 1176 | 1176 | 4826 | 1 | 22 | 23 | 40 |
| | | 04/26/99 | | | | | | | | | | | | |
| 1716 | HLDBV54 | 203957 | pCMVSport 3.0 | 1726 | 787 | 1 | 787 | 147 | 147 | 4827 | 1 | 50 | 51 | 74 |
| | | 04/26/99 | | | | | | | | | | | | |
| 1717 | HLDCR26 | PTA-181 | pCMVSport 3.0 | 1727 | 2638 | 496 | 2480 | 759 | 759 | 4828 | 1 | 21 | 22 | 43 |
| | | 06/07/99 | | | | | | | | | | | | |
| 1718 | HLDDM27 | PTA-181 | pCMVSport 3.0 | 1728 | 787 | 94 | 779 | 169 | 169 | 4829 | 1 | 19 | 20 | 67 |
| | | 06/07/99 | | | | | | | | | | | | |
| 1719 | HLDDM27 | PTA-181 | pCMVSport 3.0 | 1729 | 799 | 102 | 788 | 177 | 177 | 4830 | 1 | 19 | 20 | 67 |
| | | 06/07/99 | | | | | | | | | | | | |
| 1720 | HLDNF18 | 203957 | pCMVSport 3.0 | 1730 | 1726 | 175 | 1686 | 197 | 197 | 4831 | 1 | 23 | 24 | 129 |
| | | 04/26/99 | | | | | | | | | | | | |
| 1721 | HLDNN84 | 203957 | pCMVSport 3.0 | 1731 | 936 | 1 | 936 | 12 | 12 | 4832 | 1 | 29 | 30 | 36 |
| | | 04/26/99 | | | | | | | | | | | | |
| 1722 | HLDOD77 | 203957 | pCMVSport 3.0 | 1732 | 698 | 1 | 698 | 106 | 106 | 4833 | 1 | 25 | 26 | 31 |
| | | 04/26/99 | | | | | | | | | | | | |
| 1723 | HLDOL74 | 203957 | pCMVSport 3.0 | 1733 | 903 | 1 | 903 | 193 | 193 | 4834 | 1 | 26 | 27 | 46 |
| | | 04/26/99 | | | | | | | | | | | | |
| 1724 | HLDPB24 | PTA-181 | pCMVSport 3.0 | 1734 | 1971 | 85 | 1971 | 238 | 238 | 4835 | 1 | 25 | 26 | 55 |
| | | 06/07/99 | | | | | | | | | | | | |
| 1725 | HLDRU08 | 203957 | pCMVSport 3.0 | 1735 | 1086 | 1 | 1086 | 161 | 161 | 4836 | 1 | 20 | 21 | 51 |
| | | 04/26/99 | | | | | | | | | | | | |
| 1726 | HLDXF43 | 203957 | pSport1 | 1736 | 559 | 1 | 559 | 28 | 28 | 4837 | 1 | 36 | 37 | 51 |
| | | 04/26/99 | | | | | | | | | | | | |
| 1727 | HLEAA10 | 203957 | Uni-ZAP XR | 1737 | 1425 | 1 | 1425 | 34 | 34 | 4838 | 1 | 22 | 23 | 44 |
| | | 04/26/99 | | | | | | | | | | | | |
| 1728 | HLEAA24 | 203917 | Uni-ZAP XR | 1738 | 2324 | 1 | 2324 | 46 | 46 | 4839 | 1 | 20 | 21 | 45 |
| | | 04/08/99 | | | | | | | | | | | | |
| 1729 | HLHAE14 | PTA-181 | Uni-ZAP XR | 1739 | 2041 | 1 | 2032 | 17 | 17 | 4840 | 1 | 22 | 23 | 40 |
| | | 06/07/99 | | | | | | | | | | | | |
| 1730 | HLHAE14 | PTA-181 | Uni-ZAP XR | 1740 | 2054 | 1 | 2033 | 17 | 17 | 4841 | 1 | 22 | 23 | 40 |
| | | 06/07/99 | | | | | | | | | | | | |
| 1731 | HLHBS54 | 203957 | Uni-ZAP XR | 1741 | 4038 | 2309 | 4023 | 73 | 73 | 4842 | 1 | 1 | 2 | 343 |
| | | 04/26/99 | | | | | | | | | | | | |
| 1732 | HLHCB33 | 203957 | Uni-ZAP XR | 1742 | 1674 | 1 | 1674 | 9 | 9 | 4843 | 1 | 21 | 22 | 55 |
| | | 04/26/99 | | | | | | | | | | | | |
| 1733 | HLHCF14 | 203957 | Uni-ZAP XR | 1743 | 878 | 1 | 878 | 423 | 423 | 4844 | 1 | 11 | 12 | 52 |
| | | 04/26/99 | | | | | | | | | | | | |
| 1734 | HLHCG24 | 203979 | Uni-ZAP XR | 1744 | 1134 | 1 | 1134 | 140 | 140 | 4845 | 1 | 14 | 15 | 51 |
| | | 04/29/99 | | | | | | | | | | | | |
| 1735 | HLHCH20 | 203957 | Uni-ZAP XR | 1745 | 1260 | 1 | 1260 | 157 | 157 | 4846 | 1 | | | 16 |
| | | 04/26/99 | | | | | | | | | | | | |
| 1736 | HLHCN51 | 203957 | Uni-ZAP XR | 1746 | 1818 | 1 | 1818 | 237 | 237 | 4847 | 1 | 15 | 16 | 48 |
| | | 04/26/99 | | | | | | | | | | | | |
| 1737 | HLHCT96 | PTA-793 | Uni-ZAP XR | 1747 | 2154 | 1 | 2154 | 182 | 182 | 4848 | 1 | | | 10 |
| | | 09/27/99 | | | | | | | | | | | | |
| 1738 | HLHDC33 | 203918 | Uni-ZAP XR | 1748 | 947 | 1 | 947 | | 63 | 4849 | 1 | | | 1 |
| | | 04/08/99 | | | | | | | | | | | | |
| 1739 | HLHDF92 | 203918 | Uni-ZAP XR | 1749 | 808 | 1 | 808 | 515 | 515 | 4850 | 1 | 14 | 15 | 32 |
| | | 04/08/99 | | | | | | | | | | | | |
| 1740 | HLHDJ05 | 203918 | Uni-ZAP XR | 1750 | 839 | 1 | 839 | 73 | 73 | 4851 | 1 | 17 | 18 | 21 |
| | | 04/08/99 | | | | | | | | | | | | |
| 1741 | HLHDL37 | 203979 | Uni-ZAP XR | 1751 | 971 | 1 | 971 | | 94 | 4852 | 1 | | | 7 |
| | | 04/29/99 | | | | | | | | | | | | |
| 1742 | HLHDL69 | 203979 | Uni-ZAP XR | 1752 | 2351 | 363 | 2332 | 432 | 432 | 4853 | 1 | 20 | 21 | 38 |
| | | 04/29/99 | | | | | | | | | | | | |
| 1743 | HLHDL69 | 203979 | Uni-ZAP XR | 1753 | 2516 | 364 | 2502 | 433 | 433 | 4854 | 1 | 20 | 21 | 38 |
| | | 04/29/99 | | | | | | | | | | | | |
| 1744 | HLHDL69 | 203979 | Uni-ZAP XR | 1754 | 2556 | 364 | 2556 | 433 | 433 | 4855 | 1 | 20 | 21 | 38 |
| | | 04/29/99 | | | | | | | | | | | | |
| 1745 | HLHDL69 | 203979 | Uni-ZAP XR | 1755 | 2127 | 364 | 2127 | 433 | 433 | 4856 | 1 | 20 | 21 | 38 |
| | | 04/29/99 | | | | | | | | | | | | |
| 1746 | HLHDM38 | 203957 | Uni-ZAP XR | 1756 | 1105 | 1 | 1105 | | 282 | 4857 | 1 | 11 | 12 | 41 |
| | | 04/26/99 | | | | | | | | | | | | |
| 1747 | HLHDR92 | 203957 | Uni-ZAP XR | 1757 | 1274 | 1 | 1274 | 157 | 157 | 4858 | 1 | | | 15 |
| | | 04/26/99 | | | | | | | | | | | | |
| 1748 | HLHDY94 | 203979 | Uni-ZAP XR | 1758 | 1491 | 1 | 1491 | 153 | 153 | 4859 | 1 | 18 | 19 | 60 |
| | | 04/29/99 | | | | | | | | | | | | |
| 1749 | HLHEE27 | 203979 | Uni-ZAP XR | 1759 | 3045 | 1107 | 2270 | 1260 | 1260 | 4860 | 1 | 23 | 24 | 61 |
| | | 04/29/99 | | | | | | | | | | | | |
| 1750 | HLHEE38 | 203957 | Uni-ZAP XR | 1760 | 880 | 1 | 880 | 270 | 270 | 4861 | 1 | | | 17 |
| | | 04/26/99 | | | | | | | | | | | | |
| 1751 | HLHEI72 | PTA-791 | Uni-ZAP XR | 1761 | 1154 | 1 | 1154 | 89 | 89 | 4862 | 1 | 15 | 16 | 146 |
| | | 09/27/99 | | | | | | | | | | | | |
| 1752 | HLHEX62 | 203957 | Uni-ZAP XR | 1762 | 1124 | 1 | 1124 | 23 | 23 | 4863 | 1 | 20 | 21 | 54 |
| | | 04/26/99 | | | | | | | | | | | | |
| 1753 | HLHFK59 | 203957 | Uni-ZAP XR | 1763 | 816 | 1 | 816 | 220 | 220 | 4864 | 1 | 22 | 23 | 26 |
| | | 04/26/99 | | | | | | | | | | | | |
| 1754 | HLHFP09 | 203957 | Uni-ZAP XR | 1764 | 1232 | 1 | 1232 | 133 | 133 | 4865 | 1 | 26 | 27 | 31 |
| | | 04/26/99 | | | | | | | | | | | | |
| 1755 | HLHGG78 | 203957 | Uni-ZAP XR | 1765 | 854 | 1 | 854 | 461 | 461 | 4866 | 1 | 19 | 20 | 23 |
| | | 04/26/99 | | | | | | | | | | | | |
| 1756 | HLHSG15 | 203957 | pBluescript | 1766 | 2092 | 1 | 2092 | | 1368 | 4867 | 1 | 8 | 9 | 62 |
| | | 04/26/99 | | | | | | | | | | | | |
| 1757 | HLHSQ35 | 203957 | pBluescript | 1767 | 1352 | 1 | 1352 | 39 | 39 | 4868 | 1 | 21 | 22 | 26 |
| | | 04/26/99 | | | | | | | | | | | | |
| 1758 | HLHTB92 | 203957 | pBluescript | 1768 | 1658 | 1 | 1658 | 162 | 162 | 4869 | 1 | 32 | 33 | 37 |
| | | 04/26/99 | | | | | | | | | | | | |
| 1759 | HLHTP55 | 203979 | pBluescript | 1769 | 774 | 1 | 774 | 161 | 161 | 4870 | 1 | 19 | 20 | 43 |
| | | 04/29/99 | | | | | | | | | | | | |
| 1760 | HLIBD74 | 203957 | pCMVSport 1 | 1770 | 411 | 1 | 411 | 127 | 127 | 4871 | 1 | 19 | 20 | 70 |
| | | 04/26/99 | | | | | | | | | | | | |
| 1761 | HLIBE41 | 203957 | pCMVSport 1 | 1771 | 779 | 97 | 779 | 198 | 198 | 4872 | 1 | 22 | 23 | 33 |
| | | 04/26/99 | | | | | | | | | | | | |
| 1762 | HLIBO16 | 203957 | pCMVSport 1 | 1772 | 638 | 202 | 638 | 467 | 467 | 4873 | 1 | 21 | 22 | 23 |
| | | 04/26/99 | | | | | | | | | | | | |
| 1763 | HLJBI22 | 203957 | pCMVSport 1 | 1773 | 1055 | 1 | 1055 | 416 | 416 | 4874 | 1 | 16 | 17 | 58 |
| | | 04/26/99 | | | | | | | | | | | | |
| 1764 | HLJEE16 | 203949 | pCMVSport 1 | 1774 | 1161 | 1 | 1161 | 38 | 38 | 4875 | 1 | 16 | 17 | 28 |
| | | 04/29/99 | | | | | | | | | | | | |
| 1765 | HLLAX64 | 203957 | pCMVSport 1 | 1775 | 1681 | 1 | 1681 | 282 | 282 | 4876 | 1 | 24 | 25 | 32 |
| | | 04/26/99 | | | | | | | | | | | | |
| 1766 | HLLAX95 | 203957 | pCMVSport 1 | 1776 | 678 | 1 | 678 | 99 | 99 | 4877 | 1 | 43 | 44 | 46 |
| | | 04/26/99 | | | | | | | | | | | | |
| 1767 | HLLCD67 | 203957 | pCMVSport 1 | 1777 | 610 | 1 | 610 | 237 | 237 | 4878 | 1 | 8 | 9 | 24 |
| | | 04/26/99 | | | | | | | | | | | | |
| 1768 | HLMBX89 | 203957 | Lambda ZAP II | 1778 | 1264 | 1 | 1264 | 249 | 249 | 4879 | 1 | 28 | 29 | 32 |
| | | 04/26/99 | | | | | | | | | | | | |
| 1769 | HLMBZ14 | 203957 | Lambda ZAP II | 1779 | 942 | 1 | 942 | | 160 | 4880 | 1 | 27 | 28 | 55 |
| | | 04/26/99 | | | | | | | | | | | | |
| 1770 | HLMCT51 | 203957 | Uni-ZAP XR | 1780 | 1522 | 1 | 1522 | 63 | 63 | 4881 | 1 | | | 9 |
| | | 04/26/99 | | | | | | | | | | | | |
| 1771 | HLMCT95 | 203957 | Uni-ZAP XR | 1781 | 1446 | 1 | 1446 | 195 | 195 | 4882 | 1 | 43 | 44 | 50 |
| | | 04/26/99 | | | | | | | | | | | | |
| 1772 | HLMDD65 | 203957 | Uni-ZAP XR | 1782 | 1193 | 1 | 1193 | | 183 | 4883 | 1 | 21 | 22 | 34 |
| | | 04/26/99 | | | | | | | | | | | | |
| 1773 | HLMDH01 | 203957 | Uni-ZAP XR | 1783 | 921 | 1 | 621 | 71 | 71 | 4884 | 1 | 16 | 17 | 57 |
| | | 04/26/99 | | | | | | | | | | | | |
| 1774 | HLMDU23 | 203957 | Uni-ZAP XR | 1784 | 1059 | 1 | 1059 | 21 | 21 | 4885 | 1 | 21 | 22 | 72 |
| | | 04/26/99 | | | | | | | | | | | | |
| 1775 | HLMFB62 | 203957 | Lambda ZAP II | 1785 | 590 | 1 | 590 | 268 | 268 | 4886 | 1 | | | 15 |
| | | 04/26/99 | | | | | | | | | | | | |
| 1776 | HLMFG52 | 203957 | Lambda ZAP II | 1786 | 965 | 1 | 965 | 185 | 185 | 4887 | 1 | 16 | 17 | 23 |
| | | 04/26/99 | | | | | | | | | | | | |
| 1777 | HLMFU53 | 203957 | Lambda ZAP II | 1787 | 1175 | 236 | 1175 | | 520 | 4888 | 1 | 9 | 10 | 59 |
| | | 04/26/99 | | | | | | | | | | | | |
| 1778 | HLMHG68 | 203957 | Lambda ZAP II | 1788 | 1340 | 1 | 1340 | 141 | 141 | 4889 | 1 | 44 | 45 | 86 |
| | | 04/26/99 | | | | | | | | | | | | |
| 1779 | HLMHN06 | PTA-181 | Lambda ZAP II | 1789 | 656 | 1 | 656 | 21 | 21 | 4890 | 1 | | | 19 |
| | | 06/07/99 | | | | | | | | | | | | |
| 1780 | HLMHS15 | 203957 | Lambda ZAP II | 1790 | 927 | 1 | 927 | 271 | 271 | 4891 | 1 | 17 | 18 | 33 |
| | | 04/26/99 | | | | | | | | | | | | |
| 1781 | HLMIM84 | 203957 | Lambda ZAP II | 1791 | 1635 | 1 | 1635 | 124 | 124 | 4892 | 1 | 20 | 21 | 48 |
| | | 04/26/99 | | | | | | | | | | | | |
| 1782 | HLMIN52 | 203957 | Lambda ZAP II | 1792 | 1246 | 1 | 1246 | 100 | 100 | 4893 | 1 | | | 20 |
| | | 04/26/99 | | | | | | | | | | | | |
| 1783 | HLMIQ83 | 203957 | Lambda ZAP II | 1793 | 358 | 1 | 358 | 38 | 38 | 4894 | 1 | 25 | 26 | 98 |
| | | 04/26/99 | | | | | | | | | | | | |
| 1784 | HLMIW76 | 203957 | Lambda ZAP II | 1794 | 779 | 1 | 779 | 137 | 137 | 4895 | 1 | 19 | 20 | 21 |
| | | 04/26/99 | | | | | | | | | | | | |
| 1785 | HLMMA65 | 203949 | Lambda ZAP II | 1795 | 446 | 1 | 446 | 131 | 131 | 4896 | 1 | | | 10 |
| | | 04/29/99 | | | | | | | | | | | | |
| 1786 | HLMMT12 | 203957 | Lambda ZAP II | 1796 | 445 | 38 | 412 | 295 | 295 | 4897 | 1 | 14 | 15 | 38 |
| | | 04/26/99 | | | | | | | | | | | | |
| 1787 | HLMNA19 | 203957 | Lambda ZAP II | 1797 | 1006 | 127 | 1006 | 445 | 445 | 4898 | 1 | 19 | 20 | 59 |
| | | 04/26/99 | | | | | | | | | | | | |
| 1788 | HLQAD72 | PTA-181 | Lambda ZAP II | 1798 | 1369 | 1 | 1369 | | 142 | 4899 | 1 | 15 | 16 | 141 |
| | | 06/07/99 | | | | | | | | | | | | |
| 1789 | HLQAM30 | 203957 | Lambda ZAP II | 1799 | 676 | 1 | 676 | 28 | 28 | 4900 | 1 | 44 | 45 | 68 |
| | | 04/26/99 | | | | | | | | | | | | |
| 1790 | HLQAM59 | 203957 | Lambda ZAP II | 1800 | 1061 | 1 | 1061 | 268 | 268 | 4901 | 1 | | | 16 |
| | | 04/26/99 | | | | | | | | | | | | |
| 1791 | HLQBB23 | 203957 | Lambda ZAP II | 1801 | 2046 | 442 | 2046 | 568 | 568 | 4902 | 1 | 26 | 27 | 29 |
| | | 04/26/99 | | | | | | | | | | | | |
| 1792 | HLQBF05 | 203957 | Lambda ZAP II | 1802 | 577 | 1 | 577 | 95 | 95 | 4903 | 1 | 22 | 23 | 32 |
| | | 04/26/99 | | | | | | | | | | | | |
| 1793 | HLQBX64 | 203959 | Lambda ZAP II | 1803 | 2108 | 762 | 1349 | 810 | 810 | 4904 | 1 | | | 15 |
| | | 04/26/99 | | | | | | | | | | | | |
| 1794 | HLQCY09 | 203957 | Lambda ZAP II | 1804 | 1026 | 1 | 1026 | 120 | 120 | 4905 | 1 | 30 | 31 | 72 |
| | | 04/26/99 | | | | | | | | | | | | |
| 1795 | HLQCZ43 | 203957 | Lambda ZAP II | 1805 | 1103 | 1 | 1103 | | 377 | 4906 | 1 | 15 | 16 | 37 |
| | | 04/26/99 | | | | | | | | | | | | |
| 1796 | HLQCZ80 | 203957 | Lambda ZAP II | 1806 | 1421 | 1 | 1173 | 327 | 327 | 4907 | 1 | 24 | 25 | 25 |
| | | 04/26/99 | | | | | | | | | | | | |
| 1797 | HLQDK45 | 203957 | Lambda ZAP II | 1807 | 845 | 1 | 845 | 95 | 95 | 4908 | 1 | 18 | 19 | 30 |
| | | 04/26/99 | | | | | | | | | | | | |
| 1798 | HLQDM47 | 203957 | Lambda ZAP II | 1808 | 1781 | 1 | 1781 | 115 | 115 | 4909 | 1 | 22 | 23 | 66 |
| | | 04/26/99 | | | | | | | | | | | | |
| 1799 | HLQDU77 | 203957 | Lambda ZAP II | 1809 | 919 | 144 | 919 | 181 | 181 | 4910 | 1 | 18 | 19 | 70 |
| | | 04/26/99 | | | | | | | | | | | | |
| 1800 | HLSAD72 | 203957 | pSport1 | 1810 | 495 | 1 | 495 | 113 | 113 | 4911 | 1 | 25 | 26 | 30 |
| | | 04/26/99 | | | | | | | | | | | | |
| 1801 | HLTCJ67 | 203957 | Uni-ZAP XR | 1811 | 1483 | 1 | 1483 | 246 | 246 | 4912 | 1 | | | 20 |
| | | 04/26/99 | | | | | | | | | | | | |
| 1802 | HLTCM28 | 203957 | Uni-ZAP XR | 1812 | 1332 | 1 | 1332 | 99 | 99 | 4913 | 1 | | | 18 |
| | | 04/26/99 | | | | | | | | | | | | |
| 1803 | HLTCO22 | 203959 | Uni-ZAP XR | 1813 | 1676 | 597 | 1672 | 758 | 758 | 4914 | 1 | 29 | 30 | 42 |
| | | 04/26/99 | | | | | | | | | | | | |
| 1804 | HLTDA14 | 203957 | Uni-ZAP XR | 1814 | 947 | 1 | 947 | 99 | 99 | 4915 | 1 | 23 | 24 | 50 |
| | | 04/26/99 | | | | | | | | | | | | |
| 1805 | HLTDC26 | 203957 | Uni-ZAP XR | 1815 | 1744 | 1 | 1474 | | 120 | 4916 | 1 | 25 | 26 | 37 |
| | | 04/26/99 | | | | | | | | | | | | |
| 1806 | HLTDC26 | 203957 | Uni-ZAP XR | 1816 | 1744 | 1 | 1474 | | 120 | 4917 | 1 | 25 | 26 | 37 |
| | | 04/26/99 | | | | | | | | | | | | |
| 1807 | HLTDI20 | 203957 | Uni-ZAP XR | 1817 | 1982 | 1 | 1982 | 520 | 520 | 4918 | 1 | 28 | 29 | 38 |
| | | 04/26/99 | | | | | | | | | | | | |
| 1808 | HLTDI65 | 203957 | Uni-ZAP XR | 1818 | 2689 | 1 | 2689 | | 127 | 4919 | 1 | 13 | 14 | 34 |
| | | 04/26/99 | | | | | | | | | | | | |
| 1809 | HLTDK30 | 203957 | Uni-ZAP XR | 1819 | 1573 | 648 | 1573 | | 761 | 4920 | 1 | 23 | 24 | 140 |
| | | 04/26/99 | | | | | | | | | | | | |
| 1810 | HLTDL37 | 203957 | Uni-ZAP XR | 1820 | 1986 | 1 | 1986 | 55 | 55 | 4921 | 1 | | | 11 |
| | | 04/26/99 | | | | | | | | | | | | |
| 1811 | HLTDU35 | 203957 | Uni-ZAP XR | 1821 | 1993 | 1 | 1993 | 53 | 53 | 4922 | 1 | | | 33 |
| | | 04/26/99 | | | | | | | | | | | | |
| 1812 | HLTDX04 | 203957 | Uni-ZAP XR | 1822 | 1469 | 1 | 1469 | 71 | 71 | 4923 | 1 | 43 | 44 | 79 |
| | | 04/26/99 | | | | | | | | | | | | |
| 1813 | HLTEH84 | 203957 | Uni-ZAP XR | 1823 | 1254 | 1 | 1254 | 88 | 88 | 4924 | 1 | | | 31 |
| | | 04/26/99 | | | | | | | | | | | | |
| 1814 | HLTEL39 | PTA-181 | Uni-ZAP XR | 1824 | 1827 | 1 | 1827 | | 210 | 4925 | 1 | | | 1 |
| | | 06/07/99 | | | | | | | | | | | | |
| 1815 | HLTEN11 | 203957 | Uni-ZAP XR | 1825 | 1514 | 1 | 1514 | 122 | 122 | 4926 | 1 | | | 23 |
| | | 04/26/99 | | | | | | | | | | | | |
| 1816 | HLTEW52 | 203957 | Uni-ZAP XR | 1826 | 1535 | 1 | 1535 | 251 | 251 | 4927 | 1 | 16 | 17 | 35 |
| | | 04/26/99 | | | | | | | | | | | | |
| 1817 | HLTEZ36 | 203959 | Uni-ZAP XR | 1827 | 3051 | 1 | 2583 | 218 | 218 | 4928 | 1 | | | 9 |
| | | 04/26/99 | | | | | | | | | | | | |
| 1818 | HLTGG14 | 203957 | Uni-ZAP XR | 1828 | 1290 | 1 | 1290 | 229 | 229 | 4929 | 1 | 18 | 19 | 22 |
| | | 04/26/99 | | | | | | | | | | | | |
| 1819 | HLUAF94 | 203957 | Uni-Zap XR | 1829 | 1503 | 1 | 1503 | | 257 | 4930 | 1 | | | 3 |
| | | 04/26/99 | | | | | | | | | | | | |
| 1820 | HLWAH33 | PTA-181 | pCMVSport 3.0 | 1830 | 2289 | 1 | 2287 | 117 | 117 | 4931 | 1 | 17 | 18 | 37 |
| | | 06/07/99 | | | | | | | | | | | | |
| 1821 | HLWAO11 | PTA-793 | pCMVSport 3.0 | 1831 | 2929 | 1 | 2929 | 63 | 63 | 4932 | 1 | 25 | 26 | 43 |
| | | 09/27/99 | | | | | | | | | | | | |
| 1822 | HLWAW73 | 203957 | pCMVSport 3.0 | 1832 | 1203 | 1 | 1203 | | 676 | 4933 | 1 | 9 | 10 | 52 |
| | | 04/26/99 | | | | | | | | | | | | |
| 1823 | HLWAX50 | 203957 | pCMVSport 3.0 | 1833 | 3186 | 1 | 3186 | 178 | 178 | 4934 | 1 | 28 | 29 | 39 |
| | | 04/26/99 | | | | | | | | | | | | |
| 1824 | HLWBJ93 | 203957 | pCMVSport 3.0 | 1834 | 1608 | 1 | 1608 | 46 | 46 | 4935 | 1 | 47 | 48 | 72 |
| | | 04/26/99 | | | | | | | | | | | | |
| 1825 | HLWBK16 | 203957 | pCMVSport 3.0 | 1835 | 1218 | 1 | 1218 | 492 | 492 | 4936 | 1 | | | 11 |
| | | 04/26/99 | | | | | | | | | | | | |
| 1826 | HLWCC11 | 203949 | pCMVSport 3.0 | 1836 | 368 | 1 | 368 | 73 | 73 | 4937 | 1 | 30 | 31 | 31 |
| | | 04/29/99 | | | | | | | | | | | | |
| 1827 | HLYAH81 | 203957 | pSport1 | 1837 | 685 | 1 | 685 | 254 | 254 | 4938 | 1 | | | 6 |
| | | 04/26/99 | | | | | | | | | | | | |
| 1828 | HLYAH92 | 203957 | pSport1 | 1838 | 781 | 1 | 781 | 211 | 211 | 4939 | 1 | 17 | 18 | 32 |
| | | 04/26/99 | | | | | | | | | | | | |
| 1829 | HLYAJ79 | 203957 | pSport1 | 1839 | 829 | 1 | 829 | 162 | 162 | 4940 | 1 | 16 | 17 | 33 |
| | | 04/26/99 | | | | | | | | | | | | |
| 1830 | HLYAL28 | 203957 | pSport1 | 1840 | 1007 | 1 | 1007 | 404 | 404 | 4941 | 1 | 43 | 44 | 53 |
| | | 04/26/99 | | | | | | | | | | | | |
| 1831 | HLYAR30 | 203957 | pSport1 | 1841 | 854 | 1 | 854 | 562 | 562 | 4942 | 1 | 1 | 2 | 97 |
| | | 04/26/99 | | | | | | | | | | | | |
| 1832 | HLYAT54 | 203957 | pSport1 | 1842 | 1274 | 1 | 1274 | 195 | 195 | 4943 | 1 | | | 22 |
| | | 04/26/99 | | | | | | | | | | | | |
| 1833 | HLYBC81 | 203957 | pSport1 | 1843 | 1820 | 1 | 1820 | 89 | 89 | 4944 | 1 | | | 7 |
| | | 04/26/99 | | | | | | | | | | | | |
| 1834 | HLYBD09 | 203957 | pSport1 | 1844 | 1984 | 1 | 1984 | 90 | 90 | 4945 | 1 | 28 | 29 | 30 |
| | | 04/26/99 | | | | | | | | | | | | |
| 1835 | HLYBL67 | 203959 | pSport1 | 1845 | 789 | 1 | 789 | 497 | 497 | 4946 | 1 | | | 29 |
| | | 04/26/99 | | | | | | | | | | | | |
| 1836 | HLYBM38 | 203957 | pSport1 | 1846 | 354 | 1 | 354 | 223 | 223 | 4947 | 1 | 19 | 20 | 38 |
| | | 04/26/99 | | | | | | | | | | | | |
| 1837 | HLYBN23 | 203957 | pSport1 | 1847 | 1487 | 1 | 1487 | | 324 | 4948 | 1 | | | 6 |
| | | 04/26/99 | | | | | | | | | | | | |
| 1838 | HLYBN71 | 203957 | pSport1 | 1848 | 820 | 1 | 820 | 237 | 237 | 4949 | 1 | 19 | 20 | 34 |
| | | 04/26/99 | | | | | | | | | | | | |
| 1839 | HLYBS25 | 203957 | pSport1 | 1849 | 751 | 26 | 751 | 48 | 48 | 4950 | 1 | 18 | 19 | 34 |
| | | 04/26/99 | | | | | | | | | | | | |
| 1840 | HLYBT28 | 203957 | pSport1 | 1850 | 1084 | 1 | 1084 | 245 | 245 | 4951 | 1 | 32 | 33 | 33 |
| | | 04/26/99 | | | | | | | | | | | | |
| 1841 | HLYBU15 | 203957 | pSport1 | 1851 | 1403 | 1 | 1403 | 369 | 369 | 4952 | 1 | 18 | 19 | 71 |
| | | 04/26/99 | | | | | | | | | | | | |
| 1842 | HLYBY04 | 203957 | pSport1 | 1852 | 1566 | 1 | 1566 | 188 | 188 | 4953 | 1 | 15 | 16 | 20 |
| | | 04/26/99 | | | | | | | | | | | | |
| 1843 | HLYCE15 | 203957 | pSport1 | 1853 | 668 | 1 | 668 | 22 | 22 | 4954 | 1 | 27 | 28 | 35 |
| | | 04/26/99 | | | | | | | | | | | | |
| 1844 | HLYCH04 | 203957 | pSport1 | 1854 | 313 | 1 | 313 | 49 | 49 | 4955 | 1 | 16 | 17 | 33 |
| | | 04/26/99 | | | | | | | | | | | | |
| 1845 | HLYCY48 | 203957 | pSport1 | 1855 | 1082 | 1 | 1082 | | 296 | 4956 | 1 | 21 | 22 | 49 |
| | | 04/26/99 | | | | | | | | | | | | |
| 1846 | HLYDE38 | 203957 | pSport1 | 1856 | 1316 | 1 | 1316 | 180 | 180 | 4957 | 1 | 20 | 21 | 30 |
| | | 04/26/99 | | | | | | | | | | | | |
| 1847 | HLYDG55 | 203957 | pSport1 | 1857 | 722 | 1 | 722 | 220 | 220 | 4958 | 1 | 27 | 28 | 29 |
| | | 04/26/99 | | | | | | | | | | | | |
| 1848 | HLYDO73 | 203957 | pSport1 | 1858 | 858 | 1 | 858 | 233 | 233 | 4959 | 1 | | | 12 |
| | | 04/26/99 | | | | | | | | | | | | |
| 1849 | HLYEA60 | 203957 | pSport1 | 1859 | 1206 | 46 | 1196 | | 427 | 4960 | 1 | 14 | 15 81 | |
| | | 04/26/99 | | | | | | | | | | | | |
| 1850 | HLYEJ14 | PTA-181 | pSport1 | 1860 | 2102 | 1 | 2102 | 94 | 94 | 4961 | 1 | 22 | 23 520 | |
| | | 06/07/99 | | | | | | | | | | | | |
| 1851 | HLYEJ44 | 203957 | pSport1 | 1861 | 1289 | 1 | 1289 | 124 | 124 | 4962 | 1 | 30 | 31 37 | |
| | | 04/26/99 | | | | | | | | | | | | |
| 1852 | HLYEU51 | 203957 | pSport1 | 1862 | 868 | 1 | 868 | 20 | 20 | 4963 | 1 | 21 | 22 35 | |
| | | 04/26/99 | | | | | | | | | | | | |
| 1853 | HLYGV19 | 203957 | pSport1 | 1863 | 2929 | 2604 | 2928 | 2789 | 2789 | 4964 | 1 | 27 | 28 47 | |
| | | 04/26/99 | | | | | | | | | | | | |
| 1854 | HMABK52 | PTA-181 | Uni-ZAP XR | 1864 | 1141 | 1 | 1141 | 235 | 235 | 4965 | 1 | 17 | 18 46 | |
| | | 06/07/99 | | | | | | | | | | | | |
| 1855 | HMACF34 | PTA-181 | Uni-ZAP XR | 1865 | 1285 | 1 | 1285 | 324 | 324 | 4966 | 1 | 17 | 18 19 | |
| | | 06/07/99 | | | | | | | | | | | | |
| 1856 | HMACL77 | PTA-181 | Uni-ZAP XR | 1866 | 1796 | 1 | 1796 | 251 | 251 | 4967 | 1 | | | 34 |
| | | 06/07/99 | | | | | | | | | | | | |
| 1857 | HMACT74 | 203918 | Uni-ZAP XR | 1867 | 770 | 1 | 749 | | 327 | 4968 | 1 | 24 | 25 67 | |
| | | 04/08/99 | | | | | | | | | | | | |
| 1858 | HMADJ14 | 203979 | Uni-ZAP XR | 1868 | 1444 | 91 | 1444 | 125 | 125 | 4969 | 1 | 25 | 26 257 | |
| | | 04/29/99 | | | | | | | | | | | | |
| 1859 | HMADJ74 | 203957 | Uni-ZAP XR | 1869 | 1892 | 619 | 1855 | 264 | 264 | 4970 | 1 | 38 | 39 291 | |
| | | 04/26/99 | | | | | | | | | | | | |
| 1860 | HMAEA58 | PTA-791 | Uni-ZAP XR | 1870 | 2509 | 1 | 2509 | 40 | 40 | 4971 | 1 | 18 | 19 23 | |
| | | 09/27/99 | | | | | | | | | | | | |
| 1861 | HMAGF01 | 203957 | Uni-ZAP XR | 1871 | 2101 | 37 | 1769 | 136 | 136 | 4972 | 1 | 19 | 20 64 | |
| | | 04/26/99 | | | | | | | | | | | | |
| 1862 | HMAJS26 | 203918 | Uni-ZAP XR | 1872 | 1322 | 695 | 1322 | 743 | 743 | 4973 | 1 | 22 | 23 64 | |
| | | 04/08/99 | | | | | | | | | | | | |
| 1863 | HMCED78 | 203957 | Uni-ZAP XR | 1873 | 1111 | 134 | 971 | 471 | 471 | 4974 | 1 | | | 23 |
| | | 04/26/99 | | | | | | | | | | | | |
| 1864 | HMCFN86 | PTA-793 | Uni-ZAP XR | 1874 | 1514 | 1 | 1514 | 413 | 413 | 4975 | 1 | 18 | 19 82 | |
| | | 09/27/99 | | | | | | | | | | | | |
| 1865 | HMCGJ47 | 203957 | Uni-ZAP XR | 1875 | 2799 | 654 | 2780 | 889 | 889 | 4976 | 1 | 28 | 29 31 | |
| | | 04/26/99 | | | | | | | | | | | | |
| 1866 | HMCGK88 | 203957 | Uni-ZAP XR | 1876 | 990 | 1 | 990 | | 317 | 4977 | 1 | 9 | 10 11 | |
| | | 04/26/99 | | | | | | | | | | | | |
| 1867 | HMCIH27 | PTA-181 | Uni-ZAP XR | 1877 | 1316 | 1 | 1316 | | 152 | 4978 | 1 | 16 | 17 49 | |
| | | 06/07/99 | | | | | | | | | | | | |
| 1868 | HMCIQ20 | 203957 | Uni-ZAP XR | 1878 | 1146 | 1 | 1146 | 356 | 356 | 4979 | 1 | 16 | 17 26 | |
| | | 04/26/99 | | | | | | | | | | | | |
| 1869 | HMCJC19 | 203959 | Uni-ZAP XR | 1879 | 545 | 1 | 545 | 215 | 215 | 4980 | 1 | 30 | 31 86 | |
| | | 04/26/99 | | | | | | | | | | | | |
| 1870 | HMDAB44 | 203957 | Uni-ZAP XR | 1880 | 606 | 1 | 606 | | 432 | 4981 | 1 | 5 | 6 | 58 |
| | | 04/26/99 | | | | | | | | | | | | |
| 1871 | HMDAE88 | 203957 | Uni-ZAP XR | 1881 | 1035 | 1 | 1035 | 377 | 377 | 4982 | 1 | 10 | 11 74 | |
| | | 04/26/99 | | | | | | | | | | | | |
| 1872 | HMDAG62 | 203957 | Uni-ZAP XR | 1882 | 2414 | 273 | 2414 | 399 | 399 | 4983 | 1 | 24 | 25 82 | |
| | | 04/26/99 | | | | | | | | | | | | |
| 1873 | HMDAK20 | 203957 | Uni-ZAP XR | 1883 | 582 | 1 | 582 | | 149 | 4984 | 1 | 20 | 21 44 | |
| | | 04/26/99 | | | | | | | | | | | | |
| 1874 | HMDAM08 | 203957 | Uni-ZAP XR | 1884 | 1426 | 1 | 1426 | 31 | 31 | 4985 | 1 | 17 | 18 32 | |
| | | 04/26/99 | | | | | | | | | | | | |
| 1875 | HMDAM39 | 203957 | Uni-ZAP XR | 1885 | 712 | 1 | 712 | 38 | 38 | 4986 | 1 | | | 28 |
| | | 04/26/99 | | | | | | | | | | | | |
| 1876 | HMEAA41 | 203957 | Lambda ZAP II | 1886 | 1702 | 1 | 1702 | | 9 | 4987 | 1 | 17 | 18 137 | |
| | | 04/26/99 | | | | | | | | | | | | |
| 1877 | HMECM77 | 203957 | Lambda ZAP II | 1887 | 1720 | 1 | 1720 | | 141 | 4988 | 1 | 12 | 13 42 | |
| | | 04/26/99 | | | | | | | | | | | | |
| 1878 | HMEEH21 | 203957 | Lambda ZAP II | 1888 | 505 | 1 | 505 | 20 | 20 | 4989 | 1 | 17 | 18 38 | |
| | | 04/26/99 | | | | | | | | | | | | |
| 1879 | HMEET36 | 203957 | Lambda ZAP II | 1889 | 485 | 1 | 485 | 56 | 56 | 4990 | 1 | 26 | 27 | 32 |
| | | 04/26/99 | | | | | | | | | | | | |
| 1880 | HMEEZ07 | 203957 | Lambda ZAP II | 1890 | 2007 | 1 | 2007 | 192 | 192 | 4991 | 1 | 20 | 21 | 42 |
| | | 04/26/99 | | | | | | | | | | | | |
| 1881 | HMEFB15 | 203957 | Lambda ZAP II | 1891 | 1499 | 1 | 1499 | 117 | 117 | 4992 | 1 | 27 | 28 | 36 |
| | | 04/26/99 | | | | | | | | | | | | |
| 1882 | HMEIH57 | 203957 | Lambda ZAP II | 1892 | 1626 | 1 | 1621 | 121 | 121 | 4993 | 1 | 22 | 23 | 50 |
| | | 04/26/99 | | | | | | | | | | | | |
| 1883 | HMEIJ21 | 203957 | Lambda ZAP II | 1893 | 2397 | 1 | 1525 | | 553 | 4994 | 1 | 13 | 14 | 20 |
| | | 04/26/99 | | | | | | | | | | | | |
| 1884 | HMEIX79 | 203957 | Lambda ZAP II | 1894 | 641 | 1 | 641 | 235 | 235 | 4995 | 1 | | | 11 |
| | | 04/26/99 | | | | | | | | | | | | |
| 1885 | HMEJC96 | 203957 | Lambda ZAP II | 1895 | 2163 | 401 | 2163 | 533 | 533 | 4996 | 1 | | | 15 |
| | | 04/26/99 | | | | | | | | | | | | |
| 1886 | HMEJD36 | 203957 | Lambda ZAP II | 1896 | 1312 | 1 | 1312 | 124 | 124 | 4997 | 1 | 29 | 30 | 36 |
| | | 04/26/99 | | | | | | | | | | | | |
| 1887 | HMEJK28 | 203959 | Lambda ZAP II | 1897 | 1966 | 710 | 1933 | 943 | 943 | 4998 | 1 | 25 | 26 | 26 |
| | | 04/26/99 | | | | | | | | | | | | |
| 1888 | HMEKH55 | 203957 | Lambda ZAP II | 1898 | 1726 | 1 | 1726 | 245 | 245 | 4999 | 1 | 19 | 20 | 38 |
| | | 04/26/99 | | | | | | | | | | | | |
| 1889 | HMEKW44 | 203957 | Lambda ZAP II | 1899 | 2006 | 1 | 2006 | 26 | 26 | 5000 | 1 | 33 | 34 | 58 |
| | | 04/26/99 | | | | | | | | | | | | |
| 1890 | HMEKW71 | PTA-181 | Lambda ZAP II | 1900 | 1175 | 1 | 1175 | | 244 | 5001 | 1 | 38 | 39 | 52 |
| | | 06/07/99 | | | | | | | | | | | | |
| 1891 | HMELW26 | 203957 | Lambda ZAP II | 1901 | 1402 | 1 | 1339 | 92 | 92 | 5002 | 1 | 18 | 19 | 23 |
| | | 04/26/99 | | | | | | | | | | | | |
| 1892 | HMGBT32 | 203957 | Uni-ZAP XR | 1902 | 1221 | 1 | 1221 | 243 | 243 | 5003 | 1 | | | 21 |
| | | 04/26/99 | | | | | | | | | | | | |
| 1893 | HMHBI09 | 203979 | Uni-ZAP XR | 1903 | 942 | 1 | 942 | 199 | 199 | 5004 | 1 | 29 | 30 | 44 |
| | | 04/29/99 | | | | | | | | | | | | |
| 1894 | HMHBI93 | 203959 | Uni-ZAP XR | 1904 | 2103 | 39 | 2103 | 319 | 319 | 5005 | 1 | | | 15 |
| | | 04/26/99 | | | | | | | | | | | | |
| 1895 | HMHBP74 | 203957 | Uni-ZAP XR | 1905 | 1255 | 190 | 1255 | 208 | 208 | 5006 | 1 | 22 | 23 | 33 |
| | | 04/26/99 | | | | | | | | | | | | |
| 1896 | HMIAC52 | 203957 | Uni-ZAP XR | 1906 | 1642 | 58 | 1642 | 251 | 251 | 5007 | 1 | 39 | 40 | 52 |
| | | 04/26/99 | | | | | | | | | | | | |
| 1897 | HMIAD75 | 203918 | Uni-ZAP XR | 1907 | 1621 | 1 | 1621 | 75 | 75 | 5008 | 1 | 18 | 19 | 39 |
| | | 04/08/99 | | | | | | | | | | | | |
| 1898 | HMIAG42 | 203918 | Uni-ZAP XR | 1908 | 1978 | 1 | 1978 | 273 | 273 | 5009 | 1 | 18 | 19 | 36 |
| | | 04/08/99 | | | | | | | | | | | | |
| 1899 | HMIAG55 | 203957 | Uni-ZAP XR | 1909 | 932 | 1 | 932 | 113 | 113 | 5010 | 1 | 23 | 24 | 35 |
| | | 04/26/99 | | | | | | | | | | | | |
| 1900 | HMIAG72 | 203959 | Uni-ZAP XR | 1910 | 3052 | 597 | 3052 | 740 | 740 | 5011 | 1 | 22 | 23 | 38 |
| | | 04/26/99 | | | | | | | | | | | | |
| 1901 | HMIAL39 | 203957 | Uni-ZAP XR | 1911 | 1280 | 1 | 1280 | 212 | 212 | 5012 | 1 | 27 | 28 | 41 |
| | | 04/26/99 | | | | | | | | | | | | |
| 1902 | HMIAO82 | 203957 | Uni-ZAP XR | 1912 | 3620 | 1 | 3620 | 129 | 129 | 5013 | 1 | | | 24 |
| | | 04/26/99 | | | | | | | | | | | | |
| 1903 | HMIAR42 | 203957 | Uni-ZAP XR | 1913 | 1896 | 1 | 1896 | 236 | 236 | 5014 | 1 | | | 8 |
| | | 04/26/99 | | | | | | | | | | | | |
| 1904 | HMIAV33 | 203957 | Uni-ZAP XR | 1914 | 1361 | 1 | 1361 | | 360 | 5015 | 1 | 7 | 8 | 24 |
| | | 04/26/99 | | | | | | | | | | | | |
| 1905 | HMIAZ24 | 203959 | Uni-ZAP XR | 1915 | 643 | 1 | 643 | | 144 | 5016 | 1 | | | 16 |
| | | 04/26/99 | | | | | | | | | | | | |
| 1906 | HMIBD93 | 203957 | Uni-ZAP XR | 1916 | 1323 | 734 | 1323 | | 983 | 5017 | 1 | 27 | 28 | 65 |
| | | 04/26/99 | | | | | | | | | | | | |
| 1907 | HMIBE95 | 203957 | Uni-ZAP XR | 1917 | 2083 | 1 | 2083 | 31 | 31 | 5018 | 1 | 23 | 24 | 90 |
| | | 04/26/99 | | | | | | | | | | | | |
| 1908 | HMIBG57 | 203957 | Uni-ZAP XR | 1918 | 917 | 1 | 917 | 130 | 130 | 5019 | 1 | 23 | 24 | 33 |
| | | 04/26/99 | | | | | | | | | | | | |
| 1909 | HMJAC12 | 203918 | pSport1 | 1919 | 1014 | 1 | 1014 | | 276 | 5020 | 1 | 13 | 14 | 40 |
| | | 04/08/99 | | | | | | | | | | | | |
| 1910 | HMKAN71 | PTA-792 | pSport1 | 1920 | 1720 | 1 | 1720 | 316 | 316 | 5021 | 1 | 27 | 28 | 35 |
| | | 09/27/99 | | | | | | | | | | | | |
| 1911 | HMKBA33 | 203957 | pSport1 | 1921 | 1730 | 1 | 1730 | 87 | 87 | 5022 | 1 | 19 | 20 | 34 |
| | | 04/26/99 | | | | | | | | | | | | |
| 1912 | HMKCI22 | PTA-181 | pSport1 | 1922 | 2018 | 296 | 2018 | 455 | 455 | 5023 | 1 | | | 15 |
| | | 06/07/99 | | | | | | | | | | | | |
| 1913 | HMKCK32 | 203957 | pSport1 | 1923 | 1020 | 1 | 1020 | 60 | 60 | 5024 | 1 | 20 | 21 | 37 |
| | | 04/26/99 | | | | | | | | | | | | |
| 1914 | HMKCP81 | 203957 | pSport1 | 1924 | 957 | 1 | 957 | 131 | 131 | 5025 | 1 | 17 | 18 | 30 |
| | | 04/26/99 | | | | | | | | | | | | |
| 1915 | HMKCY49 | 203957 | pSport1 | 1925 | 1034 | 1 | 1034 | 269 | 269 | 5026 | 1 | | | 2 |
| | | 04/26/99 | | | | | | | | | | | | |
| 1916 | HMKDD51 | PTA-795 | pSport1 | 1926 | 1150 | 1 | 1150 | 290 | 290 | 5027 | 1 | 22 | 23 | 39 |
| | | 09/27/99 | | | | | | | | | | | | |
| 1917 | HMKDG69 | 203957 | pSport1 | 1927 | 1761 | 1 | 1761 | | 286 | 5028 | 1 | 11 | 12 | 12 |
| | | 04/26/99 | | | | | | | | | | | | |
| 1918 | HMKDM80 | 203957 | pSport1 | 1928 | 616 | 1 | 616 | | 386 | 5029 | 1 | 11 | 12 | 35 |
| | | 04/26/99 | | | | | | | | | | | | |
| 1919 | HMKEG88 | 203957 | pSport1 | 1929 | 573 | 1 | 573 | 142 | 142 | 5030 | 1 | | | 19 |
| | | 04/26/99 | | | | | | | | | | | | |
| 1920 | HMMAA09 | 203957 | pSport1 | 1930 | 1384 | 1 | 1384 | 127 | 127 | 5031 | 1 | 30 | 31 | 34 |
| | | 04/26/99 | | | | | | | | | | | | |
| 1921 | HMMAK92 | 203957 | pSport1 | 1931 | 706 | 1 | 706 | 120 | 120 | 5032 | 1 | 30 | 31 | 34 |
| | | 04/26/99 | | | | | | | | | | | | |
| 1922 | HMMAL32 | 203957 | pSport1 | 1932 | 419 | 1 | 419 | 276 | 276 | 5033 | 1 | 36 | 37 | 48 |
| | | 04/26/99 | | | | | | | | | | | | |
| 1923 | HMMBD19 | 203957 | pSport1 | 1933 | 1025 | 1 | 1025 | 290 | 290 | 5034 | 1 | | | 9 |
| | | 04/26/99 | | | | | | | | | | | | |
| 1924 | HMMBF22 | 203918 | pSport1 | 1934 | 1390 | 1 | 699 | 42 | 42 | 5035 | 1 | 21 | 22 | 35 |
| | | 04/08/99 | | | | | | | | | | | | |
| 1925 | HMMBH91 | 203957 | pSport1 | 1935 | 783 | 1 | 783 | 234 | 234 | 5036 | 1 | 18 | 19 | 22 |
| | | 04/26/99 | | | | | | | | | | | | |
| 1926 | HMMBH94 | 203957 | pSport1 | 1936 | 909 | 1 | 909 | 86 | 86 | 5037 | 1 | | | 20 |
| | | 04/26/99 | | | | | | | | | | | | |
| 1927 | HMMBK55 | 203957 | pSport1 | 1937 | 766 | 1 | 766 | 260 | 260 | 5038 | 1 | 20 | 21 | 41 |
| | | 04/26/99 | | | | | | | | | | | | |
| 1928 | HMMBQ31 | 203957 | pSport1 | 1938 | 712 | 1 | 712 | 85 | 85 | 5039 | 1 | 21 | 22 | 37 |
| | | 04/26/99 | | | | | | | | | | | | |
| 1929 | HMMBR63 | 203957 | pSport1 | 1939 | 680 | 27 | 680 | 271 | 271 | 5040 | 1 | 26 | 27 | 44 |
| | | 04/26/99 | | | | | | | | | | | | |
| 1930 | HMMBS55 | 203957 | pSport1 | 1940 | 1004 | 1 | 1004 | 103 | 103 | 5041 | 1 | 22 | 23 | 40 |
| | | 04/26/99 | | | | | | | | | | | | |
| 1931 | HMMBT47 | 203957 | pSport1 | 1941 | 1305 | 1 | 1305 | 43 | 43 | 5042 | 1 | 23 | 24 | 50 |
| | | 04/26/99 | | | | | | | | | | | | |
| 1932 | HMMCD35 | 203957 | pSport1 | 1942 | 813 | 1 | 813 | | 308 | 5043 | 1 | 23 | 24 | 42 |
| | | 04/26/99 | | | | | | | | | | | | |
| 1933 | HMMCD95 | 203957 | pSport1 | 1943 | 1694 | 1 | 1694 | 236 | 236 | 5044 | 1 | | | 17 |
| | | 04/26/99 | | | | | | | | | | | | |
| 1934 | HMPAB26 | 203957 | pBluescript | 1944 | 865 | 1 | 865 | | 563 | 5045 | 1 | | | 6 |
| | | 04/26/99 | | | | | | | | | | | | |
| 1935 | HMPAP48 | 203957 | pBluescript | 1945 | 337 | 1 | 337 | 48 | 48 | 5046 | 1 | 17 | 18 | 33 |
| | | 04/26/99 | | | | | | | | | | | | |
| 1936 | HMQAI38 | 203957 | Uni-ZAP XR | 1946 | 1777 | 1 | 1777 | 24 | 24 | 5047 | 1 | | | 20 |
| | | 04/26/99 | | | | | | | | | | | | |
| 1937 | HMQAT69 | 203957 | Uni-ZAP XR | 1947 | 1940 | 125 | 1940 | 243 | 243 | 5048 | 1 | 25 | 26 | 138 |
| | | 04/26/99 | | | | | | | | | | | | |
| 1938 | HMQBL90 | 203957 | Uni-ZAP XR | 1948 | 1469 | 1 | 1469 | 57 | 57 | 5049 | 1 | 17 | 18 | 58 |
| | | 04/26/99 | | | | | | | | | | | | |
| 1939 | HMQBV82 | 203957 | Uni-ZAP XR | 1949 | 1013 | 302 | 1013 | 499 | 499 | 5050 | 1 | | | 5 |
| | | 04/26/99 | | | | | | | | | | | | |
| 1940 | HMQCA75 | 203957 | Uni-ZAP XR | 1950 | 1265 | 1 | 1265 | 239 | 239 | 5051 | 1 | 21 | 22 | 29 |
| | | 04/26/99 | | | | | | | | | | | | |
| 1941 | HMQCB37 | 203957 | Uni-ZAP XR | 1951 | 2122 | 1 | 2081 | | 288 | 5052 | 1 | | | 3 |
| | | 04/26/99 | | | | | | | | | | | | |
| 1942 | HMQCL80 | 203957 | Uni-ZAP XR | 1952 | 643 | 1 | 643 | 97 | 97 | 5053 | 1 | | | 12 |
| | | 04/26/99 | | | | | | | | | | | | |
| 1943 | HMQCX41 | 203957 | Uni-ZAP XR | 1953 | 608 | 1 | 608 | 221 | 221 | 5054 | 1 | 14 | 15 | 62 |
| | | 04/26/99 | | | | | | | | | | | | |
| 1944 | HMQDM09 | 203957 | Uni-ZAP XR | 1954 | 1277 | 1 | 1277 | | 109 | 5055 | 1 | | | 4 |
| | | 04/26/99 | | | | | | | | | | | | |
| 1945 | HMQDU07 | 203957 | Uni-ZAP XR | 1955 | 1982 | 1 | 1982 | | 159 | 5056 | 1 | 31 | 32 | 46 |
| | | 04/26/99 | | | | | | | | | | | | |
| 1946 | HMSAP33 | 203957 | Uni-ZAP XR | 1956 | 1600 | 157 | 1600 | 316 | 316 | 5057 | 1 | 16 | 17 | 34 |
| | | 04/26/99 | | | | | | | | | | | | |
| 1947 | HMSAZ48 | PTA-791 | Uni-ZAP XR | 1957 | 1818 | 1 | 1818 | 225 | 225 | 5058 | 1 | 21 | 22 | 24 |
| | | 09/27/99 | | | | | | | | | | | | |
| 1948 | HMSBN18 | 203979 | Uni-ZAP XR | 1958 | 1264 | 1 | 1264 | 231 | 231 | 5059 | 1 | 20 | 21 | 35 |
| | | 04/29/99 | | | | | | | | | | | | |
| 1949 | HMSBS25 | 203957 | Uni-ZAP XR | 1959 | 1366 | 1 | 1366 | 151 | 151 | 5060 | 1 | 24 | 25 | 35 |
| | | 04/26/99 | | | | | | | | | | | | |
| 1950 | HMSBU14 | 203918 | Uni-ZAP XR | 1960 | 2077 | 1 | 2077 | | 233 | 5061 | 1 | 8 | 9 | 24 |
| | | 04/08/99 | | | | | | | | | | | | |
| 1951 | HMSBZ10 | 203957 | Uni-ZAP XR | 1961 | 1993 | 1 | 1993 | | 240 | 5062 | 1 | 17 | 18 | 28 |
| | | 04/26/99 | | | | | | | | | | | | |
| 1952 | HMSCB94 | 203979 | Uni-ZAP XR | 1962 | 1932 | 1 | 1932 | 97 | 97 | 5063 | 1 | | | 21 |
| | | 04/29/99 | | | | | | | | | | | | |
| 1953 | HMSCK12 | 203957 | Uni-ZAP XR | 1963 | 1541 | 1 | 1541 | | 257 | 5064 | 1 | | | 17 |
| | | 04/26/99 | | | | | | | | | | | | |
| 1954 | HMSCP63 | 203957 | Uni-ZAP XR | 1964 | 934 | 1 | 934 | | 132 | 5065 | 1 | 7 | 8 | 10 |
| | | 04/26/99 | | | | | | | | | | | | |
| 1955 | HMSCV75 | 203918 | Uni-ZAP XR | 1965 | 1625 | 1 | 1625 | 146 | 146 | 5066 | 1 | 19 | 20 | 28 |
| | | 04/08/99 | | | | | | | | | | | | |
| 1956 | HMSCV85 | PTA-181 | Uni-ZAP XR | 1966 | 2128 | 256 | 2128 | 336 | 336 | 5067 | 1 | 15 | 16 | 31 |
| | | 06/07/99 | | | | | | | | | | | | |
| 1957 | HMSCW44 | 203957 | Uni-ZAP XR | 1967 | 1309 | 1 | 1309 | | 177 | 5068 | 1 | 29 | 30 | 37 |
| | | 04/26/99 | | | | | | | | | | | | |
| 1958 | HMSCZ19 | 203979 | Uni-ZAP XR | 1968 | 1686 | 1 | 1686 | 157 | 157 | 5069 | 1 | 48 | 49 | 177 |
| | | 04/29/99 | | | | | | | | | | | | |
| 1959 | HMSDI67 | 203957 | Uni-ZAP XR | 1969 | 2153 | 1 | 2153 | 851 | 851 | 5070 | 1 | 25 | 26 | 93 |
| | | 04/26/99 | | | | | | | | | | | | |
| 1960 | HMSDI79 | 203957 | Uni-ZAP XR | 1970 | 1790 | 1 | 1790 | | 347 | 5071 | 1 | 6 | 7 | 13 |
| | | 04/26/99 | | | | | | | | | | | | |
| 1961 | HMSDR28 | 203957 | Uni-ZAP XR | 1971 | 1319 | 1 | 1319 | 102 | 102 | 5072 | 1 | | | 24 |
| | | 04/26/99 | | | | | | | | | | | | |
| 1962 | HMSFT25 | 203957 | Uni-ZAP XR | 1972 | 1504 | 1 | 1504 | 154 | 154 | 5073 | 1 | 18 | 19 | 27 |
| | | 04/26/99 | | | | | | | | | | | | |
| 1963 | HMSFW52 | 203957 | Uni-ZAP XR | 1973 | 1645 | 1 | 1645 | 60 | 60 | 5074 | 1 | | | 18 |
| | | 04/26/99 | | | | | | | | | | | | |
| 1964 | HMSGT73 | 203957 | Uni-ZAP XR | 1974 | 1466 | 1 | 1466 | 181 | 181 | 5075 | 1 | 24 | 25 | 54 |
| | | 04/26/99 | | | | | | | | | | | | |
| 1965 | HMSGU30 | 203979 | Uni-ZAP XR | 1975 | 1828 | 1 | 1828 | 738 | 738 | 5076 | 1 | 17 | 18 | 78 |
| | | 04/29/99 | | | | | | | | | | | | |
| 1966 | HMSHB42 | 203957 | Uni-ZAP XR | 1976 | 2746 | 1 | 1171 | 1556 | 5077 | 1 | | | 3 | |
| | | 04/26/99 | | | | | | | | | | | | |
| 1967 | HMSHB42 | 203957 | Uni-ZAP XR | 1977 | 1507 | 1 | 1507 | 182 | 182 | 5078 | 1 | 18 | 19 | 33 |
| | | 04/26/99 | | | | | | | | | | | | |
| 1968 | HMSHN72 | PTA-181 | Uni-ZAP XR | 1978 | 1597 | 1 | 1597 | 84 | 84 | 5079 | 1 | 17 | 18 | 37 |
| | | 06/07/99 | | | | | | | | | | | | |
| 1969 | HMSHT29 | 203957 | Uni-ZAP XR | 1979 | 1294 | 1 | 1294 | 488 | 488 | 5080 | 1 | 28 | 29 | 38 |
| | | 04/26/99 | | | | | | | | | | | | |
| 1970 | HMSHW73 | 203957 | Uni-ZAP XR | 1980 | 2284 | 1 | 2284 | 57 | 57 | 5081 | 1 | 20 | 21 | 22 |
| | | 04/26/99 | | | | | | | | | | | | |
| 1971 | HMSIC48 | 203957 | Uni-ZAP XR | 1981 | 1395 | 1 | 1395 | | 271 | 5082 | 1 | 6 | 7 | 12 |
| | | 04/26/99 | | | | | | | | | | | | |
| 1972 | HMSII36 | 203957 | Uni-ZAP XR | 1982 | 1229 | 1 | 1229 | 222 | 222 | 5083 | 1 | 19 | 20 | 53 |
| | | 04/26/99 | | | | | | | | | | | | |
| 1973 | HMSIT42 | 203957 | Uni-ZAP XR | 1983 | 1166 | 1 | 1166 | 164 | 164 | 5084 | 1 | 50 | 51 | 64 |
| | | 04/26/99 | | | | | | | | | | | | |
| 1974 | HMSJB08 | PTA-791 | Uni-ZAP XR | 1984 | 2375 | 1 | 2375 | 141 | 141 | 5085 | 1 | 22 | 23 | 38 |
| | | 09/27/99 | | | | | | | | | | | | |
| 1975 | HMSJI69 | 203957 | Uni-ZAP XR | 1985 | 1330 | 1 | 1330 | 132 | 132 | 5086 | 1 | 15 | 16 | 21 |
| | | 04/26/99 | | | | | | | | | | | | |
| 1976 | HMSJM20 | 203957 | Uni-ZAP XR | 1986 | 1470 | 1 | 1470 | 264 | 264 | 5087 | 1 | | | 26 |
| | | 04/26/99 | | | | | | | | | | | | |
| 1977 | HMSJR44 | 203957 | Uni-ZAP XR | 1987 | 1725 | 1 | 1725 | 88 | 88 | 5088 | 1 | | | 10 |
| | | 04/26/99 | | | | | | | | | | | | |
| 1978 | HMSKQ91 | 203957 | Uni-ZAP XR | 1988 | 903 | 1 | 903 | 147 | 147 | 5089 | 1 | 33 | 34 | 69 |
| | | 04/26/99 | | | | | | | | | | | | |
| 1979 | HMSKY45 | 203957 | Uni-ZAP XR | 1989 | 1773 | 1 | 1773 | 93 | 93 | 5090 | 1 | 19 | 20 | 30 |
| | | 04/26/99 | | | | | | | | | | | | |
| 1980 | HMTAF92 | 203957 | pCMVSport 3.0 | 1990 | 2218 | 1 | 2218 | | 1554 | 5091 | 1 | 11 | 12 | 31 |
| | | 04/26/99 | | | | | | | | | | | | |
| 1981 | HMTAT36 | 203957 | pCMVSport 3.0 | 1991 | 1119 | 122 | 1119 | 198 | 198 | 5092 | 1 | 20 | 21 | 46 |
| | | 04/26/99 | | | | | | | | | | | | |
| 1982 | HMUAB93 | 203957 | pCMVSport 3.0 | 1992 | 1955 | 198 | 1955 | 200 | 200 | 5093 | 1 | 24 | 25 | 34 |
| | | 04/26/99 | | | | | | | | | | | | |
| 1983 | HMUAD65 | 203957 | pCMVSport 3.0 | 1993 | 1528 | 1 | 1528 | | 209 | 5094 | 1 | 18 | 19 | 32 |
| | | 04/26/99 | | | | | | | | | | | | |
| 1984 | HMUAT23 | PTA-795 | pCMVSport 3.0 | 1994 | 2069 | 1 | 2069 | 30 | 30 | 5095 | 1 | 25 | 26 | 33 |
| | | 09/27/99 | | | | | | | | | | | | |
| 1985 | HMUBA47 | 203957 | pCMVSport 3.0 | 1995 | 1528 | 787 | 1522 | 1074 | 1074 | 5096 | 1 | 22 | 23 | 26 |
| | | 04/26/99 | | | | | | | | | | | | |
| 1986 | HMUBJ22 | 203957 | pCMVSport 3.0 | 1996 | 1751 | 1 | 1751 | 201 | 201 | 5097 | 1 | 15 | 16 | 32 |
| | | 04/26/99 | | | | | | | | | | | | |
| 1987 | HMUBK53 | 203957 | pCMVSport 3.0 | 1997 | 752 | 1 | 752 | 247 | 247 | 5098 | 1 | 23 | 24 | 119 |
| | | 04/26/99 | | | | | | | | | | | | |
| 1988 | HMUBN24 | 203957 | pCMVSport 3.0 | 1998 | 629 | 1 | 629 | 272 | 272 | 5099 | 1 | | | 17 |
| | | 04/26/99 | | | | | | | | | | | | |
| 1989 | HMUBO15 | 203957 | pCMVSport 3.0 | 1999 | 809 | 1 | 809 | 120 | 120 | 5100 | 1 | 31 | 32 | 56 |
| | | 04/26/99 | | | | | | | | | | | | |
| 1990 | HMUBX48 | 203949 | pCMVSport 3.0 | 2000 | 1208 | 1 | 1208 | | 256 | 5101 | 1 | 4 | 5 | 89 |
| | | 04/29/99 | | | | | | | | | | | | |
| 1991 | HMUBY57 | 203918 | pCMVSport 3.0 | 2001 | 2141 | 900 | 2141 | 1085 | 1085 | 5102 | 1 | 20 | 21 | 30 |
| | | 04/08/99 | | | | | | | | | | | | |
| 1992 | HMUBZ15 | 203957 | pCMVSport 3.0 | 2002 | 1118 | 1 | 1118 | | 137 | 5103 | 1 | 6 | 7 | 40 |
| | | 04/26/99 | | | | | | | | | | | | |
| 1993 | HMVAL15 | 203957 | pSport1 | 2003 | 1769 | 1 | 1769 | 385 | 385 | 5104 | 1 | 17 | 18 | 36 |
| | | 04/26/99 | | | | | | | | | | | | |
| 1994 | HMVBC84 | 203957 | pSport1 | 2004 | 1149 | 1 | 1149 | 69 | 69 | 5105 | 1 | 18 | 19 | 40 |
| | | 04/26/99 | | | | | | | | | | | | |
| 1995 | HMVBD68 | 203957 | pSport1 | 2005 | 1281 | 1 | 1281 | 467 | 467 | 5106 | 1 | 18 | 19 | 22 |
| | | 04/26/99 | | | | | | | | | | | | |
| 1996 | HMVCG17 | 203979 | pSport1 | 2006 | 1149 | 1 | 1149 | 253 | 253 | 5107 | 1 | 21 | 22 | 65 |
| | | 04/29/99 | | | | | | | | | | | | |
| 1997 | HMVCS92 | 203979 | pSport1 | 2007 | 1869 | 1 | 1732 | 323 | 323 | 5108 | 1 | 23 | 24 | 34 |
| | | 04/29/99 | | | | | | | | | | | | |
| 1998 | HMVCS92 | 203979 | pSport1 | 2008 | 1867 | 1 | 1730 | 323 | 323 | 5109 | 1 | 22 | 23 | 47 |
| | | 04/29/99 | | | | | | | | | | | | |
| 1999 | HMVDB45 | PTA-181 | pSport1 | 2009 | 1156 | 1 | 1156 | 179 | 179 | 5110 | 1 | | | 2 |
| | | 06/07/99 | | | | | | | | | | | | |
| 2000 | HMVDJ71 | PTA-181 | pSport1 | 2010 | 1472 | 1 | 1386 | 332 | 332 | 5111 | 1 | 32 | 33 | 85 |
| | | 06/07/99 | | | | | | | | | | | | |
| 2001 | HMVDT89 | 203917 | pSport1 | 2011 | 1991 | 1 | 1689 | | 2 | 5112 | 1 | 1 | 2 | 144 |
| | | 04/08/99 | | | | | | | | | | | | |
| 2002 | HMVDT89 | 203917 | pSport1 | 2012 | 1994 | 1 | 1696 | 285 | 285 | 5113 | 1 | | | 13 |
| | | 04/08/99 | | | | | | | | | | | | |
| 2003 | HMWAO65 | 203957 | Uni-ZAP XR | 2013 | 712 | 1 | 712 | 340 | 340 | 5114 | 1 | | | 26 |
| | | 04/26/99 | | | | | | | | | | | | |
| 2004 | HMWAO82 | 203957 | Uni-ZAP XR | 2014 | 486 | 1 | 486 | 72 | 72 | 5115 | 1 | 17 | 18 | 40 |
| | | 04/26/99 | | | | | | | | | | | | |
| 2005 | HMWBD74 | 203957 | Uni-ZAP XR | 2015 | 654 | 181 | 653 | 410 | 410 | 5116 | 1 | 13 | 14 | 20 |
| | | 04/26/99 | | | | | | | | | | | | |
| 2006 | HMWBK35 | 203957 | Uni-ZAP XR | 2016 | 974 | 1 | 974 | 194 | 194 | 5117 | 1 | 20 | 21 | 63 |
| | | 04/26/99 | | | | | | | | | | | | |
| 2007 | HMWBK86 | 203957 | Uni-ZAP XR | 2017 | 472 | 1 | 472 | | 268 | 5118 | 1 | 5 | 6 | 6 |
| | | 04/26/99 | | | | | | | | | | | | |
| 2008 | HMWBL38 | 203957 | Uni-ZAP XR | 2018 | 924 | 1 | 924 | 31 | 31 | 5119 | 1 | 18 | 19 | 33 |
| | | 04/26/99 | | | | | | | | | | | | |
| 2009 | HMWBM48 | 203957 | Uni-ZAP XR | 2019 | 807 | 1 | 807 | | 11 | 5120 | 1 | 11 | 12 | 13 |
| | | 04/26/99 | | | | | | | | | | | | |
| 2010 | HMWCG28 | 203949 | Uni-ZAP XR | 2020 | 893 | 1 | 893 | 78 | 78 | 5121 | 1 | 30 | 31 | 40 |
| | | 04/29/99 | | | | | | | | | | | | |
| 2011 | HMWCP85 | 203957 | Uni-ZAP XR | 2021 | 2037 | 1 | 1857 | 116 | 116 | 5122 | 1 | | | 14 |
| | | 04/26/99 | | | | | | | | | | | | |
| 2012 | HMWDG30 | 203957 | Uni-ZAP XR | 2022 | 1417 | 1 | 1417 | | 3 | 5123 | 1 | 1 | 2 | 207 |
| | | 04/26/99 | | | | | | | | | | | | |
| 2013 | HMWDU20 | 203957 | Uni-ZAP XR | 2023 | 1837 | 1 | 1837 | 92 | 92 | 5124 | 1 | 27 | 28 | 33 |
| | | 04/26/99 | | | | | | | | | | | | |
| 2014 | HMWDX57 | 203957 | Uni-ZAP XR | 2024 | 493 | 1 | 493 | 127 | 127 | 5125 | 1 | | | 8 |
| | | 04/26/99 | | | | | | | | | | | | |
| 2015 | HMWDZ63 | 203957 | Uni-ZAP XR | 2025 | 460 | 1 | 460 | 129 | 129 | 5126 | 1 | 15 | 16 | 36 |
| | | 04/26/99 | | | | | | | | | | | | |
| 2016 | HMWEA77 | 203957 | Uni-ZAP XR | 2026 | 1369 | 1 | 1369 | 213 | 213 | 5127 | 1 | 16 | 17 | 29 |
| | | 04/26/99 | | | | | | | | | | | | |
| 2017 | HMWEC03 | 203957 | Uni-ZAP XR | 2027 | 1556 | 1 | 1555 | 190 | 190 | 5128 | 1 | 18 | 19 | 28 |
| | | 04/26/99 | | | | | | | | | | | | |
| 2018 | HMWEF46 | 203957 | Uni-ZAP XR | 2028 | 1259 | 1 | 1259 | 71 | 71 | 5129 | 1 | 18 | 19 | 61 |
| | | 04/26/99 | | | | | | | | | | | | |
| 2019 | HMWEK43 | 203979 | Uni-ZAP XR | 2029 | 1217 | 1 | 1217 | 126 | 126 | 5130 | 1 | 16 | 17 | 31 |
| | | 04/29/99 | | | | | | | | | | | | |
| 2020 | HMWEM23 | PTA-181 | Uni-ZAP XR | 2030 | 1876 | 12 | 1876 | 152 | 152 | 5131 | 1 | 1 | 2 | 338 |
| | | 06/07/99 | | | | | | | | | | | | |
| 2021 | HMWEM23 | PTA-181 | Uni-ZAP XR | 2031 | 1876 | 12 | 1876 | 135 | 135 | 5132 | 1 | 16 | 17 | 17 |
| | | 06/07/99 | | | | | | | | | | | | |
| 2022 | HMWER46 | 203959 | Uni-ZAP XR | 2032 | 1133 | 560 | 1133 | 726 | 726 | 5133 | 1 | 20 | 21 | 54 |
| | | 04/26/99 | | | | | | | | | | | | |
| 2023 | HMWEU96 | 203957 | Uni-ZAP XR | 2033 | 1609 | 1 | 1609 | 91 | 91 | 5134 | 1 | 20 | 21 | 379 |
| | | 04/26/99 | | | | | | | | | | | | |
| 2023 | HMWEU96 | 203957 | Uni-ZAP XR | 3110 | 1603 | 1 | 1603 | 86 | 86 | 6211 | 1 | 20 | 21 | 379 |
| | | 04/26/99 | | | | | | | | | | | | |
| 2024 | HMWEX02 | 203957 | Uni-ZAP XR | 2034 | 1359 | 1 | 1359 | | 48 | 5135 | 1 | 25 | 26 | 188 |
| | | 04/26/99 | | | | | | | | | | | | |
| 2025 | HMWFB65 | 203957 | Uni-ZAP XR | 2035 | 1490 | 1 | 1490 | | 29 | 5136 | 1 | | | 16 |
| | | 04/26/99 | | | | | | | | | | | | |
| 2026 | HMWFD77 | 203957 | Uni-ZAP XR | 2036 | 522 | 1 | 522 | 17 | 17 | 5137 | 1 | 31 | 32 | 34 |
| | | 04/26/99 | | | | | | | | | | | | |
| 2027 | HMWFO25 | 203957 | Uni-ZAP XR | 2037 | 930 | 1 | 930 | | 185 | 5138 | 1 | 10 | 11 | 12 |
| | | 04/26/99 | | | | | | | | | | | | |
| 2028 | HMWFO89 | 203979 | Uni-ZAP XR | 2038 | 580 | 1 | 580 | 209 | 209 | 5139 | 1 | 18 | 19 | 63 |
| | | 04/29/99 | | | | | | | | | | | | |
| 2029 | HMWGM41 | 203979 | Uni-ZAP XR | 2039 | 1224 | 1 | 1224 | 33 | 33 | 5140 | 1 | 41 | 42 | 318 |
| | | 04/29/99 | | | | | | | | | | | | |
| 2030 | HMWGO95 | 203957 | Uni-ZAP XR | 2040 | 1448 | 1 | 1448 | 175 | 175 | 5141 | 1 | 28 | 29 | 36 |
| | | 04/26/99 | | | | | | | | | | | | |
| 2031 | HMWGV85 | 203979 | Uni-ZAP XR | 2041 | 1143 | 1 | 1143 | 41 | 41 | 5142 | 1 | 42 | 43 | 109 |
| | | 04/29/99 | | | | | | | | | | | | |
| 2032 | HMWGZ42 | 203957 | Uni-ZAP XR | 2042 | 1589 | 1 | 1589 | 224 | 224 | 5143 | 1 | 21 | 22 | 32 |
| | | 04/26/99 | | | | | | | | | | | | |
| 2033 | HMWHR36 | 203957 | Uni-ZAP XR | 2043 | 831 | 1 | 831 | 164 | 164 | 5144 | 1 | 27 | 28 | 73 |
| | | 04/26/99 | | | | | | | | | | | | |
| 2034 | HMWIM55 | 203957 | Uni-ZAP XR | 2044 | 784 | 1 | 784 | 53 | 53 | 5145 | 1 | 25 | 26 | 34 |
| | | 04/26/99 | | | | | | | | | | | | |
| 2035 | HMWIQ26 | 203957 | Uni-ZAP XR | 2045 | 1178 | 1 | 1178 | 135 | 135 | 5146 | 1 | 22 | 23 | 69 |
| | | 04/26/99 | | | | | | | | | | | | |
| 2036 | HMWIU49 | 203957 | Uni-ZAP XR | 2046 | 1579 | 920 | 1579 | 989 | 989 | 5147 | 1 | 20 | 21 | 98 |
| | | 04/26/99 | | | | | | | | | | | | |
| 2037 | HMWJJ62 | 203957 | Uni-ZAP XR | 2047 | 954 | 1 | 954 | 115 | 115 | 5148 | 1 | 19 | 20 | 38 |
| | | 04/26/99 | | | | | | | | | | | | |
| 2038 | HMWJJ64 | 203957 | Uni-ZAP XR | 2048 | 1563 | 1 | 1563 | 187 | 187 | 5149 | 1 | 38 | 39 | 46 |
| | | 04/26/99 | | | | | | | | | | | | |
| 2039 | HNAAD76 | 203957 | pSport1 | 2049 | 1847 | 1 | 1847 | 116 | 116 | 5150 | 1 | 37 | 38 | 38 |
| | | 04/26/99 | | | | | | | | | | | | |
| 2040 | HNAAE24 | 203957 | pSport1 | 2050 | 1391 | 1 | 1391 | 107 | 107 | 5151 | 1 | 18 | 19 | 23 |
| | | 04/26/99 | | | | | | | | | | | | |
| 2041 | HNALD94 | 203979 | pSport1 | 2051 | 1272 | 1 | 1249 | 88 | 88 | 5152 | 1 | 13 | 14 | 217 |
| | | 04/29/99 | | | | | | | | | | | | |
| 2042 | HNALE44 | 203957 | pSport1 | 2052 | 2008 | 1 | 1980 | 179 | 179 | 5153 | 1 | 15 | 16 | 35 |
| | | 04/26/99 | | | | | | | | | | | | |
| 2043 | HNDAC35 | 203949 | pCMVSport 2.0 | 2053 | 772 | 1 | 772 | 78 | 78 | 5154 | 1 | 31 | 32 | 40 |
| | | 04/29/99 | | | | | | | | | | | | |
| 2044 | HNEAA04 | 203957 | Uni-ZAP XR | 2054 | 822 | 1 | 822 | 112 | 112 | 5155 | 1 | 26 | 27 | 35 |
| | | 04/26/99 | | | | | | | | | | | | |
| 2045 | HNEAH26 | PTA-181 | Uni-ZAP XR | 2055 | 1488 | 1 | 1488 | | 206 | 5156 | 1 | 21 | 22 | 34 |
| | | 06/07/99 | | | | | | | | | | | | |
| 2046 | HNEAK38 | 203957 | Uni-ZAP XR | 2056 | 1383 | 105 | 1383 | | 247 | 5157 | 1 | 27 | 28 | 44 |
| | | 04/26/99 | | | | | | | | | | | | |
| 2047 | HNEAK65 | 203957 | Uni-ZAP XR | 2057 | 748 | 1 | 748 | 66 | 66 | 5158 | 1 | 20 | 21 | 31 |
| | | 04/26/99 | | | | | | | | | | | | |
| 2048 | HNEBX72 | 203979 | Uni-ZAP XR | 2058 | 1694 | 21 | 1694 | 47 | 47 | 5159 | 1 | 17 | 18 | 46 |
| | | 04/29/99 | | | | | | | | | | | | |
| 2049 | HNEBY79 | 203979 | Uni-ZAP XR | 2059 | 1572 | 1 | 1567 | 186 | 186 | 5160 | 1 | 21 | 22 | 23 |
| | | 04/29/99 | | | | | | | | | | | | |
| 2050 | HNECD52 | 203957 | Uni-ZAP XR | 2060 | 1265 | 1 | 1265 | 262 | 262 | 5161 | 1 | 19 | 20 | 46 |
| | | 04/26/99 | | | | | | | | | | | | |
| 2051 | HNECL75 | 203957 | Uni-ZAP XR | 2061 | 3332 | 1077 | 3135 | 1120 | 1120 | 5162 | 1 | 32 | 33 | 48 |
| | | 04/26/99 | | | | | | | | | | | | |
| 2052 | HNECX90 | 203957 | Uni-ZAP XR | 2062 | 1314 | 1 | 1314 | 71 | 71 | 5163 | 1 | 17 | 18 | 37 |
| | | 04/26/99 | | | | | | | | | | | | |
| 2053 | HNECX90 | 203957 | Uni-ZAP XR | 2063 | 2545 | 1 | 1293 | 71 | 71 | 5164 | 1 | 17 | 18 | 37 |
| | | 04/26/99 | | | | | | | | | | | | |
| 2054 | HNEDA05 | 203957 | Uni-ZAP XR | 2064 | 1564 | 575 | 1564 | 649 | 649 | 5165 | 1 | 17 | 18 | 59 |
| | | 04/26/99 | | | | | | | | | | | | |
| 2055 | HNEDP75 | 203957 | Uni-ZAP XR | 2065 | 914 | 1 | 914 | | 211 | 5166 | 1 | | | 24 |
| | | 04/26/99 | | | | | | | | | | | | |
| 2056 | HNEDQ02 | 203979 | Uni-ZAP XR | 2066 | 2235 | 131 | 2235 | 280 | 280 | 5167 | 1 | 23 | 24 | 56 |
| | | 04/29/99 | | | | | | | | | | | | |
| 2057 | HNEDU46 | 203957 | Uni-ZAP XR | 2067 | 1369 | 1 | 1369 | 794 | 794 | 5168 | 1 | 44 | 45 | 52 |
| | | 04/26/99 | | | | | | | | | | | | |
| 2058 | HNFAD50 | 203917 | Uni-ZAP XR | 2068 | 2910 | 1 | 2885 | 227 | 227 | 5169 | 1 | 1 | 2 | 477 |
| | | 04/08/99 | | | | | | | | | | | | |
| 2059 | HNFAD50 | 203917 | Uni-ZAP XR | 2069 | 2430 | 1 | 2389 | | 112 | 5170 | 1 | | | 8 |
| | | 04/08/99 | | | | | | | | | | | | |
| 2060 | HNFAG67 | 203959 | Uni-ZAP XR | 2070 | 1525 | 480 | 1474 | | 32 | 5171 | 1 | | | 2 |
| | | 04/26/99 | | | | | | | | | | | | |
| 2061 | HNFCJ77 | PTA-793 | Uni-ZAP XR | 2071 | 2399 | 1 | 2399 | | 332 | 5172 | 1 | 11 | 12 | 17 |
| | | 09/27/99 | | | | | | | | | | | | |
| 2062 | HNFCO56 | PTA-181 | Uni-ZAP XR | 2072 | 1709 | 299 | 1645 | 526 | 526 | 5173 | 1 | | | 18 |
| | | 06/07/99 | | | | | | | | | | | | |
| 2063 | HNFCY57 | PTA-791 | Uni-ZAP XR | 2073 | 2847 | 1 | 2847 | 317 | 317 | 5174 | 1 | 10 | 11 | 629 |
| | | 09/27/99 | | | | | | | | | | | | |
| 2064 | HNFDL89 | 203957 | Uni-ZAP XR | 2074 | 2661 | 1 | 2661 | 231 | 231 | 5175 | 1 | | | 34 |
| | | 04/26/99 | | | | | | | | | | | | |
| 2065 | HNFDT73 | 203957 | Uni-ZAP XR | 2075 | 994 | 1 | 994 | 72 | 72 | 5176 | 1 | 13 | 14 | 16 |
| | | 04/26/99 | | | | | | | | | | | | |
| 2066 | HNFDU92 | 203957 | Uni-ZAP XR | 2076 | 793 | 1 | 793 | 30 | 30 | 5177 | 1 | | | 2 |
| | | 04/26/99 | | | | | | | | | | | | |
| 2067 | HNFDY09 | 203959 | Uni-ZAP XR | 2077 | 1482 | 1 | 1226 | 311 | 311 | 5178 | 1 | 12 | 13 | 15 |
| | | 04/26/99 | | | | | | | | | | | | |
| 2068 | HNFDY31 | 203957 | Uni-ZAP XR | 2078 | 1336 | 327 | 1336 | | 473 | 5179 | 1 | 16 | 17 | 60 |
| | | 04/26/99 | | | | | | | | | | | | |
| 2069 | HNFEA17 | 203957 | Uni-ZAP XR | 2079 | 2253 | 1 | 2253 | | 9 | 5180 | 1 | 18 | 19 | 47 |
| | | 04/26/99 | | | | | | | | | | | | |
| 2070 | HNFEP55 | 203957 | Uni-ZAP XR | 2080 | 1481 | 1 | 1481 | 219 | 219 | 5181 | 1 | 23 | 24 | 27 |
| | | 04/26/99 | | | | | | | | | | | | |
| 2071 | HNFET12 | 203957 | Uni-ZAP XR | 2081 | 1268 | 1 | 1268 | 281 | 281 | 5182 | 1 | 17 | 18 | 51 |
| | | 04/26/99 | | | | | | | | | | | | |
| 2072 | HNFFR59 | 203957 | Uni-ZAP XR | 2082 | 1637 | 1 | 1637 | | 162 | 5183 | 1 | 17 | 18 | 30 |
| | | 04/26/99 | | | | | | | | | | | | |
| 2073 | HNFGC51 | PTA-181 | Uni-ZAP XR | 2083 | 2127 | 1 | 2127 | 217 | 217 | 5184 | 1 | | | 9 |
| | | 06/07/99 | | | | | | | | | | | | |
| 2074 | HNFGR15 | 203959 | Uni-ZAP XR | 2084 | 1551 | 1 | 1551 | 292 | 292 | 5185 | 1 | 12 | 13 | 31 |
| | | 04/26/99 | | | | | | | | | | | | |
| 2075 | HNFGW37 | 203957 | Uni-ZAP XR | 2085 | 874 | 1 | 874 | | 219 | 5186 | 1 | 10 | 11 | 68 |
| | | 04/26/99 | | | | | | | | | | | | |
| 2076 | HNFGW53 | 203957 | Uni-ZAP XR | 2086 | 942 | 1 | 942 | 12 | 12 | 5187 | 1 | 46 | 47 | 75 |
| | | 04/26/99 | | | | | | | | | | | | |
| 2077 | HNFHA34 | 203957 | Uni-ZAP XR | 2087 | 1124 | 11 | 1124 | 246 | 246 | 5188 | 1 | 16 | 17 | 41 |
| | | 04/26/99 | | | | | | | | | | | | |
| 2078 | HNFHD58 | 203957 | Uni-ZAP XR | 2088 | 1170 | 1 | 1170 | 119 | 119 | 5189 | 1 | | | 12 |
| | | 04/26/99 | | | | | | | | | | | | |
| 2079 | HNFHV68 | 203957 | Uni-ZAP XR | 2089 | 1150 | 1 | 1150 | | 281 | 5190 | 1 | | | 8 |
| | | 04/26/99 | | | | | | | | | | | | |
| 2080 | HNFIE15 | PTA-795 | pBluescript | 2090 | 2612 | 1 | 2612 | 107 | 107 | 5191 | 1 | 26 | 27 | 99 |
| | | 09/27/99 | | | | | | | | | | | | |
| 2081 | HNFIE29 | PTA-181 | pBluescript | 2091 | 1485 | 1 | 1485 | | 150 | 5192 | 1 | | | 19 |
| | | 06/07/99 | | | | | | | | | | | | |
| 2082 | HNFIG49 | 203957 | pBluescript | 2092 | 1566 | 1 | 1566 | | 168 | 5193 | 1 | | | 20 |
| | | 04/26/99 | | | | | | | | | | | | |
| 2083 | HNFJE27 | 203957 | Uni-ZAP XR | 2093 | 1638 | 1 | 1638 | 288 | 288 | 5194 | 1 | 20 | 21 | 42 |
| | | 04/26/99 | | | | | | | | | | | | |
| 2084 | HNFJG16 | 203957 | Uni-ZAP XR | 2094 | 935 | 1 | 935 | 110 | 110 | 5195 | 1 | 17 | 18 | 32 |
| | | 04/26/99 | | | | | | | | | | | | |
| 2085 | HNGAC71 | 203957 | Uni-ZAP XR | 2095 | 628 | 1 | 628 | | 168 | 5196 | 1 | 15 | 16 | 19 |
| | | 04/26/99 | | | | | | | | | | | | |
| 2086 | HNGAK42 | 203957 | Uni-ZAP XR | 2096 | 410 | 1 | 410 | 15 | 15 | 5197 | 1 | 19 | 20 | 26 |
| | | 04/26/99 | | | | | | | | | | | | |
| 2087 | HNGAL25 | 203957 | Uni-ZAP XR | 2097 | 1409 | 1 | 1409 | 9 | 9 | 5198 | 1 | 22 | 23 | 35 |
| | | 04/26/99 | | | | | | | | | | | | |
| 2088 | HNGAT83 | 203957 | Uni-ZAP XR | 2098 | 1300 | 1 | 1300 | 145 | 145 | 5199 | 1 | 18 | 19 | 52 |
| | | 04/26/99 | | | | | | | | | | | | |
| 2089 | HNGAX06 | 203959 | Uni-ZAP XR | 2099 | 397 | 1 | 397 | 145 | 145 | 5200 | 1 | 18 | 19 | 38 |
| | | 04/26/99 | | | | | | | | | | | | |
| 2090 | HNGBB09 | 203957 | Uni-ZAP XR | 2100 | 964 | 1 | 964 | 7 | 7 | 5201 | 1 | 14 | 15 | 20 |
| | | 04/26/99 | | | | | | | | | | | | |
| 2091 | HNGBC53 | PTA-181 | Uni-ZAP XR | 2101 | 1004 | 1 | 1004 | 178 | 178 | 5202 | 1 | 20 | 21 | 55 |
| | | 06/07/99 | | | | | | | | | | | | |
| 2092 | HNGBD94 | 203957 | Uni-ZAP XR | 2102 | 1110 | 1 | 1110 | 22 | 22 | 5203 | 1 | 13 | 14 | 31 |
| | | 04/26/99 | | | | | | | | | | | | |
| 2093 | HNGBE44 | 203957 | Uni-ZAP XR | 2103 | 639 | 1 | 639 | | 208 | 5204 | 1 | | | 6 |
| | | 04/26/99 | | | | | | | | | | | | |
| 2094 | HNGBE63 | 203957 | Uni-ZAP XR | 2104 | 1197 | 1 | 1197 | 158 | 158 | 5205 | 1 | 21 | 22 | 44 |
| | | 04/26/99 | | | | | | | | | | | | |
| 2095 | HNGBI83 | PTA-793 | Uni-ZAP XR | 2105 | 421 | 1 | 421 | 80 | 80 | 5206 | 1 | 25 | 26 | 34 |
| | | 09/27/99 | | | | | | | | | | | | |
| 2096 | HNGBJ74 | 203957 | Uni-ZAP XR | 2106 | 1112 | 1 | 1112 | 180 | 180 | 5207 | 1 | 24 | 25 | 74 |
| | | 04/26/99 | | | | | | | | | | | | |
| 2097 | HNGBP30 | 203957 | Uni-ZAP XR | 2107 | 418 | 1 | 418 | 36 | 36 | 5208 | 1 | 23 | 24 | 36 |
| | | 04/26/99 | | | | | | | | | | | | |
| 2098 | HNGBQ61 | 203957 | Uni-ZAP XR | 2108 | 759 | 1 | 759 | 164 | 164 | 5209 | 1 | 44 | 45 | 67 |
| | | 04/26/99 | | | | | | | | | | | | |
| 2099 | HNGBS35 | 203957 | Uni-ZAP XR | 2109 | 1440 | 2 | 1102 | | 135 | 5210 | 1 | 4 | 5 | 17 |
| | | 04/26/99 | | | | | | | | | | | | |
| 2100 | HNGBW25 | 203957 | Uni-ZAP XR | 2110 | 961 | 1 | 961 | 15 | 15 | 5211 | 1 | 24 | 25 | 42 |
| | | 04/26/99 | | | | | | | | | | | | |
| 2101 | HNGCF29 | 203957 | Uni-ZAP XR | 2111 | 1174 | 1 | 1174 | 202 | 202 | 5212 | 1 | 20 | 21 | 35 |
| | | 04/26/99 | | | | | | | | | | | | |
| 2102 | HNGCF64 | 203957 | Uni-ZAP XR | 2112 | 1939 | 1 | 1939 | 239 | 239 | 5213 | 1 | 23 | 24 | 55 |
| | | 04/26/99 | | | | | | | | | | | | |
| 2103 | HNGDF54 | 203957 | Uni-ZAP XR | 2113 | 731 | 1 | 731 | 36 | 36 | 5214 | 1 | 23 | 24 | 92 |
| | | 04/26/99 | | | | | | | | | | | | |
| 2104 | HNGDH22 | 203957 | Uni-ZAP XR | 2114 | 1374 | 1 | 1373 | | 389 | 5215 | 1 | 27 | 28 | 83 |
| | | 04/26/99 | | | | | | | | | | | | |
| 2105 | HNGDH27 | 203957 | Uni-ZAP XR | 2115 | 1000 | 1 | 1000 | 59 | 59 | 5216 | 1 | 16 | 17 | 38 |
| | | 04/26/99 | | | | | | | | | | | | |
| 2106 | HNGDN07 | 203979 | Uni-ZAP XR | 2116 | 1122 | 1 | 1122 | 78 | 78 | 5217 | 1 | 27 | 28 | 54 |
| | | 04/29/99 | | | | | | | | | | | | |
| 2107 | HNGDO65 | 203957 | Uni-ZAP XR | 2117 | 996 | 423 | 847 | | 705 | 5218 | 1 | 18 | 19 | 22 |
| | | 04/26/99 | | | | | | | | | | | | |
| 2108 | HNGDR39 | 203957 | Uni-ZAP XR | 2118 | 2111 | 1 | 2111 | 53 | 53 | 5219 | 1 | 17 | 18 | 41 |
| | | 04/26/99 | | | | | | | | | | | | |
| 2109 | HNGDW78 | 203957 | Uni-ZAP XR | 2119 | 473 | 1 | 473 | 206 | 206 | 5220 | 1 | 19 | 20 | 35 |
| | | 04/26/99 | | | | | | | | | | | | |
| 2110 | HNGEA90 | PTA-181 | Uni-ZAP XR | 2120 | 1478 | 1 | 1478 | 220 | 220 | 5221 | 1 | 24 | 25 | 71 |
| | | 06/07/99 | | | | | | | | | | | | |
| 2111 | HNGEC17 | 203957 | Uni-ZAP XR | 2121 | 601 | 1 | 601 | 220 | 220 | 5222 | 1 | | | 4 |
| | | 04/26/99 | | | | | | | | | | | | |
| 2112 | HNGEE06 | 203957 | Uni-ZAP XR | 2122 | 1120 | 1 | 1120 | 29 | 29 | 5223 | 1 | 29 | 30 | 35 |
| | | 04/26/99 | | | | | | | | | | | | |
| 2113 | HNGEF70 | 203957 | Uni-ZAP XR | 2123 | 755 | 1 | 755 | 36 | 36 | 5224 | 1 | 21 | 22 | 31 |
| | | 04/26/99 | | | | | | | | | | | | |
| 2114 | HNGEF72 | PTA-792 | Uni-ZAP XR | 2124 | 2388 | 1 | 2388 | 238 | 238 | 5225 | 1 | 21 | 22 | 23 |
| | | 09/27/99 | | | | | | | | | | | | |
| 2115 | HNGEI64 | 203957 | Uni-ZAP XR | 2125 | 1245 | 1 | 1245 | 56 | 56 | 5226 | 1 | 22 | 23 | 29 |
| | | 04/26/99 | | | | | | | | | | | | |
| 2116 | HNGEJ33 | 203957 | Uni-ZAP XR | 2126 | 431 | 1 | 431 | 241 | 241 | 5227 | 1 | | | 20 |
| | | 04/26/99 | | | | | | | | | | | | |
| 2117 | HNGEK64 | 203957 | Uni-ZAP XR | 2127 | 1011 | 1 | 1011 | 144 | 144 | 5228 | 1 | 25 | 26 | 35 |
| | | 04/26/99 | | | | | | | | | | | | |
| 2118 | HNGEN32 | 203957 | Uni-ZAP XR | 2128 | 569 | 1 | 569 | 57 | 57 | 5229 | 1 | 21 | 22 | 38 |
| | | 04/26/99 | | | | | | | | | | | | |
| 2119 | HNGER85 | 203957 | Uni-ZAP XR | 2129 | 1223 | 1 | 1223 | 178 | 178 | 5230 | 1 | 17 | 18 | 68 |
| | | 04/26/99 | | | | | | | | | | | | |
| 2120 | HNGES90 | PTA-181 | Uni-ZAP XR | 2130 | 1626 | 1 | 1626 | 53 | 53 | 5231 | 1 | 22 | 23 | 32 |
| | | 06/07/99 | | | | | | | | | | | | |
| 2121 | HNGET33 | 203957 | Uni-ZAP XR | 2131 | 1347 | 1 | 1347 | 225 | 225 | 5232 | 1 | 28 | 29 | 54 |
| | | 04/26/99 | | | | | | | | | | | | |
| 2122 | HNGEX18 | 203957 | Uni-ZAP XR | 2132 | 741 | 1 | 741 | 389 | 389 | 5233 | 1 | | | 6 |
| | | 04/26/99 | | | | | | | | | | | | |
| 2123 | HNGEY45 | 203957 | Uni-ZAP XR | 2133 | 962 | 1 | 962 | 231 | 231 | 5234 | 1 | | | 9 |
| | | 04/26/99 | | | | | | | | | | | | |
| 2124 | HNGEZ02 | 203957 | Uni-ZAP XR | 2134 | 943 | 115 | 943 | 298 | 298 | 5235 | 1 | 17 | 18 | 25 |
| | | 04/26/99 | | | | | | | | | | | | |
| 2125 | HNGEZ90 | 203957 | Uni-ZAP XR | 2135 | 1120 | 306 | 1120 | 466 | 466 | 5236 | 1 | | | 23 |
| | | 04/26/99 | | | | | | | | | | | | |
| 2126 | HNGFA25 | 203957 | Uni-ZAP XR | 2136 | 402 | 1 | 402 | | 211 | 5237 | 1 | 13 | 14 | 64 |
| | | 04/26/99 | | | | | | | | | | | | |
| 2127 | HNGFB05 | 203957 | Uni-ZAP XR | 2137 | 214 | 1 | 214 | 110 | 110 | 5238 | 1 | | | 5 |
| | | 04/26/99 | | | | | | | | | | | | |
| 2128 | HNGFD30 | 203957 | Uni-ZAP XR | 2138 | 570 | 1 | 570 | 14 | 14 | 5239 | 1 | 20 | 21 | 32 |
| | | 04/26/99 | | | | | | | | | | | | |
| 2129 | HNGFD31 | 203957 | Uni-ZAP XR | 2139 | 1811 | 1 | 1811 | 185 | 185 | 5240 | 1 | 19 | 20 | 36 |
| | | 04/26/99 | | | | | | | | | | | | |
| 2130 | HNGFD61 | 203957 | Uni-ZAP XR | 2140 | 462 | 1 | 462 | 194 | 194 | 5241 | 1 | | | 18 |
| | | 04/26/99 | | | | | | | | | | | | |
| 2131 | HNGFG04 | 203957 | Uni-ZAP XR | 2141 | 534 | 1 | 534 | | 250 | 5242 | 1 | 23 | 24 | 57 |
| | | 04/26/99 | | | | | | | | | | | | |
| 2132 | HNGFG74 | 203957 | Uni-ZAP XR | 2142 | 1011 | 1 | 1011 | | 189 | 5243 | 1 | 21 | 22 | 43 |
| | | 04/26/99 | | | | | | | | | | | | |
| 2133 | HNGFH32 | 203957 | Uni-ZAP XR | 2143 | 1665 | 1 | 1665 | 963 | 963 | 5244 | 1 | 20 | 21 | 56 |
| | | 04/26/99 | | | | | | | | | | | | |
| 2134 | HNGFH83 | 203957 | Uni-ZAP XR | 2144 | 963 | 693 | 963 | | 739 | 5245 | 1 | | | 6 |
| | | 04/26/99 | | | | | | | | | | | | |
| 2135 | HNGFI21 | 203957 | Uni-ZAP XR | 2145 | 1573 | 1 | 1573 | | 34 | 5246 | 1 | 6 | 7 | 49 |
| | | 04/26/99 | | | | | | | | | | | | |
| 2136 | HNGFM31 | 203957 | Uni-ZAP XR | 2146 | 1361 | 1 | 1361 | 220 | 220 | 5247 | 1 | 41 | 42 | 66 |
| | | 04/26/99 | | | | | | | | | | | | |
| 2137 | HNGFN77 | 203918 | Uni-ZAP XR | 2147 | 1043 | 1 | 1043 | 195 | 195 | 5248 | 1 | 21 | 22 | 30 |
| | | 04/08/99 | | | | | | | | | | | | |
| 2138 | HNGFQ18 | 203957 | Uni-ZAP XR | 2148 | 1113 | 1 | 1113 | 39 | 39 | 5249 | 1 | 39 | 40 | 67 |
| | | 04/26/99 | | | | | | | | | | | | |
| 2139 | HNGFR54 | 203957 | Uni-ZAP XR | 2149 | 495 | 1 | 495 | | 73 | 5250 | 1 | 36 | 37 | 52 |
| | | 04/26/99 | | | | | | | | | | | | |
| 2140 | HNGFT70 | 203957 | Uni-ZAP XR | 2150 | 1099 | 1 | 1099 | 102 | 102 | 5251 | 1 | 17 | 18 | 22 |
| | | 04/26/99 | | | | | | | | | | | | |
| 2141 | HNGFU70 | 203957 | Uni-ZAP XR | 2151 | 670 | 1 | 670 | 24 | 24 | 5252 | 1 | 27 | 28 | 33 |
| | | 04/26/99 | | | | | | | | | | | | |
| 2142 | HNGFV39 | PTA-181 | Uni-ZAP XR | 2152 | 1360 | 1 | 1360 | | 262 | 5253 | 1 | 8 | 9 | 9 |
| | | 06/07/99 | | | | | | | | | | | | |
| 2143 | HNGGF13 | 203957 | Uni-ZAP XR | 2153 | 840 | 1 | 840 | 83 | 83 | 5254 | 1 | 23 | 24 | 159 |
| | | 04/26/99 | | | | | | | | | | | | |
| 2144 | HNGGK63 | 203957 | Uni-ZAP XR | 2154 | 1590 | 2 | 1590 | 225 | 225 | 5255 | 1 | | | 23 |
| | | 04/26/99 | | | | | | | | | | | | |
| 2145 | HNGGK65 | 203979 | Uni-ZAP XR | 2155 | 177 | 1 | 177 | 38 | 38 | 5256 | 1 | 25 | 26 | 38 |
| | | 04/29/99 | | | | | | | | | | | | |
| 2146 | HNGGL11 | 203957 | Uni-ZAP XR | 2156 | 1014 | 197 | 790 | 392 | 392 | 5257 | 1 | 27 | 28 | 53 |
| | | 04/26/99 | | | | | | | | | | | | |
| 2147 | HNGGO05 | 203918 | Uni-ZAP XR | 2157 | 1270 | 1 | 1270 | 43 | 43 | 5258 | 1 | 18 | 19 | 21 |
| | | 04/08/99 | | | | | | | | | | | | |
| 2148 | HNGGS92 | PTA-181 | Uni-ZAP XR | 2158 | 1100 | 1 | 1100 | 107 | 107 | 5259 | 1 | 19 | 20 | 37 |
| | | 06/07/99 | | | | | | | | | | | | |
| 2149 | HNGGT10 | PTA-181 | Uni-ZAP XR | 2159 | 1473 | 1 | 1473 | | 1 | 5260 | 1 | 1 | 2 | 160 |
| | | 06/07/99 | | | | | | | | | | | | |
| 2150 | HNGGT74 | 203957 | Uni-ZAP XR | 2160 | 1291 | 1 | 1291 | 153 | 153 | 5261 | 1 | | | 14 |
| | | 04/26/99 | | | | | | | | | | | | |
| 2151 | HNGHB89 | 203957 | Uni-ZAP XR | 2161 | 582 | 1 | 582 | | 160 | 5262 | 1 | | | 1 |
| | | 04/26/99 | | | | | | | | | | | | |
| 2152 | HNGHD07 | 203957 | Uni-ZAP XR | 2162 | 1219 | 1 | 1219 | 248 | 248 | 5263 | 1 | 29 | 30 | 36 |
| | | 04/26/99 | | | | | | | | | | | | |
| 2153 | HNGHK37 | 203957 | Uni-ZAP XR | 2163 | 1543 | 1 | 1543 | 234 | 234 | 5264 | 1 | | | 12 |
| | | 04/26/99 | | | | | | | | | | | | |
| 2154 | HNGHM47 | 203957 | Uni-ZAP XR | 2164 | 817 | 1 | 817 | 18 | 18 | 5265 | 1 | 28 | 29 | 41 |
| | | 04/26/99 | | | | | | | | | | | | |
| 2155 | HNGHT01 | 203957 | Uni-ZAP XR | 2165 | 829 | 1 | 829 | 54 | 54 | 5266 | 1 | 19 | 20 | 31 |
| | | 04/26/99 | | | | | | | | | | | | |
| 2156 | HNGHT86 | PTA-795 | Uni-ZAP XR | 2166 | 783 | 1 | 783 | 221 | 221 | 5267 | 1 | 20 | 21 | 187 |
| | | 09/27/99 | | | | | | | | | | | | |
| 2157 | HNGIH40 | 203957 | Uni-ZAP XR | 2167 | 578 | 1 | 578 | 100 | 100 | 5268 | 1 | 45 | 46 | 85 |
| | | 04/26/99 | | | | | | | | | | | | |
| 2158 | HNGIK07 | 203957 | Uni-ZAP XR | 2168 | 1142 | 1 | 1142 | 227 | 227 | 5269 | 1 | | | 19 |
| | | 04/26/99 | | | | | | | | | | | | |
| 2159 | HNGIM40 | 203957 | Uni-ZAP XR | 2169 | 2478 | 1 | 2478 | 49 | 49 | 5270 | 1 | 16 | 17 | 33 |
| | | 04/26/99 | | | | | | | | | | | | |
| 2160 | HNGIM83 | 203957 | Uni-ZAP XR | 2170 | 1092 | 1 | 1092 | 69 | 69 | 5271 | 1 | 30 | 31 | 91 |
| | | 04/26/99 | | | | | | | | | | | | |
| 2161 | HNGIO93 | PTA-795 | Uni-ZAP XR | 2171 | 846 | 142 | 846 | 151 | 151 | 5272 | 1 | 25 | 26 | 148 |
| | | 09/27/99 | | | | | | | | | | | | |
| 2162 | HNGIS27 | 203957 | Uni-ZAP XR | 2172 | 630 | 1 | 630 | 213 | 213 | 5273 | 1 | 34 | 35 | 53 |
| | | 04/26/99 | | | | | | | | | | | | |
| 2163 | HNGIU16 | 203957 | Uni-ZAP XR | 2173 | 2521 | 1 | 2521 | 14 | 14 | 5274 | 1 | 25 | 26 | 28 |
| | | 04/26/99 | | | | | | | | | | | | |
| 2164 | HNGIX91 | 203957 | Uni-ZAP XR | 2174 | 1475 | 1 | 1475 | 155 | 155 | 5275 | 1 | 26 | 27 | 31 |
| | | 04/26/99 | | | | | | | | | | | | |
| 2165 | HNGJA68 | 203957 | Uni-ZAP XR | 2175 | 1784 | 1 | 1784 | 23 | 23 | 5276 | 1 | 17 | 18 | 30 |
| | | 04/26/99 | | | | | | | | | | | | |
| 2166 | HNGJB57 | 203918 | Uni-ZAP XR | 2176 | 1743 | 1 | 1743 | 101 | 101 | 5277 | 1 | 22 | 23 | 32 |
| | | 04/08/99 | | | | | | | | | | | | |
| 2167 | HNGJE86 | 203918 | Uni-ZAP XR | 2177 | 1201 | 1 | 1201 | 229 | 229 | 5278 | 1 | 19 | 20 | 36 |
| | | 04/08/99 | | | | | | | | | | | | |
| 2168 | HNGJH26 | 203918 | Uni-ZAP XR | 2178 | 1815 | 1 | 1815 | 129 | 129 | 5279 | 1 | 33 | 34 | 34 |
| | | 04/08/99 | | | | | | | | | | | | |
| 2169 | HNGJJ61 | 203918 | Uni-ZAP XR | 2179 | 925 | 1 | 925 | 116 | 116 | 5280 | 1 | 19 | 20 | 30 |
| | | 04/08/99 | | | | | | | | | | | | |
| 2170 | HNGJL07 | 203918 | Uni-ZAP XR | 2180 | 921 | 1 | 921 | 147 | 147 | 5281 | 1 | 30 | 31 | 62 |
| | | 04/08/99 | | | | | | | | | | | | |
| 2171 | HNGJS66 | 203918 | Uni-ZAP XR | 2181 | 979 | 1 | 979 | | 49 | 5282 | 1 | 13 | 14 | 37 |
| | | 04/08/99 | | | | | | | | | | | | |
| 2172 | HNGJU60 | 203918 | Uni-ZAP XR | 2182 | 548 | 1 | 548 | 251 | 251 | 5283 | 1 | 26 | 27 | 55 |
| | | 04/08/99 | | | | | | | | | | | | |
| 2173 | HNGKB09 | 203959 | Uni-ZAP XR | 2183 | 975 | 1 | 975 | 313 | 313 | 5284 | 1 | 24 | 25 | 27 |
| | | 04/26/99 | | | | | | | | | | | | |
| 2174 | HNGKW35 | PTA-795 | Uni-ZAP XR | 2184 | 481 | 1 | 481 | 86 | 86 | 5285 | 1 | 25 | 26 | 132 |
| | | 09/27/99 | | | | | | | | | | | | |
| 2175 | HNGKY94 | 203959 | Uni-ZAP XR | 2185 | 825 | 1 | 825 | | 290 | 5286 | 1 | 15 | 16 | 51 |
| | | 04/26/99 | | | | | | | | | | | | |
| 2176 | HNGLD28 | 203959 | Uni-ZAP XR | 2186 | 455 | 1 | 455 | 403 | 403 | 5287 | 1 | | | 17 |
| | | 04/26/99 | | | | | | | | | | | | |
| 2177 | HNGOY36 | 203959 | Uni-ZAP XR | 2187 | 811 | 1 | 811 | 299 | 299 | 5288 | 1 | 18 | 19 | 54 |
| | | 04/26/99 | | | | | | | | | | | | |
| 2178 | HNHAB38 | 203918 | Uni-ZAP XR | 2188 | 636 | 1 | 636 | 69 | 69 | 5289 | 1 | 21 | 22 | 34 |
| | | 04/08/99 | | | | | | | | | | | | |
| 2179 | HNHAC43 | 203918 | Uni-ZAP XR | 2189 | 1132 | 1 | 1132 | 72 | 72 | 5290 | 1 | 29 | 30 | 34 |
| | | 04/08/99 | | | | | | | | | | | | |
| 2180 | HNHAD34 | 203918 | Uni-ZAP XR | 2190 | 1062 | 1 | 1062 | 54 | 54 | 5291 | 1 | | | 27 |
| | | 04/08/99 | | | | | | | | | | | | |
| 2181 | HNHAG83 | 203918 | Uni-ZAP XR | 2191 | 675 | 1 | 675 | 157 | 157 | 5292 | 1 | 24 | 25 | 41 |
| | | 04/08/99 | | | | | | | | | | | | |
| 2182 | HNHAH06 | 203918 | Uni-ZAP XR | 2192 | 835 | 1 | 835 | 344 | 344 | 5293 | 1 | | | 1 |
| | | 04/08/99 | | | | | | | | | | | | |
| 2183 | HNHAJ65 | 203918 | Uni-ZAP XR | 2193 | 598 | 1 | 598 | 151 | 151 | 5294 | 1 | | | 7 |
| | | 04/08/99 | | | | | | | | | | | | |
| 2184 | HNHAL61 | 203959 | Uni-ZAP XR | 2194 | 1445 | 1 | 1445 | 162 | 162 | 5295 | 1 | 20 | 21 | 37 |
| | | 04/26/99 | | | | | | | | | | | | |
| 2185 | HNHAP58 | 203918 | Uni-ZAP XR | 2195 | 888 | 1 | 888 | | 705 | 5296 | 1 | 4 | 5 | 5 |
| | | 04/08/99 | | | | | | | | | | | | |
| 2186 | HNHAW34 | 203959 | Uni-ZAP XR | 2196 | 642 | 1 | 642 | 214 | 214 | 5297 | 1 | | | 12 |
| | | 04/26/99 | | | | | | | | | | | | |
| 2187 | HNHAW35 | 203959 | Uni-ZAP XR | 2197 | 826 | 1 | 826 | 144 | 144 | 5298 | 1 | 18 | 19 | 30 |
| | | 04/26/99 | | | | | | | | | | | | |
| 2188 | HNHAY26 | 203918 | Uni-ZAP XR | 2198 | 2099 | 1 | 2099 | | 777 | 5299 | 1 | 23 | 24 | 36 |
| | | 04/08/99 | | | | | | | | | | | | |
| 2189 | HNHAY86 | PTA-181 | Uni-ZAP XR | 2199 | 953 | 1 | 953 | 99 | 99 | 5300 | 1 | | | 4 |
| | | 06/07/99 | | | | | | | | | | | | |
| 2190 | HNHAZ20 | 203918 | Uni-ZAP XR | 2200 | 1559 | 1 | 1559 | 243 | 243 | 5301 | 1 | 16 | 17 | 37 |
| | | 04/08/99 | | | | | | | | | | | | |
| 2191 | HNHBE21 | 203959 | Uni-ZAP XR | 2201 | 608 | 1 | 608 | | 395 | 5302 | 1 | 6 | 7 | 44 |
| | | 04/26/99 | | | | | | | | | | | | |
| 2192 | HNHBE38 | 203918 | Uni-ZAP XR | 2202 | 1157 | 1 | 1157 | | 214 | 5303 | 1 | 27 | 28 | 152 |
| | | 04/08/99 | | | | | | | | | | | | |
| 2193 | HNHBG18 | 203959 | Uni-ZAP XR | 2203 | 742 | 1 | 742 | | 657 | 5304 | 1 | | | 2 |
| | | 04/26/99 | | | | | | | | | | | | |
| 2194 | HNHBI65 | 203918 | Uni-ZAP XR | 2204 | 303 | 1 | 303 | 161 | 161 | 5305 | 1 | 19 | 20 | 47 |
| | | 04/08/99 | | | | | | | | | | | | |
| 2195 | HNHBM16 | 203918 | Uni-ZAP XR | 2205 | 1162 | 1 | 1162 | 374 | 374 | 5306 | 1 | 23 | 24 | 75 |
| | | 04/08/99 | | | | | | | | | | | | |
| 2196 | HNHCH78 | 203959 | Uni-ZAP XR | 2206 | 759 | 1 | 759 | | 293 | 5307 | 1 | 8 | 9 | 22 |
| | | 04/26/99 | | | | | | | | | | | | |
| 2197 | HNHCP14 | 203918 | Uni-ZAP XR | 2207 | 933 | 1 | 933 | | 55 | 5308 | 1 | 31 | 32 | 50 |
| | | 04/08/99 | | | | | | | | | | | | |
| 2198 | HNHCQ44 | 203959 | Uni-ZAP XR | 2208 | 655 | 1 | 655 | 183 | 183 | 5309 | 1 | 27 | 28 | 30 |
| | | 04/26/99 | | | | | | | | | | | | |
| 2199 | HNHCT22 | 203959 | Uni-ZAP XR | 2209 | 366 | 1 | 366 | 226 | 226 | 5310 | 1 | | | 12 |
| | | 04/26/99 | | | | | | | | | | | | |
| 2200 | HNHCT47 | 203959 | Uni-ZAP XR | 2210 | 621 | 12 | 621 | 73 | 73 | 5311 | 1 | 20 | 21 | 39 |
| | | 04/26/99 | | | | | | | | | | | | |
| 2201 | HNHCV48 | 203959 | Uni-ZAP XR | 2211 | 1611 | 1 | 1611 | 115 | 115 | 5312 | 1 | 26 | 27 | 38 |
| | | 04/26/99 | | | | | | | | | | | | |
| 2202 | HNHCZ54 | 203918 | Uni-ZAP XR | 2212 | 1267 | 1 | 1267 | 32 | 32 | 5313 | 1 | 24 | 25 | 31 |
| | | 04/08/99 | | | | | | | | | | | | |
| 2203 | HNHDC52 | 203959 | Uni-ZAP XR | 2213 | 1341 | 1 | 1341 | 207 | 207 | 5314 | 1 | 29 | 30 | 30 |
| | | 04/26/99 | | | | | | | | | | | | |
| 2204 | HNHDD95 | 203959 | Uni-ZAP XR | 2214 | 372 | 1 | 372 | 140 | 140 | 5315 | 1 | | | 14 |
| | | 04/26/99 | | | | | | | | | | | | |
| 2205 | HNHDE58 | 203918 | Uni-ZAP XR | 2215 | 745 | 1 | 745 | 272 | 272 | 5316 | 1 | 19 | 20 | 104 |
| | | 04/08/99 | | | | | | | | | | | | |
| 2206 | HNHDI17 | 203959 | Uni-ZAP XR | 2216 | 1203 | 1 | 1203 | | 1175 | 5317 | 1 | | | 9 |
| | | 04/26/99 | | | | | | | | | | | | |
| 2207 | HNHDL37 | 203918 | Uni-ZAP XR | 2217 | 722 | 1 | 722 | 94 | 94 | 5318 | 1 | 15 | 16 | 30 |
| | | 04/08/99 | | | | | | | | | | | | |
| 2208 | HNHDM21 | 203918 | Uni-ZAP XR | 2218 | 252 | 1 | 252 | 19 | 19 | 5319 | 1 | 19 | 20 | 59 |
| | | 04/08/99 | | | | | | | | | | | | |
| 2209 | HNHDR57 | 203918 | Uni-ZAP XR | 2219 | 1195 | 1 | 1195 | 117 | 117 | 5320 | 1 | 25 | 26 | 32 |
| | | 04/08/99 | | | | | | | | | | | | |
| 2210 | HNHDR96 | 203918 | Uni-ZAP XR | 2220 | 1347 | 1 | 1347 | 291 | 291 | 5321 | 1 | 23 | 24 | 34 |
| | | 04/08/99 | | | | | | | | | | | | |
| 2211 | HNHDU62 | 203918 | Uni-ZAP XR | 2221 | 794 | 1 | 794 | 311 | 311 | 5322 | 1 | | | 15 |
| | | 04/08/99 | | | | | | | | | | | | |
| 2212 | HNHDW34 | 203918 | Uni-ZAP XR | 2222 | 1184 | 1 | 1184 | 332 | 332 | 5323 | 1 | 30 | 31 | 33 |
| | | 04/08/99 | | | | | | | | | | | | |
| 2213 | HNHDX28 | 203918 | Uni-ZAP XR | 2223 | 450 | 1 | 450 | 170 | 170 | 5324 | 1 | 31 | 32 | 50 |
| | | 04/08/99 | | | | | | | | | | | | |
| 2214 | HNHDZ06 | 203918 | Uni-ZAP XR | 2224 | 1375 | 1 | 1375 | 282 | 282 | 5325 | 1 | 15 | 16 | 22 |
| | | 04/08/99 | | | | | | | | | | | | |
| 2215 | HNHDZ42 | 203918 | Uni-ZAP XR | 2225 | 328 | 1 | 328 | 282 | 282 | 5326 | 1 | | | 1 |
| | | 04/08/99 | | | | | | | | | | | | |
| 2216 | HNHEF37 | 203918 | Uni-ZAP XR | 2226 | 649 | 1 | 649 | | 180 | 5327 | 1 | 10 | 11 | 16 |
| | | 04/08/99 | | | | | | | | | | | | |
| 2217 | HNHEF49 | 203918 | Uni-ZAP XR | 2227 | 1521 | 1 | 1521 | 70 | 70 | 5328 | 1 | | | 20 |
| | | 04/08/99 | | | | | | | | | | | | |
| 2218 | HNHEF70 | 203918 | Uni-ZAP XR | 2228 | 653 | 1 | 653 | 7 | 7 | 5329 | 1 | 17 | 18 | 34 |
| | | 04/08/99 | | | | | | | | | | | | |
| 2219 | HNHEG30 | 203918 | Uni-ZAP XR | 2229 | 687 | 1 | 687 | 219 | 219 | 5330 | 1 | 27 | 28 | 50 |
| | | 04/08/99 | | | | | | | | | | | | |
| 2220 | HNHEH38 | 203918 | Uni-ZAP XR | 2230 | 548 | 1 | 548 | 267 | 267 | 5331 | 1 | 32 | 33 | 34 |
| | | 04/08/99 | | | | | | | | | | | | |
| 2221 | HNHEL22 | 203918 | Uni-ZAP XR | 2231 | 872 | 1 | 872 | 88 | 88 | 5332 | 1 | 17 | 18 | 39 |
| | | 04/08/99 | | | | | | | | | | | | |
| 2222 | HNHEN70 | PTA-181 | Uni-ZAP XR | 2232 | 1782 | 1 | 1782 | 67 | 67 | 5333 | 1 | 34 | 35 | 181 |
| | | 06/07/99 | | | | | | | | | | | | |
| 2223 | HNHEP21 | 203918 | Uni-ZAP XR | 2233 | 702 | 1 | 702 | 175 | 175 | 5334 | 1 | 19 | 20 | 31 |
| | | 04/08/99 | | | | | | | | | | | | |
| 2224 | HNHEP41 | 203918 | Uni-ZAP XR | 2234 | 917 | 1 | 917 | 184 | 184 | 5335 | 1 | 20 | 21 | 30 |
| | | 04/08/99 | | | | | | | | | | | | |
| 2225 | HNHES33 | 203979 | Uni-ZAP XR | 2235 | 1260 | 1 | 1260 | 61 | 61 | 5336 | 1 | 20 | 21 | 39 |
| | | 04/29/99 | | | | | | | | | | | | |
| 2226 | HNHET16 | 203918 | Uni-ZAP XR | 2236 | 859 | 1 | 859 | 208 | 208 | 5337 | 1 | 19 | 20 | 26 |
| | | 04/08/99 | | | | | | | | | | | | |
| 2227 | HNHEY29 | 203918 | Uni-ZAP XR | 2237 | 1516 | 1 | 1516 | 131 | 131 | 5338 | 1 | 23 | 24 | 78 |
| | | 04/08/99 | | | | | | | | | | | | |
| 2228 | HNHEZ76 | 203918 | Uni-ZAP XR | 2238 | 508 | 1 | 508 | 52 | 52 | 5339 | 1 | | | 6 |
| | | 04/08/99 | | | | | | | | | | | | |
| 2229 | HNHFF60 | 203918 | Uni-ZAP XR | 2239 | 311 | 1 | 311 | 28 | 28 | 5340 | 1 | 15 | 16 | 39 |
| | | 04/08/99 | | | | | | | | | | | | |
| 2230 | HNHFF81 | 203918 | Uni-ZAP XR | 2240 | 1338 | 1 | 1338 | | 307 | 5341 | 1 | 23 | 24 | 32 |
| | | 04/08/99 | | | | | | | | | | | | |
| 2231 | HNHFJ49 | 203959 | Uni-ZAP XR | 2241 | 1736 | 1 | 1736 | 26 | 26 | 5342 | 1 | 26 | 27 | 28 |
| | | 04/26/99 | | | | | | | | | | | | |
| 2232 | HNHFR42 | 203918 | Uni-ZAP XR | 2242 | 522 | 1 | 522 | 22 | 22 | 5343 | 1 | 21 | 22 | 33 |
| | | 04/08/99 | | | | | | | | | | | | |
| 2233 | HNHFX25 | 203918 | Uni-ZAP XR | 2243 | 591 | 1 | 591 | 244 | 244 | 5344 | 1 | 22 | 23 | 38 |
| | | 04/08/99 | | | | | | | | | | | | |
| 2234 | HNHGD95 | 203918 | Uni-ZAP XR | 2244 | 610 | 1 | 610 | 69 | 69 | 5345 | 1 | 20 | 21 | 39 |
| | | 04/08/99 | | | | | | | | | | | | |
| 2235 | HNHGR82 | 203918 | Uni-ZAP XR | 2245 | 695 | 1 | 695 | 287 | 287 | 5346 | 1 | 29 | 30 | 62 |
| | | 04/08/99 | | | | | | | | | | | | |
| 2236 | HNHGS62 | 203918 | Uni-ZAP XR | 2246 | 568 | 1 | 568 | 195 | 195 | 5347 | 1 | 16 | 17 | 33 |
| | | 04/08/99 | | | | | | | | | | | | |
| 2237 | HNHGY77 | 203918 | Uni-ZAP XR | 2247 | 468 | 1 | 468 | 298 | 298 | 5348 | 1 | 25 | 26 | 29 |
| | | 04/08/99 | | | | | | | | | | | | |
| 2238 | HNHHA47 | 203918 | Uni-ZAP XR | 2248 | 1138 | 1 | 1138 | 27 | 27 | 5349 | 1 | | | 9 |
| | | 04/08/99 | | | | | | | | | | | | |
| 2239 | HNHHN22 | PTA-181 | Uni-ZAP XR | 2249 | 898 | 1 | 898 | 104 | 104 | 5350 | 1 | 24 | 25 | 37 |
| | | 06/07/99 | | | | | | | | | | | | |
| 2240 | HNHHW53 | 203918 | Uni-ZAP XR | 2250 | 764 | 1 | 764 | 142 | 142 | 5351 | 1 | 11 | 12 | 13 |
| | | 04/08/99 | | | | | | | | | | | | |
| 2241 | HNHIB40 | 203918 | Uni-ZAP XR | 2251 | 417 | 1 | 417 | | 273 | 5352 | 1 | | | 17 |
| | | 04/08/99 | | | | | | | | | | | | |
| 2242 | HNHKI74 | 203959 | Uni-ZAP XR | 2252 | 817 | 1 | 817 | 127 | 127 | 5353 | 1 | | | 10 |
| | | 04/26/99 | | | | | | | | | | | | |
| 2243 | HNHKV56 | 203959 | Uni-ZAP XR | 2253 | 1653 | 1 | 1653 | 294 | 294 | 5354 | 1 | 31 | 32 | 66 |
| | | 04/26/99 | | | | | | | | | | | | |
| 2244 | HNHLD80 | 203959 | Uni-ZAP XR | 2254 | 713 | 1 | 713 | 164 | 164 | 5355 | 1 | 21 | 22 | 62 |
| | | 04/26/99 | | | | | | | | | | | | |
| 2245 | HNHLS76 | PTA-181 | Uni-ZAP XR | 2255 | 318 | 1 | 318 | 138 | 138 | 5356 | 1 | 23 | 24 | 39 |
| | | 06/07/99 | | | | | | | | | | | | |
| 2246 | HNHLZ47 | 203959 | Uni-ZAP XR | 2256 | 1860 | 1 | 1860 | 177 | 177 | 5357 | 1 | 17 | 18 | 34 |
| | | 04/26/99 | | | | | | | | | | | | |
| 2247 | HNHMP15 | 203959 | Uni-ZAP XR | 2257 | 1120 | 1 | 1120 | 51 | 51 | 5358 | 1 | 21 | 22 | 63 |
| | | 04/26/99 | | | | | | | | | | | | |
| 2248 | HNHMP62 | 203959 | Uni-ZAP XR | 2258 | 1068 | 1 | 1068 | 220 | 220 | 5359 | 1 | 21 | 22 | 36 |
| | | 04/26/99 | | | | | | | | | | | | |
| 2249 | HNHMY76 | 203959 | Uni-ZAP XR | 2259 | 1272 | 1 | 1272 | 25 | 25 | 5360 | 1 | 26 | 27 | 55 |
| | | 04/26/99 | | | | | | | | | | | | |
| 2250 | HNHMZ01 | 203959 | Uni-ZAP XR | 2260 | 536 | 1 | 536 | 250 | 250 | 5361 | 1 | 19 | 20 | 33 |
| | | 04/26/99 | | | | | | | | | | | | |
| 2251 | HNHND14 | 203959 | Uni-ZAP XR | 2261 | 393 | 1 | 393 | 255 | 255 | 5362 | 1 | 17 | 18 | 46 |
| | | 04/26/99 | | | | | | | | | | | | |
| 2252 | HNHND94 | 203959 | Uni-ZAP XR | 2262 | 688 | 1 | 688 | 17 | 17 | 5363 | 1 | | | 31 |
| | | 04/26/99 | | | | | | | | | | | | |
| 2253 | HNHOF09 | 203959 | Uni-ZAP XR | 2263 | 1430 | 1 | 1430 | 539 | 539 | 5364 | 1 | 21 | 22 | 66 |
| | | 04/26/99 | | | | | | | | | | | | |
| 2254 | HNKAA76 | 203959 | pSport1 | 2264 | 1803 1 | 1803 | 384 | 384 | 5365 | 1 | 23 | 24 | 47 | |
| | | 04/26/99 | | | | | | | | | | | | |
| 2255 | HNTAF42 | 203918 | pCMVSport 3.0 | 2265 | 1149 | 1 | 1149 | 82 | 82 | 5366 | 1 | 21 | 22 | 49 |
| | | 04/08/99 | | | | | | | | | | | | |
| 2256 | HNTCG32 | PTA-795 | pCMVSport 3.0 | 2266 | 2753 | 1 | 2753 | 178 | 178 | 5367 | 1 | 44 | 45 | 358 |
| | | 09/27/99 | | | | | | | | | | | | |
| 2257 | HNTNY89 | PTA-793 | pSport1 | 2267 | 1247 | 1 | 1247 | 158 | 158 | 5368 | 1 | 30 | 31 | 37 |
| | | 09/27/99 | | | | | | | | | | | | |
| 2258 | HNTRB25 | 203918 | pSport1 | 2268 | 1154 1 | 1154 | 162 | 162 | 5369 | 1 | 41 | 42 | 97 | |
| | | 04/08/99 | | | | | | | | | | | | |
| 2259 | HNTRQ40 | 203959 | pSport1 | 2269 | 4024 | 1 | 4024 | 132 | 132 | 5370 | 1 | 16 | 17 | 91 |
| | | 04/26/99 | | | | | | | | | | | | |
| 2260 | HNTSQ23 | 203959 | pSport1 | 2270 | 2287 | 231 | 2287 | 1255 | 1255 | 5371 | 1 | 28 | 29 | 38 |
| | | 04/26/99 | | | | | | | | | | | | |
| 2261 | HOAAH51 | PTA-181 | Uni-ZAP XR | 2271 | 755 | 1 | 755 | 187 | 187 | 5372 | 1 | 31 | 32 | 58 |
| | | 06/07/99 | | | | | | | | | | | | |
| 2262 | HOAAI76 | 203959 | Uni-ZAP XR | 2272 | 522 | 1 | 515 | 121 | 121 | 5373 | 1 | | | 16 |
| | | 04/26/99 | | | | | | | | | | | | |
| 2263 | HOAAJ09 | 203918 | Uni-ZAP XR | 2273 | 787 | 1 | 787 | 60 | 60 | 5374 | 1 | 24 | 25 | 37 |
| | | 04/08/99 | | | | | | | | | | | | |
| 2264 | HOAAL10 | 203918 | Uni-ZAP XR | 2274 | 1241 | 1 | 1241 | 20 | 20 | 5375 | 1 | 20 | 21 | 80 |
| | | 04/08/99 | | | | | | | | | | | | |
| 2265 | HOAAU13 | 203918 | Uni-ZAP XR | 2275 | 1093 | 1 | 1093 | 182 | 182 | 5376 | 1 | | | 26 |
| | | 04/08/99 | | | | | | | | | | | | |
| 2266 | HOABC12 | 203959 | Uni-ZAP XR | 2276 | 553 | 1 | 553 | 186 | 186 | 5377 | 1 | 28 | 29 | 29 |
| | | 04/26/99 | | | | | | | | | | | | |
| 2267 | HOABH36 | 203959 | Uni-ZAP XR | 2277 | 1503 1 | 1503 | 181 | 181 | 5378 | 1 | 28 | 29 | 71 | |
| | | 04/26/99 | | | | | | | | | | | | |
| 2268 | HOBNA89 | 203959 | Uni-ZAP XR | 2278 | 605 | 1 | 605 | 15 | 15 | 5379 | 1 | 12 | 13 | 37 |
| | | 04/26/99 | | | | | | | | | | | | |
| 2269 | HOBNF51 | 203918 | Uni-ZAP XR | 2279 | 1156 1 | 1156 | | 223 | 5380 | 1 | 43 | 44 | 67 | |
| | | 04/08/99 | | | | | | | | | | | | |
| 2270 | HODAH24 | 203918 | Uni-ZAP XR | 2280 | 1357 | 1 | 1357 | 39 | 39 | 5381 | 1 | 27 | 28 | 30 |
| | | 04/08/99 | | | | | | | | | | | | |
| 2271 | HODAH46 | PTA-181 | Uni-ZAP XR | 2281 | 739 | 1 | 739 | 201 | 201 | 5382 | 1 | 24 | 25 | 124 |
| | | 06/07/99 | | | | | | | | | | | | |
| 2272 | HODAV25 | 203959 | Uni-ZAP XR | 2282 | 991 | 387 | 991 | | 19 | 5383 | 1 | | | 6 |
| | | 04/26/99 | | | | | | | | | | | | |
| 2273 | HODAW64 | 203959 | Uni-ZAP XR | 2283 | 3287 | 1 | 828 | | 3184 | 5384 | 1 | 8 | 9 | 33 |
| | | 04/26/99 | | | | | | | | | | | | |
| 2274 | HODAY17 | 203959 | Uni-ZAP XR | 2284 | 2621 | 1919 | 2559 | 2128 | 2128 | 5385 | 1 | | | 15 |
| | | 04/26/99 | | | | | | | | | | | | |
| 2275 | HODBA45 | 203918 | Uni-ZAP XR | 2285 | 745 | 1 | 745 | 179 | 179 | 5386 | 1 | 16 | 17 | 42 |
| | | 04/08/99 | | | | | | | | | | | | |
| 2276 | HODBC79 | 203918 | Uni-ZAP XR | 2286 | 931 | 1 | 931 | 179 | 179 | 5387 | 1 | 23 | 24 | 34 |
| | | 04/08/99 | | | | | | | | | | | | |
| 2277 | HODBD79 | 203918 | Uni-ZAP XR | 2287 | 635 | 1 | 635 | 91 | 91 | 5388 | 1 | 19 | 20 | 92 |
| | | 04/08/99 | | | | | | | | | | | | |
| 2278 | HODBF12 | 203918 | Uni-ZAP XR | 2288 | 1187 1 | 1187 | 68 | 68 | 5389 | 1 | | | 3 | |
| | | 04/08/99 | | | | | | | | | | | | |
| 2279 | HODBF86 | 203918 | Uni-ZAP XR | 2289 | 921 | 1 | 921 | 228 | 228 | 5390 | 1 | | | 13 |
| | | 04/08/99 | | | | | | | | | | | | |
| 2280 | HODBF91 | 203959 | Uni-ZAP XR | 2290 | 960 | 172 | 960 | | 383 | 5391 | 1 | 12 | 13 | 33 |
| | | 04/26/99 | | | | | | | | | | | | |
| 2281 | HODBW34 | PTA-791 | Uni-ZAP XR | 2291 | 869 | 1 | 869 | 241 | 241 | 5392 | 1 | | | 14 |
| | | 09/27/99 | | | | | | | | | | | | |
| 2282 | HODBX93 | PTA-795 | Uni-ZAP XR | 2292 | 799 | 1 | 799 | 169 | 169 | 5393 | 1 | | | 5 |
| | | 09/27/99 | | | | | | | | | | | | |
| 2283 | HODBZ06 | 203959 | Uni-ZAP XR | 2293 | 1804 | 1 | 1804 | 159 | 159 | 5394 | 1 | | | 11 |
| | | 04/26/99 | | | | | | | | | | | | |
| 2284 | HODCA73 | 203979 | Uni-ZAP XR | 2294 | 831 | 1 | 831 | | 130 | 5395 | 1 | | | 10 |
| | | 04/29/99 | | | | | | | | | | | | |
| 2285 | HODCV86 | 203959 | Uni-ZAP XR | 2295 | 407 | 1 | 407 | 250 | 250 | 5396 | 1 | 32 | 33 | 36 |
| | | 04/26/99 | | | | | | | | | | | | |
| 2286 | HODCY44 | 203959 | Uni-ZAP XR | 2296 | 1255 | 1 | 1255 | 111 | 111 | 5397 | 1 | 19 | 20 | 47 |
| | | 04/26/99 | | | | | | | | | | | | |
| 2287 | HODDB58 | 203918 | Uni-ZAP XR | 2297 | 1768 | 1 | 1768 | 86 | 86 | 5398 | 1 | | | 33 |
| | | 04/08/99 | | | | | | | | | | | | |
| 2288 | HODDG72 | 203918 | Uni-ZAP XR | 2298 | 826 | 1 | 826 | 186 | 186 | 5399 | 1 | 30 | 31 | 57 |
| | | 04/08/99 | | | | | | | | | | | | |
| 2289 | HODDJ25 | 203959 | Uni-ZAP XR | 2299 | 2243 | 1441 | 2038 | 1540 | 1540 | 5400 | 1 | | | 17 |
| | | 04/26/99 | | | | | | | | | | | | |
| 2290 | HODDN21 | 203959 | Uni-ZAP XR | 2300 | 968 | 8 | 968 | | 237 | 5401 | 1 | 25 | 26 | 39 |
| | | 04/26/99 | | | | | | | | | | | | |
| 2291 | HODDO31 | 203918 | Uni-ZAP XR | 2301 | 1532 | 1 | 1532 | 122 | 122 | 5402 | 1 | 25 | 26 | 35 |
| | | 04/08/99 | | | | | | | | | | | | |
| 2292 | HODDQ06 | 203959 | Uni-ZAP XR | 2302 | 1874 | 583 | 1598 | | 834 | 5403 | 1 | 19 | 20 | 28 |
| | | 04/26/99 | | | | | | | | | | | | |
| 2293 | HODEA20 | 203959 | Uni-ZAP XR | 2303 | 1471 | 1 | 1452 | 373 | 373 | 5404 | 1 | 18 | 19 | 19 |
| | | 04/26/99 | | | | | | | | | | | | |
| 2294 | HODEM38 | 203959 | Uni-ZAP XR | 2304 | 1117 | 1 | 1117 | 527 | 527 | 5405 | 1 | 22 | 23 | 72 |
| | | 04/26/99 | | | | | | | | | | | | |
| 2295 | HODET37 | 203959 | Uni-ZAP XR | 2305 | 1121 | 1 | 1121 | | 389 | 5406 | 1 | 21 | 22 | 26 |
| | | 04/26/99 | | | | | | | | | | | | |
| 2296 | HOEBI94 | 203917 | Uni-ZAP XR | 2306 | 2322 | 439 | 2241 | | 558 | 5407 | 1 | 15 | 16 | 24 |
| | | 04/08/99 | | | | | | | | | | | | |
| 2297 | HOEBJ70 | 203959 | Uni-ZAP XR | 2307 | 1330 | 1 | 1330 | 197 | 197 | 5408 | 1 | 26 | 27 | 44 |
| | | 04/26/99 | | | | | | | | | | | | |
| 2298 | HOECB33 | 203959 | Uni-ZAP XR | 2308 | 1100 | 1 | 1100 | 302 | 302 | 5409 | 1 | | | 23 |
| | | 04/26/99 | | | | | | | | | | | | |
| 2299 | HOECX21 | 203979 | Uni-ZAP XR | 2309 | 1963 | 56 | 1892 | 75 | 75 | 5410 | 1 | 33 | 34 | 37 |
| | | 04/29/99 | | | | | | | | | | | | |
| 2300 | HOEDE27 | 203918 | Uni-ZAP XR | 2310 | 960 | 1 | 960 | 403 | 403 | 5411 | 1 | 18 | 19 | 33 |
| | | 04/08/99 | | | | | | | | | | | | |
| 2301 | HOEEK81 | 203918 | Uni-ZAP XR | 2311 | 1691 | 450 | 1690 | 501 | 501 | 5412 | 1 | 19 | 20 | 30 |
| | | 04/08/99 | | | | | | | | | | | | |
| 2302 | HOEEZ62 | 203959 | Uni-ZAP XR | 2312 | 385 | 1 | 385 | 258 | 258 | 5413 | 1 | 14 | 15 | 17 |
| | | 04/26/99 | | | | | | | | | | | | |
| 2303 | HOEFJ26 | 203979 | Uni-ZAP XR | 2313 | 1634 | 1 | 1634 | | 695 | 5414 | 1 | | | 6 |
| | | 04/29/99 | | | | | | | | | | | | |
| 2304 | HOEFL74 | 203918 | Uni-ZAP XR | 2314 | 889 | 1 | 889 | 142 | 142 | 5415 | 1 | 20 | 21 | 66 |
| | | 04/08/99 | | | | | | | | | | | | |
| 2305 | HOFMF63 | 203949 | pCMVSport 2.0 | 2315 | 1578 | 1 | 1578 | 86 | 86 | 5416 | 1 | 68 | 69 | 180 |
| | | 04/29/99 | | | | | | | | | | | | |
| 2306 | HOFMJ65 | 203918 | pCMVSport 2.0 | 2316 | 2082 | 1 | 2082 | 341 | 341 | 5417 | 1 | 13 | 14 | 41 |
| | | 04/08/99 | | | | | | | | | | | | |
| 2307 | HOFMK02 | 203918 | pCMVSport 2.0 | 2317 | 1671 | 1 | 1671 | 129 | 129 | 5418 | 1 | | | 34 |
| | | 04/08/99 | | | | | | | | | | | | |
| 2308 | HOFMO16 | 203918 | pCMVSport 2.0 | 2318 | 1142 | 1 | 1142 | 149 | 149 | 5419 | 1 | 40 | 41 | 152 |
| | | 04/08/99 | | | | | | | | | | | | |
| 2309 | HOFMP62 | PTA-181 | pCMVSport 2.0 | 2319 | 900 | 1 | 900 | 103 | 103 | 5420 | 1 | 17 | 18 | 67 |
| | | 06/07/99 | | | | | | | | | | | | |
| 2310 | HOFMT59 | 203918 | pCMVSport 2.0 | 2320 | 1326 | 1 | 1326 | 159 | 159 | 5421 | 1 | 22 | 23 | 46 |
| | | 04/08/99 | | | | | | | | | | | | |
| 2311 | HOFMV22 | 203918 | pCMVSport 2.0 | 2321 | 621 | 1 | 621 | 170 | 170 | 5422 | 1 | 15 | 16 | 29 |
| | | 04/08/99 | | | | | | | | | | | | |
| 2312 | HOFND06 | 203918 | pCMVSport 2.0 | 2322 | 2144 | 1 | 2144 | 272 | 272 | 5423 | 1 | 15 | 16 | 51 |
| | | 04/08/99 | | | | | | | | | | | | |
| 2313 | HOFNY15 | 203918 | pCMVSport 2.0 | 2323 | 1187 | 1 | 1187 | | 30 | 5424 | 1 | 8 | 9 | 114 |
| | | 04/08/99 | | | | | | | | | | | | |
| 2314 | HOFNY28 | 203918 | pCMVSport 2.0 | 2324 | 1233 | 1 | 1233 | 365 | 365 | 5425 | 1 | 26 | 27 | 37 |
| | | 04/08/99 | | | | | | | | | | | | |
| 2315 | HOFOC41 | 203918 | pCMVSport 2.0 | 2325 | 1197 | 1 | 1197 | 152 | 152 | 5426 | 1 | 27 | 28 | 37 |
| | | 04/08/99 | | | | | | | | | | | | |
| 2316 | HOGAA41 | 203918 | pCMVSport 2.0 | 2326 | 5077 | 1 | 5077 | 640 | 640 | 5427 | 1 | 18 | 19 | 206 |
| | | 04/08/99 | | | | | | | | | | | | |
| 2317 | HOGAB51 | 203918 | pCMVSport 2.0 | 2327 | 1634 | 1 | 1634 | 242 | 242 | 5428 | 1 | 24 | 25 | 35 |
| | | 04/08/99 | | | | | | | | | | | | |
| 2318 | HOGAH40 | 203959 | pCMVSport 2.0 | 2328 | 1648 | 1058 | 1648 | 1339 | 1339 | 5429 | 1 | 14 | 15 | 25 |
| | | 04/26/99 | | | | | | | | | | | | |
| 2319 | HOGAP06 | 203918 | pCMVSport 2.0 | 2329 | 1726 | 1 | 1726 | 225 | 225 | 5430 | 1 | 23 | 24 | 37 |
| | | 04/08/99 | | | | | | | | | | | | |
| 2320 | HOGAR36 | 203959 | pCMVSport 2.0 | 2330 | 1175 | 1 | 1175 | 205 | 205 | 5431 | 1 | 20 | 21 | 26 |
| | | 04/26/99 | | | | | | | | | | | | |
| 2321 | HOGAR71 | 203959 | pCMVSport 2.0 | 2331 | 1014 | 1 | 1014 | 87 | 87 | 5432 | 1 | 24 | 25 | 211 |
| | | 04/26/99 | | | | | | | | | | | | |
| 2322 | HOGCC26 | 203959 | pCMVSport 2.0 | 2332 | 1827 | 566 | 1816 | 713 | 713 | 5433 | 1 | | | 19 |
| | | 04/26/99 | | | | | | | | | | | | |
| 2323 | HOGCD78 | 203918 | pCMVSport 2.0 | 2333 | 734 | 1 | 734 | 151 | 151 | 5434 | 1 | 28 | 29 | 63 |
| | | 04/08/99 | | | | | | | | | | | | |
| 2324 | HOGCK03 | 203949 | pCMVSport 2.0 | 2334 | 1392 | 1 | 1392 | | 386 | 5435 | 1 | 8 | 9 | 27 |
| | | 04/29/99 | | | | | | | | | | | | |
| 2325 | HOGCL01 | 203959 | pCMVSport 2.0 | 2335 | 959 | 1 | 930 | 167 | 167 | 5436 | 1 | 20 | 21 | 216 |
| | | 04/26/99 | | | | | | | | | | | | |
| 2326 | HOHBB36 | 203949 | pCMVSport 2.0 | 2336 | 2263 | 1 | 2263 | 283 | 283 | 5437 | 1 | | | 14 |
| | | 04/29/99 | | | | | | | | | | | | |
| 2327 | HOHBC57 | 203959 | pCMVSport 2.0 | 2337 | 5083 | 699 | 5083 | 891 | 891 | 5438 | 1 | 28 | 29 | 51 |
| | | 04/26/99 | | | | | | | | | | | | |
| 2328 | HOHBO66 | PTA-181 | pCMVSport 2.0 | 2338 | 1790 | 1 | 1790 | 338 | 338 | 5439 | 1 | | | 21 |
| | | 06/07/99 | | | | | | | | | | | | |
| 2329 | HOHBZ10 | 203959 | pCMVSport 2.0 | 2339 | 829 | 1 | 829 | 150 | 150 | 5440 | 1 | 21 | 22 | 52 |
| | | 04/26/99 | | | | | | | | | | | | |
| 2330 | HOHCH71 | 203959 | pCMVSport 2.0 | 2340 | 2574 | 166 | 2574 | 333 | 333 | 5441 | 1 | 24 | 25 | 38 |
| | | 04/26/99 | | | | | | | | | | | | |
| 2331 | HOHEB48 | 203959 | pCMVSport 2.0 | 2341 | 1579 | 1 | 1579 | 126 | 126 | 5442 | 1 | 22 | 23 | 23 |
| | | 04/26/99 | | | | | | | | | | | | |
| 2332 | HONAH67 | 203918 | pBluescript | 2342 | 2202 | 1 | 2202 | 18 | 18 | 5443 | 1 | 20 | 21 | 33 |
| | | 04/08/99 | SK- | | | | | | | | | | | |
| 2333 | HOOAC84 | 203918 | pBluescript | 2343 | 1556 | 1 | 1556 | 84 | 84 | 5444 | 1 | 27 | 28 | 31 |
| | | 04/08/99 | | | | | | | | | | | | |
| 2334 | HOPBP13 | 203918 | Uni-ZAP XR | 2344 | 2185 | 1 | 2185 | | 295 | 5445 | 1 | 7 | 8 | 43 |
| | | 04/08/99 | | | | | | | | | | | | |
| 2335 | HOQBG21 | 203959 | Uni-ZAP XR | 2345 | 1649 | 35 | 1643 | 189 | 189 | 5446 | 1 | 30 | 31 | 76 |
| | | 04/26/99 | | | | | | | | | | | | |
| 2336 | HORBI80 | PTA-791 | Uni-ZAP XR | 2346 | 2665 | 1 | 2665 | 58 | 58 | 5447 | 1 | 22 | 23 | 44 |
| | | 09/27/99 | | | | | | | | | | | | |
| 2337 | HORBL77 | PTA-181 | Uni-ZAP XR | 2347 | 1258 | 12 | 1233 | | 25 | 5448 | 1 | 4 | 5 | 64 |
| | | 06/07/99 | | | | | | | | | | | | |
| 2338 | HOSBX14 | 203918 | Uni-ZAP XR | 2348 | 1027 | 1 | 1027 | 173 | 173 | 5449 | 1 | 25 | 26 | 59 |
| | | 04/08/99 | | | | | | | | | | | | |
| 2339 | HOSCZ41 | 203959 | Uni-ZAP XR | 2349 | 1248 | 127 | 1246 | 188 | 188 | 5450 | 1 | 18 | 19 | 50 |
| | | 04/26/99 | | | | | | | | | | | | |
| 2340 | HOSEM81 | 203959 | Uni-ZAP XR | 2350 | 1019 | 1 | 1019 | | 227 | 5451 | 1 | 9 | 10 | 66 |
| | | 04/26/99 | | | | | | | | | | | | |
| 2341 | HOSEO83 | 203979 | Uni-ZAP XR | 2351 | 1309 | 1 | 1309 | 50 | 50 | 5452 | 1 | 45 | 46 | 67 |
| | | 04/29/99 | | | | | | | | | | | | |
| 2342 | HOSFR35 | 203918 | Uni-ZAP XR | 2352 | 2255 | 1 | 2255 | 81 | 81 | 5453 | 1 | 50 | 51 | 85 |
| | | 04/08/99 | | | | | | | | | | | | |
| 2343 | HOUAZ32 | 203918 | Uni-ZAP XR | 2353 | 1659 | 1 | 1659 | 214 | 214 | 5454 | 1 | | | 15 |
| | | 04/08/99 | | | | | | | | | | | | |
| 2344 | HOUBC29 | PTA-791 | Uni-ZAP XR | 2354 | 2845 | 1 | 2845 | | 134 | 5455 | 1 | | | 8 |
| | | 09/27/99 | | | | | | | | | | | | |
| 2345 | HOUBG39 | 203918 | Uni-ZAP XR | 2355 | 1647 | 1 | 1647 | 62 | 62 | 5456 | 1 | 22 | 23 | 26 |
| | | 04/08/99 | | | | | | | | | | | | |
| 2346 | HOUCD12 | 203918 | Uni-ZAP XR | 2356 | 640 | 1 | 640 | | 514 | 5457 | 1 | 12 | 13 | 42 |
| | | 04/08/99 | | | | | | | | | | | | |
| 2347 | HOUDB17 | 203959 | Uni-ZAP XR | 2357 | 706 | 1 | 706 | | 158 | 5458 | 1 | 10 | 11 | 23 |
| | | 04/26/99 | | | | | | | | | | | | |
| 2348 | HOUDX40 | 203959 | Uni-ZAP XR | 2358 | 1264 | 1 | 1152 | | 360 | 5459 | 1 | | | 12 |
| | | 04/26/99 | | | | | | | | | | | | |
| 2349 | HOUEF84 | PTA-181 | Uni-ZAP XR | 2359 | 2249 | 1 | 2249 | 83 | 83 | 5460 | 1 | 24 | 25 | 32 |
| | | 06/07/99 | | | | | | | | | | | | |
| 2350 | HOUEJ43 | 203959 | Uni-ZAP XR | 2360 | 1450 | 1 | 1450 | 157 | 157 | 5461 | 1 | | | 14 |
| | | 04/26/99 | | | | | | | | | | | | |
| 2351 | HOUGS36 | PTA-181 | Uni-ZAP XR | 2361 | 1645 | 1 | 1645 | 295 | 295 | 5462 | 1 | 15 | 16 | 70 |
| | | 06/07/99 | | | | | | | | | | | | |
| 2352 | HOUHQ36 | 203959 | Uni-ZAP XR | 2362 | 979 | 1 | 979 | 376 | 376 | 5463 | 1 | 37 | 38 | 53 |
| | | 04/26/99 | | | | | | | | | | | | |
| 2353 | HOUIG68 | 203959 | Uni-ZAP XR | 2363 | 2952 | 1423 | 2569 | 1509 | 1509 | 5464 | 1 | 13 | 14 | 18 |
| | | 04/26/99 | | | | | | | | | | | | |
| 2354 | HOUIG92 | 203959 | Uni-ZAP XR | 2364 | 1117 | 1 | 1117 | 343 | 343 | 5465 | 1 | 12 | 13 | 61 |
| | | 04/26/99 | | | | | | | | | | | | |
| 2355 | HOVAD93 | 203918 | pSport1 | 2365 | 860 | 1 | 860 | 114 | 114 | 5466 | 1 | 19 | 20 | 28 |
| | | 04/08/99 | | | | | | | | | | | | |
| 2356 | HOVAE10 | 203918 | pSport1 | 2366 | 1086 | 1 | 1082 | 228 | 228 | 5467 | 1 | 20 | 21 | 26 |
| | | 04/08/99 | | | | | | | | | | | | |
| 2357 | HOVAE36 | 203918 | pSport1 | 2367 | 969 | 1 | 969 | 49 | 49 | 5468 | 1 | | | 12 |
| | | 04/08/99 | | | | | | | | | | | | |
| 2358 | HOVAE82 | 203918 | pSport1 | 2368 | 1206 | 1 | 1206 | 154 | 154 | 5469 | 1 | 17 | 18 | 37 |
| | | 04/08/99 | | | | | | | | | | | | |
| 2359 | HOVAJ68 | 203918 | pSport1 | 2369 | 1623 | 1 | 1623 | 129 | 129 | 5470 | 1 | 19 | 20 | 28 |
| | | 04/08/99 | | | | | | | | | | | | |
| 2360 | HOVAW46 | PTA-794 | pSport1 | 2370 | 1370 | 1 | 1370 | 220 | 220 | 5471 | 1 | | | 16 |
| | | 09/27/99 | | | | | | | | | | | | |
| 2361 | HOVBB19 | 203918 | pSport1 | 2371 | 751 | 1 | 751 | 379 | 379 | 5472 | 1 | 29 | 30 | 32 |
| | | 04/08/99 | | | | | | | | | | | | |
| 2362 | HOVBD31 | 203918 | pSport1 | 2372 | 2329 | 1 | 2258 | 149 | 149 | 5473 | 1 | | | 29 |
| | | 04/08/99 | | | | | | | | | | | | |
| 2363 | HOVBE81 | PTA-181 | pSport1 | 2373 | 953 | 1 | 953 | 172 | 172 | 5474 | 1 | 20 | 21 | 32 |
| | | 06/07/99 | | | | | | | | | | | | |
| 2364 | HOVBI16 | 203918 | pSport1 | 2374 | 932 | 1 | 932 | 269 | 269 | 5475 | 1 | 17 | 18 | 91 |
| | | 04/08/99 | | | | | | | | | | | | |
| 2365 | HOVBS68 | 203918 | pSport1 | 2375 | 1812 | 1 | 1812 | 20 | 20 | 5476 | 1 | 33 | 34 | 40 |
| | | 04/08/99 | | | | | | | | | | | | |
| 2366 | HOVCC73 | 203918 | pSport1 | 2376 | 594 | 1 | 594 | 126 | 126 | 5477 | 1 | 39 | 40 | 44 |
| | | 04/08/99 | | | | | | | | | | | | |
| 2367 | HOVCF30 | 203918 | pSport1 | 2377 | 909 | 1 | 909 | 169 | 169 | 5478 | 1 | | | 21 |
| | | 04/08/99 | | | | | | | | | | | | |
| 2368 | HOVCJ71 | 203959 | pSport1 | 2378 | 1463 | 1 | 1463 | | 147 | 5479 | 1 | 18 | 19 | 46 |
| | | 04/26/99 | | | | | | | | | | | | |
| 2369 | HOVCN53 | 203918 | pSport1 | 2379 | 809 | 1 | 809 | 128 | 128 | 5480 | 1 | 22 | 23 | 36 |
| | | 04/08/99 | | | | | | | | | | | | |
| 2370 | HOVCO53 | 203918 | pSport1 | 2380 | 1583 | 1 | 1583 | 65 | 65 | 5481 | 1 | 45 | 46 | 47 |
| | | 04/08/99 | | | | | | | | | | | | |
| 2371 | HPASF94 | 203959 | Uni-ZAP XR | 2381 | 352 | 29 | 352 | | 41 | 5482 | 1 | 15 | 16 | 37 |
| | | 04/26/99 | | | | | | | | | | | | |
| 2372 | HPBCG26 | 203918 | pBluescript | 2382 | 453 | 1 | 453 | 74 | 74 | 5483 | 1 | 21 | 22 | 31 |
| | | 04/08/99 | SK- | | | | | | | | | | | |
| 2373 | HPBCT11 | 203959 | pBluescript | 2383 | 996 | 1 | 996 | 149 | 149 | 5484 | 1 | 27 | 28 | 38 |
| | | 04/26/99 | SK- | | | | | | | | | | | |
| 2374 | HPBDE33 | PTA-181 | pBluescript | 2384 | 2444 | 1215 | 2435 | 257 | 257 | 5485 | 1 | 20 | 21 | 310 |
| | | 06/07/99 | SK- | | | | | | | | | | | |
| 2375 | HPBDE33 | PTA-181 | pBluescript | 2385 | 2444 | 1215 | 2435 | 1308 | 1308 | 5486 | 1 | 18 | 19 | 25 |
| | | 06/07/99 | SK- | | | | | | | | | | | |
| 2376 | HPBDF31 | 203918 | pBluescript | 2386 | 895 | 1 | 895 | 149 | 149 | 5487 | 1 | 23 | 24 | 29 |
| | | 04/08/99 | SK- | | | | | | | | | | | |
| 2377 | HPCAG17 | 203959 | Uni-ZAP XR | 2387 | 1320 | 1 | 1320 | | 214 | 5488 | 1 | 22 | 23 | 31 |
| | | 04/26/99 | | | | | | | | | | | | |
| 2378 | HPCAG17 | 203959 | Uni-ZAP XR | 2388 | 1227 | 1 | 873 | | 81 | 5489 | 1 | 22 | 23 | 31 |
| | | 04/26/99 | | | | | | | | | | | | |
| 2379 | HPCAM02 | PTA-791 | Uni-ZAP XR | 2389 | 1176 | 1 | 1176 | 265 | 265 | 5490 | 1 | 26 | 27 | 36 |
| | | 09/27/99 | | | | | | | | | | | | |
| 2380 | HPDDQ17 | 203918 | pBluescript | 2390 | 531 | 1 | 531 | 251 | 251 | 5491 | 1 | 24 | 25 | 31 |
| | | 04/08/99 | SK- | | | | | | | | | | | |
| 2381 | HPDDQ28 | 203918 | pBluescript | 2391 | 1221 | 1 | 1221 | 166 | 166 | 5492 | 1 | 23 | 24 | 72 |
| | | 04/08/99 | SK- | | | | | | | | | | | |
| 2382 | HPDDT14 | 203918 | pBluescript | 2392 | 1293 | 1 | 1264 | 173 | 173 | 5493 | 1 | 26 | 27 | 58 |
| | | 04/08/99 | SK- | | | | | | | | | | | |
| 2383 | HPEAA65 | 203918 | Uni-ZAP XR | 2393 | 908 | 1 | 908 | 25 | 25 | 5494 | 1 | 23 | 24 | 49 |
| | | 04/08/99 | | | | | | | | | | | | |
| 2384 | HPEAG24 | 203959 | Uni-ZAP XR | 2394 | 546 | 1 | 546 | 207 | 207 | 5495 | 1 | 21 | 22 | 35 |
| | | 04/26/99 | | | | | | | | | | | | |
| 2385 | HPEBA84 | 203959 | Uni-ZAP XR | 2395 | 1160 | 250 | 1160 | 533 | 533 | 5496 | 1 | 21 | 22 | 36 |
| | | 04/26/99 | | | | | | | | | | | | |
| 2386 | HPEBF91 | 203918 | Uni-ZAP XR | 2396 | 308 | 1 | 308 | 189 | 189 | 5497 | 1 | 22 | 23 | 34 |
| | | 04/08/99 | | | | | | | | | | | | |
| 2387 | HPEBI09 | 203918 | Uni-ZAP XR | 2397 | 236 | 1 | 236 | 53 | 53 | 5498 | 1 | | | 18 |
| | | 04/08/99 | | | | | | | | | | | | |
| 2388 | HPFCJ75 | 203959 | Uni-ZAP XR | 2398 | 2024 | 1 | 859 | | 1 | 5499 | 1 | | | 10 |
| | | 04/26/99 | | | | | | | | | | | | |
| 2389 | HPFCP75 | 203918 | Uni-ZAP XR | 2399 | 1345 | 1 | 1345 | 78 | 78 | 5500 | 1 | 26 | 27 | 31 |
| | | 04/08/99 | | | | | | | | | | | | |
| 2390 | HPFDB66 | 203959 | Uni-ZAP XR | 2400 | 1376 | 741 | 1376 | | 973 | 5501 | 1 | | | 9 |
| | | 04/26/99 | | | | | | | | | | | | |
| 2391 | HPFDD28 | 203918 | Uni-ZAP XR | 2401 | 1485 | 1 | 1485 | 391 | 391 | 5502 | 1 | | | 3 |
| | | 04/08/99 | | | | | | | | | | | | |
| 2392 | HPFDI47 | 203918 | Uni-ZAP XR | 2402 | 486 | 1 | 486 | 174 | 174 | 5503 | 1 | 18 | 19 | 26 |
| | | 04/08/99 | | | | | | | | | | | | |
| 2393 | HPIAF35 | 203918 | Uni-ZAP XR | 2403 | 2401 | 1 | 2401 | 140 | 140 | 5504 | 1 | | | 6 |
| | | 04/08/99 | | | | | | | | | | | | |
| 2394 | HPIAK27 | PTA-181 | Uni-ZAP XR | 2404 | 2970 | 785 | 2966 | 1088 | 1088 | 5505 | 1 | 16 | 17 | 25 |
| | | 06/07/99 | | | | | | | | | | | | |
| 2395 | HPIAL55 | 203979 | Uni-ZAP XR | 2405 | 2184 | 1 | 2184 | | 286 | 5506 | 1 | 16 | 17 | 67 |
| | | 04/29/99 | | | | | | | | | | | | |
| 2396 | HPIAT18 | PTA-791 | Uni-ZAP XR | 2406 | 3852 | 1 | 3852 | 74 | 74 | 5507 | 1 | 25 | 26 | 38 |
| | | 09/27/99 | | | | | | | | | | | | |
| 2397 | HPIAZ52 | 203918 | Uni-ZAP XR | 2407 | 2604 | 2 | 2604 | 149 | 149 | 5508 | 1 | 29 | 30 | 34 |
| | | 04/08/99 | | | | | | | | | | | | |
| 2398 | HPIBA07 | PTA-793 | Uni-ZAP XR | 2408 | 3033 | 1 | 3033 | 23 | 23 | 5509 | 1 | 37 | 38 | 61 |
| | | 09/27/99 | | | | | | | | | | | | |
| 2399 | HPIBA24 | 203959 | Uni-ZAP XR | 2409 | 2003 | 1 | 2002 | 49 | 49 | 5510 | 1 | 22 | 23 | 24 |
| | | 04/26/99 | | | | | | | | | | | | |
| 2400 | HPIBI40 | 203918 | Uni-ZAP XR | 2410 | 1417 | 1 | 1417 | 184 | 184 | 5511 | 1 | 35 | 36 | 87 |
| | | 04/08/99 | | | | | | | | | | | | |
| 2401 | HPIBT19 | 203918 | Uni-ZAP XR | 2411 | 1146 | 1 | 1146 | 340 | 340 | 5512 | 1 | 21 | 22 | 31 |
| | | 04/08/99 | | | | | | | | | | | | |
| 2402 | HPJAA82 | 203918 | Uni-ZAP XR | 2412 | 1465 | 1 | 1465 | 158 | 158 | 5513 | 1 | | | 12 |
| | | 04/08/99 | | | | | | | | | | | | |
| 2403 | HPJAB75 | 203979 | Uni-ZAP XR | 2413 | 1817 | 1 | 1792 | 153 | 153 | 5514 | 1 | | | 28 |
| | | 04/29/99 | | | | | | | | | | | | |
| 2404 | HPJAN76 | 203959 | Uni-ZAP XR | 2414 | 1953 | 70 | 1953 | 275 | 275 | 5515 | 1 | 17 | 18 | 18 |
| | | 04/26/99 | | | | | | | | | | | | |
| 2405 | HPJAN76 | 203959 | Uni-ZAP XR | 2415 | 1956 | 70 | 1953 | 275 | 275 | 5516 | 1 | 17 | 18 | 18 |
| | | 04/26/99 | | | | | | | | | | | | |
| 2406 | HPJAU94 | 203918 | Uni-ZAP XR | 2416 | 4161 | 1 | 4161 | 55 | 55 | 5517 | 1 | 22 | 23 | 23 |
| | | 04/08/99 | | | | | | | | | | | | |
| 2407 | HPJAW78 | 203918 | Uni-ZAP XR | 2417 | 1211 | 1 | 1211 | 100 | 100 | 5518 | 1 | 26 | 27 | 67 |
| | | 04/08/99 | | | | | | | | | | | | |
| 2408 | HPJBS16 | 203918 | Uni-ZAP XR | 2418 | 1703 | 1 | 1703 | 31 | 31 | 5519 | 1 | 20 | 21 | 112 |
| | | 04/08/99 | | | | | | | | | | | | |
| 2409 | HPJBU04 | 203918 | Uni-ZAP XR | 2419 | 3121 | 1 | 3121 | | 288 | 5520 | 1 | 17 | 18 | 34 |
| | | 04/08/99 | | | | | | | | | | | | |
| 2410 | HPJCN83 | 203918 | Uni-ZAP XR | 2420 | 1501 | 1 | 1501 | 195 | 195 | 5521 | 1 | 17 | 18 | 36 |
| | | 04/08/99 | | | | | | | | | | | | |
| 2411 | HPJCP75 | PTA-793 | Uni-ZAP XR | 2421 | 2203 | 1 | 2203 | 34 | 34 | 5522 | 1 | 22 | 23 | 34 |
| | | 09/27/99 | | | | | | | | | | | | |
| 2412 | HPJCV35 | 203918 | Uni-ZAP XR | 2422 | 2971 | 1 | 2971 | 527 | 527 | 5523 | 1 | 20 | 21 | 45 |
| | | 04/08/99 | | | | | | | | | | | | |
| 2413 | HPJCX13 | PTA-181 | Uni-ZAP XR | 2423 | 5065 | 1643 | 5065 | 1830 | 1830 | 5524 | 1 | 15 | 16 | 65 |
| | | 06/07/99 | | | | | | | | | | | | |
| 2414 | HPLAW13 | 203957 | Uni-ZAP XR | 2424 | 1592 | 1 | 1561 | 199 | 199 | 5525 | 1 | 28 | 29 | 37 |
| | | 04/26/99 | | | | | | | | | | | | |
| 2415 | HPMAI31 | 203918 | Uni-ZAP XR | 2425 | 270 | 1 | 270 | 142 | 142 | 5526 | 1 | 19 | 20 | 43 |
| | | 04/08/99 | | | | | | | | | | | | |
| 2416 | HPMBI91 | 203918 | Uni-ZAP XR | 2426 | 1045 | 1 | 1045 | 216 | 216 | 5527 | 1 | | | 11 |
| | | 04/08/99 | | | | | | | | | | | | |
| 2417 | HPMBT05 | 203918 | Uni-ZAP XR | 2427 | 838 | 1 | 838 | 147 | 147 | 5528 | 1 | 15 | 16 | 32 |
| | | 04/08/99 | | | | | | | | | | | | |
| 2418 | HPMBW95 | 203959 | Uni-ZAP XR | 2428 | 1367 | 418 | 1355 | 523 | 523 | 5529 | 1 | | | 3 |
| | | 04/26/99 | | | | | | | | | | | | |
| 2419 | HPMCW10 | 203959 | Uni-ZAP XR | 2429 | 915 | 1 | 915 | | 169 | 5530 | 1 | 19 | 20 | 25 |
| | | 04/26/99 | | | | | | | | | | | | |
| 2420 | HPMCZ18 | 203959 | Uni-ZAP XR | 2430 | 2509 | 686 | 2509 | 772 | 772 | 5531 | 1 | | | 10 |
| | | 04/26/99 | | | | | | | | | | | | |
| 2421 | HPMDA80 | 203959 | Uni-ZAP XR | 2431 | 921 | 1 | 921 | 166 | 166 | 5532 | 1 | 16 | 17 | 49 |
| | | 04/26/99 | | | | | | | | | | | | |
| 2422 | HPMDD27 | 203959 | Uni-ZAP XR | 2432 | 1723 | 230 | 1720 | 327 | 327 | 5533 | 1 | 43 | 44 | 54 |
| | | 04/26/99 | | | | | | | | | | | | |
| 2423 | HPMDF45 | 203918 | Uni-ZAP XR | 2433 | 2310 | 1 | 2310 | 58 | 58 | 5534 | 1 | 22 | 23 | 39 |
| | | 04/08/99 | | | | | | | | | | | | |
| 2424 | HPMDP57 | 203918 | Uni-ZAP XR | 2434 | 1541 | 1 | 1541 | | 233 | 5535 | 1 | 17 | 18 | 31 |
| | | 04/08/99 | | | | | | | | | | | | |
| 2425 | HPMEG72 | 203959 | Uni-ZAP XR | 2435 | 2074 | 91 | 1727 | 172 | 172 | 5536 | 1 | 19 | 20 | 31 |
| | | 04/26/99 | | | | | | | | | | | | |
| 2426 | HPMFM70 | 203918 | Uni-ZAP XR | 2436 | 2288 | 649 | 2288 | 749 | 749 | 5537 | 1 | 30 | 31 | 38 |
| | | 04/08/99 | | | | | | | | | | | | |
| 2427 | HPMFP48 | 203918 | Uni-ZAP XR | 2437 | 1156 | 1 | 1156 | 166 | 166 | 5538 | 1 | 25 | 26 | 40 |
| | | 04/08/99 | | | | | | | | | | | | |
| 2428 | HPMFW01 | 203979 | Uni-ZAP XR | 2438 | 2488 | 1 | 2215 | 95 | 95 | 5539 | 1 | | | 18 |
| | | 04/29/99 | | | | | | | | | | | | |
| 2429 | HPMGM06 | 203918 | Uni-ZAP XR | 2439 | 1640 | 1 | 1640 | 67 | 67 | 5540 | 1 | 29 | 30 | 88 |
| | | 04/08/99 | | | | | | | | | | | | |
| 2430 | HPMGW43 | 203959 | Uni-ZAP XR | 2440 | 1996 | 1 | 1831 | | 12 | 5541 | 1 | | | 12 |
| | | 04/26/99 | | | | | | | | | | | | |
| 2431 | HPMGY89 | 203917 | Uni-ZAP XR | 2441 | 2067 | 56 | 2065 | 110 | 110 | 5542 | 1 | 20 | 21 | 55 |
| | | 04/08/99 | | | | | | | | | | | | |
| 2432 | HPMKB09 | PTA-1838 | Uni-ZAP XR | 2442 | 2226 | 1229 | 2217 | 1351 | 1351 | 5543 | 1 | 16 | 17 | 80 |
| | | 05/09/00 | | | | | | | | | | | | |
| 2433 | HPMSH26 | 203979 | pBluescript | 2443 | 1758 | 47 | 1697 | 322 | 322 | 5544 | 1 | 16 | 17 | 24 |
| | | 04/29/99 | | | | | | | | | | | | |
| 2434 | HPMSH96 | 203918 | pBluescript | 2444 | 1575 | 1 | 1575 | 57 | 57 | 5545 | 1 | 25 | 26 | 31 |
| | | 04/08/99 | | | | | | | | | | | | |
| 2435 | HPQAJ25 | PTA-181 | Lambda ZAP II | 2445 | 549 | 1 | 549 | 85 | 85 | 5546 | 1 | 35 | 36 | 39 |
| | | 06/07/99 | | | | | | | | | | | | |
| 2436 | HPQAJ27 | 203918 | Lambda ZAP II | 2446 | 1397 | 3 | 1397 | | 233 | 5547 | 1 | 13 | 14 | 40 |
| | | 04/08/99 | | | | | | | | | | | | |
| 2437 | HPQAN50 | 203959 | Lambda ZAP II | 2447 | 1285 | 1 | 1228 | 164 | 164 | 5548 | 1 | 20 | 21 | 44 |
| | | 04/26/99 | | | | | | | | | | | | |
| 2438 | HPQAO80 | 203959 | Lambda ZAP II | 2448 | 985 | 10 | 983 | 284 | 284 | 5549 | 1 | | | 2 |
| | | 04/26/99 | | | | | | | | | | | | |
| 2439 | HPQAW27 | 203918 | Lambda ZAP II | 2449 | 961 | 1 | 911 | 118 | 118 | 5550 | 1 | 19 | 20 | 31 |
| | | 04/08/99 | | | | | | | | | | | | |
| 2440 | HPQBC90 | 203918 | Lambda ZAP II | 2450 | 1017 | 1 | 1017 | 21 | 21 | 5551 | 1 | 20 | 21 | 31 |
| | | 04/08/99 | | | | | | | | | | | | |
| 2441 | HPQBJ48 | 203959 | Lambda ZAP II | 2451 | 822 | 1 | 822 | 251 | 251 | 5552 | 1 | 19 | 20 | 36 |
| | | 04/26/99 | | | | | | | | | | | | |
| 2442 | HPQBJ48 | 203959 | Lambda ZAP II | 2452 | 822 | 1 | 822 | 251 | 251 | 5553 | 1 | 19 | 20 | 36 |
| | | 04/26/99 | | | | | | | | | | | | |
| 2443 | HPQBL67 | 203918 | Lambda ZAP II | 2453 | 1087 | 1 | 1087 | 234 | 234 | 5554 | 1 | | | 4 |
| | | 04/08/99 | | | | | | | | | | | | |
| 2444 | HPQBT17 | 203959 | Lambda ZAP II | 2454 | 1220 | 3 | 1208 | 236 | 236 | 5555 | 1 | | | 12 |
| | | 04/26/99 | | | | | | | | | | | | |
| 2445 | HPQCF94 | 203959 | Lambda ZAP II | 2455 | 951 | 8 | 944 | 212 | 212 | 5556 | 1 | 22 | 23 | 28 |
| | | 04/26/99 | | | | | | | | | | | | |
| 2446 | HPQCI62 | 203918 | Lambda ZAP II | 2456 | 1071 | 1 | 1071 | 237 | 237 | 5557 | 1 | 30 | 31 | 74 |
| | | 04/08/99 | | | | | | | | | | | | |
| 2447 | HPQRS74 | 203959 | Lambda ZAP II | 2457 | 563 | 1 | 563 | 146 | 146 | 5558 | 1 | 34 | 35 | 36 |
| | | 04/26/99 | | | | | | | | | | | | |
| 2448 | HPRAD30 | 203959 | Uni-ZAP XR | 2458 | 2930 | 1 | 2930 | 99 | 99 | 5559 | 1 | 48 | 49 | 73 |
| | | 04/26/99 | | | | | | | | | | | | |
| 2449 | HPRCC91 | 203918 | Uni-ZAP XR | 2459 | 932 | 1 | 932 | | 653 | 5560 | 1 | | | 9 |
| | | 04/08/99 | | | | | | | | | | | | |
| 2450 | HPRCF40 | 203959 | Uni-ZAP XR | 2460 | 2904 | 2001 | 2882 | 2217 | 2217 | 5561 | 1 | 28 | 29 | 34 |
| | | 04/26/99 | | | | | | | | | | | | |
| 2451 | HPRCF50 | 203918 | Uni-ZAP XR | 2461 | 1959 | 1 | 1959 | | 151 | 5562 | 1 | 31 | 32 | 51 |
| | | 04/08/99 | | | | | | | | | | | | |
| 2452 | HPRCL58 | 203918 | Uni-ZAP XR | 2462 | 1139 | 1 | 1139 | 171 | 171 | 5563 | 1 | | | 30 |
| | | 04/08/99 | | | | | | | | | | | | |
| 2453 | HPRCM72 | 203959 | Uni-ZAP XR | 2463 | 2455 | 26 | 1572 | | 281 | 5564 | 1 | 24 | 25 | 108 |
| | | 04/26/99 | | | | | | | | | | | | |
| 2454 | HPRCS59 | 203918 | Uni-ZAP XR | 2464 | 772 | 1 | 772 | 142 | 142 | 5565 | 1 | | | 10 |
| | | 04/08/99 | | | | | | | | | | | | |
| 2455 | HPRCT73 | 203918 | Uni-ZAP XR | 2465 | 1481 | 1 | 1481 | | 135 | 5566 | 1 | | | 11 |
| | | 04/08/99 | | | | | | | | | | | | |
| 2456 | HPRTH56 | PTA-181 | pBluescript | 2466 | 1377 | 1 | 1377 | 25 | 25 | 5567 | 1 | | | 26 |
| | | 06/07/99 | | | | | | | | | | | | |
| 2457 | HPTRE80 | PTA-792 | pBluescript | 2467 | 1173 | 1 | 1173 | | 102 | 5568 | 1 | 21 | 22 | 187 |
| | | 09/27/99 | | | | | | | | | | | | |
| 2458 | HPTRI42 | 203959 | pBluescript | 2468 | 1098 | 1 | 1098 | | 266 | 5569 | 1 | 18 | 19 | 71 |
| | | 04/26/99 | | | | | | | | | | | | |
| 2459 | HPTRL95 | 203959 | pBluescript | 2469 | 692 | 1 | 692 | 149 | 149 | 5570 | 1 | 32 | 33 | 37 |
| | | 04/26/99 | | | | | | | | | | | | |
| 2460 | HPTRQ52 | 203959 | pBluescript | 2470 | 658 | 1 | 658 | 224 | 224 | 5571 | 1 | 13 | 14 | 33 |
| | | 04/26/99 | | | | | | | | | | | | |
| 2461 | HPTTH35 | 203918 | Uni-ZAP XR | 2471 | 1134 | 1 | 1134 | 80 | 80 | 5572 | 1 | | | 20 |
| | | 04/08/99 | | | | | | | | | | | | |
| 2462 | HPTTI65 | 203918 | Uni-ZAP XR | 2472 | 1175 | 1 | 1175 | 210 | 210 | 5573 | 1 | 13 | 14 | 38 |
| | | 04/08/99 | | | | | | | | | | | | |
| 2463 | HPTTT62 | 203918 | Uni-ZAP XR | 2473 | 553 | 1 | 553 | 222 | 222 | 5574 | 1 | 26 | 27 | 63 |
| | | 04/08/99 | | | | | | | | | | | | |
| 2464 | HPTVH24 | 203959 | pBluescript | 2474 | 1463 | 576 | 1453 | 766 | 766 | 5575 | 1 | 19 | 20 | 35 |
| | | 04/26/99 | | | | | | | | | | | | |
| 2465 | HPTVH59 | 203959 | pBluescript | 2475 | 475 | 1 | 475 | | 144 | 5576 | 1 | 20 | 21 | 44 |
| | | 04/26/99 | | | | | | | | | | | | |
| 2466 | HPTVI04 | PTA-795 | pBluescript | 2476 | 636 | 19 | 618 | | 273 | 5577 | 1 | 20 | 21 | 65 |
| | | 09/27/99 | | | | | | | | | | | | |
| 2467 | HPTVI96 | 203959 | pBluescript | 2477 | 520 | 1 | 520 | 271 | 271 | 5578 | 1 | | | 6 |
| | | 04/26/99 | | | | | | | | | | | | |
| 2468 | HPVAA15 | 203959 | Uni-ZAP XR | 2478 | 1506 | 40 | 1068 | 74 | 74 | 5579 | 1 | 21 | 22 | 24 |
| | | 04/26/99 | | | | | | | | | | | | |
| 2469 | HPVAB20 | 203918 | Uni-ZAP XR | 2479 | 906 | 1 | 906 | 48 | 48 | 5580 | 1 | 16 | 17 | 36 |
| | | 04/08/99 | | | | | | | | | | | | |
| 2470 | HPVAB63 | 203918 | Uni-ZAP XR | 2480 | 774 | 1 | 774 | 311 | 311 | 5581 | 1 | | | 13 |
| | | 04/08/99 | | | | | | | | | | | | |
| 2471 | HPVAF86 | 203918 | Uni-ZAP XR | 2481 | 1236 | 1 | 1236 | 91 | 91 | 5582 | 1 | 25 | 26 | 39 |
| | | 04/08/99 | | | | | | | | | | | | |
| 2472 | HPWAH55 | PTA-181 | Uni-ZAP XR | 2482 | 2071 | 1 | 2071 | 144 | 144 | 5583 | 1 | 22 | 23 | 39 |
| | | 06/07/99 | | | | | | | | | | | | |
| 2473 | HPWAO89 | 203918 | Uni-ZAP XR | 2483 | 1467 | 1 | 1467 | | 46 | 5584 | 1 | 18 | 19 | 41 |
| | | 04/08/99 | | | | | | | | | | | | |
| 2474 | HPWAS27 | 203918 | Uni-ZAP XR | 2484 | 1201 | 1 | 1201 | | 305 | 5585 | 1 | 14 | 15 | 34 |
| | | 04/08/99 | | | | | | | | | | | | |
| 2475 | HPWAT86 | 203959 | Uni-ZAP XR | 2485 | 617 | 1 | 617 | 83 | 83 | 5586 | 1 | 29 | 30 | 59 |
| | | 04/26/99 | | | | | | | | | | | | |
| 2476 | HPWAV82 | 203918 | Uni-ZAP XR | 2486 | 637 | 262 | 637 | 401 | 401 | 5587 | 1 | | | 12 |
| | | 04/08/99 | | | | | | | | | | | | |
| 2477 | HPWBA36 | 203959 | Uni-ZAP XR | 2487 | 1610 | 1 | 1609 | 83 | 83 | 5588 | 1 | 23 | 24 | 24 |
| | | 04/26/99 | | | | | | | | | | | | |
| 2478 | HPWTF23 | 203979 | Uni-ZAP XR | 2488 | 2008 | 94 | 1994 | 283 | 283 | 5589 | 1 | 29 | 30 | 130 |
| | | 04/29/99 | | | | | | | | | | | | |
| 2479 | HPWTF23 | 203979 | Uni-ZAP XR | 2489 | 2008 | 94 | 1994 | 283 | 283 | 5590 | 1 | 29 | 30 | 130 |
| | | 04/29/99 | | | | | | | | | | | | |
| 2480 | HPWTF53 | 203979 | Uni-ZAP XR | 2490 | 2190 | 227 | 2190 | | 484 | 5591 | 1 | 14 | 15 | 97 |
| | | 04/29/99 | | | | | | | | | | | | |
| 2481 | HPXAB56 | 203918 | pBluescript | 2491 | 240 | 1 | 240 | 73 | 73 | 5592 | 1 | 16 | 17 | 30 |
| | | 04/08/99 | | | | | | | | | | | | |
| 2482 | HPZAB75 | 203918 | pBluescript | 2492 | 686 | 1 | 686 | 42 | 42 | 5593 | 1 | 22 | 23 | 36 |
| | | 04/08/99 | | | | | | | | | | | | |
| 2483 | HRAAB26 | 203918 | pCMVSport 3.0 | 2493 | 1961 | 1 | 1961 | 8 | 8 | 5594 | 1 | 18 | 19 | 25 |
| | | 04/08/99 | | | | | | | | | | | | |
| 2484 | HRAAC36 | 203918 | pCMVSport 3.0 | 2494 | 2647 | 1 | 2647 | | 274 | 5595 | 1 | 17 | 18 | 59 |
| | | 04/08/99 | | | | | | | | | | | | |
| 2485 | HRAAF59 | 203949 | pCMVSport 3.0 | 2495 | 1520 | 1 | 1520 | 103 | 103 | 5596 | 1 | 33 | 34 | 49 |
| | | 04/29/99 | | | | | | | | | | | | |
| 2486 | HRAAG89 | 203918 | pCMVSport 3.0 | 2496 | 594 | 1 | 594 | 54 | 54 | 5597 | 1 | 28 | 29 | 31 |
| | | 04/08/99 | | | | | | | | | | | | |
| 2487 | HRAAO40 | 203918 | pCMVSport 3.0 | 2497 | 933 | 1 | 933 | 95 | 95 | 5598 | 1 | 33 | 34 | 36 |
| | | 04/08/99 | | | | | | | | | | | | |
| 2488 | HRAAZ12 | 203959 | pCMVSport 3.0 | 2498 | 4561 | 3116 | 4561 | 3201 | 3201 | 5599 | 1 | 21 | 22 | 39 |
| | | 04/26/99 | | | | | | | | | | | | |
| 2489 | HRABA19 | 203918 | pCMVSport 3.0 | 2499 | 1142 | 1 | 1142 | 175 | 175 | 5600 | 1 | | | 4 |
| | | 04/08/99 | | | | | | | | | | | | |
| 2490 | HRABP28 | 203959 | pCMVSport 3.0 | 2500 | 1317 | 1 | 1317 | 224 | 224 | 5601 | 1 | 23 | 24 | 35 |
| | | 04/26/99 | | | | | | | | | | | | |
| 2491 | HRABU56 | 203918 | pCMVSport 3.0 | 2501 | 420 | 1 | 420 | 268 | 268 | 5602 | 1 | 29 | 30 | 51 |
| | | 04/08/99 | | | | | | | | | | | | |
| 2492 | HRABZ80 | 203918 | pCMVSport 3.0 | 2502 | 1506 | 1 | 1506 | 207 | 207 | 5603 | 1 | 17 | 18 | 48 |
| | | 04/08/99 | | | | | | | | | | | | |
| 2493 | HRACB01 | 203918 | pCMVSport 3.0 | 2503 | 1424 | 1 | 1424 | 150 | 150 | 5604 | 1 | | | 21 |
| | | 04/08/99 | | | | | | | | | | | | |
| 2494 | HRACI39 | 203918 | pCMVSport 3.0 | 2504 | 1348 | 1 | 1348 | 124 | 124 | 5605 | 1 | 17 | 18 | 30 |
| | | 04/08/99 | | | | | | | | | | | | |
| 2495 | HRADU15 | 203959 | pCMVSport 3.0 | 2505 | 849 | 1 | 849 | 304 | 304 | 5606 | 1 | 34 | 35 | 46 |
| | | 04/26/99 | | | | | | | | | | | | |
| 2496 | HRDAH04 | 203918 | Uni-ZAP XR | 2506 | 1519 | 1 | 1519 | | 147 | 5607 | 1 | 16 | 17 | 24 |
| | | 04/08/99 | | | | | | | | | | | | |
| 2497 | HRDBA20 | 203918 | Uni-ZAP XR | 2507 | 1292 | 1 | 1292 | | 87 | 5608 | 1 | 17 | 18 | 45 |
| | | 04/08/99 | | | | | | | | | | | | |
| 2498 | HRDBD32 | 203918 | Uni-ZAP XR | 2508 | 1292 | 1 | 1292 | | 86 | 5609 | 1 | 17 | 18 | 45 |
| | | 04/08/99 | | | | | | | | | | | | |
| 2499 | HRDBL01 | 203917 | Uni-ZAP XR | 2509 | 935 | 60 | 935 | 248 | 248 | 5610 | 1 | 18 | 19 | 38 |
| | | 04/08/99 | | | | | | | | | | | | |
| 2500 | HRDDM85 | 203959 | Uni-ZAP XR | 2510 | 2180 | 1 | 2180 | 281 | 281 | 5611 | 1 | | | 17 |
| | | 04/26/99 | | | | | | | | | | | | |
| 2501 | HRDDS22 | 203959 | Uni-ZAP XR | 2511 | 948 | 1 | 948 | 235 | 235 | 5612 | 1 | 18 | 19 | 44 |
| | | 04/26/99 | | | | | | | | | | | | |
| 2502 | HRDEJ86 | 203959 | Uni-ZAP XR | 2512 | 844 | 1 | 844 | | 203 | 5613 | 1 | 14 | 15 | 27 |
| | | 04/26/99 | | | | | | | | | | | | |
| 2503 | HRDEQ34 | 203959 | Uni-ZAP XR | 2513 | 608 | 1 | 608 | 67 | 67 | 5614 | 1 | 15 | 16 | 19 |
| | | 04/26/99 | | | | | | | | | | | | |
| 2504 | HRDFE30 | 203959 | Uni-ZAP XR | 2514 | 1595 | 821 | 1595 | 1193 | 1193 | 5615 | 1 | 29 | 30 | 41 |
| | | 04/26/99 | | | | | | | | | | | | |
| 2505 | HRDFT83 | 203959 | Uni-ZAP XR | 2515 | 953 | 8 | 953 | 51 | 51 | 5616 | 1 | 27 | 28 | 34 |
| | | 04/26/99 | | | | | | | | | | | | |
| 2506 | HRGCA01 | 203918 | Uni-ZAP XR | 2516 | 1320 | 1 | 1320 | 75 | 75 | 5617 | 1 | 15 | 16 | 26 |
| | | 04/08/99 | | | | | | | | | | | | |
| 2507 | HRGCA06 | PTA-181 | Uni-ZAP XR | 2517 | 617 | 1 | 617 | 74 | 74 | 5618 | 1 | 15 | 16 | 137 |
| | | 06/07/99 | | | | | | | | | | | | |
| 2508 | HRGSE38 | PTA-795 | pBluescript | 2518 | 536 | 1 | 536 | 50 | 50 | 5619 | 1 | 16 | 17 | 106 |
| | | 09/27/99 | | | | | | | | | | | | |
| 2509 | HRLAT43 | 203959 | ZAP Express | 2519 | 451 | 1 | 451 | 158 | 158 | 5620 | 1 | | | 21 |
| | | 04/26/99 | | | | | | | | | | | | |
| 2510 | HRLME03 | 203918 | ZAP Express | 2520 | 272 | 1 | 272 | 162 | 162 | 5621 | 1 | 21 | 22 | 37 |
| | | 04/08/99 | | | | | | | | | | | | |
| 2511 | HROAN20 | 203918 | Uni-ZAP XR | 2521 | 1346 | 1 | 1346 | 254 | 254 | 5622 | 1 | 11 | 12 | 25 |
| | | 04/08/99 | | | | | | | | | | | | |
| 2512 | HROAP64 | 203959 | Uni-ZAP XR | 2522 | 638 | 1 | 638 | 181 | 181 | 5623 | 1 | 20 | 21 | 35 |
| | | 04/26/99 | | | | | | | | | | | | |
| 2513 | HROAS35 | 203959 | Uni-ZAP XR | 2523 | 923 | 1 | 923 | 152 | 152 | 5624 | 1 | | | 31 |
| | | 04/26/99 | | | | | | | | | | | | |
| 2514 | HROAY16 | 203959 | Uni-ZAP XR | 2524 | 1957 | 1 | 1957 | 242 | 242 | 5625 | 1 | 26 | 27 | 31 |
| | | 04/26/99 | | | | | | | | | | | | |
| 2515 | HROBJ10 | 203959 | Uni-ZAP XR | 2525 | 1870 | 1 | 516 | 108 | 108 | 5626 | 1 | 19 | 20 | 57 |
| | | 04/26/99 | | | | | | | | | | | | |
| 2516 | HROBW46 | 203959 | Uni-ZAP XR | 2526 | 1157 | 1 | 1157 | 395 | 395 | 5627 | 1 | 28 | 29 | 44 |
| | | 04/26/99 | | | | | | | | | | | | |
| 2517 | HRODG86 | 203959 | Uni-ZAP XR | 2527 | 1084 | 1 | 1084 | | 320 | 5628 | 1 | 12 | 13 | 14 |
| | | 04/26/99 | | | | | | | | | | | | |
| 2518 | HRSAL26 | 203918 | ZAP Express | 2528 | 175 | 1 | 175 | 82 | 82 | 5629 | 1 | 18 | 19 | 31 |
| | | 04/08/99 | | | | | | | | | | | | |
| 2519 | HRTAE88 | 203918 | pBluescript | 2529 | 2845 | 1 | 2845 | 266 | 266 | 5630 | 1 | 18 | 19 | 31 |
| | | 04/08/99 | SK- | | | | | | | | | | | |
| 2520 | HRTAP63 | 203979 | pBluescript | 2530 | 2576 | 891 | 2576 | 959 | 959 | 5631 | 1 | 28 | 29 | 42 |
| | | 04/29/99 | SK- | | | | | | | | | | | |
| 2521 | HRTAR24 | 203918 | pBluescript | 2531 | 466 | 1 | 466 | | 220 | 5632 | 1 | 24 | 25 | 57 |
| | | 04/08/99 | SK- | | | | | | | | | | | |
| 2522 | HSAAN03 | 203918 | pBluescript | 2532 | 1136 | 1 | 1136 | 193 | 193 | 5633 | 1 | 32 | 33 | 66 |
| | | 04/08/99 | SK- | | | | | | | | | | | |
| 2523 | HSAAS05 | 203959 | pBluescript | 2533 | 1500 | 1 | 1500 | 115 | 115 | 5634 | 1 | 19 | 20 | 38 |
| | | 04/26/99 | SK- | | | | | | | | | | | |
| 2524 | HSAAW13 | 203918 | pBluescript | 2534 | 2384 | 2 | 2384 | 246 | 246 | 5635 | 1 | | | 22 |
| | | 04/08/99 | SK- | | | | | | | | | | | |
| 2525 | HSABA15 | 203918 | pBluescript | 2535 | 947 | 1 | 947 | 110 | 110 | 5636 | 1 | 29 | 30 | 43 |
| | | 04/08/99 | SK- | | | | | | | | | | | |
| 2526 | HSABG81 | 203959 | pBluescript | 2536 | 2187 | 365 | 2187 | 466 | 466 | 5637 | 1 | 41 | 42 | 42 |
| | | 04/26/99 | SK- | | | | | | | | | | | |
| 2527 | HSATA50 | 203918 | Uni-ZAP XR | 2537 | 937 | 1 | 937 | 211 | 211 | 5638 | 1 | | | 17 |
| | | 04/08/99 | | | | | | | | | | | | |
| 2528 | HSATA61 | 203959 | Uni-ZAP XR | 2538 | 419 | 1 | 419 | | 132 | 5639 | 1 | 13 | 14 | 32 |
| | | 04/26/99 | | | | | | | | | | | | |
| 2529 | HSATG66 | 203917 | Uni-ZAP XR | 2539 | 4049 | 1146 | 3480 | | 1815 | 5640 | 1 | | | 20 |
| | | 04/08/99 | | | | | | | | | | | | |
| 2530 | HSATI91 | 203918 | Uni-ZAP XR | 2540 | 1377 | 1 | 1377 | | 105 | 5641 | 1 | 26 | 27 | 67 |
| | | 04/08/99 | | | | | | | | | | | | |
| 2531 | HSATR50 | 203959 | Uni-ZAP XR | 2541 | 862 | 1 | 667 | 217 | 217 | 5642 | 1 | 22 | 23 | 34 |
| | | 04/26/99 | | | | | | | | | | | | |
| 2532 | HSATT82 | 203918 | Uni-ZAP XR | 2542 | 1075 | 1 | 1075 | 166 | 166 | 5643 | 1 | | | 29 |
| | | 04/08/99 | | | | | | | | | | | | |
| 2533 | HSATW19 | 203959 | Uni-ZAP XR | 2543 | 695 | 1 | 695 | | 185 | 5644 | 1 | | | 3 |
| | | 04/26/99 | | | | | | | | | | | | |
| 2534 | HSATW67 | 203959 | Uni-ZAP XR | 2544 | 721 | 1 | 721 | 37 | 37 | 5645 | 1 | 18 | 19 | 32 |
| | | 04/26/99 | | | | | | | | | | | | |
| 2535 | HSATZ02 | 203918 | Uni-ZAP XR | 2545 | 1029 | 6 | 1029 | 246 | 246 | 5646 | 1 | | | 3 |
| | | 04/08/99 | | | | | | | | | | | | |
| 2536 | HSAUA95 | 203918 | Uni-ZAP XR | 2546 | 560 | 1 | 560 | 62 | 62 | 5647 | 1 | 21 | 22 | 38 |
| | | 04/08/99 | | | | | | | | | | | | |
| 2537 | HSAUB89 | 203918 | Uni-ZAP XR | 2547 | 1288 | 1 | 1288 | 161 | 161 | 5648 | 1 | 20 | 21 | 36 |
| | | 04/08/99 | | | | | | | | | | | | |
| 2538 | HSAUI53 | PTA-181 | Uni-ZAP XR | 2548 | 1492 1 | 1492 | 22 | 22 | 5649 | 1 | 28 | 29 | 39 | |
| | | 06/07/99 | | | | | | | | | | | | |
| 2539 | HSAUV74 | PTA-181 | Uni-ZAP XR | 2549 | 899 | 1 | 899 | 169 | 169 | 5650 | 1 | | | 16 |
| | | 06/07/99 | | | | | | | | | | | | |
| 2540 | HSAUX39 | 203959 | Uni-ZAP XR | 2550 | 2006 | 1 | 2006 | 98 | 98 | 5651 | 1 | 29 | 30 | 35 |
| | | 04/26/99 | | | | | | | | | | | | |
| 2541 | HSAVA58 | PTA-181 | Uni-ZAP XR | 2551 | 1242 1 | 1242 | | 376 | 5652 | 1 | | | 7 | |
| | | 06/07/99 | | | | | | | | | | | | |
| 2542 | HSAVE52 | 203918 | Uni-ZAP XR | 2552 | 1467 | 1 | 1467 | 179 | 179 | 5653 | 1 | 17 | 18 | 22 |
| | | 04/08/99 | | | | | | | | | | | | |
| 2543 | HSAVH32 | 203959 | Uni-ZAP XR | 2553 | 851 | 1 | 851 | 63 | 63 | 5654 | 1 | 22 | 23 | 31 |
| | | 04/26/99 | | | | | | | | | | | | |
| 2544 | HSAVM49 | 203959 | Uni-ZAP XR | 2554 | 1266 | 1 | 1266 | | 236 | 5655 | 1 | 5 | 6 | 25 |
| | | 04/26/99 | | | | | | | | | | | | |
| 2545 | HSAVO11 | 203959 | Uni-ZAP XR | 2555 | 1623 | 1 | 1623 | 208 | 208 | 5656 | 1 | 19 | 20 | 22 |
| | | 04/26/99 | | | | | | | | | | | | |
| 2546 | HSAVO17 | 203959 | Uni-ZAP XR | 2556 | 1441 | 365 | 1441 | 727 | 727 | 5657 | 1 | | | 38 |
| | | 04/26/99 | | | | | | | | | | | | |
| 2547 | HSAVQ13 | 203959 | Uni-ZAP XR | 2557 | 576 | 1 | 576 | 18 | 18 | 5658 | 1 | 19 | 20 | 32 |
| | | 04/26/99 | | | | | | | | | | | | |
| 2548 | HSAVR85 | 203960 | Uni-ZAP XR | 2558 | 5048 | 48 | 645 | | 507 | 5659 | 1 | | | 3 |
| | | 04/26/99 | | | | | | | | | | | | |
| 2549 | HSAVY92 | 203959 | Uni-ZAP XR | 2559 | 1134 | 1 | 1134 | 100 | 100 | 5660 | 1 | | | 8 |
| | | 04/26/99 | | | | | | | | | | | | |
| 2550 | HSAVZ05 | 203959 | Uni-ZAP XR | 2560 | 1586 | 315 | 1586 | 653 | 653 | 5661 | 1 | | | 13 |
| | | 04/26/99 | | | | | | | | | | | | |
| 2551 | HSAWB58 | 203959 | Uni-ZAP XR | 2561 | 1703 | 1 | 1703 | 121 | 121 | 5662 | 1 | 18 | 19 | 49 |
| | | 04/26/99 | | | | | | | | | | | | |
| 2552 | HSAWH36 | 203918 | Uni-ZAP XR | 2562 | 1114 | 1 | 1114 | | 101 | 5663 | 1 | 21 | 22 | 29 |
| | | 04/08/99 | | | | | | | | | | | | |
| 2553 | HSAWM20 | 203959 | Uni-ZAP XR | 2563 | 624 | 1 | 624 | 126 | 126 | 5664 | 1 | 18 | 19 | 28 |
| | | 04/26/99 | | | | | | | | | | | | |
| 2554 | HSAWM74 | PTA-181 | Uni-ZAP XR | 2564 | 533 | 1 | 533 | | 223 | 5665 | 1 | | | 6 |
| | | 06/07/99 | | | | | | | | | | | | |
| 2555 | HSAWX70 | PTA-791 | Uni-ZAP XR | 2565 | 4015 | 1 | 4015 | 1363 | 1363 | 5666 | 1 | 28 | 29 | 57 |
| | | 09/27/99 | | | | | | | | | | | | |
| 2556 | HSAXC22 | 203959 | Uni-ZAP XR | 2566 | 550 | 1 | 550 | 59 | 59 | 5667 | 1 | 19 | 20 | 31 |
| | | 04/26/99 | | | | | | | | | | | | |
| 2557 | HSAXI10 | 203918 | Uni-ZAP XR | 2567 | 812 | 1 | 812 | 104 | 104 | 5668 | 1 | 31 | 32 | 69 |
| | | 04/08/99 | | | | | | | | | | | | |
| 2558 | HSAXL49 | 203959 | Uni-ZAP XR | 2568 | 898 | 1 | 898 | 86 | 86 | 5669 | 1 | | | 9 |
| | | 04/26/99 | | | | | | | | | | | | |
| 2559 | HSAXL82 | 203918 | Uni-ZAP XR | 2569 | 899 | 1 | 899 | | 164 | 5670 | 1 | 27 | 28 | 40 |
| | | 04/08/99 | | | | | | | | | | | | |
| 2560 | HSAXN57 | 203959 | Uni-ZAP XR | 2570 | 484 | 1 | 484 | 90 | 90 | 5671 | 1 | | | 20 |
| | | 04/26/99 | | | | | | | | | | | | |
| 2561 | HSAXO45 | 203918 | Uni-ZAP XR | 2571 | 1391 | 1 | 1391 | 260 | 260 | 5672 | 1 | 16 | 17 | 34 |
| | | 04/08/99 | | | | | | | | | | | | |
| 2562 | HSAXS06 | 203918 | Uni-ZAP XR | 2572 | 1125 | 1 | 1125 | 158 | 158 | 5673 | 1 | 19 | 20 | 36 |
| | | 04/08/99 | | | | | | | | | | | | |
| 2563 | HSAXS22 | 203918 | Uni-ZAP XR | 2573 | 366 | 1 | 362 | 20 | 20 | 5674 | 1 | 16 | 17 | 35 |
| | | 04/08/99 | | | | | | | | | | | | |
| 2564 | HSAYL24 | 203918 | Uni-ZAP XR | 2574 | 1066 | 1 | 1066 | 151 | 151 | 5675 | 1 | 20 | 21 | 62 |
| | | 04/08/99 | | | | | | | | | | | | |
| 2565 | HSAYO82 | 203918 | Uni-ZAP XR | 2575 | 605 | 117 | 605 | 139 | 139 | 5676 | 1 | 19 | 20 | 41 |
| | | 04/08/99 | | | | | | | | | | | | |
| 2566 | HSAYR62 | 203959 | Uni-ZAP XR | 2576 | 3116 | 1559 | 2971 | | 1900 | 5677 | 1 | 15 | 16 | 23 |
| | | 04/26/99 | | | | | | | | | | | | |
| 2567 | HSAZP90 | 203959 | Uni-ZAP XR | 2577 | 1073 | 1 | 1073 | 136 | 136 | 5678 | 1 | 29 | 30 | 48 |
| | | 04/26/99 | | | | | | | | | | | | |
| 2568 | HSBAJ47 | 203959 | pBluescript | 2578 | 2195 | 1 | 2157 | 173 | 173 | 5679 | 1 | 24 | 25 | 37 |
| | | 04/26/99 | SK- | | | | | | | | | | | |
| 2569 | HSDBI90 | PTA-181 | Uni-ZAP XR | 2579 | 1057 | 1 | 1057 | 218 | 218 | 5680 | 1 | | | 14 |
| | | 06/07/99 | | | | | | | | | | | | |
| 2570 | HSDDC55 | 203918 | Uni-ZAP XR | 2580 | 1626 | 1 | 1626 | 116 | 116 | 5681 | 1 | 16 | 17 | 32 |
| | | 04/08/99 | | | | | | | | | | | | |
| 2571 | HSDEA26 | 203918 | Uni-ZAP XR | 2581 | 1692 | 1 | 1692 | 246 | 246 | 5682 | 1 | 15 | 16 | 43 |
| | | 04/08/99 | | | | | | | | | | | | |
| 2572 | HSDEY39 | 203918 | Uni-ZAP XR | 2582 | 975 | 1 | 975 | 88 | 88 | 5683 | 1 | 22 | 23 | 35 |
| | | 04/08/99 | | | | | | | | | | | | |
| 2573 | hsdff72 | 203918 | Uni-ZAP XR | 2583 | 1276 | 1 | 1276 | 192 | 192 | 5684 | 1 | 20 | 21 | 22 |
| | | 04/08/99 | | | | | | | | | | | | |
| 2574 | HSDFO08 | 203918 | Uni-ZAP XR | 2584 | 1212 | 1 | 1212 | 74 | 74 | 5685 | 1 | 23 | 24 | 31 |
| | | 04/08/99 | | | | | | | | | | | | |
| 2575 | HSDFR10 | PTA-181 | Uni-ZAP XR | 2585 | 575 | 1 | 575 | 167 | 167 | 5686 | 1 | 20 | 21 | 24 |
| | | 06/07/99 | | | | | | | | | | | | |
| 2576 | HSDGB20 | 203918 | Uni-ZAP XR | 2586 | 519 | 1 | 519 | 217 | 217 | 5687 | 1 | 15 | 16 | 31 |
| | | 04/08/99 | | | | | | | | | | | | |
| 2577 | HSDGH56 | PTA-181 | Uni-ZAP XR | 2587 | 1104 | 1 | 1104 | 76 | 76 | 5688 | 1 | | | 16 |
| | | 06/07/99 | | | | | | | | | | | | |
| 2578 | HSDGM01 | 203918 | Uni-ZAP XR | 2588 | 865 | 1 | 865 | 71 | 71 | 5689 | 1 | 17 | 18 | 35 |
| | | 04/08/99 | | | | | | | | | | | | |
| 2579 | HSDGM42 | 203917 | Uni-ZAP XR | 2589 | 3244 | 1 | 3231 | 765 | 765 | 5690 | 1 | 1 | 2 | 625 |
| | | 04/08/99 | | | | | | | | | | | | |
| 2580 | HSDGM42 | 203917 | Uni-ZAP XR | 2590 | 3229 | 1 | 3229 | 67 | 67 | 5691 | 1 | 21 | 22 | 35 |
| | | 04/08/99 | | | | | | | | | | | | |
| 2581 | HSDGM42 | 203917 | Uni-ZAP XR | 2591 | 1545 | 14 | 1124 | | 940 | 5692 | 1 | 6 | 7 | 12 |
| | | 04/08/99 | | | | | | | | | | | | |
| 2582 | HSDGM42 | 203917 | Uni-ZAP XR | 2592 | 3304 | 1 | 3291 | 399 | 399 | 5693 | 1 | 1 | 2 | 767 |
| | | 04/08/99 | | | | | | | | | | | | |
| 2583 | HSDGM42 | 203917 | Uni-ZAP XR | 2593 | 3303 | 1 | 3290 | 128 | 128 | 5694 | 1 | 21 | 22 | 35 |
| | | 04/08/99 | | | | | | | | | | | | |
| 2584 | HSDGM42 | 203917 | Uni-ZAP XR | 2594 | 3304 | 1 | 3291 | 128 | 128 | 5695 | 1 | 21 | 22 | 35 |
| | | 04/08/99 | | | | | | | | | | | | |
| 2585 | HSDHD05 | 203918 | Uni-ZAP XR | 2595 | 815 | 1 | 815 | 229 | 229 | 5696 | 1 | 19 | 20 | 62 |
| | | 04/08/99 | | | | | | | | | | | | |
| 2586 | HSDIE51 | 203918 | Uni-ZAP XR | 2596 | 1433 | 1 | 1433 | 185 | 185 | 5697 | 1 | 18 | 19 | 28 |
| | | 04/08/99 | | | | | | | | | | | | |
| 2587 | HSDIK31 | 203979 | Uni-ZAP XR | 2597 | 1862 | 1 | 1862 | 194 | 194 | 5698 | 1 | 27 | 28 | 48 |
| | | 04/29/99 | | | | | | | | | | | | |
| 2588 | HSDIV37 | 203979 | Uni-ZAP XR | 2598 | 1201 | 1 | 1201 | 147 | 147 | 5699 | 1 | 19 | 20 | 30 |
| | | 04/29/99 | | | | | | | | | | | | |
| 2589 | HSDJC96 | 203918 | Uni-ZAP XR | 2599 | 1969 | 439 | 1969 | 687 | 687 | 5700 | 1 | 27 | 28 | 47 |
| | | 04/08/99 | | | | | | | | | | | | |
| 2590 | HSDJE77 | 203918 | Uni-ZAP XR | 2600 | 1166 | 1 | 1137 | 114 | 114 | 5701 | 1 | 22 | 23 | 32 |
| | | 04/08/99 | | | | | | | | | | | | |
| 2591 | HSDJF04 | 203959 | Uni-ZAP XR | 2601 | 1144 | 1 | 1144 | | 74 | 5702 | 1 | 29 | 30 | 116 |
| | | 04/26/99 | | | | | | | | | | | | |
| 2592 | HSDJG47 | 203979 | Uni-ZAP XR | 2602 | 1930 | 245 | 1908 | | 714 | 5703 | 1 | 19 | 20 | 45 |
| | | 04/29/99 | | | | | | | | | | | | |
| 2593 | HSDJH72 | 203918 | Uni-ZAP XR | 2603 | 1753 | 1 | 1753 | 241 | 241 | 5704 | 1 | 14 | 15 | 23 |
| | | 04/08/99 | | | | | | | | | | | | |
| 2594 | HSDJL07 | PTA-795 | Uni-ZAP XR | 2604 | 1501 | 1 | 1501 | 282 | 282 | 5705 | 1 | 21 | 22 | 36 |
| | | 09/27/99 | | | | | | | | | | | | |
| 2595 | HSDJR49 | 203918 | Uni-ZAP XR | 2605 | 1450 | 1 | 1450 | 102 | 102 | 5706 | 1 | 24 | 25 | 33 |
| | | 04/08/99 | | | | | | | | | | | | |
| 2596 | HSDJV24 | 203918 | Uni-ZAP XR | 2606 | 2329 | 759 | 2329 | | 2 | 5707 | 1 | 1 | 2 | 496 |
| | | 04/08/99 | | | | | | | | | | | | |
| 2597 | HSDJV40 | 203918 | Uni-ZAP XR | 2607 | 1593 | 1 | 1593 | 126 | 126 | 5708 | 1 | 42 | 43 | 63 |
| | | 04/08/99 | | | | | | | | | | | | |
| 2598 | HSDKA64 | 203918 | Uni-ZAP XR | 2608 | 1583 | 1 | 1583 | 199 | 199 | 5709 | 1 | 44 | 45 | 55 |
| | | 04/08/99 | | | | | | | | | | | | |
| 2599 | HSDKE82 | 203918 | Uni-ZAP XR | 2609 | 1434 | 1 | 1434 | 120 | 120 | 5710 | 1 | 35 | 36 | 96 |
| | | 04/08/99 | | | | | | | | | | | | |
| 2600 | HSDKF96 | 203918 | Uni-ZAP XR | 2610 | 1710 | 1 | 1710 | 187 | 187 | 5711 | 1 | 24 | 25 | 25 |
| | | 04/08/99 | | | | | | | | | | | | |
| 2601 | HSDZO08 | 203959 | pBluescript | 2611 | 2279 | 1029 | 2255 | 1142 | 1142 | 5712 | 1 | 45 | 46 | 169 |
| | | 04/26/99 | | | | | | | | | | | | |
| 2602 | HSDZQ96 | 203918 | pBluescript | 2612 | 708 | 1 | 708 | 330 | 330 | 5713 | 1 | | | 13 |
| | | 04/08/99 | | | | | | | | | | | | |
| 2603 | HSEBB18 | PTA-792 | pCMVSport 1 | 2613 | 1297 | 1 | 1297 | 268 | 268 | 5714 | 1 | | | 14 |
| | | 09/27/99 | | | | | | | | | | | | |
| 2604 | HSFAM19 | 203918 | Uni-ZAP XR | 2614 | 1434 | 1 | 1434 | 170 | 170 | 5715 | 1 | 21 | 22 | 48 |
| | | 04/08/99 | | | | | | | | | | | | |
| 2605 | HSHAG54 | 203959 | Uni-ZAP XR | 2615 | 1501 | 20 | 1358 | | 155 | 5716 | 1 | 18 | 19 | 38 |
| | | 04/26/99 | | | | | | | | | | | | |
| 2606 | HSHAS72 | 203960 | Uni-ZAP XR | 2616 | 4416 | 1 | 4416 | 207 | 207 | 5717 | 1 | 30 | 31 | 72 |
| | | 04/26/99 | | | | | | | | | | | | |
| 2607 | HSHAX04 | 203959 | Uni-ZAP XR | 2617 | 1287 | 494 | 1285 | | 42 | 5718 | 1 | 6 | 7 | 57 |
| | | 04/26/99 | | | | | | | | | | | | |
| 2608 | HSHBT15 | 203918 | Uni-ZAP XR | 2618 | 1544 | 1 | 1528 | | 187 | 5719 | 1 | 25 | 26 | 93 |
| | | 04/08/99 | | | | | | | | | | | | |
| 2609 | HSHCE85 | PTA-181 | Uni-ZAP XR | 2619 | 1225 | 1 | 1225 | 263 | 263 | 5720 | 1 | 13 | 14 | 36 |
| | | 06/07/99 | | | | | | | | | | | | |
| 2610 | HSIAC81 | 203959 | Uni-ZAP XR | 2620 | 1913 | 1 | 1913 | 46 | 46 | 5721 | 1 | | | 21 |
| | | 04/26/99 | | | | | | | | | | | | |
| 2611 | HSIAF66 | PTA-181 | Uni-ZAP XR | 2621 | 2192 | 1 | 2192 | 74 | 74 | 5722 | 1 | 25 | 26 | 37 |
| | | 06/07/99 | | | | | | | | | | | | |
| 2612 | HSIAP01 | PTA-795 | Uni-ZAP XR | 2622 | 1385 | 1 | 855 | 90 | 90 | 5723 | 1 | 21 | 22 | 26 |
| | | 09/27/99 | | | | | | | | | | | | |
| 2613 | HSIDA33 | 203979 | Uni-ZAP XR | 2623 | 556 | 1 | 535 | | 196 | 5724 | 1 | | | 4 |
| | | 04/29/99 | | | | | | | | | | | | |
| 2614 | HSIDA39 | 203918 | Uni-ZAP XR | 2624 | 789 | 1 | 789 | | 260 | 5725 | 1 | 19 | 20 | 57 |
| | | 04/08/99 | | | | | | | | | | | | |
| 2615 | HSIDZ25 | 203918 | Uni-ZAP XR | 2625 | 1691 | 1 | 1691 | | 53 | 5726 | 1 | 11 | 12 | 111 |
| | | 04/08/99 | | | | | | | | | | | | |
| 2616 | HSIEB64 | 203918 | Uni-ZAP XR | 2626 | 2148 | 1 | 2148 | 182 | 182 | 5727 | 1 | 21 | 22 | 32 |
| | | 04/08/99 | | | | | | | | | | | | |
| 2617 | HSIEM18 | 203918 | Uni-ZAP XR | 2627 | 1111 | 1 | 1111 | 162 | 162 | 5728 | 1 | | | 15 |
| | | 04/08/99 | | | | | | | | | | | | |
| 2618 | HSIFO61 | 203979 | Uni-ZAP XR | 2628 | 2150 | 647 | 2076 | 95 | 95 | 5729 | 1 | 22 | 23 | 613 |
| | | 04/29/99 | | | | | | | | | | | | |
| 2619 | HSIFO61 | 203979 | Uni-ZAP XR | 2629 | 2238 | 735 | 2164 | 772 | 772 | 5730 | 1 | 29 | 30 | 36 |
| | | 04/29/99 | | | | | | | | | | | | |
| 2620 | HSIGC63 | PTA-791 | Uni-ZAP XR | 2630 | 1750 | 1 | 1750 | 259 | 259 | 5731 | 1 | | | 14 |
| | | 09/27/99 | | | | | | | | | | | | |
| 2621 | HSIGM95 | 203959 | Uni-ZAP XR | 2631 | 979 | 1 | 979 | 398 | 398 | 5732 | 1 | | | 1 |
| | | 04/26/99 | | | | | | | | | | | | |
| 2622 | HSJAE76 | 203917 | Uni-ZAP XR | 2632 | 2367 | 127 | 2245 | 180 | 180 | 5733 | 1 | 17 | 18 | 30 |
| | | 04/08/99 | | | | | | | | | | | | |
| 2623 | HSJAN83 | 203918 | Uni-ZAP XR | 2633 | 1092 | 1 | 1092 | | 189 | 5734 | 1 | | | 12 |
| | | 04/08/99 | | | | | | | | | | | | |
| 2624 | HSJAQ10 | PTA-181 | Uni-ZAP XR | 2634 | 954 | 1 | 954 | 56 | 56 | 5735 | 1 | 31 | 32 | 44 |
| | | 06/07/99 | | | | | | | | | | | | |
| 2625 | HSJAR59 | 203959 | Uni-ZAP XR | 2635 | 541 | 1 | 541 | 35 | 35 | 5736 | 1 | | | 31 |
| | | 04/26/99 | | | | | | | | | | | | |
| 2626 | HSJAU93 | 203918 | Uni-ZAP XR | 2636 | 1142 | 1 | 1142 | | 87 | 5737 | 1 | 35 | 36 | 181 |
| | | 04/08/99 | | | | | | | | | | | | |
| 2627 | HSJAY14 | 203959 | Uni-ZAP XR | 2637 | 1452 | 380 | 1349 | 416 | 416 | 5738 | 1 | | | 4 |
| | | 04/26/99 | | | | | | | | | | | | |
| 2628 | HSJAY14 | 203959 | Uni-ZAP XR | 2638 | 1452 | 380 | 1349 | 416 | 416 | 5739 | 1 | | | 4 |
| | | 04/26/99 | | | | | | | | | | | | |
| 2629 | HSJAY14 | 203959 | Uni-ZAP XR | 2639 | 1452 | 380 | 1349 | 416 | 416 | 5740 | 1 | | | 4 |
| | | 04/26/99 | | | | | | | | | | | | |
| 2630 | HSJAY14 | 203959 | Uni-ZAP XR | 2640 | 1452 | 380 | 1349 | 416 | 416 | 5741 | 1 | | | 4 |
| | | 04/26/99 | | | | | | | | | | | | |
| 2631 | HSJBB27 | 203918 | Uni-ZAP XR | 2641 | 1195 | 1 | 1195 | 66 | 66 | 5742 | 1 | 25 | 26 | 39 |
| | | 04/08/99 | | | | | | | | | | | | |
| 2632 | HSKBU03 | 203959 | Uni-ZAP XR | 2642 | 542 | 1 | 542 | 79 | 79 | 5743 | 1 | | | 20 |
| | | 04/26/99 | | | | | | | | | | | | |
| 2633 | HSKCQ51 | 203959 | Uni-ZAP XR | 2643 | 549 | 1 | 549 | | 235 | 5744 | 1 | 10 | 11 | 97 |
| | | 04/26/99 | | | | | | | | | | | | |
| 2634 | HSKDE13 | 203959 | Uni-ZAP XR | 2644 | 1707 | 1 | 1707 | 132 | 132 | 5745 | 1 | | | 19 |
| | | 04/26/99 | | | | | | | | | | | | |
| 2635 | HSKDS47 | 203959 | Uni-ZAP XR | 2645 | 1159 | 474 | 1159 | | 740 | 5746 | 1 | 13 | 14 | 17 |
| | | 04/26/99 | | | | | | | | | | | | |
| 2636 | HSKHV81 | 203979 | pBluescript | 2646 | 960 | 1 | 960 | 183 | 183 | 5747 | 1 | 28 | 29 | 36 |
| | | 04/29/99 | | | | | | | | | | | | |
| 2637 | HSKXB14 | 203959 | pBluescript | 2647 | 1065 | 244 | 1058 | 315 | 315 | 5748 | 1 | 20 | 21 | 38 |
| | | 04/26/99 | | | | | | | | | | | | |
| 2638 | HSKYR49 | 203959 | pBluescript | 2648 | 2631 | 1750 | 2631 | 2066 | 2066 | 5749 | 1 | 20 | 21 | 81 |
| | | 04/26/99 | | | | | | | | | | | | |
| 2639 | HSKYU81 | PTA-795 | pBluescript | 2649 | 1879 | 1 | 1879 | 121 | 121 | 5750 | 1 | 24 | 25 | 50 |
| | | 09/27/99 | | | | | | | | | | | | |
| 2640 | HSKYY92 | PTA-181 | pBluescript | 2650 | 1631 | 1 | 1631 | 133 | 133 | 5751 | 1 | | | 16 |
| | | 06/07/99 | | | | | | | | | | | | |
| 2641 | HSLAB11 | 203918 | Uni-ZAP XR | 2651 | 3382 | 1385 | 3382 | 1409 | 1409 | 5752 | 1 | 24 | 25 | 46 |
| | | 04/08/99 | | | | | | | | | | | | |
| 2642 | HSLAS96 | 203959 | Uni-ZAP XR | 2652 | 1408 | 1 | 1408 | 99 | 99 | 5753 | 1 | 16 | 17 | 26 |
| | | 04/26/99 | | | | | | | | | | | | |
| 2643 | HSLAW59 | 203918 | Uni-ZAP XR | 2653 | 583 | 1 | 583 | 18 | 18 | 5754 | 1 | 20 | 21 | 51 |
| | | 04/08/99 | | | | | | | | | | | | |
| 2644 | HSLCH54 | 203918 | Uni-ZAP XR | 2654 | 570 | 1 | 570 | | 58 | 5755 | 1 | 24 | 25 | 61 |
| | | 04/08/99 | | | | | | | | | | | | |
| 2645 | HSLCH57 | PTA-795 | Uni-ZAP XR | 2655 | 2369 | 1 | 2369 | 101 | 101 | 5756 | 1 | 28 | 29 | 115 |
| | | 09/27/99 | | | | | | | | | | | | |
| 2646 | HSLCI86 | 203959 | Uni-ZAP XR | 2656 | 1936 | 243 | 1936 | 598 | 598 | 5757 | 1 | | | 13 |
| | | 04/26/99 | | | | | | | | | | | | |
| 2647 | HSLCS31 | 203918 | Uni-ZAP XR | 2657 | 1879 | 1 | 1879 | 13 | 13 | 5758 | 1 | 25 | 26 | 345 |
| | | 04/08/99 | | | | | | | | | | | | |
| 2648 | HSLCS34 | 203918 | Uni-ZAP XR | 2658 | 1089 | 1 | 1089 | 61 | 61 | 5759 | 1 | 49 | 50 | 107 |
| | | 04/08/99 | | | | | | | | | | | | |
| 2649 | HSLCV16 | 203959 | Uni-ZAP XR | 2659 | 2957 | 746 | 2500 | 965 | 965 | 5760 | 1 | 37 | 38 | 42 |
| | | 04/26/99 | | | | | | | | | | | | |
| 2650 | HSLDW54 | PTA-181 | Uni-ZAP XR | 2660 | 1419 | 1 | 1419 | 153 | 153 | 5761 | 1 | 11 | 12 | 69 |
| | | 06/07/99 | | | | | | | | | | | | |
| 2651 | HSLEC18 | 203959 | Uni-ZAP XR | 2661 | 2043 | 1 | 2043 | 270 | 270 | 5762 | 1 | 26 | 27 | 350 |
| | | 04/26/99 | | | | | | | | | | | | |
| 2652 | HSLEG59 | 203918 | Uni-ZAP XR | 2662 | 1484 | 1 | 1484 | 87 | 87 | 5763 | 1 | 28 | 29 | 36 |
| | | 04/08/99 | | | | | | | | | | | | |
| 2653 | HSLFR59 | PTA-181 | Uni-ZAP XR | 2663 | 2865 | 1 | 2865 | 320 | 320 | 5764 | 1 | 19 | 20 | 58 |
| | | 06/07/99 | | | | | | | | | | | | |
| 2654 | HSLGD91 | PTA-792 | Uni-ZAP XR | 2664 | 1272 | 834 | 1272 | | 70 | 5765 | 1 | | | 5 |
| | | 09/27/99 | | | | | | | | | | | | |
| 2655 | HSLGF66 | 203959 | Uni-ZAP XR | 2665 | 1529 | 1 | 1529 | 226 | 226 | 5766 | 1 | 9 | 10 | 10 |
| | | 04/26/99 | | | | | | | | | | | | |
| 2656 | HSLGF70 | 203959 | Uni-ZAP XR | 2666 | 1314 | 1 | 1314 | 890 | 890 | 5767 | 1 | 16 | 17 | 30 |
| | | 04/26/99 | | | | | | | | | | | | |
| 2657 | HSLGP68 | PTA-181 | Uni-ZAP XR | 2667 | 2354 | 1 | 2354 | 166 | 166 | 5768 | 1 | 19 | 20 | 26 |
| | | 06/07/99 | | | | | | | | | | | | |
| 2658 | HSNAB88 | 203918 | Uni-ZAP XR | 2668 | 744 | 1 | 744 | 262 | 262 | 5769 | 1 | 12 | 13 | 15 |
| | | 04/08/99 | | | | | | | | | | | | |
| 2659 | HSNAH56 | 203918 | Uni-ZAP XR | 2669 | 372 | 1 | 372 | 171 | 171 | 5770 | 1 | 23 | 24 | 45 |
| | | 04/08/99 | | | | | | | | | | | | |
| 2660 | HSNAN38 | PTA-181 | Uni-ZAP XR | 2670 | 427 | 1 | 427 | 240 | 240 | 5771 | 1 | 13 | 14 | 53 |
| | | 06/07/99 | | | | | | | | | | | | |
| 2661 | HSNAO19 | 203959 | Uni-ZAP XR | 2671 | 304 | 1 | 304 | 226 | 226 | 5772 | 1 | | | 4 |
| | | 04/26/99 | | | | | | | | | | | | |
| 2662 | HSNAQ52 | 203918 | Uni-ZAP XR | 2672 | 400 | 1 | 400 | | 218 | 5773 | 1 | | | 9 |
| | | 04/08/99 | | | | | | | | | | | | |
| 2663 | HSNAT08 | 203918 | Uni-ZAP XR | 2673 | 703 | 1 | 703 | 25 | 25 | 5774 | 1 | 30 | 31 | 46 |
| | | 04/08/99 | | | | | | | | | | | | |
| 2664 | HSNAW06 | 203918 | Uni-ZAP XR | 2674 | 675 | 1 | 675 | | 174 | 5775 | 1 | 8 | 9 | 12 |
| | | 04/08/99 | | | | | | | | | | | | |
| 2665 | HSNAW37 | 203918 | Uni-ZAP XR | 2675 | 432 | 1 | 432 | | 237 | 5776 | 1 | 10 | 11 | 28 |
| | | 04/08/99 | | | | | | | | | | | | |
| 2666 | HSNBJ05 | 203918 | Uni-ZAP XR | 2676 | 794 | 1 | 794 | 136 | 136 | 5777 | 1 | 13 | 14 | 34 |
| | | 04/08/99 | | | | | | | | | | | | |
| 2667 | HSNBO90 | 203918 | Uni-ZAP XR | 2677 | 425 | 1 | 425 | 286 | 286 | 5778 | 1 | | | 16 |
| | | 04/08/99 | | | | | | | | | | | | |
| 2668 | HSNBQ36 | 203918 | Uni-ZAP XR | 2678 | 1489 | 781 | 1489 | 838 | 838 | 5779 | 1 | 27 | 28 | 29 |
| | | 04/08/99 | | | | | | | | | | | | |
| 2669 | HSNBS39 | 203918 | Uni-ZAP XR | 2679 | 323 | 1 | 323 | 190 | 190 | 5780 | 1 | | | 14 |
| | | 04/08/99 | | | | | | | | | | | | |
| 2670 | HSOAE34 | 203959 | Uni-ZAP XR | 2680 | 674 | 1 | 674 | 231 | 231 | 5781 | 1 | | | 8 |
| | | 04/26/99 | | | | | | | | | | | | |
| 2671 | HSOAT44 | 203949 | Uni-ZAP XR | 2681 | 650 | 1 | 650 | 31 | 31 | 5782 | 1 | 18 | 19 | 55 |
| | | 04/29/99 | | | | | | | | | | | | |
| 2672 | HSOBB94 | 203959 | Uni-ZAP XR | 2682 | 757 | 1 | 757 | | 565 | 5783 | 1 | 10 | 11 | 55 |
| | | 04/26/99 | | | | | | | | | | | | |
| 2673 | HSOBH11 | 203959 | Uni-ZAP XR | 2683 | 818 | 1 | 818 | 131 | 131 | 5784 | 1 | | | 12 |
| | | 04/26/99 | | | | | | | | | | | | |
| 2674 | HSOBP75 | 203959 | Uni-ZAP XR | 2684 | 821 | 1 | 821 | | 438 | 5785 | 1 | 15 | 16 | 43 |
| | | 04/26/99 | | | | | | | | | | | | |
| 2675 | HSOBW65 | 203959 | Uni-ZAP XR | 2685 | 735 | 1 | 735 | 387 | 387 | 5786 | 1 | | | 18 |
| | | 04/26/99 | | | | | | | | | | | | |
| 2676 | HSPAA89 | 203918 | pSport1 | 2686 | 1372 | 1 | 1372 | 252 | 252 | 5787 | 1 | 20 | 21 | 55 |
| | | 04/08/99 | | | | | | | | | | | | |
| 2677 | HSPAC13 | 203918 | pSport1 | 2687 | 580 | 1 | 580 | 33 | 33 | 5788 | 1 | 21 | 22 | 37 |
| | | 04/08/99 | | | | | | | | | | | | |
| 2678 | HSPAG75 | PTA-793 | pSport1 | 2688 | 2120 | 1 | 2120 | 246 | 246 | 5789 | 1 | 19 | 20 | 37 |
| | | 09/27/99 | | | | | | | | | | | | |
| 2679 | HSPAI20 | 203918 | pSport1 | 2689 | 1467 | 1 | 1467 | 261 | 261 | 5790 | 1 | 20 | 21 | 44 |
| | | 04/08/99 | | | | | | | | | | | | |
| 2680 | HSPAL59 | PTA-181 | pSport1 | 2690 | 1917 | 113 | 1383 | 250 | 250 | 5791 | 1 | 19 | 20 | 33 |
| | | 06/07/99 | | | | | | | | | | | | |
| 2681 | HSPAY90 | 203959 | pSport1 | 2691 | 1164 | 1 | 1164 | 190 | 190 | 5792 | 1 | 29 | 30 | 49 |
| | | 04/26/99 | | | | | | | | | | | | |
| 2682 | HSPMF63 | 203959 | pSport1 | 2692 | 1180 | 1 | 1148 | | 179 | 5793 | 1 | 18 | 19 | 33 |
| | | 04/26/99 | | | | | | | | | | | | |
| 2683 | HSQAC69 | PTA-791 | Uni-ZAP XR | 2693 | 2056 | 526 | 2056 | 671 | 671 | 5794 | 1 | 21 | 22 | 45 |
| | | 09/27/99 | | | | | | | | | | | | |
| 2684 | HSQAH14 | 203959 | Uni-ZAP XR | 2694 | 825 | 137 | 825 | | 267 | 5795 | 1 | | | 13 |
| | | 04/26/99 | | | | | | | | | | | | |
| 2685 | HSQAX94 | 203918 | Uni-ZAP XR | 2695 | 3107 | 814 | 3107 | 886 | 886 | 5796 | 1 | 33 | 34 | 81 |
| | | 04/08/99 | | | | | | | | | | | | |
| 2686 | HSQBL20 | 203959 | Uni-ZAP XR | 2696 | 939 | 405 | 918 | 183 | 183 | 5797 | 1 | 1 | 2 | 218 |
| | | 04/26/99 | | | | | | | | | | | | |
| 2687 | HSQCQ45 | 203918 | Uni-ZAP XR | 2697 | 588 | 1 | 588 | 41 | 41 | 5798 | 1 | 25 | 26 | 30 |
| | | 04/08/99 | | | | | | | | | | | | |
| 2688 | HSQCY74 | PTA-793 | Uni-ZAP XR | 2698 | 2317 | 280 | 2317 | 440 | 440 | 5799 | 1 | | | 12 |
| | | 09/27/99 | | | | | | | | | | | | |
| 2689 | HSQDM74 | 203918 | Uni-ZAP XR | 2699 | 1290 | 1 | 1290 | 192 | 192 | 5800 | 1 | 22 | 23 | 27 |
| | | 04/08/99 | | | | | | | | | | | | |
| 2690 | HSQEG23 | 203959 | Uni-ZAP XR | 2700 | 2290 | 188 | 1071 | | 302 | 5801 | 1 | 17 | 18 | 22 |
| | | 04/26/99 | | | | | | | | | | | | |
| 2691 | HSQEG47 | 203959 | Uni-ZAP XR | 2701 | 1934 | 883 | 1905 | | 1001 | 5802 | 1 | | | 12 |
| | | 04/26/99 | | | | | | | | | | | | |
| 2692 | HSQFE72 | 203917 | Uni-ZAP XR | 2702 | 357 | 0 | 1 | 93 | 93 | 5803 | 1 | | | 27 |
| | | 04/08/99 | | | | | | | | | | | | |
| 2693 | HSQFE76 | PTA-181 | Uni-ZAP XR | 2703 | 1469 | 7 | 1469 | 31 | 31 | 5804 | 1 | 19 | 20 | 31 |
| | | 06/07/99 | | | | | | | | | | | | |
| 2694 | HSQFV12 | 203918 | Uni-ZAP XR | 2704 | 567 | 1 | 567 | | 267 | 5805 | 1 | 7 | 8 | 30 |
| | | 04/08/99 | | | | | | | | | | | | |
| 2695 | HSRAA81 | 203918 | Uni-ZAP XR | 2705 | 1679 | 1 | 1679 | 235 | 235 | 5806 | 1 | 18 | 19 | 43 |
| | | 04/08/99 | | | | | | | | | | | | |
| 2696 | HSRAO56 | 203959 | Uni-ZAP XR | 2706 | 1598 | 11 | 1598 | | 131 | 5807 | 1 | 19 | 20 | 20 |
| | | 04/26/99 | | | | | | | | | | | | |
| 2697 | HSRAV28 | 203918 | Uni-ZAP XR | 2707 | 824 | 1 | 824 | | 301 | 5808 | 1 | | | 14 |
| | | 04/08/99 | | | | | | | | | | | | |
| 2698 | HSRDM56 | 203918 | Uni-ZAP XR | 2708 | 2023 | 1 | 2023 | 134 | 134 | 5809 | 1 | 27 | 28 | 73 |
| | | 04/08/99 | | | | | | | | | | | | |
| 2699 | HSRDW57 | 203918 | Uni-ZAP XR | 2709 | 942 | 1 | 942 | | 8 | 5810 | 1 | 20 | 21 | 117 |
| | | 04/08/99 | | | | | | | | | | | | |
| 2700 | HSREC72 | 203918 | Uni-ZAP XR | 2710 | 884 | 1 | 884 | 172 | 172 | 5811 | 1 | 22 | 23 | 34 |
| | | 04/08/99 | | | | | | | | | | | | |
| 2701 | HSREG42 | 203959 | Uni-ZAP XR | 2711 | 2637 | 578 | 2282 | 730 | 730 | 5812 | 1 | | | 27 |
| | | 04/26/99 | | | | | | | | | | | | |
| 2702 | HSRFD18 | 203959 | Uni-ZAP XR | 2712 | 1889 | 1 | 1793 | 67 | 67 | 5813 | 1 | 20 | 21 | 28 |
| | | 04/26/99 | | | | | | | | | | | | |
| 2703 | HSRGZ11 | 203959 | Uni-ZAP XR | 2713 | 785 | 1 | 785 | 208 | 208 | 5814 | 1 | | | 14 |
| | | 04/26/99 | | | | | | | | | | | | |
| 2704 | HSRHB59 | 203959 | Uni-ZAP XR | 2714 | 854 | 1 | 844 | 308 | 308 | 5815 | 1 | 19 | 20 | 56 |
| | | 04/26/99 | | | | | | | | | | | | |
| 2705 | HSSAN03 | 203918 | Uni-ZAP XR | 2715 | 753 | 1 | 753 | 130 | 130 | 5816 | 1 | 18 | 19 | 39 |
| | | 04/08/99 | | | | | | | | | | | | |
| 2706 | HSSCC66 | 203918 | Uni-ZAP XR | 2716 | 864 | 1 | 864 | 174 | 174 | 5817 | 1 | 18 | 19 | 36 |
| | | 04/08/99 | | | | | | | | | | | | |
| 2707 | HSSDI13 | 203918 | Uni-ZAP XR | 2717 | 1863 | 1 | 1863 | 107 | 107 | 5818 | 1 | 25 | 26 | 36 |
| | | 04/08/99 | | | | | | | | | | | | |
| 2708 | HSSDQ20 | 203959 | Uni-ZAP XR | 2718 | 1114 | 69 | 1114 | 261 | 261 | 5819 | 1 | 23 | 24 | 92 |
| | | 04/26/99 | | | | | | | | | | | | |
| 2709 | HSSDX38 | 203959 | Uni-ZAP XR | 2719 | 796 | 1 | 796 | | 244 | 5820 | 1 | 16 | 17 | 22 |
| | | 04/26/99 | | | | | | | | | | | | |
| 2710 | HSSED57 | 203918 | Uni-ZAP XR | 2720 | 1545 | 1 | 1545 | 191 | 191 | 5821 | 1 | 38 | 39 | 70 |
| | | 04/08/99 | | | | | | | | | | | | |
| 2711 | HSSEL28 | 203959 | Uni-ZAP XR | 2721 | 1733 | 1 | 1733 | | 166 | 5822 | 1 | 18 | 19 | 27 |
| | | 04/26/99 | | | | | | | | | | | | |
| 2712 | HSSFP88 | 203918 | Uni-ZAP XR | 2722 | 1417 | 1 | 1417 | 141 | 141 | 5823 | 1 | 24 | 25 | 350 |
| | | 04/08/99 | | | | | | | | | | | | |
| 2713 | HSSGS62 | 203918 | Uni-ZAP XR | 2723 | 1389 | 1 | 1389 | 249 | 249 | 5824 | 1 | 19 | 20 | 55 |
| | | 04/08/99 | | | | | | | | | | | | |
| 2714 | HSSJA23 | 203979 | Uni-ZAP XR | 2724 | 1988 | 1 | 1988 | 261 | 261 | 5825 | 1 | 16 | 17 | 27 |
| | | 04/29/99 | | | | | | | | | | | | |
| 2715 | HSSJF26 | 203918 | Uni-ZAP XR | 2725 | 1301 | 1 | 1301 | 177 | 177 | 5826 | 1 | 32 | 33 | 71 |
| | | 04/08/99 | | | | | | | | | | | | |
| 2716 | HSSJF96 | PTA-181 | Uni-ZAP XR | 2726 | 2192 | 1 | 2192 | 14 | 14 | 5827 | 1 | 19 | 20 | 57 |
| | | 06/07/99 | | | | | | | | | | | | |
| 2717 | HSSJM47 | 203949 | Uni-ZAP XR | 2727 | 1152 | 1 | 1000 | | 151 | 5828 | 1 | | | 2 |
| | | 04/29/99 | | | | | | | | | | | | |
| 2718 | HSSJW30 | 203979 | Uni-ZAP XR | 2728 | 1893 | 581 | 1880 | | 713 | 5829 | 1 | 15 | 16 | 24 |
| | | 04/29/99 | | | | | | | | | | | | |
| 2719 | HSSJW30 | 203979 | Uni-ZAP XR | 2729 | 2108 | 796 | 2095 | | 928 | 5830 | 1 | 15 | 16 | 24 |
| | | 04/29/99 | | | | | | | | | | | | |
| 2720 | HSSJW30 | 203979 | Uni-ZAP XR | 2730 | 2266 | 935 | 2234 | | 1067 | 5831 | 1 | 15 | 16 | 24 |
| | | 04/29/99 | | | | | | | | | | | | |
| 2721 | HSSMY35 | 203959 | Uni-ZAP XR | 2731 | 831 | 10 | 831 | 42 | 42 | 5832 | 1 | 19 | 20 | 54 |
| | | 04/26/99 | | | | | | | | | | | | |
| 2722 | HSTAL93 | 203918 | Uni-ZAP XR | 2732 | 972 | 1 | 972 | 127 | 127 | 5833 | 1 | | | 13 |
| | | 04/08/99 | | | | | | | | | | | | |
| 2723 | HSTBG23 | 203918 | Uni-ZAP XR | 2733 | 1695 | 1 | 1695 | 96 | 96 | 5834 | 1 | 26 | 27 | 31 |
| | | 04/08/99 | | | | | | | | | | | | |
| 2724 | HSUAF06 | PTA-181 | Uni-ZAP XR | 2734 | 1320 | 1 | 1320 | 109 | 109 | 5835 | 1 | 20 | 21 | 89 |
| | | 06/07/99 | | | | | | | | | | | | |
| 2725 | HSUBX67 | 203918 | Uni-ZAP XR | 2735 | 805 | 1 | 805 | | 295 | 5836 | 1 | | | 11 |
| | | 04/08/99 | | | | | | | | | | | | |
| 2726 | HSUSB73 | 203918 | pBluescript | 2736 | 1538 | 1 | 1538 | 158 | 158 | 5837 | 1 | 23 | 24 | 91 |
| | | 04/08/99 | | | | | | | | | | | | |
| 2727 | HSVAC05 | 203979 | Uni-ZAP XR | 2737 | 698 | 1 | 698 | 60 | 60 | 5838 | 1 | 32 | 33 | 37 |
| | | 04/29/99 | | | | | | | | | | | | |
| 2728 | HSVAE42 | 203918 | Uni-ZAP XR | 2738 | 525 | 1 | 525 | | 295 | 5839 | 1 | 11 | 12 | 40 |
| | | 04/08/99 | | | | | | | | | | | | |
| 2729 | HSVAL83 | 203959 | Uni-ZAP XR | 2739 | 861 | 1 | 861 | 308 | 308 | 5840 | 1 | 32 | 33 | 36 |
| | | 04/26/99 | | | | | | | | | | | | |
| 2730 | HSVAT36 | 203959 | Uni-ZAP XR | 2740 | 571 | 1 | 571 | | 162 | 5841 | 1 | | | 2 |
| | | 04/26/99 | | | | | | | | | | | | |
| 2731 | HSVAV02 | 203959 | Uni-ZAP XR | 2741 | 446 | 1 | 446 | 309 | 309 | 5842 | 1 | | | 31 |
| | | 04/26/99 | | | | | | | | | | | | |
| 2732 | HSVBA83 | 203959 | Uni-ZAP XR | 2742 | 780 | 1 | 780 | 139 | 139 | 5843 | 1 | | | 15 |
| | | 04/26/99 | | | | | | | | | | | | |
| 2733 | HSVBD37 | 203959 | Uni-ZAP XR | 2743 | 464 | 1 | 464 | 146 | 146 | 5844 | 1 | | | 6 |
| | | 04/26/99 | | | | | | | | | | | | |
| 2734 | HSVBN46 | 203959 | Uni-ZAP XR | 2744 | 785 | 1 | 785 | 120 | 120 | 5845 | 1 | 21 | 22 | 44 |
| | | 04/26/99 | | | | | | | | | | | | |
| 2735 | HSVBY62 | 203959 | Uni-ZAP XR | 2745 | 410 | 1 | 410 | | 188 | 5846 | 1 | 23 | 24 | 28 |
| | | 04/26/99 | | | | | | | | | | | | |
| 2736 | HSVBZ53 | 203959 | Uni-ZAP XR | 2746 | 1304 | 317 | 1243 | 461 | 461 | 5847 | 1 | 16 | 17 | 25 |
| | | 04/26/99 | | | | | | | | | | | | |
| 2737 | HSVCF53 | 203959 | Uni-ZAP XR | 2747 | 1248 | 1 | 1248 | 259 | 259 | 5848 | 1 | | | 23 |
| | | 04/26/99 | | | | | | | | | | | | |
| 2738 | HSWAZ17 | 203918 | pCMVSport 3.0 | 2748 | 914 | 1 | 914 | 257 | 257 | 5849 | 1 | | | 18 |
| | | 04/08/99 | | | | | | | | | | | | |
| 2739 | HSWBI16 | 203959 | pCMVSport 3.0 | 2749 | 1122 | 627 | 1122 | 817 | 817 | 5850 | 1 | 20 | 21 | 21 |
| | | 04/26/99 | | | | | | | | | | | | |
| 2740 | HSXAI44 | 203918 | Uni-ZAP XR | 2750 | 1041 | 1 | 1041 | 132 | 132 | 5851 | 1 | | | 26 |
| | | 04/08/99 | | | | | | | | | | | | |
| 2741 | HSXAJ07 | 203918 | Uni-ZAP XR | 2751 | 900 | 1 | 900 | 217 | 217 | 5852 | 1 | | | 5 |
| | | 04/08/99 | | | | | | | | | | | | |
| 2742 | HSXAS59 | 203959 | Uni-ZAP XR | 2752 | 1536 | 94 | 1536 | | 244 | 5853 | 1 | 30 | 31 | 92 |
| | | 04/26/99 | | | | | | | | | | | | |
| 2743 | HSXAX20 | 203918 | Uni-ZAP XR | 2753 | 1388 | 1 | 1388 | | 347 | 5854 | 1 | | | 9 |
| | | 04/08/99 | | | | | | | | | | | | |
| 2744 | HSXAY60 | 203959 | Uni-ZAP XR | 2754 | 1769 | 1 | 1769 | 345 | 345 | 5855 | 1 | 13 | 14 | 100 |
| | | 04/26/99 | | | | | | | | | | | | |
| 2745 | HSXBB78 | 203918 | Uni-ZAP XR | 2755 | 1502 | 1 | 1502 | 156 | 156 | 5856 | 1 | | | 16 |
| | | 04/08/99 | | | | | | | | | | | | |
| 2746 | HSXCA83 | 203959 | Uni-ZAP XR | 2756 | 2199 | 1413 | 2199 | | 1796 | 5857 | 1 | | | 16 |
| | | 04/26/99 | | | | | | | | | | | | |
| 2747 | HSXCX20 | 203959 | Uni-ZAP XR | 2757 | 1385 | 1 | 1385 | | 95 | 5858 | 1 | 12 | 13 | 36 |
| | | 04/26/99 | | | | | | | | | | | | |
| 2748 | HSXFG21 | 203917 | Uni-ZAP XR | 2758 | 3787 | 738 | 3787 | | 989 | 5859 | 1 | | | 1 |
| | | 04/08/99 | | | | | | | | | | | | |
| 2749 | HSXFH82 | 203959 | Uni-ZAP XR | 2759 | 1705 | 1 | 1678 | | 182 | 5860 | 1 | 17 | 18 | 34 |
| | | 04/26/99 | | | | | | | | | | | | |
| 2750 | HSYBD33 | 203918 | pCMVSport 3.0 | 2760 | 1067 | 1 | 1067 | | 329 | 5861 | 1 | 19 | 20 | 52 |
| | | 04/08/99 | | | | | | | | | | | | |
| 2751 | HSYBR79 | PTA-791 | pCMVSport 3.0 | 2761 | 2270 | 6 | 2264 | 425 | 425 | 5862 | 1 | 23 | 24 | 57 |
| | | 09/27/99 | | | | | | | | | | | | |
| 2752 | HSYBV44 | 203959 | pCMVSport 3.0 | 2762 | 778 | 1 | 778 | 84 | 84 | 5863 | 1 | 32 | 33 | 47 |
| | | 04/26/99 | | | | | | | | | | | | |
| 2753 | HSYBZ94 | 203959 | pCMVSport 3.0 | 2763 | 3268 | 1 | 3268 | 52 | 52 | 5864 | 1 | 35 | 36 | 79 |
| | | 04/26/99 | | | | | | | | | | | | |
| 2754 | HT3AB13 | 203949 | Uni-ZAP XR | 2764 | 3350 | 1954 | 3315 | 2055 | 2055 | 5865 | 1 | 21 | 22 | 63 |
| | | 04/29/99 | | | | | | | | | | | | |
| 2755 | HT4SB02 | 203917 | Uni-ZAP XR | 2765 | 3054 | 95 | 1189 | 21 | 21 | 5866 | 1 | 1 | 2 | 168 |
| | | 04/08/99 | | | | | | | | | | | | |
| 2756 | HT4SB37 | 203918 | Uni-ZAP XR | 2766 | 1029 | 1 | 1029 | 299 | 299 | 5867 | 1 | 33 | 34 | 35 |
| | | 04/08/99 | | | | | | | | | | | | |
| 2757 | HT4SB81 | 203959 | Uni-ZAP XR | 2767 | 2319 | 959 | 2319 | 1168 | 1168 | 5868 | 1 | 13 | 14 | 35 |
| | | 04/26/99 | | | | | | | | | | | | |
| 2758 | HT4SB81 | 203959 | Uni-ZAP XR | 2768 | 2331 | 962 | 2320 | 1171 | 1171 | 5869 | 1 | 13 | 14 | 35 |
| | | 04/26/99 | | | | | | | | | | | | |
| 2759 | HT4SB81 | 203959 | Uni-ZAP XR | 2769 | 2331 | 962 | 2320 | 1171 | 1171 | 5870 | 1 | 13 | 14 | 35 |
| | | 04/26/99 | | | | | | | | | | | | |
| 2760 | HT5FX76 | 203959 | Uni-ZAP XR | 2770 | 643 | 1 | 643 | 98 | 98 | 5871 | 1 | 32 | 33 | 52 |
| | | 04/26/99 | | | | | | | | | | | | |
| 2761 | HTABF81 | 203918 | Uni-ZAP XR | 2771 | 1620 | 1 | 1620 | 255 | 255 | 5872 | 1 | | | 15 |
| | | 04/08/99 | | | | | | | | | | | | |
| 2762 | HTACX63 | 203959 | Uni-ZAP XR | 2772 | 1095 | 1 | 1095 | 202 | 202 | 5873 | 1 | | | 18 |
| | | 04/26/99 | | | | | | | | | | | | |
| 2763 | HTADC63 | 203979 | Uni-ZAP XR | 2773 | 2458 | 1 | 2406 | | 188 | 5874 | 1 | 17 | 18 | 215 |
| | | 04/29/99 | | | | | | | | | | | | |
| 2764 | HTADO61 | 203959 | Uni-ZAP XR | 2774 | 1127 | 1 | 1127 | 217 | 217 | 5875 | 1 | 28 | 29 | 39 |
| | | 04/26/99 | | | | | | | | | | | | |
| 2765 | HTADQ22 | 203918 | Uni-ZAP XR | 2775 | 378 | 1 | 378 | 205 | 205 | 5876 | 1 | 23 | 24 | 24 |
| | | 04/08/99 | | | | | | | | | | | | |
| 2766 | HTAEC59 | 203979 | Uni-ZAP XR | 2776 | 2056 | 1 | 2056 | | 287 | 5877 | 1 | 16 | 17 | 21 |
| | | 04/29/99 | | | | | | | | | | | | |
| 2767 | HTAED89 | 203918 | Uni-ZAP XR | 2777 | 2366 | 1 | 2366 | 979 | 979 | 5878 | 1 | 16 | 17 | 200 |
| | | 04/08/99 | | | | | | | | | | | | |
| 2768 | HTAEF02 | 203979 | Uni-ZAP XR | 2778 | 2761 | 1 | 2761 | 183 | 183 | 5879 | 1 | 16 | 17 | 51 |
| | | 04/29/99 | | | | | | | | | | | | |
| 2769 | HTAEH58 | 203959 | Uni-ZAP XR | 2779 | 1601 | 147 | 1601 | | 295 | 5880 | 1 | 15 | 16 | 54 |
| | | 04/26/99 | | | | | | | | | | | | |
| 2770 | HTAEO35 | 203959 | Uni-ZAP XR | 2780 | 1514 | 1 | 1514 | 63 | 63 | 5881 | 1 | 33 | 34 | 35 |
| | | 04/26/99 | | | | | | | | | | | | |
| 2771 | HTDAF68 | 203918 | pSport1 | 2781 | 1079 | 1 | 1079 | 167 | 167 | 5882 | 1 | 34 | 35 | 54 |
| | | 04/08/99 | | | | | | | | | | | | |
| 2772 | HTDAI38 | PTA-792 | pSport1 | 2782 | 2814 | 1188 | 2796 | 1414 | 1414 | 5883 | 1 | 21 | 22 | 76 |
| | | 09/27/99 | | | | | | | | | | | | |
| 2773 | HTEAJ87 | PTA-181 | Uni-ZAP XR | 2783 | 2200 | 1 | 2200 | 67 | 67 | 5884 | 1 | 24 | 25 | 38 |
| | | 06/07/99 | | | | | | | | | | | | |
| 2774 | HTEAN76 | 203959 | Uni-ZAP XR | 2784 | 966 | 188 | 955 | 290 | 290 | 5885 | 1 | 31 | 32 | 37 |
| | | 04/26/99 | | | | | | | | | | | | |
| 2775 | HTEBL56 | 203918 | Uni-ZAP XR | 2785 | 1512 | 1 | 1512 | 180 | 180 | 5886 | 1 | 15 | 16 | 21 |
| | | 04/08/99 | | | | | | | | | | | | |
| 2776 | HTECE87 | 203959 | Uni-ZAP XR | 2786 | 946 | 1 | 946 | 157 | 157 | 5887 | 1 | 33 | 34 | 41 |
| | | 04/26/99 | | | | | | | | | | | | |
| 2777 | HTEDF78 | 203918 | Uni-ZAP XR | 2787 | 1570 | 1 | 1570 | 83 | 83 | 5888 | 1 | 34 | 35 | 53 |
| | | 04/08/99 | | | | | | | | | | | | |
| 2778 | HTEDT87 | 203979 | Uni-ZAP XR | 2788 | 2418 | 726 | 2418 | 949 | 949 | 5889 | 1 | | | 17 |
| | | 04/29/99 | | | | | | | | | | | | |
| 2779 | HTEDX05 | PTA-181 | Uni-ZAP XR | 2789 | 2220 | 1 | 2220 | 65 | 65 | 5890 | 1 | 18 | 19 | 20 |
| | | 06/07/99 | | | | | | | | | | | | |
| 2780 | HTEEC19 | PTA-181 | Uni-ZAP XR | 2790 | 1721 | 1 | 1721 | 72 | 72 | 5891 | 1 | 21 | 22 | 30 |
| | | 06/07/99 | | | | | | | | | | | | |
| 2781 | HTEGH03 | 203959 | Uni-ZAP XR | 2791 | 2267 | 91 | 2248 | 156 | 156 | 5892 | 1 | 19 | 20 | 33 |
| | | 04/26/99 | | | | | | | | | | | | |
| 2782 | HTEGH03 | 203959 | Uni-ZAP XR | 2792 | 2158 | 1 | 2151 | | 1 | 5893 | 1 | 1 | 2 | 233 |
| | | 04/26/99 | | | | | | | | | | | | |
| 2783 | HTEGS48 | 203918 | Uni-ZAP XR | 2793 | 763 | 1 | 763 | 289 | 289 | 5894 | 1 | 20 | 21 | 49 |
| | | 04/08/99 | | | | | | | | | | | | |
| 2784 | HTEGY81 | 203918 | Uni-ZAP XR | 2794 | 1134 | 1 | 1134 | 36 | 36 | 5895 | 1 | | | 20 |
| | | 04/08/99 | | | | | | | | | | | | |
| 2785 | HTEHB11 | 203959 | Uni-ZAP XR | 2795 | 963 | 1 | 963 | 271 | 271 | 5896 | 1 | | | 12 |
| | | 04/26/99 | | | | | | | | | | | | |
| 2786 | HTEHB49 | 203959 | Uni-ZAP XR | 2796 | 1876 | 1 | 1738 | 192 | 192 | 5897 | 1 | 20 | 21 | 35 |
| | | 04/26/99 | | | | | | | | | | | | |
| 2787 | HTEHS91 | PTA-181 | Uni-ZAP XR | 2797 | 2202 | 1 | 2186 | 343 | 343 | 5898 | 1 | 17 | 18 | 66 |
| | | 06/07/99 | | | | | | | | | | | | |
| 2788 | HTEHV60 | 203918 | Uni-ZAP XR | 2798 | 1316 | 1 | 1316 | 38 | 38 | 5899 | 1 | 23 | 24 | 30 |
| | | 04/08/99 | | | | | | | | | | | | |
| 2789 | HTEHW80 | PTA-181 | Uni-ZAP XR | 2799 | 1167 | 1 | 1167 | | 96 | 5900 | 1 | 12 | 13 | 29 |
| | | 06/07/99 | | | | | | | | | | | | |
| 2790 | HTEID25 | 203959 | Uni-ZAP XR | 2800 | 1436 | 1 | 1436 | 141 | 141 | 5901 | 1 | 18 | 19 | 38 |
| | | 04/26/99 | | | | | | | | | | | | |
| 2791 | HTEIJ23 | 203917 | Uni-ZAP XR | 2801 | 2593 | 1 | 1398 | 156 | 156 | 5902 | 1 | | | 17 |
| | | 04/08/99 | | | | | | | | | | | | |
| 2792 | HTEIM62 | 203959 | Uni-ZAP XR | 2802 | 673 | 196 | 673 | 183 | 183 | 5903 | 1 | | | 24 |
| | | 04/26/99 | | | | | | | | | | | | |
| 2793 | HTEIV33 | 203959 | Uni-ZAP XR | 2803 | 1051 | 1 | 1051 | | 207 | 5904 | 1 | | | 6 |
| | | 04/26/99 | | | | | | | | | | | | |
| 2794 | HTEIV65 | 203918 | Uni-ZAP XR | 2804 | 743 | 1 | 743 | 102 | 102 | 5905 | 1 | 20 | 21 | 41 |
| | | 04/08/99 | | | | | | | | | | | | |
| 2795 | HTEJC50 | 203959 | Uni-ZAP XR | 2805 | 429 | 1 | 429 | 96 | 96 | 5906 | 1 | 21 | 22 | 29 |
| | | 04/26/99 | | | | | | | | | | | | |
| 2796 | HTEJD20 | 203918 | Uni-ZAP XR | 2806 | 1471 | 1 | 1471 | 257 | 257 | 5907 | 1 | | | 11 |
| | | 04/08/99 | | | | | | | | | | | | |
| 2797 | HTEJD61 | 203959 | Uni-ZAP XR | 2807 | 1154 | 1 | 1154 | 94 | 94 | 5908 | 1 | 23 | 24 | 24 |
| | | 04/26/99 | | | | | | | | | | | | |
| 2798 | HTEJF31 | 203959 | Uni-ZAP XR | 2808 | 395 | 1 | 395 | 124 | 124 | 5909 | 1 | 18 | 19 | 40 |
| | | 04/26/99 | | | | | | | | | | | | |
| 2799 | HTEJI29 | 203959 | Uni-ZAP XR | 2809 | 975 | 1 | 975 | 298 | 298 | 5910 | 1 | 15 | 16 | 17 |
| | | 04/26/99 | | | | | | | | | | | | |
| 2800 | HTEJL16 | 203959 | Uni-ZAP XR | 2810 | 1158 | 1 | 1158 | 136 | 136 | 5911 | 1 | 26 | 27 | 37 |
| | | 04/26/99 | | | | | | | | | | | | |
| 2801 | HTEJP65 | 203918 | Uni-ZAP XR | 2811 | 754 | 1 | 754 | 389 | 389 | 5912 | 1 | 20 | 21 | 33 |
| | | 04/08/99 | | | | | | | | | | | | |
| 2802 | HTEJY20 | 203959 | Uni-ZAP XR | 2812 | 2908 | 1602 | 2908 | 1747 | 1747 | 5913 | 1 | 18 | 19 | 44 |
| | | 04/26/99 | | | | | | | | | | | | |
| 2803 | HTEKD35 | 203959 | Uni-ZAP XR | 2813 | 688 | 1 | 688 | 41 | 41 | 5914 | 1 | 15 | 16 | 31 |
| | | 04/26/99 | | | | | | | | | | | | |
| 2804 | HTEKP82 | 203959 | Uni-ZAP XR | 2814 | 930 | 1 | 930 | 457 | 457 | 5915 | 1 | 15 | 16 | 35 |
| | | 04/26/99 | | | | | | | | | | | | |
| 2805 | HTEKV69 | PTA-792 | Uni-ZAP XR | 2815 | 1663 | 1 | 1663 | 634 | 634 | 5916 | 1 | 33 | 34 | 322 |
| | | 09/27/99 | | | | | | | | | | | | |
| 2806 | HTEKZ52 | 203959 | Uni-ZAP XR | 2816 | 288 | 1 | 288 | 146 | 146 | 5917 | 1 | 23 | 24 | 32 |
| | | 04/26/99 | | | | | | | | | | | | |
| 2807 | HTEQG28 | 203959 | Uni-ZAP XR | 2817 | 1719 | 1 | 1719 | | 389 | 5918 | 1 | 15 | 16 | 21 |
| | | 04/26/99 | | | | | | | | | | | | |
| 2808 | HTFOB75 | PTA-1838 | pSport1 | 2818 | 3299 | 1996 | 3274 | 2365 | 2365 | 5919 | 1 | 46 | 47 | 142 |
| | | 05/09/00 | | | | | | | | | | | | |
| 2809 | HTGAA35 | 203959 | Uni-ZAP XR | 2819 | 1633 | 25 | 1633 | 180 | 180 | 5920 | 1 | | | 10 |
| | | 04/26/99 | | | | | | | | | | | | |
| 2810 | HTGAD74 | 203959 | Uni-ZAP XR | 2820 | 890 | 7 | 890 | | 311 | 5921 | 1 | 13 | 14 | 23 |
| | | 04/26/99 | | | | | | | | | | | | |
| 2811 | HIGAP05 | 203918 | Uni-ZAP XR | 2821 | 1074 | 670 | 1074 | 211 | 211 | 5922 | 1 | | | 23 |
| | | 04/08/99 | | | | | | | | | | | | |
| 2812 | HTGAQ29 | 203918 | Uni-ZAP XR | 2822 | 631 | 1 | 631 | 127 | 127 | 5923 | 1 | 19 | 20 | 52 |
| | | 04/08/99 | | | | | | | | | | | | |
| 2813 | HTGAR21 | 203959 | Uni-ZAP XR | 2823 | 1104 | 1 | 1104 | 97 | 97 | 5924 | 1 | 23 | 24 | 34 |
| | | 04/26/99 | | | | | | | | | | | | |
| 2814 | HTGAS70 | 203918 | Uni-ZAP XR | 2824 | 1803 | 1 | 1803 | 435 | 435 | 5925 | 1 | 21 | 22 | 42 |
| | | 04/08/99 | | | | | | | | | | | | |
| 2815 | HTGAT65 | 203918 | Uni-ZAP XR | 2825 | 1610 | 1 | 1610 | 155 | 155 | 5926 | 1 | | | 16 |
| | | 04/08/99 | | | | | | | | | | | | |
| 2816 | HTGAU17 | 203918 | Uni-ZAP XR | 2826 | 1228 | 1 | 1228 | 109 | 109 | 5927 | 1 | 24 | 25 | 34 |
| | | 04/08/99 | | | | | | | | | | | | |
| 2817 | HTGBF47 | 203918 | Uni-ZAP XR | 2827 | 787 | 1 | 787 | 188 | 188 | 5928 | 1 | 32 | 33 | 73 |
| | | 04/08/99 | | | | | | | | | | | | |
| 2818 | HTGBK95 | 203959 | Uni-ZAP XR | 2828 | 1131 | 1 | 1131 | 271 | 271 | 5929 | 1 | 12 | 13 | 16 |
| | | 04/26/99 | | | | | | | | | | | | |
| 2819 | HTGCC01 | 203918 | Uni-ZAP XR | 2829 | 1133 | 1 | 1133 | 55 | 55 | 5930 | 1 | | | 28 |
| | | 04/08/99 | | | | | | | | | | | | |
| 2820 | HTGCK43 | 203959 | Uni-ZAP XR | 2830 | 962 | 208 | 956 | 231 | 231 | 5931 | 1 | 6 | 7 | 15 |
| | | 04/26/99 | | | | | | | | | | | | |
| 2821 | HTGDS43 | 203918 | Uni-ZAP XR | 2831 | 950 | 1 | 950 | 271 | 271 | 5932 | 1 | 17 | 18 | 22 |
| | | 04/08/99 | | | | | | | | | | | | |
| 2822 | HTGDS92 | 203918 | Uni-ZAP XR | 2832 | 1325 | 1 | 1325 | 80 | 80 | 5933 | 1 | 31 | 32 | 39 |
| | | 04/08/99 | | | | | | | | | | | | |
| 2823 | HTGEX34 | PTA-792 | Uni-ZAP XR | 2833 | 2301 | 1 | 2301 | 13 | 13 | 5934 | 1 | 22 | 23 | 44 |
| | | 09/27/99 | | | | | | | | | | | | |
| 2824 | HTGFM31 | PTA-181 | Uni-ZAP XR | 2834 | 2057 | 1 | 2057 | 73 | 73 | 5935 | 1 | 30 | 31 | 38 |
| | | 06/07/99 | | | | | | | | | | | | |
| 2825 | HTGGM37 | 203959 | Uni-ZAP XR | 2835 | 1927 | 1 | 1927 | 290 | 290 | 5936 | 1 | 20 | 21 | 27 |
| | | 04/26/99 | | | | | | | | | | | | |
| 2826 | HTGGN22 | 203959 | Uni-ZAP XR | 2836 | 793 | 1 | 793 | | 243 | 5937 | 1 | | | 20 |
| | | 04/26/99 | | | | | | | | | | | | |
| 2827 | HTHAA41 | 203918 | Uni-ZAP XR | 2837 | 1943 | 1 | 1943 | 128 | 128 | 5938 | 1 | 14 | 15 | 32 |
| | | 04/08/99 | | | | | | | | | | | | |
| 2828 | HTHBC58 | 203918 | Uni-ZAP XR | 2838 | 1479 | 458 | 1479 | 519 | 519 | 5939 | 1 | | | 14 |
| | | 04/08/99 | | | | | | | | | | | | |
| 2829 | HTHBO72 | 203959 | Uni-ZAP XR | 2839 | 538 | 1 | 538 | 335 | 335 | 5940 | 1 | 17 | 18 | 20 |
| | | 04/26/99 | | | | | | | | | | | | |
| 2830 | HTHBQ29 | 203918 | Uni-ZAP XR | 2840 | 1090 | 1 | 1090 | 165 | 165 | 5941 | 1 | 21 | 22 | 39 |
| | | 04/08/99 | | | | | | | | | | | | |
| 2831 | HTHBT76 | PTA-181 | Uni-ZAP XR | 2841 | 2025 | 1 | 2025 | 207 | 207 | 5942 | 1 | | | 12 |
| | | 06/07/99 | | | | | | | | | | | | |
| 2832 | HTHBZ91 | 203918 | Uni-ZAP XR | 2842 | 986 | 1 | 986 | 31 | 31 | 5943 | 1 | 35 | 36 | 37 |
| | | 04/08/99 | | | | | | | | | | | | |
| 2833 | HTHCA30 | 203959 | Uni-ZAP XR | 2843 | 627 | 1 | 627 | 158 | 158 | 5944 | 1 | | | 23 |
| | | 04/26/99 | | | | | | | | | | | | |
| 2834 | HTHCM60 | 203918 | Uni-ZAP XR | 2844 | 1220 | 1 | 1220 | | 250 | 5945 | 1 | | | 7 |
| | | 04/08/99 | | | | | | | | | | | | |
| 2835 | HTHDB20 | 203918 | Uni-ZAP XR | 2845 | 657 | 1 | 657 | 105 | 105 | 5946 | 1 | 41 | 42 | 72 |
| | | 04/08/99 | | | | | | | | | | | | |
| 2836 | HTHDF45 | 203918 | Uni-ZAP XR | 2846 | 1026 | 1 | 1026 | 175 | 175 | 5947 | 1 | 13 | 14 | 21 |
| | | 04/08/99 | | | | | | | | | | | | |
| 2837 | HTHDF86 | 203918 | Uni-ZAP XR | 2847 | 1535 | 1 | 1535 | | 118 | 5948 | 1 | 43 | 44 | 80 |
| | | 04/08/99 | | | | | | | | | | | | |
| 2838 | HTHDH18 | 203918 | Uni-ZAP XR | 2848 | 1242 | 1 | 1242 | | 247 | 5949 | 1 | 17 | 18 | 67 |
| | | 04/08/99 | | | | | | | | | | | | |
| 2839 | HTHDP65 | 203918 | Uni-ZAP XR | 2849 | 633 | 1 | 633 | 217 | 217 | 5950 | 1 | 17 | 18 | 43 |
| | | 04/08/99 | | | | | | | | | | | | |
| 2840 | HTHDT25 | 203918 | Uni-ZAP XR | 2850 | 422 | 1 | 422 | 60 | 60 | 5951 | 1 | 34 | 35 | 45 |
| | | 04/08/99 | | | | | | | | | | | | |
| 2841 | HTHDV50 | 203959 | Uni-ZAP XR | 2851 | 535 | 1 | 391 | | 119 | 5952 | 1 | 6 | 7 | 23 |
| | | 04/26/99 | | | | | | | | | | | | |
| 2842 | HTJMA64 | 203918 | pCMVSport 2.0 | 2852 | 2259 | 1 | 2259 | 138 | 138 | 5953 | 1 | 28 | 29 | 92 |
| | | 04/08/99 | | | | | | | | | | | | |
| 2843 | HTJMJ72 | 203959 | pCMVSport 2.0 | 2853 | 854 | 1 | 854 | 263 | 263 | 5954 | 1 | 23 | 24 | 27 |
| | | 04/26/99 | | | | | | | | | | | | |
| 2844 | HTLAD74 | 203959 | Uni-ZAP XR | 2854 | 971 | 1 | 971 | 163 | 163 | 5955 | 1 | 17 | 18 | 33 |
| | | 04/26/99 | | | | | | | | | | | | |
| 2845 | HTLAF81 | PTA-181 | Uni-ZAP XR | 2855 | 1229 | 1 | 1229 | | 195 | 5956 | 1 | 14 | 15 | 190 |
| | | 06/07/99 | | | | | | | | | | | | |
| 2846 | HTLBF46 | 203959 | Uni-ZAP XR | 2856 | 1260 | 1 | 1235 | 176 | 176 | 5957 | 1 | 18 | 19 | 194 |
| | | 04/26/99 | | | | | | | | | | | | |
| 2847 | HTLBF63 | 203959 | Uni-ZAP XR | 2857 | 1124 | 1 | 1124 | 97 | 97 | 5958 | 1 | 12 | 13 | 232 |
| | | 04/26/99 | | | | | | | | | | | | |
| 2848 | HTLCX82 | 203979 | Uni-ZAP XR | 2858 | 920 | 1 | 920 | | 46 | 5959 | 1 | 15 | 16 | 75 |
| | | 04/29/99 | | | | | | | | | | | | |
| 2849 | HTLDD89 | 203959 | Uni-ZAP XR | 2859 | 489 | 1 | 489 | 263 | 263 | 5960 | 1 | 21 | 22 | 49 |
| | | 04/26/99 | | | | | | | | | | | | |
| 2850 | HTLDN34 | PTA-181 | Uni-ZAP XR | 2860 | 882 | 1 | 882 | 84 | 84 | 5961 | 1 | 19 | 20 | 93 |
| | | 06/07/99 | | | | | | | | | | | | |
| 2851 | HTLDP19 | PTA-793 | Uni-ZAP XR | 2861 | 957 | 1 | 957 | 99 | 99 | 5962 | 1 | 23 | 24 | 176 |
| | | 09/27/99 | | | | | | | | | | | | |
| 2852 | HTLDY30 | PTA-1838 | Uni-ZAP XR | 2862 | 1240 | 1 | 1240 | 115 | 115 | 5963 | 1 | | | 8 |
| | | 05/09/00 | | | | | | | | | | | | |
| 2853 | HTLEJ24 | 203918 | Uni-ZAP XR | 2863 | 928 | 1 | 928 | 110 | 110 | 5964 | 1 | 18 | 19 | 170 |
| | | 04/08/99 | | | | | | | | | | | | |
| 2854 | HTLEJ75 | 203959 | Uni-ZAP XR | 2864 | 2569 | 1336 | 2533 | 1559 | 1559 | 5965 | 1 | | | 13 |
| | | 04/26/99 | | | | | | | | | | | | |
| 2855 | HTLEJ75 | 203959 | Uni-ZAP XR | 2865 | 1192 | 1 | 1192 | 224 | 224 | 5966 | 1 | | | 13 |
| | | 04/26/99 | | | | | | | | | | | | |
| 2856 | HTLEP55 | 203918 | Uni-ZAP XR | 2866 | 1507 | 1 | 1507 | 133 | 133 | 5967 | 1 | 38 | 39 | 152 |
| | | 04/08/99 | | | | | | | | | | | | |
| 2857 | HTLEV80 | PTA-181 | Uni-ZAP XR | 2867 | 1129 | 1 | 1129 | 276 | 276 | 5968 | 1 | 18 | 19 | 75 |
| | | 06/07/99 | | | | | | | | | | | | |
| 2858 | HTLEZ57 | 203959 | Uni-ZAP XR | 2868 | 1003 | 1 | 1003 | 187 | 187 | 5969 | 1 | 15 | 16 | 35 |
| | | 04/26/99 | | | | | | | | | | | | |
| 2859 | HTLFA90 | 203960 | Uni-ZAP XR | 2869 | 1314 | 1 | 1304 | 131 | 131 | 5970 | 1 | 32 | 33 | 314 |
| | | 04/26/99 | | | | | | | | | | | | |
| 2860 | HTLGL33 | 203959 | Uni-ZAP XR | 2870 | 1703 | 539 | 1703 | 763 | 763 | 5971 | 1 | 19 | 20 | 174 |
| | | 04/26/99 | | | | | | | | | | | | |
| 2861 | HTLGQ25 | PTA-795 | Uni-ZAP XR | 2871 | 669 | 1 | 669 | 24 | 24 | 5972 | 1 | 28 | 29 | 170 |
| | | 09/27/99 | | | | | | | | | | | | |
| 2862 | HTLGS72 | PTA-795 | Uni-ZAP XR | 2872 | 1189 | 1 | 1189 | 363 | 363 | 5973 | 1 | 19 | 20 | 85 |
| | | 09/27/99 | | | | | | | | | | | | |
| 2863 | HILGY50 | 203959 | Uni-ZAP XR | 2873 | 1245 | 1 | 1245 | 337 | 337 | 5974 | 1 | 23 | 24 | 303 |
| | | 04/26/99 | | | | | | | | | | | | |
| 2864 | HTLHN86 | 203959 | Uni-ZAP XR | 2874 | 2204 | 1059 | 2133 | 1413 | 1413 | 5975 | 1 | 20 | 21 | 187 |
| | | 04/26/99 | | | | | | | | | | | | |
| 2865 | HTLHN86 | 203959 | Uni-ZAP XR | 2875 | 2240 | 1059 | 2184 | 1413 | 1413 | 5976 | 1 | 20 | 21 | 187 |
| | | 04/26/99 | | | | | | | | | | | | |
| 2866 | HTLHN86 | 203959 | Uni-ZAP XR | 2876 | 2240 | 1059 | 2133 | 1413 | 1413 | 5977 | 1 | 20 | 21 | 187 |
| | | 04/26/99 | | | | | | | | | | | | |
| 2867 | HTLHN86 | 203959 | Uni-ZAP XR | 2877 | 2240 | 1059 | 2133 | 1413 | 1413 | 5978 | 1 | 20 | 21 | 187 |
| | | 04/26/99 | | | | | | | | | | | | |
| 2868 | HTLIW29 | PTA-795 | Uni-ZAP XR | 2878 | 1082 | 1 | 1082 | 10 | 10 | 5979 | 1 | 19 | 20 | 314 |
| | | 09/27/99 | | | | | | | | | | | | |
| 2869 | HTLJC15 | PTA-1838 | Uni-ZAP XR | 2879 | 1913 | 697 | 1873 | 996 | 996 | 5980 | 1 | 38 | 39 | 240 |
| | | 05/09/00 | | | | | | | | | | | | |
| 2870 | HTNAL14 | PTA-793 | pBluescript | 2880 | 1989 | 1 | 1989 | 166 | 166 | 5981 | 1 | 18 | 19 | 31 |
| | | 09/27/99 | SK- | | | | | | | | | | | |
| 2871 | HTNAL34 | 203918 | pBluescript | 2881 | 336 | 1 | 336 | 225 | 225 | 5982 | 1 | 15 | 16 | 23 |
| | | 04/08/99 | SK- | | | | | | | | | | | |
| 2872 | HTNBJ15 | 203959 | pBluescript | 2882 | 2794 | 1511 | 2782 | 1737 | 1737 | 5983 | 1 | 22 | 23 | 51 |
| | | 04/26/99 | SK- | | | | | | | | | | | |
| 2873 | HTNBJ15 | 203959 | pBluescript | 2883 | 2792 | 1511 | 2763 | 1737 | 1737 | 5984 | 1 | 22 | 23 | 51 |
| | | 04/26/99 | SK- | | | | | | | | | | | |
| 2874 | HTNBJ15 | 203959 | pBluescript | 2884 | 3351 | 1511 | 2764 | 1737 | 1737 | 5985 | 1 | 22 | 23 | 51 |
| | | 04/26/99 | SK- | | | | | | | | | | | |
| 2875 | HTNBJ15 | 203959 | pBluescript | 2885 | 2794 | 1511 | 2765 | 1737 | 1737 | 5986 | 1 | 22 | 23 | 51 |
| | | 04/26/99 | SK- | | | | | | | | | | | |
| 2876 | HTOAC65 | 203918 | Uni-ZAP XR | 2886 | 1014 | 1 | 1014 | | 551 | 5987 | 1 | 9 | 10 | 28 |
| | | 04/08/99 | | | | | | | | | | | | |
| 2877 | HTOAE47 | PTA-181 | Uni-ZAP XR | 2887 | 1382 | 1 | 1382 | 138 | 138 | 5988 | 1 | | | 15 |
| | | 06/07/99 | | | | | | | | | | | | |
| 2878 | HTOAK03 | 203918 | Uni-ZAP XR | 2888 | 1282 | 1 | 1282 | 64 | 64 | 5989 | 1 | 49 | 50 | 51 |
| | | 04/08/99 | | | | | | | | | | | | |
| 2879 | HTOAO58 | PTA-181 | Uni-ZAP XR | 2889 | 1637 | 1 | 1637 | 157 | 157 | 5990 | 1 | 13 | 14 | 34 |
| | | 06/07/99 | | | | | | | | | | | | |
| 2880 | HTOAT56 | 203959 | Uni-ZAP XR | 2890 | 1522 | 1 | 1522 | | 85 | 5991 | 1 | 19 | 20 | 118 |
| | | 04/26/99 | | | | | | | | | | | | |
| 2881 | HTOBG07 | 203918 | Uni-ZAP XR | 2891 | 1344 | 1 | 1344 | | 1123 | 5992 | 1 | | | 4 |
| | | 04/08/99 | | | | | | | | | | | | |
| 2882 | HTOBG62 | 203918 | Uni-ZAP XR | 2892 | 1399 | 1 | 1399 | | 90 | 5993 | 1 | 27 | 28 | 36 |
| | | 04/08/99 | | | | | | | | | | | | |
| 2883 | HTODA92 | PTA-181 | Uni-ZAP XR | 2893 | 3261 | 1346 | 3251 | | 1525 | 5994 | 1 | 21 | 22 | 62 |
| | | 06/07/99 | | | | | | | | | | | | |
| 2884 | HTODN35 | 203918 | Uni-ZAP XR | 2894 | 1594 | 1 | 1594 | 67 | 67 | 5995 | 1 | | | 14 |
| | | 04/08/99 | | | | | | | | | | | | |
| 2885 | HTODO45 | 203918 | Uni-ZAP XR | 2895 | 1455 | 1 | 1455 | | 502 | 5996 | 1 | | | 16 |
| | | 04/08/99 | | | | | | | | | | | | |
| 2886 | HTOEA53 | 203918 | Uni-ZAP XR | 2896 | 2020 | 1 | 2020 | 56 | 56 | 5997 | 1 | 22 | 23 | 31 |
| | | 04/08/99 | | | | | | | | | | | | |
| 2887 | HTOEB55 | 203918 | Uni-ZAP XR | 2897 | 1774 | 1 | 1774 | | 139 | 5998 | 1 | 14 | 15 | 19 |
| | | 04/08/99 | | | | | | | | | | | | |
| 2888 | HTOEB76 | 203918 | Uni-ZAP XR | 2898 | 1619 | 1 | 1619 | | 325 | 5999 | 1 | | | 6 |
| | | 04/08/99 | | | | | | | | | | | | |
| 2889 | HTOET03 | 203917 | Uni-ZAP XR | 2899 | 1921 | 434 | 1897 | 518 | 518 | 6000 | 1 | | | 24 |
| | | 04/08/99 | | | | | | | | | | | | |
| 2890 | HTOET03 | 203917 | Uni-ZAP XR | 2900 | 1920 | 434 | 1897 | 518 | 518 | 6001 | 1 | | | 24 |
| | | 04/08/99 | | | | | | | | | | | | |
| 2891 | HTOEV01 | 203918 | Uni-ZAP XR | 2901 | 2206 | 1 | 2206 | | 194 | 6002 | 1 | 7 | 8 | 46 |
| | | 04/08/99 | | | | | | | | | | | | |
| 2892 | HTOFA11 | 203918 | Uni-ZAP XR | 2902 | 2597 | 1 | 2597 | 99 | 99 | 6003 | 1 | 18 | 19 | 43 |
| | | 04/08/99 | | | | | | | | | | | | |
| 2893 | HTOFC33 | 203918 | Uni-ZAP XR | 2903 | 1075 | 1 | 1075 | | 159 | 6004 | 1 | | | 23 |
| | | 04/08/99 | | | | | | | | | | | | |
| 2894 | HTOGB79 | 203959 | Uni-ZAP XR | 2904 | 2778 | 1 | 2778 | 138 | 138 | 6005 | 1 | 19 | 20 | 40 |
| | | 04/26/99 | | | | | | | | | | | | |
| 2895 | HTOHE22 | 203959 | Uni-ZAP XR | 2905 | 1904 | 1 | 1904 | | 358 | 6006 | 1 | | | 14 |
| | | 04/26/99 | | | | | | | | | | | | |
| 2896 | HTOHG63 | 203959 | Uni-ZAP XR | 2906 | 1918 | 773 | 1918 | 922 | 922 | 6007 | 1 | 31 | 32 | 37 |
| | | 04/26/99 | | | | | | | | | | | | |
| 2897 | HTOHJ93 | 203918 | Uni-ZAP XR | 2907 | 1768 | 1 | 1768 | 86 | 86 | 6008 | 1 | | | 15 |
| | | 04/08/99 | | | | | | | | | | | | |
| 2898 | HTOHM12 | 203918 | Uni-ZAP XR | 2908 | 2196 | 1 | 2196 | 100 | 100 | 6009 | 1 | 29 | 30 | 31 |
| | | 04/08/99 | | | | | | | | | | | | |
| 2899 | HTOHM82 | 203959 | Uni-ZAP XR | 2909 | 1561 | 1 | 1561 | 26 | 26 | 6010 | 1 | 45 | 46 | 71 |
| | | 04/26/99 | | | | | | | | | | | | |
| 2900 | HTOHN40 | 203959 | Uni-ZAP XR | 2910 | 1963 | 1 | 1963 | 50 | 50 | 6011 | 1 | 21 | 22 | 34 |
| | | 04/26/99 | | | | | | | | | | | | |
| 2901 | HTOHR59 | 203959 | Uni-ZAP XR | 2911 | 1300 | 1 | 1300 | 110 | 110 | 6012 | 1 | 18 | 19 | 37 |
| | | 04/26/99 | | | | | | | | | | | | |
| 2902 | HTOHS29 | 203959 | Uni-ZAP XR | 2912 | 1146 | 1 | 1104 | 275 | 275 | 6013 | 1 | | | 14 |
| | | 04/26/99 | | | | | | | | | | | | |
| 2903 | HTOID65 | 203918 | Uni-ZAP XR | 2913 | 1472 | 1 | 1472 | 56 | 56 | 6014 | 1 | 25 | 26 | 36 |
| | | 04/08/99 | | | | | | | | | | | | |
| 2904 | HTOIE17 | 203959 | Uni-ZAP XR | 2914 | 1117 | 1 | 1117 | 99 | 99 | 6015 | 1 | 23 | 24 | 35 |
| | | 04/26/99 | | | | | | | | | | | | |
| 2905 | HTOIG16 | 203959 | Uni-ZAP XR | 2915 | 1797 | 1 | 1797 | | 160 | 6016 | 1 | 19 | 20 | 23 |
| | | 04/26/99 | | | | | | | | | | | | |
| 2906 | HTOIH39 | 203959 | Uni-ZAP XR | 2916 | 1435 | 1 | 1435 | 215 | 215 | 6017 | 1 | 20 | 21 | 30 |
| | | 04/26/99 | | | | | | | | | | | | |
| 2907 | HTOIH51 | 203959 | Uni-ZAP XR | 2917 | 1472 | 1 | 1472 | 296 | 296 | 6018 | 1 | 19 | 20 | 47 |
| | | 04/26/99 | | | | | | | | | | | | |
| 2908 | HTOJB02 | 203918 | Uni-ZAP XR | 2918 | 1447 | 1 | 1447 | 107 | 107 | 6019 | 1 | 43 | 44 | 134 |
| | | 04/08/99 | | | | | | | | | | | | |
| 2909 | HTOJJ26 | 203959 | Uni-ZAP XR | 2919 | 3003 | 838 | 3003 | 1034 | 1034 | 6020 | 1 | 16 | 17 | 48 |
| | | 04/26/99 | | | | | | | | | | | | |
| 2910 | HTOJP25 | PTA-181 | Uni-ZAP XR | 2920 | 1524 | 1 | 1524 | 268 | 268 | 6021 | 1 | 18 | 19 | 33 |
| | | 06/07/99 | | | | | | | | | | | | |
| 2911 | HTOJS23 | 203959 | Uni-ZAP XR | 2921 | 1842 | 1 | 1842 | | 130 | 6022 | 1 | 18 | 19 | 53 |
| | | 04/26/99 | | | | | | | | | | | | |
| 2912 | HTOJY56 | 203918 | Uni-ZAP XR | 2922 | 1895 | 1 | 1895 | 244 | 244 | 6023 | 1 | 26 | 27 | 33 |
| | | 04/08/99 | | | | | | | | | | | | |
| 2913 | HTOJZ18 | 203959 | Uni-ZAP XR | 2923 | 1641 | 189 | 1641 | 234 | 234 | 6024 | 1 | 20 | 21 | 33 |
| | | 04/26/99 | | | | | | | | | | | | |
| 2914 | HTPCG10 | 203959 | Uni-ZAP XR | 2924 | 1807 | 134 | 1445 | 145 | 145 | 6025 | 1 | 28 | 29 | 53 |
| | | 04/26/99 | | | | | | | | | | | | |
| 2915 | HTPCO75 | PTA-181 | Uni-ZAP XR | 2925 | 1467 | 1 | 1467 | | 73 | 6026 | 1 | 23 | 24 | 40 |
| | | 06/07/99 | | | | | | | | | | | | |
| 2916 | HTPCW21 | 203959 | Uni-ZAP XR | 2926 | 1293 | 1 | 1293 | 171 | 171 | 6027 | 1 | 35 | 36 | 60 |
| | | 04/26/99 | | | | | | | | | | | | |
| 2917 | HTPDD68 | 203918 | Uni-ZAP XR | 2927 | 2068 | 175 | 2068 | 509 | 509 | 6028 | 1 | 24 | 25 | 31 |
| | | 04/08/99 | | | | | | | | | | | | |
| 2918 | HTPDV75 | 203918 | Uni-ZAP XR | 2928 | 389 | 1 | 389 | 240 | 240 | 6029 | 1 | 18 | 19 | 47 |
| | | 04/08/99 | | | | | | | | | | | | |
| 2919 | HTSER28 | 203979 | pBluescript | 2929 | 2027 | 1 | 1573 | 153 | 153 | 6030 | 1 | | | 13 |
| | | 04/29/99 | | | | | | | | | | | | |
| 2920 | HTSET62 | 203959 | pBluescript | 2930 | 1345 | 968 | 1345 | 1147 | 1147 | 6031 | 1 | 15 | 16 | 17 |
| | | 04/26/99 | | | | | | | | | | | | |
| 2921 | HTSFV18 | 203918 | pBluescript | 2931 | 1093 | 1 | 1093 | 134 | 134 | 6032 | 1 | 41 | 42 | 50 |
| | | 04/08/99 | | | | | | | | | | | | |
| 2922 | HTSGO13 | 203959 | pBluescript | 2932 | 1300 | 337 | 879 | 699 | 699 | 6033 | 1 | 9 | 10 | 49 |
| | | 04/26/99 | | | | | | | | | | | | |
| 2923 | HTSGO88 | 203959 | pBluescript | 2933 | 798 | 1 | 798 | 249 | 249 | 6034 | 1 | | | 21 |
| | | 04/26/99 | | | | | | | | | | | | |
| 2924 | HTTAH05 | 203918 | Uni-ZAP XR | 2934 | 1050 | 1 | 1050 | 39 | 39 | 6035 | 1 | 33 | 34 | 35 |
| | | 04/08/99 | | | | | | | | | | | | |
| 2925 | HTTAP37 | 203918 | Uni-ZAP XR | 2935 | 1040 | 15 | 1040 | 104 | 104 | 6036 | 1 | 30 | 31 | 45 |
| | | 04/08/99 | | | | | | | | | | | | |
| 2926 | HTTBJ38 | PTA-181 | Uni-ZAP XR | 2936 | 2364 | 401 | 2329 | 585 | 585 | 6037 | 1 | | | 15 |
| | | 06/07/99 | | | | | | | | | | | | |
| 2927 | HTTDB11 | 203959 | Uni-ZAP XR | 2937 | 524 | 65 | 524 | 130 | 130 | 6038 | 1 | 32 | 33 | 37 |
| | | 04/26/99 | | | | | | | | | | | | |
| 2928 | HTTDG27 | 203918 | Uni-ZAP XR | 2938 | 711 | 1 | 711 | | 277 | 6039 | 1 | 17 | 18 | 99 |
| | | 04/08/99 | | | | | | | | | | | | |
| 2929 | HTTDN24 | 203959 | Uni-ZAP XR | 2939 | 1992 | 856 | 1992 | | 1024 | 6040 | 1 | 13 | 14 | 234 |
| | | 04/26/99 | | | | | | | | | | | | |
| 2930 | HTTDO33 | PTA-1838 | Uni-ZAP XR | 2940 | 1161 | 1 | 1161 | 22 | 22 | 6041 | 1 | 30 | 31 | 244 |
| | | 05/09/00 | | | | | | | | | | | | |
| 2931 | HTTDT67 | 203918 | Uni-ZAP XR | 2941 | 1255 | 1 | 1255 | 44 | 44 | 6042 | 1 | 32 | 33 | 68 |
| | | 04/08/99 | | | | | | | | | | | | |
| 2932 | HTTEO25 | PTA-181 | Uni-ZAP XR | 2942 | 2204 | 1 | 2204 | | 188 | 6043 | 1 | 30 | 31 | 57 |
| | | 06/07/99 | | | | | | | | | | | | |
| 2933 | HTTEP11 | 203918 | Uni-ZAP XR | 2943 | 1409 | 1 | 1409 | | 236 | 6044 | 1 | 5 | 6 | 7 |
| | | 04/08/99 | | | | | | | | | | | | |
| 2934 | HTTES77 | 203918 | Uni-ZAP XR | 2944 | 2389 | 1084 | 2379 | 1133 | 1133 | 6045 | 1 | 20 | 21 | 40 |
| | | 04/08/99 | | | | | | | | | | | | |
| 2935 | HTTFD29 | PTA-181 | Uni-ZAP XR | 2945 | 1338 | 1 | 1338 | 52 | 52 | 6046 | 1 | 20 | 21 | 28 |
| | | 06/07/99 | | | | | | | | | | | | |
| 2936 | HTTFG15 | 203918 | Uni-ZAP XR | 2946 | 1081 | 1 | 1081 | 30 | 30 | 6047 | 1 | 19 | 20 | 27 |
| | | 04/08/99 | | | | | | | | | | | | |
| 2937 | HTWAM19 | 203918 | Lambda ZAP II | 2947 | 1877 | 1 | 1877 | 160 | 160 | 6048 | 1 | | | 47 |
| | | 04/08/99 | | | | | | | | | | | | |
| 2938 | HTWBF58 | 203918 | pSport1 | 2948 | 1352 | 1 | 1332 | 111 | 111 | 6049 | 1 | 22 | 23 | 32 |
| | | 04/08/99 | | | | | | | | | | | | |
| 2939 | HTWBO30 | 203918 | pSport1 | 2949 | 773 | 1 | 773 | 137 | 137 | 6050 | 1 | 43 | 44 | 76 |
| | | 04/08/99 | | | | | | | | | | | | |
| 2940 | HTWBZ57 | 203959 | pSport1 | 2950 | 1667 | 777 | 1658 | 990 | 990 | 6051 | 1 | 27 | 28 | 28 |
| | | 04/26/99 | | | | | | | | | | | | |
| 2941 | HTWCC10 | 203918 | pSport1 | 2951 | 1241 | 1 | 1241 | 244 | 244 | 6052 | 1 | 17 | 18 | 20 |
| | | 04/08/99 | | | | | | | | | | | | |
| 2942 | HTWCE14 | 203959 | pSport1 | 2952 | 1054 | 828 | 1036 | 892 | 892 | 6053 | 1 | 29 | 30 | 54 |
| | | 04/26/99 | | | | | | | | | | | | |
| 2943 | HTWCT76 | 203918 | pSport1 | 2953 | 1560 | 1 | 1560 | 143 | 143 | 6054 | 1 | | | 16 |
| | | 04/08/99 | | | | | | | | | | | | |
| 2944 | HTWDJ17 | 203918 | pSport1 | 2954 | 1390 | 1 | 1390 | 302 | 302 | 6055 | 1 | 22 | 23 | 318 |
| | | 04/08/99 | | | | | | | | | | | | |
| 2945 | HTWDM89 | 203918 | pSport1 | 2955 | 1472 | 1 | 1472 | 244 | 244 | 6056 | 1 | 16 | 17 | 24 |
| | | 04/08/99 | | | | | | | | | | | | |
| 2946 | HIWEA05 | PTA-181 | pSport1 | 2956 | 893 | 1 | 893 | 198 | 198 | 6057 | 1 | 26 | 27 | 33 |
| | | 06/07/99 | | | | | | | | | | | | |
| 2947 | HTWEG06 | 203959 | pSport1 | 2957 | 1066 | 1 | 1066 | | 132 | 6058 | 1 | 13 | 14 | 57 |
| | | 04/26/99 | | | | | | | | | | | | |
| 2948 | HTWEQ36 | 203918 | pSport1 | 2958 | 1436 | 1 | 1436 | 133 | 133 | 6059 | 1 | 20 | 21 | 32 |
| | | 04/08/99 | | | | | | | | | | | | |
| 2949 | HTWFA21 | 203918 | pSport1 | 2959 | 684 | 83 | 613 | 93 | 93 | 6060 | 1 | 29 | 30 | 46 |
| | | 04/08/99 | | | | | | | | | | | | |
| 2950 | HTWFA88 | 203918 | pSport1 | 2960 | 1851 | 1 | 1851 | 293 | 293 | 6061 | 1 | 13 | 14 | 116 |
| | | 04/08/99 | | | | | | | | | | | | |
| 2951 | HTWFM85 | 203918 | pSport1 | 2961 | 1693 | 319 | 1693 | 680 | 680 | 6062 | 1 | 20 | 21 | 39 |
| | | 04/08/99 | | | | | | | | | | | | |
| 2952 | HTWFO43 | PTA-181 | pSport1 | 2962 | 1298 | 1 | 1298 | 193 | 193 | 6063 | 1 | 20 | 21 | 30 |
| | | 06/07/99 | | | | | | | | | | | | |
| 2953 | HTWLG39 | PTA-181 | Lambda ZAP II | 2963 | 504 | 1 | 504 | 200 | 200 | 6064 | 1 | 28 | 29 | 32 |
| | | 06/07/99 | | | | | | | | | | | | |
| 2954 | HTXAA20 | 203959 | Uni-ZAP XR | 2964 | 761 | 1 | 761 | 30 | 30 | 6065 | 1 | 29 | 30 | 50 |
| | | 04/26/99 | | | | | | | | | | | | |
| 2955 | HTXAD75 | 203959 | Uni-ZAP XR | 2965 | 1924 | 1 | 1924 | | 49 | 6066 | 1 | 19 | 20 | 41 |
| | | 04/26/99 | | | | | | | | | | | | |
| 2956 | HTXAR92 | 203918 | Uni-ZAP XR | 2966 | 1600 | 1 | 1600 | 35 | 35 | 6067 | 1 | 15 | 16 | 26 |
| | | 04/08/99 | | | | | | | | | | | | |
| 2957 | HTXBS38 | 203918 | Uni-ZAP XR | 2967 | 759 | 1 | 759 | 261 | 261 | 6068 | 1 | | | 16 |
| | | 04/08/99 | | | | | | | | | | | | |
| 2958 | HTXBU88 | 203918 | Uni-ZAP XR | 2968 | 776 | 1 | 776 | 159 | 159 | 6069 | 1 | 18 | 19 | 34 |
| | | 04/08/99 | | | | | | | | | | | | |
| 2959 | HTXCP27 | PTA-1838 | Uni-ZAP XR | 2969 | 1573 | 1 | 1573 | | 153 | 6070 | 1 | | | 15 |
| | | 05/09/00 | | | | | | | | | | | | |
| 2960 | HTXCU30 | 203918 | Uni-ZAP XR | 2970 | 1440 | 98 | 1440 | | 221 | 6071 | 1 | | | 14 |
| | | 04/08/99 | | | | | | | | | | | | |
| 2961 | HTXCV44 | 203918 | Uni-ZAP XR | 2971 | 1544 | 1 | 1544 | 181 | 181 | 6072 | 1 | 22 | 23 | 64 |
| | | 04/08/99 | | | | | | | | | | | | |
| 2962 | HTXDJ21 | 203959 | Uni-ZAP XR | 2972 | 1335 | 15 | 1335 | | 189 | 6073 | 1 | 27 | 28 | 42 |
| | | 04/26/99 | | | | | | | | | | | | |
| 2963 | HTXDJ75 | 203918 | Uni-ZAP XR | 2973 | 1628 | 1 | 1628 | 253 | 253 | 6074 | 1 | 16 | 17 | 45 |
| | | 04/08/99 | | | | | | | | | | | | |
| 2964 | HTXDJ85 | 203918 | Uni-ZAP XR | 2974 | 1957 | 1 | 1957 | | 210 | 6075 | 1 | 25 | 26 | 27 |
| | | 04/08/99 | | | | | | | | | | | | |
| 2965 | HTXDK09 | 203959 | Uni-ZAP XR | 2975 | 636 | 1 | 369 | 118 | 118 | 6076 | 1 | 29 | 30 | 31 |
| | | 04/26/99 | | | | | | | | | | | | |
| 2966 | HTXDO17 | 203959 | Uni-ZAP XR | 2976 | 1320 | 1 | 1320 | 149 | 149 | 6077 | 1 | 46 | 47 | 56 |
| | | 04/26/99 | | | | | | | | | | | | |
| 2967 | HTXDT72 | 203959 | Uni-ZAP XR | 2977 | 1521 | 1 | 1521 | 267 | 267 | 6078 | 1 | 10 | 11 | 70 |
| | | 04/26/99 | | | | | | | | | | | | |
| 2968 | HTXDU08 | 203959 | Uni-ZAP XR | 2978 | 1103 | 1 | 1103 | 168 | 168 | 6079 | 1 | 26 | 27 | 34 |
| | | 04/26/99 | | | | | | | | | | | | |
| 2969 | HTXDZ68 | 203959 | Uni-ZAP XR | 2979 | 968 | 1 | 968 | 323 | 323 | 6080 | 1 | 17 | 18 | 27 |
| | | 04/26/99 | | | | | | | | | | | | |
| 2970 | HTXEN33 | 203918 | Uni-ZAP XR | 2980 | 1544 | 1 | 1544 | 151 | 151 | 6081 | 1 | 32 | 33 | 43 |
| | | 04/08/99 | | | | | | | | | | | | |
| 2971 | HTXES13 | 203959 | Uni-ZAP XR | 2981 | 677 | 1 | 677 | 179 | 179 | 6082 | 1 | 17 | 18 | 81 |
| | | 04/26/99 | | | | | | | | | | | | |
| 2972 | HTXFD86 | PTA-1838 | Uni-ZAP XR | 2982 | 1678 | 1 | 1678 | 132 | 132 | 6083 | 1 | | | 15 |
| | | 05/09/00 | | | | | | | | | | | | |
| 2973 | HTXGK12 | PTA-1838 | Uni-ZAP XR | 2983 | 1679 | 1 | 1393 | 102 | 102 | 6084 | 1 | | 32 | |
| | | 05/09/00 | | | | | | | | | | | | |
| 2974 | HTXGL32 | 203917 | Uni-ZAP XR | 2984 | 1425 | 1 | 1425 | 113 | 113 | 6085 | 1 | 30 | 31 | 32 |
| | | 04/08/99 | | | | | | | | | | | | |
| 2975 | HTXJD08 | 203918 | Uni-ZAP XR | 2985 | 1238 | 1 | 1238 | 192 | 192 | 6086 | 1 | | | 4 |
| | | 04/08/99 | | | | | | | | | | | | |
| 2976 | HTXJD85 | 203959 | Uni-ZAP XR | 2986 | 1117 | 1 | 1117 | 211 | 211 | 6087 | 1 | 16 | 17 | 31 |
| | | 04/26/99 | | | | | | | | | | | | |
| 2977 | HTXJE12 | PTA-181 | Uni-ZAP XR | 2987 | 1640 | 1 | 1640 | 204 | 204 | 6088 | 1 | 22 | 23 | 83 |
| | | 06/07/99 | | | | | | | | | | | | |
| 2978 | HTXJI59 | PTA-791 | Uni-ZAP XR | 2988 | 2060 | 49 | 1195 | | 1809 | 6089 | 1 | 6 | 7 | 12 |
| | | 09/27/99 | | | | | | | | | | | | |
| 2979 | HTXJJ92 | PTA-793 | Uni-ZAP XR | 2989 | 823 | 1 | 823 | 275 | 275 | 6090 | 1 | | | 9 |
| | | 09/27/99 | | | | | | | | | | | | |
| 2980 | HTXJM94 | PTA-181 | Uni-ZAP XR | 2990 | 938 | 1 | 938 | 44 | 44 | 6091 | 1 | 46 | 47 | 73 |
| | | 06/07/99 | | | | | | | | | | | | |
| 2981 | HTXJV54 | 203918 | Uni-ZAP XR | 2991 | 1896 | 1 | 1896 | 269 | 269 | 6092 | 1 | | | 9 |
| | | 04/08/99 | | | | | | | | | | | | |
| 2982 | HTXJW06 | 203979 | Uni-ZAP XR | 2992 | 1494 | 511 | 1494 | 635 | 635 | 6093 | 1 | 19 | 20 | 129 |
| | | 04/29/99 | | | | | | | | | | | | |
| 2983 | HTXKB57 | 203979 | Uni-ZAP XR | 2993 | 2836 | 570 | 2801 | 867 | 867 | 6094 | 1 | 16 | 17 | 61 |
| | | 04/29/99 | | | | | | | | | | | | |
| 2984 | HTXKH22 | 203918 | Uni-ZAP XR | 2994 | 1073 | 1 | 1073 | | 350 | 6095 | 1 | | | 12 |
| | | 04/08/99 | | | | | | | | | | | | |
| 2985 | HTXKH40 | 203918 | Uni-ZAP XR | 2995 | 1290 | 1 | 1290 | 153 | 153 | 6096 | 1 | 21 | 22 | 46 |
| | | 04/08/99 | | | | | | | | | | | | |
| 2986 | HTXKK76 | PTA-181 | Uni-ZAP XR | 2996 | 1629 | 1 | 1629 | 54 | 54 | 6097 | 1 | 26 | 27 | 52 |
| | | 06/07/99 | | | | | | | | | | | | |
| 2987 | HTXKL53 | 203959 | Uni-ZAP XR | 2997 | 1610 | 278 | 1610 | 1245 | 1245 | 6098 | 1 | 24 | 25 | 46 |
| | | 04/26/99 | | | | | | | | | | | | |
| 2988 | HTXKS11 | 203918 | Uni-ZAP XR | 2998 | 1945 | 1 | 1945 | 133 | 133 | 6099 | 1 | 22 | 23 | 38 |
| | | 04/08/99 | | | | | | | | | | | | |
| 2989 | HTXKS27 | PTA-792 | Uni-ZAP XR | 2999 | 1455 | 1 | 1455 | 286 | 286 | 6100 | 1 | 20 | 21 | 55 |
| | | 09/27/99 | | | | | | | | | | | | |
| 2990 | HTXLC05 | 203959 | Uni-ZAP XR | 3000 | 743 | 1 | 743 | 295 | 295 | 6101 | 1 | 28 | 29 | 80 |
| | | 04/26/99 | | | | | | | | | | | | |
| 2991 | HTXLC45 | 203959 | Uni-ZAP XR | 3001 | 715 | 1 | 715 | 359 | 359 | 6102 | 1 | 22 | 23 | 50 |
| | | 04/26/99 | | | | | | | | | | | | |
| 2992 | HTXLT36 | 203959 | Uni-ZAP XR | 3002 | 1040 | 1 | 1038 | 189 | 189 | 6103 | 1 | | | 13 |
| | | 04/26/99 | | | | | | | | | | | | |
| 2993 | HTXLY94 | 203959 | Uni-ZAP XR | 3003 | 3511 | 698 | 1568 | 893 | 893 | 6104 | 1 | 24 | 25 | 35 |
| | | 04/26/99 | | | | | | | | | | | | |
| 2994 | HTXNV66 | 203959 | Uni-ZAP XR | 3004 | 2058 | 1 | 2058 | | 674 | 6105 | 1 | 9 | 10 | 91 |
| | | 04/26/99 | | | | | | | | | | | | |
| 2995 | HTXOL30 | 203959 | Uni-ZAP XR | 3005 | 840 | 1 | 840 | 272 | 272 | 6106 | 1 | | | 14 |
| | | 04/26/99 | | | | | | | | | | | | |
| 2996 | HTXOW27 | 203959 | Uni-ZAP XR | 3006 | 2387 | 627 | 2372 | 1070 | 1070 | 6107 | 1 | 16 | 17 | 26 |
| | | 04/26/99 | | | | | | | | | | | | |
| 2997 | HTXPD86 | 203959 | Uni-ZAP XR | 3007 | 2064 | 559 | 1458 | 900 | 900 | 6108 | 1 | 21 | 22 | 47 |
| | | 04/26/99 | | | | | | | | | | | | |
| 2998 | HTXPT57 | PTA-1838 | Uni-ZAP XR | 3008 | 1127 | 1 | 1127 | 93 | 93 | 6109 | 1 | 23 | 24 | 92 |
| | | 05/09/00 | | | | | | | | | | | | |
| 2999 | HTYSJ88 | 203918 | pBluescript | 3009 | 772 | 1 | 772 | 44 | 44 | 6110 | 1 | 15 | 16 | 35 |
| | | 04/08/99 | | | | | | | | | | | | |
| 3000 | HUDBE20 | 203918 | ZAP Express | 3010 | 1014 | 1 | 1014 | 202 | 202 | 6111 | 1 | 33 | 34 | 39 |
| | | 04/08/99 | | | | | | | | | | | | |
| 3001 | HUDBK47 | 203918 | ZAP Express | 3011 | 1642 | 1 | 1642 | 147 | 147 | 6112 | 1 | 36 | 37 | 39 |
| | | 04/08/99 | | | | | | | | | | | | |
| 3002 | HUFAB57 | 203918 | pSport1 | 3012 | 1534 | 1 | 1534 | 232 | 232 | 6113 | 1 | 17 | 18 | 38 |
| | | 04/08/99 | | | | | | | | | | | | |
| 3003 | HUFAL17 | 203918 | pSport1 | 3013 | 857 | 1 | 857 | 54 | 54 | 6114 | 1 | 13 | 14 | 32 |
| | | 04/08/99 | | | | | | | | | | | | |
| 3004 | HUFAO92 | 203918 | pSport1 | 3014 | 819 | 1 | 819 | 304 | 304 | 6115 | 1 | 12 | 13 | 73 |
| | | 04/08/99 | | | | | | | | | | | | |
| 3005 | HUFAO94 | 203959 | pSport1 | 3015 | 739 | 1 | 739 | 229 | 229 | 6116 | 1 | | | 13 |
| | | 04/26/99 | | | | | | | | | | | | |
| 3006 | HUFAP33 | 203918 | pSport1 | 3016 | 1537 | 1 | 1537 | 60 | 60 | 6117 | 1 | 23 | 24 | 328 |
| | | 04/08/99 | | | | | | | | | | | | |
| 3007 | HUFAU71 | 203959 | pSport1 | 3017 | 2146 | 887 | 2130 | 1041 | 1041 | 6118 | 1 | | | 31 |
| | | 04/26/99 | | | | | | | | | | | | |
| 3008 | HUFBK95 | 203959 | pSport1 | 3018 | 1384 | 1 | 1384 | 174 | 174 | 6119 | 1 | | | 16 |
| | | 04/26/99 | | | | | | | | | | | | |
| 3009 | HUFBP77 | 203918 | pSport1 | 3019 | 1374 | 1 | 1374 | 95 | 95 | 6120 | 1 | 22 | 23 | 109 |
| | | 04/08/99 | | | | | | | | | | | | |
| 3010 | HUFBV62 | 203959 | pSport1 | 3020 | 743 | 1 | 743 | 453 | 453 | 6121 | 1 | 23 | 24 | 31 |
| | | 04/26/99 | | | | | | | | | | | | |
| 3011 | HUFBY96 | 203959 | pSport1 | 3021 | 736 | 1 | 736 | | 334 | 6122 | 1 | 19 | 20 | 25 |
| | | 04/26/99 | | | | | | | | | | | | |
| 3012 | HUFCN72 | 203918 | pSport1 | 3022 | 803 | 1 | 803 | 253 | 253 | 6123 | 1 | 15 | 16 | 30 |
| | | 04/08/99 | | | | | | | | | | | | |
| 3013 | HUFEF79 | 203959 | pSport1 | 3023 | 1010 | 1 | 1010 | 201 | 201 | 6124 | 1 | | | 20 |
| | | 04/26/99 | | | | | | | | | | | | |
| 3014 | HUKAD46 | 203918 | Lambda ZAP II | 3024 | 1554 | 1 | 1554 | 200 | 200 | 6125 | 1 | 43 | 44 | 50 |
| | | 04/08/99 | | | | | | | | | | | | |
| 3015 | HUKAI28 | 203949 | Lambda ZAP II | 3025 | 1700 | 1 | 1700 | 61 | 61 | 6126 | 1 | 15 | 16 | 32 |
| | | 04/29/99 | | | | | | | | | | | | |
| 3016 | HUKAO50 | 203959 | Lambda ZAP II | 3026 | 2058 | 730 | 2058 | 815 | 815 | 6127 | 1 | | | 6 |
| | | 04/26/99 | | | | | | | | | | | | |
| 3017 | HUKCS86 | 203959 | Lambda ZAP II | 3027 | 1781 | 32 | 1773 | 201 | 201 | 6128 | 1 | 20 | 21 | 232 |
| | | 04/26/99 | | | | | | | | | | | | |
| 3018 | HUKCS86 | 203959 | Lambda ZAP II | 3028 | 1781 | 32 | 1773 | 201 | 201 | 6129 | 1 | 20 | 21 | 232 |
| | | 04/26/99 | | | | | | | | | | | | |
| 3019 | HUKEA22 | 203959 | Lambda ZAP II | 3029 | 575 | 1 | 575 | 63 | 63 | 6130 | 1 | 17 | 18 | 36 |
| | | 04/26/99 | | | | | | | | | | | | |
| 3020 | HUKEL79 | 203959 | Lambda ZAP II | 3030 | 646 | 1 | 646 | 94 | 94 | 6131 | 1 | 20 | 21 | 28 |
| | | 04/26/99 | | | | | | | | | | | | |
| 3021 | HUKEX37 | 203959 | Lambda ZAP II | 3031 | 529 | 1 | 529 | | 220 | 6132 | 1 | 18 | 19 | 23 |
| | | 04/26/99 | | | | | | | | | | | | |
| 3022 | HUKFC71 | 203949 | Lambda ZAP II | 3032 | 963 | 1 | 963 | 260 | 260 | 6133 | 1 | | | 9 |
| | | 04/29/99 | | | | | | | | | | | | |
| 3022 | HUKFC71 | 203949 | Lambda ZAP II | 3111 | 1177 | 1 | 973 | 261 | 261 | 6212 | 1 | | | 9 |
| | | 04/29/99 | | | | | | | | | | | | |
| 3023 | HUKFV37 | 203949 | Lambda ZAP II | 3033 | 1574 | 20 | 1531 | 49 | 49 | 6134 | 1 | 45 | 46 | 224 |
| | | 04/29/99 | | | | | | | | | | | | |
| 3024 | HUKFY09 | 203949 | Lambda ZAP II | 3034 | 2735 | 1 | 957 | 237 | 237 | 6135 | 1 | | | 13 |
| | | 04/29/99 | | | | | | | | | | | | |
| 3025 | HUNAL39 | 203918 | pBluescript | 3035 | 1121 | 1 | 1121 | 830 | 830 | 6136 | 1 | | | 10 |
| | | 04/08/99 | SK- | | | | | | | | | | | |
| 3026 | HUSAO04 | PTA-791 | Lambda ZAP II | 3036 | 1971 | 24 | 1664 | | 3 | 6137 | 1 | 1 | 2 | 486 |
| | | 09/27/99 | | | | | | | | | | | | |
| 3027 | HUSAO04 | PTA-791 | Lambda ZAP II | 3037 | 1971 | 24 | 1664 | | 297 | 6138 | 1 | 15 | 16 | 388 |
| | | 09/27/99 | | | | | | | | | | | | |
| 3028 | HUSCA09 | PTA-181 | Lambda ZAP II | 3038 | 1986 | 1 | 1986 | | 101 | 6139 | 1 | 38 | 39 | 510 |
| | | 06/07/99 | | | | | | | | | | | | |
| 3029 | HUSCJ01 | 203918 | Lambda ZAP II | 3039 | 1340 | 1 | 1340 | 205 | 205 | 6140 | 1 | | | 16 |
| | | 04/08/99 | | | | | | | | | | | | |
| 3030 | HUSGB23 | 203959 | pSport1 | 3040 | 719 | 1 | 718 | 168 | 168 | 6141 | 1 | 19 | 20 | 37 |
| | | 04/26/99 | | | | | | | | | | | | |
| 3031 | HUSGJ09 | 203918 | pSport1 | 3041 | 688 | 1 | 688 | 191 | 191 | 6142 | 1 | 23 | 24 | 32 |
| | | 04/08/99 | | | | | | | | | | | | |
| 3032 | HUSGQ57 | 203918 | pSport1 | 3042 | 1940 | 1 | 1940 | 73 | 73 | 6143 | 1 | | | 34 |
| | | 04/08/99 | | | | | | | | | | | | |
| 3033 | HUSGY15 | 203918 | pSport1 | 3043 | 1526 | 299 | 1526 | 643 | 643 | 6144 | 1 | | | 22 |
| | | 04/08/99 | | | | | | | | | | | | |
| 3034 | HUSHD41 | PTA-181 | Lambda ZAP II | 3044 | 2576 | 1 | 2576 | 227 | 227 | 6145 | 1 | 19 | 20 | 72 |
| | | 06/07/99 | | | | | | | | | | | | |
| 3035 | HUSHK65 | 203949 | Lambda ZAP II | 3045 | 6705 | 768 | 2758 | 812 | 812 | 6146 | 1 | 21 | 22 | 487 |
| | | 04/29/99 | | | | | | | | | | | | |
| 3036 | HUSIK45 | PTA-181 | pSport1 | 3046 | 1415 | 1 | 1415 | 204 | 204 | 6147 | 1 | 20 | 21 | 33 |
| | | 06/07/99 | | | | | | | | | | | | |
| 3037 | HUSIO57 | PTA-793 | pSport1 | 3047 | 925 | 1 | 925 | | 177 | 6148 | 1 | 20 | 21 | 41 |
| | | 09/27/99 | | | | | | | | | | | | |
| 3038 | HUSIP17 | 203918 | pSport1 | 3048 | 699 | 1 | 699 | | 301 | 6149 | 1 | 22 | 23 | 26 |
| | | 04/08/99 | | | | | | | | | | | | |
| 3039 | HUSIR70 | 203959 | pSport1 | 3049 | 1236 | 1 | 1236 | 281 | 281 | 6150 | 1 | 23 | 24 | 26 |
| | | 04/26/99 | | | | | | | | | | | | |
| 3040 | HUSXP50 | 203918 | pSport1 | 3050 | 413 | 1 | 413 | 42 | 42 | 6151 | 1 | 29 | 30 | 52 |
| | | 04/08/99 | | | | | | | | | | | | |
| 3041 | HUSXY93 | 203918 | pSport1 | 3051 | 639 | 1 | 639 | 148 | 148 | 6152 | 1 | | | 19 |
| | | 04/08/99 | | | | | | | | | | | | |
| 3042 | HUSYG26 | 203959 | pSport1 | 3052 | 744 | 363 | 744 | 421 | 421 | 6153 | 1 | 28 | 29 | 69 |
| | | 04/26/99 | | | | | | | | | | | | |
| 3043 | HUVCQ68 | 203918 | Uni-ZAP XR | 3053 | 678 | 1 | 678 | 265 | 265 | 6154 | 1 | 17 | 18 | 25 |
| | | 04/08/99 | | | | | | | | | | | | |
| 3044 | HUVDG58 | PTA-1838 | Uni-ZAP XR | 3054 | 2785 | 1 | 2785 | 27 | 27 | 6155 | 1 | 28 | 29 | 38 |
| | | 05/09/00 | | | | | | | | | | | | |
| 3045 | HUVEG53 | 203959 | Uni-ZAP XR | 3055 | 2163 | 151 | 2163 | | 366 | 6156 | 1 | 12 | 13 | 22 |
| | | 04/26/99 | | | | | | | | | | | | |
| 3046 | HWAAH11 | 203959 | pCMVSport 3.0 | 3056 | 1278 | 1 | 1278 | 479 | 479 | 6157 | 1 | 39 | 40 | 92 |
| | | 04/26/99 | | | | | | | | | | | | |
| 3047 | HWAAQ28 | 203959 | pCMVSport 3.0 | 3057 | 1649 | 34 | 1649 | 443 | 443 | 6158 | 1 | 26 | 27 | 87 |
| | | 04/26/99 | | | | | | | | | | | | |
| 3048 | HWAAY60 | 203918 | pCMVSport 3.0 | 3058 | 1727 | 464 | 1727 | 488 | 488 | 6159 | 1 | | | 25 |
| | | 04/08/99 | | | | | | | | | | | | |
| 3049 | HWABR43 | 203959 | pCMVSport 3.0 | 3059 | 2314 | 1 | 2314 | 258 | 258 | 6160 | 1 | 15 | 16 | 31 |
| | | 04/26/99 | | | | | | | | | | | | |
| 3050 | HWACH06 | 203959 | pCMVSport 3.0 | 3060 | 1161 | 1 | 1161 | 318 | 318 | 6161 | 1 | | | 15 |
| | | 04/26/99 | | | | | | | | | | | | |
| 3051 | HWACZ33 | 203959 | pCMVSport 3.0 | 3061 | 1462 | 1 | 1462 | | 110 | 6162 | 1 | 22 | 23 | 62 |
| | | 04/26/99 | | | | | | | | | | | | |
| 3052 | HWADV90 | PTA-1838 | pCMVSport 3.0 | 3062 | 2393 | 1 | 2393 | 314 | 314 | 6163 | 1 | | | 22 |
| | | 05/09/00 | | | | | | | | | | | | |
| 3053 | HWAEB52 | PTA-792 | pCMVSport 3.0 | 3063 | 2193 | 1 | 2193 | 212 | 212 | 6164 | 1 | 23 | 24 | 405 |
| | | 09/27/99 | | | | | | | | | | | | |
| 3054 | HWBAK71 | PTA-181 | pCMVSport 3.0 | 3064 | 372 | 1 | 372 | 260 | 260 | 6165 | 1 | 15 | 16 | 17 |
| | | 06/07/99 | | | | | | | | | | | | |
| 3055 | HWBBU75 | 203949 | pCMVSport 3.0 | 3065 | 2731 | 623 | 2731 | 783 | 783 | 6166 | 1 | 22 | 23 | 51 |
| | | 04/29/99 | | | | | | | | | | | | |
| 3056 | HWBCN81 | PTA-181 | pCMVSport 3.0 | 3066 | 2783 | 1 | 2783 | 615 | 615 | 6167 | 1 | 32 | 33 | 60 |
| | | 06/07/99 | | | | | | | | | | | | |
| 3057 | HWBCP16 | 203959 | pCMVSport 3.0 | 3067 | 625 | 1 | 625 | 140 | 140 | 6168 | 1 | 36 | 37 | 54 |
| | | 04/26/99 | | | | | | | | | | | | |
| 3058 | HWBCX93 | PTA-181 | pCMVSport 3.0 | 3068 | 831 | 1 | 831 | 261 | 261 | 6169 | 1 | 28 | 29 | 30 |
| | | 06/07/99 | | | | | | | | | | | | |
| 3059 | HWBEF34 | 203949 | pCMVSport 3.0 | 3069 | 1468 | 1 | 1468 | 134 | 134 | 6170 | 1 | 31 | 32 | 44 |
| | | 04/29/99 | | | | | | | | | | | | |
| 3060 | HWFBB23 | PTA-181 | pBluescript | 3070 | 1411 | 1 | 1411 | 40 | 40 | 6171 | 1 | 29 | 30 | 38 |
| | | 06/07/99 | SK- | | | | | | | | | | | |
| 3061 | HWFBI40 | 203918 | pBluescript | 3071 | 875 | 1 | 875 | 315 | 315 | 6172 | 1 | | | 17 |
| | | 04/08/99 | SK- | | | | | | | | | | | |
| 3062 | HWHGV77 | 203959 | pCMVSport 3.0 | 3072 | 1026 | 213 | 1026 | 660 | 660 | 6173 | 1 | 17 | 18 | 34 |
| | | 04/26/99 | | | | | | | | | | | | |
| 3063 | HWHGW09 | 203959 | pCMVSport 3.0 | 3073 | 596 | 1 | 596 | 268 | 268 | 6174 | 1 | 23 | 24 | 61 |
| | | 04/26/99 | | | | | | | | | | | | |
| 3064 | HWHHA21 | 203959 | pCMVSport 3.0 | 3074 | 695 | 1 | 695 | 213 | 213 | 6175 | 1 | 47 | 48 | 61 |
| | | 04/26/99 | | | | | | | | | | | | |
| 3065 | HWHPU44 | 203959 | pCMVSport 3.0 | 3075 | 871 | 1 | 871 | 166 | 166 | 6176 | 1 | 28 | 29 | 40 |
| | | 04/26/99 | | | | | | | | | | | | |
| 3066 | HWHRC51 | PTA-181 | pCMVSport 3.0 | 3076 | 843 | 1 | 843 | | 148 | 6177 | 1 | 20 | 21 | 59 |
| | | 06/07/99 | | | | | | | | | | | | |
| 3067 | HWLAT50 | 203959 | pSport1 | 3077 | 2973 | 2488 | 2932 | 2741 | 2741 | 6178 | 1 | | | 11 |
| | | 04/26/99 | | | | | | | | | | | | |
| 3068 | HWLBO67 | 203959 | pSport1 | 3078 | 536 | 1 | 536 | 42 | 42 | 6179 | 1 | 28 | 29 | 39 |
| | | 04/26/99 | | | | | | | | | | | | |
| 3069 | HWLGP26 | 203959 | pSport1 | 3079 | 1898 | 1007 | 1835 | 1091 | 1091 | 6180 | 1 | 23 | 24 | 71 |
| | | 04/26/99 | | | | | | | | | | | | |
| 3070 | HWLHO31 | 203959 | pSport1 | 3080 | 1701 | 1 | 1701 | 183 | 183 | 6181 | 1 | | | 10 |
| | | 04/26/99 | | | | | | | | | | | | |
| 3071 | HWLIL31 | 203959 | pSport1 | 3081 | 787 | 1 | 787 | | 531 | 6182 | 1 | 31 | 32 | 39 |
| | | 04/26/99 | | | | | | | | | | | | |
| 3072 | HWLJN08 | 203959 | pSport1 | 3082 | 1030 | 1 | 1030 | 594 | 594 | 6183 | 1 | 23 | 24 | 31 |
| | | 04/26/99 | | | | | | | | | | | | |
| 3073 | HWLRE03 | 203959 | pSport1 | 3083 | 2770 | 2287 | 2770 | 2526 | 2526 | 6184 | 1 | | | 20 |
| | | 04/26/99 | | | | | | | | | | | | |
| 3074 | HWTAM38 | 203918 | Uni-ZAP XR | 3084 | 598 | 245 | 598 | 377 | 377 | 6185 | 1 | 17 | 18 | 74 |
| | | 04/08/99 | | | | | | | | | | | | |
| 3075 | HWTAW58 | 203959 | Uni-ZAP XR | 3085 | 2306 | 1432 | 2306 | | 1523 | 6186 | 1 | | | 13 |
| | | 04/26/99 | | | | | | | | | | | | |
| 3076 | HWTBB42 | 203959 | Uni-ZAP XR | 3086 | 91 | 1 | 91 | | 33 | 6187 | 1 | | | 10 |
| | | 04/26/99 | | | | | | | | | | | | |
| 3077 | HWTBC75 | PTA-181 | Uni-ZAP XR | 3087 | 699 | 1 | 699 | 228 | 228 | 6188 | 1 | 25 | 26 | 44 |
| | | 06/07/99 | | | | | | | | | | | | |
| 3078 | HWTBI25 | 203918 | Uni-ZAP XR | 3088 | 338 | 1 | 338 | 197 | 197 | 6189 | 1 | 21 | 22 | 33 |
| | | 04/08/99 | | | | | | | | | | | | |
| 3079 | HWTBL86 | 203959 | Uni-ZAP XR | 3089 | 2789 | 2179 | 2789 | 2270 | 2270 | 6190 | 1 | | | 38 |
| | | 04/26/99 | | | | | | | | | | | | |
| 3080 | HWTBX66 | 203959 | Uni-ZAP XR | 3090 | 1145 | 1 | 1145 | | 261 | 6191 | 1 | 11 | 12 | 271 |
| | | 04/26/99 | | | | | | | | | | | | |
| 3081 | HYAAC74 | 203918 | pCMVSport 3.0 | 3091 | 592 | 1 | 592 | 197 | 197 | 6192 | 1 | 18 | 19 | 38 |
| | | 04/08/99 | | | | | | | | | | | | |
| 3082 | HYAAD61 | PTA-1838 | pCMVSport 3.0 | 3092 | 2230 | 1 | 2230 | 341 | 341 | 6193 | 1 | | | 18 |
| | | 05/09/00 | | | | | | | | | | | | |
| 3083 | HYACC21 | 203959 | pCMVSport 3.0 | 3093 | 1223 | 1 | 1223 | 461 | 461 | 6194 | 1 | 17 | 18 | 31 |
| | | 04/26/99 | | | | | | | | | | | | |
| 3084 | HYBAP75 | PTA-181 | Uni-ZAP XR | 3094 | 1168 | 1 | 1168 | | 166 | 6195 | 1 | 26 | 27 | 37 |
| | | 06/07/99 | | | | | | | | | | | | |
| 3085 | HYBAQ24 | PTA-1838 | Uni-ZAP XR | 3095 | 1193 | 1 | 1193 | 261 | 261 | 6196 | 1 | 33 | 34 | 68 |
| | | 05/09/00 | | | | | | | | | | | | |
| 3086 | HYBAW56 | 203918 | Uni-ZAP XR | 3096 | 584 | 1 | 584 | 116 | 116 | 6197 | 1 | 18 | 19 | 50 |
| | | 04/08/99 | | | | | | | | | | | | |
| 3087 | HYBBD81 | 203918 | Uni-ZAP XR | 3097 | 896 | 1 | 896 | 151 | 151 | 6198 | 1 | 11 | 12 | 22 |
| | | 04/08/99 | | | | | | | | | | | | |

Table 1B (Comprised of Tables 1B.1 and 1B.2)

[0129] The first column in Table 1B.1 and Table 1B.2 provides the gene number in the application corresponding to the clone identifier. The second column in Table 1B.1 and Table 1B.2 provides a unique “Clone ID:” for the cDNA clone related to each contig sequence disclosed in Table 1B.1 and Table 1B.2. This clone ID references the cDNA clone which contains at least the 5′ most sequence of the assembled contig and at least a portion of SEQ ID NO:X as determined by directly sequencing the referenced clone. The referenced clone may have more sequence than described in the sequence listing or the clone may have less. In the vast majority of cases, however, the clone is believed to encode a full-length polypeptide. In the case where a clone is not full-length, a full-length cDNA can be obtained by methods described elsewhere herein. The third column in Table 1B.1 and Table 1B.2 provides a unique “Contig ID” identification for each contig sequence. The fourth column in Table 1B.1 and Table 1B.2 provides the “SEQ ID NO:” identifier for each of the contig polynucleotide sequences disclosed in Table 1B.

[0130] Table 1B.1

[0131] The fifth column in Table 1B.1, “ORF (From-To)”, provides the location (i.e., nucleotide position numbers) within the polynucleotide sequence “SEQ ID NO:X” that delineate the preferred open reading frame (ORF) shown in the sequence listing and referenced in Table 1B.1, column 6, as SEQ ID NO:Y. Where the nucleotide position number “To” is lower than the nucleotide position number “From”, the preferred ORF is the reverse complement of the referenced polynucleotide sequence. The sixth column in Table 1B.1 provides the corresponding SEQ ID NO:Y for the polypeptide sequence encoded by the preferred ORF delineated in column 5. In one embodiment, the invention provides an amino acid sequence comprising, or alternatively consisting of, a polypeptide encoded by the portion of SEQ ID NO:X delineated by “ORF (From-To)”. Also provided are polynucleotides encoding such amino acid sequences and the complementary strand thereto. Column 7 in Table 1B.1 lists residues comprising epitopes contained in the polypeptides encoded by the preferred ORF (SEQ ID NO:Y), as predicted using the algorithm of Jameson and Wolf, (1988) Comp. Appl. Biosci. 4:181-186. The Jameson-Wolf antigenic analysis was performed using the computer program PROTEAN (Version 3.11 for the Power MacIntosh, DNASTAR, Inc., 1228 South Park Street Madison, Wis.). In specific embodiments, polypeptides of the invention comprise, or alternatively consist of, at least one, two, three, four, five or more of the predicted epitopes as described in Table 1B. It will be appreciated that depending on the analytical criteria used to predict antigenic determinants, the exact address of the determinant may vary slightly.

[0132] Column 8 in Table 1B.1 provides a chromosomal map location for certain polynucleotides of the invention. Chromosomal location was determined by finding exact matches to EST and cDNA sequences contained in the NCBI (National Center for Biotechnology Information) UniGene database. Each sequence in the UniGene database is assigned to a “cluster”; all of the ESTs, cDNAs, and STSs in a cluster are believed to be derived from a single gene. Chromosomal mapping data is often available for one or more sequence(s) in a UniGene cluster; this data (if consistent) is then applied to the cluster as a whole. Thus, it is possible to infer the chromosomal location of a new polynucleotide sequence by determining its identity with a mapped UniGene cluster.

[0133] A modified version of the computer program BLASTN (Altshul, et al., J. Mol. Biol. 215:403-410 (1990), and Gish, and States, Nat. Genet. 3:266-272) (1993) was used to search the UniGene database for EST or cDNA sequences that contain exact or near-exact matches to a polynucleotide sequence of the invention (the ‘Query’). A sequence from the UniGene database (the ‘Subject’) was said to be an exact match if it contained a segment of 50 nucleotides in length such that 48 of those nucleotides were in the same order as found in the Query sequence. If all of the matches that met this criteria were in the same UniGene cluster, and mapping data was available for this cluster, it is indicated in Table 1B under the heading “Cytologic Band”. Where a cluster had been further localized to a distinct cytologic band, that band is disclosed; where no banding information was available, but the gene had been localized to a single chromosome, the chromosome is disclosed.

[0134] Once a presumptive chromosomal location was determined for a polynucleotide of the invention, an associated disease locus was identified by comparison with a database of diseases which have been experimentally associated with genetic loci. The database used was the Morbid Map, derived from OMIM™ and National Center for Biotechnology Information, National Library of Medicine (Bethesda, Md.) 2000. If the putative chromosomal location of a polynucleotide of the invention (Query sequence) was associated with a disease in the Morbid Map database, an OMIM reference identification number was noted in column 9, Table 1B.1, labelled “OMIM Disease Reference(s). Table 5 is a key to the OMIM reference identification numbers (column 1), and provides a description of the associated disease in Column 2.

[0135] Table 1B.2

[0136] Column 5, in Table 1B.2, provides an expression profile and library Code:Count for each of the contig sequences (SEQ ID NO:X) disclosed in Table 1B, which can routinely be combined with the information provided in Table 4 and used to determine the tissues, cells, and/or cell line libraries which predominantly express the polynucleotides of the invention. The first number in Table 1B.2, column 5 (preceding the colon), represents the tissue/cell source identifier code corresponding to the code and description provided in Table 4. The second number in column 5 (following the colon) represents the number of times a sequence corresponding to the reference polynucleotide sequence was identified in the corresponding tissue/cell source. Those tissue/cell source identifier codes in which the first two letters are “AR” designate information generated using DNA array technology. Utilizing this technology, cDNAs were amplified by PCR and then transferred, in duplicate, onto the array. Gene expression was assayed through hybridization of first strand cDNA probes to the DNA array. cDNA probes were generated from total RNA extracted from a variety of different tissues and cell lines. Probe synthesis was performed in the presence of ³³P dCTP, using oligo (dT) to prime reverse transcription. After hybridization, high stringency washing conditions were employed to remove non-specific hybrids from the array. The remaining signal, emanating from each gene target, was measured using a Phosphorimager. Gene expression was reported as Phosphor Stimulating Luminescence (PSL) which reflects the level of phosphor signal generated from the probe hybridized to each of the gene targets represented on the array. A local background signal subtraction was performed before the total signal generated from each array was used to normalize gene expression between the different hybridizations. The value presented after “[array code]:” represents the mean of the duplicate values, following background subtraction and probe normalization. One of skill in the art could routinely use this information to identify normal and/or diseased tissue(s) which show a predominant expression pattern of the corresponding polynucleotide of the invention or to identify polynucleotides which show predominant and/or specific tissue and/or cell expression.

LENGTHY TABLE REFERENCED HERE
US20070298491A1-20071227-T00001
Please refer to the end of the specification for access instructions.

LENGTHY TABLE REFERENCED HERE
US20070298491A1-20071227-T00002
Please refer to the end of the specification for access instructions.

[0137] Table 1C summarizes additional polynucleotides encompassed by the invention (including cDNA clones related to the sequences (Clone ID:), contig sequences (contig identifier (Contig ID:) contig nucleotide sequence identifiers (SEQ ID NO:X)), and genomic sequences (SEQ ID NO:B). The first column provides a unique clone identifier, “Clone ID:”, for a cDNA clone related to each contig sequence. The second column provides the sequence identifier, “SEQ ID NO:X”, for each contig sequence. The third column provides a unique contig identifier, “Contig ID:” for each contig sequence. The fourth column, provides a BAC identifier “BAC ID NO:A” for the BAC clone referenced in the corresponding row of the table. The fifth column provides the nucleotide sequence identifier, “SEQ ID NO:B” for a fragment of the BAC clone identified in column four of the corresponding row of the table. The sixth column, “Exon From-To”, provides the location (i.e., nucleotide position numbers) within the polynucleotide sequence of SEQ ID NO:B which delineate certain polynucleotides of the invention that are also exemplary members of polynucleotide sequences that encode polypeptides of the invention (e.g., polypeptides containing amino acid sequences encoded by the polynucleotide sequences delineated in column six, and fragments and variants thereof).

LENGTHY TABLE REFERENCED HERE
US20070298491A1-20071227-T00003
Please refer to the end of the specification for access instructions.

[0138] Tables 1D and 1E: The polynucleotides or polypeptides, or agonists or antagonists of the present invention can be used in assays to test for one or more biological activities. If these polynucleotides and polypeptides do exhibit activity in a particular assay, it is likely that these molecules may be involved in the diseases associated with the biological activity. Thus, the polynucleotides or polypeptides, or agonists or antagonists could be used to treat the associated disease.

[0139] The present invention encompasses methods of detecting, preventing, diagnosing, prognosticating, treating, and/or ameliorating a disease or disorder. In preferred embodiments, the present invention encompasses a method of treating a disease or disorder listed in the “Preferred Indications” columns of Table 1D and Table 1E; comprising administering to a patient (in which such treatment, prevention, or amelioration is desired) a protein, nucleic acid, or antibody of the invention (or fragment or variant thereof) in an amount effective to treat, prevent, diagnose, or ameliorate the disease or disorder. The first and second columns of Table 1D show the “Gene No.” and “cDNA Clone ID No.”, respectively, indicating certain nucleic acids and proteins (or antibodies against the same) of the invention (including polynucleotide, polypeptide, and antibody fragments or variants thereof) that may be used in preventing, treating, diagnosing, or ameliorating the disease(s) or disorder(s) indicated in the corresponding row in Column 3 of Table 1D.

[0140] In another embodiment, the present invention also encompasses methods of preventing, treating, diagnosing, or ameliorating a disease or disorder listed in the “Preferred Indications” column of Table 1D and Table 1E; comprising administering to a patient combinations of the proteins, nucleic acids, or antibodies of the invention (or fragments or variants thereof), sharing similar indications as shown in the corresponding rows in Column 3 of Table 1D.

[0141] The “Preferred Indications” columns of Table 1D and Table 1E describe diseases, disorders, and/or conditions that may be treated, prevented, diagnosed, or ameliorated by a protein, nucleic acid, or antibody of the invention (or fragment or variant thereof).

[0142] The recitation of “Cancer” in the “Preferred Indications” columns indicates that the corresponding nucleic acid and protein, or antibody against the same, of the invention (or fragment or variant thereof) may be used for example, to diagnose, treat, prevent, and/or ameliorate diseases and/or disorders relating to neoplastic diseases (e.g., leukemias, cancers, and/or as described below under “Hyperproliferative Disorders”).

[0143] In specific embodiments, a protein, nucleic acid, or antibody of the invention (or fragment or variant thereof) having a “Cancer” recitation in the “Preferred Indication” column of Table 1D may be used for example, to diagnose, treat, prevent, and/or ameliorate a neoplasm located in a tissue selected from the group consisting of: colon, abdomen, bone, breast, digestive system, liver, pancreas, prostate, peritoneum, lung, blood (e.g., leukemia), endocrine glands (adrenal, parathyroid, pituitary, testicles, ovary, thymus, thyroid), uterus, eye, head and neck, nervous (central and peripheral), lymphatic system, pelvic, skin, soft tissue, spleen, thoracic, and urogenital.

[0144] In specific embodiments, a protein, nucleic acid, or antibody of the invention (or fragment or variant thereof) having a “Cancer” recitation in the “Preferred Indication” column of Table 1D, may be used for example, to diagnose, treat, prevent, and/or ameliorate a pre-neoplastic condition, selected from the group consisting of: hyperplasia (e.g., endometrial hyperplasia and/or as described in the section entitled “Hyperproliferative Disorders”), metaplasia (e.g., connective tissue metaplasia, atypical metaplasia, and/or as described in the section entitled “Hyperproliferative Disorders”), and/or dysplasia (e.g., cervical dysplasia, and bronchopulmonary dysplasia).

[0145] In another specific embodiment, a protein, nucleic acid, or antibody of the invention (or fragment or variant thereof) having a “Cancer” recitation in the “Preferred Indication” column of Table 1D, may be used for example, to diagnose, treat, prevent, and/or ameliorate a benign dysproliferative disorder selected from the group consisting of: benign tumors, fibrocystic conditions, tissue hypertrophy, and/or as described in the section entitled “Hyperproliferative Disorders”.

[0146] The recitation of “Immune/Hematopoietic” in the “Preferred Indication” column indicates that the corresponding nucleic acid and protein, or antibody against the same, of the invention (or fragment or variant thereof), may be used for example, to diagnose, treat, prevent, and/or ameliorate diseases and/or disorders relating to neoplastic diseases (e.g., as described below under “Hyperproliferative Disorders”), blood disorders (e.g., as described below under “Immune Activity” “Cardiovascular Disorders” and/or “Blood-Related Disorders”), and infections (e.g., as described below under “Infectious Disease”).

[0147] In specific embodiments, a protein, nucleic acid, or antibody of the invention (or fragment or variant thereof) having the “Immune/Hematopoietic” recitation in the “Preferred Indication” column of Table 1D, may be used for example, to diagnose, treat, prevent, and/or ameliorate a disease or disorder selected from the group consisting of: anemia, pancytopenia, leukopenia, thrombocytopenia, leukemias, Hodgkin's disease, non-Hodgkin's lymphoma, acute lymphocytic anemia (ALL), plasmacytomas, multiple myeloma, Burkitt's lymphoma, arthritis, asthma, AIDS, autoimmune disease, rheumatoid arthritis, granulomatous disease, immune deficiency, inflammatory bowel disease, sepsis, neutropenia, neutrophilia, psoriasis, immune reactions to transplanted organs and tissues, systemic lupus erythematosis, hemophilia, hypercoagulation, diabetes mellitus, endocarditis, meningitis, Lyme Disease, and allergies.

[0148] The recitation of “Reproductive” in the “Preferred Indication” column indicates that the corresponding nucleic acid and protein, or antibody against the same, of the invention (or fragment or variant thereof), may be used for example, to diagnose, treat, prevent, and/or ameliorate diseases and/or disorders relating to neoplastic diseases (e.g., as described below under “Hyperproliferative Disorders”), and disorders of the reproductive system (e.g., as described below under “Reproductive System Disorders”).

[0149] In specific embodiments, a protein, nucleic acid, or antibody of the invention (or fragment or variant thereof) having a “Reproductive” recitation in the “Preferred Indication” column of Table 1D, may be used for example, to diagnose, treat, prevent, and/or ameliorate a disease or disorder selected from the group consisting of: cryptorchism, prostatitis, inguinal hernia, varicocele, leydig cell tumors, verrucous carcinoma, prostatitis, malacoplakia, Peyronie's disease, penile carcinoma, squamous cell hyperplasia, dysmenorrhea, ovarian adenocarcinoma, Turner's syndrome, mucop lent cervicitis, Sertoli-leydig tumors, ovarian cancer, uterine cancer, pelvic inflammatory disease, testicular cancer, prostate cancer, Klinefelter's syndrome, Young's syndrome, premature ejaculation, diabetes mellitus, cystic fibrosis, Kartagener's syndrome, testicular atrophy, testicular feminization, anorchia, ectopic testis, epididymitis, orchitis, gonorrhea, syphilis, testicular torsion, vasitis nodosa, germ cell tumors, stromal tumors, dysmenorrhea, retroverted uterus, endometriosis, fibroids, adenomyosis, anovulatory bleeding, amenorrhea, Cushing's syndrome, hydatidiform moles, Asherman's syndrome, premature menopause, precocious puberty, uterine polyps, dysfunctional uterine bleeding, cervicitis, chronic cervicitis, mucopurulent cervicitis, cervical dysplasia, cervical polyps, Nabothian cysts, cervical erosion, cervical incompetence, cervical neoplasms, pseudohermaphroditism, and premenstrual syndrome.

[0150] The recitation of “Musculoskeletal” in the “Preferred Indication” column indicates that the corresponding nucleic acid and protein, or antibody against the same, of the invention (or fragment or variant thereof), may be used for example, to diagnose, treat, prevent, and/or ameliorate diseases and/or disorders relating to neoplastic diseases (e.g., as described below under “Hyperproliferative Disorders”), and disorders of the immune system (e.g., as described below under “Immune Activity”).

[0151] In specific embodiments, a protein, nucleic acid, or antibody of the invention (or fragment or variant thereof) having a “Musculoskeletal” recitation in the “Preferred Indication” column of Table 1D, may be used for example, to diagnose, treat, prevent, and/or ameliorate a disease or disorder selected from the group consisting of: bone cancers (e.g., osteochondromas, benign chondromas, chondroblastoma, chondromyxoid fibromas, osteoid osteomas, giant cell tumors, multiple myeloma, osteosarcomas), Paget's Disease, rheumatoid arthritis, systemic lupus erythematosus, osteomyelitis, Lyme Disease, gout, bursitis, tendonitis, osteoporosis, osteoarthritis, muscular dystrophy, mitochondrial myopathy, cachexia, and multiple sclerosis.

[0152] The recitation of “Cardiovascular” in the “Preferred Indication” column indicates that the corresponding nucleic acid and protein, or antibody against the same, of the invention (or fragment or variant thereof), may be used for example, to diagnose, treat, prevent, and/or ameliorate diseases and/or disorders relating to neoplastic diseases (e.g., as described below under “Hyperproliferative Disorders”), and disorders of the cardiovascular system (e.g., as described below under “Cardiovascular Disorders”).

[0153] In specific embodiments, a protein, nucleic acid, or antibody of the invention (or fragment or variant thereof) having a “Cardiovascular” recitation in the “Preferred Indication” column of Table 1D, may be used for example, to diagnose, treat, prevent, and/or ameliorate a disease or disorder selected from the group consisting of: myxomas, fibromas, rhabdomyomas, cardiovascular abnormalities (e.g., congenital heart defects, cerebral arteriovenous malformations, septal defects), heart disease (e.g., heart failure, congestive heart disease, arrhythmia, tachycardia, fibrillation, pericardial Disease, endocarditis), cardiac arrest, heart valve disease (e.g., stenosis, regurgitation, prolapse), vascular disease (e.g., hypertension, coronary artery disease, angina, aneurysm, arteriosclerosis, peripheral vascular disease), hyponatremia, hypematremia, hypokalemia, and hyperkalemia.

[0154] The recitation of “Mixed Fetal” in the “Preferred Indication” column indicates that the corresponding nucleic acid and protein, or antibody against the same, of the invention (or fragment or variant thereof), may be used for example, to diagnose, treat, prevent, and/or ameliorate diseases and/or disorders relating to neoplastic diseases (e.g., as described below under “Hyperproliferative Disorders”).

[0155] In specific embodiments, a protein, nucleic acid, or antibody of the invention (or fragment or variant thereof) having a “Mixed Fetal” recitation in the “Preferred Indication” column of Table 1D, may be used for example, to diagnose, treat, prevent, and/or ameliorate a disease or disorder selected from the group consisting of: spina bifida, hydranencephaly, neurofibromatosis, fetal alcohol syndrome, diabetes mellitus, PKU, Down's syndrome, Patau syndrome, Edwards syndrome, Turner syndrome, Apert syndrome, Carpenter syndrome, Conradi syndrome, Crouzon syndrome, cutis laxa, Cornelia de Lange syndrome, Ellis-van Creveld syndrome, Holt-Oram syndrome, Kartagener syndrome, Meckel-Gruber syndrome, Noonan syndrome, Pallister-Hall syndrome, Rubinstein-Taybi syndrome, Scimitar syndrome, Smith-Lemli-Opitz syndrome, thromocytopenia-absent radius (TAR) syndrome, Treacher Collins syndrome, Williams syndrome, Hirschsprung's disease, Meckel's diverticulum, polycystic kidney disease, Turner's syndrome, and gonadal dysgenesis, Klippel-Feil syndrome, Ostogenesis imperfecta, muscular dystrophy, Tay-Sachs disease, Wilm's tumor, neuroblastoma, and retinoblastoma.

[0156] The recitation of “Excretory” in the “Preferred Indication” column indicates that the corresponding nucleic acid and protein, or antibody against the same, of the invention (or fragment or variant thereof), may be used for example, to diagnose, treat, prevent, and/or ameliorate diseases and/or disorders relating to neoplastic diseases (e.g., as described below under “Hyperproliferative Disorders”) and renal disorders (e.g., as described below under “Renal Disorders”).

[0157] In specific embodiments, a protein, nucleic acid, or antibody of the invention (or fragment or variant thereof) having a “Excretory” recitation in the “Preferred Indication” column of Table 1D, may be used for example, to diagnose, treat, prevent, and/or ameliorate a disease or disorder selected from the group consisting of: bladder cancer, prostate cancer, benign prostatic hyperplasia, bladder disorders (e.g., urinary incontinence, urinary retention, urinary obstruction, urinary tract Infections, interstitial cystitis, prostatitis, neurogenic bladder, hematuria), renal disorders (e.g., hydronephrosis, proteinuria, renal failure, pyelonephritis, urolithiasis, reflux nephropathy, and unilateral obstructive uropathy).

[0158] The recitation of “Neural/Sensory” in the “Preferred Indication” column indicates that the corresponding nucleic acid and protein, or antibody against the same, of the invention (or fragment or variant thereof), may be used for example, to diagnose, treat, prevent, and/or ameliorate diseases and/or disorders relating to neoplastic diseases (e.g., as described below under “Hyperproliferative Disorders”) and diseases or disorders of the nervous system (e.g., as described below under “Neural Activity and Neurological Diseases”).

[0159] In specific embodiments, a protein, nucleic acid, or antibody of the invention (or fragment or variant thereof) having a “Neural/Sensory” recitation in the “Preferred Indication” column of Table 1D, may be used for example, to diagnose, treat, prevent, and/or ameliorate a disease or disorder selected from the group consisting of: brain cancer (e.g., brain stem glioma, brain tumors, central nervous system (Primary) lymphoma, central nervous system lymphoma, cerebellar astrocytoma, and cerebral astrocytoma, neurodegenerative disorders (e.g., Alzheimer's Disease, Creutzfeldt-Jakob Disease, Parkinson's Disease, and Idiopathic Presenile Dementia), encephalomyelitis, cerebral malaria, meningitis, metabolic brain diseases (e.g., phenylketonuria and pyruvate carboxylase deficiency), cerebellar ataxia, ataxia telangiectasia, and AIDS Dementia Complex, schizophrenia, attention deficit disorder, hyperactive attention deficit disorder, autism, and obsessive compulsive disorders.

[0160] The recitation of “Respiratory” in the “Preferred Indication” column indicates that the corresponding nucleic acid and protein, or antibody against the same, of the invention (or fragment or variant thereof), may be used for example, to diagnose, treat, prevent, and/or ameliorate diseases and/or disorders relating to neoplastic diseases (e.g., as described below under “Hyperproliferative Disorders”) and diseases or disorders of the respiratory system (e.g., as described below under “Respiratory Disorders”).

[0161] In specific embodiments, a protein, nucleic acid, or antibody of the invention (or fragment or variant thereof) having a “Respiratory” recitation in the “Preferred Indication” column of Table 1D, may be used for example, to diagnose, treat, prevent, and/or ameliorate a disease or disorder selected from the group consisting of: cancers of the respiratory system such as larynx cancer, pharynx cancer, trachea cancer, epiglottis cancer, lung cancer, squamous cell carcinomas, small cell (oat cell) carcinomas, large cell carcinomas, and adenocarcinomas. Allergic reactions, cystic fibrosis, sarcoidosis, histiocytosis X, infiltrative lung diseases (e.g., pulmonary fibrosis and lymphoid interstitial pneumonia), obstructive airway diseases (e.g., asthma, emphysema, chronic or acute bronchitis), occupational lung diseases (e.g., silicosis and asbestosis), pneumonia, and pleurisy.

[0162] The recitation of “Endocrine” in the “Preferred Indication” column indicates that the corresponding nucleic acid and protein, or antibody against the same, of the invention (or fragment or variant thereof), may be used for example, to diagnose, treat, prevent, and/or ameliorate diseases and/or disorders relating to neoplastic diseases (e.g., as described below under “Hyperproliferative Disorders”) and diseases or disorders of the respiratory system (e.g., as described below under “Respiratory Disorders”), renal disorders (e.g., as described below under “Renal Disorders”), and disorders of the endocrine system (e.g., as described below under “Endocrine Disorders”.

[0163] In specific embodiments, a protein, nucleic acid, or antibody of the invention (or fragment or variant thereof) having an “Endocrine” recitation in the “Preferred Indication” column of Table 1D, may be used for example, to diagnose, treat, prevent, and/or ameliorate a disease or disorder selected from the group consisting of: cancers of endocrine tissues and organs (e.g., cancers of the hypothalamus, pituitary gland, thyroid gland, parathyroid glands, pancreas, adrenal glands, ovaries, and testes), diabetes (e.g., diabetes insipidus, type I and type II diabetes mellitus), obesity, disorders related to pituitary glands (e.g., hyperpituitarism, hypopituitarism, and pituitary dwarfism), hypothyroidism, hyperthyroidism, goiter, reproductive disorders (e.g. male and female infertility), disorders related to adrenal glands (e.g., Addison's Disease, corticosteroid deficiency, and Cushing's Syndrome), kidney cancer (e.g., hypemephroma, transitional cell cancer, and Wilm's tumor), diabetic nephropathy, interstitial nephritis, polycystic kidney disease, glomerulonephritis (e.g., IgM mesangial proliferative glomerulonephritis and glomerulonephritis caused by autoimmune disorders; such as Goodpasture's syndrome), and nephrocalcinosis.

[0164] The recitation of “Digestive” in the “Preferred Indication” column indicates that the corresponding nucleic acid and protein, or antibody against the same, of the invention (or fragment or variant thereof), may be used for example, to diagnose, treat, prevent, and/or ameliorate diseases and/or disorders relating to neoplastic diseases (e.g., as described below under “Hyperproliferative Disorders”) and diseases or disorders of the gastrointestinal system (e.g., as described below under “Gastrointestinal Disorders”.

[0165] In specific embodiments, a protein, nucleic acid, or antibody of the invention (or fragment or variant thereof) having a “Digestive” recitation in the “Preferred Indication” column of Table 1D, may be used for example, to diagnose, treat, prevent, and/or ameliorate a disease or disorder selected from the group consisting of: ulcerative colitis, appendicitis, Crohn's disease, hepatitis, hepatic encephalopathy, portal hypertension, cholelithiasis, cancer of the digestive system (e.g., biliary tract cancer, stomach cancer, colon cancer, gastric cancer, pancreatic cancer, cancer of the bile duct, tumors of the colon (e.g., polyps or cancers), and cirrhosis), pancreatitis, ulcerative disease, pyloric stenosis, gastroenteritis, gastritis, gastric atropy, benign tumors of the duodenum, distension, irritable bowel syndrome, malabsorption, congenital disorders of the small intestine, bacterial and parasitic infection, megacolon, Hirschsprung's disease, aganglionic megacolon, acquired megacolon, colitis, anorectal disorders (e.g., anal fistulas, hemorrhoids), congenital disorders of the liver (e.g., Wilson's disease, hemochromatosis, cystic fibrosis, biliary atresia, and alpha1-antitrypsin deficiency), portal hypertension, cholelithiasis, and jaundice.

[0166] The recitation of “Connective/Epithelial” in the “Preferred Indication” column indicates that the corresponding nucleic acid and protein, or antibody against the same, of the invention (or fragment or variant thereof), may be used for example, to diagnose, treat, prevent, and/or ameliorate diseases and/or disorders relating to neoplastic diseases (e.g., as described below under “Hyperproliferative Disorders”), cellular and genetic abnormalities (e.g., as described below under “Diseases at the Cellular Level”), angiogenesis (e.g., as described below under “Anti-Angiogenesis Activity”), and or to promote or inhibit regeneration (e.g., as described below under “Regeneration”), and wound healing (e.g., as described below under “Wound Healing and Epithelial Cell Proliferation”).

[0167] In specific embodiments, a protein, nucleic acid, or antibody of the invention (or fragment or variant thereof) having a “Connective/Epithelial” recitation in the “Preferred Indication” column of Table 1D, may be used for example, to diagnose, treat, prevent, and/or ameliorate a disease or disorder selected from the group consisting of: connective tissue metaplasia, mixed connective tissue disease, focal epithelial hyperplasia, epithelial metaplasia, mucoepithelial dysplasia, graft v. host disease, polymyositis, cystic hyperplasia, cerebral dysplasia, tissue hypertrophy, Alzheimer's disease, lymphoproliferative disorder, Waldenstron's macroglobulinemia, Crohn's disease, pemicious anemia, idiopathic Addison's disease, glomerulonephritis, bullous pemphigoid, Sjogren's syndrome, diabetes mellitus, cystic fibrosis, osteoblastoma, osteoclastoma, osteosarcoma, chondrosarcoma, osteoporosis, osteocarthritis, periodontal disease, wound healing, relapsing polychondritis, vasculitis, polyarteritis nodosa, Wegener's granulomatosis, cellulitis, rheumatoid arthritis, psoriatic arthritis, discoid lupus erythematosus, systemic lupus erythematosus, scleroderma, CREST syndrome, Sjogren's syndrome, polymyositis, dermatomyositis, mixed connective tissue disease, relapsing polychondritis, vasculitis, Henoch-Schonlein syndrome, erythema nodosum, polyarteritis nodosa, temporal (giant cell) arteritis, Takayasu's arteritis, Wegener's granulomatosis, Reiter's syndrome, Behcet's syndrome, ankylosing spondylitis, cellulitis, keloids, Ehler Danlos syndrome, Marfan syndrome, pseudoxantoma elasticum, osteogenese imperfecta, chondrodysplasias, epidermolysis bullosa, Alport syndrome, and cutis laxa.

TABLE 1D

| Gene No. | cDNA Clone ID | Preferred Indication Identifiers |
|---|---|---|
| 1 | H6BSF56 | Cancer |
| 2 | H6EDM64 | Cancer |
| 3 | H6EEC72 | Cancer |
| 4 | HACAB68 | Connective/Epithelial, |
| | | Immune/Hematopoietic |
| 5 | HACBJ56 | Cancer |
| 6 | HACBS22 | Cancer |
| 7 | HADDE71 | Cancer |
| 8 | HADDJ13 | Connective/Epithelial |
| 9 | HADMB15 | Cancer |
| 10 | HAGBQ12 | Excretory, |
| | | Neural/Sensory |
| 11 | HAGDW20 | Neural/Sensory, |
| | | Reproductive |
| 12 | HAGEG10 | Cancer |
| 13 | HAGEQ79 | Digestive, |
| | | Neural/Sensory |
| 14 | HAGFS57 | Cancer |
| 15 | HAGHN57 | Cancer |
| 16 | HAHEA15 | Cardiovascular |
| 17 | HAJAA47 | Immune/Hematopoietic |
| 18 | HAJAY92 | Cancer |
| 19 | HAJBV67 | Cancer |
| 20 | HAJCH70 | Cancer |
| 21 | HAOAG15 | Cancer |
| 22 | HAQAI92 | Digestive, |
| | | Mixed Fetal, |
| | | Reproductive |
| 23 | HAQCE11 | Reproductive |
| 24 | HATBI94 | Cancer |
| 25 | HATCB45 | Cancer |
| 26 | HATCD80 | Endocrine, |
| | | Reproductive |
| 27 | HATCI03 | Endocrine, |
| | | Immune/Hematopoietic, |
| | | Neural/Sensory |
| 28 | HATEH20 | Cancer |
| 29 | HBAGD86 | Cancer |
| 30 | HBCJL35 | Cancer |
| 31 | HBDAB91 | Immune/Hematopoietic |
| 32 | HBDAB91 | Immune/Hematopoietic |
| 33 | HBGBC29 | Cancer |
| 34 | HBGNC72 | Cancer |
| 35 | HBHAA05 | Neural/Sensory |
| 36 | HBHAA81 | Cancer |
| 37 | HBIAA59 | Cancer |
| 38 | HBIAC29 | Cancer |
| 39 | HBICW51 | Digestive, |
| | | Immune/Hematopoietic, |
| | | Neural/Sensory |
| 40 | HBJAB02 | Cancer |
| 41 | HBJAC65 | Cancer |
| 42 | HBJBM12 | Immune/Hematopoietic |
| 43 | HBJCR46 | Cancer |
| 44 | HBJDS79 | Cancer |
| 45 | HBJDW56 | Immune/Hematopoietic |
| 46 | HBJEL16 | Cancer |
| 47 | HBJFK45 | Immune/Hematopoietic |
| 48 | HBJIG20 | Cancer |
| 49 | HBJKD16 | Cancer |
| 50 | HBMBM96 | Digestive, |
| | | Immune/Hematopoietic, |
| | | Neural/Sensory |
| 51 | HBMBX01 | Cancer |
| 52 | HBMTM11 | Cancer |
| 53 | HBMTX26 | Immune/Hematopoietic |
| 54 | HBMTY48 | Immune/Hematopoietic, |
| | | Reproductive |
| 55 | HBMUH74 | Cardiovascular, |
| | | Immune/Hematopoietic, |
| | | Reproductive |
| 56 | HBMWE61 | Immune/Hematopoietic |
| 57 | HBNAX40 | Cancer |
| 58 | HBNBJ76 | Cancer |
| 59 | HBQAB79 | Neural/Sensory |
| 60 | HBQAC57 | Neural/Sensory |
| 61 | HBSAK32 | Mixed Fetal, |
| | | Musculoskeletal, |
| | | Neural/Sensory |
| 62 | HBXCM66 | Cardiovascular, |
| | | Neural/Sensory, |
| | | Reproductive |
| 63 | HBXCX15 | Immune/Hematopoietic, |
| | | Neural/Sensory |
| 64 | HCDCY76 | Cancer |
| 65 | HCDDL48 | Musculoskeletal |
| 66 | HCE1G78 | Cancer |
| 67 | HCE2H52 | Cancer |
| 68 | HCE3B04 | Digestive, |
| | | Neural/Sensory |
| 69 | HCE5F78 | Immune/Hematopoietic, |
| | | Neural/Sensory |
| 70 | HCEDR26 | Digestive, |
| | | Immune/Hematopoietic, |
| | | Neural/Sensory |
| 71 | HCEEE79 | Neural/Sensory |
| 72 | HCEEQ25 | Mixed Fetal, |
| | | Neural/Sensory |
| 73 | HCEEU18 | Neural/Sensory |
| 74 | HCEFZ82 | Cancer |
| 75 | HCEGX05 | Cancer |
| 76 | HCFLN88 | Cancer |
| 77 | HCFLT90 | Cancer |
| 78 | HCHAB84 | Cancer |
| 79 | HCMSX51 | Cancer |
| 80 | HCNCO11 | Digestive |
| 81 | HCNSD29 | Cardiovascular, |
| | | Digestive, |
| | | Immune/Hematopoietic |
| 82 | HCQBH72 | Digestive, |
| | | Excretory, |
| | | Immune/Hematopoietic |
| 83 | HCQCC96 | Cancer |
| 84 | HCQCJ56 | Cardiovascular, |
| | | Digestive, |
| | | Reproductive |
| 85 | HCQCM24 | Cancer |
| 86 | HCRAY10 | Cancer |
| 87 | HCRBF72 | Cancer |
| 88 | HCRNF78 | Cancer |
| 89 | HCUAF85 | Immune/Hematopoietic |
| 90 | HCUCF89 | Immune/Hematopoietic |
| 91 | HCUCK44 | Cancer |
| 92 | HCUDD64 | Cancer |
| 93 | HCWAE64 | Immune/Hematopoietic |
| 94 | HCWFU39 | Immune/Hematopoietic, |
| | | Neural/Sensory |
| 95 | HCWUL09 | Immune/Hematopoietic, |
| | | Neural/Sensory |
| 96 | HDHAA42 | Cancer |
| 97 | HDHEB76 | Mixed Fetal, |
| | | Neural/Sensory |
| 98 | HDPCW16 | Cancer |
| 99 | HDPDI72 | Immune/Hematopoietic |
| 100 | HDPDJ58 | Cancer |
| 101 | HDPFF10 | Cancer |
| 102 | HDPFU43 | Cancer |
| 103 | HDPFY18 | Cancer |
| 104 | HDPGE24 | Cancer |
| 105 | HDPIU94 | Cancer |
| 106 | HDPOC24 | Cancer |
| 107 | HDPOL37 | Immune/Hematopoietic, |
| | | Reproductive |
| 108 | HDPOO76 | Cancer |
| 109 | HDPPD93 | Cancer |
| 110 | HDPPQ30 | Connective/Epithelial, |
| | | Immune/Hematopoietic, |
| | | Musculoskeletal |
| 111 | HDPPW82 | Immune/Hematopoietic |
| 112 | HDPXN20 | Immune/Hematopoietic |
| 113 | HDQHM36 | Immune/Hematopoietic |
| 114 | HDTAU35 | Immune/Hematopoietic |
| 115 | HDTAV54 | Cancer |
| 116 | HDTFX18 | Immune/Hematopoietic, |
| | | Reproductive |
| 117 | HDTGW48 | Immune/Hematopoietic, |
| | | Reproductive |
| 118 | HDTLM18 | Immune/Hematopoietic |
| 119 | HE2CA60 | Cancer |
| 120 | HE2CA60 | Cancer |
| 121 | HE2CH58 | Digestive, |
| | | Mixed Fetal |
| 122 | HE2CM39 | Cancer |
| 123 | HE2HC60 | Cancer |
| 124 | HE2PO93 | Cancer |
| 125 | HE6AU52 | Mixed Fetal |
| 126 | HE6CS65 | Cancer |
| 127 | HE6DO92 | Immune/Hematopoietic, |
| | | Mixed Fetal |
| 128 | HE6EY13 | Cancer |
| 129 | HE6FU11 | Mixed Fetal, |
| | | Neural/Sensory, |
| | | Respiratory |
| 130 | HE6FV29 | Cancer |
| 131 | HE8FC45 | Cancer |
| 132 | HE8FC45 | Cancer |
| 133 | HE8FD92 | Cancer |
| 134 | HE8FD92 | Cancer |
| 135 | HE8FD92 | Cancer |
| 136 | HE8FD92 | Cancer |
| 137 | HE8FD92 | Cancer |
| 138 | HE8SG96 | Mixed Fetal, |
| | | Neural/Sensory |
| 139 | HE8TY46 | Cancer |
| 140 | HE9CY05 | Mixed Fetal |
| 141 | HE9EA10 | Cancer |
| 142 | HE9GG20 | Cancer |
| 143 | HEBCI18 | Cancer |
| 144 | HEBCY54 | Cancer |
| 145 | HEBDF77 | Neural/Sensory |
| 146 | HEBDQ91 | Neural/Sensory |
| 147 | HEBFR46 | Cancer |
| 148 | HEBGE07 | Neural/Sensory |
| 149 | HEGAU15 | Excretory, |
| | | Immune/Hematopoietic, |
| | | Reproductive |
| 150 | HELAT35 | Cardiovascular, |
| | | Mixed Fetal |
| 151 | HELBU54 | Cardiovascular, |
| | | Digestive |
| 152 | HELGG84 | Cancer |
| 153 | HELGG84 | Cancer |
| 154 | HEMEY47 | Cancer |
| 155 | HEOMC46 | Immune/Hematopoietic |
| 156 | HEPBA14 | Reproductive |
| 157 | HEQAH80 | Cancer |
| 158 | HEQBF89 | Reproductive |
| 159 | HETCI16 | Cancer |
| 160 | HETDW58 | Cancer |
| 161 | HETEY67 | Connective/Epithelial, |
| | | Immune/Hematopoietic, |
| | | Reproductive |
| 162 | HFCDW95 | Cancer |
| 163 | HFCEI04 | Neural/Sensory |
| 164 | HFCFD04 | Neural/Sensory |
| 165 | HFCFE20 | Cancer |
| 166 | HFEAY59 | Connective/Epithelial |
| 167 | HFGAJ16 | Cancer |
| 168 | HFIHZ75 | Cancer |
| 169 | HFIJA29 | Cancer |
| 170 | HFIJA68 | Musculoskeletal |
| 171 | HFKES05 | Cancer |
| 172 | HFKEU12 | Excretory |
| 173 | HFPCZ55 | Cancer |
| 174 | HFPDR62 | Immune/Hematopoietic, |
| | | Neural/Sensory |
| 175 | HFPDS07 | Cancer |
| 176 | HFRAB10 | Excretory, |
| | | Immune/Hematopoietic, |
| | | Neural/Sensory |
| 177 | HFTBM38 | Cancer |
| 178 | HFTDH56 | Cancer |
| 179 | HFVGK35 | Cancer |
| 180 | HFVHW43 | Digestive |
| 181 | HFXAV37 | Immune/Hematopoietic, |
| | | Neural/Sensory |
| 182 | HFXBN86 | Neural/Sensory |
| 183 | HFXBT66 | Neural/Sensory |
| 184 | HFXFZ46 | Neural/Sensory |
| 185 | HGBER72 | Cancer |
| 186 | HGBEY14 | Cancer |
| 187 | HGBGN34 | Cancer |
| 188 | HGBHP91 | Digestive |
| 189 | HGCAC19 | Cancer |
| 190 | HGCAC19 | Cancer |
| 191 | HGCAC19 | Cancer |
| 192 | HHEAK45 | Cancer |
| 193 | HHEGS55 | Immune/Hematopoietic |
| 194 | HHEOW19 | Cancer |
| 195 | HHFFF87 | Cancer |
| 196 | HHFFL34 | Cancer |
| 197 | HHFFS40 | Cancer |
| 198 | HHGCS78 | Immune/Hematopoietic |
| 199 | HHGDT26 | Immune/Hematopoietic, |
| | | Reproductive |
| 200 | HHPFU28 | Cancer |
| 201 | HHPSA85 | Cancer |
| 202 | HHSBI06 | Cancer |
| 203 | HHSBI65 | Cancer |
| 204 | HHSDI53 | Cancer |
| 205 | HHSFC09 | Cancer |
| 206 | HHSGL28 | Cancer |
| 207 | HILCA24 | Digestive, |
| | | Immune/Hematopoietic, |
| | | Reproductive |
| 208 | HILCA24 | Digestive, |
| | | Immune/Hematopoietic, |
| | | Reproductive |
| 209 | HISAT67 | Cancer |
| 210 | HJBCU75 | Cancer |
| 211 | HJMAA03 | Cancer |
| 212 | HJMAV41 | Cancer |
| 213 | HJMAY90 | Cancer |
| 214 | HJPBE39 | Cancer |
| 215 | HJPBK28 | Cancer |
| 216 | HJPCH08 | Cancer |
| 217 | HKABU43 | Cancer |
| 218 | HKACI79 | Cancer |
| 219 | HKAFF50 | Cancer |
| 220 | HKGBF25 | Cancer |
| 221 | HKIXC44 | Cancer |
| 222 | HKMLK03 | Digestive, |
| | | Excretory, |
| | | Immune/Hematopoietic |
| 223 | HKMLM95 | Cancer |
| 224 | HKTAB41 | Digestive, |
| | | Excretory |
| 225 | HLDBG17 | Cancer |
| 226 | HLDCA54 | Cancer |
| 227 | HLDQU79 | Cancer |
| 228 | HLDRT09 | Cancer |
| 229 | HLHAP05 | Immune/Hematopoietic, |
| | | Neural/Sensory, |
| | | Respiratory |
| 230 | HLHCS23 | Respiratory |
| 231 | HLIBO72 | Cancer |
| 232 | HLICE88 | Cancer |
| 233 | HLICO10 | Cancer |
| 234 | HLJBS28 | Cancer |
| 235 | HLMBW89 | Cancer |
| 236 | HLMGP50 | Digestive, |
| | | Immune/Hematopoietic |
| 237 | HLMJB64 | Cancer |
| 238 | HLMMX62 | Cancer |
| 239 | HLQAS12 | Cancer |
| 240 | HLQCL64 | Digestive, |
| | | Immune/Hematopoietic, |
| | | Reproductive |
| 241 | HLQCX36 | Digestive |
| 242 | HLWAF06 | Immune/Hematopoietic, |
| | | Reproductive |
| 243 | HLWAU42 | Cancer |
| 244 | HLWAU42 | Cancer |
| 245 | HLWAV47 | Cancer |
| 246 | HLWBB73 | Cancer |
| 247 | HLWCN37 | Cancer |
| 248 | HLWDB73 | Cancer |
| 249 | HLYDF73 | Immune/Hematopoietic |
| 250 | HLYEU59 | Immune/Hematopoietic |
| 251 | HLYGB19 | Cancer |
| 252 | HLYGE16 | Cancer |
| 253 | HLYGY91 | Cancer |
| 254 | HMCAZ04 | Cancer |
| 255 | HMCAZ04 | Cancer |
| 256 | HMCAZ04 | Cancer |
| 257 | HMCAZ04 | Cancer |
| 258 | HMCAZ04 | Cancer |
| 259 | HMCFH60 | Cancer |
| 260 | HMDAB29 | Digestive, |
| | | Neural/Sensory |
| 261 | HMDAD44 | Connective/Epithelial, |
| | | Immune/Hematopoietic, |
| | | Neural/Sensory |
| 262 | HMEBB82 | Cancer |
| 263 | HMEDE24 | Cardiovascular |
| 264 | HMEDI90 | Cardiovascular, |
| | | Musculoskeletal, |
| | | Neural/Sensory |
| 265 | HMELM75 | Cancer |
| 266 | HMIAK10 | Neural/Sensory |
| 267 | HMIBF07 | Neural/Sensory |
| 268 | HMICI80 | Cardiovascular, |
| | | Endocrine, |
| | | Neural/Sensory |
| 269 | HMICP65 | Cancer |
| 270 | HMJAK70 | Neural/Sensory |
| 271 | HMSBE04 | Immune/Hematopoietic |
| 272 | HMSCL38 | Immune/Hematopoietic, |
| | | Neural/Sensory |
| 273 | HMSCR69 | Cancer |
| 274 | HMSHC86 | Immune/Hematopoietic |
| 275 | HMSHU20 | Immune/Hematopoietic, |
| | | Reproductive |
| 276 | HMSHY25 | Immune/Hematopoietic |
| 277 | HMTAB77 | Cancer |
| 278 | HMUAE26 | Cancer |
| 279 | HMUAN45 | Cancer |
| 280 | HMVBC31 | Cancer |
| 281 | HMVDU15 | Cancer |
| 282 | HMWBL03 | Cancer |
| 283 | HMWJF53 | Cancer |
| 284 | HNEAK81 | Immune/Hematopoietic |
| 285 | HNECL22 | Cancer |
| 286 | HNECW49 | Immune/Hematopoietic |
| 287 | HNEDH88 | Immune/Hematopoietic |
| 288 | HNFAC50 | Cancer |
| 289 | HNFGR08 | Immune/Hematopoietic |
| 290 | HNFHF34 | Cancer |
| 291 | HNGAK51 | Immune/Hematopoietic |
| 292 | HNGAM58 | Immune/Hematopoietic |
| 293 | HNGBH53 | Immune/Hematopoietic |
| 294 | HNGDQ38 | Immune/Hematopoietic |
| 295 | HNGDX18 | Cancer |
| 296 | HNGDY34 | Immune/Hematopoietic |
| 297 | HNGEA34 | Digestive, |
| | | Immune/Hematopoietic |
| 298 | HNGEQ75 | Immune/Hematopoietic, |
| | | Neural/Sensory |
| 299 | HNGGA68 | Immune/Hematopoietic, |
| | | Musculoskeletal |
| 300 | HNGGP65 | Immune/Hematopoietic |
| 301 | HNGHZ69 | Immune/Hematopoietic |
| 302 | HNGIV64 | Immune/Hematopoietic |
| 303 | HNGJB41 | Immune/Hematopoietic |
| 304 | HNGKT41 | Immune/Hematopoietic |
| 305 | HNGMW45 | Immune/Hematopoietic |
| 306 | HNGNK44 | Immune/Hematopoietic |
| 307 | HNGNO53 | Immune/Hematopoietic |
| 308 | HNGPJ25 | Immune/Hematopoietic, |
| | | Mixed Fetal, |
| | | Musculoskeletal |
| 309 | HNHEN82 | Cancer |
| 310 | HNHFE71 | Immune/Hematopoietic |
| 311 | HNHGK22 | Immune/Hematopoietic |
| 312 | HNHHB10 | Immune/Hematopoietic, |
| | | Reproductive |
| 313 | HNHKS19 | Immune/Hematopoietic, |
| | | Reproductive |
| 314 | HNTBT17 | Cancer |
| 315 | HNTMH79 | Cancer |
| 316 | HOABP31 | Cancer |
| 317 | HOABP31 | Cancer |
| 318 | HOACG07 | Cancer |
| 319 | HODAG07 | Reproductive |
| 320 | HODBB70 | Reproductive |
| 321 | HODBV05 | Cancer |
| 322 | HODCZ32 | Reproductive |
| 323 | HOEBK60 | Cancer |
| 324 | HOFAA78 | Cancer |
| 325 | HOFNB74 | Reproductive |
| 326 | HOFNU55 | Reproductive |
| 327 | HOGBF01 | Reproductive |
| 328 | HORBS82 | Cancer |
| 329 | HORBV76 | Immune/Hematopoietic, |
| | | Reproductive |
| 330 | HOSDO75 | Cancer |
| 331 | HOSEC25 | Musculoskeletal |
| 332 | HOSEI81 | Digestive, |
| | | Musculoskeletal |
| 333 | HOSEJ94 | Cancer |
| 334 | HOUCA21 | Connective/Epithelial, |
| | | Immune/Hematopoietic, |
| | | Musculoskeletal |
| 335 | HOUDE92 | Cancer |
| 336 | HOUDR07 | Cancer |
| 337 | HOUED72 | Connective/Epithelial |
| 338 | HOUFS04 | Cancer |
| 339 | HOUHI25 | Cancer |
| 340 | HOVBD85 | Musculoskeletal, |
| | | Reproductive |
| 341 | HPCAB41 | Immune/Hematopoietic, |
| | | Reproductive |
| 342 | HPCAL26 | Cancer |
| 343 | HPEAD23 | Cancer |
| 344 | HPFBA54 | Reproductive |
| 345 | HPFCI36 | Cancer |
| 346 | HPFDI37 | Cancer |
| 347 | HPIAA80 | Cancer |
| 348 | HPJBJ51 | Immune/Hematopoietic, |
| | | Reproductive |
| 349 | HPJBJ51 | Immune/Hematopoietic, |
| | | Reproductive |
| 350 | HPJBU43 | Reproductive |
| 351 | HPJCW58 | Reproductive |
| 352 | HPMBX22 | Cancer |
| 353 | HPMCJ84 | Reproductive |
| 354 | HPMCV30 | Cancer |
| 355 | HPMFH77 | Cancer |
| 356 | HPQAX38 | Cardiovascular |
| 357 | HPQAX38 | Cardiovascular |
| 358 | HPQCB83 | Cancer |
| 359 | HPQCC53 | Cancer |
| 360 | HPRBH85 | Cancer |
| 361 | HPRCA64 | Cancer |
| 362 | HPRCD35 | Cancer |
| 363 | HPTRM02 | Cancer |
| 364 | HPWBA29 | Reproductive |
| 365 | HPWDK06 | Cancer |
| 366 | HRAAD30 | Cancer |
| 367 | HRADA42 | Cancer |
| 368 | HRADF49 | Cancer |
| 369 | HRADN25 | Cancer |
| 370 | HRADT25 | Digestive, |
| | | Excretory |
| 371 | HRDAI17 | Cancer |
| 372 | HRDDQ39 | Cancer |
| 373 | HRDER22 | Cancer |
| 374 | HRDEX93 | Cancer |
| 375 | HRDFK37 | Cancer |
| 376 | HRGBD54 | Cancer |
| 377 | HROEA08 | Cancer |
| 378 | HSAVA08 | Immune/Hematopoietic |
| 379 | HSAVW42 | Cancer |
| 380 | HSAWN53 | Immune/Hematopoietic |
| 381 | HSAWZ40 | Immune/Hematopoietic |
| 382 | HSAYC41 | Excretory, |
| | | Immune/Hematopoietic, |
| | | Reproductive |
| 383 | HSDZM54 | Neural/Sensory |
| 384 | HSHBF76 | Cancer |
| 385 | HSIFG47 | Digestive |
| 386 | HSJBY32 | Immune/Hematopoietic, |
| | | Musculoskeletal, |
| | | Neural/Sensory |
| 387 | HSKDR27 | Cancer |
| 388 | HSLHG78 | Cancer |
| 389 | HSLHX15 | Musculoskeletal |
| 390 | HSNAP85 | Cancer |
| 391 | HSNAZ09 | Cancer |
| 392 | HSNBM34 | Cancer |
| 393 | HSOAH16 | Digestive |
| 394 | HSQBF66 | Cancer |
| 395 | HSQDO85 | Cancer |
| 396 | HSQES57 | Cancer |
| 397 | HSRBE06 | Cancer |
| 398 | HSSDI26 | Musculoskeletal |
| 399 | HSSEA64 | Cancer |
| 400 | HSSEF77 | Cancer |
| 401 | HSSFE38 | Cancer |
| 402 | HSSGJ58 | Musculoskeletal |
| 403 | HSWBE76 | Cancer |
| 404 | HSXCP38 | Cardiovascular, |
| | | Neural/Sensory |
| 405 | HSYBI06 | Cancer |
| 406 | HT1SC27 | Digestive, |
| | | Immune/Hematopoietic, |
| | | Reproductive |
| 407 | HT3BF49 | Immune/Hematopoietic |
| 408 | HT4FV41 | Cancer |
| 409 | HT5FX79 | Cancer |
| 410 | HT5GR59 | Cancer |
| 411 | HTAEI78 | Immune/Hematopoietic |
| 412 | HTDAA78 | Immune/Hematopoietic |
| 413 | HTEAG62 | Digestive, |
| | | Immune/Hematopoietic, |
| | | Reproductive |
| 414 | HTECB02 | Cancer |
| 415 | HTECC15 | Cancer |
| 416 | HTEDF18 | Reproductive |
| 417 | HTEDJ28 | Cancer |
| 418 | HTEDS12 | Cardiovascular, |
| | | Immune/Hematopoietic, |
| | | Reproductive |
| 419 | HTEED26 | Reproductive |
| 420 | HTEED26 | Reproductive |
| 421 | HTEEF26 | Cancer |
| 422 | HTEEF26 | Cancer |
| 423 | HTEEW69 | Reproductive |
| 424 | HTEGS07 | Reproductive |
| 425 | HTEGS11 | Cancer |
| 426 | HTEHA56 | Cancer |
| 427 | HTEHU59 | Cancer |
| 428 | HTEJD29 | Reproductive |
| 429 | HTEKM46 | Cancer |
| 430 | HTEMQ17 | Cancer |
| 431 | HTENR63 | Cancer |
| 432 | HTGGM44 | Cancer |
| 433 | HTHBZ06 | Cancer |
| 434 | HTLAP64 | Cancer |
| 435 | HTLBT80 | Cancer |
| 436 | HTLDA84 | Reproductive |
| 437 | HTLDN29 | Cancer |
| 438 | HTLDU78 | Reproductive |
| 439 | HTLEC82 | Cancer |
| 440 | HTLEM16 | Cancer |
| 441 | HTLEV48 | Reproductive |
| 442 | HTLFA13 | Musculoskeletal, |
| | | Reproductive |
| 443 | HTLFI73 | Digestive, |
| | | Immune/Hematopoietic, |
| | | Reproductive |
| 444 | HTLGI89 | Cancer |
| 445 | HTLIF11 | Cancer |
| 446 | HTLIF12 | Excretory, |
| | | Reproductive |
| 447 | HTLIF12 | Excretory, |
| | | Reproductive |
| 448 | HTLIF12 | Excretory, |
| | | Reproductive |
| 449 | HTLIF12 | Excretory, |
| | | Reproductive |
| 450 | HTLIF12 | Excretory, |
| | | Reproductive |
| 451 | HTLIF12 | Excretory, |
| | | Reproductive |
| 452 | HTNAM63 | Endocrine |
| 453 | HTNBK13 | Cancer |
| 454 | HTOAI50 | Digestive, |
| | | Immune/Hematopoietic |
| 455 | HTOAM11 | Immune/Hematopoietic, |
| | | Neural/Sensory |
| 456 | HTODH57 | Immune/Hematopoietic |
| 457 | HTODH83 | Immune/Hematopoietic |
| 458 | HTOEV16 | Cancer |
| 459 | HTOGR38 | Immune/Hematopoietic |
| 460 | HTOHO21 | Immune/Hematopoietic |
| 461 | HTOHQ05 | Immune/Hematopoietic |
| 462 | HTOJL95 | Cancer |
| 463 | HTOJL95 | Cancer |
| 464 | HTPDU17 | Cancer |
| 465 | HTSFJ32 | Immune/Hematopoietic |
| 466 | HTTCB60 | Cancer |
| 467 | HTTEE41 | Cancer |
| 468 | HTTEZ02 | Cancer |
| 469 | HTWEH94 | Immune/Hematopoietic |
| 470 | HTXBD09 | Cancer |
| 471 | HTXDB22 | Cancer |
| 472 | HTXDC38 | Cancer |
| 473 | HTXDC77 | Cancer |
| 474 | HTXDD61 | Cancer |
| 475 | HTXDG92 | Cancer |
| 476 | HTXET11 | Digestive, |
| | | Immune/Hematopoietic |
| 477 | HTXFA72 | Immune/Hematopoietic |
| 478 | HTXJY08 | Cancer |
| 479 | HTXKF95 | Cancer |
| 480 | HTXMZ07 | Cancer |
| 481 | HUFCL31 | Digestive, |
| | | Immune/Hematopoietic |
| 482 | HUKBT67 | Cancer |
| 483 | HUKDF20 | Cardiovascular, |
| | | Neural/Sensory, |
| | | Reproductive |
| 484 | HUKDY82 | Cancer |
| 485 | HUSCJ14 | Cancer |
| 486 | HUSGL67 | Cancer |
| 487 | HUSGU40 | Cancer |
| 488 | HUSIR18 | Cancer |
| 489 | HUVDJ48 | Digestive, |
| | | Reproductive |
| 490 | HWAAI12 | Cancer |
| 491 | HWBBQ70 | Immune/Hematopoietic, |
| | | Neural/Sensory |
| 492 | HWBCN36 | Immune/Hematopoietic |
| 493 | HWBDJ08 | Cancer |
| 494 | HWBFX16 | Immune/Hematopoietic |
| 495 | HWDAC26 | Connective/Epithelial, |
| | | Immune/Hematopoietic, |
| | | Neural/Sensory |
| 496 | HWDAG96 | Cancer |
| 497 | HWDAJ01 | Connective/Epithelial |
| 498 | HWHPB78 | Cancer |
| 499 | HYABC84 | Cancer |
| 500 | HYABC84 | Cancer |
| 501 | H2CBD20 | Digestive |
| 502 | H2CBH91 | Cancer |
| 503 | H2LBA54 | Cancer |
| 504 | H2LBB09 | Cancer |
| 505 | H2LBB09 | Cancer |
| 506 | H2MAC63 | Digestive, |
| | | Reproductive |
| 507 | H2MBA76 | Cancer |
| 508 | H2MBF60 | Cancer |
| 509 | H6BSM88 | Cancer |
| 510 | H6EEA48 | Cancer |
| 511 | H6EEN71 | Cancer |
| 512 | H6EEO05 | Cancer |
| 513 | H6EEU40 | Cancer |
| 514 | H7TDB54 | Cancer |
| 515 | H7TMB95 | Cancer |
| 516 | HAAAT06 | Cancer |
| 517 | HACAD42 | Connective/Epithelial, |
| | | Mixed Fetal, |
| | | Neural/Sensory |
| 518 | HACBJ11 | Cancer |
| 519 | HACBS86 | Cancer |
| 520 | HACBT91 | Cancer |
| 521 | HACBZ73 | Cancer |
| 522 | HACCK29 | Connective/Epithelial |
| 523 | HADAB60 | Cancer |
| 524 | HADAM31 | Connective/Epithelial |
| 525 | HADCL19 | Connective/Epithelial |
| 526 | HADCZ65 | Connective/Epithelial, |
| | | Immune/Hematopoietic |
| 527 | HADDC04 | Connective/Epithelial, |
| | | Reproductive |
| 528 | HADDP23 | Cancer |
| 529 | HADDP51 | Cancer |
| 530 | HADDR24 | Cancer |
| 531 | HADET62 | Connective/Epithelial |
| 532 | HADEY08 | Cancer |
| 533 | HADEY22 | Connective/Epithelial |
| 534 | HADEY22 | Connective/Epithelial |
| 535 | HADFB84 | Cancer |
| 536 | HADFD01 | Cancer |
| 537 | HADFD10 | Cancer |
| 538 | HADFK11 | Connective/Epithelial |
| 539 | HADFT44 | Connective/Epithelial, |
| | | Mixed Fetal, |
| | | Neural/Sensory |
| 540 | HADFW20 | Connective/Epithelial |
| 541 | HADFX10 | Connective/Epithelial, |
| | | Neural/Sensory |
| 542 | HADFY80 | Connective/Epithelial, |
| | | Digestive |
| 543 | HADGD93 | Cardiovascular, |
| | | Connective/Epithelial |
| 544 | HADMA77 | Cancer |
| 545 | HADXA10 | Cancer |
| 546 | HADXA10 | Cancer |
| 547 | HAFBB15 | Cancer |
| 548 | HAFBL14 | Cancer |
| 549 | HAGAB62 | Cancer |
| 550 | HAGAB83 | Neural/Sensory |
| 551 | HAGAE84 | Neural/Sensory |
| 552 | HAGAF75 | Digestive, |
| | | Neural/Sensory |
| 553 | HAGAK40 | Cancer |
| 554 | HAGAU43 | Neural/Sensory |
| 555 | HAGAZ36 | Neural/Sensory |
| 556 | HAGBC57 | Cancer |
| 557 | HAGBL31 | Neural/Sensory |
| 558 | HAGBO09 | Mixed Fetal, |
| | | Neural/Sensory |
| 559 | HAGBO12 | Neural/Sensory |
| 560 | HAGBO51 | Neural/Sensory |
| 561 | HAGBS89 | Immune/Hematopoietic, |
| | | Musculoskeletal, |
| | | Neural/Sensory |
| 562 | HAGBV06 | Cancer |
| 563 | HAGBV25 | Cancer |
| 564 | HAGBV29 | Immune/Hematopoietic, |
| | | Neural/Sensory |
| 565 | HAGCC87 | Digestive, |
| | | Immune/Hematopoietic, |
| | | Neural/Sensory |
| 566 | HAGCH67 | Neural/Sensory |
| 567 | HAGCI69 | Neural/Sensory, |
| | | Reproductive |
| 568 | HAGCT33 | Immune/Hematopoietic, |
| | | Mixed Fetal, |
| | | Neural/Sensory |
| 569 | HAGCZ70 | Neural/Sensory |
| 570 | HAGDC73 | Cancer |
| 571 | HAGDG84 | Immune/Hematopoietic, |
| | | Neural/Sensory |
| 572 | HAGDH85 | Neural/Sensory |
| 573 | HAGDI69 | Neural/Sensory |
| 574 | HAGDJ53 | Immune/Hematopoietic, |
| | | Neural/Sensory |
| 575 | HAGDJ56 | Cardiovascular, |
| | | Endocrine, |
| | | Neural/Sensory |
| 576 | HAGDL51 | Immune/Hematopoietic, |
| | | Musculoskeletal, |
| | | Neural/Sensory |
| 577 | HAGDO70 | Cancer |
| 578 | HAGDT30 | Cancer |
| 579 | HAGDW68 | Endocrine, |
| | | Neural/Sensory |
| 580 | HAGDX84 | Cancer |
| 581 | HAGEK37 | Cancer |
| 582 | HAGEK86 | Cancer |
| 583 | HAGEP30 | Neural/Sensory |
| 584 | HAGEQ58 | Neural/Sensory |
| 585 | HAGEQ67 | Cancer |
| 586 | HAGEU26 | Neural/Sensory |
| 587 | HAGEW83 | Neural/Sensory |
| 588 | HAGEX49 | Cancer |
| 589 | HAGEX49 | Cancer |
| 590 | HAGFD75 | Cancer |
| 591 | HAGFF43 | Cancer |
| 592 | HAGFJ67 | Digestive, |
| | | Immune/Hematopoietic, |
| | | Neural/Sensory |
| 593 | HAGFM58 | Cardiovascular, |
| | | Neural/Sensory |
| 594 | HAGFT48 | Cancer |
| 595 | HAGFU31 | Neural/Sensory |
| 596 | HAGFW13 | Neural/Sensory |
| 597 | HAGHE85 | Cardiovascular, |
| | | Neural/Sensory |
| 598 | HAGHR18 | Neural/Sensory |
| 599 | HAGIB90 | Cancer |
| 600 | HAHEM51 | Cardiovascular |
| 601 | HAHSA76 | Cardiovascular |
| 602 | HAHSD51 | Cancer |
| 603 | HAIBR76 | Cancer |
| 604 | HAIBT20 | Cancer |
| 605 | HAIBV91 | Cancer |
| 606 | HAICE62 | Cancer |
| 607 | HAICL90 | Digestive, |
| | | Immune/Hematopoietic, |
| | | Reproductive |
| 608 | HAICV44 | Cancer |
| 609 | HAIDP45 | Cancer |
| 610 | HAJAB88 | Cancer |
| 611 | HAJAZ56 | Cancer |
| 612 | HAMFC67 | Cancer |
| 613 | HAMFQ38 | Cancer |
| 614 | HAMGG01 | Cancer |
| 615 | HANGB24 | Cancer |
| 616 | HANKC93 | Musculoskeletal |
| 617 | HAPAD35 | Cancer |
| 618 | HAPBR13 | Cancer |
| 619 | HAPBU09 | Cancer |
| 620 | HAPBU86 | Cancer |
| 621 | HAPBU86 | Cancer |
| 622 | HAPNJ33 | Cancer |
| 623 | HAPNL62 | Cancer |
| 624 | HAPNO50 | Cancer |
| 625 | HAPNY10 | Cancer |
| 626 | HAPPW83 | Cancer |
| 627 | HAPQJ73 | Cancer |
| 628 | HAPQK26 | Reproductive |
| 629 | HAPQU71 | Cancer |
| 630 | HAPQU71 | Cancer |
| 631 | HAPQW18 | Cancer |
| 632 | HAPQX44 | Cancer |
| 633 | HAPRK55 | Cancer |
| 634 | HAPSH37 | Cancer |
| 635 | HAQBG57 | Cancer |
| 636 | HAQBY85 | Cancer |
| 637 | HAQBZ15 | Cancer |
| 638 | HAQCE18 | Immune/Hematopoietic, |
| | | Reproductive |
| 639 | HAQCF94 | Cancer |
| 640 | HARAE26 | Neural/Sensory |
| 641 | HARAT69 | Cancer |
| 642 | HARAZ81 | Cancer |
| 643 | HASAU26 | Cancer |
| 644 | HASAX57 | Cancer |
| 645 | HASAY07 | Cancer |
| 646 | HATAE01 | Cancer |
| 647 | HATAG52 | Endocrine, |
| | | Neural/Sensory, |
| | | Reproductive |
| 648 | HATAL05 | Cancer |
| 649 | HATBA90 | Endocrine |
| 650 | HATBM71 | Endocrine |
| 651 | HATCF80 | Cancer |
| 652 | HATCI67 | Cancer |
| 653 | HATCJ27 | Cancer |
| 654 | HATCS79 | Endocrine, |
| | | Immune/Hematopoietic |
| 655 | HATCX03 | Cancer |
| 656 | HATDE03 | Cancer |
| 657 | HATDF41 | Cancer |
| 658 | HATDH23 | Cancer |
| 659 | HATDH55 | Cancer |
| 660 | HATDO84 | Endocrine |
| 661 | HATDU01 | Cancer |
| 662 | HATDW05 | Endocrine |
| 663 | HATEF13 | Digestive, |
| | | Endocrine |
| 664 | HATEF64 | Cancer |
| 665 | HATEH40 | Cancer |
| 666 | HATEI22 | Cancer |
| 667 | HAUCC84 | Cancer |
| 668 | HAWAS41 | Connective/Epithelial, |
| | | Excretory, |
| | | Immune/Hematopoietic |
| 669 | HAWBA65 | Cancer |
| 670 | HBAGH64 | Cancer |
| 671 | HBAGV01 | Connective/Epithelial, |
| | | Excretory |
| 672 | HBAMC50 | Excretory |
| 673 | HBAMC57 | Excretory |
| 674 | HBBBA42 | Cancer |
| 675 | HBBBB08 | Neural/Sensory |
| 676 | HBBBE83 | Cancer |
| 677 | HBBMA11 | Neural/Sensory |
| 678 | HBCAK10 | Digestive, |
| | | Immune/Hematopoietic, |
| | | Reproductive |
| 679 | HBCAK80 | Cancer |
| 680 | HBCAQ48 | Cancer |
| 681 | HBCAY17 | Cancer |
| 682 | HBCGE46 | Musculoskeletal |
| 683 | HBGBA14 | Cancer |
| 684 | HBGBE75 | Cancer |
| 685 | HBGBP22 | Cancer |
| 686 | HBGFQ34 | Reproductive |
| 687 | HBGML95 | Reproductive |
| 688 | HBGMT60 | Cancer |
| 689 | HBHAA53 | Neural/Sensory |
| 690 | HBIAU43 | Cancer |
| 691 | HBIAW58 | Neural/Sensory |
| 692 | HBIBB20 | Cancer |
| 693 | HBIBF26 | Cancer |
| 694 | HBIBM33 | Neural/Sensory |
| 695 | HBIBN67 | Cancer |
| 696 | HBIBQ69 | Immune/Hematopoietic, |
| | | Neural/Sensory |
| 697 | HBIBR38 | Neural/Sensory |
| 698 | HBIBR61 | Cancer |
| 699 | HBIBS33 | Neural/Sensory |
| 700 | HBIBT13 | Digestive, |
| | | Immune/Hematopoietic, |
| | | Neural/Sensory |
| 701 | HBIBZ20 | Neural/Sensory |
| 702 | HBICB80 | Cancer |
| 703 | HBJAC40 | Cancer |
| 704 | HBJAV56 | Immune/Hematopoietic, |
| | | Musculoskeletal |
| 705 | HBJAY14 | Immune/Hematopoietic |
| 706 | HBJBQ69 | Immune/Hematopoietic |
| 707 | HBJBR40 | Immune/Hematopoietic |
| 708 | HBJCH46 | Immune/Hematopoietic, |
| | | Musculoskeletal |
| 709 | HBJCR17 | Cancer |
| 710 | HBJCS26 | Cancer |
| 711 | HBJCW24 | Cancer |
| 712 | HBJDC57 | Immune/Hematopoietic, |
| | | Reproductive |
| 713 | HBJDR18 | Immune/Hematopoietic |
| 714 | HBJDR83 | Immune/Hematopoietic |
| 715 | HBJEE51 | Immune/Hematopoietic |
| 716 | HBJEL21 | Cancer |
| 717 | HBJFH84 | Cancer |
| 718 | HBJFJ14 | Cancer |
| 719 | HBJFJ26 | Cancer |
| 720 | HBJFJ83 | Immune/Hematopoietic, |
| | | Mixed Fetal |
| 721 | HBJFJ83 | Immune/Hematopoietic, |
| | | Mixed Fetal |
| 722 | HBJFP47 | Immune/Hematopoietic, |
| | | Reproductive |
| 723 | HBJFR77 | Cancer |
| 724 | HBJFU30 | Cancer |
| 725 | HBJFX41 | Immune/Hematopoietic |
| 726 | HBJHO83 | Immune/Hematopoietic, |
| | | Reproductive |
| 727 | HBJHS92 | Immune/Hematopoietic, |
| | | Neural/Sensory |
| 728 | HBJHT01 | Immune/Hematopoietic, |
| | | Reproductive |
| 729 | HBJHT01 | Immune/Hematopoietic, |
| | | Reproductive |
| 730 | HBJHW06 | Immune/Hematopoietic, |
| | | Reproductive |
| 731 | HBJIR14 | Cancer |
| 732 | HBJJA26 | Immune/Hematopoietic |
| 733 | HBJJX02 | Immune/Hematopoietic |
| 734 | HBJLH78 | Immune/Hematopoietic |
| 735 | HBJND04 | Cancer |
| 736 | HBJND57 | Immune/Hematopoietic |
| 737 | HBKDF66 | Cancer |
| 738 | HBKEA94 | Cancer |
| 739 | HBKEE60 | Digestive |
| 740 | HBKEI41 | Endocrine, |
| | | Mixed Fetal, |
| | | Reproductive |
| 741 | HBMBD51 | Digestive, |
| | | Immune/Hematopoietic |
| 742 | HBMBD73 | Cancer |
| 743 | HBMBE33 | Immune/Hematopoietic |
| 744 | HBMBM17 | Immune/Hematopoietic, |
| | | Reproductive |
| 745 | HBMCL59 | Immune/Hematopoietic |
| 746 | HBMCM96 | Immune/Hematopoietic, |
| | | Neural/Sensory |
| 747 | HBMCQ74 | Cancer |
| 748 | HBMCQ74 | Cancer |
| 749 | HBMCT40 | Cancer |
| 750 | HBMDM08 | Immune/Hematopoietic |
| 751 | HBMSN62 | Cancer |
| 752 | HBMSO30 | Immune/Hematopoietic |
| 753 | HBMTM50 | Cancer |
| 754 | HBMUD59 | Cancer |
| 755 | HBMUI10 | Cancer |
| 756 | HBMUJ48 | Cancer |
| 757 | HBMUR39 | Immune/Hematopoietic |
| 758 | HBMVF65 | Endocrine, |
| | | Immune/Hematopoietic, |
| | | Neural/Sensory |
| 759 | HBMVF65 | Endocrine, |
| | | Immune/Hematopoietic, |
| | | Neural/Sensory |
| 760 | HBMWC39 | Cancer |
| 761 | HBMWJ92 | Cancer |
| 762 | HBMWS52 | Immune/Hematopoietic |
| 763 | HBMXE34 | Cancer |
| 764 | HBMXG01 | Immune/Hematopoietic |
| 765 | HBMXG76 | Immune/Hematopoietic |
| 766 | HBMXM05 | Excretory, |
| | | Immune/Hematopoietic, |
| | | Neural/Sensory |
| 767 | HBMXW83 | Cancer |
| 768 | HBNAE74 | Excretory, |
| | | Musculoskeletal, |
| | | Reproductive |
| 769 | HBNAX16 | Cancer |
| 770 | HBNAZ35 | Endocrine, |
| | | Reproductive |
| 771 | HBODK40 | Cancer |
| 772 | HBODV76 | Cancer |
| 773 | HBPAD89 | Cancer |
| 774 | HBPAF39 | Immune/Hematopoietic, |
| | | Neural/Sensory |
| 775 | HBQAC45 | Neural/Sensory |
| 776 | HBQAC72 | Neural/Sensory |
| 777 | HBQAE37 | Neural/Sensory |
| 778 | HBSAJ63 | Cancer |
| 779 | HBSAJ63 | Cancer |
| 780 | HBSDD24 | Cancer |
| 781 | HBWBD25 | Immune/Hematopoietic, |
| | | Neural/Sensory |
| 782 | HBXAS93 | Neural/Sensory |
| 783 | HBXAT27 | Cancer |
| 784 | HBXAW57 | Neural/Sensory |
| 785 | HBXBI29 | Neural/Sensory |
| 786 | HBXBM24 | Neural/Sensory |
| 787 | HBXBM78 | Cancer |
| 788 | HBXCD59 | Immune/Hematopoietic, |
| | | Neural/Sensory |
| 789 | HBXCE43 | Neural/Sensory |
| 790 | HBXCG08 | Cancer |
| 791 | HBXCM52 | Cancer |
| 792 | HBXCQ03 | Cancer |
| 793 | HBXCR15 | Cancer |
| 794 | HBXDL52 | Cancer |
| 795 | HBXDL52 | Cancer |
| 796 | HBXDN08 | Cancer |
| 797 | HBXDN65 | Neural/Sensory |
| 798 | HBXFA04 | Neural/Sensory |
| 799 | HBXFE64 | Neural/Sensory |
| 800 | HBXFI33 | Immune/Hematopoietic, |
| | | Neural/Sensory |
| 801 | HBXFP72 | Cancer |
| 802 | HBXFS31 | Neural/Sensory |
| 803 | HBXFW01 | Neural/Sensory |
| 804 | HBXGE12 | Cancer |
| 805 | HBXGL91 | Neural/Sensory, |
| | | Reproductive |
| 806 | HBXGM24 | Cancer |
| 807 | HBZAI75 | Digestive, |
| | | Reproductive |
| 808 | HCABP33 | Cancer |
| 809 | HCABW10 | Cancer |
| 810 | HCACZ65 | Cancer |
| 811 | HCBAB34 | Cancer |
| 812 | HCDAA24 | Cancer |
| 813 | HCDAA24 | Cancer |
| 814 | HCDAF17 | Cancer |
| 815 | HCDAH02 | Immune/Hematopoietic, |
| | | Musculoskeletal |
| 816 | HCDAP33 | Cancer |
| 817 | HCDAR40 | Cardiovascular, |
| | | Immune/Hematopoietic, |
| | | Musculoskeletal |
| 818 | HCDAS02 | Cancer |
| 819 | HCDBE76 | Cancer |
| 820 | HCDBO32 | Cancer |
| 821 | HCDBW67 | Cancer |
| 822 | HCDBZ31 | Musculoskeletal |
| 823 | HCDCB03 | Cancer |
| 824 | HCDCE51 | Cancer |
| 825 | HCDCI42 | Immune/Hematopoietic, |
| | | Musculoskeletal |
| 826 | HCDDB15 | Cancer |
| 827 | HCDDX81 | Musculoskeletal |
| 828 | HCDDY28 | Cardiovascular, |
| | | Musculoskeletal |
| 829 | HCDEB19 | Cancer |
| 830 | HCDEN46 | Cancer |
| 831 | HCDES69 | Immune/Hematopoietic, |
| | | Musculoskeletal, |
| | | Reproductive |
| 832 | HCE1D45 | Cancer |
| 833 | HCE1N56 | Cancer |
| 834 | HCE1T53 | Neural/Sensory |
| 835 | HCE1Y27 | Digestive, |
| | | Neural/Sensory, |
| | | Reproductive |
| 836 | HCE1Y34 | Immune/Hematopoietic, |
| | | Neural/Sensory |
| 837 | HCE2B57 | Musculoskeletal, |
| | | Neural/Sensory |
| 838 | HCE2E47 | Immune/Hematopoietic, |
| | | Mixed Fetal, |
| | | Neural/Sensory |
| 839 | HCE2I23 | Neural/Sensory |
| 840 | HCE2P90 | Neural/Sensory |
| 841 | HCE3A54 | Neural/Sensory |
| 842 | HCE3C46 | Immune/Hematopoietic, |
| | | Neural/Sensory |
| 843 | HCE3D58 | Cancer |
| 844 | HCE3D89 | Endocrine, |
| | | Neural/Sensory |
| 845 | HCE3J43 | Cancer |
| 846 | HCE3L04 | Neural/Sensory |
| 847 | HCE3N23 | Cancer |
| 848 | HCE3R01 | Cancer |
| 849 | HCE3R01 | Cancer |
| 850 | HCE3R01 | Cancer |
| 851 | HCE3R46 | Cancer |
| 852 | HCE4H32 | Cancer |
| 853 | HCE4H32 | Cancer |
| 854 | HCE4T64 | Cancer |
| 855 | HCE4W88 | Cancer |
| 856 | HCE5B62 | Neural/Sensory |
| 857 | HCE5H86 | Cancer |
| 858 | HCE5J64 | Digestive, |
| | | Neural/Sensory |
| 859 | HCEBF54 | Cancer |
| 860 | HCECO77 | Cancer |
| 861 | HCEDH42 | Neural/Sensory |
| 862 | HCEDJ05 | Neural/Sensory |
| 863 | HCEDJ26 | Cancer |
| 864 | HCEDN07 | Digestive, |
| | | Mixed Fetal, |
| | | Neural/Sensory |
| 865 | HCEDO17 | Cancer |
| 866 | HCEEG48 | Neural/Sensory |
| 867 | HCEEM33 | Cancer |
| 868 | HCEEP16 | Immune/Hematopoietic, |
| | | Neural/Sensory, |
| | | Reproductive |
| 869 | HCEER60 | Cardiovascular, |
| | | Digestive, |
| | | Neural/Sensory |
| 870 | HCEFA10 | Immune/Hematopoietic, |
| | | Neural/Sensory, |
| | | Reproductive |
| 871 | HCEFA50 | Neural/Sensory |
| 872 | HCEFA94 | Neural/Sensory |
| 873 | HCEFC27 | Cancer |
| 874 | HCEFG93 | Neural/Sensory |
| 875 | HCEFH31 | Cancer |
| 876 | HCEFK56 | Cancer |
| 877 | HCEFN51 | Cancer |
| 878 | HCEGG08 | Cancer |
| 879 | HCEGH74 | Cancer |
| 880 | HCEGK81 | Cancer |
| 881 | HCEGS49 | Connective/Epithelial, |
| | | Neural/Sensory, |
| | | Reproductive |
| 882 | HCEGU75 | Cancer |
| 883 | HCEGY33 | Cancer |
| 884 | HCEHW24 | Neural/Sensory |
| 885 | HCEJL08 | Cancer |
| 886 | HCEJP93 | Cancer |
| 887 | HCELB04 | Cancer |
| 888 | HCEMA08 | Cancer |
| 889 | HCENN67 | Digestive, |
| | | Endocrine, |
| | | Neural/Sensory |
| 890 | HCENQ22 | Digestive, |
| | | Immune/Hematopoietic, |
| | | Neural/Sensory |
| 891 | HCEOF01 | Neural/Sensory, |
| | | Reproductive |
| 892 | HCEOF01 | Neural/Sensory, |
| | | Reproductive |
| 893 | HCEON94 | Immune/Hematopoietic, |
| | | Neural/Sensory, |
| | | Reproductive |
| 894 | HCEOQ67 | Cancer |
| 895 | HCEOV48 | Cancer |
| 896 | HCEPC90 | Neural/Sensory |
| 897 | HCEPO08 | Cancer |
| 898 | HCESB03 | Immune/Hematopoietic, |
| | | Neural/Sensory |
| 899 | HCESK44 | Cancer |
| 900 | HCETE08 | Mixed Fetal, |
| | | Neural/Sensory, |
| | | Reproductive |
| 901 | HCETL19 | Immune/Hematopoietic, |
| | | Neural/Sensory, |
| | | Reproductive |
| 902 | HCEWD90 | Cancer |
| 903 | HCEWE62 | Neural/Sensory |
| 904 | HCEZW14 | Cancer |
| 905 | HCFAT42 | Immune/Hematopoietic |
| 906 | HCFAT66 | Immune/Hematopoietic |
| 907 | HCFBA30 | Cardiovascular, |
| | | Immune/Hematopoietic, |
| | | Reproductive |
| 908 | HCFBM77 | Immune/Hematopoietic |
| 909 | HCFBV39 | Cancer |
| 910 | HCFCB72 | Immune/Hematopoietic |
| 911 | HCFCG91 | Cancer |
| 912 | HCFCM81 | Digestive, |
| | | Immune/Hematopoietic, |
| | | Reproductive |
| 913 | HCFCW39 | Cancer |
| 914 | HCFCY49 | Cancer |
| 915 | HCFDD18 | Digestive, |
| | | Immune/Hematopoietic, |
| | | Mixed Fetal |
| 916 | HCFLB10 | Cardiovascular, |
| | | Immune/Hematopoietic |
| 917 | HCFLC03 | Cancer |
| 918 | HCFLJ52 | Cancer |
| 919 | HCFLL33 | Immune/Hematopoietic, |
| | | Reproductive |
| 920 | HCFLP48 | Immune/Hematopoietic |
| 921 | HCFLQ12 | Cancer |
| 922 | HCFLY20 | Cancer |
| 923 | HCFLY20 | Cancer |
| 924 | HCFMA39 | Immune/Hematopoietic |
| 925 | HCFMJ40 | Immune/Hematopoietic |
| 926 | HCFML07 | Cancer |
| 927 | HCFMR75 | Digestive, |
| | | Immune/Hematopoietic |
| 928 | HCFMX16 | Immune/Hematopoietic |
| 929 | HCFMX88 | Immune/Hematopoietic, |
| | | Neural/Sensory |
| 930 | HCFNM40 | Digestive, |
| | | Immune/Hematopoietic, |
| | | Reproductive |
| 931 | HCFNM50 | Immune/Hematopoietic |
| 932 | HCFNN16 | Cancer |
| 933 | HCFNN75 | Cancer |
| 934 | HCFOG17 | Immune/Hematopoietic |
| 935 | HCFOH93 | Immune/Hematopoietic, |
| | | Reproductive |
| 936 | HCGBA15 | Cancer |
| 937 | HCHAC68 | Cancer |
| 938 | HCHBP49 | Cancer |
| 939 | HCHCA79 | Digestive, |
| | | Neural/Sensory, |
| | | Reproductive |
| 940 | HCHCG33 | Cancer |
| 941 | HCHMY57 | Cancer |
| 942 | HCHOC06 | Reproductive |
| 943 | HCHOY52 | Cancer |
| 944 | HCHQB93 | Cancer |
| 945 | HCHQB93 | Cancer |
| 946 | HCLBK61 | Cancer |
| 947 | HCLCU75 | Respiratory |
| 948 | HCMSA37 | Cardiovascular |
| 949 | HCMSR07 | Cardiovascular |
| 950 | HCNAI74 | Digestive |
| 951 | HCNCT01 | Digestive |
| 952 | HCNDR39 | Cancer |
| 953 | HCNSD91 | Cancer |
| 954 | HCNSF01 | Cancer |
| 955 | HCNSG06 | Digestive, |
| | | Reproductive |
| 956 | HCNSG32 | Digestive, |
| | | Reproductive |
| 957 | HCPAE41 | Cancer |
| 958 | HCQAK36 | Cancer |
| 959 | HCQAQ47 | Cancer |
| 960 | HCQAS72 | Cancer |
| 961 | HCQBM95 | Digestive, |
| | | Immune/Hematopoietic |
| 962 | HCQCM95 | Cancer |
| 963 | HCQCM95 | Cancer |
| 964 | HCQCV23 | Cancer |
| 965 | HCQCV23 | Cancer |
| 966 | HCQDD32 | Digestive, |
| | | Immune/Hematopoietic, |
| | | Reproductive |
| 967 | HCQDD61 | Digestive, |
| | | Immune/Hematopoietic |
| 968 | HCQDT67 | Digestive, |
| | | Immune/Hematopoietic |
| 969 | HCRAI29 | Neural/Sensory |
| 970 | HCRBI79 | Cancer |
| 971 | HCRBL20 | Cancer |
| 972 | HCRBX84 | Cancer |
| 973 | HCRMA24 | Digestive, |
| | | Musculoskeletal |
| 974 | HCRMR35 | Cancer |
| 975 | HCRMR35 | Cancer |
| 976 | HCRMR35 | Cancer |
| 977 | HCROC18 | Cancer |
| 978 | HCUAE53 | Immune/Hematopoietic |
| 979 | HCUAO46 | Immune/Hematopoietic |
| 980 | HCUAT74 | Cancer |
| 981 | HCUBA28 | Cancer |
| 982 | HCUBC45 | Cancer |
| 983 | HCUBM41 | Immune/Hematopoietic |
| 984 | HCUBN69 | Immune/Hematopoietic |
| 985 | HCUBY47 | Digestive, |
| | | Immune/Hematopoietic |
| 986 | HCUCV66 | Cancer |
| 987 | HCUDJ41 | Immune/Hematopoietic |
| 988 | HCUEC55 | Immune/Hematopoietic |
| 989 | HCUEG85 | Immune/Hematopoietic |
| 990 | HCUES35 | Immune/Hematopoietic, |
| | | Neural/Sensory |
| 991 | HCUFC77 | Cancer |
| 992 | HCUFD17 | Cancer |
| 993 | HCUFD46 | Immune/Hematopoietic |
| 994 | HCUFE33 | Immune/Hematopoietic |
| 995 | HCUFJ09 | Cancer |
| 996 | HCUFQ58 | Cardiovascular, |
| | | Immune/Hematopoietic |
| 997 | HCUFQ58 | Cardiovascular, |
| | | Immune/Hematopoietic |
| 998 | HCUFX08 | Immune/Hematopoietic |
| 999 | HCUGB76 | Immune/Hematopoietic, |
| | | Reproductive |
| 1000 | HCUGK79 | Immune/Hematopoietic |
| 1001 | HCUGQ19 | Immune/Hematopoietic |
| 1002 | HCUGR26 | Immune/Hematopoietic |
| 1003 | HCUGR86 | Immune/Hematopoietic |
| 1004 | HCUHE27 | Immune/Hematopoietic |
| 1005 | HCUHL82 | Cardiovascular, |
| | | Immune/Hematopoietic, |
| | | Reproductive |
| 1006 | HCUHM71 | Immune/Hematopoietic, |
| | | Musculoskeletal |
| 1007 | HCWAK88 | Immune/Hematopoietic |
| 1008 | HCWAL10 | Cardiovascular, |
| | | Immune/Hematopoietic |
| 1009 | HCWAT71 | Immune/Hematopoietic |
| 1010 | HCWBQ52 | Immune/Hematopoietic |
| 1011 | HCWCH16 | Immune/Hematopoietic |
| 1012 | HCWDM69 | Digestive, |
| | | Immune/Hematopoietic |
| 1013 | HCWEB38 | Immune/Hematopoietic |
| 1014 | HCWEB72 | Immune/Hematopoietic |
| 1015 | HCWEF04 | Cancer |
| 1016 | HCWEI82 | Immune/Hematopoietic |
| 1017 | HCWEM96 | Cancer |
| 1018 | HCWFJ16 | Immune/Hematopoietic |
| 1019 | HCWFJ16 | Immune/Hematopoietic |
| 1020 | HCWFK03 | Cancer |
| 1021 | HCWHD30 | Immune/Hematopoietic |
| 1022 | HCWHT34 | Immune/Hematopoietic, |
| | | Mixed Fetal |
| 1023 | HCWHT52 | Immune/Hematopoietic |
| 1024 | HCWKO32 | Immune/Hematopoietic |
| 1025 | HCWLE50 | Immune/Hematopoietic |
| 1026 | HCWUF93 | Cancer |
| 1027 | HCWUW24 | Immune/Hematopoietic |
| 1028 | HCYBA32 | Cancer |
| 1029 | HDAAV67 | Musculoskeletal, |
| | | Neural/Sensory |
| 1030 | HDABR74 | Cancer |
| 1031 | HDABW45 | Immune/Hematopoietic, |
| | | Musculoskeletal |
| 1032 | HDACJ52 | Cancer |
| 1033 | HDCBM09 | Immune/Hematopoietic |
| 1034 | HDFAB86 | Mixed Fetal, |
| | | Neural/Sensory |
| 1035 | HDFIB37 | Connective/Epithelial, |
| | | Neural/Sensory |
| 1036 | HDFMB91 | Neural/Sensory |
| 1037 | HDHAA55 | Immune/Hematopoietic, |
| | | Neural/Sensory |
| 1038 | HDHEA33 | Cancer |
| 1039 | HDHEB12 | Immune/Hematopoietic, |
| | | Neural/Sensory |
| 1040 | HDHEB80 | Neural/Sensory |
| 1041 | HDHIA16 | Cancer |
| 1042 | HDHIA26 | Neural/Sensory |
| 1043 | HDHMA71 | Cancer |
| 1044 | HDLAL94 | Cancer |
| 1045 | HDPAB86 | Cancer |
| 1046 | HDPAE80 | Cancer |
| 1047 | HDPAQ86 | Digestive, |
| | | Immune/Hematopoietic, |
| | | Neural/Sensory |
| 1048 | HDPBD56 | Cancer |
| 1049 | HDPBN48 | Digestive, |
| | | Immune/Hematopoietic |
| 1050 | HDPCG79 | Digestive, |
| | | Immune/Hematopoietic, |
| | | Reproductive |
| 1051 | HDPCV29 | Immune/Hematopoietic |
| 1052 | HDPDA36 | Immune/Hematopoietic |
| 1053 | HDPDC59 | Immune/Hematopoietic, |
| | | Musculoskeletal |
| 1054 | HDPFG13 | Cancer |
| 1055 | HDPFK27 | Immune/Hematopoietic, |
| | | Neural/Sensory |
| 1056 | HDPFZ05 | Immune/Hematopoietic, |
| | | Neural/Sensory |
| 1057 | HDPGA84 | Cancer |
| 1058 | HDPGR80 | Cancer |
| 1059 | HDPGU14 | Cancer |
| 1060 | HDPGX09 | Cancer |
| 1061 | HDPIE44 | Cancer |
| 1062 | HDPIE73 | Immune/Hematopoietic |
| 1063 | HDPIF35 | Immune/Hematopoietic |
| 1064 | HDPIF65 | Immune/Hematopoietic |
| 1065 | HDPIH25 | Cancer |
| 1066 | HDPIY31 | Cancer |
| 1067 | HDPJH72 | Cancer |
| 1068 | HDPJV53 | Immune/Hematopoietic |
| 1069 | HDPJV75 | Cancer |
| 1070 | HDPKC55 | Cardiovascular, |
| | | Immune/Hematopoietic, |
| | | Reproductive |
| 1071 | HDPKD16 | Cancer |
| 1072 | HDPMC52 | Digestive, |
| | | Immune/Hematopoietic, |
| | | Musculoskeletal |
| 1073 | HDPML04 | Connective/Epithelial, |
| | | Immune/Hematopoietic |
| 1074 | HDPMM22 | Immune/Hematopoietic |
| 1075 | HDPNC21 | Cancer |
| 1076 | HDPNJ26 | Cancer |
| 1077 | HDPOD73 | Immune/Hematopoietic |
| 1078 | HDPOT33 | Cancer |
| 1079 | HDPPB70 | Cancer |
| 1080 | HDPPC19 | Immune/Hematopoietic |
| 1081 | HDPPE05 | Cancer |
| 1082 | HDPSA70 | Cancer |
| 1083 | HDPSS56 | Cancer |
| 1084 | HDPSZ07 | Immune/Hematopoietic |
| 1085 | HDPSZ07 | Immune/Hematopoietic |
| 1086 | HDPSZ07 | Immune/Hematopoietic |
| 1087 | HDPTI49 | Immune/Hematopoietic, |
| | | Neural/Sensory |
| 1088 | HDPTP22 | Immune/Hematopoietic, |
| | | Neural/Sensory, |
| | | Reproductive |
| 1089 | HDPYE25 | Immune/Hematopoietic, |
| | | Neural/Sensory |
| 1090 | HDQGD06 | Cancer |
| 1091 | HDQGD06 | Cancer |
| 1092 | HDQGD06 | Cancer |
| 1093 | HDQGN08 | Immune/Hematopoietic |
| 1094 | HDQGO62 | Cancer |
| 1095 | HDQPM16 | Cancer |
| 1096 | HDRAA17 | Cancer |
| 1097 | HDRAC68 | Cancer |
| 1098 | HDSAC78 | Cancer |
| 1099 | HDSAH37 | Connective/Epithelial |
| 1100 | HDSAM57 | Immune/Hematopoietic |
| 1101 | HDSAO14 | Cancer |
| 1102 | HDSAO64 | Cancer |
| 1103 | HDSAP15 | Cancer |
| 1104 | HDTAR39 | Cancer |
| 1105 | HDTAS57 | Cancer |
| 1106 | HDTBP62 | Cancer |
| 1107 | HDTBQ77 | Cancer |
| 1108 | HDTDA48 | Immune/Hematopoietic, |
| | | Neural/Sensory |
| 1109 | HDTDE66 | Cancer |
| 1110 | HDTDG75 | Immune/Hematopoietic |
| 1111 | HDTDS09 | Cancer |
| 1112 | HDTFF53 | Cancer |
| 1113 | HDTGW76 | Cancer |
| 1114 | HDTGZ56 | Immune/Hematopoietic |
| 1115 | HDTHZ85 | Cancer |
| 1116 | HDTIM39 | Cancer |
| 1117 | HDTKJ29 | Cancer |
| 1118 | HDUAB12 | Cancer |
| 1119 | HDUAD68 | Cancer |
| 1120 | HE2AC74 | Cancer |
| 1121 | HE2AC74 | Cancer |
| 1122 | HE2AC75 | Mixed Fetal |
| 1123 | HE2AI94 | Cancer |
| 1124 | HE2AT61 | Cancer |
| 1125 | HE2AX36 | Cancer |
| 1126 | HE2AY96 | Cancer |
| 1127 | HE2BD72 | Cancer |
| 1128 | HE2BH50 | Cancer |
| 1129 | HE2CB53 | Cancer |
| 1130 | HE2CC17 | Excretory, |
| | | Mixed Fetal |
| 1131 | HE2CJ53 | Cancer |
| 1132 | HE2CK47 | Cancer |
| 1133 | HE2CM34 | Cancer |
| 1134 | HE2DG46 | Mixed Fetal |
| 1135 | HE2DI16 | Mixed Fetal |
| 1136 | HE2DJ84 | Cancer |
| 1137 | HE2DY23 | Cancer |
| 1138 | HE2DY25 | Cancer |
| 1139 | HE2EE80 | Cancer |
| 1140 | HE2EH45 | Mixed Fetal |
| 1141 | HE2FE89 | Cardiovascular, |
| | | Digestive, |
| | | Mixed Fetal |
| 1142 | HE2FR49 | Cancer |
| 1143 | HE2GB19 | Cancer |
| 1144 | HE2GO81 | Cancer |
| 1145 | HE2HB61 | Mixed Fetal |
| 1146 | HE2HB64 | Cancer |
| 1147 | HE2HF76 | Cancer |
| 1148 | HE2ID09 | Mixed Fetal |
| 1149 | HE2IE66 | Cancer |
| 1150 | HE2NW57 | Mixed Fetal |
| 1151 | HE2OA95 | Cancer |
| 1152 | HE2OC39 | Mixed Fetal, |
| | | Musculoskeletal |
| 1153 | HE2PB61 | Cancer |
| 1154 | HE2PI43 | Cancer |
| 1155 | HE2PJ56 | Cancer |
| 1156 | HE6CJ41 | Immune/Hematopoietic, |
| | | Mixed Fetal |
| 1157 | HE6DC37 | Digestive, |
| | | Mixed Fetal, |
| | | Reproductive |
| 1158 | HE6DN83 | Cancer |
| 1159 | HE6EI30 | Immune/Hematopoietic, |
| | | Mixed Fetal |
| 1160 | HE6ET70 | Mixed Fetal, |
| | | Reproductive |
| 1161 | HE6GO65 | Mixed Fetal, |
| | | Neural/Sensory |
| 1162 | HE8AN83 | Mixed Fetal, |
| | | Musculoskeletal |
| 1163 | HE8AU68 | Cancer |
| 1164 | HE8BE20 | Cancer |
| 1165 | HE8BP05 | Mixed Fetal |
| 1166 | HE8BP64 | Cancer |
| 1167 | HE8BQ49 | Mixed Fetal |
| 1168 | HE8BR18 | Cancer |
| 1169 | HE8BR30 | Mixed Fetal |
| 1170 | HE8BT58 | Cancer |
| 1171 | HE8BU60 | Cancer |
| 1172 | HE8CA13 | Cancer |
| 1173 | HE8CC34 | Cardiovascular, |
| | | Digestive, |
| | | Mixed Fetal |
| 1174 | HE8CH08 | Cancer |
| 1175 | HE8DG02 | Mixed Fetal |
| 1176 | HE8DK52 | Cancer |
| 1177 | HE8DZ94 | Cancer |
| 1178 | HE8EN79 | Cancer |
| 1179 | HE8EX86 | Cancer |
| 1180 | HE8FC10 | Immune/Hematopoietic, |
| | | Mixed Fetal, |
| | | Reproductive |
| 1181 | HE8FG15 | Cancer |
| 1182 | HE8FG24 | Cancer |
| 1183 | HE8FK78 | Cancer |
| 1184 | HE8FL24 | Mixed Fetal |
| 1185 | HE8FL68 | Mixed Fetal |
| 1186 | HE8FR53 | Cancer |
| 1187 | HE8MA27 | Cancer |
| 1188 | HE8MG56 | Mixed Fetal |
| 1189 | HE8MQ01 | Cancer |
| 1190 | HE8MS43 | Cancer |
| 1191 | HE8MY77 | Cancer |
| 1192 | HE8NC81 | Cancer |
| 1193 | HE8NO09 | Cancer |
| 1194 | HE8QU21 | Immune/Hematopoietic, |
| | | Mixed Fetal |
| 1195 | HE8SH74 | Immune/Hematopoietic, |
| | | Mixed Fetal, |
| | | Musculoskeletal |
| 1196 | HE8UX34 | Mixed Fetal |
| 1197 | HE9AE05 | Cancer |
| 1198 | HE9BJ14 | Mixed Fetal, |
| | | Musculoskeletal |
| 1199 | HE9CI81 | Cancer |
| 1200 | HE9CJ38 | Mixed Fetal |
| 1201 | HE9CM11 | Mixed Fetal |
| 1202 | HE9CN58 | Cancer |
| 1203 | HE9CV59 | Cancer |
| 1204 | HE9DG54 | Cancer |
| 1205 | HE9DH59 | Cancer |
| 1206 | HE9DZ47 | Endocrine, |
| | | Immune/Hematopoietic, |
| | | Mixed Fetal |
| 1207 | HE9EC36 | Cancer |
| 1208 | HE9EM54 | Immune/Hematopoietic, |
| | | Mixed Fetal |
| 1209 | HE9FH28 | Mixed Fetal |
| 1210 | HE9HE13 | Cancer |
| 1211 | HE9HE13 | Cancer |
| 1212 | HE9HF59 | Mixed Fetal |
| 1213 | HE9HV71 | Cancer |
| 1214 | HE9NB82 | Cancer |
| 1215 | HE9NE43 | Mixed Fetal |
| 1216 | HE9RN58 | Cancer |
| 1217 | HE9TA42 | Cancer |
| 1218 | HEAAC21 | Cancer |
| 1219 | HEAAC39 | Neural/Sensory, |
| | | Reproductive |
| 1220 | HEAAC48 | Reproductive |
| 1221 | HEAAD63 | Neural/Sensory, |
| | | Reproductive |
| 1222 | HEAAE19 | Immune/Hematopoietic, |
| | | Reproductive |
| 1223 | HEAAM54 | Reproductive |
| 1224 | HEAAM96 | Reproductive |
| 1225 | HEAAN52 | Cancer |
| 1226 | HEAAU28 | Reproductive |
| 1227 | HEAAW54 | Reproductive |
| 1228 | HEAAW94 | Cancer |
| 1229 | HEBAP51 | Cancer |
| 1230 | HEBAT05 | Cancer |
| 1231 | HEBBF78 | Cancer |
| 1232 | HEBBK04 | Cancer |
| 1233 | HEBCN80 | Neural/Sensory |
| 1234 | HEBCW57 | Mixed Fetal, |
| | | Neural/Sensory |
| 1235 | HEBDF90 | Cancer |
| 1236 | HEBDW31 | Cancer |
| 1237 | HEBFL36 | Neural/Sensory |
| 1238 | HEBGC01 | Neural/Sensory |
| 1239 | HEBGE23 | Cancer |
| 1240 | HEBGE85 | Digestive, |
| | | Neural/Sensory, |
| | | Reproductive |
| 1241 | HEBGJ94 | Cancer |
| 1242 | HEBGM06 | Cancer |
| 1243 | HEEAB58 | Cancer |
| 1244 | HEEAF49 | Cancer |
| 1245 | HEEAJ46 | Mixed Fetal, |
| | | Reproductive |
| 1246 | HEGAI20 | Reproductive |
| 1247 | HEIAC52 | Cancer |
| 1248 | HELAC55 | Cardiovascular, |
| | | Immune/Hematopoietic, |
| | | Musculoskeletal |
| 1249 | HELAT58 | Cardiovascular |
| 1250 | HELAW94 | Cancer |
| 1251 | HELDF80 | Cancer |
| 1252 | HELDH39 | Cancer |
| 1253 | HELDK79 | Cardiovascular |
| 1254 | HELDQ42 | Cancer |
| 1255 | HELEE85 | Cancer |
| 1256 | HELEL76 | Cancer |
| 1257 | HELEL76 | Cancer |
| 1258 | HELEO45 | Cancer |
| 1259 | HELFA57 | Cancer |
| 1260 | HELFO30 | Cancer |
| 1261 | HELGF28 | Cancer |
| 1262 | HELGP60 | Cardiovascular, |
| | | Excretory, |
| | | Immune/Hematopoietic |
| 1263 | HELHN47 | Cancer |
| 1264 | HELHP11 | Cardiovascular, |
| | | Immune/Hematopoietic |
| 1265 | HELHP11 | Cardiovascular, |
| | | Immune/Hematopoietic |
| 1266 | HEMAE30 | Cancer |
| 1267 | HEMBV40 | Cancer |
| 1268 | HEMCJ80 | Cancer |
| 1269 | HEMCL55 | Cardiovascular |
| 1270 | HEMDB07 | Cardiovascular |
| 1271 | HEMDR05 | Cardiovascular, |
| | | Digestive, |
| | | Immune/Hematopoietic |
| 1272 | HEMGK71 | Cardiovascular, |
| | | Immune/Hematopoietic, |
| | | Musculoskeletal |
| 1273 | HEOMF59 | Immune/Hematopoietic |
| 1274 | HEOMJ73 | Cancer |
| 1275 | HEOMR67 | Cancer |
| 1276 | HEOMU25 | Connective/Epithelial, |
| | | Immune/Hematopoietic |
| 1277 | HEOMU44 | Cancer |
| 1278 | HEONI85 | Digestive, |
| | | Immune/Hematopoietic, |
| | | Reproductive |
| 1279 | HEONK04 | Cancer |
| 1280 | HEONP08 | Immune/Hematopoietic |
| 1281 | HEPAD15 | Endocrine, |
| | | Reproductive |
| 1282 | HEPBC23 | Cancer |
| 1283 | HEPBV09 | Reproductive |
| 1284 | HEPCF35 | Neural/Sensory, |
| | | Reproductive |
| 1285 | HEPCU48 | Cancer |
| 1286 | HEQAH47 | Cancer |
| 1287 | HEQAP92 | Cancer |
| 1288 | HEQAV53 | Cancer |
| 1289 | HEQBJ01 | Cancer |
| 1290 | HEQBJ01 | Cancer |
| 1291 | HEQBJ01 | Cancer |
| 1292 | HEQBM94 | Cancer |
| 1293 | HEQCB93 | Cancer |
| 1294 | HERAI63 | Connective/Epithelial |
| 1295 | HERAQ22 | Connective/Epithelial |
| 1296 | HERAS61 | Connective/Epithelial |
| 1297 | HESAG57 | Cancer |
| 1298 | HETAA62 | Cancer |
| 1299 | HETBB70 | Immune/Hematopoietic, |
| | | Reproductive |
| 1300 | HETBJ88 | Cancer |
| 1301 | HETCM67 | Cancer |
| 1302 | HETDD61 | Reproductive |
| 1303 | HETDD61 | Reproductive |
| 1304 | HETDJ34 | Cancer |
| 1305 | HETDM73 | Cancer |
| 1306 | HETDP76 | Cancer |
| 1307 | HETFO57 | Cancer |
| 1308 | HETGZ31 | Cancer |
| 1309 | HETHD26 | Cancer |
| 1310 | HETHM27 | Cancer |
| 1311 | HETIN36 | Cancer |
| 1312 | HFAAI17 | Neural/Sensory |
| 1313 | HFAAJ45 | Immune/Hematopoietic, |
| | | Neural/Sensory |
| 1314 | HFADF41 | Neural/Sensory |
| 1315 | HFADM09 | Cancer |
| 1316 | HFAUA23 | Cancer |
| 1317 | HFCAG75 | Cancer |
| 1318 | HFCAI40 | Cancer |
| 1319 | HFCAQ17 | Cancer |
| 1320 | HFCBC16 | Neural/Sensory |
| 1321 | HFCBL53 | Cancer |
| 1322 | HFCBL53 | Cancer |
| 1323 | HFCBL53 | Cancer |
| 1324 | HFCBT29 | Cancer |
| 1325 | HFCCZ31 | Cancer |
| 1326 | HFCDN13 | Cancer |
| 1327 | HFCDT67 | Cancer |
| 1328 | HFCDY36 | Neural/Sensory |
| 1329 | HFCEC45 | Cancer |
| 1330 | HFCET43 | Cancer |
| 1331 | HFEAG55 | Cancer |
| 1332 | HFEAU63 | Connective/Epithelial |
| 1333 | HFEBA88 | Cancer |
| 1334 | HFEBK75 | Connective/Epithelial |
| 1335 | HFEBO15 | Cancer |
| 1336 | HFEBO17 | Cancer |
| 1337 | HFFAE46 | Neural/Sensory |
| 1338 | HFFAH01 | Digestive, |
| | | Immune/Hematopoietic, |
| | | Neural/Sensory |
| 1339 | HFFAL70 | Cancer |
| 1340 | HFFAV61 | Neural/Sensory |
| 1341 | HFGAB50 | Cancer |
| 1342 | HFGAE28 | Cancer |
| 1343 | HFGAN63 | Cancer |
| 1344 | HFHDN80 | Cardiovascular, |
| | | Digestive, |
| | | Immune/Hematopoietic |
| 1345 | HFIAB78 | Cancer |
| 1346 | HFIAD23 | Cancer |
| 1347 | HFIAK06 | Musculoskeletal, |
| | | Reproductive |
| 1348 | HFICH70 | Musculoskeletal |
| 1349 | HFIHQ57 | Musculoskeletal, |
| | | Reproductive |
| 1350 | HFIIK29 | Cancer |
| 1351 | HFIIK29 | Cancer |
| 1352 | HFIIK29 | Cancer |
| 1353 | HFIIK29 | Cancer |
| 1354 | HFIIQ27 | Cancer |
| 1355 | HFIIQ64 | Cancer |
| 1356 | HFIIZ61 | Cancer |
| 1357 | HFIJD81 | Cancer |
| 1358 | HFIJF44 | Cancer |
| 1359 | HFITA02 | Immune/Hematopoietic, |
| | | Musculoskeletal |
| 1360 | HFITF80 | Cancer |
| 1361 | HFIUK66 | Cancer |
| 1362 | HFIUT21 | Cancer |
| 1363 | HFIVB04 | Cancer |
| 1364 | HFIXC39 | Cancer |
| 1365 | HFIXC69 | Cancer |
| 1366 | HFIXE39 | Cancer |
| 1367 | HFIYP15 | Immune/Hematopoietic, |
| | | Musculoskeletal |
| 1368 | HFIZE10 | Cancer |
| 1369 | HFIZF51 | Musculoskeletal |
| 1370 | HFIZK42 | Immune/Hematopoietic, |
| | | Musculoskeletal |
| 1371 | HFIZM89 | Musculoskeletal |
| 1372 | HFKBA62 | Digestive, |
| | | Excretory, |
| | | Neural/Sensory |
| 1373 | HFKBC47 | Cancer |
| 1374 | HFKDX53 | Cancer |
| 1375 | HFKEB14 | Cancer |
| 1376 | HFKEG63 | Excretory |
| 1377 | HFKES35 | Cancer |
| 1378 | HFKES35 | Cancer |
| 1379 | HFKEU17 | Cancer |
| 1380 | HFKEV77 | Cancer |
| 1381 | HFKFI15 | Cancer |
| 1382 | HFKFI35 | Excretory |
| 1383 | HFKFK49 | Cancer |
| 1384 | HFKFV88 | Cancer |
| 1385 | HFKFV88 | Cancer |
| 1386 | HFKFV88 | Cancer |
| 1387 | HFKFX64 | Excretory |
| 1388 | HFOXD49 | Cancer |
| 1389 | HFOXE28 | Cancer |
| 1390 | HFOYH74 | Musculoskeletal |
| 1391 | HFOYP02 | Musculoskeletal |
| 1392 | HFOYR24 | Musculoskeletal |
| 1393 | HFOYR54 | Cancer |
| 1394 | HFOZB26 | Cancer |
| 1395 | HFPBF54 | Cancer |
| 1396 | HFPBF54 | Cancer |
| 1397 | HFPBI93 | Cancer |
| 1398 | HFPBJ64 | Musculoskeletal, |
| | | Neural/Sensory |
| 1399 | HFPBQ55 | Musculoskeletal, |
| | | Neural/Sensory, |
| | | Reproductive |
| 1400 | HFPCK22 | Cancer |
| 1401 | HFPCM32 | Neural/Sensory |
| 1402 | HFPCM36 | Cancer |
| 1403 | HFPCS84 | Neural/Sensory |
| 1404 | HFPCU47 | Neural/Sensory |
| 1405 | HFPCY66 | Digestive, |
| | | Neural/Sensory |
| 1406 | HFPDC65 | Cancer |
| 1407 | HFPDE42 | Musculoskeletal, |
| | | Neural/Sensory |
| 1408 | HFPDE88 | Neural/Sensory |
| 1409 | HFPDO25 | Neural/Sensory |
| 1410 | HFPDP70 | Neural/Sensory |
| 1411 | HFPDR39 | Cancer |
| 1412 | HFPDX08 | Cancer |
| 1413 | HFPEP69 | Neural/Sensory |
| 1414 | HFRAU40 | Cancer |
| 1415 | HFRAY90 | Cancer |
| 1416 | HFSAY91 | Cancer |
| 1417 | HFSBC10 | Immune/Hematopoietic, |
| | | Mixed Fetal |
| 1418 | HFSBE94 | Immune/Hematopoietic |
| 1419 | HFTAN11 | Cancer |
| 1420 | HFTAR27 | Cancer |
| 1421 | HFTAR30 | Cancer |
| 1422 | HFTAS49 | Cancer |
| 1423 | HFTBB50 | Cancer |
| 1424 | HFTBL17 | Cancer |
| 1425 | HFTBL17 | Cancer |
| 1426 | HFTCF02 | Digestive, |
| | | Musculoskeletal, |
| | | Neural/Sensory |
| 1427 | HFTCI85 | Neural/Sensory |
| 1428 | HFTCJ32 | Neural/Sensory |
| 1429 | HFTCO17 | Cancer |
| 1430 | HFTCW07 | Neural/Sensory |
| 1431 | HFTDF32 | Cancer |
| 1432 | HFTDF79 | Immune/Hematopoietic, |
| | | Neural/Sensory, |
| | | Reproductive |
| 1433 | HFTDK11 | Cancer |
| 1434 | HFTDU08 | Immune/Hematopoietic, |
| | | Musculoskeletal, |
| | | Neural/Sensory |
| 1435 | HFVGK67 | Digestive, |
| | | Immune/Hematopoietic |
| 1436 | HFVHD38 | Cancer |
| 1437 | HFVHY57 | Cancer |
| 1438 | HFVIC33 | Cancer |
| 1439 | HFXAK32 | Cancer |
| 1440 | HFXAK59 | Cancer |
| 1441 | HFXBI64 | Neural/Sensory |
| 1442 | HFXBL05 | Mixed Fetal, |
| | | Neural/Sensory |
| 1443 | HFXBM52 | Neural/Sensory |
| 1444 | HFXBR58 | Neural/Sensory |
| 1445 | HFXBV67 | Digestive, |
| | | Neural/Sensory |
| 1446 | HFXBY20 | Neural/Sensory |
| 1447 | HFXCB70 | Neural/Sensory |
| 1448 | HFXCI42 | Neural/Sensory |
| 1449 | HFXCL59 | Immune/Hematopoietic, |
| | | Musculoskeletal, |
| | | Neural/Sensory |
| 1450 | HFXCM22 | Neural/Sensory, |
| | | Reproductive |
| 1451 | HFXCN18 | Neural/Sensory |
| 1452 | HFXCS53 | Cancer |
| 1453 | HFXDB37 | Neural/Sensory |
| 1454 | HFXDI32 | Neural/Sensory |
| 1455 | HFXDJ43 | Neural/Sensory |
| 1456 | HFXDL76 | Immune/Hematopoietic, |
| | | Musculoskeletal, |
| | | Neural/Sensory |
| 1457 | HFXDM75 | Neural/Sensory |
| 1458 | HFXDO18 | Neural/Sensory |
| 1459 | HFXDP44 | Neural/Sensory |
| 1460 | HFXDR08 | Immune/Hematopoietic, |
| | | Neural/Sensory, |
| | | Reproductive |
| 1461 | HFXDR28 | Neural/Sensory |
| 1462 | HFXDR28 | Neural/Sensory |
| 1463 | HFXDR47 | Cancer |
| 1464 | HFXDZ03 | Immune/Hematopoietic, |
| | | Neural/Sensory |
| 1465 | HFXED33 | Neural/Sensory |
| 1466 | HFXEE88 | Neural/Sensory |
| 1467 | HFXGR32 | Neural/Sensory |
| 1468 | HFXGT51 | Neural/Sensory |
| 1469 | HFXGW16 | Neural/Sensory |
| 1470 | HFXHC15 | Neural/Sensory |
| 1471 | HFXHI33 | Immune/Hematopoietic, |
| | | Neural/Sensory |
| 1472 | HFXHL21 | Neural/Sensory |
| 1473 | HFXHL83 | Neural/Sensory |
| 1474 | HFXHM49 | Neural/Sensory |
| 1475 | HFXHM93 | Neural/Sensory |
| 1476 | HFXHN89 | Immune/Hematopoietic, |
| | | Neural/Sensory |
| 1477 | HFXJB21 | Neural/Sensory |
| 1478 | HFXJN93 | Neural/Sensory |
| 1479 | HFXJS15 | Cancer |
| 1480 | HFXJT53 | Cancer |
| 1481 | HFXKG56 | Neural/Sensory |
| 1482 | HFXKL60 | Cancer |
| 1483 | HFXLG08 | Neural/Sensory |
| 1484 | HFXLK91 | Cancer |
| 1485 | HFXLM32 | Neural/Sensory, |
| | | Reproductive |
| 1486 | HGBAX83 | Digestive |
| 1487 | HGBBR29 | Cancer |
| 1488 | HGBDL51 | Cancer |
| 1489 | HGBDV35 | Cancer |
| 1490 | HGBDX28 | Cancer |
| 1491 | HGBGX31 | Cancer |
| 1492 | HGBHE23 | Cancer |
| 1493 | HGBHI15 | Digestive |
| 1494 | HGCMW39 | Cancer |
| 1495 | HGLAG32 | Cancer |
| 1496 | HGLAH08 | Cancer |
| 1497 | HGLAH86 | Immune/Hematopoietic |
| 1498 | HGLBC33 | Cancer |
| 1499 | HGLBG15 | Cancer |
| 1500 | HGLBM55 | Cancer |
| 1501 | HGLDA95 | Cancer |
| 1502 | HGLDB06 | Cancer |
| 1503 | HGLDE15 | Digestive, |
| | | Immune/Hematopoietic |
| 1504 | HHBEI14 | Cancer |
| 1505 | HHBGL33 | Cardiovascular, |
| | | Digestive |
| 1506 | HHEAW44 | Immune/Hematopoietic |
| 1507 | HHEBP28 | Cancer |
| 1508 | HHECK41 | Cancer |
| 1509 | HHECR10 | Immune/Hematopoietic |
| 1510 | HHEMC55 | Immune/Hematopoietic |
| 1511 | HHEMM20 | Immune/Hematopoietic |
| 1512 | HHEMM80 | Immune/Hematopoietic |
| 1513 | HHEMP35 | Cancer |
| 1514 | HHEMZ08 | Cancer |
| 1515 | HHENC17 | Cancer |
| 1516 | HHENF95 | Immune/Hematopoietic |
| 1517 | HHENR74 | Immune/Hematopoietic |
| 1518 | HHENU33 | Immune/Hematopoietic |
| 1519 | HHENY07 | Cancer |
| 1520 | HHEOK77 | Cancer |
| 1521 | HHEPE72 | Immune/Hematopoietic |
| 1522 | HHEPE81 | Cancer |
| 1523 | HHEPM64 | Cancer |
| 1524 | HHEQI04 | Connective/Epithelial, |
| | | Excretory, |
| | | Immune/Hematopoietic |
| 1525 | HHEQY60 | Immune/Hematopoietic |
| 1526 | HHFBA31 | Cancer |
| 1527 | HHFCI81 | Cancer |
| 1528 | HHFCN78 | Cardiovascular, |
| | | Immune/Hematopoietic |
| 1529 | HHFCT95 | Cancer |
| 1530 | HHFDN16 | Cardiovascular |
| 1531 | HHFEB79 | Connective/Epithelial |
| 1532 | HHFEC39 | Cancer |
| 1533 | HHFEN34 | Cardiovascular |
| 1534 | HHFFZ01 | Cancer |
| 1535 | HHFGI71 | Cardiovascular |
| 1536 | HHFGJ54 | Cancer |
| 1537 | HHFGL38 | Cardiovascular, |
| | | Immune/Hematopoietic |
| 1538 | HHFGR75 | Cardiovascular, |
| | | Immune/Hematopoietic, |
| | | Neural/Sensory |
| 1539 | HHFGZ23 | Cardiovascular, |
| | | Digestive, |
| | | Endocrine |
| 1540 | HHFHG26 | Cardiovascular, |
| | | Neural/Sensory |
| 1541 | HHFHM47 | Cardiovascular, |
| | | Immune/Hematopoietic |
| 1542 | HHGAA76 | Immune/Hematopoietic, |
| | | Reproductive |
| 1543 | HHGAD46 | Cancer |
| 1544 | HHGAT09 | Cancer |
| 1545 | HHGBC21 | Cancer |
| 1546 | HHGBF91 | Cancer |
| 1547 | HHGBG63 | Cancer |
| 1548 | HHGBV02 | Immune/Hematopoietic, |
| | | Reproductive |
| 1549 | HHGBW55 | Immune/Hematopoietic, |
| | | Reproductive |
| 1550 | HHGBX88 | Cancer |
| 1551 | HHGCA26 | Reproductive |
| 1552 | HHGDA81 | Cancer |
| 1553 | HHGDI12 | Neural/Sensory |
| 1554 | HHGDR05 | Neural/Sensory |
| 1555 | HHGDR92 | Cancer |
| 1556 | HHGDS56 | Cancer |
| 1557 | HHGDW65 | Cancer |
| 1558 | HHLBA86 | Digestive |
| 1559 | HHNAC56 | Digestive |
| 1560 | HHPBG90 | Cancer |
| 1561 | HHPDE28 | Cancer |
| 1562 | HHPDJ11 | Cancer |
| 1563 | HHPDX86 | Neural/Sensory |
| 1564 | HHPEA17 | Neural/Sensory |
| 1565 | HHPEB61 | Immune/Hematopoietic, |
| | | Neural/Sensory, |
| | | Respiratory |
| 1566 | HHPFP26 | Cancer |
| 1567 | HHPFS11 | Cardiovascular, |
| | | Neural/Sensory |
| 1568 | HHPFS15 | Cancer |
| 1569 | HHPFS18 | Cancer |
| 1570 | HHPGH34 | Neural/Sensory, |
| | | Reproductive |
| 1571 | HHPGU74 | Neural/Sensory |
| 1572 | HHPGU87 | Cancer |
| 1573 | HHPSD42 | Immune/Hematopoietic, |
| | | Neural/Sensory |
| 1574 | HHPSE03 | Neural/Sensory |
| 1575 | HHPSE55 | Cancer |
| 1576 | HHPSF70 | Cancer |
| 1577 | HHPSH74 | Cancer |
| 1578 | HHPSL14 | Cancer |
| 1579 | HHPSM40 | Neural/Sensory |
| 1580 | HHPTF26 | Mixed Fetal, |
| | | Musculoskeletal, |
| | | Neural/Sensory |
| 1581 | HHSAD31 | Immune/Hematopoietic, |
| | | Neural/Sensory, |
| | | Reproductive |
| 1582 | HHSAE74 | Neural/Sensory |
| 1583 | HHSAG62 | Cancer |
| 1584 | HHSAK17 | Neural/Sensory |
| 1585 | HHSBJ92 | Cancer |
| 1586 | HHSBN84 | Cancer |
| 1587 | HHSCL24 | Cancer |
| 1588 | HHSCQ67 | Cancer |
| 1589 | HHSCU12 | Cancer |
| 1590 | HHSDB43 | Cancer |
| 1591 | HHSDL07 | Neural/Sensory |
| 1592 | HHSDX07 | Cancer |
| 1593 | HHSFF54 | Cancer |
| 1594 | HHSGB85 | Cancer |
| 1595 | HHSGL84 | Neural/Sensory |
| 1596 | HHTLH79 | Immune/Hematopoietic, |
| | | Musculoskeletal, |
| | | Neural/Sensory |
| 1597 | HIABC70 | Cancer |
| 1598 | HIATG10 | Endocrine |
| 1599 | HIBCO70 | Cancer |
| 1600 | HIBCR82 | Mixed Fetal, |
| | | Neural/Sensory |
| 1601 | HIBDA41 | Cancer |
| 1602 | HIBEC45 | Cancer |
| 1603 | HILBW03 | Cancer |
| 1604 | HISAE16 | Digestive |
| 1605 | HISAG53 | Cancer |
| 1606 | HISAN63 | Digestive |
| 1607 | HISAT78 | Cancer |
| 1608 | HISBA38 | Digestive, |
| | | Immune/Hematopoietic |
| 1609 | HISBB66 | Cancer |
| 1610 | HISCJ20 | Cancer |
| 1611 | HISCK41 | Digestive |
| 1612 | HISCO45 | Cancer |
| 1613 | HISEJ52 | Cancer |
| 1614 | HJABC58 | Cancer |
| 1615 | HJABG59 | Immune/Hematopoietic |
| 1616 | HJABR75 | Immune/Hematopoietic |
| 1617 | HJABS31 | Cancer |
| 1618 | HJABT12 | Digestive, |
| | | Immune/Hematopoietic, |
| | | Neural/Sensory |
| 1619 | HJACE25 | Cancer |
| 1620 | HJACK21 | Cancer |
| 1621 | HJBCG74 | Cancer |
| 1622 | HJBCO21 | Cancer |
| 1623 | HJBCQ40 | Immune/Hematopoietic |
| 1624 | HJBDM36 | Cancer |
| 1625 | HJMAF30 | Cancer |
| 1626 | HJMAM72 | Cancer |
| 1627 | HJMAZ60 | Cancer |
| 1628 | HJMBB20 | Cancer |
| 1629 | HJMBB20 | Cancer |
| 1630 | HJMBB20 | Cancer |
| 1631 | HJMBK59 | Cancer |
| 1632 | HJMBP01 | Cancer |
| 1633 | HJMBQ17 | Cancer |
| 1634 | HJMBW62 | Reproductive |
| 1635 | HJMBX54 | Musculoskeletal, |
| | | Reproductive |
| 1636 | HJPAF69 | Immune/Hematopoietic |
| 1637 | HJPAQ19 | Cancer |
| 1638 | HJPAZ35 | Cancer |
| 1639 | HJPBI77 | Immune/Hematopoietic, |
| | | Musculoskeletal, |
| | | Neural/Sensory |
| 1640 | HJPBN96 | Cancer |
| 1641 | HJPBU47 | Cancer |
| 1642 | HJPCQ19 | Cancer |
| 1643 | HJPDJ08 | Immune/Hematopoietic |
| 1644 | HJPDK61 | Cancer |
| 1645 | HKABI53 | Cancer |
| 1646 | HKABN63 | Cancer |
| 1647 | HKACA25 | Cancer |
| 1648 | HKACO64 | Cancer |
| 1649 | HKACP50 | Cancer |
| 1650 | HKACX90 | Cancer |
| 1651 | HKADI27 | Cancer |
| 1652 | HKADN26 | Cancer |
| 1653 | HKADP79 | Cancer |
| 1654 | HKADT55 | Cancer |
| 1655 | HKAEK58 | Cancer |
| 1656 | HKAEK72 | Connective/Epithelial |
| 1657 | HKAFJ47 | Cancer |
| 1658 | HKAFQ41 | Cancer |
| 1659 | HKAHH71 | Cancer |
| 1660 | HKAJA95 | Cancer |
| 1661 | HKAKU90 | Cancer |
| 1662 | HKCSZ54 | Digestive |
| 1663 | HKFAA15 | Cancer |
| 1664 | HKFBB08 | Immune/Hematopoietic |
| 1665 | HKGAG59 | Cancer |
| 1666 | HKGAJ81 | Cancer |
| 1667 | HKGAK45 | Musculoskeletal, |
| | | Reproductive |
| 1668 | HKGAP04 | Cancer |
| 1669 | HKGAP57 | Immune/Hematopoietic |
| 1670 | HKGAW41 | Cancer |
| 1671 | HKGBA21 | Connective/Epithelial, |
| | | Mixed Fetal, |
| | | Musculoskeletal |
| 1672 | HKGBC33 | Immune/Hematopoietic |
| 1673 | HKGBC73 | Cancer |
| 1674 | HKGBF61 | Cancer |
| 1675 | HKGBH54 | Cancer |
| 1676 | HKGBP52 | Cancer |
| 1677 | HKGCE23 | Cancer |
| 1678 | HKGCE62 | Immune/Hematopoietic |
| 1679 | HKGCK41 | Cancer |
| 1680 | HKGCK41 | Cancer |
| 1681 | HKGCN96 | Cancer |
| 1682 | HKGCX05 | Cancer |
| 1683 | HKGDA95 | Cancer |
| 1684 | HKGDO12 | Cancer |
| 1685 | HKIME53 | Cancer |
| 1686 | HKIMG23 | Cancer |
| 1687 | HKIXB73 | Excretory |
| 1688 | HKIXD68 | Cancer |
| 1689 | HKIXR91 | Cancer |
| 1690 | HKIXS19 | Cancer |
| 1691 | HKIXW45 | Cancer |
| 1692 | HKIYU90 | Excretory, |
| | | Neural/Sensory |
| 1693 | HKMLB81 | Excretory |
| 1694 | HKMLF77 | Excretory |
| 1695 | HKMLM32 | Excretory, |
| | | Neural/Sensory |
| 1696 | HKMLR17 | Cancer |
| 1697 | HKMLT89 | Excretory, |
| | | Immune/Hematopoietic, |
| | | Reproductive |
| 1698 | HKMLV05 | Excretory, |
| | | Immune/Hematopoietic |
| 1699 | HKMLV25 | Cancer |
| 1700 | HKMMB79 | Cancer |
| 1701 | HKMMC69 | Excretory, |
| | | Immune/Hematopoietic |
| 1702 | HKMMD91 | Cancer |
| 1703 | HKMMP90 | Excretory, |
| | | Immune/Hematopoietic, |
| | | Neural/Sensory |
| 1704 | HKMMU76 | Cancer |
| 1705 | HKPAC10 | Excretory |
| 1706 | HKPAC50 | Cancer |
| 1707 | HKPMA08 | Cancer |
| 1708 | HKTAC18 | Cancer |
| 1709 | HL1SA89 | Cancer |
| 1710 | HL2AB60 | Cancer |
| 1711 | HL3AE69 | Cancer |
| 1712 | HL3AF32 | Cancer |
| 1713 | HLDAV70 | Digestive, |
| | | Immune/Hematopoietic |
| 1714 | HLDBL62 | Cancer |
| 1715 | HLDBV18 | Cancer |
| 1716 | HLDBV54 | Cancer |
| 1717 | HLDCR26 | Cancer |
| 1718 | HLDDM27 | Cancer |
| 1719 | HLDDM27 | Cancer |
| 1720 | HLDNF18 | Cancer |
| 1721 | HLDNN84 | Digestive, |
| | | Mixed Fetal |
| 1722 | HLDOD77 | Digestive |
| 1723 | HLDOL74 | Cancer |
| 1724 | HLDPB24 | Cardiovascular, |
| | | Digestive |
| 1725 | HLDRU08 | Cancer |
| 1726 | HLDXF43 | Cancer |
| 1727 | HLEAA10 | Immune/Hematopoietic |
| 1728 | HLEAA24 | Immune/Hematopoietic |
| 1729 | HLHAE14 | Neural/Sensory, |
| | | Respiratory |
| 1730 | HLHAE14 | Neural/Sensory, |
| | | Respiratory |
| 1731 | HLHBS54 | Cancer |
| 1732 | HLHCB33 | Digestive, |
| | | Reproductive, |
| | | Respiratory |
| 1733 | HLHCF14 | Connective/Epithelial, |
| | | Respiratory |
| 1734 | HLHCG24 | Cancer |
| 1735 | HLHCH20 | Cancer |
| 1736 | HLHCN51 | Digestive, |
| | | Immune/Hematopoietic, |
| | | Respiratory |
| 1737 | HLHCT96 | Cancer |
| 1738 | HLHDC33 | Immune/Hematopoietic, |
| | | Reproductive, |
| | | Respiratory |
| 1739 | HLHDF92 | Cancer |
| 1740 | HLHDJ05 | Respiratory |
| 1741 | HLHDL37 | Respiratory |
| 1742 | HLHDL69 | Cancer |
| 1743 | HLHDL69 | Cancer |
| 1744 | HLHDL69 | Cancer |
| 1745 | HLHDL69 | Cancer |
| 1746 | HLHDM38 | Cancer |
| 1747 | HLHDR92 | Neural/Sensory, |
| | | Respiratory |
| 1748 | HLHDY94 | Cancer |
| 1749 | HLHEE27 | Cancer |
| 1750 | HLHEE38 | Connective/Epithelial, |
| | | Neural/Sensory, |
| | | Respiratory |
| 1751 | HLHEI72 | Musculoskeletal, |
| | | Respiratory |
| 1752 | HLHEX62 | Excretory, |
| | | Immune/Hematopoietic, |
| | | Respiratory |
| 1753 | HLHFK59 | Digestive, |
| | | Respiratory |
| 1754 | HLHFP09 | Cancer |
| 1755 | HLHGG78 | Cancer |
| 1756 | HLHSG15 | Cancer |
| 1757 | HLHSQ35 | Respiratory |
| 1758 | HLHTB92 | Immune/Hematopoietic, |
| | | Respiratory |
| 1759 | HLHTP55 | Cancer |
| 1760 | HLIBD74 | Digestive |
| 1761 | HLIBE41 | Digestive, |
| | | Immune/Hematopoietic, |
| | | Reproductive |
| 1762 | HLIBO16 | Digestive, |
| | | Immune/Hematopoietic |
| 1763 | HLJBI22 | Cancer |
| 1764 | HLJEE16 | Cancer |
| 1765 | HLLAX64 | Cancer |
| 1766 | HLLAX95 | Immune/Hematopoietic |
| 1767 | HLLCD67 | Immune/Hematopoietic |
| 1768 | HLMBX89 | Cancer |
| 1769 | HLMBZ14 | Immune/Hematopoietic |
| 1770 | HLMCT51 | Immune/Hematopoietic, |
| | | Reproductive |
| 1771 | HLMCT95 | Cancer |
| 1772 | HLMDD65 | Cancer |
| 1773 | HLMDH01 | Immune/Hematopoietic |
| 1774 | HLMDU23 | Immune/Hematopoietic |
| 1775 | HLMFB62 | Immune/Hematopoietic |
| 1776 | HLMFG52 | Immune/Hematopoietic |
| 1777 | HLMFU53 | Cancer |
| 1778 | HLMHG68 | Cancer |
| 1779 | HLMHN06 | Immune/Hematopoietic, |
| | | Neural/Sensory |
| 1780 | HLMHS15 | Immune/Hematopoietic |
| 1781 | HLMIM84 | Cancer |
| 1782 | HLMIN52 | Cancer |
| 1783 | HLMIQ83 | Immune/Hematopoietic |
| 1784 | HLMIW76 | Immune/Hematopoietic |
| 1785 | HLMMA65 | Immune/Hematopoietic |
| 1786 | HLMMT12 | Digestive, |
| | | Immune/Hematopoietic |
| 1787 | HLMNA19 | Cardiovascular, |
| | | Immune/Hematopoietic |
| 1788 | HLQAD72 | Cancer |
| 1789 | HLQAM30 | Cancer |
| 1790 | HLQAM59 | Digestive |
| 1791 | HLQBB23 | Cancer |
| 1792 | HLQBF05 | Digestive, |
| | | Reproductive |
| 1793 | HLQBX64 | Cancer |
| 1794 | HLQCY09 | Digestive |
| 1795 | HLQCZ43 | Cancer |
| 1796 | HLQCZ80 | Digestive |
| 1797 | HLQDK45 | Digestive |
| 1798 | HLQDM47 | Digestive |
| 1799 | HLQDU77 | Cancer |
| 1800 | HLSAD72 | Connective/Epithelial |
| 1801 | HLTCJ67 | Immune/Hematopoietic |
| 1802 | HLTCM28 | Immune/Hematopoietic, |
| | | Respiratory |
| 1803 | HLTCO22 | Cancer |
| 1804 | HLTDA14 | Immune/Hematopoietic |
| 1805 | HLTDC26 | Cancer |
| 1806 | HLTDC26 | Cancer |
| 1807 | HLTDI20 | Cancer |
| 1808 | HLTDI65 | Immune/Hematopoietic |
| 1809 | HLTDK30 | Cancer |
| 1810 | HLTDL37 | Cancer |
| 1811 | HLTDU35 | Cancer |
| 1812 | HLTDX04 | Cancer |
| 1813 | HLTEH84 | Cancer |
| 1814 | HLTEL39 | Cardiovascular, |
| | | Immune/Hematopoietic |
| 1815 | HLTEN11 | Cancer |
| 1816 | HLTEW52 | Immune/Hematopoietic |
| 1817 | HLTEZ36 | Cancer |
| 1818 | HLTGG14 | Cancer |
| 1819 | HLUAF94 | Immune/Hematopoietic |
| 1820 | HLWAH33 | Mixed Fetal, |
| | | Reproductive |
| 1821 | HLWAO11 | Cancer |
| 1822 | HLWAW73 | Cancer |
| 1823 | HLWAX50 | Cancer |
| 1824 | HLWBJ93 | Cancer |
| 1825 | HLWBK16 | Cardiovascular, |
| | | Connective/Epithelial, |
| | | Reproductive |
| 1826 | HLWCC11 | Reproductive |
| 1827 | HLYAH81 | Immune/Hematopoietic |
| 1828 | HLYAH92 | Immune/Hematopoietic |
| 1829 | HLYAJ79 | Cancer |
| 1830 | HLYAL28 | Immune/Hematopoietic |
| 1831 | HLYAR30 | Cancer |
| 1832 | HLYAT54 | Immune/Hematopoietic |
| 1833 | HLYBC81 | Connective/Epithelial, |
| | | Immune/Hematopoietic, |
| | | Reproductive |
| 1834 | HLYBD09 | Immune/Hematopoietic |
| 1835 | HLYBL67 | Immune/Hematopoietic |
| 1836 | HLYBM38 | Digestive, |
| | | Immune/Hematopoietic |
| 1837 | HLYBN23 | Immune/Hematopoietic |
| 1838 | HLYBN71 | Immune/Hematopoietic |
| 1839 | HLYBS25 | Digestive, |
| | | Immune/Hematopoietic, |
| | | Reproductive |
| 1840 | HLYBT28 | Immune/Hematopoietic |
| 1841 | HLYBU15 | Immune/Hematopoietic |
| 1842 | HLYBY04 | Immune/Hematopoietic |
| 1843 | HLYCE15 | Digestive, |
| | | Immune/Hematopoietic |
| 1844 | HLYCH04 | Immune/Hematopoietic |
| 1845 | HLYCY48 | Immune/Hematopoietic |
| 1846 | HLYDE38 | Immune/Hematopoietic |
| 1847 | HLYDG55 | Immune/Hematopoietic |
| 1848 | HLYDO73 | Immune/Hematopoietic |
| 1849 | HLYEA60 | Cancer |
| 1850 | HLYEJ14 | Cancer |
| 1851 | HLYEJ44 | Cancer |
| 1852 | HLYEU51 | Immune/Hematopoietic |
| 1853 | HLYGV19 | Cancer |
| 1854 | HMABK52 | Immune/Hematopoietic |
| 1855 | HMACF34 | Immune/Hematopoietic |
| 1856 | HMACL77 | Cancer |
| 1857 | HMACT74 | Immune/Hematopoietic |
| 1858 | HMADJ14 | Connective/Epithelial, |
| | | Immune/Hematopoietic, |
| | | Musculoskeletal |
| 1859 | HMADJ74 | Connective/Epithelial, |
| | | Immune/Hematopoietic, |
| | | Musculoskeletal |
| 1860 | HMAEA58 | Cancer |
| 1861 | HMAGF01 | Cancer |
| 1862 | HMAJS26 | Cancer |
| 1863 | HMCED78 | Cancer |
| 1864 | HMCFN86 | Cancer |
| 1865 | HMCGJ47 | Cancer |
| 1866 | HMCGK88 | Cancer |
| 1867 | HMCIH27 | Cancer |
| 1868 | HMCIQ20 | Cardiovascular, |
| | | Immune/Hematopoietic, |
| | | Neural/Sensory |
| 1869 | HMCJC19 | Immune/Hematopoietic |
| 1870 | HMDAB44 | Neural/Sensory |
| 1871 | HMDAE88 | Neural/Sensory |
| 1872 | HMDAG62 | Cancer |
| 1873 | HMDAK20 | Neural/Sensory |
| 1874 | HMDAM08 | Neural/Sensory |
| 1875 | HMDAM39 | Neural/Sensory |
| 1876 | HMEAA41 | Cancer |
| 1877 | HMECM77 | Cardiovascular |
| 1878 | HMEEH21 | Cardiovascular |
| 1879 | HMEET36 | Cancer |
| 1880 | HMEEZ07 | Cardiovascular, |
| | | Reproductive |
| 1881 | HMEFB15 | Cardiovascular |
| 1882 | HMEIH57 | Cardiovascular, |
| | | Immune/Hematopoietic |
| 1883 | HMEIJ21 | Cancer |
| 1884 | HMEIX79 | Cancer |
| 1885 | HMEJC96 | Cancer |
| 1886 | HMEJD36 | Cardiovascular, |
| | | Endocrine, |
| | | Immune/Hematopoietic |
| 1887 | HMEJK28 | Cancer |
| 1888 | HMEKH55 | Cancer |
| 1889 | HMEKW44 | Cardiovascular, |
| | | Immune/Hematopoietic, |
| | | Neural/Sensory |
| 1890 | HMEKW71 | Cancer |
| 1891 | HMELW26 | Cancer |
| 1892 | HMGBT32 | Cancer |
| 1893 | HMHBI09 | Cancer |
| 1894 | HMHBI93 | Cancer |
| 1895 | HMHBP74 | Cancer |
| 1896 | HMIAC52 | Cancer |
| 1897 | HMIAD75 | Neural/Sensory |
| 1898 | HMIAG42 | Cancer |
| 1899 | HMIAG55 | Cancer |
| 1900 | HMIAG72 | Cancer |
| 1901 | HMIAL39 | Cancer |
| 1902 | HMIAO82 | Cancer |
| 1903 | HMIAR42 | Cancer |
| 1904 | HMIAV33 | Immune/Hematopoietic, |
| | | Mixed Fetal, |
| | | Neural/Sensory |
| 1905 | HMIAZ24 | Cancer |
| 1906 | HMIBD93 | Cancer |
| 1907 | HMIBE95 | Neural/Sensory |
| 1908 | HMIBG57 | Immune/Hematopoietic, |
| | | Neural/Sensory, |
| | | Reproductive |
| 1909 | HMJAC12 | Neural/Sensory |
| 1910 | HMKAN71 | Cancer |
| 1911 | HMKBA33 | Neural/Sensory |
| 1912 | HMKCI22 | Cancer |
| 1913 | HMKCK32 | Neural/Sensory |
| 1914 | HMKCP81 | Cancer |
| 1915 | HMKCY49 | Immune/Hematopoietic, |
| | | Neural/Sensory |
| 1916 | HMKDD51 | Neural/Sensory |
| 1917 | HMKDG69 | Cardiovascular, |
| | | Neural/Sensory |
| 1918 | HMKDM80 | Neural/Sensory |
| 1919 | HMKEG88 | Neural/Sensory |
| 1920 | HMMAA09 | Immune/Hematopoietic |
| 1921 | HMMAK92 | Immune/Hematopoietic |
| 1922 | HMMAL32 | Immune/Hematopoietic |
| 1923 | HMMBD19 | Immune/Hematopoietic, |
| | | Reproductive |
| 1924 | HMMBF22 | Immune/Hematopoietic, |
| | | Reproductive |
| 1925 | HMMBH91 | Immune/Hematopoietic |
| 1926 | HMMBH94 | Immune/Hematopoietic |
| 1927 | HMMBK55 | Immune/Hematopoietic |
| 1928 | HMMBQ31 | Cardiovascular, |
| | | Immune/Hematopoietic |
| 1929 | HMMBR63 | Cancer |
| 1930 | HMMBS55 | Immune/Hematopoietic, |
| | | Reproductive |
| 1931 | HMMBT47 | Immune/Hematopoietic |
| 1932 | HMMCD35 | Immune/Hematopoietic |
| 1933 | HMMCD95 | Immune/Hematopoietic, |
| | | Neural/Sensory |
| 1934 | HMPAB26 | Cancer |
| 1935 | HMPAP48 | Immune/Hematopoietic |
| 1936 | HMQAI38 | Immune/Hematopoietic, |
| | | Reproductive |
| 1937 | HMQAT69 | Cancer |
| 1938 | HMQBL90 | Digestive, |
| | | Immune/Hematopoietic |
| 1939 | HMQBV82 | Immune/Hematopoietic, |
| | | Musculoskeletal, |
| | | Reproductive |
| 1940 | HMQCA75 | Cancer |
| 1941 | HMQCB37 | Cancer |
| 1942 | HMQCL80 | Immune/Hematopoietic |
| 1943 | HMQCX41 | Immune/Hematopoietic |
| 1944 | HMQDM09 | Cancer |
| 1945 | HMQDU07 | Digestive, |
| | | Immune/Hematopoietic, |
| | | Musculoskeletal |
| 1946 | HMSAP33 | Immune/Hematopoietic |
| 1947 | HMSAZ48 | Immune/Hematopoietic |
| 1948 | HMSBN18 | Cancer |
| 1949 | HMSBS25 | Immune/Hematopoietic |
| 1950 | HMSBU14 | Immune/Hematopoietic |
| 1951 | HMSBZ10 | Immune/Hematopoietic |
| 1952 | HMSCB94 | Immune/Hematopoietic, |
| | | Reproductive |
| 1953 | HMSCK12 | Immune/Hematopoietic |
| 1954 | HMSCP63 | Immune/Hematopoietic |
| 1955 | HMSCV75 | Immune/Hematopoietic |
| 1956 | HMSCV85 | Immune/Hematopoietic, |
| | | Reproductive |
| 1957 | HMSCW44 | Immune/Hematopoietic, |
| | | Mixed Fetal, |
| | | Neural/Sensory |
| 1958 | HMSCZ19 | Cancer |
| 1959 | HMSDI67 | Digestive, |
| | | Immune/Hematopoietic |
| 1960 | HMSDI79 | Cancer |
| 1961 | HMSDR28 | Cancer |
| 1962 | HMSFT25 | Immune/Hematopoietic |
| 1963 | HMSFW52 | Immune/Hematopoietic |
| 1964 | HMSGT73 | Immune/Hematopoietic |
| 1965 | HMSGU30 | Cancer |
| 1966 | HMSHB42 | Cancer |
| 1967 | HMSHB42 | Cancer |
| 1968 | HMSHN72 | Immune/Hematopoietic, |
| | | Reproductive |
| 1969 | HMSHT29 | Immune/Hematopoietic |
| 1970 | HMSHW73 | Immune/Hematopoietic |
| 1971 | HMSIC48 | Cardiovascular, |
| | | Immune/Hematopoietic |
| 1972 | HMSII36 | Immune/Hematopoietic |
| 1973 | HMSIT42 | Digestive, |
| | | Immune/Hematopoietic, |
| | | Neural/Sensory |
| 1974 | HMSJB08 | Cancer |
| 1975 | HMSJI69 | Immune/Hematopoietic |
| 1976 | HMSJM20 | Immune/Hematopoietic |
| 1977 | HMSJR44 | Immune/Hematopoietic |
| 1978 | HMSKQ91 | Immune/Hematopoietic |
| 1979 | HMSKY45 | Immune/Hematopoietic |
| 1980 | HMTAF92 | Cancer |
| 1981 | HMTAT36 | Cancer |
| 1982 | HMUAB93 | Cancer |
| 1983 | HMUAD65 | Immune/Hematopoietic, |
| | | Musculoskeletal |
| 1984 | HMUAT23 | Cancer |
| 1985 | HMUBA47 | Cancer |
| 1986 | HMUBJ22 | Cancer |
| 1987 | HMUBK53 | Cancer |
| 1988 | HMUBN24 | Musculoskeletal |
| 1989 | HMUBO15 | Cancer |
| 1990 | HMUBX48 | Musculoskeletal, |
| | | Reproductive |
| 1991 | HMUBY57 | Cancer |
| 1992 | HMUBZ15 | Cancer |
| 1993 | HMVAL15 | Cancer |
| 1994 | HMVBC84 | Digestive, |
| | | Immune/Hematopoietic, |
| | | Neural/Sensory |
| 1995 | HMVBD68 | Cancer |
| 1996 | HMVCG17 | Immune/Hematopoietic |
| 1997 | HMVCS92 | Cancer |
| 1998 | HMVCS92 | Cancer |
| 1999 | HMVDB45 | Immune/Hematopoietic |
| 2000 | HMVDJ71 | Cancer |
| 2001 | HMVDT89 | Cancer |
| 2002 | HMVDT89 | Cancer |
| 2003 | HMWAO65 | Cancer |
| 2004 | HMWAO82 | Immune/Hematopoietic |
| 2005 | HMWBD74 | Cancer |
| 2006 | HMWBK35 | Cancer |
| 2007 | HMWBK86 | Immune/Hematopoietic, |
| | | Mixed Fetal |
| 2008 | HMWBL38 | Connective/Epithelial, |
| | | Immune/Hematopoietic |
| 2009 | HMWBM48 | Cancer |
| 2010 | HMWCG28 | Cancer |
| 2011 | HMWCP85 | Digestive, |
| | | Immune/Hematopoietic |
| 2012 | HMWDG30 | Cancer |
| 2013 | HMWDU20 | Cancer |
| 2014 | HMWDX57 | Digestive, |
| | | Immune/Hematopoietic, |
| | | Respiratory |
| 2015 | HMWDZ63 | Immune/Hematopoietic |
| 2016 | HMWEA77 | Immune/Hematopoietic |
| 2017 | HMWEC03 | Cancer |
| 2018 | HMWEF46 | Immune/Hematopoietic |
| 2019 | HMWEK43 | Immune/Hematopoietic |
| 2020 | HMWEM23 | Cancer |
| 2021 | HMWEM23 | Cancer |
| 2022 | HMWER46 | Cancer |
| 2023 | HMWEU96 | Cancer |
| 2024 | HMWEX02 | Cancer |
| 2025 | HMWFB65 | Cancer |
| 2026 | HMWFD77 | Immune/Hematopoietic |
| 2027 | HMWFO25 | Immune/Hematopoietic |
| 2028 | HMWFO89 | Cancer |
| 2029 | HMWGM41 | Cancer |
| 2030 | HMWGO95 | Immune/Hematopoietic |
| 2031 | HMWGV85 | Cancer |
| 2032 | HMWGZ42 | Immune/Hematopoietic |
| 2033 | HMWHR36 | Immune/Hematopoietic |
| 2034 | HMWIM55 | Immune/Hematopoietic |
| 2035 | HMWIQ26 | Cancer |
| 2036 | HMWIU49 | Cancer |
| 2037 | HMWJJ62 | Cancer |
| 2038 | HMWJJ64 | Cancer |
| 2039 | HNAAD76 | Digestive, |
| | | Immune/Hematopoietic |
| 2040 | HNAAE24 | Digestive |
| 2041 | HNALD94 | Cancer |
| 2042 | HNALE44 | Cancer |
| 2043 | HNDAC35 | Cancer |
| 2044 | HNEAA04 | Immune/Hematopoietic |
| 2045 | HNEAH26 | Immune/Hematopoietic, |
| | | Neural/Sensory |
| 2046 | HNEAK38 | Immune/Hematopoietic |
| 2047 | HNEAK65 | Cancer |
| 2048 | HNEBX72 | Immune/Hematopoietic, |
| | | Neural/Sensory |
| 2049 | HNEBY79 | Immune/Hematopoietic |
| 2050 | HNECD52 | Immune/Hematopoietic, |
| | | Neural/Sensory |
| 2051 | HNECL75 | Cancer |
| 2052 | HNECX90 | Cancer |
| 2053 | HNECX90 | Cancer |
| 2054 | HNEDA05 | Immune/Hematopoietic |
| 2055 | HNEDP75 | Immune/Hematopoietic |
| 2056 | HNEDQ02 | Cancer |
| 2057 | HNEDU46 | Cancer |
| 2058 | HNFAD50 | Cancer |
| 2059 | HNFAD50 | Cancer |
| 2060 | HNFAG67 | Cancer |
| 2061 | HNFCJ77 | Immune/Hematopoietic, |
| | | Reproductive |
| 2062 | HNFCO56 | Cancer |
| 2063 | HNFCY57 | Connective/Epithelial, |
| | | Immune/Hematopoietic, |
| | | Respiratory |
| 2064 | HNFDL89 | Digestive, |
| | | Immune/Hematopoietic |
| 2065 | HNFDT73 | Excretory, |
| | | Immune/Hematopoietic, |
| | | Reproductive |
| 2066 | HNFDU92 | Immune/Hematopoietic |
| 2067 | HNFDY09 | Digestive, |
| | | Immune/Hematopoietic, |
| | | Neural/Sensory |
| 2068 | HNFDY31 | Cancer |
| 2069 | HNFEA17 | Cancer |
| 2070 | HNFEP55 | Cancer |
| 2071 | HNFET12 | Immune/Hematopoietic |
| 2072 | HNFFR59 | Immune/Hematopoietic |
| 2073 | HNFGC51 | Cancer |
| 2074 | HNFGR15 | Immune/Hematopoietic |
| 2075 | HNFGW37 | Immune/Hematopoietic |
| 2076 | HNFGW53 | Cancer |
| 2077 | HNFHA34 | Cancer |
| 2078 | HNFHD58 | Cancer |
| 2079 | HNFHV68 | Immune/Hematopoietic |
| 2080 | HNFIE15 | Cancer |
| 2081 | HNFIE29 | Immune/Hematopoietic |
| 2082 | HNFIG49 | Immune/Hematopoietic |
| 2083 | HNFJE27 | Immune/Hematopoietic |
| 2084 | HNFJG16 | Immune/Hematopoietic |
| 2085 | HNGAC71 | Digestive, |
| | | Immune/Hematopoietic |
| 2086 | HNGAK42 | Immune/Hematopoietic |
| 2087 | HNGAL25 | Immune/Hematopoietic |
| 2088 | HNGAT83 | Immune/Hematopoietic |
| 2089 | HNGAX06 | Cancer |
| 2090 | HNGBB09 | Immune/Hematopoietic |
| 2091 | HNGBC53 | Immune/Hematopoietic |
| 2092 | HNGBD94 | Immune/Hematopoietic |
| 2093 | HNGBE44 | Digestive, |
| | | Immune/Hematopoietic |
| 2094 | HNGBE63 | Immune/Hematopoietic |
| 2095 | HNGBI83 | Immune/Hematopoietic |
| 2096 | HNGBJ74 | Immune/Hematopoietic |
| 2097 | HNGBP30 | Immune/Hematopoietic |
| 2098 | HNGBQ61 | Immune/Hematopoietic |
| 2099 | HNGBS35 | Immune/Hematopoietic |
| 2100 | HNGBW25 | Immune/Hematopoietic |
| 2101 | HNGCF29 | Immune/Hematopoietic |
| 2102 | HNGCF64 | Immune/Hematopoietic |
| 2103 | HNGDF54 | Cancer |
| 2104 | HNGDH22 | Immune/Hematopoietic |
| 2105 | HNGDH27 | Immune/Hematopoietic |
| 2106 | HNGDN07 | Immune/Hematopoietic, |
| | | Reproductive |
| 2107 | HNGDO65 | Cancer |
| 2108 | HNGDR39 | Immune/Hematopoietic |
| 2109 | HNGDW78 | Immune/Hematopoietic |
| 2110 | HNGEA90 | Immune/Hematopoietic |
| 2111 | HNGEC17 | Immune/Hematopoietic |
| 2112 | HNGEE06 | Immune/Hematopoietic |
| 2113 | HNGEF70 | Immune/Hematopoietic |
| 2114 | HNGEF72 | Immune/Hematopoietic |
| 2115 | HNGEI64 | Immune/Hematopoietic |
| 2116 | HNGEJ33 | Cancer |
| 2117 | HNGEK64 | Immune/Hematopoietic |
| 2118 | HNGEN32 | Immune/Hematopoietic |
| 2119 | HNGER85 | Immune/Hematopoietic |
| 2120 | HNGES90 | Immune/Hematopoietic |
| 2121 | HNGET33 | Immune/Hematopoietic |
| 2122 | HNGEX18 | Immune/Hematopoietic |
| 2123 | HNGEY45 | Immune/Hematopoietic |
| 2124 | HNGEZ02 | Immune/Hematopoietic, |
| | | Reproductive |
| 2125 | HNGEZ90 | Immune/Hematopoietic |
| 2126 | HNGFA25 | Immune/Hematopoietic |
| 2127 | HNGFB05 | Immune/Hematopoietic |
| 2128 | HNGFD30 | Immune/Hematopoietic, |
| | | Mixed Fetal |
| 2129 | HNGFD31 | Immune/Hematopoietic |
| 2130 | HNGFD61 | Excretory, |
| | | Immune/Hematopoietic |
| 2131 | HNGFG04 | Immune/Hematopoietic |
| 2132 | HNGFG74 | Immune/Hematopoietic |
| 2133 | HNGFH32 | Immune/Hematopoietic |
| 2134 | HNGFH83 | Immune/Hematopoietic |
| 2135 | HNGFI21 | Cancer |
| 2136 | HNGFM31 | Immune/Hematopoietic |
| 2137 | HNGFN77 | Immune/Hematopoietic |
| 2138 | HNGFQ18 | Immune/Hematopoietic |
| 2139 | HNGFR54 | Immune/Hematopoietic |
| 2140 | HNGFT70 | Immune/Hematopoietic |
| 2141 | HNGFU70 | Immune/Hematopoietic |
| 2142 | HNGFV39 | Immune/Hematopoietic |
| 2143 | HNGGF13 | Immune/Hematopoietic |
| 2144 | HNGGK63 | Immune/Hematopoietic |
| 2145 | HNGGK65 | Immune/Hematopoietic, |
| | | Neural/Sensory, |
| | | Reproductive |
| 2146 | HNGGL11 | Immune/Hematopoietic |
| 2147 | HNGGO05 | Immune/Hematopoietic |
| 2148 | HNGGS92 | Immune/Hematopoietic |
| 2149 | HNGGT10 | Cancer |
| 2150 | HNGGT74 | Immune/Hematopoietic |
| 2151 | HNGHB89 | Digestive, |
| | | Immune/Hematopoietic, |
| | | Reproductive |
| 2152 | HNGHD07 | Immune/Hematopoietic |
| 2153 | HNGHK37 | Immune/Hematopoietic |
| 2154 | HNGHM47 | Immune/Hematopoietic |
| 2155 | HNGHT01 | Immune/Hematopoietic, |
| | | Neural/Sensory |
| 2156 | HNGHT86 | Immune/Hematopoietic |
| 2157 | HNGIH40 | Immune/Hematopoietic |
| 2158 | HNGIK07 | Connective/Epithelial, |
| | | Immune/Hematopoietic, |
| | | Musculoskeletal |
| 2159 | HNGIM40 | Immune/Hematopoietic |
| 2160 | HNGIM83 | Immune/Hematopoietic |
| 2161 | HNGIO93 | Cancer |
| 2162 | HNGIS27 | Immune/Hematopoietic |
| 2163 | HNGIU16 | Immune/Hematopoietic, |
| | | Reproductive |
| 2164 | HNGIX91 | Immune/Hematopoietic |
| 2165 | HNGJA68 | Immune/Hematopoietic |
| 2166 | HNGJB57 | Immune/Hematopoietic |
| 2167 | HNGJE86 | Immune/Hematopoietic |
| 2168 | HNGJH26 | Immune/Hematopoietic |
| 2169 | HNGJJ61 | Immune/Hematopoietic |
| 2170 | HNGJL07 | Immune/Hematopoietic, |
| | | Neural/Sensory |
| 2171 | HNGJS66 | Immune/Hematopoietic, |
| | | Reproductive |
| 2172 | HNGJU60 | Immune/Hematopoietic |
| 2173 | HNGKB09 | Immune/Hematopoietic, |
| | | Reproductive |
| 2174 | HNGKW35 | Immune/Hematopoietic |
| 2175 | HNGKY94 | Immune/Hematopoietic |
| 2176 | HNGLD28 | Immune/Hematopoietic |
| 2177 | HNGOY36 | Immune/Hematopoietic |
| 2178 | HNHAB38 | Immune/Hematopoietic, |
| | | Musculoskeletal |
| 2179 | HNHAC43 | Cancer |
| 2180 | HNHAD34 | Immune/Hematopoietic |
| 2181 | HNHAG83 | Immune/Hematopoietic, |
| | | Mixed Fetal, |
| | | Musculoskeletal |
| 2182 | HNHAH06 | Immune/Hematopoietic |
| 2183 | HNHAJ65 | Immune/Hematopoietic |
| 2184 | HNHAL61 | Immune/Hematopoietic |
| 2185 | HNHAP58 | Cancer |
| 2186 | HNHAW34 | Immune/Hematopoietic |
| 2187 | HNHAW35 | Immune/Hematopoietic |
| 2188 | HNHAY26 | Immune/Hematopoietic |
| 2189 | HNHAY86 | Immune/Hematopoietic, |
| | | Neural/Sensory |
| 2190 | HNHAZ20 | Immune/Hematopoietic |
| 2191 | HNHBE21 | Immune/Hematopoietic |
| 2192 | HNHBE38 | Cancer |
| 2193 | HNHBG18 | Immune/Hematopoietic |
| 2194 | HNHBI65 | Immune/Hematopoietic |
| 2195 | HNHBM16 | Immune/Hematopoietic, |
| | | Neural/Sensory |
| 2196 | HNHCH78 | Immune/Hematopoietic |
| 2197 | HNHCP14 | Immune/Hematopoietic |
| 2198 | HNHCQ44 | Immune/Hematopoietic |
| 2199 | HNHCT22 | Cardiovascular, |
| | | Immune/Hematopoietic |
| 2200 | HNHCT47 | Cardiovascular, |
| | | Immune/Hematopoietic |
| 2201 | HNHCV48 | Immune/Hematopoietic |
| 2202 | HNHCZ54 | Cancer |
| 2203 | HNHDC52 | Immune/Hematopoietic, |
| | | Neural/Sensory |
| 2204 | HNHDD95 | Immune/Hematopoietic |
| 2205 | HNHDE58 | Cancer |
| 2206 | HNHDI17 | Immune/Hematopoietic |
| 2207 | HNHDL37 | Immune/Hematopoietic |
| 2208 | HNHDM21 | Immune/Hematopoietic |
| 2209 | HNHDR57 | Immune/Hematopoietic |
| 2210 | HNHDR96 | Immune/Hematopoietic |
| 2211 | HNHDU62 | Immune/Hematopoietic |
| 2212 | HNHDW34 | Immune/Hematopoietic |
| 2213 | HNHDX28 | Immune/Hematopoietic |
| 2214 | HNHDZ06 | Immune/Hematopoietic |
| 2215 | HNHDZ42 | Immune/Hematopoietic |
| 2216 | HNHEF37 | Immune/Hematopoietic |
| 2217 | HNHEF49 | Immune/Hematopoietic |
| 2218 | HNHEF70 | Immune/Hematopoietic |
| 2219 | HNHEG30 | Immune/Hematopoietic |
| 2220 | HNHEH38 | Immune/Hematopoietic |
| 2221 | HNHEL22 | Immune/Hematopoietic |
| 2222 | HNHEN70 | Cancer |
| 2223 | HNHEP21 | Immune/Hematopoietic |
| 2224 | HNHEP41 | Immune/Hematopoietic |
| 2225 | HNHES33 | Immune/Hematopoietic, |
| | | Reproductive |
| 2226 | HNHET16 | Immune/Hematopoietic |
| 2227 | HNHEY29 | Immune/Hematopoietic |
| 2228 | HNHEZ76 | Immune/Hematopoietic |
| 2229 | HNHFF60 | Immune/Hematopoietic |
| 2230 | HNHFF81 | Immune/Hematopoietic, |
| | | Neural/Sensory |
| 2231 | HNHFJ49 | Immune/Hematopoietic |
| 2232 | HNHFR42 | Immune/Hematopoietic |
| 2233 | HNHFX25 | Immune/Hematopoietic, |
| | | Musculoskeletal |
| 2234 | HNHGD95 | Cardiovascular, |
| | | Immune/Hematopoietic |
| 2235 | HNHGR82 | Immune/Hematopoietic |
| 2236 | HNHGS62 | Immune/Hematopoietic |
| 2237 | HNHGY77 | Cancer |
| 2238 | HNHHA47 | Digestive, |
| | | Immune/Hematopoietic, |
| | | Respiratory |
| 2239 | HNHHN22 | Immune/Hematopoietic |
| 2240 | HNHHW53 | Immune/Hematopoietic |
| 2241 | HNHIB40 | Immune/Hematopoietic |
| 2242 | HNHKI74 | Immune/Hematopoietic |
| 2243 | HNHKV56 | Immune/Hematopoietic |
| 2244 | HNHLD80 | Immune/Hematopoietic |
| 2245 | HNHLS76 | Immune/Hematopoietic |
| 2246 | HNHLZ47 | Immune/Hematopoietic |
| 2247 | HNHMP15 | Immune/Hematopoietic |
| 2248 | HNHMP62 | Immune/Hematopoietic |
| 2249 | HNHMY76 | Immune/Hematopoietic, |
| | | Reproductive |
| 2250 | HNHMZ01 | Immune/Hematopoietic |
| 2251 | HNHND14 | Immune/Hematopoietic |
| 2252 | HNHND94 | Immune/Hematopoietic |
| 2253 | HNHOF09 | Immune/Hematopoietic |
| 2254 | HNKAA76 | Cancer |
| 2255 | HNTAF42 | Cancer |
| 2256 | HNTCG32 | Cancer |
| 2257 | HNTNY89 | Cancer |
| 2258 | HNTRB25 | Cancer |
| 2259 | HNTRQ40 | Cancer |
| 2260 | HNTSQ23 | Cancer |
| 2261 | HOAAH51 | Cancer |
| 2262 | HOAAI76 | Cancer |
| 2263 | HOAAJ09 | Cancer |
| 2264 | HOAAL10 | Musculoskeletal |
| 2265 | HOAAU13 | Mixed Fetal, |
| | | Musculoskeletal |
| 2266 | HOABC12 | Cancer |
| 2267 | HOABH36 | Cancer |
| 2268 | HOBNA89 | Musculoskeletal |
| 2269 | HOBNF51 | Cancer |
| 2270 | HODAH24 | Reproductive |
| 2271 | HODAH46 | Cancer |
| 2272 | HODAV25 | Cancer |
| 2273 | HODAW64 | Cardiovascular, |
| | | Neural/Sensory, |
| | | Reproductive |
| 2274 | HODAY17 | Cancer |
| 2275 | HODBA45 | Reproductive |
| 2276 | HODBC79 | Cancer |
| 2277 | HODBD79 | Immune/Hematopoietic, |
| | | Reproductive |
| 2278 | HODBF12 | Cancer |
| 2279 | HODBF86 | Digestive, |
| | | Reproductive |
| 2280 | HODBF91 | Cancer |
| 2281 | HODBW34 | Digestive, |
| | | Immune/Hematopoietic, |
| | | Reproductive |
| 2282 | HODBX93 | Reproductive |
| 2283 | HODBZ06 | Cancer |
| 2284 | HODCA73 | Cancer |
| 2285 | HODCV86 | Immune/Hematopoietic, |
| | | Reproductive |
| 2286 | HODCY44 | Reproductive |
| 2287 | HODDB58 | Neural/Sensory, |
| | | Reproductive |
| 2288 | HODDG72 | Cancer |
| 2289 | HODDJ25 | Cancer |
| 2290 | HODDN21 | Reproductive |
| 2291 | HODDO31 | Reproductive |
| 2292 | HODDQ06 | Cancer |
| 2293 | HODEA20 | Cancer |
| 2294 | HODEM38 | Digestive, |
| | | Immune/Hematopoietic, |
| | | Reproductive |
| 2295 | HODET37 | Reproductive |
| 2296 | HOEBI94 | Cancer |
| 2297 | HOEBJ70 | Cancer |
| 2298 | HOECB33 | Cancer |
| 2299 | HOECX21 | Cancer |
| 2300 | HOEDE27 | Musculoskeletal |
| 2301 | HOEEK81 | Cancer |
| 2302 | HOEEZ62 | Musculoskeletal |
| 2303 | HOEFJ26 | Cancer |
| 2304 | HOEFL74 | Cardiovascular, |
| | | Digestive, |
| | | Musculoskeletal |
| 2305 | HOFMF63 | Cancer |
| 2306 | HOFMJ65 | Cancer |
| 2307 | HOFMK02 | Immune/Hematopoietic, |
| | | Reproductive |
| 2308 | HOFMO16 | Reproductive |
| 2309 | HOFMP62 | Reproductive |
| 2310 | HOFMT59 | Reproductive |
| 2311 | HOFMV22 | Reproductive |
| 2312 | HOFND06 | Digestive, |
| | | Reproductive |
| 2313 | HOFNY15 | Reproductive |
| 2314 | HOFNY28 | Reproductive |
| 2315 | HOFOC41 | Reproductive |
| 2316 | HOGAA41 | Cancer |
| 2317 | HOGAB51 | Immune/Hematopoietic, |
| | | Reproductive |
| 2318 | HOGAH40 | Cancer |
| 2319 | HOGAP06 | Immune/Hematopoietic, |
| | | Reproductive |
| 2320 | HOGAR36 | Reproductive |
| 2321 | HOGAR71 | Cancer |
| 2322 | HOGCC26 | Cancer |
| 2323 | HOGCD78 | Reproductive |
| 2324 | HOGCK03 | Cancer |
| 2325 | HOGCL01 | Cancer |
| 2326 | HOHBB36 | Cancer |
| 2327 | HOHBC57 | Cancer |
| 2328 | HOHBO66 | Cancer |
| 2329 | HOHBZ10 | Cancer |
| 2330 | HOHCH71 | Cancer |
| 2331 | HOHEB48 | Musculoskeletal |
| 2332 | HONAH67 | Digestive, |
| | | Excretory, |
| | | Reproductive |
| 2333 | HOOAC84 | Immune/Hematopoietic, |
| | | Neural/Sensory, |
| | | Reproductive |
| 2334 | HOPBP13 | Cancer |
| 2335 | HOQBG21 | Cancer |
| 2336 | HORBI80 | Cancer |
| 2337 | HORBL77 | Cancer |
| 2338 | HOSBX14 | Immune/Hematopoietic, |
| | | Musculoskeletal, |
| | | Reproductive |
| 2339 | HOSCZ41 | Cancer |
| 2340 | HOSEM81 | Cancer |
| 2341 | HOSEO83 | Cancer |
| 2342 | HOSFR35 | Cancer |
| 2343 | HOUAZ32 | Cancer |
| 2344 | HOUBC29 | Connective/Epithelial, |
| | | Immune/Hematopoietic, |
| | | Reproductive |
| 2345 | HOUBG39 | Connective/Epithelial, |
| | | Immune/Hematopoietic, |
| | | Musculoskeletal |
| 2346 | HOUCD12 | Connective/Epithelial |
| 2347 | HOUDB17 | Connective/Epithelial |
| 2348 | HOUDX40 | Connective/Epithelial |
| 2349 | HOUEF84 | Cancer |
| 2350 | HOUEJ43 | Connective/Epithelial |
| 2351 | HOUGS36 | Connective/Epithelial |
| 2352 | HOUHQ36 | Connective/Epithelial |
| 2353 | HOUIG68 | Cancer |
| 2354 | HOUIG92 | Cancer |
| 2355 | HOVAD93 | Reproductive |
| 2356 | HOVAE10 | Cancer |
| 2357 | HOVAE36 | Reproductive |
| 2358 | HOVAE82 | Immune/Hematopoietic, |
| | | Reproductive |
| 2359 | HOVAJ68 | Reproductive |
| 2360 | HOVAW46 | Musculoskeletal, |
| | | Reproductive |
| 2361 | HOVBB19 | Musculoskeletal, |
| | | Reproductive |
| 2362 | HOVBD31 | Cancer |
| 2363 | HOVBE81 | Reproductive |
| 2364 | HOVBI16 | Cancer |
| 2365 | HOVBS68 | Cancer |
| 2366 | HOVCC73 | Immune/Hematopoietic, |
| | | Reproductive |
| 2367 | HOVCF30 | Immune/Hematopoietic, |
| | | Reproductive |
| 2368 | HOVCJ71 | Reproductive |
| 2369 | HOVCN53 | Reproductive |
| 2370 | HOVCO53 | Reproductive |
| 2371 | HPASF94 | Cancer |
| 2372 | HPBCG26 | Cancer |
| 2373 | HPBCT11 | Reproductive |
| 2374 | HPBDE33 | Cancer |
| 2375 | HPBDE33 | Cancer |
| 2376 | HPBDF31 | Cancer |
| 2377 | HPCAG17 | Immune/Hematopoietic, |
| | | Reproductive |
| 2378 | HPCAG17 | Immune/Hematopoietic, |
| | | Reproductive |
| 2379 | HPCAM02 | Immune/Hematopoietic, |
| | | Musculoskeletal, |
| | | Reproductive |
| 2380 | HPDDQ17 | Endocrine |
| 2381 | HPDDQ28 | Endocrine, |
| | | Musculoskeletal |
| 2382 | HPDDT14 | Cancer |
| 2383 | HPEAA65 | Digestive, |
| | | Immune/Hematopoietic, |
| | | Reproductive |
| 2384 | HPEAG24 | Cancer |
| 2385 | HPEBA84 | Immune/Hematopoietic, |
| | | Reproductive |
| 2386 | HPEBF91 | Cancer |
| 2387 | HPEBI09 | Digestive, |
| | | Reproductive |
| 2388 | HPFCJ75 | Cancer |
| 2389 | HPFCP75 | Immune/Hematopoietic, |
| | | Neural/Sensory, |
| | | Reproductive |
| 2390 | HPFDB66 | Cancer |
| 2391 | HPFDD28 | Reproductive |
| 2392 | HPFDI47 | Digestive, |
| | | Reproductive |
| 2393 | HPIAF35 | Reproductive |
| 2394 | HPIAK27 | Cancer |
| 2395 | HPIAL55 | Cancer |
| 2396 | HPIAT18 | Cancer |
| 2397 | HPIAZ52 | Reproductive |
| 2398 | HPIBA07 | Cancer |
| 2399 | HPIBA24 | Cancer |
| 2400 | HPIBI40 | Cancer |
| 2401 | HPIBT19 | Reproductive |
| 2402 | HPJAA82 | Reproductive |
| 2403 | HPJAB75 | Cancer |
| 2404 | HPJAN76 | Cancer |
| 2405 | HPJAN76 | Cancer |
| 2406 | HPJAU94 | Immune/Hematopoietic, |
| | | Reproductive |
| 2407 | HPJAW78 | Immune/Hematopoietic, |
| | | Musculoskeletal, |
| | | Reproductive |
| 2408 | HPJBS16 | Connective/Epithelial, |
| | | Reproductive |
| 2409 | HPJBU04 | Immune/Hematopoietic, |
| | | Reproductive |
| 2410 | HPJCN83 | Reproductive |
| 2411 | HPJCP75 | Reproductive |
| 2412 | HPJCV35 | Reproductive |
| 2413 | HPJCX13 | Cancer |
| 2414 | HPLAW13 | Cancer |
| 2415 | HPMAI31 | Cancer |
| 2416 | HPMBI91 | Reproductive |
| 2417 | HPMBT05 | Reproductive |
| 2418 | HPMBW95 | Cancer |
| 2419 | HPMCW10 | Cancer |
| 2420 | HPMCZ18 | Cancer |
| 2421 | HPMDA80 | Cancer |
| 2422 | HPMDD27 | Cancer |
| 2423 | HPMDF45 | Excretory, |
| | | Immune/Hematopoietic, |
| | | Reproductive |
| 2424 | HPMDP57 | Immune/Hematopoietic, |
| | | Musculoskeletal, |
| | | Reproductive |
| 2425 | HPMEG72 | Cancer |
| 2426 | HPMFM70 | Immune/Hematopoietic, |
| | | Neural/Sensory, |
| | | Reproductive |
| 2427 | HPMFP48 | Cancer |
| 2428 | HPMFW01 | Cancer |
| 2429 | HPMGM06 | Digestive, |
| | | Neural/Sensory, |
| | | Reproductive |
| 2430 | HPMGW43 | Cancer |
| 2431 | HPMGY89 | Cancer |
| 2432 | HPMKB09 | Cancer |
| 2433 | HPMSH26 | Cancer |
| 2434 | HPMSH96 | Mixed Fetal, |
| | | Reproductive |
| 2435 | HPQAJ25 | Cardiovascular, |
| | | Digestive, |
| | | Mixed Fetal |
| 2436 | HPQAJ27 | Cancer |
| 2437 | HPQAN50 | Reproductive |
| 2438 | HPQAO80 | Cancer |
| 2439 | HPQAW27 | Cancer |
| 2440 | HPQBC90 | Cancer |
| 2441 | HPQBJ48 | Cancer |
| 2442 | HPQBJ48 | Cancer |
| 2443 | HPQBL67 | Cancer |
| 2444 | HPQBT17 | Cancer |
| 2445 | HPQCF94 | Cancer |
| 2446 | HPQCI62 | Cancer |
| 2447 | HPQRS74 | Cancer |
| 2448 | HPRAD30 | Cancer |
| 2449 | HPRCC91 | Cancer |
| 2450 | HPRCF40 | Cancer |
| 2451 | HPRCF50 | Cancer |
| 2452 | HPRCL58 | Reproductive |
| 2453 | HPRCM72 | Cancer |
| 2454 | HPRCS59 | Reproductive |
| 2455 | HPRCT73 | Cancer |
| 2456 | HPRTH56 | Cancer |
| 2457 | HPTRE80 | Cancer |
| 2458 | HPTRI42 | Cancer |
| 2459 | HPTRL95 | Cancer |
| 2460 | HPTRQ52 | Cancer |
| 2461 | HPTTH35 | Cancer |
| 2462 | HPTTI65 | Endocrine, |
| | | Reproductive |
| 2463 | HPTTT62 | Cancer |
| 2464 | HPTVH24 | Cancer |
| 2465 | HPTVH59 | Endocrine, |
| | | Neural/Sensory |
| 2466 | HPTVI04 | Cancer |
| 2467 | HPTVI96 | Cancer |
| 2468 | HPVAA15 | Cancer |
| 2469 | HPVAB20 | Cancer |
| 2470 | HPVAB63 | Cancer |
| 2471 | HPVAF86 | Reproductive |
| 2472 | HPWAH55 | Digestive |
| 2473 | HPWAO89 | Immune/Hematopoietic, |
| | | Reproductive |
| 2474 | HPWAS27 | Cancer |
| 2475 | HPWAT86 | Immune/Hematopoietic, |
| | | Neural/Sensory, |
| | | Reproductive |
| 2476 | HPWAV82 | Reproductive |
| 2477 | HPWBA36 | Reproductive |
| 2478 | HPWTF23 | Cancer |
| 2479 | HPWTF23 | Cancer |
| 2480 | HPWTF53 | Cancer |
| 2481 | HPXAB56 | Immune/Hematopoietic |
| 2482 | HPZAB75 | Digestive, |
| | | Reproductive |
| 2483 | HRAAB26 | Excretory |
| 2484 | HRAAC36 | Excretory, |
| | | Immune/Hematopoietic |
| 2485 | HRAAF59 | Excretory |
| 2486 | HRAAG89 | Cancer |
| 2487 | HRAAO40 | Excretory |
| 2488 | HRAAZ12 | Cancer |
| 2489 | HRABA19 | Excretory, |
| | | Reproductive |
| 2490 | HRABP28 | Excretory, |
| | | Immune/Hematopoietic |
| 2491 | HRABU56 | Cardiovascular, |
| | | Excretory, |
| | | Musculoskeletal |
| 2492 | HRABZ80 | Excretory, |
| | | Immune/Hematopoietic, |
| | | Musculoskeletal |
| 2493 | HRACB01 | Excretory |
| 2494 | HRACI39 | Excretory |
| 2495 | HRADU15 | Excretory |
| 2496 | HRDAH04 | Immune/Hematopoietic, |
| | | Mixed Fetal, |
| | | Musculoskeletal |
| 2497 | HRDBA20 | Musculoskeletal |
| 2498 | HRDBD32 | Musculoskeletal |
| 2499 | HRDBL01 | Mixed Fetal, |
| | | Musculoskeletal, |
| | | Neural/Sensory |
| 2500 | HRDDM85 | Musculoskeletal |
| 2501 | HRDDS22 | Cancer |
| 2502 | HRDEJ86 | Cancer |
| 2503 | HRDEQ34 | Musculoskeletal |
| 2504 | HRDFE30 | Cancer |
| 2505 | HRDFT83 | Musculoskeletal |
| 2506 | HRGCA01 | Musculoskeletal |
| 2507 | HRGCA06 | Cancer |
| 2508 | HRGSE38 | Cancer |
| 2509 | HRLAT43 | Cancer |
| 2510 | HRLME03 | Cancer |
| 2511 | HROAN20 | Cardiovascular, |
| | | Digestive |
| 2512 | HROAP64 | Digestive |
| 2513 | HROAS35 | Digestive |
| 2514 | HROAY16 | Digestive |
| 2515 | HROBJ10 | Cancer |
| 2516 | HROBW46 | Digestive, |
| | | Immune/Hematopoietic |
| 2517 | HRODG86 | Cancer |
| 2518 | HRSAL26 | Cancer |
| 2519 | HRTAE88 | Digestive |
| 2520 | HRTAP63 | Cancer |
| 2521 | HRTAR24 | Digestive, |
| | | Immune/Hematopoietic |
| 2522 | HSAAN03 | Cancer |
| 2523 | HSAAS05 | Immune/Hematopoietic, |
| | | Neural/Sensory |
| 2524 | HSAAW13 | Cancer |
| 2525 | HSABA15 | Cancer |
| 2526 | HSABG81 | Cancer |
| 2527 | HSATA50 | Cardiovascular, |
| | | Immune/Hematopoietic, |
| | | Musculoskeletal |
| 2528 | HSATA61 | Cancer |
| 2529 | HSATG66 | Cancer |
| 2530 | HSATI91 | Immune/Hematopoietic |
| 2531 | HSATR50 | Digestive, |
| | | Immune/Hematopoietic, |
| | | Reproductive |
| 2532 | HSATT82 | Immune/Hematopoietic |
| 2533 | HSATW19 | Immune/Hematopoietic, |
| | | Musculoskeletal |
| 2534 | HSATW67 | Excretory, |
| | | Immune/Hematopoietic, |
| | | Reproductive |
| 2535 | HSATZ02 | Immune/Hematopoietic, |
| | | Musculoskeletal |
| 2536 | HSAUA95 | Immune/Hematopoietic |
| 2537 | HSAUB89 | Cancer |
| 2538 | HSAUI53 | Immune/Hematopoietic |
| 2539 | HSAUV74 | Cancer |
| 2540 | HSAUX39 | Immune/Hematopoietic |
| 2541 | HSAVA58 | Immune/Hematopoietic, |
| | | Mixed Fetal |
| 2542 | HSAVE52 | Immune/Hematopoietic |
| 2543 | HSAVH32 | Immune/Hematopoietic |
| 2544 | HSAVM49 | Immune/Hematopoietic |
| 2545 | HSAVO11 | Immune/Hematopoietic, |
| | | Neural/Sensory |
| 2546 | HSAVO17 | Immune/Hematopoietic, |
| | | Musculoskeletal |
| 2547 | HSAVQ13 | Immune/Hematopoietic |
| 2548 | HSAVR85 | Cancer |
| 2549 | HSAVY92 | Immune/Hematopoietic, |
| | | Neural/Sensory |
| 2550 | HSAVZ05 | Digestive, |
| | | Immune/Hematopoietic |
| 2551 | HSAWB58 | Immune/Hematopoietic |
| 2552 | HSAWH36 | Immune/Hematopoietic |
| 2553 | HSAWM20 | Immune/Hematopoietic |
| 2554 | HSAWM74 | Cancer |
| 2555 | HSAWX70 | Cancer |
| 2556 | HSAXC22 | Immune/Hematopoietic |
| 2557 | HSAXI10 | Digestive, |
| | | Immune/Hematopoietic |
| 2558 | HSAXL49 | Immune/Hematopoietic |
| 2559 | HSAXL82 | Immune/Hematopoietic |
| 2560 | HSAXN57 | Immune/Hematopoietic |
| 2561 | HSAXO45 | Immune/Hematopoietic |
| 2562 | HSAXS06 | Immune/Hematopoietic, |
| | | Reproductive |
| 2563 | HSAXS22 | Immune/Hematopoietic |
| 2564 | HSAYL24 | Immune/Hematopoietic |
| 2565 | HSAYO82 | Endocrine, |
| | | Immune/Hematopoietic |
| 2566 | HSAYR62 | Cancer |
| 2567 | HSAZP90 | Immune/Hematopoietic |
| 2568 | HSBAJ47 | Cancer |
| 2569 | HSDBI90 | Digestive, |
| | | Endocrine, |
| | | Neural/Sensory |
| 2570 | HSDDC55 | Neural/Sensory |
| 2571 | HSDEA26 | Neural/Sensory |
| 2572 | HSDEY39 | Neural/Sensory |
| 2573 | HSDFF72 | Cancer |
| 2574 | HSDFO08 | Neural/Sensory |
| 2575 | HSDFR10 | Digestive, |
| | | Neural/Sensory, |
| | | Reproductive |
| 2576 | HSDGB20 | Neural/Sensory |
| 2577 | HSDGH56 | Cancer |
| 2578 | HSDGM01 | Neural/Sensory |
| 2579 | HSDGM42 | Cancer |
| 2580 | HSDGM42 | Cancer |
| 2581 | HSDGM42 | Cancer |
| 2582 | HSDGM42 | Cancer |
| 2583 | HSDGM42 | Cancer |
| 2584 | HSDGM42 | Cancer |
| 2585 | HSDHD05 | Neural/Sensory |
| 2586 | HSDIE51 | Cancer |
| 2587 | HSDIK31 | Cancer |
| 2588 | HSDIV37 | Cancer |
| 2589 | HSDJC96 | Cancer |
| 2590 | HSDJE77 | Cardiovascular, |
| | | Immune/Hematopoietic, |
| | | Neural/Sensory |
| 2591 | HSDJF04 | Cancer |
| 2592 | HSDJG47 | Cancer |
| 2593 | HSDJH72 | Connective/Epithelial, |
| | | Excretory, |
| | | Neural/Sensory |
| 2594 | HSDJL07 | Neural/Sensory, |
| | | Reproductive |
| 2595 | HSDJR49 | Neural/Sensory |
| 2596 | HSDJV24 | Cancer |
| 2597 | HSDJV40 | Immune/Hematopoietic, |
| | | Neural/Sensory |
| 2598 | HSDKA64 | Immune/Hematopoietic, |
| | | Neural/Sensory |
| 2599 | HSDKE82 | Neural/Sensory |
| 2600 | HSDKF96 | Neural/Sensory |
| 2601 | HSDZO08 | Cancer |
| 2602 | HSDZQ96 | Neural/Sensory |
| 2603 | HSEBB18 | Cancer |
| 2604 | HSFAM19 | Cancer |
| 2605 | HSHAG54 | Cancer |
| 2606 | HSHAS72 | Cancer |
| 2607 | HSHAX04 | Cancer |
| 2608 | HSHBT15 | Cancer |
| 2609 | HSHCE85 | Cancer |
| 2610 | HSIAC81 | Digestive |
| 2611 | HSIAF66 | Digestive |
| 2612 | HSIAP01 | Digestive, |
| | | Reproductive |
| 2613 | HSIDA33 | Cancer |
| 2614 | HSIDA39 | Digestive |
| 2615 | HSIDZ25 | Cancer |
| 2616 | HSIEB64 | Digestive |
| 2617 | HSIEM18 | Cancer |
| 2618 | HSIFO61 | Cancer |
| 2619 | HSIFO61 | Cancer |
| 2620 | HSIGC63 | Digestive, |
| | | Immune/Hematopoietic, |
| | | Reproductive |
| 2621 | HSIGM95 | Digestive, |
| | | Immune/Hematopoietic |
| 2622 | HSJAE76 | Cancer |
| 2623 | HSJAN83 | Digestive, |
| | | Musculoskeletal |
| 2624 | HSJAQ10 | Cancer |
| 2625 | HSJAR59 | Musculoskeletal |
| 2626 | HSJAU93 | Cancer |
| 2627 | HSJAY14 | Cancer |
| 2628 | HSJAY14 | Cancer |
| 2629 | HSJAY14 | Cancer |
| 2630 | HSJAY14 | Cancer |
| 2631 | HSJBB27 | Musculoskeletal |
| 2632 | HSKBU03 | Musculoskeletal, |
| | | Neural/Sensory |
| 2633 | HSKCQ51 | Cancer |
| 2634 | HSKDE13 | Cancer |
| 2635 | HSKDS47 | Cancer |
| 2636 | HSKHV81 | Musculoskeletal |
| 2637 | HSKXB14 | Cancer |
| 2638 | HSKYR49 | Cancer |
| 2639 | HSKYU81 | Cancer |
| 2640 | HSKYY92 | Musculoskeletal |
| 2641 | HSLAB11 | Cancer |
| 2642 | HSLAS96 | Immune/Hematopoietic, |
| | | Musculoskeletal |
| 2643 | HSLAW59 | Immune/Hematopoietic, |
| | | Musculoskeletal |
| 2644 | HSLCH54 | Cancer |
| 2645 | HSLCH57 | Cancer |
| 2646 | HSLCI86 | Endocrine, |
| | | Mixed Fetal, |
| | | Musculoskeletal |
| 2647 | HSLCS31 | Cancer |
| 2648 | HSLCS34 | Cancer |
| 2649 | HSLCV16 | Cancer |
| 2650 | HSLDW54 | Cancer |
| 2651 | HSLEC18 | Cancer |
| 2652 | HSLEG59 | Musculoskeletal |
| 2653 | HSLFR59 | Cancer |
| 2654 | HSLGD91 | Cancer |
| 2655 | HSLGF66 | Cancer |
| 2656 | HSLGF70 | Musculoskeletal, |
| | | Neural/Sensory |
| 2657 | HSLGP68 | Musculoskeletal, |
| | | Neural/Sensory |
| 2658 | HSNAB88 | Cancer |
| 2659 | HSNAH56 | Cancer |
| 2660 | HSNAN38 | Cancer |
| 2661 | HSNAO19 | Cancer |
| 2662 | HSNAQ52 | Cancer |
| 2663 | HSNAT08 | Cancer |
| 2664 | HSNAW06 | Immune/Hematopoietic |
| 2665 | HSNAW37 | Cancer |
| 2666 | HSNBJ05 | Cancer |
| 2667 | HSNBO90 | Cancer |
| 2668 | HSNBQ36 | Cancer |
| 2669 | HSNBS39 | Cancer |
| 2670 | HSOAE34 | Digestive, |
| | | Immune/Hematopoietic |
| 2671 | HSOAT44 | Cancer |
| 2672 | HSOBB94 | Cancer |
| 2673 | HSOBH11 | Digestive |
| 2674 | HSOBP75 | Cancer |
| 2675 | HSOBW65 | Digestive |
| 2676 | HSPAA89 | Digestive |
| 2677 | HSPAC13 | Cancer |
| 2678 | HSPAG75 | Digestive |
| 2679 | HSPAI20 | Digestive, |
| | | Neural/Sensory |
| 2680 | HSPAL59 | Digestive, |
| | | Immune/Hematopoietic |
| 2681 | HSPAY90 | Cancer |
| 2682 | HSPMF63 | Cancer |
| 2683 | HSQAC69 | Cancer |
| 2684 | HSQAH14 | Cancer |
| 2685 | HSQAX94 | Cancer |
| 2686 | HSQBL20 | Cancer |
| 2687 | HSQCQ45 | Cancer |
| 2688 | HSQCY74 | Cancer |
| 2689 | HSQDM74 | Cancer |
| 2690 | HSQEG23 | Cancer |
| 2691 | HSQEG47 | Cancer |
| 2692 | HSQFE72 | Cancer |
| 2693 | HSQFE76 | Cancer |
| 2694 | HSQFV12 | Cancer |
| 2695 | HSRAA81 | Cancer |
| 2696 | HSRAO56 | Cancer |
| 2697 | HSRAV28 | Digestive, |
| | | Musculoskeletal |
| 2698 | HSRDM56 | Cancer |
| 2699 | HSRDW57 | Cancer |
| 2700 | HSREC72 | Immune/Hematopoietic, |
| | | Musculoskeletal |
| 2701 | HSREG42 | Cancer |
| 2702 | HSRFD18 | Cancer |
| 2703 | HSRGZ11 | Cancer |
| 2704 | HSRHB59 | Cancer |
| 2705 | HSSAN03 | Cancer |
| 2706 | HSSCC66 | Musculoskeletal |
| 2707 | HSSDI13 | Musculoskeletal |
| 2708 | HSSDQ20 | Musculoskeletal, |
| | | Neural/Sensory |
| 2709 | HSSDX38 | Musculoskeletal |
| 2710 | HSSED57 | Cancer |
| 2711 | HSSEL28 | Cancer |
| 2712 | HSSFP88 | Cancer |
| 2713 | HSSGS62 | Musculoskeletal, |
| | | Reproductive |
| 2714 | HSSJA23 | Cancer |
| 2715 | HSSJF26 | Musculoskeletal |
| 2716 | HSSJF96 | Musculoskeletal |
| 2717 | HSSJM47 | Cancer |
| 2718 | HSSJW30 | Cancer |
| 2719 | HSSJW30 | Cancer |
| 2720 | HSSJW30 | Cancer |
| 2721 | HSSMY35 | Cancer |
| 2722 | HSTAL93 | Connective/Epithelial |
| 2723 | HSTBG23 | Connective/Epithelial |
| 2724 | HSUAF06 | Immune/Hematopoietic |
| 2725 | HSUBX67 | Immune/Hematopoietic |
| 2726 | HSUSB73 | Immune/Hematopoietic, |
| | | Reproductive |
| 2727 | HSVAC05 | Cancer |
| 2728 | HSVAE42 | Connective/Epithelial, |
| | | Neural/Sensory |
| 2729 | HSVAL83 | Cancer |
| 2730 | HSVAT36 | Immune/Hematopoietic |
| 2731 | HSVAV02 | Cancer |
| 2732 | HSVBA83 | Endocrine, |
| | | Mixed Fetal |
| 2733 | HSVBD37 | Cancer |
| 2734 | HSVBN46 | Cancer |
| 2735 | HSVBY62 | Cancer |
| 2736 | HSVBZ53 | Cancer |
| 2737 | HSVCF53 | Cardiovascular, |
| | | Neural/Sensory, |
| | | Reproductive |
| 2738 | HSWAZ17 | Connective/Epithelial, |
| | | Reproductive, |
| | | Respiratory |
| 2739 | HSWBI16 | Cancer |
| 2740 | HSXAI44 | Neural/Sensory |
| 2741 | HSXAJ07 | Neural/Sensory |
| 2742 | HSXAS59 | Neural/Sensory |
| 2743 | HSXAX20 | Digestive, |
| | | Mixed Fetal, |
| | | Neural/Sensory |
| 2744 | HSXAY60 | Cancer |
| 2745 | HSXBB78 | Neural/Sensory |
| 2746 | HSXCA83 | Cancer |
| 2747 | HSXCX20 | Cancer |
| 2748 | HSXFG21 | Cancer |
| 2749 | HSXFH82 | Cancer |
| 2750 | HSYBD33 | Immune/Hematopoietic |
| 2751 | HSYBR79 | Cancer |
| 2752 | HSYBV44 | Immune/Hematopoietic |
| 2753 | HSYBZ94 | Cancer |
| 2754 | HT3AB13 | Cancer |
| 2755 | HT4SB02 | Immune/Hematopoietic |
| 2756 | HT4SB37 | Cardiovascular, |
| | | Immune/Hematopoietic, |
| | | Reproductive |
| 2757 | HT4SB81 | Cancer |
| 2758 | HT4SB81 | Cancer |
| 2759 | HT4SB81 | Cancer |
| 2760 | HT5FX76 | Cancer |
| 2761 | HTABF81 | Cancer |
| 2762 | HTACX63 | Immune/Hematopoietic |
| 2763 | HTADC63 | Cancer |
| 2764 | HTADO61 | Cancer |
| 2765 | HTADQ22 | Cancer |
| 2766 | HTAEC59 | Cancer |
| 2767 | HTAED89 | Immune/Hematopoietic |
| 2768 | HTAEF02 | Immune/Hematopoietic |
| 2769 | HTAEH58 | Immune/Hematopoietic |
| 2770 | HTAEO35 | Immune/Hematopoietic |
| 2771 | HTDAF68 | Immune/Hematopoietic |
| 2772 | HTDAI38 | Cancer |
| 2773 | HTEAJ87 | Mixed Fetal, |
| | | Neural/Sensory, |
| | | Reproductive |
| 2774 | HTEAN76 | Cancer |
| 2775 | HTEBL56 | Cancer |
| 2776 | HTECE87 | Cancer |
| 2777 | HTEDF78 | Reproductive |
| 2778 | HTEDT87 | Cancer |
| 2779 | HTEDX05 | Cancer |
| 2780 | HTEEC19 | Cancer |
| 2781 | HTEGH03 | Cancer |
| 2782 | HTEGH03 | Cancer |
| 2783 | HTEGS48 | Reproductive |
| 2784 | HTEGY81 | Cancer |
| 2785 | HTEHB11 | Reproductive |
| 2786 | HTEHB49 | Immune/Hematopoietic, |
| | | Reproductive |
| 2787 | HTEHS91 | Cancer |
| 2788 | HTEHV60 | Reproductive |
| 2789 | HTEHW80 | Reproductive |
| 2790 | HTEID25 | Reproductive |
| 2791 | HTEIJ23 | Cancer |
| 2792 | HTEIM62 | Digestive, |
| | | Immune/Hematopoietic, |
| | | Reproductive |
| 2793 | HTEIV33 | Reproductive |
| 2794 | HTEIV65 | Reproductive |
| 2795 | HTEJC50 | Reproductive |
| 2796 | HTEJD20 | Cancer |
| 2797 | HTEJD61 | Reproductive |
| 2798 | HTEJF31 | Reproductive |
| 2799 | HTEJI29 | Reproductive |
| 2800 | HTEJL16 | Reproductive |
| 2801 | HTEJP65 | Cancer |
| 2802 | HTEJY20 | Cancer |
| 2803 | HTEKD35 | Reproductive |
| 2804 | HTEKP82 | Cardiovascular, |
| | | Mixed Fetal, |
| | | Reproductive |
| 2805 | HTEKV69 | Reproductive |
| 2806 | HTEKZ52 | Reproductive |
| 2807 | HTEQG28 | Immune/Hematopoietic, |
| | | Reproductive |
| 2808 | HTFOB75 | Cancer |
| 2809 | HTGAA35 | Immune/Hematopoietic |
| 2810 | HTGAD74 | Immune/Hematopoietic, |
| | | Reproductive |
| 2811 | HTGAP05 | Immune/Hematopoietic, |
| | | Neural/Sensory |
| 2812 | HTGAQ29 | Immune/Hematopoietic |
| 2813 | HTGAR21 | Immune/Hematopoietic |
| 2814 | HTGAS70 | Cancer |
| 2815 | HTGAT65 | Immune/Hematopoietic, |
| | | Neural/Sensory, |
| | | Reproductive |
| 2816 | HTGAU17 | Immune/Hematopoietic |
| 2817 | HTGBF47 | Immune/Hematopoietic |
| 2818 | HTGBK95 | Cancer |
| 2819 | HTGCC01 | Immune/Hematopoietic |
| 2820 | HTGCK43 | Cancer |
| 2821 | HTGDS43 | Immune/Hematopoietic, |
| | | Neural/Sensory |
| 2822 | HTGDS92 | Cancer |
| 2823 | HTGEX34 | Digestive, |
| | | Immune/Hematopoietic |
| 2824 | HTGFM31 | Immune/Hematopoietic |
| 2825 | HTGGM37 | Digestive, |
| | | Immune/Hematopoietic |
| 2826 | HTGGN22 | Immune/Hematopoietic |
| 2827 | HTHAA41 | Cancer |
| 2828 | HTHBC58 | Digestive, |
| | | Immune/Hematopoietic |
| 2829 | HTHBO72 | Cancer |
| 2830 | HTHBQ29 | Immune/Hematopoietic |
| 2831 | HTHBT76 | Cancer |
| 2832 | HTHBZ91 | Immune/Hematopoietic |
| 2833 | HTHCA30 | Cancer |
| 2834 | HTHCM60 | Immune/Hematopoietic |
| 2835 | HTHDB20 | Immune/Hematopoietic |
| 2836 | HTHDF45 | Immune/Hematopoietic |
| 2837 | HTHDF86 | Immune/Hematopoietic |
| 2838 | HTHDH18 | Immune/Hematopoietic |
| 2839 | HTHDP65 | Cancer |
| 2840 | HTHDT25 | Immune/Hematopoietic |
| 2841 | HTHDV50 | Immune/Hematopoietic |
| 2842 | HTJMA64 | Cancer |
| 2843 | HTJMJ72 | Connective/Epithelial, |
| | | Immune/Hematopoietic |
| 2844 | HTLAD74 | Reproductive |
| 2845 | HTLAF81 | Cancer |
| 2846 | HTLBF46 | Cancer |
| 2847 | HTLBF63 | Cancer |
| 2848 | HTLCX82 | Cancer |
| 2849 | HTLDD89 | Reproductive |
| 2850 | HTLDN34 | Reproductive |
| 2851 | HTLDP19 | Cancer |
| 2852 | HTLDY30 | Cancer |
| 2853 | HTLEJ24 | Cancer |
| 2854 | HTLEJ75 | Cancer |
| 2855 | HTLEJ75 | Cancer |
| 2856 | HTLEP55 | Cancer |
| 2857 | HTLEV80 | Cancer |
| 2858 | HTLEZ57 | Cancer |
| 2859 | HTLFA90 | Cancer |
| 2860 | HTLGL33 | Reproductive |
| 2861 | HTLGQ25 | Reproductive |
| 2862 | HTLGS72 | Reproductive |
| 2863 | HTLGY50 | Cancer |
| 2864 | HTLHN86 | Cancer |
| 2865 | HTLHN86 | Cancer |
| 2866 | HTLHN86 | Cancer |
| 2867 | HTLHN86 | Cancer |
| 2868 | HTLIW29 | Cancer |
| 2869 | HTLJC15 | Cancer |
| 2870 | HTNAL14 | Cancer |
| 2871 | HTNAL34 | Endocrine, |
| | | Reproductive |
| 2872 | HTNBJ15 | Cancer |
| 2873 | HTNBJ15 | Cancer |
| 2874 | HTNBJ15 | Cancer |
| 2875 | HTNBJ15 | Cancer |
| 2876 | HTOAC65 | Immune/Hematopoietic |
| 2877 | HTOAE47 | Immune/Hematopoietic |
| 2878 | HTOAK03 | Cancer |
| 2879 | HTOAO58 | Immune/Hematopoietic |
| 2880 | HTOAT56 | Cancer |
| 2881 | HTOBG07 | Immune/Hematopoietic, |
| | | Musculoskeletal |
| 2882 | HTOBG62 | Immune/Hematopoietic |
| 2883 | HTODA92 | Cancer |
| 2884 | HTODN35 | Immune/Hematopoietic |
| 2885 | HTODO45 | Immune/Hematopoietic |
| 2886 | HTOEA53 | Digestive, |
| | | Excretory, |
| | | Immune/Hematopoietic |
| 2887 | HTOEB55 | Cancer |
| 2888 | HTOEB76 | Immune/Hematopoietic |
| 2889 | HTOET03 | Cancer |
| 2890 | HTOET03 | Cancer |
| 2891 | HTOEV01 | Immune/Hematopoietic, |
| | | Reproductive |
| 2892 | HTOFA11 | Cancer |
| 2893 | HTOFC33 | Immune/Hematopoietic |
| 2894 | HTOGB79 | Cancer |
| 2895 | HTOHE22 | Immune/Hematopoietic |
| 2896 | HTOHG63 | Cancer |
| 2897 | HTOHJ93 | Immune/Hematopoietic |
| 2898 | HTOHM12 | Immune/Hematopoietic, |
| | | Neural/Sensory |
| 2899 | HTOHM82 | Cancer |
| 2900 | HTOHN40 | Immune/Hematopoietic, |
| | | Neural/Sensory |
| 2901 | HTOHR59 | Digestive, |
| | | Immune/Hematopoietic, |
| | | Neural/Sensory |
| 2902 | HTOHS29 | Cancer |
| 2903 | HTOID65 | Cancer |
| 2904 | HTOIE17 | Excretory, |
| | | Immune/Hematopoietic |
| 2905 | HTOIG16 | Immune/Hematopoietic, |
| | | Reproductive |
| 2906 | HTOIH39 | Immune/Hematopoietic |
| 2907 | HTOIH51 | Immune/Hematopoietic |
| 2908 | HTOJB02 | Immune/Hematopoietic |
| 2909 | HTOJJ26 | Connective/Epithelial, |
| | | Digestive, |
| | | Immune/Hematopoietic |
| 2910 | HTOJP25 | Immune/Hematopoietic |
| 2911 | HTOJS23 | Immune/Hematopoietic |
| 2912 | HTOJY56 | Cancer |
| 2913 | HTOJZ18 | Immune/Hematopoietic |
| 2914 | HTPCG10 | Cancer |
| 2915 | HTPCO75 | Cancer |
| 2916 | HTPCW21 | Digestive, |
| | | Neural/Sensory |
| 2917 | HTPDD68 | Cancer |
| 2918 | HTPDV75 | Digestive, |
| | | Reproductive |
| 2919 | HTSER28 | Cancer |
| 2920 | HTSET62 | Cancer |
| 2921 | HTSFV18 | Cancer |
| 2922 | HTSGO13 | Cancer |
| 2923 | HTSGO88 | Immune/Hematopoietic |
| 2924 | HTTAH05 | Reproductive |
| 2925 | HTTAP37 | Immune/Hematopoietic, |
| | | Reproductive |
| 2926 | HTTBJ38 | Cancer |
| 2927 | HTTDB11 | Cancer |
| 2928 | HTTDG27 | Reproductive |
| 2929 | HTTDN24 | Cancer |
| 2930 | HTTDO33 | Cancer |
| 2931 | HTTDT67 | Cancer |
| 2932 | HTTEO25 | Cancer |
| 2933 | HTTEP11 | Neural/Sensory, |
| | | Reproductive |
| 2934 | HTTES77 | Cancer |
| 2935 | HTTFD29 | Reproductive |
| 2936 | HTTFG15 | Cancer |
| 2937 | HTWAM19 | Immune/Hematopoietic |
| 2938 | HTWBF58 | Immune/Hematopoietic |
| 2939 | HTWBO30 | Cancer |
| 2940 | HTWBZ57 | Cancer |
| 2941 | HTWCC10 | Immune/Hematopoietic |
| 2942 | HTWCE14 | Cancer |
| 2943 | HTWCT76 | Digestive, |
| | | Immune/Hematopoietic |
| 2944 | HTWDJ17 | Cancer |
| 2945 | HTWDM89 | Immune/Hematopoietic |
| 2946 | HTWEA05 | Immune/Hematopoietic |
| 2947 | HTWEG06 | Immune/Hematopoietic |
| 2948 | HTWEQ36 | Cancer |
| 2949 | HTWFA21 | Immune/Hematopoietic |
| 2950 | HTWFA88 | Digestive, |
| | | Immune/Hematopoietic |
| 2951 | HTWFM85 | Cancer |
| 2952 | HTWFO43 | Cancer |
| 2953 | HTWLG39 | Cancer |
| 2954 | HTXAA20 | Cancer |
| 2955 | HTXAD75 | Cancer |
| 2956 | HTXAR92 | Immune/Hematopoietic |
| 2957 | HTXBS38 | Cancer |
| 2958 | HTXBU88 | Immune/Hematopoietic |
| 2959 | HTXCP27 | Cancer |
| 2960 | HTXCU30 | Excretory, |
| | | Immune/Hematopoietic |
| 2961 | HTXCV44 | Immune/Hematopoietic, |
| | | Neural/Sensory |
| 2962 | HTXDJ21 | Immune/Hematopoietic |
| 2963 | HTXDJ75 | Digestive, |
| | | Immune/Hematopoietic, |
| | | Mixed Fetal |
| 2964 | HTXDJ85 | Immune/Hematopoietic |
| 2965 | HTXDK09 | Cancer |
| 2966 | HTXDO17 | Immune/Hematopoietic, |
| | | Neural/Sensory, |
| | | Respiratory |
| 2967 | HTXDT72 | Cancer |
| 2968 | HTXDU08 | Cancer |
| 2969 | HTXDZ68 | Immune/Hematopoietic, |
| | | Musculoskeletal |
| 2970 | HTXEN33 | Immune/Hematopoietic, |
| | | Reproductive |
| 2971 | HTXES13 | Cancer |
| 2972 | HTXFD86 | Cancer |
| 2973 | HTXGK12 | Cancer |
| 2974 | HTXGL32 | Immune/Hematopoietic |
| 2975 | HTXJD08 | Digestive, |
| | | Immune/Hematopoietic |
| 2976 | HTXJD85 | Immune/Hematopoietic |
| 2977 | HTXJE12 | Cancer |
| 2978 | HTXJI59 | Cancer |
| 2979 | HTXJJ92 | Cancer |
| 2980 | HTXJM94 | Cancer |
| 2981 | HTXJV54 | Digestive, |
| | | Immune/Hematopoietic, |
| | | Reproductive |
| 2982 | HTXJW06 | Cancer |
| 2983 | HTXKB57 | Cancer |
| 2984 | HTXKH22 | Immune/Hematopoietic |
| 2985 | HTXKH40 | Cancer |
| 2986 | HTXKK76 | Immune/Hematopoietic |
| 2987 | HTXKL53 | Cancer |
| 2988 | HTXKS11 | Immune/Hematopoietic |
| 2989 | HTXKS27 | Cancer |
| 2990 | HTXLC05 | Digestive, |
| | | Immune/Hematopoietic, |
| | | Respiratory |
| 2991 | HTXLC45 | Immune/Hematopoietic |
| 2992 | HTXLT36 | Cancer |
| 2993 | HTXLY94 | Cancer |
| 2994 | HTXNV66 | Cancer |
| 2995 | HTXOL30 | Immune/Hematopoietic |
| 2996 | HTXOW27 | Cancer |
| 2997 | HTXPD86 | Cancer |
| 2998 | HTXPT57 | Digestive, |
| | | Immune/Hematopoietic |
| 2999 | HTYSJ88 | Endocrine, |
| | | Immune/Hematopoietic |
| 3000 | HUDBE20 | Reproductive |
| 3001 | HUDBK47 | Immune/Hematopoietic, |
| | | Reproductive |
| 3002 | HUFAB57 | Cancer |
| 3003 | HUFAL17 | Digestive |
| 3004 | HUFAO92 | Digestive, |
| | | Reproductive |
| 3005 | HUFAO94 | Cancer |
| 3006 | HUFAP33 | Cancer |
| 3007 | HUFAU71 | Cancer |
| 3008 | HUFBK95 | Digestive, |
| | | Reproductive |
| 3009 | HUFBP77 | Cancer |
| 3010 | HUFBV62 | Cancer |
| 3011 | HUFBY96 | Cancer |
| 3012 | HUFCN72 | Digestive |
| 3013 | HUFEF79 | Cancer |
| 3014 | HUKAD46 | Endocrine, |
| | | Immune/Hematopoietic, |
| | | Reproductive |
| 3015 | HUKAI28 | Cardiovascular, |
| | | Reproductive |
| 3016 | HUKAO50 | Cancer |
| 3017 | HUKCS86 | Cancer |
| 3018 | HUKCS86 | Cancer |
| 3019 | HUKEA22 | Cancer |
| 3020 | HUKEL79 | Cancer |
| 3021 | HUKEX37 | Reproductive |
| 3022 | HUKFC71 | Cancer |
| 3023 | HUKFV37 | Cancer |
| 3024 | HUKFY09 | Cancer |
| 3025 | HUNAL39 | Reproductive |
| 3026 | HUSAO04 | Cancer |
| 3027 | HUSAO04 | Cancer |
| 3028 | HUSCA09 | Cancer |
| 3029 | HUSCJ01 | Cancer |
| 3030 | HUSGB23 | Cancer |
| 3031 | HUSGJ09 | Cardiovascular, |
| | | Neural/Sensory |
| 3032 | HUSGQ57 | Cancer |
| 3033 | HUSGY15 | Cancer |
| 3034 | HUSHD41 | Cancer |
| 3035 | HUSHK65 | Cancer |
| 3036 | HUSIK45 | Cancer |
| 3037 | HUSIO57 | Cancer |
| 3038 | HUSIP17 | Cardiovascular |
| 3039 | HUSIR70 | Cancer |
| 3040 | HUSXP50 | Cardiovascular, |
| | | Reproductive |
| 3041 | HUSXY93 | Cancer |
| 3042 | HUSYG26 | Cancer |
| 3043 | HUVCQ68 | Cancer |
| 3044 | HUVDG58 | Digestive, |
| | | Immune/Hematopoietic, |
| | | Reproductive |
| 3045 | HUVEG53 | Cancer |
| 3046 | HWAAH11 | Cancer |
| 3047 | HWAAQ28 | Cancer |
| 3048 | HWAAY60 | Cancer |
| 3049 | HWABR43 | Digestive, |
| | | Immune/Hematopoietic |
| 3050 | HWACH06 | Cancer |
| 3051 | HWACZ33 | Digestive, |
| | | Immune/Hematopoietic, |
| | | Reproductive |
| 3052 | HWADV90 | Immune/Hematopoietic |
| 3053 | HWAEB52 | Cancer |
| 3054 | HWBAK71 | Immune/Hematopoietic |
| 3055 | HWBBU75 | Cancer |
| 3056 | HWBCN81 | Immune/Hematopoietic, |
| | | Reproductive |
| 3057 | HWBCP16 | Immune/Hematopoietic |
| 3058 | HWBCX93 | Cancer |
| 3059 | HWBEF34 | Immune/Hematopoietic, |
| | | Neural/Sensory |
| 3060 | HWFBB23 | Cancer |
| 3061 | HWFBI40 | Connective/Epithelial, |
| | | Digestive, |
| | | Immune/Hematopoietic |
| 3062 | HWHGV77 | Connective/Epithelial |
| 3063 | HWHGW09 | Cancer |
| 3064 | HWHHA21 | Connective/Epithelial |
| 3065 | HWHPU44 | Connective/Epithelial |
| 3066 | HWHRC51 | Cancer |
| 3067 | HWLAT50 | Cancer |
| 3068 | HWLBO67 | Digestive |
| 3069 | HWLGP26 | Cancer |
| 3070 | HWLHO31 | Cardiovascular, |
| | | Digestive |
| 3071 | HWLIL31 | Cancer |
| 3072 | HWLJN08 | Cancer |
| 3073 | HWLRE03 | Cancer |
| 3074 | HWTAM38 | Digestive, |
| | | Immune/Hematopoietic, |
| | | Reproductive |
| 3075 | HWTAW58 | Cancer |
| 3076 | HWTBB42 | Cancer |
| 3077 | HWTBC75 | Cancer |
| 3078 | HWTBI25 | Cancer |
| 3079 | HWTBL86 | Cancer |
| 3080 | HWTBX66 | Cancer |
| 3081 | HYAAC74 | Immune/Hematopoietic, |
| | | Musculoskeletal, |
| | | Reproductive |
| 3082 | HYAAD61 | Immune/Hematopoietic |
| 3083 | HYACC21 | Immune/Hematopoietic |
| 3084 | HYBAP75 | Cancer |
| 3085 | HYBAQ24 | Cancer |
| 3086 | HYBAW56 | Musculoskeletal |
| 3087 | HYBBD81 | Musculoskeletal |

[0168] Table 1E provides information related to biological activities and preferred indications for polynucleotides and polypeptides of the invention (including antibodies, agonists, and/or antagonists thereof). Table 1E also provides information related to assays which may be used to test polynucleotides and polypeptides of the invention (including antibodies, agonists, and/or antagonists thereof) for the corresponding biological activities. The first column (“Gene No.”) provides the gene number in the application for each clone identifier. The second column (“cDNA Clone ID:”) provides the unique clone identifier for each clone as previously described and indicated in Tables 1A, 1B, 1C, and 1D. The third column (“AA SEQ ID NO:Y”) indicates the Sequence Listing SEQ ID Number for polypeptide sequences encoded by the corresponding cDNA clones (also as indicated in Tables 1A, 1B, and 2). The fourth column (“Biological Activity”) indicates a biological activity corresponding to the indicated polypeptides (or polynucleotides encoding said polypeptides). The fifth column (“Exemplary Activity Assay”) further describes the corresponding biological activity and also provides information pertaining to the various types of assays which may be performed to test, demonstrate, or quantify the corresponding biological activity. The sixth column (“Preferred Indictions”) describes particular embodiments of the invention as well as indications (e.g. pathologies, diseases, disorders, abnormalities, etc.) for which polynucleotides and polypeptides of the invention (including antibodies, agonists, and/or antagonists thereof) may be used in detecting, diagnosing, preventing, and/or treating.

[0169] Table 1E describes the use of, inter alia, FMAT technology for testing or demonstrating various biological activities. Fluorometric microvolume assay technology (FMAT) is a fluorescence-based system which provides a means to perform nonradioactive cell- and bead-based assays to detect activation of cell signal transduction pathways. This technology was designed specifically for ligand binding and immunological assays. Using this technology, fluorescent cells or beads at the bottom of the well are detected as localized areas of concentrated fluorescence using a data processing system. Unbound flurophore comprising the background signal is ignored, allowing for a wide variety of homogeneous assays. FMAT technology may be used for peptide ligand binding assays, immunofluorescence, apoptosis, cytotoxicity, and bead-based immunocapture assays. See, Miraglia S et. al., “Homogeneous cell and bead based assays for highthroughput screening using flourometric microvolume assay technology,” Journal of Biomolecular Screening; 4:193-204 (1999). In particular, FMAT technology may be used to test, confirm, and/or identify the ability of polypeptides (including polypeptide fragments and variants) to activate signal transduction pathways. For example, FMAT technology may be used to test, confirm, and/or identify the ability of polypeptides to upregulate production of immunomodulatory proteins (such as, for example, interleukins, GM-CSF, Rantes, and Tumor Necrosis factors, as well as other cellular regulators (e.g. insulin)).

[0170] Table 1E also describes the use of kinase assays for testing, demonstrating, or quantifying biological activity. In this regard, the phosphorylation and de-phosphorylation of specific amino acid residues (e.g. Tyrosine, Serine, Threonine) on cell-signal transduction proteins provides a fast, reversible means for activation and de-activation of cellular signal transduction pathways. Moreover, cell signal transduction via phosphorylation/de-phosphorylation is crucial to the regulation of a wide variety of cellular processes (e.g. proliferation, differentiation, migration, apoptosis, etc.). Accordingly, kinase assays provide a powerful tool useful for testing, confirming, and/or identifying polypeptides (including polypeptide fragments and variants) that mediate cell signal transduction events via protein phosphorylation. See e.g., Forrer, P., Tamaskovic R., and Jaussi, R. “Enzyme-Linked Immunosorbent Assay for Measurement of JNK, ERK, and p38 Kinase Activities” Biol. Chem. 379(8-9): 1101-1110 (1998).

LENGTHY TABLE REFERENCED HERE
US20070298491A1-20071227-T00004
Please refer to the end of the specification for access instructions.

Table 1F:

[0171] Polynucleotides encoding polypeptides of the present invention can be used in assays to test for one or more biological activities. One such biological activity which may be tested includes the ability of polynucleotides and polypeptides of the invention to stimulate up-regulation or down-regulation of expression of particular genes and proteins. Hence, if polynucleotides and polypeptides of the present invention exhibit activity in altering particular gene and protein expression patterns, it is likely that these polynucleotides and polypeptides of the present invention may be involved in, or capable of effecting changes in, diseases associated with the altered gene and protein expression profiles. Hence, polynucleotides, polypeptides, or antibodies of the present invention could be used to treat said associated diseases.

[0172] TaqMan® assays may be performed to assess the ability of polynucleotides (and polypeptides they encode) to alter the expression pattern of particular “target” genes. TaqMan® reactions are performed to evaluate the ability of a test agent to induce or repress expression of specific genes in different cell types. TaqMan® gene expression quantification assays (“TaqMan® assays”) are well known to, and routinely performed by, those of ordinary skill in the art. TaqMan® assays are performed in a two step reverse transcription/polymerase chain reaction (RT-PCR). In the first (RT) step, cDNA is reverse transcribed from total RNA samples using random hexamer primers. In the second (PCR) step, PCR products are synthesized from the cDNA using gene specific primers.

[0173] To quantify gene expression the Taqman® PCR reaction exploits the 5′ nuclease activity of AmpliTaq Gold DNA Polymerase to cleave a Taqman® probe (distinct from the primers) during PCR. The Taqman® probe contains a reporter dye at the 5′-end of the probe and a quencher dye at the 3′ end of the probe. When the probe is intact, the proximity of the reporter dye to the quencher dye results in suppression of the reporter fluorescence. During PCR, if the target of interest is present, the probe specifically anneals between the forward and reverse primer sites. AmpliTaq Fold DNA Polymerase then cleaves the probe between the reporter and quencher when the probe hybridizes to the target, resulting in increased fluorescence of the reporter (see FIG. 2). Accumulation of PCR products is detected directly by monitoring the increase in fluorescence of the reporter dye.

[0174] After the probe fragments are displaced from the target, polymerization of the strand continues. The 3′-end of the probe is blocked to prevent extension of the probe during PCR. This process occurs in every cycle and does not interfere with the exponential accumulation of product. The increase in fluorescence signal is detected only if the target sequence is complementary to the probe and is amplified during PCR. Because of these requirements, any nonspecific amplification is not detected.

[0175] For test sample preparation, vector controls or constructs containing the coding sequence for the gene of interest are transfected into cells, such as for example 293T cells, and supernatants collected after 48 hours. For cell treatment and RNA isolation, multiple primary human cells or human cell lines are used; such cells may include but are not limited to, Normal Human Dermal Fibroblasts, Aortic Smooth Muscle, Human Umbilical Vein Endothelial Cells, HepG2, Daudi, Jurkat, U937, Caco, and THP-1 cell lines. Cells are plated in growth media and growth is arrested by culturing without media change for 3 days, or by switching cells to low serum media and incubating overnight. Cells are treated for 1, 6, or 24 hours with either vector control supernatant or sample supernatant (or purified/partially purified protein preparations in buffer). Total RNA is isolated; for example, by using Trizol extraction or by using the Ambion RNAqueous™-4PCR RNA isolation system. Expression levels of multiple genes are analyzed using Taqman®, and expression in the test sample is compared to control vector samples to identify genes induced or repressed. Each of the above described techniques are well known to, and routinely performed by, those of ordinary skill in the art.

[0176] Table 1F indicates particular disease classes and preferred indications for which polynucleotides, polypeptides, or antibodies of the present invention may be used in detecting, diagnosing, preventing, treating and/or ameliorating said diseases and disorders based on “target” gene expression patterns which may be up- or down-regulated by polynucleotides (and the encoded polypeptides) corresponding to each indicated cDNA Clone ID (shown in Table 1F, Column 2).

[0177] Thus, in preferred embodiments, the present invention encompasses a method of detecting, diagnosing, preventing, treating, and/or ameliorating a disease or disorder listed in the “Disease Class” and/or “Preferred Indication” columns of Table 1F; comprising administering to a patient in which such detection, diagnosis, prevention, or treatment is desired a protein, nucleic acid, or antibody of the invention (or fragment or variant thereof) in an amount effective to detect, diagnose, prevent, treat, or ameliorate the disease or disorder. The first and second columns of Table 1D show the “Gene No.” and “cDNA Clone ID No.”, respectively, indicating certain nucleic acids and proteins (or antibodies against the same) of the invention (including polynucleotide, polypeptide, and antibody fragments or variants thereof) that may be used in detecting, diagnosing, preventing, treating, or ameliorating the disease(s) or disorder(s) indicated in the corresponding row in the “Disease Class” or “Preferred Indication” Columns of Table 1F.

[0178] In another embodiment, the present invention also encompasses methods of detecting, diagnosing, preventing, treating, or ameliorating a disease or disorder listed in the “Disease Class” or “Preferred Indication” Columns of Table 1F; comprising administering to a patient combinations of the proteins, nucleic acids, or antibodies of the invention (or fragments or variants thereof), sharing similar indications as shown in the corresponding rows in the “Disease Class” or “Preferred Indication” Columns of Table 1F.

[0179] The “Disease Class” Column of Table 1F provides a categorized descriptive heading for diseases, disorders, and/or conditions (more fully described below) that may be detected, diagnosed, prevented, treated, or ameliorated by a protein, nucleic acid, or antibody of the invention (or fragment or variant thereof).

[0180] The “Preferred Indication” Column of Table 1F describes diseases, disorders, and/or conditions that may be detected, diagnosed, prevented, treated, or ameliorated by a protein, nucleic acid, or antibody of the invention (or fragment or variant thereof).

[0181] The “Cell Line” and “Exemplary Targets” Columns of Table 1F indicate particular cell lines and target genes, respectively, which may show altered gene expression patterns (i.e., up- or down-regulation of the indicated target gene) in Taqman® assays, performed as described above, utilizing polynucleotides of the cDNA Clone ID shown in the corresponding row. Alteration of expression patterns of the indicated “Exemplary Target” genes is correlated with a particular “Disease Class” and/or “Preferred Indication” as shown in the corresponding row under the respective column headings.

[0182] The “Exemplary Accessions” Column indicates GenBank Accessions (available online through the National Center for Biotechnology Information (NCBI) at http://www.ncbi.nlm.nih.gov/) which correspond to the “Exemplary Targets” shown in the adjacent row.

[0183] The recitation of “Cancer” in the “Disease Class” Column indicates that the corresponding nucleic acid and protein, or antibody against the same, of the invention (or fragment or variant thereof) may be used for example, to detect, diagnose, prevent, treat, and/or ameliorate neoplastic diseases and/or disorders (e.g., leukemias, cancers, etc., as described below under “Hyperproliferative Disorders”).

[0184] The recitation of “Immune” in the “Disease Class” column indicates that the corresponding nucleic acid and protein, or antibody against the same, of the invention (or fragment or variant thereof), may be used for example, to detect, diagnose, prevent, treat, and/or ameliorate diseases and/or disorders relating to neoplastic diseases (e.g., as described below under “Hyperproliferative Disorders”), blood disorders (e.g., as described below under “Immune Activity” “Cardiovascular Disorders” and/or “Blood-Related Disorders”), and infections (e.g., as described below under “Infectious Disease”).

[0185] The recitation of “Angiogenesis” in the “Disease Class” column indicates that the corresponding nucleic acid and protein, or antibody against the same, of the invention (or fragment or variant thereof), may be used for example, to detect, diagnose, treat, prevent, and/or ameliorate diseases and/or disorders relating to neoplastic diseases (e.g., as described below under “Hyperproliferative Disorders”), diseases and/or disorders of the cardiovascular system (e.g., as described below under “Cardiovascular Disorders”), diseases and/or disorders involving cellular and genetic abnormalities (e.g., as described below under “Diseases at the Cellular Level”), diseases and/or disorders involving angiogenesis (e.g., as described below under “Anti-Angiogenesis Activity”), to promote or inhibit cell or tissue regeneration (e.g., as described below under “Regeneration”), or to promote wound healing (e.g., as described below under “Wound Healing and Epithelial Cell Proliferation”).

[0186] The recitation of “Diabetes” in the “Disease Class” column indicates that the corresponding nucleic acid and protein, or antibody against the same, of the invention (or fragment or variant thereof), may be used for example, to detect, diagnose, treat, prevent, and/or ameliorate diabetes (including diabetes mellitus types I and II), as well as diseases and/or disorders associated with, or consequential to, diabetes (e.g. as described below under “Endocrine Disorders,” “Renal Disorders,” and “Gastrointestinal Disorders”).

TABLE 1F

| Gene | cDNA | Disease | |
|---|---|---|---|
| No. | Clone ID | Class | Preferred Indications |
| 423 | HTEEW69 | Immune | Highly preferred indications include immunological disorders such as |
| | | | described herein under the heading “Immune Activity” and/or “Blood-Related |
| | | | Disorders” (particularly including, but not limited to, immune disorders |
| | | | involving muscle tissues and the cardiovascular system (e.g. heart, lungs, |
| | | | circulatory system)). Highly preferred embodiments of the invention include |
| | | | methods of preventing, detecting, diagnosing, treating and/or ameliorating |
| | | | disorders of the immune system (particularly including, but not limited to, |
| | | | immune disorders involving muscle tissue or the cardiovascular system). |
| | | | (AOSMC cells are human aortic smooth muscle cells). |
| 423 | HTEEW69 | Immune | Highly preferred indications include immunological disorders such as |
| | | | described herein under the heading “Immune Activity” and/or “Blood-Related |
| | | | Disorders” (particularly including, but not limited to, immune disorders |
| | | | involving the cells of the gastrointestinal tract). Highly preferred embodiments |
| | | | of the invention include methods of preventing, detecting, diagnosing, treating |
| | | | and/or ameliorating disorders of the immune system (particularly including, |
| | | | but not limited to, immune disorders involving cells of the gastrointestinal |
| | | | tract). (The Caco-2 cell line is a human colorectal adenocarcinoma cell line |
| | | | available through the ATCC as cell line number HTB-37). |
| 423 | HTEEW69 | Immune | Highly preferred indications include immunological disorders such as |
| | | | described herein under the heading “Immune Activity” and/or “Blood-Related |
| | | | Disorders” (particularly including, but not limited to, immune disorders |
| | | | involving the B-cells). Highly preferred embodiments of the invention include |
| | | | methods of preventing, detecting, diagnosing, treating and/or ameliorating |
| | | | disorders of the immune system (particularly including, but not limited to, |
| | | | immune disorders involving B-cells). (The Daudi cell line is a human B |
| | | | lymphoblast cell line available through the ATCC as cell line number CCL- |
| | | | 213). |
| 423 | HTEEW69 | Immune | Highly preferred indications include immunological disorders such as |
| | | | described herein under the heading “Immune Activity” and/or “Blood-Related |
| | | | Disorders” (particularly including, but not limited to, immune disorders |
| | | | involving epithelial cells or the renal system). Highly preferred embodiments |
| | | | of the invention include methods of preventing, detecting, diagnosing, treating |
| | | | and/or ameliorating disorders of the immune system (particularly including, |
| | | | but not limited to, immune disorders involving epithelial cells or the renal |
| | | | system). (The 293 cell line is a human embryonal kidney epithelial cell line |
| | | | available through the ATCC as cell line number CRL-1573). |
| 423 | HTEEW69 | Immune | Highly preferred indications include immunological disorders such as |
| | | | described herein under the heading “Immune Activity” and/or “Blood-Related |
| | | | Disorders” (particularly including, but not limited to, immune disorders |
| | | | involving cells of the hepatic system). Highly preferred embodiments of the |
| | | | invention include methods of preventing, detecting, diagnosing, treating and/or |
| | | | ameliorating disorders of the immune system (particularly including, but not |
| | | | limited to, immune disorders involving cells of the hepatic system). |
| 423 | HTEEW69 | Immune | Highly preferred indications include immunological disorders such as |
| | | | described herein under the heading “Immune Activity” and/or “Blood-Related |
| | | | Disorders” (particularly including, but not limited to, immune disorders |
| | | | involving the skin). Highly preferred embodiments of the invention include |
| | | | methods of preventing, detecting, diagnosing, treating and/or ameliorating |
| | | | disorders of the immune system (particularly including, but not limited to, |
| | | | immune disorders involving the skin). (NHDF cells are normal human dermal |
| | | | fibroblasts). |
| 423 | HTEEW69 | Immune | Highly preferred indications include immunological disorders such as |
| | | | described herein under the heading “Immune Activity” and/or “Blood-Related |
| | | | Disorders” (particularly including, but not limited to, immune disorders |
| | | | involving the central nervous system). Highly preferred embodiments of the |
| | | | invention include methods of preventing, detecting, diagnosing, treating and/or |
| | | | ameliorating disorders of the immune system (particularly including, but not |
| | | | limited to, immune disorders involving the central nervous sytem). (The SK- |
| | | | N-MC neuroblastoma cell line is a cell line derived from human brain tissue |
| | | | and is available through the ATCC as cell line number HTB-10). |
| 423 | HTEEW69 | Immune | Highly preferred indications include immunological disorders such as |
| | | | described herein under the heading “Immune Activity” and/or “Blood-Related |
| | | | Disorders” (particularly including, but not limited to, immune disorders |
| | | | involving monocytes). Highly preferred embodiments of the invention include |
| | | | methods of preventing, detecting, diagnosing, treating and/or ameliorating |
| | | | disorders of the immune system (particularly including, but not limited to, |
| | | | immune disorders involving monocytes). (The THP1 cell line is a human |
| | | | monocyte cell line available through the ATCC as cell line number TIB-202). |
| 423 | HTEEW69 | Immune | Highly preferred indications include immunological disorders such as |
| | | | described herein under the heading “Immune Activity” and/or “Blood-Related |
| | | | Disorders” (particularly including, but not limited to, immune disorders |
| | | | involving monocytes). Highly preferred embodiments of the invention include |
| | | | methods of preventing, detecting, diagnosing, treating and/or ameliorating |
| | | | disorders of the immune system (particularly including, but not limited to, |
| | | | immune disorders involving monocytes). (The U937 cell line is a human |
| | | | monocyte cell line available through the ATCC; cell #CRL-1593.2). |
| 878 | HCEGG08 | Immune | Highly preferred indications include immunological disorders such as |
| | | | described herein under the heading “Immune Activity” and/or “Blood-Related |
| | | | Disorders” (particularly including, but not limited to, immune disorders |
| | | | involving muscle tissues and the cardiovascular system (e.g. heart, lungs, |
| | | | circulatory system)). Highly preferred embodiments of the invention include |
| | | | methods of preventing, detecting, diagnosing, treating and/or ameliorating |
| | | | disorders of the immune system (particularly including, but not limited to, |
| | | | immune disorders involving muscle tissue or the cardiovascular system). |
| | | | (AOSMC cells are human aortic smooth muscle cells). |
| 878 | HCEGG08 | Immune | Highly preferred indications include immunological disorders such as |
| | | | described herein under the heading “Immune Activity” and/or “Blood-Related |
| | | | Disorders” (particularly including, but not limited to, immune disorders |
| | | | involving epithelial cells or the renal system). Highly preferred embodiments |
| | | | of the invention include methods of preventing, detecting, diagnosing, treating |
| | | | and/or ameliorating disorders of the immune system (particularly including, |
| | | | but not limited to, immune disorders involving epithelial cells or the renal |
| | | | system). (The 293 cell line is a human embryonal kidney epithelial cell line |
| | | | available through the ATCC as cell line number CRL-1573). |
| 878 | HCEGG08 | Immune | Highly preferred indications include immunological disorders such as |
| | | | described herein under the heading “Immune Activity” and/or “Blood-Related |
| | | | Disorders” (particularly including, but not limited to, immune disorders |
| | | | involving endothelial cells). Highly preferred embodiments of the invention |
| | | | include methods of preventing, detecting, diagnosing, treating and/or |
| | | | ameliorating disorders of the immune system (particularly including, but not |
| | | | limited to, immune disorders involving endothelial cells). (HUVEC cells are |
| | | | human umbilical vein endothelial cells). |
| 878 | HCEGG08 | Immune | Highly preferred indications include immunological disorders such as |
| | | | described herein under the heading “Immune Activity” and/or “Blood-Related |
| | | | Disorders” (particularly including, but not limited to, immune disorders |
| | | | involving T-cells). Highly preferred embodiments of the invention include |
| | | | methods of preventing, detecting, diagnosing, treating and/or ameliorating |
| | | | disorders of the immune system (particularly including, but not limited to, |
| | | | immune disorders involving T-cells). (The Jurkat cell line is a human T |
| | | | lymphocyte cell line available through the ATCC; cell line #TIB-152). |
| 878 | HCEGG08 | Immune | Highly preferred indications include immunological disorders such as |
| | | | described herein under the heading “Immune Activity” and/or “Blood-Related |
| | | | Disorders” (particularly including, but not limited to, immune disorders |
| | | | involving cells of the hepatic system). Highly preferred embodiments of the |
| | | | invention include methods of preventing, detecting, diagnosing, treating and/or |
| | | | ameliorating disorders of the immune system (particularly including, but not |
| | | | limited to, immune disorders involving cells of the hepatic system). |
| 878 | HCEGG08 | Immune | Highly preferred indications include immunological disorders such as |
| | | | described herein under the heading “Immune Activity” and/or “Blood-Related |
| | | | Disorders” (particularly including, but not limited to, immune disorders |
| | | | involving the skin). Highly preferred embodiments of the invention include |
| | | | methods of preventing, detecting, diagnosing, treating and/or ameliorating |
| | | | disorders of the immune system (particularly including, but not limited to, |
| | | | immune disorders involving the skin). (NHDF cells are normal human dermal |
| | | | fibroblasts). |
| 878 | HCEGG08 | Immune | Highly preferred indications include immunological disorders such as |
| | | | described herein under the heading “Immune Activity” and/or “Blood-Related |
| | | | Disorders” (particularly including, but not limited to, immune disorders |
| | | | involving the central nervous system). Highly preferred embodiments of the |
| | | | invention include methods of preventing, detecting, diagnosing, treating and/or |
| | | | ameliorating disorders of the immune system (particularly including, but not |
| | | | limited to, immune disorders involving the central nervous sytem). (The SK- |
| | | | N-MC neuroblastoma cell line is a cell line derived from human brain tissue |
| | | | and is available through the ATCC as cell line number HTB-10). |
| 878 | HCEGG08 | Immune | Highly preferred indications include immunological disorders such as |
| | | | described herein under the heading “Immune Activity” and/or “Blood-Related |
| | | | Disorders” (particularly including, but not limited to, immune disorders |
| | | | involving monocytes). Highly preferred embodiments of the invention include |
| | | | methods of preventing, detecting, diagnosing, treating and/or ameliorating |
| | | | disorders of the immune system (particularly including, but not limited to, |
| | | | immune disorders involving monocytes). (The THP1 cell line is a human |
| | | | monocyte cell line available through the ATCC as cell line number TIB-202). |
| 878 | HCEGG08 | Immune | Highly preferred indications include immunological disorders such as |
| | | | described herein under the heading “Immune Activity” and/or “Blood-Related |
| | | | Disorders” (particularly including, but not limited to, immune disorders |
| | | | involving monocytes). Highly preferred embodiments of the invention include |
| | | | methods of preventing, detecting, diagnosing, treating and/or ameliorating |
| | | | disorders of the immune system (particularly including, but not limited to, |
| | | | immune disorders involving monocytes). (The U937 cell line is a human |
| | | | monocyte cell line available through the ATCC as cell line number CRL- |
| | | | 1593.2). |

| Gene | | Exemplary | |
|---|---|---|---|
| No. | Cell Line | Targets | Exemplary Accessions |
| 423 | AOSMC | CCR7 | gb\|X84702\|HSDNABLR2 |
| | | CXCR3 | gb\|Z79783\|HSCKRL2 |
| | | Rag2 | gb\|AY011962\|AY011962 |
| | | VLA4 | gb\|X16983\|HSINTAL4 |
| 423 | Caco-2 | TNF | gb\|AJ270944\|HSA27094 |
| 423 | Daudi | GATA3 | gb\|X55037\|HSGATA3 |
| | | ICAM | gb\|X06990\|HSICAM1 |
| | | TNF | gb\|AJ270944\|HSA27094 |
| 423 | HEK293 | TNF | gb\|AJ270944\|HSA27094 |
| 423 | Liver | ICAM | gb\|X06990\|HSICAM1 |
| 423 | NHDF | CIS3 | gb\|AB006967\|AB006967 |
| | | TNF | gb\|AJ270944\|HSA27094 |
| 423 | SK-N-MC | TNF | gb\|AJ270944\|HSA27094 |
| | neuroblastoma | VCAM | gb\|A30922\|A30922 |
| 423 | THP1 | CD25 | gb\|X03137\|HSIL2RG7 |
| | | CD40 | gb\|AJ300189\|HSA30018 |
| | | GATA3 | gb\|X55037\|HSGATA3 |
| | | LTBR | gb\|AK027080\|AK027080 |
| | | Rag1 | gb\|M29474\|HUMRAG1 |
| 423 | U937 | IL1B | gb\|X02532\|HSIL1BR |
| | | TNF | gb\|AJ270944\|HSA27094 |
| 878 | AOSMC | CIS3 | gb\|AB006967\|AB006967 |
| | | Granzyme B | gb\|J04071\|HUMCSE |
| | | IL1B | gb\|X02532\|HSIL1BR |
| | | IL5 | gb\|X12705\|HSBCDFIA |
| 878 | HEK293 | ICAM | gb\|X06990\|HSICAM1 |
| 878 | HUVEC | CCR7 | gb\|X84702\|HSDNABLR2 |
| | | TNF | gb\|AJ270944\|HSA27094 |
| 878 | Jurkat | GATA1 | gb\|X17254\|HSERYF1 |
| | | Rag1 | gb\|M29474\|HUMRAG1 |
| | | Rag2 | gb\|AY011962\|AY011962 |
| 878 | Liver | ICAM | gb\|X06990\|HSICAM1 |
| 878 | NHDF | HLA-c | |
| 878 | SK-N-MC | HLA-c | gb\|A30922\|A30922 |
| | neuroblastoma | VCAM | |
| 878 | THP1 | CCR3 | gb\|AB023887\|AB023887 |
| | | CCR4 | gb\|AB023888\|AB023888 |
| | | CTLA4 | gb\|AF316875\|AF316875 |
| | | Granzyme B | gb\|J04071\|HUMCSE |
| | | Rag2 | gb\|AY011962\|AY011962 |
| | | VCAM | gb\|A30922\|A30922 |
| 878 | U937 | CCR5 | gb\|AF161918\|AF161918 |
| | | CCR7 | gb\|X84702\|HSDNABLR2 |
| | | CD25 | gb\|X03137\|HSIL2RG7 |
| | | CD30 | |
| | | CXCR3 | gb\|Z79783\|HSCKRL2 |
| | | Rag1 | gb\|M29474\|HUMRAG1 |
| | | Rag2 | gb\|AY011962\|AY011962 |

[0187] Table 2 further characterizes certain encoded polypeptides of the invention, by providing the results of comparisons to protein and protein family databases. The first column provides a unique clone identifier, “Clone ID NO:”, corresponding to a cDNA clone disclosed in Table 1A and/or Table 1B. The second column provides the unique contig identifier, “Contig ID:” which allows correlation with the information in Table 1B. The third column provides the sequence identifier, “SEQ ID NO:”, for the contig polynucleotide sequences. The fourth column provides the analysis method by which the homology/identity disclosed in the Table was determined. The fifth column provides a description of the PFAM/NR hit identified by each analysis. Column six provides the accession number of the PFAM/NR hit disclosed in the fifth column. Column seven, score/percent identity, provides a quality score or the percent identity, of the hit disclosed in column five. Comparisons were made between polypeptides encoded by polynucleotides of the invention and a non-redundant protein database (herein referred to as “NR”), or a database of protein families (herein referred to as “PFAM”), as described below.

[0188] The NR database, which comprises the NBRF PIR database, the NCBI GenPept database, and the SIB SwissProt and TrEMBL databases, was made non-redundant using the computer program nrdb2 (Warren Gish, Washington University in Saint Louis). Each of the polynucleotides shown in Table 1B, column 3 (e.g., SEQ ID NO:X or the ‘Query’ sequence) was used to search against the NR database. The computer program BLASTX was used to compare a 6-frame translation of the Query sequence to the NR database (for information about the BLASTX algorithm please see Altshul et al., J. Mol. Biol. 215:403-410 (1990), and Gish and States, Nat. Genet. 3:266-272 (1993). A description of the sequence that is most similar to the Query sequence (the highest scoring ‘Subject’) is shown in column five of Table 2 and the database accession number for that sequence is provided in column six. The highest scoring ‘Subject’ is reported in Table 2 if (a) the estimated probability that the match occurred by chance alone is less than 1.0e-07, and (b) the match was not to a known repetitive element. BLASTX returns alignments of short polypeptide segments of the Query and Subject sequences which share a high degree of similarity; these segments are known as High-Scoring Segment Pairs or HSPs. Table 2 reports the degree of similarity between the Query and the Subject for each HSP as a percent identity in Column 7. The percent identity is determined by dividing the number of exact matches between the two aligned sequences in the HSP, dividing by the number of Query amino acids in the HSP and multiplying by 100. The polynucleotides of SEQ ID NO:X which encode the polypeptide sequence that generates an HSP are delineated by columns 8 and 9 of Table 2.

[0189] The PFAM database, PFAM version 2.1, (Sonnhammer, Nucl. Acids Res., 26:320-322, 1998)) consists of a series of multiple sequence alignments; one alignment for each protein family. Each multiple sequence alignment is converted into a probability model called a Hidden Markov Model, or HMM, that represents the position-specific variation among the sequences that make up the multiple sequence alignment (see, e.g., Durbin, et al., Biological sequence analysis: probabilistic models of proteins and nucleic acids, Cambridge University Press, 1998 for the theory of HMMs). The program HMMER version 1.8 (Sean Eddy, Washington University in Saint Louis) was used to compare the predicted protein sequence for each Query sequence (SEQ ID NO:Y in Table 1B.1) to each of the HMMs derived from PFAM version 2.1. A HMM derived from PFAM version 2.1 was said to be a significant match to a polypeptide of the invention if the score returned by HMMER 1.8 was greater than 0.8 times the HMMER 1.8 score obtained with the most distantly related known member of that protein family. The description of the PFAM family which shares a significant match with a polypeptide of the invention is listed in column 5 of Table 2, and the database accession number of the PFAM hit is provided in column 6. Column 7 provides the score returned by HMMER version 1.8 for the alignment. Columns 8 and 9 delineate the polynucleotides of SEQ ID NO:X which encode the polypeptide sequence which show a significant match to a PFAM protein family.

[0190] As mentioned, columns 8 and 9 in Table 2, “NT From” and “NT To”, delineate the polynucleotides of “SEQ ID NO:X” that encode a polypeptide having a significant match to the PFAM/NR database as disclosed in the fifth column. In one embodiment, the invention provides a protein comprising, or alternatively consisting of, a polypeptide encoded by the polynucleotides of SEQ ID NO:X delineated in columns 8 and 9 of Table 2. Also provided are polynucleotides encoding such proteins, and the complementary strand thereto.

[0191] The nucleotide sequence SEQ ID NO:X and the translated SEQ ID NO:Y are sufficiently accurate and otherwise suitable for a variety of uses well known in the art and described further below. For instance, the nucleotide sequences of SEQ ID NO:X are useful for designing nucleic acid hybridization probes that will detect nucleic acid sequences contained in SEQ ID NO:X or the cDNA contained in ATCC Deposit No:Z. These probes will also hybridize to nucleic acid molecules in biological samples, thereby enabling immediate applications in chromosome mapping, linkage analysis, tissue identification and/or typing, and a variety of forensic and diagnostic methods of the invention. Similarly, polypeptides identified from SEQ ID NO:Y may be used to generate antibodies which bind specifically to these polypeptides, or fragments thereof, and/or to the polypeptides encoded by the cDNA clones identified in, for example, Table 1A and/or 1B.

[0192] Nevertheless, DNA sequences generated by sequencing reactions can contain sequencing errors. The errors exist as misidentified nucleotides, or as insertions or deletions of nucleotides in the generated DNA sequence. The erroneously inserted or deleted nucleotides cause frame shifts in the reading frames of the predicted amino acid sequence. In these cases, the predicted amino acid sequence diverges from the actual amino acid sequence, even though the generated DNA sequence may be greater than 99.9% identical to the actual DNA sequence (for example, one base insertion or deletion in an open reading frame of over 1000 bases).

[0193] Accordingly, for those applications requiring precision in the nucleotide sequence or the amino acid sequence, the present invention provides not only the generated nucleotide sequence identified as SEQ ID NO:X, and a predicted translated amino acid sequence identified as SEQ ID NO:Y, but also a sample of plasmid DNA containing cDNA ATCC Deposit No:Z (e.g., as set forth in columns 2 and 3 of Table 1A and/or as set forth, for example, in Table 1B, 6, and 7). The nucleotide sequence of each deposited clone can readily be determined by sequencing the deposited clone in accordance with known methods. Further, techniques known in the art can be used to verify the nucleotide sequences of SEQ ID NO:X.

[0194] The predicted amino acid sequence can then be verified from such deposits. Moreover, the amino acid sequence of the protein encoded by a particular clone can also be directly determined by peptide sequencing or by expressing the protein in a suitable host cell containing the deposited human cDNA, collecting the protein, and determining its sequence.

TABLE 2

| | | | | | PFam/NR Accession | Score/ | | |
|---|---|---|---|---|---|---|---|---|
| cDNA Clone ID | Contig ID: | SEQ ID NO: X | Analysis Method | PFam/NR Description | Number | Percent Identity | NT From | NT To |
| H6BSF56 | 762968 | 11 | HMMER 2.1.1 | PFAM: Zinc-binding dehydrogenases | PF00107 | 35.6 | 176 | 415 |
| | | | WUblastx.64 | (Q9BV79) SIMILAR TO CGI-63 PROTEIN. | Q9BV79 | 100% | 25 | 42 |
| | | | | | | 92% | 53 | 427 |
| H6EDM64 | 841331 | 12 | WUblastx.64 | (Q9UID3) ANG2. | Q9UID3 | 90% | 928 | 2451 |
| | | | | | | 36% | 203 | 310 |
| | | | | | | 36% | 931 | 1038 |
| | | | | | | 95% | 191 | 871 |
| H6EEC72 | 889401 | 13 | WUblastx.64 | hypothetical protein DKFZp434L061.1 - human | pir\|T43456\|T43456 | 80% | 1484 | 1203 |
| | | | | | | 41% | 1277 | 1080 |
| | | | | | | 35% | 973 | 845 |
| | | | | | | 34% | 659 | 549 |
| | | | | | | 57% | 991 | 365 |
| HACBJ56 | 847112 | 15 | WUblastx.64 | (Q9D2Q2) 2310079F23RIK PROTEIN. | Q9D2Q2 | 65% | 98 | 286 |
| HACBS22 | 847113 | 16 | WUblastx.64 | (O60266) ADENYLATE CYCLASE TYPE III (EC 4.6.1.1) | CYA3_HUMAN | 89% | 6 | 416 |
| | | | | (ADENYLATE | | 25% | 1547 | 2299 |
| | | | | | | 18% | 917 | 1111 |
| | | | | | | 93% | 416 | 2449 |
| HADMB15 | 847116 | 19 | WUblastx.64 | (Q9BVH1) SIMILAR TO DLXIN-1. | Q9BVH1 | 100% | 8 | 109 |
| HAGEG10 | 823543 | 22 | WUblastx.64 | (Q9NWT5) CDNA FLJ20618 FIS, CLONE KAT05049. | Q9NWT5 | 100% | 1237 | 1377 |
| | | | | | | 96% | 1 | 156 |
| HAGFS57 | 847120 | 24 | WUblastx.64 | (Q9Y485) X-LIKE 1 PROTEIN. | Q9Y485 | 58% | 9 | 872 |
| HAGHN57 | 773286 | 25 | WUblastx.64 | (O60416) WUGSC: H_RG276O03.2 PROTEIN. | O60416 | 98% | 65 | 1444 |
| HAHEA15 | 847013 | 26 | WUblastx.64 | (Q9NWD5) HYPOTHETICAL 31.4 KDA PROTEIN. | Q9NWD5 | 76% | 455 | 832 |
| | | | | | | 99% | 30 | 560 |
| HAJAA47 | 534670 | 27 | WUblastx.64 | (Q9NZA3) CDA14. | Q9NZA3 | 100% | 17 | 157 |
| HAJAY92 | 845601 | 28 | WUblastx.64 | (O00549) ORF2-LIKE PROTEIN (FRAGMENT). | O00549 | 53% | 2226 | 2318 |
| | | | | | | 26% | 769 | 915 |
| | | | | | | 38% | 1653 | 1769 |
| | | | | | | 31% | 1721 | 2242 |
| HAJBV67 | 866415 | 29 | WUblastx.64 | (Q9HD45) TRANSMEMBRANE 9 SUPERFAMILY PROTEIN | T9S3_HUMAN | 100% | 13 | 126 |
| | | | | MEMBER 3 PRECU | | 93% | 116 | 1681 |
| HAOAG15 | 852204 | 31 | HMMER 2.1.1 | PFAM: von Willebrand factor type A domain | PF00092 | 180.1 | 506 | 1057 |
| | | | WUblastx.64 | (O75578) INTEGRIN ALPHA-10 PRECURSOR. | ITAG_HUMAN | 90% | 8 | 3463 |
| HAQCE11 | 633730 | 33 | WUblastx.64 | (Q24333) ELASTIN LIKE PROTEIN (FRAGMENT). | Q24333 | 95% | 61 | 132 |
| HATCB45 | 631172 | 35 | WUblastx.64 | (Q9D0I6) 2610014F08RIK PROTEIN. | Q9D0I6 | 88% | 490 | 645 |
| HATCI03 | 580805 | 37 | WUblastx.64 | (Q9H743) CDNA: FLJ21394 FIS, CLONE COL03536. | Q9H743 | 71% | 906 | 688 |
| HBAGD86 | 838799 | 39 | WUblastx.64 | (Q14287) HYPOTHETICAL PROTEIN (FRAGMENT). | Q14287 | 37% | 801 | 559 |
| HBDAB91 | 789532 | 41 | WUblastx.64 | (O00370) PUTATIVE P150. | O00370 | 40% | 587 | 513 |
| | | | | | | 34% | 529 | 5 |
| HBDAB91 | 864374 | 42 | WUblastx.64 | (O00370) PUTATIVE P150. | O00370 | 40% | 907 | 833 |
| | | | | | | 35% | 849 | 307 |
| HBGBC29 | 691473 | 43 | WUblastx.64 | (O60513) BETA-1,4-GALACTOSYLTRANSFERASE 4 (EC | B4G4_HUMAN | 61% | 1 | 78 |
| | | | | 2.4.1.—) (BET | | 98% | 65 | 1021 |
| HBHAA05 | 603174 | 45 | WUblastx.64 | (Q9H387) PRO2550. | Q9H387 | 71% | 676 | 386 |
| HBHAA81 | 846465 | 46 | WUblastx.64 | (Q9D1G3) 1110011D13RIK PROTEIN. | Q9D1G3 | 89% | 1329 | 1502 |
| | | | | | | 79% | 28 | 1329 |
| HBIAC29 | 831751 | 48 | WUblastx.64 | (Q9D7J5) 2310005N01RIK PROTEIN. | Q9D7J5 | 78% | 25 | 492 |
| | | | | | | 93% | 883 | 927 |
| HBJAB02 | 837309 | 50 | WUblastx.64 | (Q9NXT6) CDNA FLJ20062 FIS, CLONE COL01508. | Q9NXT6 | 70% | 2 | 1210 |
| HBJCR46 | 815649 | 53 | HMMER 2.1.1 | PFAM: WD domain, G-beta repeat | PF00400 | 36.6 | 790 | 867 |
| | | | WUblastx.64 | (Q9DC22) 1200006M05RIK PROTEIN. | Q9DC22 | 96% | 207 | 611 |
| | | | | | | 73% | 568 | 2763 |
| HBJDS79 | 813588 | 54 | WUblastx.64 | (Q9CY11) 2510039O18RIK PROTEIN. | Q9CY11 | 92% | 1119 | 1325 |
| | | | | | | 89% | 1322 | 1519 |
| | | | | | | 93% | 1032 | 1127 |
| | | | | | | 100% | 1509 | 1532 |
| | | | | | | 66% | 2 | 1075 |
| HBJEL16 | 847030 | 56 | WUblastx.64 | (O95297) PROTEIN ZERO RELATED PROTEIN. | O95297 | 98% | 285 | 491 |
| HBJIG20 | 866159 | 58 | HMMER 2.1.1 | PFAM: Cytochrome c oxidase subunit III | PF00510 | 162.6 | 321 | 551 |
| | | | WUblastx.64 | (BAA77671) Cytochrome c oxidase subunit 3 (Fragment | BAA77671 | 81% | 9 | 617 |
| HBJKD16 | 853358 | 59 | WUblastx.64 | (Q9NXS4) CDNA FLJ20080 FIS, CLONE COL03184. | Q9NXS4 | 91% | 8 | 1528 |
| HBMBM96 | 561935 | 60 | WUblastx.64 | (Q9H387) PRO2550. | Q9H387 | 69% | 661 | 494 |
| | | | | | | 67% | 794 | 639 |
| HBMTX26 | 695704 | 63 | WUblastx.64 | (Q14288) HYPOTHETICAL PROTEIN (FRAGMENT). | Q14288 | 46% | 964 | 608 |
| | | | | | | 61% | 272 | 156 |
| | | | | | | 66% | 136 | 101 |
| | | | | | | 54% | 611 | 507 |
| | | | | | | 58% | 546 | 292 |
| HBMTY48 | 637521 | 64 | WUblastx.64 | (Q9H5N9) CDNA: FLJ23235 FIS, CLONE CAS04980. | Q9H5N9 | 94% | 54 | 941 |
| HBMUH74 | 866160 | 65 | WUblastx.64 | (Q9NVW8) CDNA FLJ10462 FIS, CLONE NT2RP1001494, | Q9NVW8 | 100% | 11 | 427 |
| | | | | WEAKLY SIMILAR TO MAL | | | | |
| HBMWE61 | 778066 | 66 | WUblastx.64 | (Q9BX88) MAGPHININ DELTA. | Q9BX88 | 100% | 302 | 520 |
| | | | | | | 95% | 869 | 1009 |
| HBNAX40 | 834801 | 67 | WUblastx.64 | (Q9H2K2) TANKYRASE-LIKE PROTEIN (TANKYRASE 2). | Q9H2K2 | 100% | 1 | 201 |
| | | | | | | 100% | 221 | 481 |
| HBQAB79 | 810542 | 69 | WUblastx.64 | (Q9UQ32) AD 3 (FRAGMENT). | Q9UQ32 | 82% | 323 | 204 |
| HBSAK32 | 856387 | 71 | WUblastx.64 | (Q9H1Q7) BA12M19.1.3 (NOVEL PROTEIN). | Q9H1Q7 | 100% | 239 | 412 |
| | | | | | | 100% | 95 | 172 |
| HBXCM66 | 639039 | 72 | WUblastx.64 | (Q9H728) CDNA: FLJ21463 FIS, CLONE COL04765. | Q9H728 | 65% | 988 | 809 |
| | | | | | | 77% | 836 | 690 |
| HBXCX15 | 637542 | 73 | WUblastx.64 | (Q9GMX5) HYPOTHETICAL 12.9 KDA PROTEIN. | Q9GMX5 | 41% | 726 | 827 |
| | | | | | | 52% | 578 | 730 |
| HCDCY76 | 837972 | 74 | WUblastx.64 | frizzled protein 4 - human | pir\|JC7127\|JC7127 | 100% | 1039 | 527 |
| | | | | | | 30% | 994 | 785 |
| | | | | | | 79% | 567 | 37 |
| HCE1G78 | 761204 | 76 | HMMER 2.1.1 | PFAM: Inositol polyphosphate phosphatase family, catalytic domain | PF00783 | 277.3 | 77 | 775 |
| | | | WUblastx.64 | (Q9UDT9) WUGSC: H_DJ412A9.2 PROTEIN (FRAGMENT). | Q9UDT9 | 72% | 8 | 1549 |
| | | | | | | 95% | 8 | 67 |
| HCE2H52 | 847007 | 77 | WUblastx.64 | probable transposase - human transposon MER37 | pir\|S72481\|S72481 | 60% | 564 | 758 |
| | | | | | | 77% | 430 | 537 |
| | | | | | | 75% | 754 | 1251 |
| HCE3B04 | 831151 | 78 | WUblastx.64 | (O43466) HYPOTHETICAL 31.3 KDA PROTEIN (FRAGMENT). | O43466 | 98% | 836 | 1003 |
| | | | | | | 45% | 217 | 972 |
| HCEDR26 | 771144 | 80 | WUblastx.64 | (Q9H919) CDNA FLJ13078 FIS, CLONE NT2RP3002002. | Q9H919 | 66% | 1157 | 1095 |
| | | | | | | 66% | 1345 | 1184 |
| HCEEQ25 | 531784 | 82 | WUblastx.64 | (P78349) SODIUM CHANNEL 2. | P78349 | 95% | 311 | 433 |
| | | | | | | 93% | 433 | 480 |
| | | | | | | 100% | 658 | 714 |
| HCEEU18 | 688041 | 83 | WUblastx.64 | (Q9N083) UNNAMED PORTEIN PRODUCT. | Q9N083 | 49% | 186 | 10 |
| | | | | | | 56% | 1223 | 933 |
| HCEFZ82 | 831745 | 84 | WUblastx.64 | (Q9BV23) SIMILAR TO LIPASE PROTEIN. | Q9BV23 | 95% | 594 | 782 |
| | | | | | | 100% | 17 | 604 |
| HCFLN88 | 610000 | 86 | WUblastx.64 | (Q9BQE9) SIMILAR TO B-CELL CLL/LYMPHOMA 7B | Q9BQE9 | 87% | 278 | 475 |
| | | | | (UNKNOWN) (PROTEIN FOR MGC | | | | |
| HCFLT90 | 788578 | 87 | WUblastx.64 | (Q9CVC2) 2210013O21RIK PROTEIN (FRAGMENT). | Q9CVC2 | 53% | 612 | 445 |
| | | | | | | 70% | 850 | 671 |
| HCHAB84 | 834326 | 88 | WUblastx.64 | (Q9BRV3) STROMAL CELL PROTEIN. | Q9BRV3 | 89% | 82 | 744 |
| HCNSD29 | 862314 | 91 | WUblastx.64 | (O75400) HUNTINGTIN-INTERACTING PROTEIN | O75400 | 82% | 628 | 1605 |
| | | | | HYPA/FBP11 (FRAGMENT). | | 78% | 337 | 489 |
| HCRAY10 | 695709 | 96 | WUblastx.64 | (AAH08671) Similar to RIKEN cDNA 5530601I19 gene. | AAH08671 | 77% | 72 | 440 |
| HCRBF72 | 828945 | 97 | WUblastx.64 | (Q9UI95) MITOTIC SPINDLE ASSEMBLY CHECKPOINT | MD22_HUMAN | 94% | 191 | 823 |
| | | | | PROTEIN MAD2B | | | | |
| HCUCF89 | 637986 | 100 | WUblastx.64 | (Q9P147) PRO2822. | Q9P147 | 100% | 421 | 398 |
| | | | | | | 82% | 494 | 426 |
| HCUCK44 | 790277 | 101 | WUblastx.64 | hypothetical protein DKFZp564J157.1 - human (fragment) | pir\|T34520\|T34520 | 100% | 29 | 157 |
| | | | | | | 100% | 377 | 403 |
| HDPDI72 | 897277 | 109 | WUblastx.64 | adult-specific brush border protein - rabbit | pir\|C45665\|C45665 | 64% | 180 | 230 |
| | | | | | | 83% | 11 | 100 |
| HDPDJ58 | 587265 | 110 | WUblastx.64 | hypothetical protein DKFZp434D2328.1 - human (fragment) | pir\|T42691\|T42691 | 100% | 307 | 609 |
| | | | | | | 87% | 621 | 785 |
| | | | | | | 36% | 101 | 313 |
| | | | | | | 36% | 307 | 606 |
| | | | | | | 36% | 188 | 316 |
| | | | | | | 42% | 89 | 172 |
| | | | | | | 27% | 23 | 307 |
| | | | | | | 85% | 14 | 307 |
| | | | | | | 37% | 134 | 307 |
| | | | | | | 35% | 101 | 307 |
| | | | | | | 35% | 89 | 274 |
| | | | | | | 32% | 137 | 307 |
| | | | | | | 36% | 325 | 594 |
| | | | | | | 34% | 543 | 671 |
| | | | | | | 38% | 307 | 606 |
| | | | | | | 37% | 322 | 585 |
| | | | | | | 28% | 307 | 606 |
| | | | | | | 29% | 358 | 606 |
| | | | | | | 33% | 337 | 594 |
| | | | | | | 41% | 487 | 594 |
| | | | | | | 37% | 92 | 307 |
| | | | | | | 36% | 352 | 606 |
| | | | | | | 32% | 89 | 316 |
| | | | | | | 32% | 340 | 594 |
| | | | | | | 30% | 83 | 316 |
| | | | | | | 35% | 454 | 606 |
| | | | | | | 31% | 654 | 785 |
| | | | | | | 41% | 624 | 779 |
| | | | | | | 31% | 624 | 794 |
| | | | | | | 40% | 630 | 785 |
| | | | | | | 34% | 624 | 776 |
| | | | | | | 33% | 630 | 785 |
| | | | | | | 34% | 83 | 307 |
| | | | | | | 35% | 92 | 286 |
| | | | | | | 34% | 1229 | 1402 |
| | | | | | | 36% | 1265 | 1411 |
| | | | | | | 36% | 660 | 785 |
| | | | | | | 32% | 624 | 779 |
| | | | | | | 39% | 645 | 773 |
| | | | | | | 35% | 645 | 785 |
| | | | | | | 35% | 645 | 785 |
| | | | | | | 32% | 785 | 1393 |
| | | | | | | 34% | 280 | 606 |
| | | | | | | 36% | 259 | 594 |
| | | | | | | 32% | 259 | 591 |
| | | | | | | 32% | 319 | 591 |
| | | | | | | 100% | 1405 | 1464 |
| | | | | | | 33% | 322 | 510 |
| | | | | | | 33% | 633 | 881 |
| | | | | | | 29% | 656 | 1327 |
| | | | | | | 25% | 902 | 1402 |
| | | | | | | 30% | 848 | 1402 |
| | | | | | | 30% | 1040 | 1420 |
| | | | | | | 36% | 89 | 307 |
| | | | | | | 39% | 827 | 1042 |
| | | | | | | 41% | 962 | 1117 |
| | | | | | | 27% | 803 | 1402 |
| | | | | | | 33% | 131 | 307 |
| | | | | | | 25% | 848 | 1144 |
| | | | | | | 27% | 89 | 307 |
| | | | | | | 37% | 125 | 307 |
| | | | | | | 30% | 854 | 1447 |
| | | | | | | 76% | 746 | 1450 |
| HDPFF10 | 853513 | 111 | HMMER 2.1.1 | PFAM: Leucine Rich Repeat | PF00560 | 65.1 | 729 | 800 |
| | | | WUblastx.64 | garp precursor - human | pir\|S42799\|S42799 | 38% | 285 | 965 |
| | | | | | | 42% | 1153 | 1593 |
| | | | | | | 32% | 1306 | 1641 |
| | | | | | | 29% | 1147 | 1446 |
| | | | | | | 31% | 1614 | 1898 |
| | | | | | | 26% | 1159 | 1512 |
| | | | | | | 30% | 1174 | 1536 |
| | | | | | | 33% | 1306 | 1632 |
| | | | | | | 30% | 1174 | 1494 |
| | | | | | | 31% | 1162 | 1539 |
| | | | | | | 33% | 1183 | 1500 |
| | | | | | | 28% | 468 | 893 |
| | | | | | | 27% | 246 | 965 |
| | | | | | | 37% | 1629 | 2111 |
| HDPFU43 | 790189 | 112 | WUblastx.64 | (AAH01057) Tyrosylprotein sulfotransferase 2. | AAH01057 | 100% | 360 | 1349 |
| | | | | | | 58% | 220 | 348 |
| HDPGE24 | 801947 | 114 | WUblastx.64 | (Q9P195) PRO1722. | Q9P195 | 65% | 1413 | 1291 |
| | | | | | | 43% | 1388 | 1278 |
| | | | | | | 77% | 2528 | 2394 |
| | | | | | | 47% | 2182 | 2078 |
| | | | | | | 75% | 1774 | 1751 |
| | | | | | | 62% | 2604 | 2557 |
| | | | | | | 68% | 1301 | 1167 |
| HDPIU94 | 813352 | 115 | WUblastx.64 | (Q9BVF7) SIMILAR TO HYPOTHETICAL PROTEIN FLJ10422. | Q9BVF7 | 99% | 63 | 1703 |
| HDPOC24 | 777493 | 116 | WUblastx.64 | (Q9H8K1) CDNA FLJ13518 FIS, CLONE PLACE1005799. | Q9H8K1 | 100% | 62 | 208 |
| HDPOL37 | 745377 | 117 | WUblastx.64 | (AAK40301) TRH4. | AAK40301 | 70% | 502 | 323 |
| | | | | | | 60% | 1325 | 483 |
| HDPPQ30 | 684292 | 120 | WUblastx.64 | (Q9H387) PRO2550. | Q9H387 | 51% | 807 | 727 |
| | | | | | | 79% | 1042 | 815 |
| HDPPW82 | 778405 | 121 | WUblastx.64 | hypothetical protein UL126 - human cytomegalovirus (strain | pir\|S09875\|S09875 | 94% | 6 | 116 |
| | | | | AD169) | | | | |
| HDQHM36 | 852328 | 123 | WUblastx.64 | (Q9N083) UNNAMED PORTEIN PRODUCT. | Q9N083 | 69% | 1129 | 1257 |
| | | | | | | 50% | 965 | 1153 |
| HDTAU35 | 838139 | 124 | WUblastx.64 | (Q9T9V8) NADH DEHYDROGENASE SUBUNIT 3. | Q9T9V8 | 87% | 56 | 175 |
| | | | | | | 83% | 305 | 340 |
| HDTAV54 | 801898 | 125 | WUblastx.64 | (AAH01231) Glutathione S-transferase subunit 13 hom | AAH01231 | 100% | 13 | 303 |
| HDTGW48 | 827285 | 127 | WUblastx.64 | (Q9P1W8) SIRP-B2. | Q9P1W8 | 100% | 783 | 1100 |
| | | | | | | 79% | 1359 | 1757 |
| HE2CA60 | 888705 | 130 | WUblastx.64 | (O95232) OKADAIC ACID-INDUCIBLE PHOSPHOPROTEIN | OA48_HUMAN | 98% | 1098 | 1265 |
| | | | | OA48-18. | | | | |
| HE2HC60 | 753265 | 133 | WUblastx.64 | (Q9NVC4) CDNA FLJ10814 FIS, CLONE NT2RP4000984. | Q9NVC4 | 88% | 125 | 1300 |
| HE6CS65 | 762960 | 136 | WUblastx.64 | (Q9H7C6) CDNA: FLJ21047 FIS, CLONE CAS00253. | Q9H7C6 | 98% | 938 | 1378 |
| HE6DO92 | 562767 | 137 | WUblastx.64 | gag polyprotein - human endogenous virus S71 | pir\|A46312\|A46312 | 63% | 623 | 895 |
| | | | | | | 80% | 19 | 633 |
| HE6EY13 | 847058 | 138 | WUblastx.64 | (O95476) HYPOTHETICAL 28.3 KDA PROTEIN. | O95476 | 92% | 5 | 472 |
| HE6FU11 | 827236 | 139 | HMMER 2.1.1 | PFAM: von Willebrand factor type A domain | PF00092 | 184.7 | 244 | 771 |
| | | | WUblastx.64 | (O95460) MATRILIN-4 PRECURSOR. | MTN4_HUMAN | 77% | 145 | 789 |
| | | | | | | 45% | 782 | 907 |
| | | | | | | 41% | 791 | 925 |
| | | | | | | 50% | 794 | 907 |
| | | | | | | 38% | 863 | 1498 |
| | | | | | | 33% | 190 | 741 |
| | | | | | | 98% | 782 | 1642 |
| HE8FC45 | 843781 | 141 | WUblastx.64 | (Q9NX85) CDNA FLJ20378 FIS, CLONE KAIA0536. | Q9NX85 | 50% | 1285 | 1172 |
| | | | | | | 57% | 1824 | 1663 |
| | | | | | | 75% | 1672 | 1553 |
| HE8FC45 | 845672 | 142 | WUblastx.64 | (Q9NX85) CDNA FLJ20378 FIS, CLONE KAIA0536. | Q9NX85 | 50% | 1285 | 1172 |
| | | | | | | 57% | 1824 | 1663 |
| | | | | | | 75% | 1672 | 1553 |
| HE8FD92 | 856544 | 145 | WUblastx.64 | (Q9UJI9) HYPOTHETICAL 105.9 KDA PROTEIN. | Q9UJI9 | 84% | 419 | 1414 |
| | | | | | | 71% | 2 | 1060 |
| | | | | | | 76% | 419 | 1345 |
| | | | | | | 61% | 2 | 613 |
| | | | | | | 45% | 203 | 1060 |
| | | | | | | 40% | 449 | 1345 |
| | | | | | | 52% | 2 | 328 |
| | | | | | | 33% | 605 | 1345 |
| | | | | | | 46% | 47 | 328 |
| HE8FD92 | 869847 | 146 | WUblastx.64 | (Q9UJI9) HYPOTHETICAL 105.9 KDA PROTEIN. | Q9UJI9 | 74% | 4 | 609 |
| | | | | | | 59% | 4 | 540 |
| | | | | | | 50% | 1 | 255 |
| | | | | | | 63% | 346 | 540 |
| | | | | | | 63% | 346 | 540 |
| | | | | | | 60% | 346 | 540 |
| | | | | | | 49% | 1 | 255 |
| | | | | | | 48% | 1 | 255 |
| | | | | | | 53% | 346 | 540 |
| | | | | | | 41% | 4 | 255 |
| | | | | | | 33% | 40 | 255 |
| HE8FD92 | 901142 | 147 | WUblastx.64 | (Q9UJI9) HYPOTHETICAL 105.9 KDA PROTEIN. | Q9UJI9 | 76% | 31 | 480 |
| | | | | | | 56% | 31 | 411 |
| | | | | | | 67% | 217 | 408 |
| | | | | | | 67% | 217 | 408 |
| | | | | | | 63% | 217 | 411 |
| | | | | | | 63% | 217 | 411 |
| | | | | | | 60% | 217 | 411 |
| | | | | | | 53% | 217 | 411 |
| | | | | | | 59% | 31 | 126 |
| | | | | | | 56% | 31 | 126 |
| | | | | | | 56% | 31 | 126 |
| | | | | | | 56% | 31 | 126 |
| | | | | | | 39% | 58 | 126 |
| HE8SG96 | 862016 | 148 | WUblastx.64 | (Q9P195) PRO1722. | Q9P195 | 58% | 1997 | 1845 |
| | | | | | | 63% | 1854 | 1687 |
| HE8TY46 | 899528 | 149 | WUblastx.64 | (BAB55144) CDNA FLJ14576 fis, clone NT2RM4001092, w | BAB55144 | 95% | 318 | 938 |
| HE9CY05 | 834826 | 150 | WUblastx.64 | (Q9CX63) 6030468B19RIK PROTEIN. | Q9CX63 | 48% | 434 | 742 |
| | | | | | | 57% | 55 | 426 |
| HE9EA10 | 827796 | 151 | WUblastx.64 | laminin alpha-1 chain precursor - human | pir\|S14458\|S14458 | 99% | 761 | 1891 |
| | | | | | | 27% | 878 | 1840 |
| | | | | | | 25% | 1142 | 1876 |
| HEBFR46 | 847064 | 157 | WUblastx.64 | (Q9NX85) CDNA FLJ20378 FIS, CLONE KAIA0536. | Q9NX85 | 80% | 1111 | 1022 |
| | | | | | | 84% | 1265 | 1110 |
| HEBGE07 | 798096 | 158 | WUblastx.64 | (Q9NX85) CDNA FLJ20378 FIS, CLONE KAIA0536. | Q9NX85 | 79% | 1851 | 1720 |
| HELAT35 | 693175 | 160 | WUblastx.64 | (Q9H728) CDNA: FLJ21463 FIS, CLONE COL04765. | Q9H728 | 72% | 2092 | 1802 |
| HELBU54 | 637624 | 161 | WUblastx.64 | (Q9H728) CDNA: FLJ21463 FIS, CLONE COL04765. | Q9H728 | 59% | 1255 | 1031 |
| HEMEY47 | 834491 | 164 | WUblastx.64 | (Q9H387) PRO2550. | Q9H387 | 68% | 513 | 587 |
| | | | | | | 74% | 578 | 838 |
| HEPBA14 | 855935 | 166 | WUblastx.64 | (Q9BTY9) UNKNOWN (PROTEIN FOR IMAGE: 2823490) | Q9BTY9 | 87% | 423 | 515 |
| | | | | (FRAGMENT). | | 71% | 15 | 77 |
| | | | | | | 92% | 85 | 426 |
| HEQAH80 | 701984 | 167 | WUblastx.64 | (Q9GMX5) HYPOTHETICAL 12.9 KDA PROTEIN. | Q9GMX5 | 60% | 818 | 1045 |
| HEQBF89 | 786205 | 168 | WUblastx.64 | (Q9H728) CDNA: FLJ21463 FIS, CLONE COL04765. | Q9H728 | 64% | 793 | 638 |
| | | | | | | 64% | 647 | 489 |
| HETCI16 | 844543 | 169 | WUblastx.64 | (Q9P0V3) BOG25. | Q9P0V3 | 99% | 3 | 356 |
| HETDW58 | 790557 | 170 | WUblastx.64 | unidentified 27.6K protein, spliced form A - human | pir\|JC7586\|JC7586 | 95% | 324 | 1058 |
| HFCFE20 | 701985 | 175 | WUblastx.64 | (Q9CSE5) EUKARYOTIC TRANSLATION INITIATION | Q9CSE5 | 89% | 438 | 581 |
| | | | | FACTOR 3 (FRAGMENT). | | 54% | 1083 | 1187 |
| HFEAY59 | 658685 | 176 | WUblastx.64 | (Q9Z320) C29. | Q9Z320 | 67% | 50 | 1153 |
| HFGAJ16 | 580824 | 177 | WUblastx.64 | CDM protein - human | pir\|S44279\|S44279 | 97% | 263 | 403 |
| HFIJA29 | 839206 | 179 | WUblastx.64 | (Q9UHT1) PRO1902 PROTEIN. | Q9UHT1 | 46% | 889 | 806 |
| | | | | | | 59% | 1026 | 880 |
| HFIJA68 | 847074 | 180 | WUblastx.64 | (Q9UHE8) SIX TRANSMEMBRANE EPITHELIAL ANTIGEN | STEA_HUMAN | 89% | 13 | 399 |
| | | | | OF PROSTATE. | | | | |
| HFKES05 | 827572 | 181 | WUblastx.64 | (BAB55088) CDNA FLJ14496 fis, clone NT2RM1000035. | BAB55088 | 85% | 84 | 314 |
| | | | | | | 94% | 367 | 1722 |
| HFKEU12 | 634006 | 182 | WUblastx.64 | hypothetical protein 3 - rat | pir\|S21347\|S21347 | 52% | 695 | 745 |
| | | | | | | 50% | 757 | 933 |
| | | | | | | 40% | 774 | 1007 |
| | | | | | | 54% | 387 | 692 |
| HFPDS07 | 821646 | 185 | WUblastx.64 | (O94925) GLUTAMINASE, KIDNEY ISOFORM, | GLSK_HUMAN | 78% | 343 | 513 |
| | | | | MITOCHONDRIAL PRECURS | | 74% | 2 | 436 |
| HFVGK35 | 731868 | 189 | WUblastx.64 | (Q9GMX5) HYPOTHETICAL 12.9 KDA PROTEIN. | Q9GMX5 | 65% | 832 | 608 |
| HFVHW43 | 570948 | 190 | WUblastx.64 | (Q9BGX4) HYPOTHETICAL 13.8 KDA PROTEIN. | Q9BGX4 | 69% | 1209 | 1093 |
| HFXAV37 | 626595 | 191 | WUblastx.64 | (O60448) NEURONAL THREAD PROTEIN AD7C-NTP. | O60448 | 33% | 583 | 461 |
| | | | | | | 68% | 473 | 333 |
| | | | | | | 60% | 1240 | 1166 |
| | | | | | | 47% | 607 | 539 |
| | | | | | | 45% | 1454 | 1275 |
| | | | | | | 56% | 1295 | 1173 |
| | | | | | | 59% | 1287 | 1222 |
| | | | | | | 64% | 607 | 407 |
| | | | | | | 69% | 607 | 461 |
| | | | | | | 57% | 1285 | 1169 |
| | | | | | | 40% | 1467 | 1402 |
| | | | | | | 48% | 1321 | 1232 |
| | | | | | | 37% | 558 | 346 |
| | | | | | | 78% | 402 | 361 |
| | | | | | | 68% | 591 | 406 |
| | | | | | | 31% | 549 | 355 |
| | | | | | | 60% | 398 | 354 |
| | | | | | | 36% | 1321 | 1232 |
| | | | | | | 41% | 1364 | 1275 |
| | | | | | | 46% | 1187 | 1110 |
| | | | | | | 47% | 1453 | 1187 |
| HFXBT66 | 580831 | 193 | WUblastx.64 | (Q9H387) PRO2550. | Q9H387 | 73% | 739 | 807 |
| | | | | | | 58% | 809 | 907 |
| | | | | | | 62% | 564 | 764 |
| HGBER72 | 826710 | 195 | WUblastx.64 | (Q9H387) PRO2550. | Q9H387 | 71% | 1061 | 969 |
| | | | | | | 78% | 1104 | 1063 |
| | | | | | | 77% | 1237 | 1103 |
| HGBHP91 | 693011 | 198 | WUblastx.64 | hypothetical protein (L1H 3′ region) - human | pir\|B34087\|B34087 | 52% | 541 | 491 |
| | | | | | | 44% | 537 | 34 |
| HGCAC19 | 851527 | 199 | WUblastx.64 | (Q9UIE9) WUGSC: H_DJ0687K01.2 PROTEIN. | Q9UIE9 | 34% | 984 | 1124 |
| | | | | | | 31% | 1546 | 1863 |
| | | | | | | 96% | 361 | 1047 |
| | | | | | | 24% | 993 | 1124 |
| | | | | | | 22% | 984 | 1124 |
| | | | | | | 40% | 1002 | 1124 |
| | | | | | | 27% | 984 | 1124 |
| | | | | | | 27% | 981 | 1124 |
| | | | | | | 25% | 984 | 1088 |
| | | | | | | 31% | 984 | 1124 |
| | | | | | | 23% | 984 | 1124 |
| | | | | | | 29% | 984 | 1124 |
| | | | | | | 29% | 984 | 1124 |
| | | | | | | 32% | 1023 | 1124 |
| | | | | | | 26% | 586 | 801 |
| | | | | | | 95% | 2017 | 2712 |
| HGCAC19 | 801999 | 200 | WUblastx.64 | (Q9H6A1) CDNA: FLJ22454 FIS, CLONE HRC09703 | Q9H6A1 | 34% | 984 | 1124 |
| | | | | (FRAGMENT). | | 100% | 184 | 210 |
| | | | | | | 31% | 984 | 1124 |
| | | | | | | 29% | 984 | 1124 |
| | | | | | | 40% | 1002 | 1124 |
| | | | | | | 27% | 984 | 1124 |
| | | | | | | 29% | 984 | 1124 |
| | | | | | | 27% | 981 | 1124 |
| | | | | | | 21% | 984 | 1121 |
| | | | | | | 24% | 993 | 1124 |
| | | | | | | 23% | 984 | 1124 |
| | | | | | | 96% | 316 | 1056 |
| HGCAC19 | 842540 | 201 | WUblastx.64 | (Q9H6A1) CDNA: FLJ22454 FIS, CLONE HRC09703 | Q9H6A1 | 34% | 982 | 1122 |
| | | | | (FRAGMENT). | | 100% | 182 | 208 |
| | | | | | | 31% | 982 | 1122 |
| | | | | | | 29% | 982 | 1122 |
| | | | | | | 40% | 1000 | 1122 |
| | | | | | | 27% | 982 | 1122 |
| | | | | | | 29% | 982 | 1122 |
| | | | | | | 27% | 979 | 1122 |
| | | | | | | 21% | 982 | 1119 |
| | | | | | | 24% | 991 | 1122 |
| | | | | | | 23% | 982 | 1122 |
| | | | | | | 96% | 314 | 1045 |
| HHEAK45 | 765278 | 202 | WUblastx.64 | (Q9NPB0) DJ202I21.1 (NOVEL PROTEIN) (CDNA FLJ11101 FIS, | Q9NPB0 | 68% | 1949 | 1458 |
| | | | | CLONE PLACE10 | | | | |
| HHEOW19 | 886174 | 204 | WUblastx.64 | (O18973) RAB5 GDP/GTP EXCHANGE FACTOR, RABEX5. | O18973 | 77% | 417 | 623 |
| | | | | | | 91% | 611 | 715 |
| | | | | | | 56% | 166 | 378 |
| | | | | | | 92% | 129 | 167 |
| HHFFF87 | 778071 | 205 | WUblastx.64 | coatomer zeta chain - bovine | pir\|A49465\|A49465 | 100% | 50 | 145 |
| HHFFL34 | 753230 | 206 | WUblastx.64 | (BAB55306) CDNA FLJ14793 fis, clone NT2RP4001174, w | BAB55306 | 100% | 9 | 710 |
| HHFFS40 | 824059 | 207 | WUblastx.64 | (Q9H4A6) GOLGI PROTEIN. | Q9H4A6 | 100% | 3 | 251 |
| HHGDT26 | 658692 | 209 | WUblastx.64 | (Q9H728) CDNA: FLJ21463 FIS, CLONE COL04765. | Q9H728 | 69% | 1580 | 1290 |
| HHSBI65 | 801910 | 213 | WUblastx.64 | (Q9H5W9) CDNA: FLJ22888 FIS, CLONE KAT03934. | Q9H5W9 | 100% | 270 | 407 |
| | | | | | | 94% | 479 | 1300 |
| HHSDI53 | 862028 | 214 | WUblastx.64 | (Q9H387) PRO2550. | Q9H387 | 70% | 1108 | 935 |
| | | | | | | 71% | 1241 | 1107 |
| | | | | | | 75% | 1276 | 1241 |
| HILCA24 | 782450 | 217 | WUblastx.64 | (Q9NUU6) CDNA FLJ11127 FIS, CLONE PLACE1006225. | Q9NUU6 | 73% | 103 | 159 |
| | | | | | | 100% | 168 | 1169 |
| HILCA24 | 869856 | 218 | WUblastx.64 | (Q9NUU6) CDNA FLJ11127 FIS, CLONE PLACE1006225. | Q9NUU6 | 95% | 104 | 1171 |
| HISAT67 | 843549 | 219 | WUblastx.64 | (Q9UH94) PROLACTIN REGULATORY ELEMENT-BINDING | Q9UH94 | 88% | 219 | 797 |
| | | | | PROTEIN (PROLACTIN REGU | | 91% | 788 | 1447 |
| HJBCU75 | 638329 | 220 | WUblastx.64 | (O45030) STRABISMUS. | O45030 | 44% | 199 | 426 |
| | | | | | | 52% | 464 | 964 |
| HJMAA03 | 824062 | 221 | WUblastx.64 | (Q9N032) UNNAMED PROTEIN PRODUCT. | Q9N032 | 71% | 415 | 528 |
| HJMAV41 | 862029 | 222 | WUblastx.64 | brain-specific membrane anchor protein - human | pir\|JC7110\|JC7110 | 100% | 14 | 475 |
| HJMAY90 | 793678 | 223 | WUblastx.64 | (Q9DC16) 1200007D18RIK PROTEIN (RIKEN CDNA | Q9DC16 | 77% | 100 | 312 |
| | | | | 1200007D18 GENE). | | 98% | 315 | 968 |
| HJPBE39 | 801960 | 224 | WUblastx.64 | (Q9CUS4) 4833420K19RIK PROTEIN (FRAGMENT). | Q9CUS4 | 33% | 1 | 621 |
| | | | | | | 74% | 213 | 1007 |
| HJPCH08 | 840365 | 226 | WUblastx.64 | (O95235) RABKINESIN-6 (RAB6-INTERACTING KINESIN- | RB6K_HUMAN | 93% | 9 | 596 |
| | | | | LIKE PROTEI | | | | |
| HKABU43 | 838573 | 227 | WUblastx.64 | (AAH03633) Translocase of outer mitochondrial membr | AAH03633 | 100% | 33 | 62 |
| | | | | | | 92% | 26 | 1597 |
| HKACI79 | 853361 | 228 | WUblastx.64 | (Q9BGV8) HYPOTHETICAL 10.0 KDA PROTEIN. | Q9BGV8 | 72% | 886 | 1104 |
| HKAFF50 | 790192 | 229 | WUblastx.64 | (Q9P1G7) PRO1777. | Q9P1G7 | 99% | 1753 | 1424 |
| HKGBF25 | 738797 | 230 | WUblastx.64 | (Q9HBS7) HYPOTHETICAL 14.2 KDA PROTEIN. | Q9HBS7 | 71% | 1708 | 1688 |
| | | | | | | 56% | 1956 | 1708 |
| HKMLK03 | 734213 | 232 | WUblastx.64 | (Q9N083) UNNAMED PORTEIN PRODUCT. | Q9N083 | 50% | 981 | 832 |
| | | | | | | 73% | 856 | 731 |
| HLDQU79 | 740755 | 237 | WUblastx.64 | (O75477) KE04P. | O75477 | 100% | 105 | 1142 |
| HLDQU79 | 837599 | 3099 | blastx.2 | KE04P. | sp\|O75477\|O75477 | 99% | 81 | 1118 |
| HLDRT09 | 830544 | 238 | WUblastx.64 | (Q9HAQ7) ATP-BINDING CASSETTE HALF-TRANSPORTER. | Q9HAQ7 | 86% | 2 | 469 |
| HLHAP05 | 638476 | 239 | WUblastx.64 | (Q9HA67) CDNA FLJ12155 FIS, CLONE MAMMA1000472. | Q9HA67 | 55% | 1553 | 1500 |
| | | | | | | 72% | 1650 | 1585 |
| | | | | | | 77% | 1807 | 1646 |
| HLIBO72 | 883431 | 241 | WUblastx.64 | (AAH07829) Similar to hypothetical protein AF140225 | AAH07829 | 100% | 65 | 547 |
| HLICE88 | 840321 | 242 | WUblastx.64 | fibrinogen gamma-A chain precursor [validated] - human | pir\|A90470\|FGHUG | 89% | 3 | 584 |
| HLMBW89 | 701996 | 245 | WUblastx.64 | (AAH07983) Unknown (protein for MGC: 16279). | AAH07983 | 85% | 390 | 247 |
| HLMGP50 | 647603 | 246 | WUblastx.64 | (Q9GMI7) HYPOTHETICAL 9.0 KDA PROTEIN. | Q9GMI7 | 61% | 765 | 709 |
| | | | | | | 72% | 935 | 807 |
| HLQAS12 | 886180 | 249 | WUblastx.64 | (Q9XTA8) LECTIN-LIKE OXIDIZED LDL RECEPTOR. | Q9XTA8 | 71% | 690 | 842 |
| | | | | | | 52% | 364 | 711 |
| HLQCL64 | 864966 | 250 | HMMER 2.1.1 | PFAM: Major intrinsic protein | PF00230 | 87.3 | 87 | 449 |
| | | | WUblastx.64 | aquaporin 9 - human | pir\|JC5973\|JC5973 | 98% | 18 | 548 |
| HLQCX36 | 584786 | 251 | WUblastx.64 | (Q9UI59) PRO0478 PROTEIN. | Q9UI59 | 87% | 1100 | 1216 |
| HLWDB73 | 838453 | 258 | WUblastx.64 | (Q9H7D7) CDNA: FLJ21016 FIS, CLONE CAE05735. | Q9H7D7 | 100% | 660 | 872 |
| | | | | | | 98% | 1 | 657 |
| HLYGB19 | 838083 | 261 | WUblastx.64 | (Q9H0Q1) HYPOTHETICAL 12.3 KDA PROTEIN. | Q9H0Q1 | 97% | 204 | 518 |
| HLYGY91 | 658703 | 263 | WUblastx.64 | (Q9H8N0) CDNA FLJ13386 FIS, CLONE PLACE1001104, | Q9H8N0 | 94% | 221 | 391 |
| | | | | WEAKLY SIMILAR TO MYO | | | | |
| HMCAZ04 | 839783 | 264 | WUblastx.64 | (Q9Y6N5) HYPOTHETICAL 50.0 KDA PROTEIN. | Q9Y6N5 | 100% | 106 | 1455 |
| HMCAZ04 | 858210 | 265 | WUblastx.64 | (Q9Y6N5) HYPOTHETICAL 50.0 KDA PROTEIN. | Q9Y6N5 | 100% | 106 | 1455 |
| HMCAZ04 | 867910 | 266 | WUblastx.64 | (Q9Y6N5) HYPOTHETICAL 50.0 KDA PROTEIN. | Q9Y6N5 | 100% | 106 | 1455 |
| HMCAZ04 | 887445 | 267 | WUblastx.64 | (Q9Y6N5) HYPOTHETICAL 50.0 KDA PROTEIN. | Q9Y6N5 | 100% | 107 | 1456 |
| HMCAZ04 | 668249 | 268 | WUblastx.64 | (Q9UQM8) CGI-44 PROTEIN. | Q9UQM8 | 100% | 9 | 1055 |
| HMDAB29 | 584789 | 270 | WUblastx.64 | (Q9NX17) CDNA FLJ20489 FIS, CLONE KAT08285. | Q9NX17 | 72% | 1186 | 890 |
| HMEBB82 | 783077 | 272 | WUblastx.64 | (Q9NSE4) MITOCHONDRIAL ISOLEUCINE TRNA | Q9NSE4 | 99% | 2 | 2206 |
| | | | | SYNTHETASE (FRAGMENT). | | | | |
| HMEDE24 | 837027 | 273 | WUblastx.64 | (Q9BVH9) SIMILAR TO GLUCOSE REGULATED PROTEIN, 58 KDA. | Q9BVH9 | 94% | 188 | 1159 |
| | | | | | | 42% | 101 | 742 |
| HMEDI90 | 840077 | 274 | WUblastx.64 | (Q9HBA3) RAB3 INTERACTING PROTEIN VARIANT 4 | Q9HBA3 | 100% | 81 | 794 |
| | | | | (FRAGMENT). | | | | |
| HMELM75 | 587307 | 275 | WUblastx.64 | (Q9NVW5) HYPOTHETICAL 31.3 KDA PROTEIN. | Q9NVW5 | 100% | 137 | 391 |
| HMICP65 | 847403 | 279 | WUblastx.64 | (Q9HAU9) GUANINE NUCLEOTIDE BINDING PROTEIN BETA | Q9HAU9 | 99% | 8 | 892 |
| | | | | SUBUNIT 5L. | | 22% | 269 | 943 |
| HMSBE04 | 709672 | 281 | WUblastx.64 | (Q9H5V8) CDNA: FLJ22969 FIS, CLONE KAT10759. | Q9H5V8 | 85% | 182 | 3 |
| HMSCL38 | 801919 | 282 | WUblastx.64 | (Q9P195) PRO1722. | Q9P195 | 64% | 1272 | 1460 |
| | | | | | | 72% | 2918 | 2844 |
| | | | | | | 64% | 2851 | 2759 |
| | | | | | | 76% | 2769 | 2653 |
| HMSCR69 | 843059 | 283 | HMMER 2.1.1 | PFAM: Zinc finger present in dystrophin, CBP/p300 | PF00569 | 48.2 | 113 | 250 |
| | | | WUblastx.64 | (Q9BWK2) POTASSIUM CHANNEL MODULATORY FACTOR. | Q9BWK2 | 78% | 107 | 1231 |
| HMSHC86 | 840402 | 284 | WUblastx.64 | (Q9N083) UNNAMED PORTEIN PRODUCT. | Q9N083 | 70% | 1724 | 1674 |
| | | | | | | 67% | 1674 | 1420 |
| HMSHU20 | 847410 | 285 | WUblastx.64 | (Q9H728) CDNA: FLJ21463 FIS, CLONE COL04765. | Q9H728 | 47% | 1722 | 1453 |
| HMTAB77 | 847411 | 287 | WUblastx.64 | (P43243) MATRIN 3. | MAT3_HUMAN | 95% | 630 | 1385 |
| | | | | | | 64% | 287 | 628 |
| | | | | | | 22% | 2002 | 2175 |
| | | | | | | 98% | 3255 | 3428 |
| | | | | | | 31% | 2041 | 2190 |
| | | | | | | 22% | 2047 | 2181 |
| | | | | | | 23% | 2584 | 2763 |
| | | | | | | 75% | 2440 | 2760 |
| | | | | | | 27% | 2596 | 2709 |
| | | | | | | 35% | 1705 | 1797 |
| | | | | | | 35% | 3312 | 3404 |
| | | | | | | 91% | 1384 | 2328 |
| HMUAE26 | 747403 | 288 | WUblastx.64 | (Q9P2R4) SEVEN TRANSMEMBRANE DOMAIN ORPHAN | Q9P2R4 | 89% | 153 | 575 |
| | | | | RECEPTOR. | | 86% | 577 | 1272 |
| HMUAN45 | 833072 | 289 | WUblastx.64 | (BAB55441) CDNA FLJ14993 fis, clone Y79AA1001874, w | BAB55441 | 70% | 684 | 1238 |
| | | | | | | 65% | 239 | 955 |
| | | | | | | 100% | 1247 | 1516 |
| HMVBC31 | 825598 | 290 | WUblastx.64 | (O60725) PROTEIN-S ISOPRENYLCYSTEINE O- | ICMT_HUMAN | 80% | 747 | 938 |
| | | | | METHYLTRANSFERASE (E | | 87% | 121 | 789 |
| HMVDU15 | 801969 | 291 | WUblastx.64 | (Q9BTJ2) SIMILAR TO CGI-30 PROTEIN. | Q9BTJ2 | 100% | 75 | 917 |
| HMWBL03 | 822861 | 292 | WUblastx.64 | (Q9BWT1) C-MYC TARGET JP1. | Q9BWT1 | 85% | 137 | 1240 |
| HMWJF53 | 758158 | 293 | WUblastx.64 | (Q9GZU7) NUCLEAR LIM INTERACTOR-INTERACTING | Q9GZU7 | 91% | 3 | 170 |
| | | | | FACTOR. | | 100% | 154 | 720 |
| HNEAK81 | 722235 | 294 | WUblastx.64 | (Q9N083) UNNAMED PORTEIN PRODUCT. | Q9N083 | 56% | 770 | 1087 |
| HNECL22 | 799541 | 295 | WUblastx.64 | (Q9P0J2) MITOCHONDRIAL SOLUTE CARRIER. | Q9P0J2 | 94% | 1771 | 2331 |
| HNEDH88 | 815675 | 297 | WUblastx.64 | (Q9GML5) HYPOTHETICAL 8.0 KDA PROTEIN. | Q9GML5 | 56% | 1706 | 1849 |
| HNFAC50 | 815676 | 298 | WUblastx.64 | (Q9H286) SEROLOGICALLY DEFINED BREAST CANCER | Q9H286 | 100% | 425 | 282 |
| | | | | ANTIGEN NY-BR-20 (FRAGME | | | | |
| HNFHF34 | 722237 | 300 | WUblastx.64 | (Q9NZX0) HSPC068. | Q9NZX0 | 100% | 9 | 431 |
| | | | | | | 34% | 9 | 404 |
| | | | | | | 35% | 3 | 407 |
| | | | | | | 33% | 9 | 407 |
| | | | | | | 32% | 129 | 422 |
| HNGAK51 | 603910 | 301 | WUblastx.64 | (O60448) NEURONAL THREAD PROTEIN AD7C-NTP. | O60448 | 61% | 563 | 601 |
| | | | | | | 67% | 733 | 915 |
| | | | | | | 65% | 702 | 878 |
| | | | | | | 74% | 714 | 914 |
| HNGAM58 | 688114 | 302 | WUblastx.64 | (Q9H728) CDNA: FLJ21463 FIS, CLONE COL04765. | Q9H728 | 71% | 1020 | 1061 |
| | | | | | | 85% | 1081 | 1143 |
| | | | | | | 53% | 818 | 1003 |
| HNGGP65 | 597449 | 310 | WUblastx.64 | (Q9GMU5) HYPOTHETICAL 14.1 KDA PROTEIN. | Q9GMU5 | 31% | 69 | 302 |
| | | | | | | 47% | 398 | 541 |
| HNGJB41 | 852178 | 313 | WUblastx.64 | probable oxysterol-binding protein DJ430N08.1 - human (fragment) | pir\|T02435\|T02435 | 100% | 128 | 9 |
| HNHFE71 | 834487 | 320 | WUblastx.64 | hypothetical protein DKFZp761L0812.1 - human (fragment) | pir\|T47135\|T47135 | 67% | 822 | 583 |
| HNHGK22 | 597451 | 321 | WUblastx.64 | hypothetical protein (L1H 3′ region) - human | pir\|B34087\|B34087 | 41% | 483 | 37 |
| | | | | | | 41% | 333 | 10 |
| | | | | | | 50% | 733 | 485 |
| HNHHB10 | 634589 | 322 | WUblastx.64 | (Q9BVD9) UNKNOWN (PROTEIN FOR MGC: 5149). | Q9BVD9 | 70% | 658 | 608 |
| | | | | | | 73% | 845 | 711 |
| | | | | | | 73% | 717 | 661 |
| HNTBT17 | 855957 | 324 | WUblastx.64 | (Q9NZF3) BM-001. | Q9NZF3 | 45% | 818 | 1342 |
| | | | | | | 61% | 729 | 947 |
| | | | | | | 84% | 556 | 774 |
| HOACG07 | 792928 | 328 | WUblastx.64 | (Q9GZN8) DJ1009E24.3 (A NOVEL PROTEIN) (CDNA FLJ14158 | Q9GZN8 | 99% | 183 | 704 |
| | | | | FIS, CLONE NT2R | | | | |
| HODBV05 | 825283 | 331 | WUblastx.64 | (Q13878) 94 KDA B-RAF PROTEIN (FRAGMENT). | Q13878 | 100% | 566 | 661 |
| HODCZ32 | 836069 | 332 | WUblastx.64 | (Q9NSI6) WD-REPEAT PROTEIN 9 (FRAGMENT). | WDR9_HUMAN | 86% | 8 | 331 |
| HOEBK60 | 789396 | 333 | WUblastx.64 | (Q9H916) CDNA FLJ13081 FIS, CLONE NT2RP3002033. | Q9H916 | 98% | 132 | 1916 |
| | | | | | | 100% | 14 | 109 |
| | | | | | | 88% | 106 | 159 |
| HOFAA78 | 836646 | 334 | WUblastx.64 | (Q9NXS2) CDNA FLJ20084 FIS, CLONE COL03526. | Q9NXS2 | 90% | 529 | 792 |
| | | | | | | 50% | 9 | 80 |
| | | | | | | 88% | 29 | 529 |
| HOFNB74 | 762821 | 335 | WUblastx.64 | (Q99JH1) HYPOTHETICAL 17.7 KDA PROTEIN. | Q99JH1 | 72% | 44 | 187 |
| | | | | | | 97% | 199 | 471 |
| HORBV76 | 839270 | 339 | WUblastx.64 | (Q9Y2B2) PHOSPHATIDYLINOSITOL GLYCAN, CLASS L (EC | Q9Y2B2 | 91% | 30 | 761 |
| | | | | 3.5.—.—) (PIG-L PRO | | | | |
| HOSDO75 | 862049 | 340 | WUblastx.64 | (Q9D099) 1110057L18RIK PROTEIN. | Q9D099 | 89% | 11 | 202 |
| | | | | | | 88% | 259 | 630 |
| HOSEC25 | 688055 | 341 | WUblastx.64 | (Q9BGW3) HYPOTHETICAL 13.5 KDA PROTEIN. | Q9BGW3 | 73% | 530 | 631 |
| | | | | | | 65% | 627 | 809 |
| | | | | | | 64% | 1501 | 1451 |
| | | | | | | 56% | 1440 | 1222 |
| HOSEJ94 | 795132 | 343 | WUblastx.64 | (Q9GZY3) HT032 (PRK1-ASSOCIATED PROTEIN AWP1) | Q9GZY3 | 92% | 363 | 986 |
| | | | | (PROTEIN ASSOCIATED WIT | | | | |
| HOUCA21 | 655359 | 344 | WUblastx.64 | (Q9HBS7) HYPOTHETICAL 14.2 KDA PROTEIN. | Q9HBS7 | 78% | 988 | 1110 |
| HOUDE92 | 580866 | 345 | WUblastx.64 | (Q9HBT2) HYPOTHETICAL 17.2 KDA PROTEIN. | Q9HBT2 | 96% | 21 | 245 |
| HOUDR07 | 745404 | 346 | WUblastx.64 | (Q9HBV4) ANGIOPOIETIN-LIKE PROTEIN PP1158. | Q9HBV4 | 87% | 170 | 1384 |
| HOUED72 | 858547 | 347 | WUblastx.64 | (Q9CRP8) RIBOSOMAL PROTEIN L15 (FRAGMENT). | Q9CRP8 | 84% | 676 | 774 |
| | | | | | | 85% | 110 | 682 |
| HOUFS04 | 771564 | 348 | WUblastx.64 | (Q9VN45) CG12001 PROTEIN. | Q9VN45 | 32% | 1362 | 1982 |
| | | | | | | 39% | 915 | 1106 |
| | | | | | | 26% | 141 | 380 |
| HOUHI25 | 888279 | 349 | WUblastx.64 | (O95003) WUGSC: H_DJ0593H12.2 PROTEIN. | O95003 | 94% | 73 | 783 |
| HPCAL26 | 762822 | 352 | WUblastx.64 | (O95084) SERINE PROTEASE (HYPOTHETICAL 43.0 KDA | O95084 | 98% | 398 | 640 |
| | | | | PROTEIN) (PROTEASE, S | | 76% | 135 | 497 |
| HPFBA54 | 635539 | 354 | WUblastx.64 | (Q9HBW6) NAG13. | Q9HBW6 | 76% | 795 | 733 |
| | | | | | | 73% | 766 | 602 |
| | | | | | | 84% | 602 | 393 |
| | | | | | | 86% | 135 | 91 |
| | | | | | | 79% | 394 | 128 |
| HPFCI36 | 855966 | 355 | WUblastx.64 | (Q9NX47) CDNA FLJ20445 FIS, CLONE KAT05170. | Q9NX47 | 100% | 9 | 320 |
| HPJBU43 | 862058 | 360 | WUblastx.64 | (Q9P1E1) PRO2221. | Q9P1E1 | 54% | 187 | 44 |
| HPMCJ84 | 562779 | 363 | WUblastx.64 | (Q9NX85) CDNA FLJ20378 FIS, CLONE KAIA0536. | Q9NX85 | 74% | 619 | 479 |
| | | | | | | 69% | 759 | 613 |
| HPMCV30 | 612870 | 364 | WUblastx.64 | (Q9BVD9) UNKNOWN (PROTEIN FOR MGC: 5149). | Q9BVD9 | 76% | 384 | 334 |
| | | | | | | 68% | 590 | 399 |
| HPQAX38 | 843592 | 366 | WUblastx.64 | (Q9BGV8) HYPOTHETICAL 10.0 KDA PROTEIN. | Q9BGV8 | 74% | 664 | 768 |
| | | | | | | 68% | 543 | 674 |
| HPQAX38 | 845752 | 367 | WUblastx.64 | (Q9BGV8) HYPOTHETICAL 10.0 KDA PROTEIN. | Q9BGV8 | 74% | 664 | 768 |
| | | | | | | 68% | 543 | 674 |
| HPRBH85 | 695752 | 370 | WUblastx.64 | (BAB55300) CDNA FLJ14784 fis, clone NT2RP4000713. | BAB55300 | 62% | 2 | 616 |
| | | | | | | 86% | 534 | 1085 |
| HPRCA64 | 824074 | 371 | WUblastx.64 | (P55161) NCK-ASSOCIATED PROTEIN 1 (NAP 1) (P125NAP1) | NCP1_RAT | 100% | 1021 | 1926 |
| | | | | (MEMBR | | 85% | 387 | 1019 |
| | | | | | | 93% | 11 | 481 |
| HPRCD35 | 853551 | 372 | WUblastx.64 | hypothetical protein DKFZp762L1710.1 - human (fragment) | pir\|T50629\|T50629 | 100% | 320 | 613 |
| | | | | | | 57% | 2 | 499 |
| HPTRM02 | 812879 | 373 | WUblastx.64 | (Q9UJU6) SRC HOMOLOGY 3 DOMAIN-CONTAINING | Q9UJU6 | 92% | 332 | 940 |
| | | | | PROTEIN HIP-55 (DREBRIN F). | | 97% | 2 | 106 |
| | | | | | | 96% | 98 | 190 |
| HRAAD30 | 866187 | 376 | WUblastx.64 | (Q9H6V0) CDNA: FLJ21839 FIS, CLONE HEP01794. | Q9H6V0 | 89% | 23 | 1393 |
| HRADA42 | 827302 | 377 | WUblastx.64 | hypothetical protein C11D2.4 - Caenorhabditis elegans | pir\|T32961\|T32961 | 48% | 387 | 668 |
| | | | | | | 74% | 668 | 931 |
| HRADF49 | 866481 | 378 | WUblastx.64 | (Q9H6L1) CDNA: FLJ22169 FIS, CLONE HRC00632. | Q9H6L1 | 90% | 13 | 825 |
| | | | | | | 84% | 813 | 1379 |
| | | | | | | 75% | 1291 | 1593 |
| | | | | | | 34% | 1590 | 1685 |
| HRADN25 | 800628 | 379 | WUblastx.64 | (Q9HB07) MYG1 PROTEIN. | MYG1_HUMAN | 96% | 47 | 1174 |
| HRDAI17 | 560720 | 381 | WUblastx.64 | (Q9NUM6) CDNA FLJ11267 FIS, CLONE PLACE1009174. | Q9NUM6 | 59% | 1305 | 1475 |
| HRDDQ39 | 840405 | 382 | WUblastx.64 | (Q9NX85) CDNA FLJ20378 FIS, CLONE KAIA0536. | Q9NX85 | 53% | 582 | 436 |
| | | | | | | 65% | 775 | 578 |
| HRDER22 | 688056 | 383 | WUblastx.64 | (Q9NW07) CDNA FLJ10390 FIS, CLONE NT2RM4000104, | Q9NW07 | 80% | 9 | 248 |
| | | | | MODERATELY SIMILAR TO | | 100% | 357 | 431 |
| | | | | | | 39% | 120 | 227 |
| | | | | | | 28% | 15 | 203 |
| | | | | | | 38% | 254 | 316 |
| HRDEX93 | 816046 | 384 | WUblastx.64 | (Q9UBV8) PEFLIN. | Q9UBV8 | 100% | 313 | 864 |
| HRDFK37 | 840381 | 385 | WUblastx.64 | (Q9P195) PRO1722. | Q9P195 | 69% | 536 | 652 |
| | | | | | | 40% | 50 | 115 |
| HRGBD54 | 828436 | 386 | WUblastx.64 | (O95819) HPK/GCK-LIKE KINASE HGK. | O95819 | 51% | 32 | 253 |
| | | | | | | 74% | 253 | 645 |
| | | | | | | 27% | 6 | 149 |
| | | | | | | 92% | 781 | 2019 |
| HSAVA08 | 580870 | 388 | WUblastx.64 | (Q9BGW3) HYPOTHETICAL 13.5 KDA PROTEIN. | Q9BGW3 | 57% | 949 | 896 |
| | | | | | | 42% | 926 | 792 |
| | | | | | | 63% | 796 | 764 |
| | | | | | | 66% | 1059 | 934 |
| HSAWZ40 | 634000 | 391 | WUblastx.64 | (O00549) ORF2-LIKE PROTEIN (FRAGMENT). | O00549 | 64% | 951 | 610 |
| | | | | | | 60% | 613 | 8 |
| HSDZM54 | 637870 | 393 | WUblastx.64 | NADH dehydrogenase (ubiquinone) (EC 1.6.5.3) chain 3 - human | pir\|A00422\|DNHUN3 | 88% | 226 | 360 |
| | | | | mitochondrion | | | | |
| HSHBF76 | 715838 | 394 | WUblastx.64 | (AAH08335) Unknown (protein for IMAGE: 3506202) (Fra | AAH08335 | 86% | 762 | 457 |
| | | | | | | 73% | 882 | 748 |
| | | | | | | 100% | 1267 | 836 |
| HSJBY32 | 702020 | 396 | WUblastx.64 | (Q9GZZ6) NEURONAL NICOTINIC ACETYLCHOLINE | Q9GZZ6 | 81% | 466 | 639 |
| | | | | ALPHA10 SUBUNIT PRECURSOR ( | | 57% | 215 | 514 |
| HSLHX15 | 777861 | 399 | WUblastx.64 | catalase (EC 1.11.1.6) - Campylobacter jejuni | pir\|I40767\|I40767 | 86% | 162 | 76 |
| HSNBM34 | 635131 | 402 | WUblastx.64 | acyl-CoA dehydrogenase (EC 1.3.99.—) very-long-chain specific - | pir\|S54183\|S54183 | 84% | 1548 | 1979 |
| | | | | human | | 100% | 251 | 1546 |
| HSOAH16 | 827058 | 403 | WUblastx.64 | (Q9NX85) CDNA FLJ20378 FIS, CLONE KAIA0536. | Q9NX85 | 57% | 682 | 623 |
| | | | | | | 81% | 624 | 544 |
| | | | | | | 68% | 524 | 384 |
| HSQDO85 | 853393 | 405 | WUblastx.64 | (Q9VCK0) CG10161 PROTEIN. | Q9VCK0 | 67% | 485 | 988 |
| | | | | | | 60% | 60 | 521 |
| | | | | | | 56% | 10 | 57 |
| HSQES57 | 831222 | 406 | WUblastx.64 | (Q96EW4) Unknown (protein for MGC: 19936). | Q96EW4 | 94% | 195 | 980 |
| HSRBE06 | 871264 | 407 | WUblastx.64 | (Q9H387) PRO2550. | Q9H387 | 70% | 1608 | 1327 |
| HSSDI26 | 560722 | 408 | WUblastx.64 | (Q9BVD9) UNKNOWN (PROTEIN FOR MGC: 5149). | Q9BVD9 | 68% | 1398 | 1264 |
| HSSEA64 | 853395 | 409 | WUblastx.64 | (Q9HBT2) HYPOTHETICAL 17.2 KDA PROTEIN. | Q9HBT2 | 98% | 7 | 243 |
| HSSEF77 | 658725 | 410 | WUblastx.64 | (O95637) WW DOMAIN BINDING PROTEIN-1. | O95637 | 42% | 10 | 246 |
| | | | | | | 83% | 296 | 829 |
| HSSFE38 | 742512 | 411 | HMMER 2.1.1 | PFAM: Ribonuclease HII | PF01351 | 76.3 | 184 | −142 |
| | | | WUblastx.64 | (O75792) RIBONUCLEASE HI LARGE SUBUNIT (EC 3.1.26.—) | RNHL_HUMAN | 91% | 156 | 635 |
| | | | | (RNASE | | 99% | 587 | 1051 |
| HSWBE76 | 751308 | 413 | WUblastx.64 | (Q9NW15) CDNA FLJ10375 FIS, CLONE NT2RM2001950. | Q9NW15 | 100% | 126 | 266 |
| HSXCP38 | 895392 | 414 | WUblastx.64 | hydroxymethylglutaryl-CoA lyase (EC 4.1.3.4) - chicken | pir\|B45470\|B45470 | 70% | 17 | 895 |
| HSYBI06 | 740766 | 415 | WUblastx.64 | (Q9BGV8) HYPOTHETICAL 10.0 KDA PROTEIN. | Q9BGV8 | 69% | 916 | 954 |
| | | | | | | 78% | 821 | 913 |
| HT5GR59 | 801930 | 420 | WUblastx.64 | (O60496) DOCKING PROTEIN. | O60496 | 72% | 70 | 1284 |
| HTAEI78 | 637684 | 421 | WUblastx.64 | (Q9UKQ2) ADAM 28 PRECURSOR (EC 3.4.24.—) (A | AD28_HUMAN | 90% | 85 | 174 |
| | | | | DISINTEGRIN AND | | | | |
| HTDAA78 | 566861 | 422 | WUblastx.64 | (Q9D8E7) 5830443F10RIK PROTEIN. | Q9D8E7 | 58% | 84 | 302 |
| HTEAG62 | 812332 | 423 | WUblastx.64 | (Q9Y5Z7) HOST CELL FACTOR 2. | Q9Y5Z7 | 60% | 1 | 57 |
| | | | | | | 93% | 14 | 2011 |
| | | | | | | 30% | 107 | 631 |
| HTECB02 | 806305 | 424 | WUblastx.64 | (AAK39520) BTB domain protein (Fragment). | AAK39520 | 95% | 33 | 1211 |
| HTECC15 | 866488 | 425 | WUblastx.64 | (Q92558) WISKOTT-ALDRICH SYNDROME PROTEIN | WAS1_HUMAN | 95% | 321 | 1100 |
| | | | | FAMILY MEMBER 1 ( | | 70% | 1525 | 1998 |
| | | | | | | 89% | 1105 | 1281 |
| HTEDS12 | 838621 | 428 | WUblastx.64 | (Q9H0K0) HYPOTHETICAL 81.8 KDA PROTEIN. | Q9H0K0 | 97% | 1029 | 1391 |
| | | | | | | 42% | 1269 | 1490 |
| | | | | | | 100% | 16 | 1011 |
| HTEEF26 | 789606 | 431 | WUblastx.64 | (Q9H7X7) CDNA FLJ14117 FIS, CLONE MAMMA1001785. | Q9H7X7 | 81% | 80 | 634 |
| HTEEF26 | 879704 | 432 | WUblastx.64 | (Q9H7X7) CDNA FLJ14117 FIS, CLONE MAMMA1001785. | Q9H7X7 | 81% | 80 | 634 |
| HTEEW69 | 764835 | 433 | WUblastx.64 | (Q9Z1H7) GSG1. | Q9Z1H7 | 65% | 850 | 927 |
| | | | | | | 85% | 707 | 769 |
| | | | | | | 50% | 519 | 662 |
| | | | | | | 66% | 908 | 943 |
| | | | | | | 65% | 182 | 544 |
| HTEGS07 | 827700 | 434 | WUblastx.64 | (Q9D143) 1110030K22RIK PROTEIN. | Q9D143 | 96% | 183 | 593 |
| HTEHA56 | 806461 | 436 | WUblastx.64 | (Q9H9A0) CDNA FLJ12895 FIS, CLONE NT2RP2004187, | Q9H9A0 | 94% | 2 | 217 |
| | | | | WEAKLY SIMILAR TO ZIN | | 65% | 70 | 468 |
| HTEJD29 | 695798 | 438 | WUblastx.64 | (Q60713) REVERSE TRANSCRIPTASE. | Q60713 | 42% | 1115 | 1285 |
| | | | | | | 47% | 874 | 1089 |
| HTEMQ17 | 840387 | 440 | WUblastx.64 | (Q9D4P8) 4930579G24RIK PROTEIN. | Q9D4P8 | 90% | 120 | 359 |
| HTENR63 | 877952 | 441 | WUblastx.64 | (Q9HD71) HYPOTHETICAL NUCLEAR FACTOR SBBI22. | Q9HD71 | 33% | 1278 | 1358 |
| | | | | | | 78% | 26 | 1168 |
| HTGGM44 | 842856 | 442 | WUblastx.64 | probable phosphodiesterase I (EC 3.1.4.1) - human (fragment) | pir\|T43461\|T43461 | 100% | 1400 | 1924 |
| | | | | | | 83% | 1925 | 2488 |
| HTLBT80 | 840045 | 445 | WUblastx.64 | (Q9NQQ7) BA394O2.1 (CGI-15 PROTEIN). | Q9NQQ7 | 76% | 1214 | 1405 |
| | | | | | | 74% | 804 | 1223 |
| | | | | | | 47% | 780 | 845 |
| | | | | | | 78% | 313 | 825 |
| HTLDA84 | 686397 | 446 | WUblastx.64 | (Q9H387) PRO2550. | Q9H387 | 79% | 1265 | 1134 |
| | | | | | | 60% | 1442 | 1398 |
| | | | | | | 65% | 1398 | 1243 |
| HTLDN29 | 790195 | 447 | WUblastx.64 | (Q9CWL8) 5730471K09RIK PROTEIN. | Q9CWL8 | 96% | 15 | 1226 |
| HTLEC82 | 811992 | 449 | WUblastx.64 | (Q99MI0) CELL GROWTH REGULATOR FALKOR. | Q99MI0 | 98% | 111 | 455 |
| HTLEM16 | 779133 | 450 | WUblastx.64 | (O95638) WW DOMAIN BINDING PROTEIN-2. | O95638 | 92% | 50 | 541 |
| | | | | | | 28% | 987 | 1142 |
| | | | | | | 48% | 617 | 841 |
| HTLEV48 | 723799 | 451 | WUblastx.64 | (BAB55550) Bk125H2.1 protein. | BAB55550 | 94% | 10 | 825 |
| HTLFA13 | 535937 | 452 | WUblastx.64 | (Q9UHT1) PRO1902 PROTEIN. | Q9UHT1 | 57% | 1118 | 873 |
| HTLGI89 | 835069 | 454 | WUblastx.64 | (Q9BXS5) CLATHRIN-ASSOCIATED PROTEIN AP47. | Q9BXS5 | 98% | 104 | 682 |
| | | | | | | 99% | 675 | 1370 |
| HTLIF11 | 843506 | 455 | WUblastx.64 | (Q9I8S4) ORNITHINE DECARBOXYLASE-2. | Q9I8S4 | 68% | 309 | 356 |
| | | | | | | 59% | 353 | 1687 |
| HTLIF12 | 834946 | 456 | WUblastx.64 | (Q9DAR1) 1700001K04RIK PROTEIN. | Q9DAR1 | 47% | 291 | 752 |
| HTLIF12 | 842691 | 457 | WUblastx.64 | (Q9DAR1) 1700001K04RIK PROTEIN. | Q9DAR1 | 47% | 293 | 754 |
| HTLIF12 | 870167 | 458 | WUblastx.64 | (Q9DAR1) 1700001K04RIK PROTEIN. | Q9DAR1 | 47% | 293 | 754 |
| HTLIF12 | 886780 | 459 | WUblastx.64 | (Q9DAR1) 1700001K04RIK PROTEIN. | Q9DAR1 | 47% | 293 | 754 |
| HTLIF12 | 891533 | 460 | WUblastx.64 | (Q9DAR1) 1700001K04RIK PROTEIN. | Q9DAR1 | 47% | 293 | 754 |
| HTLIF12 | 901225 | 461 | WUblastx.64 | (Q9DAR1) 1700001K04RIK PROTEIN. | Q9DAR1 | 47% | 293 | 754 |
| HTNBK13 | 831967 | 463 | WUblastx.64 | (Q9Y3M2) HYPOTHETICAL 14.5 KDA PROTEIN. | Q9Y3M2 | 81% | 123 | 500 |
| HTOAM11 | 664508 | 465 | WUblastx.64 | (Q9H5R3) CDNA: FLJ23147 FIS, CLONE LNG09295. | Q9H5R3 | 77% | 428 | 363 |
| | | | | | | 75% | 586 | 425 |
| HTOEV16 | 853616 | 468 | WUblastx.64 | (Q9NRZ5) 1-ACYL-SN-GLYCEROL-3-PHOSPHATE | PLCD_HUMAN | 98% | 201 | 383 |
| | | | | ACYLTRANSFERASE DEL | | 95% | 379 | 1164 |
| HTOHO21 | 732808 | 470 | WUblastx.64 | P47 LBC oncogene - human | pir\|I38434\|I38434 | 97% | 581 | 438 |
| HTOHQ05 | 853621 | 471 | WUblastx.64 | (Q9UII4) CYCLIN-E BINDING PROTEIN 1. | Q9UII4 | 100% | 669 | 791 |
| HTOJL95 | 806212 | 472 | WUblastx.64 | (Q15605) ORF1 CODES FOR A 40 KDA PRODUCT. | Q15605 | 86% | 192 | 61 |
| | | | | | | 57% | 876 | 730 |
| | | | | | | 57% | 751 | 161 |
| HTOJL95 | 762851 | 473 | WUblastx.64 | (Q15401) LINE-1 REPEAT MRNA WITH 2 OPEN READING | Q15401 | 36% | 683 | 609 |
| | | | | FRAMES. | | 59% | 966 | 820 |
| | | | | | | 71% | 607 | 248 |
| HTPDU17 | 840596 | 474 | WUblastx.64 | (Q9NW00) CDNA FLJ10404 FIS, CLONE NT2RM4000486. | Q9NW00 | 80% | 553 | 1308 |
| | | | | | | 64% | 1143 | 1664 |
| HTSFJ32 | 637720 | 475 | WUblastx.64 | (Q9WUW2) VESICLE ASSOCIATED MEMBRANE PROTEIN | Q9WUW2 | 64% | 747 | 788 |
| | | | | 2B. | | 94% | 448 | 609 |
| HTTCB60 | 853401 | 476 | WUblastx.64 | (Q9HAW0) RNA POLYMERASE III TRANSCRIPTION | Q9HAW0 | 90% | 6 | 881 |
| | | | | INITIATION FACTOR BRFU. | | | | |
| HTTEE41 | 840950 | 477 | WUblastx.64 | (P78371) T-COMPLEX PROTEIN 1, BETA SUBUNIT (TCP-1- | TCPB_HUMAN | 98% | 92 | 1696 |
| | | | | BETA) (CC | | | | |
| HTTEZ02 | 702027 | 478 | WUblastx.64 | (Q9UEZ7) MAKORIN 1. | Q9UEZ7 | 56% | 278 | 346 |
| | | | | | | 98% | 6 | 272 |
| HTWEH94 | 561680 | 479 | WUblastx.64 | (Q9GMX5) HYPOTHETICAL 12.9 KDA PROTEIN. | Q9GMX5 | 60% | 1150 | 929 |
| HTXDC38 | 801935 | 482 | WUblastx.64 | (Q9BTX3) SIMILAR TO HSPC171 PROTEIN. | Q9BTX3 | 99% | 100 | 573 |
| HTXDC77 | 844258 | 483 | HMMER 2.1.1 | PFAM: Class I Histocompatibility antigen, domains alpha 1 and 2 | PF00129 | 103.3 | 137 | 259 |
| | | | WUblastx.64 | (P03989) HLA CLASS I HISTOCOMPATIBILITY ANTIGEN, B- | 1B14_HUMAN | 63% | 880 | 945 |
| | | | | 27 ALPHA | | 71% | 65 | 256 |
| | | | | | | 80% | 282 | 863 |
| HTXFA72 | 853410 | 487 | WUblastx.64 | (Q9N083) UNNAMED PORTEIN PRODUCT. | Q9N083 | 59% | 1688 | 1557 |
| | | | | | | 66% | 1839 | 1681 |
| HTXKF95 | 834438 | 489 | WUblastx.64 | (AAH08360) Similar to hypothetical protein FLJ22376 | AAH08360 | 85% | 233 | 553 |
| | | | | | | 100% | 2 | 112 |
| HTXMZ07 | 834881 | 490 | WUblastx.64 | (Q9BRF3) SIMILAR TO RIKEN CDNA 2810468K17 GENE. | Q9BRF3 | 90% | 3 | 1469 |
| HUFCL31 | 801938 | 491 | WUblastx.64 | (Q9D311) 9030623N16RIK PROTEIN. | Q9D311 | 60% | 280 | 1224 |
| HUKBT67 | 844446 | 492 | WUblastx.64 | (BAB55428) CDNA FLJ14975 fis, clone THYRO1001405, w | BAB55428 | 100% | 1040 | 1216 |
| | | | | | | 100% | 8 | 61 |
| | | | | | | 30% | 80 | 241 |
| HUKDY82 | 570896 | 494 | WUblastx.64 | (Q9HA67) CDNA FLJ12155 FIS, CLONE MAMMA1000472. | Q9HA67 | 59% | 1405 | 1145 |
| HUSCJ14 | 894699 | 495 | WUblastx.64 | tex261 protein - mouse | pir\|S47481\|S47481 | 99% | 74 | 661 |
| HUSGL67 | 792637 | 496 | WUblastx.64 | (Q9Y2G2) CARD DOMAIN PROTEIN 8 (APOPTOTIC PROTEIN | CRD8_HUMAN | 100% | 347 | 421 |
| | | | | NDPP1) (D | | 65% | 947 | 1006 |
| | | | | | | 97% | 469 | 954 |
| HUSGU40 | 684975 | 497 | WUblastx.64 | (Q9BX98) UBIQUITIN A-52 RESIDUE RIBOSOMAL PROTEIN | Q9BX98 | 75% | 840 | 433 |
| | | | | FUSION PRODUCT 1 (F | | | | |
| HUVDJ48 | 564853 | 499 | WUblastx.64 | SHORT ISOFORM OF Q9P2N4 | sp_vs\|Q9P2N4- | 92% | 1510 | 1668 |
| | | | | | 01\|Q9P2N4 | | | |
| HWAAI12 | 830432 | 500 | WUblastx.64 | (Q9BWW4) SINGLE STRANDED DNA BINDING PROTEIN-1. | Q9BWW4 | 82% | 512 | 829 |
| | | | | | | 87% | 92 | 394 |
| | | | | | | 69% | 941 | 1252 |
| | | | | | | 36% | 521 | 685 |
| | | | | | | 37% | 752 | 826 |
| HWBCN36 | 722259 | 502 | WUblastx.64 | (Q9BGW3) HYPOTHETICAL 13.5 KDA PROTEIN. | Q9BGW3 | 69% | 1007 | 900 |
| | | | | | | 57% | 887 | 846 |
| HWBDJ08 | 762860 | 503 | WUblastx.64 | probable pol polyprotein-related protein 4 - rat | pir\|S21348\|S21348 | 47% | 901 | 833 |
| | | | | | | 43% | 1262 | 1131 |
| | | | | | | 53% | 1134 | 904 |
| HWDAC26 | 821335 | 505 | WUblastx.64 | (Q14287) HYPOTHETICAL PROTEIN (FRAGMENT). | Q14287 | 51% | 1316 | 1471 |
| | | | | | | 57% | 1093 | 1323 |
| HWDAG96 | 796743 | 506 | WUblastx.64 | (AAH01119) Integrin beta 4 binding protein. | AAH01119 | 100% | 108 | 842 |
| HWHPB78 | 740778 | 508 | WUblastx.64 | (Q9BUK4) SIMILAR TO HYPOTHETICAL PROTEIN FLJ10709. | Q9BUK4 | 61% | 360 | 614 |
| | | | | | | 100% | 677 | 817 |
| HYABC84 | 789854 | 509 | WUblastx.64 | (Q99L03) SIMILAR TO TRP4-ASSOCIATED PROTEIN TAP1 | Q99L03 | 89% | 209 | 553 |
| | | | | (FRAGMENT). | | | | |
| HYABC84 | 865064 | 510 | WUblastx.64 | (Q9H429) DJ756N5.2 (A NOVEL PROTEIN (DKFZP727M231) | Q9H429 | 92% | 163 | 618 |
| | | | | SIMILAR TO TRP4-AS | | | | |
| H2CBD20 | 570796 | 511 | WUblastx.64 | (Q14288) HYPOTHETICAL PROTEIN (FRAGMENT). | Q14288 | 42% | 758 | 988 |
| | | | | | | 51% | 987 | 1223 |
| H2CBH91 | 826669 | 512 | WUblastx.64 | (Q9NXA3) CDNA FLJ20357 FIS, CLONE HEP16545. | Q9NXA3 | 63% | 133 | 222 |
| | | | | | | 53% | 3 | 125 |
| | | | | | | 75% | 603 | 737 |
| | | | | | | 68% | 263 | 643 |
| H2LBA54 | 684290 | 513 | WUblastx.64 | (O60875) APOPTOSIS SPECIFIC PROTEIN (DJ134E15.2) | O60875 | 97% | 172 | 996 |
| | | | | (APOPTOSIS SPECIFIC | | | | |
| H2LBB09 | 658667 | 514 | WUblastx.64 | (Q9P0R6) HSPC210. | Q9P0R6 | 95% | 465 | 536 |
| | | | | | | 97% | 73 | 477 |
| H2LBB09 | 830636 | 515 | WUblastx.64 | (Q9P0R6) HSPC210. | Q9P0R6 | 100% | 504 | 575 |
| | | | | | | 97% | 112 | 516 |
| H2MBF60 | 695714 | 518 | WUblastx.64 | transcription factor TFIID 32K chain TAFII32 - human | pir\|I39141\|I39141 | 100% | 163 | 909 |
| H6EEA48 | 847111 | 520 | WUblastx.64 | (AAH07644) Similar to RIKEN cDNA 9430029K10 gene (F | AAH07644 | 90% | 478 | 933 |
| | | | | | | 96% | 27 | 482 |
| H6EEN71 | 829201 | 521 | WUblastx.64 | (Q9BW90) SIMILAR TO PEROXISOME BIOGENESIS FACTOR | Q9BW90 | 100% | 1943 | 1779 |
| | | | | 10. | | | | |
| H6EEO05 | 865424 | 522 | HMMER 2.1.1 | PFAM: EF hand | PF00036 | 25 | 328 | 414 |
| | | | WUblastx.64 | hypothetical protein DKFZp564C246.1 - human | pir\|T17225\|T17225 | 97% | 265 | 522 |
| HACBJ11 | 797625 | 528 | WUblastx.64 | band-6-protein - human | pir\|S60712\|S60712 | 100% | 8 | 139 |
| HACBS86 | 603946 | 529 | WUblastx.64 | (Q9BQB1) HYPOTHETICAL 22.5 KDA PROTEIN. | Q9BQB1 | 66% | 89 | 682 |
| HADCL19 | 599065 | 535 | WUblastx.64 | (Q9H728) CDNA: FLJ21463 FIS, CLONE COL04765. | Q9H728 | 57% | 1070 | 780 |
| HADDC04 | 601695 | 537 | WUblastx.64 | (Q9GML5) HYPOTHETICAL 8.0 KDA PROTEIN. | Q9GML5 | 57% | 2522 | 2379 |
| HADDP51 | 853356 | 539 | HMMER 2.1.1 | PFAM: TBC domain | PF00566 | 52.3 | 357 | 509 |
| | | | WUblastx.64 | (Q9H695) CDNA: FLJ22474 FIS, CLONE HRC10568. | Q9H695 | 99% | 12 | 701 |
| HADET62 | 607615 | 541 | WUblastx.64 | retrovirus-related hypothetical protein II - human 1 | pir\|S23650\|S23650 | 33% | 506 | 330 |
| | | | | | | 27% | 325 | 77 |
| | | | | | | 50% | 657 | 592 |
| | | | | | | 44% | 808 | 668 |
| HADEY08 | 799507 | 542 | WUblastx.64 | (Q9NX94) CDNA FLJ20367 FIS, CLONE HEP18101. | Q9NX94 | 98% | 663 | 1076 |
| HADEY22 | 861628 | 544 | WUblastx.64 | (Q9H728) CDNA: FLJ21463 FIS, CLONE COL04765. | Q9H728 | 77% | 590 | 459 |
| HADFB84 | 668229 | 545 | WUblastx.64 | (Q9H387) PRO2550. | Q9H387 | 67% | 758 | 1009 |
| HADFD10 | 843934 | 547 | WUblastx.64 | (Q9P1C6) PRO2738. | Q9P1C6 | 52% | 1254 | 1054 |
| HADFW20 | 599066 | 550 | WUblastx.64 | (Q9H9H0) CDNA FLJ12759 FIS, CLONE NT2RP2001347. | Q9H9H0 | 83% | 1065 | 823 |
| HADFX10 | 741054 | 551 | WUblastx.64 | (O60448) NEURONAL THREAD PROTEIN AD7C-NTP. | O60448 | 45% | 1225 | 1040 |
| | | | | | | 62% | 726 | 646 |
| | | | | | | 35% | 1221 | 808 |
| | | | | | | 39% | 1194 | 850 |
| | | | | | | 56% | 917 | 729 |
| | | | | | | 33% | 965 | 729 |
| | | | | | | 57% | 1022 | 939 |
| | | | | | | 45% | 726 | 628 |
| | | | | | | 51% | 972 | 772 |
| | | | | | | 59% | 972 | 715 |
| | | | | | | 57% | 1225 | 1169 |
| | | | | | | 34% | 1188 | 940 |
| HADFY80 | 654831 | 552 | WUblastx.64 | (Q9H8X9) CDNA FLJ13153 FIS, CLONE NT2RP3003409, | Q9H8X9 | 94% | 2 | 169 |
| | | | | WEAKLY SIMILAR TO HUM | | | | |
| HADXA10 | 772423 | 555 | WUblastx.64 | (Q9NZ51) NEUROENDOCRINE DIFFERENTIATION FACTOR. | Q9NZ51 | 78% | 132 | 311 |
| | | | | | | 79% | 295 | 798 |
| HADXA10 | 859777 | 556 | WUblastx.64 | (Q9D792) 9130011K15RIK PROTEIN. | Q9D792 | 49% | 173 | 472 |
| HAFBB15 | 608180 | 557 | HMMER 2.1.1 | PFAM: RNA 3′- terminal phosphate cyclase | PF01137 | 159.5 | 186 | 440 |
| | | | WUblastx.64 | RNA-3′- phosphate cyclase (EC 6.5.1.4) 1 [validated] - human | pir\|T48844\|T48844 | 93% | 6 | 446 |
| HAGAB62 | 588471 | 559 | WUblastx.64 | (Q9H2I4) DC42. | Q9H2I4 | 77% | 8 | 232 |
| HAGAB83 | 823044 | 560 | WUblastx.64 | (Q9NX17) CDNA FLJ20489 FIS, CLONE KAT08285. | Q9NX17 | 47% | 1597 | 1472 |
| | | | | | | 76% | 1817 | 1599 |
| HAGAF75 | 561933 | 562 | WUblastx.64 | (Q9UI59) PRO0478 PROTEIN. | Q9UI59 | 77% | 1203 | 1310 |
| HAGAK40 | 731929 | 563 | WUblastx.64 | (Q9H387) PRO2550. | Q9H387 | 80% | 506 | 658 |
| | | | | | | 70% | 707 | 838 |
| HAGAZ36 | 564230 | 565 | WUblastx.64 | pro-pol-dUTPase polyprotein - murine endogenous retrovirus ERV- | pir\|T29097\|T29097 | 66% | 613 | 578 |
| | | | | L (fragment) | | 38% | 897 | 655 |
| | | | | | | 34% | 572 | 27 |
| HAGBL31 | 679582 | 567 | WUblastx.64 | (Q13416) ORIGIN RECOGNITION COMPLEX SUBUNIT 2. | ORC2_HUMAN | 97% | 509 | 610 |
| HAGBO09 | 853357 | 568 | WUblastx.64 | (Q9NX17) CDNA FLJ20489 FIS, CLONE KAT08285. | Q9NX17 | 78% | 1533 | 1249 |
| HAGBO12 | 601431 | 569 | WUblastx.64 | (Q9BGW3) HYPOTHETICAL 13.5 KDA PROTEIN. | Q9BGW3 | 63% | 348 | 241 |
| | | | | | | 76% | 532 | 353 |
| HAGBS89 | 846292 | 571 | WUblastx.64 | (Q9P195) PRO1722. | Q9P195 | 56% | 1125 | 841 |
| HAGBV06 | 701966 | 572 | WUblastx.64 | (Q9UHC7) MAKORIN 1. | Q9UHC7 | 66% | 28 | 195 |
| HAGBV25 | 838174 | 573 | WUblastx.64 | (Q9H7C8) CDNA: FLJ21040 FIS, CLONE CAE10642. | Q9H7C8 | 99% | 1 | 1644 |
| HAGBV29 | 837203 | 574 | WUblastx.64 | (Q9H387) PRO2550. | Q9H387 | 70% | 2054 | 1761 |
| | | | | | | 71% | 439 | 585 |
| | | | | | | 60% | 309 | 455 |
| | | | | | | 56% | 749 | 955 |
| | | | | | | 48% | 732 | 836 |
| | | | | | | 73% | 687 | 731 |
| HAGCC87 | 638587 | 575 | WUblastx.64 | (Q9BGW3) HYPOTHETICAL 13.5 KDA PROTEIN. | Q9BGW3 | 65% | 992 | 1105 |
| | | | | | | 36% | 54 | 116 |
| | | | | | | 57% | 801 | 980 |
| HAGCI69 | 560596 | 577 | WUblastx.64 | (Q9UI59) PRO0478 PROTEIN. | Q9UI59 | 51% | 1015 | 1185 |
| HAGCZ70 | 747697 | 579 | WUblastx.64 | (Q9H397) PRO2852. | Q9H397 | 41% | 1672 | 1544 |
| | | | | | | 75% | 1490 | 1359 |
| | | | | | | 77% | 1366 | 1235 |
| HAGDC73 | 724860 | 580 | WUblastx.64 | (Q9V662) CG12367 PROTEIN. | Q9V662 | 37% | 536 | 1006 |
| HAGDJ53 | 821315 | 584 | WUblastx.64 | (Q9BGW3) HYPOTHETICAL 13.5 KDA PROTEIN. | Q9BGW3 | 70% | 1873 | 1781 |
| | | | | | | 46% | 1796 | 1713 |
| | | | | | | 41% | 1782 | 1582 |
| HAGDL51 | 637488 | 586 | WUblastx.64 | (O60448) NEURONAL THREAD PROTEIN AD7C-NTP. | O60448 | 61% | 1639 | 1532 |
| | | | | | | 70% | 110 | 3 |
| HAGDO70 | 812393 | 587 | WUblastx.64 | platelet-activating factor acetylhydrolase (EC 3.1.1.—) gamma chain - | pir\|JC4246\|JC4246 | 94% | 185 | 877 |
| | | | | human | | | | |
| HAGDT30 | 589514 | 588 | WUblastx.64 | (O75592) PROTEIN ASSOCIATED WITH MYC. | O75592 | 100% | 11 | 280 |
| | | | | | | 24% | 11 | 208 |
| | | | | | | 100% | 1125 | 1946 |
| | | | | | | 25% | 295 | 933 |
| | | | | | | 90% | 511 | 1131 |
| | | | | | | 45% | 1445 | 1504 |
| HAGDW68 | 835631 | 589 | WUblastx.64 | (AAC14670) WUGSC: H_DJ0651K02.1 protein (Fragment). | AAC14670 | 100% | 390 | 470 |
| | | | | | | 99% | 2 | 385 |
| HAGEK86 | 748222 | 592 | WUblastx.64 | (O43237) DYNEIN LIGHT INTERMEDIATE CHAIN 2, | DYJ2_HUMAN | 88% | 1066 | 1617 |
| | | | | CYTOSOLIC (LIC5 | | | | |
| HAGEP30 | 604478 | 593 | WUblastx.64 | (Q9H387) PRO2550. | Q9H387 | 84% | 594 | 517 |
| | | | | | | 67% | 788 | 606 |
| HAGEQ67 | 838445 | 595 | WUblastx.64 | (Q94532) PUTATIVE TYPE III ALCOHOL DEHYDROGENASE. | Q94532 | 55% | 22 | 123 |
| | | | | | | 59% | 108 | 722 |
| HAGEU26 | 608183 | 596 | WUblastx.64 | (Q9GMX5) HYPOTHETICAL 12.9 KDA PROTEIN. | Q9GMX5 | 59% | 356 | 481 |
| HAGFM58 | 604536 | 603 | WUblastx.64 | (Q9H3C0) PRO0898. | Q9H3C0 | 62% | 10 | 144 |
| HAGFT48 | 780112 | 604 | WUblastx.64 | (Q9Y2Y7) FOOCEN-M (NOGO-B PROTEIN) (RTN-XS) | Q9Y2Y7 | 80% | 761 | 1090 |
| | | | | (RETICULON 4B). | | 100% | 1156 | 1281 |
| | | | | | | 48% | 233 | 559 |
| HAGFU31 | 751713 | 605 | WUblastx.64 | (O60448) NEURONAL THREAD PROTEIN AD7C-NTP. | O60448 | 65% | 1214 | 1083 |
| | | | | | | 68% | 1245 | 1084 |
| | | | | | | 45% | 1093 | 1028 |
| | | | | | | 52% | 1015 | 953 |
| | | | | | | 68% | 1094 | 1029 |
| | | | | | | 71% | 1230 | 967 |
| HAGFW13 | 634611 | 606 | WUblastx.64 | (O00549) ORF2-LIKE PROTEIN (FRAGMENT). | O00549 | 65% | 398 | 321 |
| | | | | | | 65% | 453 | 385 |
| | | | | | | 70% | 307 | 164 |
| HAGHE85 | 838059 | 607 | WUblastx.64 | (Q9P195) PRO1722. | Q9P195 | 58% | 1665 | 1498 |
| | | | | | | 69% | 1511 | 1365 |
| HAHSD51 | 847014 | 612 | WUblastx.64 | (Q9D8B4) 2010012C24RIK PROTEIN. | Q9D8B4 | 50% | 99 | 176 |
| | | | | | | 61% | 182 | 505 |
| HAIBV91 | 852223 | 615 | WUblastx.64 | (Q9N083) UNNAMED PORTEIN PRODUCT. | Q9N083 | 59% | 672 | 899 |
| | | | | | | 40% | 1911 | 1955 |
| HAICE62 | 834523 | 616 | WUblastx.64 | (Q9H3T5) MOB1 PROTEIN (HYPOTHETICAL 25.1 KDA | Q9H3T5 | 100% | 203 | 850 |
| | | | | PROTEIN). | | | | |
| HAICL90 | 637491 | 617 | WUblastx.64 | (Q9N083) UNNAMED PORTEIN PRODUCT. | Q9N083 | 63% | 716 | 438 |
| HAIDP45 | 847015 | 619 | WUblastx.64 | (AAH08590) Hypothetical 47.9 kDa protein. | AAH08590 | 100% | 986 | 1096 |
| HAJAB88 | 780114 | 620 | HMMER 2.1.1 | PFAM: Ribosomal protein L34 | PF00468 | 32.3 | 276 | 401 |
| | | | WUblastx.64 | (Q9BQ48) MITOCHONDRIAL RIBOSOMAL PROTEIN L34 | Q9BQ48 | 98% | 126 | 374 |
| | | | | (L34MT) (UNKNOWN) (PROTE | | | | |
| HAMGG01 | 783864 | 624 | WUblastx.64 | (Q9BY78) RING FINGER PROTEIN WITH LEUCINE ZIPPER | Q9BY78 | 86% | 7 | 342 |
| | | | | RNF26. | | | | |
| HANKC93 | 847018 | 626 | WUblastx.64 | (Q9H387) PRO2550. | Q9H387 | 67% | 648 | 565 |
| | | | | | | 52% | 876 | 820 |
| | | | | | | 61% | 748 | 656 |
| HAPAD35 | 840584 | 627 | WUblastx.64 | (Q9NX85) CDNA FLJ20378 FIS, CLONE KAIA0536. | Q9NX85 | 76% | 1346 | 1245 |
| | | | | | | 63% | 1237 | 1064 |
| HAPBR13 | 609976 | 628 | WUblastx.64 | (Q9H6T0) CDNA: FLJ21918 FIS, CLONE HEP04006. | Q9H6T0 | 26% | 273 | 452 |
| | | | | | | 51% | 95 | 274 |
| | | | | | | 40% | 424 | 762 |
| HAPBU09 | 762803 | 629 | WUblastx.64 | (O60859) NEUROPATHY TARGET ESTERASE. | O60859 | 100% | 3 | 545 |
| HAPNJ33 | 835554 | 632 | WUblastx.64 | (BAA85159) Sec61. | BAA85159 | 100% | 1200 | 1403 |
| | | | | | | 98% | 163 | 1230 |
| HAPNL62 | 790340 | 633 | WUblastx.64 | (BAB55063) CDNA FLJ14456 fis, clone HEMBB1001915, m | BAB55063 | 93% | 1 | 1977 |
| HAPNO50 | 834384 | 634 | WUblastx.64 | hypothetical protein DKFZp564N123.1 - human (fragment) | pir\|T08701\|T08701 | 98% | 27 | 332 |
| | | | | | | 88% | 3 | 29 |
| | | | | | | 86% | 323 | 883 |
| HAPPW83 | 847020 | 636 | WUblastx.64 | (Q9H387) PRO2550. | Q9H387 | 77% | 626 | 757 |
| | | | | | | 84% | 475 | 627 |
| HAPRK55 | 735887 | 643 | WUblastx.64 | (Q9NX17) CDNA FLJ20489 FIS, CLONE KAT08285. | Q9NX17 | 63% | 1379 | 1068 |
| HAPSH37 | 847021 | 644 | WUblastx.64 | (Q9H387) PRO2550. | Q9H387 | 75% | 63 | 28 |
| | | | | | | 84% | 199 | 68 |
| HAQBY85 | 832384 | 646 | WUblastx.64 | (Q9D4H9) 4932409F11RIK PROTEIN. | Q9D4H9 | 100% | 17 | 358 |
| | | | | | | 55% | 1663 | 1716 |
| | | | | | | 28% | 1066 | 1212 |
| | | | | | | 34% | 1459 | 1728 |
| | | | | | | 93% | 361 | 1539 |
| HAQBZ15 | 801966 | 647 | WUblastx.64 | (AAH07201) Unknown (protein for IMAGE: 2961284) (Fra | AAH07201 | 100% | 6 | 86 |
| | | | | | | 30% | 1717 | 1824 |
| | | | | | | 93% | 175 | 711 |
| | | | | | | 37% | 1019 | 1564 |
| | | | | | | 29% | 1277 | 1510 |
| | | | | | | 35% | 1711 | 1836 |
| | | | | | | 97% | 1705 | 1956 |
| | | | | | | 35% | 843 | 953 |
| | | | | | | 31% | 205 | 357 |
| | | | | | | 27% | 187 | 408 |
| | | | | | | 67% | 641 | 1708 |
| | | | | | | 52% | 1711 | 1836 |
| | | | | | | 31% | 849 | 962 |
| | | | | | | 31% | 1078 | 1296 |
| | | | | | | 26% | 1241 | 1696 |
| | | | | | | 36% | 1123 | 1266 |
| | | | | | | 30% | 1292 | 1564 |
| | | | | | | 27% | 1081 | 1146 |
| | | | | | | 37% | 882 | 953 |
| | | | | | | 30% | 205 | 498 |
| | | | | | | 29% | 1684 | 1938 |
| | | | | | | 29% | 196 | 357 |
| | | | | | | 27% | 1054 | 1317 |
| | | | | | | 90% | 83 | 181 |
| HARAE26 | 560598 | 650 | WUblastx.64 | (Q9H743) CDNA: FLJ21394 FIS, CLONE COL03536. | Q9H743 | 65% | 1204 | 1076 |
| | | | | | | 75% | 1068 | 925 |
| HARAT69 | 769389 | 651 | WUblastx.64 | (Q9VZ55) CG1582 PROTEIN. | Q9VZ55 | 48% | 2 | 1360 |
| HARAZ81 | 832380 | 652 | WUblastx.64 | (Q9BQ36) MITOCHONDRIAL RIBOSOMAL PROTEIN BMRP64 | Q9BQ36 | 97% | 7 | 327 |
| | | | | (HYPOTHETICAL 15.1 KD | | | | |
| HASAU26 | 845848 | 653 | WUblastx.64 | (Q9H964) CDNA FLJ12984 FIS, CLONE NT2RP3000047, | Q9H964 | 94% | 3 | 107 |
| | | | | WEAKLY SIMILAR TO NPL | | 95% | 132 | 194 |
| | | | | | | 98% | 820 | 1425 |
| | | | | | | 40% | 2405 | 2479 |
| | | | | | | 98% | 188 | 829 |
| | | | | | | 100% | 98 | 133 |
| HASAY07 | 834511 | 655 | WUblastx.64 | catalase (EC 1.11.1.6) - Campylobacter jejuni | pir\|I40767\|I40767 | 96% | 263 | 177 |
| HATAE01 | 654834 | 656 | WUblastx.64 | (Q9NX17) CDNA FLJ20489 FIS, CLONE KAT08285. | Q9NX17 | 71% | 569 | 507 |
| | | | | | | 95% | 636 | 574 |
| | | | | | | 72% | 790 | 647 |
| HATAL05 | 847023 | 658 | WUblastx.64 | (Q9ER61) MDM2 BINDING PROTEIN. | Q9ER61 | 68% | 10 | 876 |
| HATCF80 | 780460 | 661 | WUblastx.64 | (Q99LV8) UNKNOWN (PROTEIN FOR IMAGE: 3489486) | Q99LV8 | 78% | 9 | 479 |
| | | | | (FRAGMENT). | | | | |
| HATCI67 | 847024 | 662 | WUblastx.64 | (Q9UHU3) PRO1659. | Q9UHU3 | 85% | 214 | 528 |
| HATDH23 | 603959 | 668 | WUblastx.64 | (O43439) MTG8-LIKE PROTEIN (MTG8 RELATED PROTEIN) | O43439 | 98% | 1 | 348 |
| | | | | (EHT) (EHT PROTEIN) | | | | |
| HATDO84 | 609850 | 670 | WUblastx.64 | (Q9NX85) CDNA FLJ20378 FIS, CLONE KAIA0536. | Q9NX85 | 58% | 798 | 646 |
| | | | | | | 77% | 919 | 812 |
| HATDU01 | 847028 | 671 | WUblastx.64 | (Q9H387) PRO2550. | Q9H387 | 81% | 1257 | 1225 |
| | | | | | | 58% | 1198 | 974 |
| HAUCC84 | 830672 | 677 | WUblastx.64 | (O75353) ANTI-DEATH PROTEIN. | O75353 | 72% | 44 | 259 |
| | | | | | | 98% | 250 | 498 |
| HAWAS41 | 877621 | 678 | WUblastx.64 | (Q9BGV8) HYPOTHETICAL 10.0 KDA PROTEIN. | Q9BGV8 | 66% | 754 | 930 |
| HAWBA65 | 542056 | 679 | WUblastx.64 | (Q24333) ELASTIN LIKE PROTEIN (FRAGMENT). | Q24333 | 100% | 41 | 112 |
| HBAGH64 | 801884 | 680 | WUblastx.64 | (Q14287) HYPOTHETICAL PROTEIN (FRAGMENT). | Q14287 | 37% | 810 | 568 |
| HBBBA42 | 841010 | 684 | WUblastx.64 | (Q9UIL1) HRIHFB2072 PROTEIN (FRAGMENT). | Q9UIL1 | 58% | 3 | 263 |
| | | | | | | 57% | 6 | 269 |
| HBCAQ48 | 525002 | 690 | WUblastx.64 | (O75528) ADA3-LIKE PROTEIN. | O75528 | 84% | 73 | 345 |
| HBGBE75 | 897455 | 694 | WUblastx.64 | (O60830) MITOCHONDRIAL IMPORT INNER MEMBRANE | I17B_HUMAN | 97% | 98 | 307 |
| | | | | TRANSLOCASE SU | | | | |
| HBHAA53 | 603183 | 699 | WUblastx.64 | (Q9N083) UNNAMED PORTEIN PRODUCT. | Q9N083 | 65% | 439 | 326 |
| | | | | | | 68% | 594 | 415 |
| HBIAU43 | 840354 | 700 | WUblastx.64 | (Q9UI59) PRO0478 PROTEIN. | Q9UI59 | 76% | 1109 | 1225 |
| HBIAW58 | 596805 | 701 | WUblastx.64 | (Q9H728) CDNA: FLJ21463 FIS, CLONE COL04765. | Q9H728 | 66% | 1268 | 1188 |
| | | | | | | 77% | 1335 | 1270 |
| | | | | | | 68% | 1486 | 1337 |
| HBIBF26 | 845743 | 703 | WUblastx.64 | (Q9NQQ7) BA394O2.1 (CGI-15 PROTEIN). | Q9NQQ7 | 76% | 1214 | 1405 |
| | | | | | | 74% | 804 | 1223 |
| | | | | | | 47% | 780 | 845 |
| | | | | | | 78% | 313 | 825 |
| HBIBQ69 | 580807 | 706 | WUblastx.64 | (BAB55217) CDNA FLJ14686 fis, clone NT2RP2004961, m | BAB55217 | 94% | 671 | 724 |
| | | | | | | 100% | 721 | 810 |
| HBIBR38 | 612783 | 707 | WUblastx.64 | (Q9NX17) CDNA FLJ20489 FIS, CLONE KAT08285. | Q9NX17 | 73% | 802 | 503 |
| HBIBS33 | 590280 | 709 | WUblastx.64 | (Q9H960) CDNA FLJ12988 FIS, CLONE NT2RP3000080. | Q9H960 | 62% | 595 | 452 |
| HBIBZ20 | 688861 | 711 | WUblastx.64 | (O75717) ACIDIC NUCLEOPLASMIC DNA-BINDING PROTEIN | O75717 | 99% | 229 | 603 |
| | | | | 1 (AND-1). | | | | |
| HBICB80 | 637516 | 712 | WUblastx.64 | (Q9BV17) SIMILAR TO CG9172 GENE PRODUCT. | Q9BV17 | 90% | 545 | 637 |
| | | | | | | 91% | 18 | 557 |
| HBJAC40 | 841235 | 713 | WUblastx.64 | (Q9P112) CHROMOSOME 16 OPEN READING FRAME 5. | Q9P112 | 100% | 8 | 73 |
| | | | | | | 36% | 5 | 70 |
| | | | | | | 57% | 11 | 52 |
| | | | | | | 53% | 85 | 180 |
| | | | | | | 100% | 192 | 632 |
| HBJAV56 | 603529 | 714 | WUblastx.64 | (Q9H387) PRO2550. | Q9H387 | 58% | 642 | 478 |
| | | | | | | 67% | 715 | 623 |
| | | | | | | 75% | 780 | 745 |
| HBJBR40 | 581104 | 717 | WUblastx.64 | (Q9GMX5) HYPOTHETICAL 12.9 KDA PROTEIN. | Q9GMX5 | 54% | 931 | 860 |
| | | | | | | 66% | 861 | 745 |
| HBJCH46 | 609859 | 718 | WUblastx.64 | conserved hypothetical protein PA5065 [imported] - Pseudomonas | pir\|D83014\|D83014 | 53% | 1070 | 900 |
| | | | | aeruginosa (strain PAO1) | | 78% | 900 | 1 |
| HBJCS26 | 821682 | 720 | WUblastx.64 | (Q9H0D4) HYPOTHETICAL 54.1 KDA PROTEIN. | Q9H0D4 | 92% | 227 | 1576 |
| HBJDR18 | 604907 | 723 | WUblastx.64 | (Q9H6G8) CDNA: FLJ22294 FIS, CLONE HRC04426. | Q9H6G8 | 81% | 940 | 875 |
| | | | | | | 77% | 1092 | 934 |
| HBJDR83 | 600395 | 724 | WUblastx.64 | (Q14273) POL/ENV ORF. | Q14273 | 71% | 559 | 621 |
| | | | | | | 60% | 813 | 902 |
| | | | | | | 68% | 614 | 718 |
| | | | | | | 41% | 1223 | 1291 |
| | | | | | | 62% | 14 | 556 |
| HBJEL21 | 866158 | 726 | WUblastx.64 | (Q9UQR1) ZINC FINGER PROTEIN 148 (ZINC FINGER DNA | Z148_HUMAN | 97% | 807 | 2063 |
| | | | | BINDING P | | | | |
| HBJFH84 | 836997 | 727 | WUblastx.64 | (Q9LM25) T10O22.22. | Q9LM25 | 30% | 118 | 921 |
| HBJFJ26 | 873844 | 3102 | WUblastx.64 | (Q9BWK5) UNKNOWN (PROTEIN FOR MGC: 5242). | Q9BWK5 | 94% | 657 | 758 |
| | | | | | | 100% | 336 | 389 |
| | | | | | | 100% | 427 | 657 |
| HBJHO83 | 610259 | 736 | HMMER 2.1.1 | PFAM: ENV polyprotein (coat polyprotein) | PF00429 | 40.5 | 207 | 389 |
| | | | WUblastx.64 | (Q85641) 3′ END OF THE GENOME OF MOLONEY MURINE | Q85641 | 85% | 2 | 61 |
| | | | | LEUKEMIA VIRUS (CODES | | 28% | 177 | 365 |
| | | | | | | 46% | 64 | 180 |
| HBJIR14 | 793391 | 741 | WUblastx.64 | (Q9H832) CDNA FLJ13968 FIS, CLONE Y79AA1001493, | Q9H832 | 91% | 134 | 871 |
| | | | | WEAKLY SIMILAR TO UBI | | | | |
| HBJJA26 | 743181 | 742 | WUblastx.64 | (Q9BRM8) UNKNOWN (PROTEIN FOR MGC: 13219). | Q9BRM8 | 47% | 647 | 423 |
| HBJND04 | 837242 | 745 | HMMER 2.1.1 | PFAM: Bacterial mutT protein | PF00293 | 26.2 | −360 | −479 |
| | | | WUblastx.64 | (Q9BW91) UNKNOWN (PROTEIN FOR MGC: 3037). | Q9BW91 | 91% | 309 | 1352 |
| HBJND57 | 612785 | 746 | WUblastx.64 | (Q9VCB4) CG17741 PROTEIN. | Q9VCB4 | 52% | 1 | 318 |
| HBKEE60 | 793788 | 749 | WUblastx.64 | pro-pol-dUTPase polyprotein - murine endogenous retrovirus ERV- | pir\|T29097\|T29097 | 64% | 97 | 204 |
| | | | | L (fragment) | | 39% | 3 | 128 |
| | | | | | | 62% | 273 | 620 |
| HBKEI41 | 827278 | 750 | WUblastx.64 | (BAB47402) CG10671-like. | BAB47402 | 100% | 436 | 465 |
| | | | | | | 90% | 596 | 757 |
| | | | | | | 59% | 498 | 623 |
| | | | | | | 77% | 5 | 436 |
| HBMBD51 | 842176 | 751 | WUblastx.64 | hypothetical protein DKFZp762E1511.1 - human (fragment) | pir\|T50632\|T50632 | 98% | 2197 | 2709 |
| HBMBD73 | 839564 | 752 | WUblastx.64 | MAP kinase 1 (EC 2.7.1.—) - human | pir\|JQ1400\|JQ1400 | 91% | 93 | 161 |
| | | | | | | 92% | 127 | 1137 |
| HBMBM17 | 637518 | 754 | WUblastx.64 | (Q9NX85) CDNA FLJ20378 FIS, CLONE KAIA0536. | Q9NX85 | 75% | 950 | 840 |
| | | | | | | 75% | 1083 | 949 |
| HBMCL59 | 608668 | 755 | WUblastx.64 | (Q9H728) CDNA: FLJ21463 FIS, CLONE COL04765. | Q9H728 | 45% | 630 | 472 |
| | | | | | | 60% | 796 | 608 |
| HBMCM96 | 821318 | 756 | WUblastx.64 | (Q9H728) CDNA: FLJ21463 FIS, CLONE COL04765. | Q9H728 | 57% | 2253 | 2155 |
| | | | | | | 63% | 2177 | 1971 |
| HBMCQ74 | 856461 | 757 | WUblastx.64 | (Q9JKP5) MUSCLEBLIND. | Q9JKP5 | 100% | 561 | 590 |
| | | | | | | 52% | 13 | 213 |
| | | | | | | 83% | 1 | 465 |
| HBMCQ74 | 864382 | 758 | WUblastx.64 | (Q9JKP5) MUSCLEBLIND. | Q9JKP5 | 100% | 561 | 590 |
| | | | | | | 52% | 13 | 213 |
| | | | | | | 83% | 1 | 465 |
| HBMDM08 | 837927 | 760 | WUblastx.64 | (Q9P0I2) 30 KDA PROTEIN. | Q9P0I2 | 94% | 190 | 972 |
| HBMSO30 | 843389 | 762 | WUblastx.64 | (Q9D4B1) 4933405A16RIK PROTEIN. | Q9D4B1 | 78% | 52 | 174 |
| HBMTM50 | 609988 | 763 | WUblastx.64 | (Q9NX85) CDNA FLJ20378 FIS, CLONE KAIA0536. | Q9NX85 | 76% | 763 | 689 |
| | | | | | | 55% | 962 | 765 |
| HBMUD59 | 701970 | 764 | WUblastx.64 | (Q9BR03) C367G8.2 (NOVEL PROTEIN) (FRAGMENT). | Q9BR03 | 91% | 9 | 647 |
| HBMUR39 | 647594 | 767 | WUblastx.64 | (Q9N083) UNNAMED PORTEIN PRODUCT. | Q9N083 | 55% | 883 | 803 |
| | | | | | | 39% | 810 | 577 |
| HBMWC39 | 523713 | 770 | WUblastx.64 | (Q9H728) CDNA: FLJ21463 FIS, CLONE COL04765. | Q9H728 | 71% | 1055 | 1117 |
| | | | | | | 67% | 820 | 1053 |
| HBMWS52 | 872553 | 772 | WUblastx.64 | (Q9H728) CDNA: FLJ21463 FIS, CLONE COL04765. | Q9H728 | 62% | 1341 | 997 |
| HBMXG01 | 689522 | 774 | WUblastx.64 | (Q9BGX7) HYPOTHETICAL 13.0 KDA PROTEIN. | Q9BGX7 | 58% | 838 | 885 |
| | | | | | | 71% | 900 | 1055 |
| HBMXG76 | 580812 | 775 | WUblastx.64 | probable phosphodiesterase I (EC 3.1.4.1) - human (fragment) | pir\|T43461\|T43461 | 98% | 37 | 222 |
| HBMXW83 | 725335 | 777 | WUblastx.64 | glutamate-cysteine ligase (EC 6.3.2.2) heavy chain - human | pir\|JH0611\|JH0611 | 100% | 492 | 584 |
| | | | | | | 90% | 373 | 498 |
| HBNAE74 | 637524 | 778 | WUblastx.64 | (Q9NU78) DJ622L5.7.1 (NOVEL PROTEIN (ISOFORM 1)). | Q9NU78 | 100% | 6 | 146 |
| HBNAX16 | 843727 | 779 | WUblastx.64 | (Q9BT21) SIMILAR TO RIKEN CDNA 2610005L19 GENE | Q9BT21 | 92% | 360 | 2639 |
| | | | | (FRAGMENT). | | | | |
| HBODK40 | 852382 | 781 | WUblastx.64 | (Q9Y6B7) ADAPTER-RELATED PROTEIN COMPLEX 4 BETA | A4B1_HUMAN | 89% | 55 | 696 |
| | | | | 1 SUBUNIT ( | | 99% | 674 | 1741 |
| HBODV76 | 866420 | 782 | WUblastx.64 | (O60662) KELCH-RELATED PROTEIN 1 (KEL-LIKE PROTEIN | KRP1_HUMAN | 83% | 474 | 902 |
| | | | | 23) (SAR | | 100% | 71 | 475 |
| | | | | | | 96% | 808 | 1905 |
| HBPAF39 | 850786 | 784 | WUblastx.64 | (Q9NX85) CDNA FLJ20378 FIS, CLONE KAIA0536. | Q9NX85 | 51% | 1217 | 849 |
| HBQAC72 | 799512 | 786 | WUblastx.64 | transcription factor znf6 - human | pir\|S25409\|S25409 | 90% | 2072 | 1110 |
| | | | | | | 33% | 1844 | 1227 |
| | | | | | | 30% | 2024 | 1215 |
| | | | | | | 30% | 1757 | 1194 |
| | | | | | | 31% | 1844 | 1401 |
| HBSAJ63 | 848683 | 788 | WUblastx.64 | (BAB55144) CDNA FLJ14576 fis, clone NT2RM4001092, w | BAB55144 | 92% | 11 | 406 |
| HBSDD24 | 839802 | 790 | WUblastx.64 | (Q9UJ70) N-ACETYLGLUCOSAMINE KINASE PROTEIN (EC | Q9UJ70 | 100% | 886 | 1251 |
| | | | | 2.7.1.59). | | | | |
| HBWBD25 | 800765 | 791 | WUblastx.64 | (O08872) PUTATIVE RNA BINDING PROTEIN 1 (FRAGMENT). | O08872 | 49% | 850 | 698 |
| | | | | | | 30% | 1473 | 853 |
| HBXAS93 | 836513 | 792 | WUblastx.64 | (Q14940) SODIUM/HYDROGEN EXCHANGER 5 (NA(+)/H(+) | NAH5_HUMAN | 85% | 532 | 1023 |
| | | | | EXCHANGER | | 78% | 2 | 238 |
| | | | | | | 90% | 256 | 321 |
| HBXAW57 | 815650 | 794 | WUblastx.64 | (Q9N083) UNNAMED PORTEIN PRODUCT. | Q9N083 | 56% | 1223 | 1071 |
| HBXBM78 | 812527 | 797 | WUblastx.64 | (Q9Y613) FH1/FH2 DOMAINS-CONTAINING PROTEIN | FHOS_HUMAN | 84% | 846 | 259 |
| | | | | (FORMIN HOMOLOG | | 28% | 2503 | 2138 |
| | | | | | | 100% | 1004 | 852 |
| | | | | | | 97% | 1903 | 1046 |
| | | | | | | 100% | 2311 | 2042 |
| | | | | | | 42% | 2184 | 2122 |
| | | | | | | 28% | 1777 | 1334 |
| | | | | | | 55% | 2520 | 2248 |
| HBXCD59 | 860439 | 798 | WUblastx.64 | (Q9C026) TRIPARTITE MOTIF PROTEIN TRIM9 ISOFORM | Q9C026 | 99% | 59 | 823 |
| | | | | BETA. | | | | |
| HBXCG08 | 628501 | 800 | WUblastx.64 | (Q9BSG3) UNKNOWN (PROTEIN FOR MGC: 12974). | Q9BSG3 | 98% | 758 | 1024 |
| HBXCM52 | 799513 | 801 | WUblastx.64 | (Q9BH03) HYPOTHETICAL 12.0 KDA PROTEIN. | Q9BH03 | 53% | 683 | 850 |
| | | | | | | 73% | 784 | 942 |
| | | | | | | 80% | 903 | 1028 |
| HBXCQ03 | 589516 | 802 | WUblastx.64 | (Q9Y296) PTD009 (HSPC172). | Q9Y296 | 100% | 382 | 672 |
| | | | | | | 100% | 17 | 382 |
| HBXDN08 | 566765 | 806 | WUblastx.64 | (O43597) SPROUTY HOMOLOG 2 (SPRY-2). | SPY2_HUMAN | 100% | 8 | 256 |
| HBXDN65 | 840021 | 807 | WUblastx.64 | (Q9H387) PRO2550. | Q9H387 | 75% | 1925 | 1641 |
| HBXFA04 | 842901 | 808 | WUblastx.64 | (AAH08467) Similar to RIKEN cDNA 1110001J03 gene. | AAH08467 | 95% | 287 | 499 |
| HBXFE64 | 838824 | 809 | WUblastx.64 | (Q9H728) CDNA: FLJ21463 FIS, CLONE COL04765. | Q9H728 | 57% | 1646 | 1320 |
| HBXFP72 | 688040 | 811 | WUblastx.64 | (Q9H754) CDNA: FLJ21308 FIS, CLONE COL02131. | Q9H754 | 93% | 7 | 1155 |
| HBXFS31 | 815651 | 812 | WUblastx.64 | (Q9NX17) CDNA FLJ20489 FIS, CLONE KAT08285. | Q9NX17 | 65% | 469 | 678 |
| | | | | | | 70% | 1551 | 1261 |
| HBXFW01 | 847001 | 813 | HMMER 2.1.1 | PFAM: Stathmin family | PF00836 | 185.7 | 266 | 523 |
| | | | WUblastx.64 | (Q9H169) RB3 PROTEIN (HYPOTHETICAL 22.1 KDA | Q9H169 | 100% | 523 | 690 |
| | | | | PROTEIN). | | 100% | 125 | 523 |
| HBXGE12 | 1310891 | 814 | WUblastx.64 | (O95902) UNKNOWN (FRAGMENT). | O95902 | 100% | 31 | 411 |
| HBXGE12 | 745398 | 3103 | WUblastx.64 | (AF131851) Unknown [Homo sapiens] | gb\|AAD20061.1\| | 100% | 10 | 390 |
| HBXGL91 | 901845 | 815 | WUblastx.64 | (Q9H2J7) ORPHAN NEUROTRANSMITTER TRANSPORTER | Q9H2J7 | 100% | 949 | 1470 |
| | | | | V7-3. | | 100% | 10 | 99 |
| | | | | | | 95% | 389 | 979 |
| HBXGM24 | 821320 | 816 | WUblastx.64 | hypothetical protein (L1H 3′ region) - human | pir\|B34087\|B34087 | 77% | 712 | 647 |
| | | | | | | 46% | 740 | 660 |
| | | | | | | 48% | 639 | 475 |
| | | | | | | 57% | 85 | 23 |
| | | | | | | 64% | 530 | 84 |
| HCBAB34 | 847002 | 821 | WUblastx.64 | (Q9BWF8) UNKNOWN (PROTEIN FOR IMAGE: 3355813) | Q9BWF8 | 95% | 1009 | 1308 |
| | | | | (FRAGMENT). | | 98% | 814 | 963 |
| | | | | | | 95% | 680 | 823 |
| | | | | | | 60% | 29 | 583 |
| HCDAH02 | 653066 | 825 | WUblastx.64 | (BAB55208) CDNA FLJ14668 fis, clone NT2RP2003194. | BAB55208 | 81% | 655 | 491 |
| | | | | | | 83% | 492 | 241 |
| HCDAP33 | 566794 | 826 | WUblastx.64 | (O75964) ATP SYNTHASE G CHAIN, MITOCHONDRIAL (EC | ATPN_HUMAN | 73% | 407 | 664 |
| | | | | 3.6.1.34) | | | | |
| HCDAR40 | 654821 | 827 | WUblastx.64 | (Q9P195) PRO1722. | Q9P195 | 63% | 837 | 514 |
| HCDAS02 | 896667 | 828 | WUblastx.64 | (O75153) PUTATIVE EUKARYOTIC TRANSLATION | IF3X_HUMAN | 89% | 79 | 867 |
| | | | | INITIATION FACTOR | | | | |
| HCDBO32 | 831942 | 830 | WUblastx.64 | (AAH17472) Hypothetical 21.3 kDa protein. | AAH17472 | 69% | 643 | 801 |
| | | | | | | 100% | 239 | 583 |
| HCDBW67 | 733860 | 831 | WUblastx.64 | (Q9H410) DJ469A13.2 (NOVEL PROTEIN) (FRAGMENT). | Q9H410 | 97% | 43 | 255 |
| HCDCB03 | 571037 | 833 | HMMER 2.1.1 | PFAM: Zinc carboxypeptidase | PF00246 | 103.3 | 35 | 337 |
| | | | WUblastx.64 | carboxypeptidase H (EC 3.4.17.10) precursor - human | pir\|S09489\|S09489 | 91% | 657 | 728 |
| | | | | | | 66% | 11 | 664 |
| HCDCE51 | 813504 | 834 | WUblastx.64 | (Q9N083) UNNAMED PORTEIN PRODUCT. | Q9N083 | 55% | 1016 | 837 |
| HCDCI42 | 847004 | 835 | WUblastx.64 | (Q9UHD2) TANK BINDING KINASE TBK1 (NF-KB- | Q9UHD2 | 100% | 678 | 875 |
| | | | | ACTIVATING KINASE NAK). | | | | |
| HCDDB15 | 841041 | 836 | WUblastx.64 | (Q9BW53) UNKNOWN (PROTEIN FOR IMAGE: 3343149) | Q9BW53 | 100% | 98 | 703 |
| | | | | (FRAGMENT). | | | | |
| HCDDY28 | 892137 | 838 | WUblastx.64 | (Q14287) HYPOTHETICAL PROTEIN (FRAGMENT). | Q14287 | 55% | 1458 | 1312 |
| | | | | | | 60% | 1312 | 1013 |
| HCDEB19 | 587264 | 839 | WUblastx.64 | nuclear matrix protein NMP 238 - human | pir\|JE0334\|JE0334 | 100% | 1218 | 1436 |
| | | | | | | 93% | 426 | 470 |
| | | | | | | 99% | 473 | 829 |
| | | | | | | 98% | 76 | 438 |
| | | | | | | 31% | 605 | 700 |
| | | | | | | 31% | 1335 | 1430 |
| | | | | | | 91% | 838 | 1218 |
| HCDES69 | 609997 | 841 | WUblastx.64 | (Q9H8N2) CDNA FLJ13381 FIS, CLONE PLACE1001010. | Q9H8N2 | 61% | 524 | 423 |
| | | | | | | 62% | 687 | 553 |
| HCE1D45 | 664481 | 842 | WUblastx.64 | (Q9UDU0) WUGSC: H_DJ400N23.1 PROTEIN (ZINC FINGER | Q9UDU0 | 84% | 10 | 279 |
| | | | | SARCOMA GENE LONG A | | | | |
| HCE1T53 | 843680 | 844 | WUblastx.64 | (Q9NX17) CDNA FLJ20489 FIS, CLONE KAT08285. | Q9NX17 | 71% | 725 | 663 |
| | | | | | | 65% | 843 | 739 |
| | | | | | | 92% | 1450 | 1412 |
| | | | | | | 67% | 1409 | 1140 |
| HCE1Y27 | 637529 | 845 | WUblastx.64 | (O95741) COPINE VI (NEURONAL-COPINE) (N-COPINE). | CNE6_HUMAN | 80% | 887 | 946 |
| | | | | | | 98% | 519 | 896 |
| | | | | | | 95% | 901 | 1353 |
| | | | | | | 93% | 16 | 561 |
| HCE1Y34 | 809084 | 846 | WUblastx.64 | (Q9NX85) CDNA FLJ20378 FIS, CLONE KAIA0536. | Q9NX85 | 61% | 1718 | 1680 |
| | | | | | | 51% | 1680 | 1411 |
| HCE2E47 | 886155 | 848 | WUblastx.64 | (Q9H387) PRO2550. | Q9H387 | 72% | 1254 | 1448 |
| | | | | | | 67% | 1450 | 1533 |
| HCE2P90 | 737935 | 850 | WUblastx.64 | (AAH07558) Unknown (protein for MGC: 15483). | AAH07558 | 47% | 792 | 896 |
| | | | | | | 42% | 640 | 795 |
| HCE3C46 | 737889 | 852 | WUblastx.64 | (Q9NX17) CDNA FLJ20489 FIS, CLONE KAT08285. | Q9NX17 | 41% | 186 | 260 |
| | | | | | | 62% | 751 | 1032 |
| HCE3D58 | 873227 | 853 | WUblastx.64 | (Q9H026) HYPOTHETICAL 16.0 KDA PROTEIN (FRAGMENT). | Q9H026 | 70% | 421 | 879 |
| HCE3N23 | 810211 | 857 | WUblastx.64 | (Q9D2L0) 4833417L20RIK PROTEIN. | Q9D2L0 | 42% | 1150 | 1539 |
| | | | | | | 38% | 1147 | 1536 |
| | | | | | | 71% | 423 | 590 |
| | | | | | | 70% | 913 | 1044 |
| | | | | | | 55% | 584 | 925 |
| | | | | | | 54% | 916 | 1047 |
| | | | | | | 44% | 370 | 423 |
| | | | | | | 58% | 863 | 913 |
| | | | | | | 72% | 77 | 358 |
| HCE3R01 | 834836 | 858 | WUblastx.64 | (O95251) HISTONE ACETYLTRANSFERASE. | O95251 | 76% | 6 | 320 |
| | | | | | | 84% | 68 | 1111 |
| HCE3R01 | 841472 | 859 | WUblastx.64 | (O95251) HISTONE ACETYLTRANSFERASE. | O95251 | 76% | 6 | 320 |
| | | | | | | 84% | 68 | 1111 |
| HCE3R01 | 844574 | 860 | WUblastx.64 | (O95251) HISTONE ACETYLTRANSFERASE. | O95251 | 76% | 6 | 320 |
| | | | | | | 84% | 68 | 1111 |
| HCE3R46 | 844450 | 861 | WUblastx.64 | (O95894) UNKNOWN (DERP2). | O95894 | 91% | 131 | 1165 |
| HCE4H32 | 843941 | 862 | WUblastx.64 | (Q9NVF5) CDNA FLJ10769 FIS, CLONE NT2RP4000151. | Q9NVF5 | 92% | 926 | 964 |
| | | | | | | 65% | 964 | 1104 |
| | | | | | | 64% | 73 | 402 |
| | | | | | | 94% | 333 | 893 |
| HCE4H32 | 874256 | 863 | WUblastx.64 | (Q9P0P1) HSPC237. | Q9P0P1 | 100% | 1260 | 1322 |
| | | | | | | 100% | 1325 | 1765 |
| HCE4W88 | 792953 | 865 | WUblastx.64 | (Q9Y5W4) MLL SEPTIN-LIKE FUSION PROTEIN (CELL | Q9Y5W4 | 100% | 3676 | 2003 |
| | | | | DIVISION CONTROL PROTEI | | | | |
| HCE5B62 | 566864 | 866 | WUblastx.64 | (O60448) NEURONAL THREAD PROTEIN AD7C-NTP. | O60448 | 70% | 1011 | 850 |
| | | | | | | 47% | 1056 | 757 |
| | | | | | | 64% | 1653 | 1486 |
| | | | | | | 58% | 1563 | 1441 |
| | | | | | | 47% | 953 | 810 |
| | | | | | | 70% | 1470 | 1420 |
| | | | | | | 34% | 820 | 725 |
| | | | | | | 40% | 1023 | 943 |
| | | | | | | 62% | 956 | 855 |
| | | | | | | 58% | 778 | 728 |
| | | | | | | 58% | 1553 | 1425 |
| | | | | | | 63% | 1653 | 1546 |
| | | | | | | 61% | 1632 | 1579 |
| | | | | | | 38% | 1631 | 1500 |
| | | | | | | 36% | 981 | 748 |
| | | | | | | 55% | 1696 | 1637 |
| | | | | | | 56% | 1505 | 1410 |
| | | | | | | 50% | 1496 | 1431 |
| | | | | | | 45% | 823 | 725 |
| | | | | | | 59% | 846 | 781 |
| | | | | | | 61% | 995 | 834 |
| | | | | | | 43% | 1557 | 1420 |
| | | | | | | 84% | 1683 | 1645 |
| | | | | | | 62% | 1673 | 1425 |
| HCE5H86 | 847032 | 867 | WUblastx.64 | (O95637) WW DOMAIN BINDING PROTEIN-1. | O95637 | 83% | 1574 | 2107 |
| | | | | | | 66% | 847 | 1248 |
| | | | | | | 66% | 1300 | 1539 |
| HCE5J64 | 688883 | 868 | WUblastx.64 | (Q9GMX5) HYPOTHETICAL 12.9 KDA PROTEIN. | Q9GMX5 | 64% | 2021 | 2122 |
| | | | | | | 56% | 1903 | 2031 |
| HCEBF54 | 847033 | 869 | WUblastx.64 | (Q9NQ43) HYPOTHETICAL 18.4 KDA PROTEIN (FRAGMENT). | Q9NQ43 | 100% | 338 | 583 |
| HCEDN07 | 847034 | 874 | WUblastx.64 | (Q9H387) PRO2550. | Q9H387 | 93% | 1256 | 1212 |
| | | | | | | 86% | 1186 | 1121 |
| | | | | | | 71% | 1410 | 1255 |
| HCEEG48 | 896688 | 876 | WUblastx.64 | (AAK55521) PRO0764. | AAK55521 | 70% | 919 | 680 |
| HCEEM33 | 821322 | 877 | WUblastx.64 | hypothetical protein DKFZp434G0511.1 - human | pir\|T46310\|T46310 | 100% | 3 | 746 |
| HCEFA94 | 822850 | 882 | WUblastx.64 | (Q9BGW3) HYPOTHETICAL 13.5 KDA PROTEIN. | Q9BGW3 | 56% | 1066 | 1224 |
| HCEFG93 | 745400 | 884 | WUblastx.64 | (Q9H387) PRO2550. | Q9H387 | 66% | 1178 | 1134 |
| | | | | | | 80% | 1114 | 1052 |
| | | | | | | 76% | 1323 | 1186 |
| HCEFH31 | 801890 | 885 | WUblastx.64 | (Q9ULW1) SPONDIN 2. | Q9ULW1 | 100% | 1503 | 1685 |
| HCEFK56 | 872554 | 886 | WUblastx.64 | (Q9UIU2) DYNACTIN 1 P150 ISOFORM. | Q9UIU2 | 92% | 7 | 2088 |
| HCEGK81 | 844452 | 890 | WUblastx.64 | (Q9H387) PRO2550. | Q9H387 | 88% | 524 | 649 |
| | | | | | | 68% | 390 | 455 |
| | | | | | | 76% | 487 | 525 |
| HCEGS49 | 846298 | 891 | WUblastx.64 | (O60448) NEURONAL THREAD PROTEIN AD7C-NTP. | O60448 | 42% | 711 | 529 |
| | | | | | | 92% | 651 | 610 |
| | | | | | | 61% | 856 | 710 |
| | | | | | | 72% | 870 | 838 |
| | | | | | | 66% | 721 | 659 |
| | | | | | | 61% | 872 | 711 |
| | | | | | | 68% | 857 | 579 |
| HCEGY33 | 753258 | 893 | WUblastx.64 | (O75843) ADAPTER-RELATED PROTEIN COMPLEX 1 | A1G2_HUMAN | 97% | 1131 | 988 |
| | | | | GAMMA 2 SUBUNIT | | 89% | 873 | 760 |
| | | | | | | 100% | 1396 | 1274 |
| | | | | | | 68% | 393 | 256 |
| | | | | | | 96% | 603 | 523 |
| | | | | | | 98% | 2024 | 1818 |
| HCEHW24 | 560610 | 894 | WUblastx.64 | (Q9BGX7) HYPOTHETICAL 13.0 KDA PROTEIN. | Q9BGX7 | 55% | 1001 | 1297 |
| HCEJL08 | 722208 | 895 | WUblastx.64 | (AAH08203) Chromosome X open reading frame 12. | AAH08203 | 59% | 36 | 170 |
| | | | | | | 96% | 581 | 775 |
| | | | | | | 58% | 2 | 103 |
| | | | | | | 79% | 130 | 570 |
| HCELB04 | 847375 | 897 | WUblastx.64 | (Q9P290) POTENT BRAIN TYPE ORGANIC ION | Q9P290 | 96% | 994 | 1083 |
| | | | | TRANSPORTER. | | 94% | 156 | 263 |
| | | | | | | 71% | 677 | 1024 |
| | | | | | | 100% | 317 | 544 |
| | | | | | | 62% | 1106 | 1177 |
| | | | | | | 73% | 500 | 544 |
| | | | | | | 75% | 1064 | 1579 |
| HCEMA08 | 846468 | 898 | WUblastx.64 | ATPase inhibitor precursor, mitochondrial - human | pir\|JC7175\|JC7175 | 65% | 1599 | 1739 |
| | | | | | | 100% | 67 | 216 |
| HCENQ22 | 740746 | 900 | WUblastx.64 | (Q9H926) CDNA FLJ13059 FIS, CLONE NT2RP3001589. | Q9H926 | 80% | 1086 | 934 |
| HCEOF01 | 564906 | 901 | WUblastx.64 | (Q9H728) CDNA: FLJ21463 FIS, CLONE COL04765. | Q9H728 | 50% | 1669 | 1586 |
| | | | | | | 75% | 1551 | 1366 |
| HCEOF01 | 850521 | 902 | WUblastx.64 | (Q9H728) CDNA: FLJ21463 FIS, CLONE COL04765. | Q9H728 | 50% | 1668 | 1585 |
| | | | | | | 75% | 1550 | 1365 |
| HCEOV48 | 850681 | 905 | WUblastx.64 | (Q9DA75) 1700018O18RIK PROTEIN. | Q9DA75 | 83% | 1344 | 1739 |
| | | | | | | 76% | 193 | 1311 |
| HCEPO08 | 637543 | 907 | WUblastx.64 | ribosomal protein L29, cytosolic - human | pir\|S65784\|S65784 | 100% | 614 | 504 |
| | | | | | | 64% | 516 | 145 |
| HCESB03 | 812940 | 908 | WUblastx.64 | (Q9HD86) NAG18. | Q9HD86 | 76% | 729 | 857 |
| HCETL19 | 702090 | 911 | WUblastx.64 | retrovirus-related env polyprotein pseudogene - human | pir\|E24483\|VCHUER | 79% | 580 | 464 |
| HCFAT42 | 815652 | 915 | WUblastx.64 | (Q9G6T1) CYTOCHROME OXIDASE SUBUNIT 3. | Q9G6T1 | 79% | 699 | 884 |
| | | | | | | 47% | 369 | 431 |
| HCFAT66 | 821337 | 916 | WUblastx.64 | (Q9HAD8) CDNA FLJ11786 FIS, CLONE HEMBA1006036. | Q9HAD8 | 64% | 1754 | 1662 |
| | | | | | | 69% | 1641 | 1453 |
| HCFBA30 | 608166 | 917 | WUblastx.64 | (Q9BU56) UNKNOWN (PROTEIN FOR IMAGE: 3940029) | Q9BU56 | 75% | 357 | 692 |
| | | | | (FRAGMENT). | | 45% | 192 | 245 |
| HCFBM77 | 604576 | 918 | WUblastx.64 | (O60448) NEURONAL THREAD PROTEIN AD7C-NTP. | O60448 | 59% | 729 | 664 |
| | | | | | | 75% | 880 | 719 |
| | | | | | | 77% | 865 | 605 |
| HCFCB72 | 824165 | 920 | WUblastx.64 | (Q9NX85) CDNA FLJ20378 FIS, CLONE KAIA0536. | Q9NX85 | 63% | 1537 | 1370 |
| | | | | | | 59% | 1707 | 1555 |
| HCFCG91 | 897509 | 921 | WUblastx.64 | (Q9V677) CG8858 PROTEIN. | Q9V677 | 47% | 53 | 511 |
| | | | | | | 32% | 786 | 2780 |
| | | | | | | 43% | 492 | 785 |
| | | | | | | 24% | 480 | 950 |
| | | | | | | 23% | 1269 | 1565 |
| | | | | | | 21% | 1275 | 1643 |
| | | | | | | 26% | 1800 | 1922 |
| HCFCM81 | 847378 | 922 | WUblastx.64 | (O00398) PUTATIVE PURINERGIC RECEPTOR P2Y10. | O00398 | 96% | 281 | 1297 |
| HCFLJ52 | 1307037 | 928 | WUblastx.64 | (O00466) K12 PROTEIN PRECURSOR. | O00466 | 95% | 362 | 418 |
| | | | | | | 100% | 415 | 561 |
| | | | | | | 100% | 121 | 372 |
| HCFLJ52 | 753260 | 3104 | WUblastx.64 | (AX055560) unnamed protein product [Homo sapiens] | emb\|CAC22100.1\| | 100% | 91 | 126 |
| | | | | | | 56% | 14 | 94 |
| | | | | | | 98% | 123 | 287 |
| HCFLY20 | 786452 | 932 | WUblastx.64 | hypothetical protein DKFZp434J0310.1 - human | pir\|T46299\|T46299 | 85% | 57 | 380 |
| | | | | | | 93% | 437 | 784 |
| | | | | | | 65% | 936 | 1022 |
| | | | | | | 40% | 167 | 226 |
| | | | | | | 76% | 757 | 936 |
| HCFLY20 | 858875 | 933 | WUblastx.64 | hypothetical protein DKFZp434J0310.1 - human | pir\|T46299\|T46299 | 85% | 68 | 391 |
| | | | | | | 72% | 959 | 1033 |
| | | | | | | 40% | 178 | 237 |
| | | | | | | 89% | 448 | 951 |
| HCFMX16 | 581042 | 938 | WUblastx.64 | (Q9BGW3) HYPOTHETICAL 13.5 KDA PROTEIN. | Q9BGW3 | 54% | 304 | 29 |
| HCFMX88 | 825989 | 939 | WUblastx.64 | (Q9HAD8) CDNA FLJ11786 FIS, CLONE HEMBA1006036. | Q9HAD8 | 71% | 1068 | 1130 |
| | | | | | | 77% | 853 | 945 |
| | | | | | | 69% | 959 | 1066 |
| HCFNM40 | 746864 | 940 | WUblastx.64 | catalase (EC 1.11.1.6) - Campylobacter jejuni | pir\|I40767\|I40767 | 84% | 246 | 130 |
| HCFNM50 | 732010 | 941 | WUblastx.64 | (Q9NX17) CDNA FLJ20489 FIS, CLONE KAT08285. | Q9NX17 | 75% | 1258 | 1103 |
| HCFNN75 | 762959 | 943 | WUblastx.64 | (Q9BGZ4) HYPOTHETICAL 11.6 KDA PROTEIN. | Q9BGZ4 | 56% | 821 | 696 |
| HCGBA15 | 604603 | 946 | WUblastx.64 | (AAK55521) PRO0764. | AAK55521 | 81% | 791 | 726 |
| | | | | | | 80% | 925 | 881 |
| | | | | | | 80% | 724 | 662 |
| | | | | | | 65% | 903 | 790 |
| HCHAC68 | 610370 | 947 | HMMER 2.1.1 | PFAM: Ank repeat | PF00023 | 58.1 | 462 | 560 |
| | | | WUblastx.64 | (Q9Y290) RELA ASSOCIATED INHIBITOR. | Q9Y290 | 90% | 201 | 770 |
| | | | | | | 93% | 52 | 96 |
| | | | | | | 100% | 770 | 871 |
| | | | | | | 70% | 6 | 50 |
| HCHBP49 | 892141 | 948 | WUblastx.64 | hypothetical protein DKFZp761H229.1 - human (fragment) | pir\|T47147\|T47147 | 91% | 8 | 457 |
| HCHCG33 | 862534 | 950 | WUblastx.64 | (Q9H728) CDNA: FLJ21463 FIS, CLONE COL04765. | Q9H728 | 66% | 2068 | 1988 |
| | | | | | | 75% | 2285 | 2073 |
| HCHMY57 | 833049 | 951 | WUblastx.64 | (Q9BV10) UNKNOWN (PROTEIN FOR MGC: 3136). | Q9BV10 | 84% | 12 | 1202 |
| HCHOC06 | 688042 | 952 | WUblastx.64 | (Q9BZH7) GASTRIC CANCER-RELATED PROTEIN VRG107. | Q9BZH7 | 75% | 131 | 424 |
| HCHOY52 | 837297 | 953 | WUblastx.64 | (Q9BT25) UNKNOWN (PROTEIN FOR IMAGE: 3636299) | Q9BT25 | 89% | 27 | 1223 |
| | | | | (FRAGMENT). | | | | |
| HCHQB93 | 793648 | 954 | WUblastx.64 | GTP-binding protein 2 - human (fragment) | pir\|PC7084\|PC7084 | 89% | 767 | 985 |
| | | | | | | 92% | 258 | 788 |
| | | | | | | 86% | 2 | 46 |
| | | | | | | 37% | 36 | 143 |
| | | | | | | 100% | 61 | 258 |
| HCHQB93 | 875853 | 955 | WUblastx.64 | GTP-binding protein 2 - human (fragment) | pir\|PC7084\|PC7084 | 89% | 767 | 985 |
| | | | | | | 92% | 258 | 788 |
| | | | | | | 86% | 2 | 46 |
| | | | | | | 37% | 36 | 143 |
| | | | | | | 100% | 61 | 258 |
| HCLCU75 | 862406 | 957 | WUblastx.64 | (Q24333) ELASTIN LIKE PROTEIN (FRAGMENT). | Q24333 | 95% | 51 | 122 |
| HCMSA37 | 598712 | 958 | WUblastx.64 | (Q9UHS7) PRO1992. | Q9UHS7 | 63% | 902 | 795 |
| HCMSR07 | 821338 | 959 | WUblastx.64 | (Q9UI59) PRO0478 PROTEIN. | Q9UI59 | 91% | 1388 | 1489 |
| HCNSF01 | 901060 | 964 | WUblastx.64 | (Q9Y6N5) HYPOTHETICAL 50.0 KDA PROTEIN. | Q9Y6N5 | 100% | 107 | 1456 |
| HCPAE41 | 799546 | 967 | WUblastx.64 | (Q9P0P0) HSPC238 (HYPOTHETICAL 17.9 KDA PROTEIN). | Q9P0P0 | 81% | 490 | 443 |
| | | | | | | 73% | 444 | 31 |
| HCQAS72 | 828082 | 970 | WUblastx.64 | (AAK58423) PC2-glutamine-rich-associated protein. | AAK58423 | 91% | 22 | 57 |
| | | | | | | 93% | 1010 | 1054 |
| | | | | | | 100% | 57 | 119 |
| | | | | | | 71% | 122 | 463 |
| HCQBM95 | 841011 | 971 | WUblastx.64 | ribosomal protein L39, cytosolic [validated] - rat | pir\|JC4229\|R6RT39 | 84% | 409 | 447 |
| | | | | | | 88% | 282 | 389 |
| HCRAI29 | 844084 | 979 | WUblastx.64 | hypothetical protein (L1H 3′ region) - human | pir\|B34087\|B34087 | 34% | 329 | 132 |
| | | | | | | 56% | 48 | 1 |
| | | | | | | 39% | 493 | 305 |
| | | | | | | 61% | 89 | 12 |
| HCRBL20 | 709660 | 981 | WUblastx.64 | (Q9NWM9) CDNA FLJ20730 FIS, CLONE HEP10359. | Q9NWM9 | 94% | 1 | 678 |
| HCRBX84 | 1007105 | 982 | WUblastx.64 | (Q9H1F6) DJ453C12.6.1 (UNCHARACTERIZED | Q9H1F6 | 91% | 37 | 177 |
| | | | | HYPOTHALAMUS PROTEIN (ISOFORM | | 63% | 51 | 617 |
| HCRMA24 | 897005 | 983 | WUblastx.64 | hypothetical protein DKFZp564J2123.1 - human (fragment) | pir\|T08683\|T08683 | 100% | 388 | 591 |
| HCRMR35 | 849071 | 984 | WUblastx.64 | (Q9H175) HYPOTHETICAL 59.6 KDA PROTEIN. | Q9H175 | 48% | 43 | 858 |
| HCRMR35 | 874743 | 985 | WUblastx.64 | (Q9H175) HYPOTHETICAL 59.6 KDA PROTEIN. | Q9H175 | 48% | 43 | 858 |
| HCRMR35 | 897434 | 986 | WUblastx.64 | (Q9H175) HYPOTHETICAL 59.6 KDA PROTEIN. | Q9H175 | 49% | 43 | 858 |
| HCROC18 | 884144 | 987 | WUblastx.64 | (Q9H8A5) CDNA FLJ13824 FIS, CLONE THYRO1000505. | Q9H8A5 | 95% | 7 | 1695 |
| HCUAE53 | 665716 | 988 | WUblastx.64 | hypothetical protein [imported] - Arabidopsis thaliana | pir\|E86188\|E86188 | 58% | 504 | 304 |
| | | | | | | 80% | 225 | 76 |
| | | | | | | 56% | 895 | 653 |
| | | | | | | 28% | 542 | 459 |
| | | | | | | 62% | 1299 | 1156 |
| HCUAT74 | 834611 | 990 | WUblastx.64 | hypothetical protein UL126 - human cytomegalovirus (strain | pir\|S09875\|S09875 | 68% | 3 | 191 |
| | | | | AD169) | | | | |
| HCUBN69 | 826610 | 994 | WUblastx.64 | (Q9BVD9) UNKNOWN (PROTEIN FOR MGC: 5149). | Q9BVD9 | 78% | 831 | 763 |
| | | | | | | 72% | 626 | 573 |
| | | | | | | 80% | 760 | 626 |
| HCUBY47 | 842787 | 995 | WUblastx.64 | (Q9EPL2) CALSYNTENIN-1 PROTEIN PRECURSOR. | Q9EPL2 | 97% | 444 | 313 |
| | | | | | | 97% | 1003 | 869 |
| HCUCV66 | 806577 | 996 | WUblastx.64 | (BAB22833) 18 days embryo cDNA, RIKEN full-length e | BAB22833 | 100% | 36 | 362 |
| HCUFC77 | 745374 | 1001 | WUblastx.64 | (Q9NX85) CDNA FLJ20378 FIS, CLONE KAIA0536. | Q9NX85 | 77% | 1526 | 1461 |
| | | | | | | 61% | 1449 | 1234 |
| HCUFD17 | 847039 | 1002 | WUblastx.64 | (Q9HBZ6) HT005 PROTEIN. | Q9HBZ6 | 100% | 10 | 195 |
| HCUFD46 | 757481 | 1003 | WUblastx.64 | (Q9H728) CDNA: FLJ21463 FIS, CLONE COL04765. | Q9H728 | 43% | 580 | 386 |
| HCUFX08 | 612843 | 1008 | WUblastx.64 | (Q9BGW3) HYPOTHETICAL 13.5 KDA PROTEIN. | Q9BGW3 | 55% | 1214 | 1128 |
| | | | | | | 65% | 1329 | 1216 |
| HCUHE27 | 562766 | 1014 | WUblastx.64 | (Q9N083) UNNAMED PORTEIN PRODUCT. | Q9N083 | 61% | 764 | 639 |
| HCWAK88 | 839083 | 1017 | WUblastx.64 | probable excinuclease ABC chain A - Zymomonas mobilis | pir\|T33732\|T33732 | 86% | 435 | 370 |
| | | | | | | 31% | 815 | 321 |
| | | | | | | 32% | 1969 | 1814 |
| | | | | | | 64% | 956 | 501 |
| | | | | | | 67% | 362 | 42 |
| | | | | | | 57% | 1237 | 1181 |
| | | | | | | 69% | 1306 | 998 |
| | | | | | | 85% | 1993 | 1538 |
| HCWAL10 | 639023 | 1018 | WUblastx.64 | (Q9Y2N3) NUCLEAR ENVELOPE PORE MEMBRANE | N121_HUMAN | 100% | 754 | 680 |
| | | | | PROTEIN POM 121 (PO | | 100% | 240 | 118 |
| HCWDM69 | 684527 | 1022 | WUblastx.64 | (Q9P195) PRO1722. | Q9P195 | 66% | 819 | 748 |
| | | | | | | 78% | 886 | 818 |
| | | | | | | 70% | 1001 | 900 |
| HCWEB72 | 639041 | 1024 | WUblastx.64 | (Q9NX85) CDNA FLJ20378 FIS, CLONE KAIA0536. | Q9NX85 | 56% | 872 | 798 |
| | | | | | | 48% | 588 | 508 |
| | | | | | | 65% | 757 | 617 |
| HCWEI82 | 799516 | 1026 | WUblastx.64 | (Q9P1N7) PRO0974. | Q9P1N7 | 47% | 384 | 656 |
| HCWEM96 | 812735 | 1027 | WUblastx.64 | probable ATP-binding component of ABC transporter PA3838 | pir\|G83165\|G83165 | 74% | 1901 | 1146 |
| | | | | [imported] - Pseudomonas aeruginosa (strain PAO1) | | | | |
| HCWHD30 | 834724 | 1031 | WUblastx.64 | (AAH07609) Similar to hypothetical protein PRO1722. | AAH07609 | 86% | 634 | 590 |
| | | | | | | 80% | 782 | 633 |
| HCWHT34 | 692400 | 1032 | WUblastx.64 | (Q9UI50) PRO0657 (FRAGMENT). | Q9UI50 | 68% | 556 | 777 |
| HCWHT52 | 834618 | 1033 | WUblastx.64 | hypothetical protein UL126 - human cytomegalovirus (strain | pir\|S09875\|S09875 | 75% | 20 | 274 |
| | | | | AD169) | | | | |
| HCWKO32 | 610619 | 1034 | WUblastx.64 | (Q9GMU5) HYPOTHETICAL 14.1 KDA PROTEIN. | Q9GMU5 | 82% | 496 | 600 |
| HCWUW24 | 799517 | 1037 | WUblastx.64 | (Q9H387) PRO2550. | Q9H387 | 45% | 541 | 696 |
| | | | | | | 33% | 60 | 245 |
| | | | | | | 77% | 686 | 817 |
| HCYBA32 | 847042 | 1038 | WUblastx.64 | (Q9H3F8) MSTP016. | Q9H3F8 | 100% | 329 | 718 |
| | | | | | | 79% | 925 | 1800 |
| HDABR74 | 861789 | 1040 | WUblastx.64 | (O60717) 7-DEHYDROCHOLESTEROL REDUCTASE (EC | O60717 | 81% | 5 | 37 |
| | | | | 1.3.1.21) (FRAGMENT). | | 95% | 69 | 908 |
| HDFIB37 | 821339 | 1045 | WUblastx.64 | (Q9D8F2) 2010004A03RIK PROTEIN. | Q9D8F2 | 74% | 792 | 884 |
| | | | | | | 64% | 357 | 431 |
| | | | | | | 65% | 388 | 816 |
| HDHEA33 | 847044 | 1048 | WUblastx.64 | (Q9BU66) UNKNOWN (PROTEIN FOR MGC: 10433). | Q9BU66 | 40% | 482 | 619 |
| | | | | | | 45% | 159 | 638 |
| | | | | | | 82% | 1054 | 1494 |
| HDHEB12 | 610260 | 1049 | WUblastx.64 | (Q9NZ96) NEUROLIGIN 3 ISOFORM HNL3S (FRAGMENT). | Q9NZ96 | 94% | 2 | 697 |
| HDLAL94 | 843583 | 1054 | HMMER 2.1.1 | PFAM: ADP-ribosylation factor family | PF00025 | 309.2 | 195 | 728 |
| | | | WUblastx.64 | (Q9D4P0) 4930587A11RIK PROTEIN. | Q9D4P0 | 100% | 192 | 728 |
| HDPAB86 | 901851 | 1055 | WUblastx.64 | (Q9NYH9) HEPATOCELLULAR CARCINOMA-ASSOCIATED | Q9NYH9 | 56% | 74 | 538 |
| | | | | ANTIGEN 66. | | 97% | 310 | 1863 |
| HDPAE80 | 778068 | 1056 | WUblastx.64 | (Q9BR63) PHENYLALANYL-TRNA SYNTHETASE BETA- | Q9BR63 | 93% | 1435 | 1662 |
| | | | | SUBUNIT (FRAGMENT). | | 78% | 1604 | 1744 |
| | | | | | | 54% | 383 | 661 |
| | | | | | | 32% | 417 | 761 |
| | | | | | | 98% | 905 | 1438 |
| HDPAQ86 | 612855 | 1057 | WUblastx.64 | (Q9H743) CDNA: FLJ21394 FIS, CLONE COL03536. | Q9H743 | 48% | 1419 | 1246 |
| | | | | | | 76% | 1250 | 1122 |
| HDPBN48 | 838593 | 1059 | WUblastx.64 | (Q9H013) MELTRIN-BETA/ADAM 19 HOMOLOGUE. | Q9H013 | 84% | 525 | 773 |
| HDPCG79 | 691350 | 1060 | WUblastx.64 | (Q9H9H4) CDNA FLJ12750 FIS, CLONE NT2RP2001168, | Q9H9H4 | 98% | 415 | 588 |
| | | | | WEAKLY SIMILAR TO VER | | | | |
| HDPCV29 | 567228 | 1061 | WUblastx.64 | hypothetical protein (L1H 3′ region) - human | pir\|B34087\|B34087 | 40% | 546 | 1196 |
| HDPDA36 | 827283 | 1062 | WUblastx.64 | (Q9CZU3) 2610528A15RIK PROTEIN. | Q9CZU3 | 96% | 3443 | 3604 |
| HDPDC59 | 872451 | 1063 | WUblastx.64 | (Q9H251) CADHERIN RELATED 23. | Q9H251 | 99% | 142 | 1737 |
| | | | | | | 32% | 145 | 1761 |
| | | | | | | 33% | 130 | 1737 |
| | | | | | | 32% | 130 | 1734 |
| | | | | | | 32% | 112 | 1740 |
| | | | | | | 34% | 145 | 1743 |
| | | | | | | 31% | 124 | 1731 |
| | | | | | | 30% | 145 | 1743 |
| | | | | | | 31% | 256 | 1725 |
| | | | | | | 31% | 145 | 1755 |
| | | | | | | 31% | 145 | 1698 |
| | | | | | | 31% | 139 | 1491 |
| | | | | | | 30% | 658 | 1737 |
| | | | | | | 29% | 154 | 1731 |
| HDPFG13 | 637580 | 1064 | WUblastx.64 | (Q9H8S0) CDNA FLJ13287 FIS, CLONE OVARC1001161. | Q9H8S0 | 100% | 55 | 441 |
| HDPFZ05 | 824390 | 1066 | WUblastx.64 | (Q9CZC8) 2810019K23RIK PROTEIN. | Q9CZC8 | 84% | 500 | 658 |
| HDPGR80 | 844812 | 1068 | WUblastx.64 | (Q9BRR6) SIMILAR TO RIKEN CDNA 2610017G09 GENE. | Q9BRR6 | 87% | 2434 | 1067 |
| | | | | | | 83% | 2556 | 2377 |
| HDPGU14 | 832543 | 1069 | WUblastx.64 | mda-9 protein - human | pir\|JC6537\|JC6537 | 100% | 292 | 1185 |
| HDPGX09 | 580818 | 1070 | WUblastx.64 | (Q9D0M0) 2610002K22RIK PROTEIN. | Q9D0M0 | 94% | 832 | 999 |
| | | | | | | 33% | 995 | 1093 |
| | | | | | | 91% | 1020 | 1220 |
| HDPIE44 | 899328 | 1071 | WUblastx.64 | (Q9D666) 4632417G13RIK PROTEIN. | Q9D666 | 62% | 102 | 2453 |
| HDPIE73 | 886158 | 1072 | WUblastx.64 | (Q9H728) CDNA: FLJ21463 FIS, CLONE COL04765. | Q9H728 | 58% | 1852 | 2145 |
| HDPIF35 | 826781 | 1073 | WUblastx.64 | (BAB55422) CDNA FLJ14966 fis, clone THYRO1000034, w | BAB55422 | 100% | 1000 | 887 |
| HDPIF65 | 847047 | 1074 | WUblastx.64 | (Q9H7Z0) CDNA FLJ14058 FIS, CLONE HEMBB1000554. | Q9H7Z0 | 60% | 236 | 12 |
| HDPIH25 | 740749 | 1075 | WUblastx.64 | (Q9H7Q7) FLJ00010 PROTEIN (FRAGMENT). | Q9H7Q7 | 78% | 99 | 539 |
| | | | | | | 100% | 876 | 968 |
| | | | | | | 76% | 971 | 2266 |
| | | | | | | 98% | 536 | 796 |
| | | | | | | 50% | 2190 | 2300 |
| | | | | | | 75% | 796 | 876 |
| HDPIY31 | 886159 | 1076 | WUblastx.64 | hypothetical protein DKFZp434N1429.1 - human (fragment) | pir\|T46448\|T46448 | 72% | 1714 | 1899 |
| HDPJH72 | 847048 | 1077 | WUblastx.64 | (O15427) MONOCARBOXYLATE TRANSPORTER 4 (MCT 4) | MOT4_HUMAN | 96% | 294 | 392 |
| | | | | (MCT 3). | | 81% | 1204 | 1473 |
| | | | | | | 100% | 77 | 295 |
| | | | | | | 89% | 854 | 1192 |
| | | | | | | 37% | 1427 | 1498 |
| | | | | | | 71% | 394 | 855 |
| HDPKC55 | 822869 | 1080 | HMMER 2.1.1 | PFAM: Tubulin/FtsZ family | PF00091 | 177.8 | 108 | 797 |
| | | | WUblastx.64 | (Q9UJT1) TUBULIN DELTA CHAIN (DELTA TUBULIN). | TBD_HUMAN | 100% | 102 | 1460 |
| HDPKD16 | 897304 | 1081 | WUblastx.64 | (AAG10506) 2P domain K+ channel TWIK-2. | AAG10506 | 100% | 246 | 857 |
| HDPMC52 | 847049 | 1082 | WUblastx.64 | (Q9Y275) TUMOR NECROSIS FACTOR LIGAND | T13B_HUMAN | 98% | 67 | 447 |
| | | | | SUPERFAMILY MEMBER 13 | | 100% | 7 | 72 |
| HDPML04 | 822851 | 1083 | WUblastx.64 | X-linked retinopathy protein (C-terminal, clone XEH.8c) - human | pir\|A46010\|A46010 | 73% | 1403 | 1326 |
| | | | | (fragment) | | 68% | 1327 | 1223 |
| HDPNC21 | 839263 | 1085 | WUblastx.64 | (AAK55521) PRO0764. | AAK55521 | 81% | 1290 | 964 |
| HDPNJ26 | 852338 | 1086 | WUblastx.64 | (Q9CQ35) 4921508O11RIK PROTEIN. | Q9CQ35 | 67% | 115 | 651 |
| HDPOD73 | 876202 | 1087 | WUblastx.64 | (Q9P195) PRO1722. | Q9P195 | 84% | 173 | 211 |
| | | | | | | 60% | 16 | 90 |
| | | | | | | 61% | 78 | 185 |
| HDPOT33 | 892319 | 1088 | WUblastx.64 | (Q92482) AQUAPORIN 3. | AQP3_HUMAN | 100% | 53 | 928 |
| HDPPB70 | 874027 | 1089 | WUblastx.64 | (Q96DV8) Unknown (protein for MGC: 3551). | Q96DV8 | 68% | 257 | 1186 |
| HDPPE05 | 809109 | 1091 | WUblastx.64 | (Q9P0G1) HSPC075 (FRAGMENT). | Q9P0G1 | 100% | 355 | 459 |
| | | | | | | 100% | 64 | 153 |
| HDPSA70 | 722216 | 1092 | WUblastx.64 | (Q9UL01) SQUAMOUS CELL CARCINOMA ANTIGEN | Q9UL01 | 100% | 13 | 261 |
| | | | | RECOGNIZED BY T CELL. | | | | |
| HDPTI49 | 847052 | 1097 | WUblastx.64 | (Q14185) DOCK180 PROTEIN. | Q14185 | 79% | 927 | 1190 |
| HDPYE25 | 636058 | 1099 | WUblastx.64 | (O42346) NEURULA-SPECIFIC FERRODOXIN REDUCTASE- | O42346 | 73% | 3 | 722 |
| | | | | LIKE PROTEIN. | | | | |
| HDQGD06 | 838076 | 1100 | WUblastx.64 | (Q9H1C4) UNC-93 RELATED PROTEIN. | Q9H1C4 | 80% | 969 | 1535 |
| | | | | | | 90% | 59 | 463 |
| | | | | | | 87% | 454 | 996 |
| HDQGD06 | 852673 | 1101 | WUblastx.64 | (Q9H1C4) UNC-93 RELATED PROTEIN. | Q9H1C4 | 81% | 969 | 1559 |
| | | | | | | 90% | 59 | 463 |
| | | | | | | 87% | 454 | 996 |
| HDQGD06 | 881280 | 1102 | WUblastx.64 | (Q9H1C4) UNC-93 RELATED PROTEIN. | Q9H1C4 | 86% | 59 | 1537 |
| HDQGN08 | 840588 | 1103 | WUblastx.64 | (Q9HAD8) CDNA FLJ11786 FIS, CLONE HEMBA1006036. | Q9HAD8 | 56% | 782 | 510 |
| HDQGO62 | 837353 | 1104 | WUblastx.64 | (Q9D6E9) 2900070E19RIK PROTEIN. | Q9D6E9 | 96% | 222 | 515 |
| HDQPM16 | 886161 | 1105 | WUblastx.64 | (Q9DCP9) PROLINE RICH PROTEIN EXPRESSED IN BRAIN. | Q9DCP9 | 76% | 145 | 648 |
| HDSAH37 | 603518 | 1109 | WUblastx.64 | (Q9H9U3) CDNA FLJ12547 FIS, CLONE NT2RM4000634. | Q9H9U3 | 41% | 341 | 156 |
| | | | | | | 36% | 449 | 147 |
| | | | | | | 35% | 344 | 105 |
| HDSAM57 | 834822 | 1110 | WUblastx.64 | (Q9P195) PRO1722. | Q9P195 | 76% | 752 | 690 |
| | | | | | | 80% | 685 | 623 |
| | | | | | | 61% | 897 | 742 |
| HDSAO14 | 847054 | 1111 | WUblastx.64 | (Q9H0I1) HYPOTHETICAL 83.8 KDA PROTEIN. | Q9H0I1 | 100% | 241 | 348 |
| HDSAP15 | 772712 | 1113 | WUblastx.64 | (Q9H059) HYPOTHETICAL 99.0 KDA PROTEIN. | Q9H059 | 46% | 160 | 378 |
| HDTAR39 | 847055 | 1114 | WUblastx.64 | (Q9NVH2) HYPOTHETICAL 106.8 KDA PROTEIN. | Q9NVH2 | 100% | 13 | 273 |
| | | | | | | 85% | 242 | 772 |
| HDTDA48 | 809110 | 1118 | WUblastx.64 | (O15254) PRISTANOYL-COA OXIDASE. | O15254 | 98% | 149 | 601 |
| HDTDE66 | 610074 | 1119 | WUblastx.64 | (Q9Y609) LR8. | Q9Y609 | 88% | 1 | 447 |
| HDTDG75 | 799892 | 1120 | WUblastx.64 | (Q9H2I8) CDA017. | Q9H2I8 | 100% | 434 | 514 |
| HDTGW76 | 862012 | 1123 | WUblastx.64 | (Q9NY74) ETAA16 PROTEIN. | Q9NY74 | 73% | 1290 | 1835 |
| | | | | | | 27% | 1422 | 1616 |
| | | | | | | 23% | 296 | 829 |
| | | | | | | 82% | 20 | 1234 |
| HDTGZ56 | 800756 | 1124 | WUblastx.64 | (Q9BGW3) HYPOTHETICAL 13.5 KDA PROTEIN. | Q9BGW3 | 54% | 27 | 257 |
| HDTIM39 | 886164 | 1126 | WUblastx.64 | (Q9P0Q9) HSPC217. | Q9P0Q9 | 80% | 254 | 523 |
| | | | | | | 35% | 302 | 403 |
| | | | | | | 90% | 504 | 788 |
| HDTKJ29 | 840023 | 1127 | HMMER 2.1.1 | PFAM: Uncharacterized protein family | PF01027 | 137.6 | 184 | 726 |
| | | | WUblastx.64 | (Q9Y3C2) CGI-119 PROTEIN. | Q9Y3C2 | 71% | 19 | 732 |
| HE2AC74 | 901343 | 1131 | WUblastx.64 | (AAK53385) G protein gamma 12 subunit. | AAK53385 | 100% | 207 | 422 |
| HE2AX36 | 812337 | 1135 | WUblastx.64 | (Q9Y5B5) UBIQUITIN-SPECIFIC PROTEASE HOMOLOG. | Q9Y5B5 | 85% | 1292 | 300 |
| HE2AY96 | 796800 | 1136 | WUblastx.64 | (BAB22850) 18 days embryo cDNA, RIKEN full-length e | BAB22850 | 87% | 56 | 751 |
| HE2BD72 | 600349 | 1137 | WUblastx.64 | (Q9NX85) CDNA FLJ20378 FIS, CLONE KAIA0536. | Q9NX85 | 66% | 496 | 371 |
| | | | | | | 77% | 650 | 522 |
| HE2BH50 | 847056 | 1138 | WUblastx.64 | (Q9GZW0) DJ604K5.1 (15 KDA SELENOPROTEIN). | Q9GZW0 | 100% | 226 | 405 |
| HE2CC17 | 566806 | 1140 | WUblastx.64 | (Q9HBW6) NAG13. | Q9HBW6 | 69% | 996 | 694 |
| | | | | | | 59% | 731 | 516 |
| | | | | | | 75% | 347 | 180 |
| | | | | | | 42% | 1037 | 933 |
| | | | | | | 70% | 540 | 352 |
| HE2CJ53 | 637592 | 1141 | WUblastx.64 | (Q9NUM3) CDNA FLJ11274 FIS, CLONE PLACE1009368, | Q9NUM3 | 100% | 123 | 266 |
| | | | | WEAKLY SIMILAR TO MET | | 100% | 266 | 412 |
| HE2DI16 | 604029 | 1145 | WUblastx.64 | (Q9NX85) CDNA FLJ20378 FIS, CLONE KAIA0536. | Q9NX85 | 66% | 1350 | 1201 |
| | | | | | | 76% | 1483 | 1331 |
| HE2DJ84 | 746643 | 1146 | WUblastx.64 | (P82673) MITOCHONDRIAL 28S RIBOSOMAL PROTEIN S28 | P82673 | 100% | 2 | 313 |
| | | | | (MRP-S28). | | | | |
| HE2DY23 | 877491 | 1147 | WUblastx.64 | (Q9VW97) CG17149 PROTEIN. | Q9VW97 | 48% | 1018 | 1284 |
| HE2EH45 | 581520 | 1150 | WUblastx.64 | (Q9H3F4) MSTP030. | Q9H3F4 | 73% | 690 | 815 |
| | | | | | | 63% | 8 | 250 |
| | | | | | | 75% | 97 | 735 |
| HE2FE89 | 780314 | 1151 | WUblastx.64 | (Q9QYN1) ENH3. | Q9QYN1 | 95% | 254 | 541 |
| HE2FR49 | 714456 | 1152 | WUblastx.64 | (Q9NUP7) CDNA FLJ11219 FIS, CLONE PLACE1008122. | Q9NUP7 | 64% | 63 | 104 |
| | | | | | | 100% | 92 | 400 |
| HE2GB19 | 566808 | 1153 | WUblastx.64 | (O95245) ENVELOPE PROTEIN (FRAGMENT). | O95245 | 41% | 397 | 519 |
| | | | | | | 39% | 246 | 362 |
| | | | | | | 63% | 140 | 247 |
| HE2HB61 | 798113 | 1155 | WUblastx.64 | (Q9BS71) UNKNOWN (PROTEIN FOR MGC: 12301). | Q9BS71 | 100% | 261 | 365 |
| HE2HF76 | 637594 | 1157 | WUblastx.64 | (Q9HAZ1) PROTEIN SERINE THREONINE KINASE CLK4. | Q9HAZ1 | 100% | 11 | 859 |
| HE2IE66 | 830436 | 1159 | WUblastx.64 | (AAH22050) Hypothetical 61.5 kDa protein (Fragment) | AAH22050 | 98% | 98 | 523 |
| HE2NW57 | 638615 | 1160 | WUblastx.64 | (Q9UI58) PRO0483 PROTEIN. | Q9UI58 | 57% | 191 | 15 |
| HE2OA95 | 637595 | 1161 | WUblastx.64 | (Q9UIK5) TMEFF2 PROTEIN PRECURSOR | Q9UIK5 | 99% | 1647 | 1231 |
| | | | | (TRANSMEMBRANE PROTEIN TENB2) (TPEF | | | | |
| HE2PB61 | 847379 | 1163 | WUblastx.64 | (Q9BWY7) DJ639P13.1 (NOVEL PROTEIN SIMILAR TO RAT | Q9BWY7 | 92% | 3 | 719 |
| | | | | TRANSPORTER-LIKE PR | | | | |
| HE2PI43 | 847380 | 1164 | WUblastx.64 | (Q9H8E8) CDNA FLJ13697 FIS, CLONE PLACE2000172. | Q9H8E8 | 100% | 234 | 407 |
| HE6CJ41 | 604908 | 1166 | WUblastx.64 | (Q9GMX5) HYPOTHETICAL 12.9 KDA PROTEIN. | Q9GMX5 | 54% | 898 | 1050 |
| HE6EI30 | 847381 | 1169 | WUblastx.64 | (Q9BRG1) SIMILAR TO RIKEN CDNA 1110020N13 GENE. | Q9BRG1 | 100% | 603 | 523 |
| HE8BP64 | 847059 | 1176 | WUblastx.64 | (Q9DBS0) HIPPOCAMPUS ABUNDANT GENE TRANSCRIPT 1. | Q9DBS0 | 71% | 10 | 1299 |
| HE8BQ49 | 589443 | 1177 | WUblastx.64 | hypothetical protein - human transposon MER37 | pir\|S72482\|S72482 | 75% | 343 | 474 |
| | | | | | | 64% | 105 | 248 |
| HE8BR18 | 731933 | 1178 | WUblastx.64 | (Q9NW38) CDNA FLJ10335 FIS, CLONE NT2RM2000669. | Q9NW38 | 100% | 654 | 1091 |
| HE8BT58 | 806144 | 1180 | WUblastx.64 | (Q9BX67) JUNCTIONAL ADHESION MOLECULE 3 | Q9BX67 | 91% | 80 | 937 |
| | | | | PRECURSOR. | | | | |
| HE8CC34 | 753266 | 1183 | WUblastx.64 | (Q9H728) CDNA: FLJ21463 FIS, CLONE COL04765. | Q9H728 | 72% | 2116 | 1829 |
| HE8DK52 | 658676 | 1186 | WUblastx.64 | (Q9D1U5) D730039F16RIK PROTEIN. | Q9D1U5 | 66% | 778 | 813 |
| | | | | | | 64% | 843 | 935 |
| HE8DZ94 | 877630 | 1187 | WUblastx.64 | (Q9Y3C2) CGI-119 PROTEIN. | Q9Y3C2 | 91% | 1295 | 1657 |
| HE8EX86 | 823176 | 1189 | WUblastx.64 | (AAK53401) Elongation factor G2. | AAK53401 | 100% | 1410 | 457 |
| | | | | | | 96% | 2790 | 2593 |
| | | | | | | 88% | 2579 | 1362 |
| HE8FC10 | 693908 | 1190 | HMMER 2.1.1 | PFAM: Zinc finger, C2H2 type | PF00096 | 72.8 | 606 | 674 |
| | | | WUblastx.64 | (Q9H8L4) CDNA FLJ13479 FIS, CLONE PLACE1003738, | Q9H8L4 | 84% | 300 | 731 |
| | | | | WEAKLY SIMILAR TO ZIN | | 98% | 6 | 173 |
| | | | | | | 45% | 438 | 731 |
| | | | | | | 45% | 438 | 674 |
| | | | | | | 44% | 438 | 674 |
| | | | | | | 39% | 438 | 674 |
| | | | | | | 36% | 438 | 674 |
| | | | | | | 40% | 444 | 674 |
| | | | | | | 37% | 438 | 674 |
| | | | | | | 37% | 444 | 674 |
| | | | | | | 51% | 6 | 134 |
| | | | | | | 48% | 6 | 161 |
| | | | | | | 46% | 6 | 134 |
| | | | | | | 46% | 6 | 134 |
| | | | | | | 47% | 9 | 134 |
| | | | | | | 48% | 6 | 134 |
| | | | | | | 47% | 9 | 134 |
| | | | | | | 40% | 9 | 134 |
| | | | | | | 44% | 48 | 134 |
| HE8FG15 | 799520 | 1191 | WUblastx.64 | (O43491) PROTEIN 4.1-G. | O43491 | 84% | 226 | 1197 |
| HE8FG24 | 733560 | 1192 | WUblastx.64 | (Q9HAQ1) GLYCEROL 3-PHOSPHATE PERMEASE. | Q9HAQ1 | 90% | 11 | 76 |
| | | | | | | 86% | 94 | 522 |
| HE8FK78 | 852180 | 1193 | WUblastx.64 | (Q9H8A3) CDNA FLJ13837 FIS, CLONE THYRO1000748, | Q9H8A3 | 100% | 1 | 75 |
| | | | | MODERATELY SIMILAR TO | | 80% | 72 | 266 |
| | | | | | | 88% | 269 | 1372 |
| HE8FR53 | 843807 | 1196 | WUblastx.64 | (Q9H373) PRO1107. | Q9H373 | 98% | 3411 | 3181 |
| HE8MQ01 | 886800 | 1199 | WUblastx.64 | (Q9UHT1) PRO1902 PROTEIN. | Q9UHT1 | 71% | 2692 | 2483 |
| HE8MS43 | 799521 | 1200 | WUblastx.64 | (Q9D7J4) 2310005N03RIK PROTEIN. | Q9D7J4 | 88% | 1023 | 946 |
| | | | | | | 83% | 1247 | 1155 |
| | | | | | | 77% | 175 | 44 |
| HE8NC81 | 862015 | 1202 | WUblastx.64 | (Q9H6B2) CDNA: FLJ22418 FIS, CLONE HRC08590. | Q9H6B2 | 100% | 74 | 106 |
| | | | | | | 88% | 168 | 923 |
| HE8NC81 | 1096692 | 3106 | HMMER 2.1.1 | PFAM: Immunoglobulin domain | PF00047 | 28.3 | 563 | 814 |
| | | | WUblastx.64 | (Q9H6B2) CDNA: FLJ22418 FIS, CLONE HRC08590. | Q9H6B2 | 99% | 419 | 1264 |
| HE8QU21 | 838391 | 1204 | WUblastx.64 | (Q9BGZ4) HYPOTHETICAL 11.6 KDA PROTEIN. | Q9BGZ4 | 44% | 1391 | 1125 |
| HE8SH74 | 833053 | 1205 | WUblastx.64 | (Q9H387) PRO2550. | Q9H387 | 69% | 2476 | 2441 |
| | | | | | | 50% | 3129 | 3034 |
| | | | | | | 76% | 3017 | 2868 |
| HE8UX34 | 838170 | 1206 | WUblastx.64 | (Q9H8Q9) CDNA FLJ13310 FIS, CLONE OVARC1001453. | Q9H8Q9 | 67% | 7 | 162 |
| HE9CI81 | 734918 | 1209 | WUblastx.64 | (Q9DB52) 2900009I07RIK PROTEIN. | Q9DB52 | 82% | 2273 | 2016 |
| HE9CJ38 | 565082 | 1210 | WUblastx.64 | (Q9BGW3) HYPOTHETICAL 13.5 KDA PROTEIN. | Q9BGW3 | 64% | 1180 | 1079 |
| | | | | | | 54% | 1380 | 1243 |
| HE9CN58 | 562768 | 1212 | WUblastx.64 | (Q99710) YY1-ASSOCIATED FACTOR 2. | Q99710 | 44% | 6 | 353 |
| HE9CV59 | 847061 | 1213 | WUblastx.64 | (Q9CYF7) 5730494N06RIK PROTEIN. | Q9CYF7 | 76% | 73 | 408 |
| HE9DG54 | 821326 | 1214 | WUblastx.64 | (Q9N083) UNNAMED PORTEIN PRODUCT. | Q9N083 | 53% | 1508 | 1197 |
| HE9DH59 | 886059 | 1215 | WUblastx.64 | (AAK49519) Putative mitochondrial solute carrier sp | AAK49519 | 100% | 54 | 419 |
| | | | | | | 94% | 1534 | 2085 |
| HE9EM54 | 560627 | 1218 | WUblastx.64 | (Q9H743) CDNA: FLJ21394 FIS, CLONE COL03536. | Q9H743 | 57% | 611 | 688 |
| | | | | | | 67% | 756 | 902 |
| HE9FH28 | 633737 | 1219 | WUblastx.64 | (Q9H728) CDNA: FLJ21463 FIS, CLONE COL04765. | Q9H728 | 58% | 965 | 591 |
| HE9HE13 | 868829 | 1220 | WUblastx.64 | (Q9P183) PRO2160. | Q9P183 | 100% | 434 | 183 |
| HE9HE13 | 824328 | 1221 | WUblastx.64 | (Q9UI56) PROTEIN PRO0518. | P518_HUMAN | 100% | 665 | 462 |
| HE9HF59 | 664485 | 1222 | WUblastx.64 | (Q9BGW3) HYPOTHETICAL 13.5 KDA PROTEIN. | Q9BGW3 | 45% | 1593 | 1276 |
| HE9TA42 | 834972 | 1227 | WUblastx.64 | (P53992) PROTEIN TRANSPORT PROTEIN SEC24C (SEC24- | S24C_HUMAN | 100% | 1423 | 1674 |
| | | | | RELATED PR | | 98% | 2099 | 2359 |
| | | | | | | 85% | 1674 | 2105 |
| | | | | | | 29% | 1833 | 1943 |
| | | | | | | 38% | 58 | 135 |
| | | | | | | 98% | 8 | 1435 |
| HEAAC21 | 581048 | 1228 | WUblastx.64 | (Q9NV24) CDNA FLJ10980 FIS, CLONE PLACE1001570. | Q9NV24 | 100% | 100 | 246 |
| HEAAD63 | 603321 | 1231 | WUblastx.64 | (Q9H965) CDNA FLJ12983 FIS, CLONE NT2RP3000002. | Q9H965 | 84% | 613 | 575 |
| | | | | | | 68% | 789 | 613 |
| HEAAM96 | 562769 | 1234 | WUblastx.64 | (Q9H4S5) DJ336K20B.1 (NOVEL PROTEIN BASED ON | Q9H4S5 | 83% | 541 | 1044 |
| | | | | FGENESH) (FRAGMENT). | | | | |
| HEAAN52 | 862020 | 1235 | WUblastx.64 | (Q9BGW3) HYPOTHETICAL 13.5 KDA PROTEIN. | Q9BGW3 | 54% | 796 | 1104 |
| HEAAW94 | 847340 | 1238 | WUblastx.64 | (Q9UEV9) ACTIN-BINDING PROTEIN HOMOLOG ABP-278. | Q9UEV9 | 94% | 285 | 890 |
| | | | | | | 41% | 285 | 884 |
| | | | | | | 38% | 285 | 884 |
| | | | | | | 36% | 285 | 872 |
| | | | | | | 35% | 285 | 884 |
| | | | | | | 34% | 285 | 884 |
| | | | | | | 34% | 285 | 878 |
| | | | | | | 32% | 303 | 887 |
| | | | | | | 33% | 285 | 881 |
| | | | | | | 33% | 285 | 878 |
| | | | | | | 31% | 285 | 869 |
| | | | | | | 29% | 288 | 887 |
| | | | | | | 30% | 279 | 884 |
| | | | | | | 31% | 285 | 863 |
| | | | | | | 36% | 414 | 848 |
| | | | | | | 30% | 288 | 884 |
| | | | | | | 32% | 429 | 857 |
| | | | | | | 31% | 309 | 824 |
| | | | | | | 26% | 321 | 824 |
| | | | | | | 38% | 285 | 539 |
| | | | | | | 37% | 552 | 824 |
| HEBAT05 | 637602 | 1240 | WUblastx.64 | (Q9NWW0) CDNA FLJ20568 FIS, CLONE REC00775. | Q9NWW0 | 96% | 111 | 380 |
| | | | | | | 87% | 84 | 131 |
| HEBCN80 | 596808 | 1243 | WUblastx.64 | (Q9BGX7) HYPOTHETICAL 13.0 KDA PROTEIN. | Q9BGX7 | 57% | 782 | 865 |
| | | | | | | 53% | 666 | 788 |
| HEEAF49 | 880521 | 1254 | WUblastx.64 | (Q9P147) PRO2822. | Q9P147 | 79% | 2117 | 1896 |
| HEEAJ46 | 637623 | 1255 | WUblastx.64 | (AAK55521) PRO0764. | AAK55521 | 86% | 2358 | 2314 |
| | | | | | | 66% | 1626 | 1582 |
| | | | | | | 55% | 2336 | 2163 |
| | | | | | | 73% | 1601 | 1368 |
| HEGAI20 | 825818 | 1256 | WUblastx.64 | (Q9N083) UNNAMED PORTEIN PRODUCT. | Q9N083 | 63% | 893 | 759 |
| HEIAC52 | 826611 | 1257 | WUblastx.64 | (Q9H6A7) CDNA: FLJ22429 FIS, CLONE HRC09084. | Q9H6A7 | 75% | 40 | 915 |
| HELAT58 | 732199 | 1259 | WUblastx.64 | (Q9H743) CDNA: FLJ21394 FIS, CLONE COL03536. | Q9H743 | 56% | 1807 | 1881 |
| | | | | | | 60% | 1731 | 1805 |
| | | | | | | 59% | 1880 | 2035 |
| HELAW94 | 834796 | 1260 | WUblastx.64 | (AAH02585) RAB7, member RAS oncogene family-like 1. | AAH02585 | 100% | 159 | 551 |
| HELDF80 | 799522 | 1261 | WUblastx.64 | N-ras upstream protein NRU - human | pir\|S29815\|S29815 | 99% | 3 | 1289 |
| | | | | | | 28% | 6 | 1061 |
| | | | | | | 28% | 435 | 1118 |
| HELDK79 | 532597 | 1263 | WUblastx.64 | L6 surface protein - human | pir\|A42926\|A42926 | 78% | 71 | 676 |
| HELDQ42 | 695716 | 1264 | WUblastx.64 | (O60629) BLADDER CANCER-ASSOCIATED PROTEIN | BC10_HUMAN | 100% | 289 | 549 |
| | | | | (BLADDER CANCER | | | | |
| HELEL76 | 862490 | 1266 | WUblastx.64 | (Q9BRX8) SIMILAR TO RIKEN CDNA 5730469M10 GENE. | Q9BRX8 | 93% | 171 | 818 |
| HELEL76 | 839470 | 1267 | WUblastx.64 | (Q9BRX8) SIMILAR TO RIKEN CDNA 5730469M10 GENE. | Q9BRX8 | 98% | 545 | 694 |
| | | | | | | 90% | 48 | 506 |
| HELEO45 | 847067 | 1268 | WUblastx.64 | (Q9H6Q6) CDNA: FLJ21982 FIS, CLONE HEP06188. | Q9H6Q6 | 92% | 1385 | 1423 |
| | | | | | | 88% | 7 | 1392 |
| HELFA57 | 845981 | 1269 | WUblastx.64 | (O95761) WUGSC:H_DJ0771P04.2 PROTEIN (FRAGMENT). | O95761 | 95% | 340 | 1362 |
| | | | | | | 95% | 9 | 137 |
| | | | | | | 78% | 62 | 409 |
| HELHN47 | 872795 | 1273 | WUblastx.64 | (Q9NWC8) HYPOTHETICAL 17.6 KDA PROTEIN. | Q9NWC8 | 91% | 1233 | 772 |
| HELHP11 | 638064 | 1274 | WUblastx.64 | (Q9H743) CDNA: FLJ21394 FIS, CLONE COL03536. | Q9H743 | 76% | 1429 | 1313 |
| HELHP11 | 851116 | 1275 | WUblastx.64 | (Q9H743) CDNA: FLJ21394 FIS, CLONE COL03536. | Q9H743 | 79% | 1441 | 1313 |
| HEMBV40 | 847069 | 1277 | WUblastx.64 | NADH dehydrogenase (ubiquinone) (EC 1.6.5.3) CI-B12 chain - | pir\|JC5822\|JC5822 | 77% | 798 | 1055 |
| | | | | human | | | | |
| HEMCJ80 | 765041 | 1278 | WUblastx.64 | (Q9NXF8) CDNA FLJ20279 FIS, CLONE HEP03229. | Q9NXF8 | 98% | 489 | 710 |
| | | | | | | 73% | 3 | 206 |
| | | | | | | 79% | 155 | 487 |
| HEMDB07 | 617137 | 1280 | WUblastx.64 | (Q9H387) PRO2550. | Q9H387 | 82% | 400 | 660 |
| HEMGK71 | 847374 | 1282 | WUblastx.64 | (Q9NX85) CDNA FLJ20378 FIS, CLONE KAIA0536. | Q9NX85 | 80% | 1383 | 1258 |
| | | | | | | 64% | 1576 | 1352 |
| HEOMU44 | 778085 | 1287 | WUblastx.64 | (Q9N307) HYPOTHETICAL PROTEIN Y61A9LA.B. | Q9N307 | 52% | 823 | 1392 |
| HEONI85 | 566833 | 1288 | WUblastx.64 | hypothetical 43.5K protein - mouse | pir\|JU0319\|JU0319 | 77% | 236 | 421 |
| | | | | | | 90% | 382 | 672 |
| HEONK04 | 658682 | 1289 | WUblastx.64 | (Q9UKN4) BRIDGING INTEGRATOR-2. | Q9UKN4 | 72% | 267 | 1070 |
| HEONP08 | 601691 | 1290 | WUblastx.64 | (Q9Y349) HYPOTHETICAL 15.7 KDA PROTEIN. | Q9Y349 | 100% | 924 | 523 |
| HEPBC23 | 799985 | 1292 | WUblastx.64 | (Q9H1V4) DJ1182A14.3 (SIMILAR TO MST1 (MACROPHAGE | Q9H1V4 | 92% | 4 | 303 |
| | | | | STIMULATING 1 (HEPA | | | | |
| HEPCU48 | 805585 | 1295 | WUblastx.64 | (Q9UNT2) PROTEIN O-MANNOSYL-TRANSFERASE 1. | Q9UNT2 | 79% | 315 | 1490 |
| | | | | | | 95% | 79 | 324 |
| | | | | | | 100% | 15 | 32 |
| HEQAH47 | 877634 | 1296 | WUblastx.64 | hypothetical protein DKFZp586M121.1 - human (fragment) | pir\|T08772\|T08772 | 100% | 630 | 1085 |
| | | | | | | 87% | 12 | 476 |
| | | | | | | 30% | 90 | 308 |
| | | | | | | 30% | 189 | 305 |
| | | | | | | 29% | 1104 | 1355 |
| | | | | | | 28% | 30 | 245 |
| | | | | | | 63% | 257 | 289 |
| HEQBJ01 | 861786 | 1300 | WUblastx.64 | (Q9LVQ7) ZINC FINGER PROTEIN. | Q9LVQ7 | 34% | 424 | 849 |
| HEQBJ01 | 876546 | 1301 | WUblastx.64 | (Q9LVQ7) ZINC FINGER PROTEIN. | Q9LVQ7 | 34% | 424 | 849 |
| HEQBM94 | 580823 | 1302 | WUblastx.64 | (Q9BT25) UNKNOWN (PROTEIN FOR IMAGE: 3636299) | Q9BT25 | 100% | 470 | 559 |
| | | | | (FRAGMENT). | | 72% | 583 | 843 |
| | | | | | | 77% | 7 | 471 |
| HESAG57 | 855936 | 1307 | WUblastx.64 | (O43432) EIF4GII. | O43432 | 82% | 936 | 7 |
| | | | | | | 100% | 1221 | 1030 |
| | | | | | | 100% | 1365 | 1336 |
| | | | | | | 27% | 1382 | 1254 |
| | | | | | | 28% | 1545 | 1327 |
| HETBJ88 | 855937 | 1310 | WUblastx.64 | (Q9H1Y3) DJ317G22.2 (ENCEPHALOPSIN) (PANOPSIN). | Q9H1Y3 | 83% | 10 | 864 |
| HETCM67 | 861909 | 1311 | HMMER 2.1.1 | PFAM: Disintegrin | PF00200 | 112.2 | 239 | 466 |
| | | | WUblastx.64 | (Q9UKQ2) ADAM 28 PRECURSOR (EC 3.4.24.—) (A | AD28_HUMAN | 96% | 11 | 1318 |
| | | | | DISINTEGRIN AND | | | | |
| HETDD61 | 800668 | 1312 | WUblastx.64 | (Q9Y6B7) ADAPTER-RELATED PROTEIN COMPLEX 4 BETA | A4B1_HUMAN | 96% | 789 | 1085 |
| | | | | 1 SUBUNIT ( | | 85% | 363 | 569 |
| | | | | | | 96% | 1315 | 1761 |
| HETDD61 | 852381 | 1313 | WUblastx.64 | (Q9Y6B7) ADAPTER-RELATED PROTEIN COMPLEX 4 BETA | A4B1_HUMAN | 96% | 1314 | 1760 |
| | | | | 1 SUBUNIT ( | | 96% | 789 | 1085 |
| | | | | | | 85% | 363 | 569 |
| HETDP76 | 782836 | 1316 | WUblastx.64 | (Q9BUK6) HYPOTHETICAL 61.8 KDA PROTEIN. | Q9BUK6 | 100% | 29 | 394 |
| | | | | | | 92% | 700 | 1620 |
| | | | | | | 80% | 1895 | 2116 |
| | | | | | | 53% | 1428 | 1466 |
| | | | | | | 100% | 465 | 653 |
| HETFO57 | 844190 | 1317 | WUblastx.64 | (Q9H229) RAD50-INTERACTING PROTEIN 1. | Q9H229 | 96% | 2 | 1363 |
| HFAAI17 | 607563 | 1322 | WUblastx.64 | (Q9H387) PRO2550. | Q9H387 | 61% | 426 | 518 |
| | | | | | | 73% | 281 | 403 |
| HFADF41 | 607557 | 1324 | WUblastx.64 | B-cell growth factor precursor - human | pir\|A47582\|A47582 | 56% | 600 | 737 |
| HFADM09 | 899435 | 1325 | WUblastx.64 | ISOFORM 8 OF Q9Y4J8 | sp_vs\|Q9Y4J8- | 100% | 382 | 480 |
| | | | | | 02\|Q9Y4J8 | | | |
| HFAUA23 | 636071 | 1326 | WUblastx.64 | (Q9HAL3) CDNA FLJ11393 FIS, CLONE HEMBA1000591, | Q9HAL3 | 25% | 243 | 91 |
| | | | | WEAKLY SIMILAR TO PTB | | 45% | 466 | 263 |
| HFCAG75 | 834834 | 1327 | WUblastx.64 | (AAK55521) PRO0764. | AAK55521 | 80% | 745 | 701 |
| | | | | | | 78% | 720 | 484 |
| HFCAI40 | 866441 | 1328 | HMMER 2.1.1 | PFAM: TPR Domain | PF00515 | 52.6 | 167 | 253 |
| | | | WUblastx.64 | (Q9V532) CG8777 PROTEIN. | Q9V532 | 36% | 20 | 1021 |
| HFCAQ17 | 695720 | 1329 | WUblastx.64 | NADH dehydrogenase (ubiquinone) (EC 1.6.5.3) chain NDUFA3 - | pir\|JE0379\|JE0379 | 78% | 20 | 238 |
| | | | | human | | | | |
| HFCBC16 | 559312 | 1330 | WUblastx.64 | (Q9H743) CDNA: FLJ21394 FIS, CLONE COL03536. | Q9H743 | 55% | 998 | 792 |
| HFCBT29 | 654842 | 1334 | WUblastx.64 | (Q9H9H1) CDNA FLJ12756 FIS, CLONE NT2RP2001295, | Q9H9H1 | 73% | 80 | 280 |
| | | | | WEAKLY SIMILAR TO ZIN | | | | |
| HFCDN13 | 722221 | 1336 | WUblastx.64 | (Q9P0T7) HSPC186 (HYPOTHETICAL 20.6 KDA PROTEIN). | Q9P0T7 | 90% | 2 | 187 |
| HFCDT67 | 598900 | 1337 | WUblastx.64 | (Q9H0N3) HYPOTHETICAL 107.1 KDA PROTEIN. | Q9H0N3 | 82% | 9 | 455 |
| | | | | | | 77% | 845 | 910 |
| | | | | | | 45% | 373 | 438 |
| | | | | | | 67% | 498 | 902 |
| HFCDY36 | 834512 | 1338 | WUblastx.64 | catalase (EC 1.11.1.6) - Campylobacter jejuni | pir\|I40767\|I40767 | 93% | 279 | 190 |
| HFCEC45 | 847384 | 1339 | WUblastx.64 | (Q9D3Q4) 5033428A16RIK PROTEIN. | Q9D3Q4 | 98% | 68 | 349 |
| HFCET43 | 596813 | 1340 | WUblastx.64 | (Q9Z1M7) ACETYLGLUCOSAMINYLTRANSFERASE-LIKE | Q9Z1M7 | 100% | 7 | 144 |
| | | | | PROTEIN. | | | | |
| HFEAG55 | 838142 | 1341 | WUblastx.64 | (Q9EP97) SENTRIN/SUMO-SPECIFIC PROTEASE (SMT3 | Q9EP97 | 100% | 12 | 200 |
| | | | | ISOPEPTIDASE 1). | | | | |
| HFEAU63 | 790190 | 1342 | WUblastx.64 | ISOFORM EYA1B OF Q99502 | sp_vs\|Q99502- | 90% | 2180 | 2028 |
| | | | | | 01\|Q99502 | | | |
| HFEBA88 | 684297 | 1343 | WUblastx.64 | (BAB55210) CDNA FLJ14675 fis, clone NT2RP2003952, w | BAB55210 | 100% | 205 | 297 |
| | | | | | | 44% | 70 | 327 |
| HFEBO15 | 831772 | 1345 | WUblastx.64 | (Q9HC46) HYPOTHETICAL 42.8 KDA PROTEIN. | Q9HC46 | 85% | 226 | 477 |
| | | | | | | 53% | 150 | 332 |
| | | | | | | 51% | 2 | 298 |
| HFEBO17 | 852218 | 1346 | WUblastx.64 | (BAB55130) CDNA FLJ14559 fis, clone NT2RM2001998. | BAB55130 | 100% | 523 | 624 |
| | | | | | | 91% | 606 | 809 |
| HFFAE46 | 654843 | 1347 | WUblastx.64 | (O14597) NON-FUNCTIONAL FOLATE BINDING PROTEIN. | O14597 | 100% | 608 | 658 |
| | | | | | | 96% | 703 | 801 |
| | | | | | | 78% | 386 | 442 |
| | | | | | | 58% | 602 | 649 |
| | | | | | | 57% | 402 | 632 |
| HFFAH01 | 843438 | 1348 | WUblastx.64 | hypothetical protein DKFZp434P1721.1 - human (fragment) | pir\|T43460\|T43460 | 91% | 510 | 241 |
| | | | | | | 98% | 259 | 11 |
| | | | | | | 95% | 818 | 513 |
| HFFAL70 | 827570 | 1349 | WUblastx.64 | (AAH07384) Unknown (protein for IMAGE: 3677194) (Fra | AAH07384 | 84% | 921 | 466 |
| HFFAV61 | 664486 | 1350 | WUblastx.64 | (BAA92711) Adaptor protein p130Cas. | BAA92711 | 100% | 1555 | 1184 |
| | | | | | | 50% | 577 | 536 |
| HFGAN63 | 708053 | 1353 | WUblastx.64 | (Q9D4E9) 4932701A20RIK PROTEIN. | Q9D4E9 | 34% | 159 | 542 |
| | | | | | | 52% | 561 | 617 |
| HFIAB78 | 581054 | 1355 | WUblastx.64 | (Q9UKA1) F-BOX PROTEIN FBL5 (FRAGMENT). | Q9UKA1 | 100% | 672 | 872 |
| | | | | | | 100% | 14 | 667 |
| | | | | | | 58% | 608 | 658 |
| | | | | | | 32% | 461 | 661 |
| | | | | | | 36% | 690 | 836 |
| HFIIK29 | 843587 | 1360 | WUblastx.64 | (Q9H705) CDNA: FLJ21611 FIS, CLONE COL07344. | Q9H705 | 94% | 48 | 218 |
| HFIIK29 | 852308 | 1361 | WUblastx.64 | (Q9H705) CDNA: FLJ21611 FIS, CLONE COL07344. | Q9H705 | 94% | 48 | 218 |
| HFIIK29 | 873681 | 1362 | WUblastx.64 | (Q9H705) CDNA: FLJ21611 FIS, CLONE COL07344. | Q9H705 | 94% | 48 | 218 |
| HFIIK29 | 885007 | 1363 | WUblastx.64 | (Q9H705) CDNA: FLJ21611 FIS, CLONE COL07344. | Q9H705 | 94% | 48 | 218 |
| HFIIZ61 | 855939 | 1366 | WUblastx.64 | (Q62786) PROSTAGLANDIN F2-ALPHA RECEPTOR | FPRP_RAT | 92% | 35 | 229 |
| | | | | REGULATORY PROTEIN | | | | |
| HFIUT21 | 794323 | 1372 | WUblastx.64 | (AAH07934) DKFZP434A043 protein. | AAH07934 | 100% | 6 | 320 |
| HFIXC39 | 683053 | 1374 | WUblastx.64 | hypothetical protein 1 - rat (fragment) | pir\|S33477\|S33477 | 36% | 1816 | 1541 |
| HFIXC69 | 704080 | 1375 | WUblastx.64 | (Q9NRX3) NADH:UBIQUINONE OXIDOREDUCTASE MLRQ | Q9NRX3 | 87% | 32 | 292 |
| | | | | SUBUNIT HOMOLOG. | | | | |
| HFIXE39 | 844408 | 1376 | WUblastx.64 | (CAC18649) Lipoyl-containing component X precursor. | CAC18649 | 100% | 1394 | 1651 |
| HFIYP15 | 688044 | 1377 | WUblastx.64 | (Q9H324) ZINC METALLOENDOPEPTIDASE (FRAGMENT). | Q9H324 | 49% | 430 | 1074 |
| | | | | | | 35% | 406 | 915 |
| | | | | | | 31% | 553 | 1110 |
| | | | | | | 36% | 712 | 966 |
| | | | | | | 33% | 577 | 738 |
| | | | | | | 34% | 481 | 558 |
| HFKBC47 | 847076 | 1383 | WUblastx.64 | (O95302) FK506-BINDING PROTEIN (FRAGMENT). | O95302 | 99% | 1177 | 323 |
| | | | | | | 54% | 1174 | 404 |
| | | | | | | 47% | 997 | 323 |
| HFKDX53 | 731867 | 1384 | WUblastx.64 | (Q9BTV6) UNKNOWN (PROTEIN FOR IMAGE:3502107) | Q9BTV6 | 100% | 407 | 763 |
| | | | | (FRAGMENT). | | 65% | 204 | 371 |
| | | | | | | 100% | 766 | 1296 |
| HFKEB14 | 709663 | 1385 | WUblastx.64 | (Q9NVY4) CDNA FLJ10436 FIS, CLONE NT2RP1000574, | Q9NVY4 | 97% | 8 | 127 |
| | | | | HIGHLY SIMILAR TO HOM | | | | |
| HFKEU17 | 815554 | 1389 | WUblastx.64 | (AAH00465) Growth arrest and DNA-damage-inducible, | AAH00465 | 97% | 226 | 330 |
| | | | | | | 86% | 473 | 784 |
| HFKEV77 | 850678 | 1390 | WUblastx.64 | hypothetical protein DKFZp564B167.1 - human | pir\|T14797\|T14797 | 89% | 238 | 567 |
| HFKFI15 | 775846 | 1391 | WUblastx.64 | (Q12948) FORKHEAD BOX PROTEIN C1 (FORKHEAD- | FXC1_HUMAN | 100% | 2 | 166 |
| | | | | RELATED PROTEIN | | | | |
| HFKFK49 | 847077 | 1393 | WUblastx.64 | (Q9UHR0) MAP KINASE-INTERACTING KINASE. | Q9UHR0 | 100% | 277 | 366 |
| HFOXD49 | 844524 | 1398 | WUblastx.64 | (O15194) YA22 PROTEIN (HYA22). | O15194 | 99% | 7 | 435 |
| HFOXE28 | 847385 | 1399 | WUblastx.64 | (Q9H0E0) HYPOTHETICAL 13.4 KDA PROTEIN. | Q9H0E0 | 47% | 1011 | 1286 |
| | | | | | | 39% | 135 | 476 |
| | | | | | | 34% | 360 | 671 |
| | | | | | | 60% | 837 | 881 |
| HFOYR54 | 743196 | 1403 | WUblastx.64 | (O00566) U3 SMALL NUCLEOLAR RIBONUCLEOPROTEIN | MP10_HUMAN | 78% | 118 | 1365 |
| | | | | PROTEIN MPP10 | | 63% | 136 | 168 |
| HFPBQ55 | 608171 | 1409 | WUblastx.64 | (Q24333) ELASTIN LIKE PROTEIN (FRAGMENT). | Q24333 | 100% | 45 | 116 |
| HFPCM32 | 608215 | 1411 | WUblastx.64 | (Q9H743) CDNA: FLJ21394 FIS, CLONE COL03536. | Q9H743 | 48% | 719 | 441 |
| HFPCU47 | 741049 | 1414 | WUblastx.64 | (Q9H728) CDNA: FLJ21463 FIS, CLONE COL04765. | Q9H728 | 59% | 1645 | 1580 |
| | | | | | | 58% | 1598 | 1356 |
| HFPCY66 | 825718 | 1415 | WUblastx.64 | (Q9H387) PRO2550. | Q9H387 | 72% | 1371 | 1252 |
| | | | | | | 72% | 1555 | 1424 |
| HFPDC65 | 839208 | 1416 | WUblastx.64 | (Q9H5G8) CDNA: FLJ23451 FIS, CLONE HSI06456. | Q9H5G8 | 100% | 72 | 605 |
| HFPDE42 | 844402 | 1417 | WUblastx.64 | (Q99PQ3) TRIPARTITE MOTIF PROTEIN TRIM9 | Q99PQ3 | 97% | 3 | 218 |
| | | | | (FRAGMENT). | | | | |
| HFPDP70 | 745433 | 1420 | WUblastx.64 | (Q9H919) CDNA FLJ13078 FIS, CLONE NT2RP3002002. | Q9H919 | 83% | 937 | 990 |
| | | | | | | 88% | 879 | 905 |
| | | | | | | 58% | 980 | 1096 |
| HFPDX08 | 746379 | 1422 | WUblastx.64 | (Q9H9Y3) CDNA FLJ12474 FIS, CLONE NT2RM1000927. | Q9H9Y3 | 100% | 3 | 311 |
| HFPEP69 | 835459 | 1423 | WUblastx.64 | (Q9P0X1) LIPOPOLYSACCHARIDE SPECIFIC RESPONSE-5 | Q9P0X1 | 96% | 654 | 749 |
| | | | | PROTEIN (FRAGMENT). | | | | |
| HFRAU40 | 701986 | 1424 | WUblastx.64 | hypothetical protein 3 - human | pir\|E41925\|E41925 | 34% | 228 | 109 |
| | | | | | | 57% | 511 | 428 |
| | | | | | | 45% | 428 | 252 |
| HFSAY91 | 828067 | 1426 | WUblastx.64 | hypothetical protein DKFZp434M035.1 - human | pir\|T46933\|T46933 | 100% | 1280 | 1197 |
| | | | | | | 92% | 1096 | 437 |
| HFSBC10 | 638315 | 1427 | WUblastx.64 | (O95025) SEMAPHORIN 3D PRECURSOR. | SM3D_HUMAN | 82% | 1437 | 532 |
| | | | | | | 82% | 626 | 231 |
| | | | | | | 54% | 742 | 443 |
| | | | | | | 100% | 234 | 67 |
| HFSBE94 | 600398 | 1428 | WUblastx.64 | (Q9P195) PRO1722. | Q9P195 | 75% | 705 | 610 |
| | | | | | | 73% | 853 | 695 |
| HFTAN11 | 638316 | 1429 | WUblastx.64 | (Q9H387) PRO2550. | Q9H387 | 54% | 676 | 614 |
| | | | | | | 82% | 771 | 667 |
| | | | | | | 68% | 537 | 490 |
| | | | | | | 83% | 617 | 489 |
| HFTBL17 | 844488 | 1434 | WUblastx.64 | (Q14288) HYPOTHETICAL PROTEIN (FRAGMENT). | Q14288 | 95% | 967 | 710 |
| HFTBL17 | 863152 | 1435 | WUblastx.64 | (Q14288) HYPOTHETICAL PROTEIN (FRAGMENT). | Q14288 | 95% | 969 | 712 |
| HFTCI85 | 664487 | 1437 | WUblastx.64 | (O60448) NEURONAL THREAD PROTEIN AD7C-NTP. | O60448 | 63% | 1140 | 1075 |
| | | | | | | 92% | 1070 | 1032 |
| | | | | | | 38% | 1139 | 1032 |
| | | | | | | 67% | 1285 | 1130 |
| | | | | | | 59% | 1067 | 1002 |
| | | | | | | 33% | 877 | 707 |
| | | | | | | 65% | 1275 | 1129 |
| | | | | | | 77% | 1283 | 1257 |
| | | | | | | 72% | 1276 | 1019 |
| HFTCJ32 | 604911 | 1438 | WUblastx.64 | (Q9H387) PRO2550. | Q9H387 | 59% | 669 | 586 |
| | | | | | | 71% | 889 | 689 |
| HFTCO17 | 844354 | 1439 | WUblastx.64 | (Q9QY01) SERINE/THREONINE KINASE UNC51.2. | Q9QY01 | 83% | 1 | 231 |
| | | | | | | 95% | 216 | 611 |
| HFTCW07 | 604987 | 1440 | WUblastx.64 | (Q9H5R3) CDNA: FLJ23147 FIS, CLONE LNG09295. | Q9H5R3 | 75% | 798 | 589 |
| HFTDF32 | 600360 | 1441 | WUblastx.64 | (Q9H728) CDNA: FLJ21463 FIS, CLONE COL04765. | Q9H728 | 73% | 1017 | 1310 |
| HFTDF79 | 827459 | 1442 | WUblastx.64 | hypothetical protein XF0051 [imported] - Xylella fastidiosa (strain | pir\|G82853\|G82853 | 40% | 873 | 691 |
| | | | | 9a5c) | | 32% | 872 | 627 |
| | | | | | | 51% | 1202 | 1113 |
| | | | | | | 42% | 813 | 589 |
| | | | | | | 32% | 961 | 716 |
| | | | | | | 28% | 792 | 424 |
| | | | | | | 62% | 1184 | 1113 |
| | | | | | | 62% | 1184 | 1113 |
| | | | | | | 42% | 873 | 619 |
| HFTDK11 | 837382 | 1443 | WUblastx.64 | (Q9Y6D7) ES18 (FRAGMENT). | Q9Y6D7 | 100% | 2 | 67 |
| | | | | | | 100% | 558 | 650 |
| | | | | | | 63% | 97 | 618 |
| HFTDU08 | 825715 | 1444 | WUblastx.64 | (Q9NX85) CDNA FLJ20378 FIS, CLONE KAIA0536. | Q9NX85 | 70% | 885 | 775 |
| HFVGK67 | 569778 | 1445 | WUblastx.64 | (Q9H387) PRO2550. | Q9H387 | 83% | 1269 | 985 |
| HFVHD38 | 826709 | 1446 | WUblastx.64 | SHORT ISOFORM OF O00339 | sp_vs\|O00339- | 98% | 2163 | 550 |
| | | | | | 01\|O00339 | 56% | 2163 | 1387 |
| | | | | | | 50% | 2163 | 1387 |
| | | | | | | 49% | 2163 | 1387 |
| | | | | | | 48% | 2142 | 1387 |
| | | | | | | 40% | 1386 | 820 |
| HFVIC33 | 799524 | 1448 | HMMER 2.1.1 | PFAM: Enoyl-CoA hydratase/isomerase family | PF00378 | 34.7 | 462 | 680 |
| | | | WUblastx.64 | (Q9NTX5) DJ351K20.2.1 (NOVEL ENOYL COA/ACYL COA | Q9NTX5 | 96% | 694 | 975 |
| | | | | HYDRATASE/DEHYDROGENA | | 99% | 72 | 716 |
| HFXAK32 | 638319 | 1449 | WUblastx.64 | (Q9BGW3) HYPOTHETICAL 13.5 KDA PROTEIN. | Q9BGW3 | 40% | 1403 | 1104 |
| HFXAK59 | 831141 | 1450 | WUblastx.64 | (Q9BTC8) SIMILAR TO METASTASIS ASSOCIATED 1. | Q9BTC8 | 95% | 1537 | 431 |
| HFXBM52 | 737672 | 1453 | WUblastx.64 | (Q9HA67) CDNA FLJ12155 FIS, CLONE MAMMA1000472. | Q9HA67 | 80% | 708 | 631 |
| | | | | | | 50% | 123 | 64 |
| | | | | | | 68% | 569 | 465 |
| HFXBV67 | 748230 | 1455 | WUblastx.64 | hypothetical protein (L1H 3′ region) - human | pir\|B34087\|B34087 | 52% | 1618 | 1319 |
| HFXCI42 | 606806 | 1458 | WUblastx.64 | (Q9GMI7) HYPOTHETICAL 9.0 KDA PROTEIN. | Q9GMI7 | 43% | 542 | 297 |
| | | | | | | 72% | 534 | 406 |
| HFXCL59 | 825713 | 1459 | WUblastx.64 | (Q9NSI6) WD-REPEAT PROTEIN 9 (FRAGMENT). | WDR9_HUMAN | 90% | 1008 | 397 |
| | | | | | | 76% | 53 | 3 |
| | | | | | | 35% | 1002 | 385 |
| | | | | | | 28% | 993 | 604 |
| | | | | | | 24% | 960 | 556 |
| | | | | | | 29% | 349 | 182 |
| | | | | | | 100% | 367 | 182 |
| | | | | | | 88% | 180 | 154 |
| HFXCS53 | 828903 | 1462 | WUblastx.64 | (Q9H8H0) CDNA FLJ13640 FIS, CLONE PLACE1011221. | Q9H8H0 | 99% | 1107 | 442 |
| HFXDB37 | 569805 | 1463 | WUblastx.64 | (Q9GMX5) HYPOTHETICAL 12.9 KDA PROTEIN. | Q9GMX5 | 58% | 1116 | 1208 |
| | | | | | | 57% | 991 | 1131 |
| HFXDL76 | 821571 | 1466 | WUblastx.64 | probable pol polyprotein-related protein 4 - rat | pir\|S21348\|S21348 | 63% | 1811 | 1746 |
| | | | | | | 48% | 1520 | 1446 |
| | | | | | | 64% | 1740 | 1519 |
| HFXDP44 | 590269 | 1469 | WUblastx.64 | (Q9NX17) CDNA FLJ20489 FIS, CLONE KAT08285. | Q9NX17 | 64% | 531 | 761 |
| | | | | | | 50% | 918 | 1115 |
| | | | | | | 88% | 745 | 825 |
| | | | | | | 36% | 1005 | 1103 |
| | | | | | | 30% | 660 | 779 |
| HFXDR08 | 621342 | 1470 | WUblastx.64 | (Q9BGV8) HYPOTHETICAL 10.0 KDA PROTEIN. | Q9BGV8 | 64% | 506 | 700 |
| HFXDR28 | 621300 | 1471 | WUblastx.64 | (Q9H5R3) CDNA: FLJ23147 FIS, CLONE LNG09295. | Q9H5R3 | 68% | 652 | 717 |
| | | | | | | 70% | 501 | 653 |
| HFXDR28 | 873859 | 1472 | WUblastx.64 | (Q9H5X2) CDNA: FLJ22865 FIS, CLONE KAT02171. | Q9H5X2 | 98% | 853 | 314 |
| HFXDR47 | 846477 | 1473 | WUblastx.64 | (Q9H387) PRO2550. | Q9H387 | 100% | 977 | 957 |
| | | | | | | 92% | 1051 | 1010 |
| | | | | | | 65% | 957 | 733 |
| HFXDZ03 | 846323 | 1474 | WUblastx.64 | (Q9UN78) HYPOTHETICAL 40.1 KDA PROTEIN. | Q9UN78 | 32% | 1065 | 739 |
| | | | | | | 52% | 528 | 385 |
| | | | | | | 24% | 1161 | 877 |
| | | | | | | 39% | 757 | 521 |
| HFXEE88 | 838822 | 1476 | WUblastx.64 | (Q9NX17) CDNA FLJ20489 FIS, CLONE KAT08285. | Q9NX17 | 56% | 1310 | 1116 |
| HFXGR32 | 534607 | 1477 | WUblastx.64 | (Q9HA67) CDNA FLJ12155 FIS, CLONE MAMMA1000472. | Q9HA67 | 57% | 24 | 272 |
| HFXGT51 | 638174 | 1478 | WUblastx.64 | (Q9NX85) CDNA FLJ20378 FIS, CLONE KAIA0536. | Q9NX85 | 74% | 1126 | 989 |
| | | | | | | 78% | 1232 | 1107 |
| HFXHI33 | 874255 | 1481 | WUblastx.64 | (Q9HBS7) HYPOTHETICAL 14.2 KDA PROTEIN. | Q9HBS7 | 66% | 1535 | 1278 |
| HFXHL21 | 581363 | 1482 | WUblastx.64 | (Q9BGW3) HYPOTHETICAL 13.5 KDA PROTEIN. | Q9BGW3 | 56% | 1441 | 1373 |
| | | | | | | 64% | 1601 | 1443 |
| HFXHM93 | 858720 | 1485 | WUblastx.64 | (AAK55521) PRO0764. | AAK55521 | 66% | 803 | 1027 |
| HFXHN89 | 786196 | 1486 | WUblastx.64 | (O60448) NEURONAL THREAD PROTEIN AD7C-NTP. | O60448 | 61% | 1063 | 1218 |
| | | | | | | 59% | 1208 | 1273 |
| | | | | | | 65% | 1072 | 1332 |
| HFXJB21 | 743165 | 1487 | WUblastx.64 | (Q9H728) CDNA: FLJ21463 FIS, CLONE COL04765. | Q9H728 | 73% | 1269 | 1003 |
| HFXJN93 | 596815 | 1488 | WUblastx.64 | (Q9D4B1) 4933405A16RIK PROTEIN. | Q9D4B1 | 97% | 501 | 298 |
| HFXJS15 | 800866 | 1489 | WUblastx.64 | (Q9ESN6) NEURAL ACTIVITY-RELATED RING FINGER | Q9ESN6 | 97% | 1 | 447 |
| | | | | PROTEIN (TRIPARTITE MOTI | | 32% | 37 | 438 |
| | | | | | | 33% | 10 | 435 |
| | | | | | | 31% | 10 | 516 |
| HFXJT53 | 823591 | 1490 | WUblastx.64 | (AAL50053) Viperin. | AAL50053 | 94% | 111 | 1193 |
| HFXKL60 | 895307 | 1492 | WUblastx.64 | (Q9H3C0) PRO0898. | Q9H3C0 | 37% | 1749 | 1889 |
| | | | | | | 67% | 1865 | 2029 |
| HFXLG08 | 885514 | 1493 | WUblastx.64 | (Q9GMX5) HYPOTHETICAL 12.9 KDA PROTEIN. | Q9GMX5 | 60% | 1303 | 1067 |
| HFXLK91 | 827288 | 1494 | WUblastx.64 | (Q9NWT2) CDNA FLJ20623 FIS, CLONE KAT04793. | Q9NWT2 | 87% | 3 | 827 |
| HGBBR29 | 823106 | 1497 | WUblastx.64 | (O43592) EXPORTIN T. | O43592 | 100% | 183 | 1118 |
| HGBDV35 | 581058 | 1499 | WUblastx.64 | (AAK53702) ADMP. | AAK53702 | 42% | 91 | 252 |
| HGBHE23 | 832303 | 1502 | WUblastx.64 | hypothetical protein DKFZp564N1362.1 - human (fragment) | pir\|T12479\|T12479 | 86% | 24 | 455 |
| HGBHI15 | 608170 | 1503 | WUblastx.64 | (Q9BGW3) HYPOTHETICAL 13.5 KDA PROTEIN. | Q9BGW3 | 63% | 663 | 565 |
| | | | | | | 65% | 559 | 380 |
| HGLAG32 | 668271 | 1505 | WUblastx.64 | (Q9BRZ3) UNKNOWN (PROTEIN FOR MGC: 2724). | Q9BRZ3 | 66% | 2 | 154 |
| HGLAH86 | 603525 | 1507 | WUblastx.64 | (Q9NX17) CDNA FLJ20489 FIS, CLONE KAT08285. | Q9NX17 | 55% | 824 | 618 |
| HHEBP28 | 775744 | 1517 | WUblastx.64 | (Q9BRL7) SIMILAR TO VESICLE TRAFFICKING PROTEIN. | Q9BRL7 | 100% | 3 | 233 |
| HHECR10 | 621371 | 1519 | WUblastx.64 | (Q9H7S6) CDNA FLJ14310 FIS, CLONE PLACE3000271. | Q9H7S6 | 64% | 972 | 766 |
| HHEMC55 | 566796 | 1520 | WUblastx.64 | (O60448) NEURONAL THREAD PROTEIN AD7C-NTP. | O60448 | 64% | 605 | 417 |
| | | | | | | 42% | 659 | 417 |
| | | | | | | 63% | 1063 | 896 |
| | | | | | | 48% | 912 | 808 |
| | | | | | | 41% | 575 | 405 |
| | | | | | | 47% | 1063 | 965 |
| | | | | | | 40% | 1017 | 781 |
| | | | | | | 42% | 976 | 878 |
| | | | | | | 61% | 1060 | 827 |
| | | | | | | 32% | 1063 | 812 |
| | | | | | | 50% | 896 | 771 |
| | | | | | | 80% | 349 | 320 |
| | | | | | | 65% | 656 | 597 |
| | | | | | | 40% | 606 | 325 |
| | | | | | | 43% | 516 | 343 |
| | | | | | | 45% | 941 | 885 |
| | | | | | | 65% | 606 | 445 |
| HHEMP35 | 821328 | 1523 | WUblastx.64 | (Q9Y6X2) PROTEIN INHIBITOR OF ACTIVATIED STAT3 | Q9Y6X2 | 93% | 302 | 931 |
| | | | | (PROTEIN INHIBITOR OF | | 60% | 75 | 308 |
| HHEMZ08 | 840026 | 1524 | WUblastx.64 | (Q9NZ80) UNCHARACTERIZED BONE MARROW PROTEIN | Q9NZ80 | 77% | 845 | 1351 |
| | | | | BM042. | | | | |
| HHENR74 | 825671 | 1527 | WUblastx.64 | (Q9H728) CDNA: FLJ21463 FIS, CLONE COL04765. | Q9H728 | 70% | 1005 | 1085 |
| | | | | | | 77% | 811 | 876 |
| | | | | | | 76% | 878 | 1003 |
| HHENY07 | 638321 | 1529 | WUblastx.64 | (O00311) CELL DIVISION CYCLE 7-RELATED PROTEIN | CDC7_HUMAN | 88% | 8 | 136 |
| | | | | KINASE (EC 2 | | 98% | 121 | 744 |
| HHEOK77 | 841099 | 1530 | WUblastx.64 | (Q9Z1W6) P80 (FRAGMENT). | Q9Z1W6 | 76% | 238 | 276 |
| | | | | | | 87% | 942 | 1127 |
| | | | | | | 23% | 510 | 764 |
| | | | | | | 80% | 315 | 977 |
| HHEPE72 | 621254 | 1531 | WUblastx.64 | (Q9H728) CDNA: FLJ21463 FIS, CLONE COL04765. | Q9H728 | 53% | 1015 | 749 |
| HHEPE81 | 840614 | 1532 | WUblastx.64 | (O95373) RANBP7/IMPORTIN 7. | O95373 | 86% | 3 | 389 |
| HHEQY60 | 799535 | 1535 | WUblastx.64 | (O60448) NEURONAL THREAD PROTEIN AD7C-NTP. | O60448 | 68% | 703 | 566 |
| | | | | | | 62% | 731 | 555 |
| | | | | | | 68% | 568 | 503 |
| | | | | | | 47% | 570 | 502 |
| | | | | | | 58% | 489 | 439 |
| | | | | | | 65% | 731 | 429 |
| HHFEB79 | 1300768 | 1541 | WUblastx.64 | (Q92545) RW1 PROTEIN (FRAGMENT). | RW1_HUMAN | 74% | 708 | 2387 |
| | | | | | | 80% | 6 | 590 |
| | | | | | | 32% | 1984 | 2148 |
| HHFEB79 | 863749 | 3107 | WUblastx.64 | Similar to a C. elegans protein encoded in cosmid C27F2 (U40419) | dbj\|BAA13387.1\| | 69% | 1303 | 2400 |
| | | | | [Homo sapiens] | | 80% | 601 | 1185 |
| HHFEN34 | 701992 | 1543 | WUblastx.64 | (Q9HAD8) CDNA FLJ11786 FIS, CLONE HEMBA1006036. | Q9HAD8 | 63% | 709 | 644 |
| | | | | | | 57% | 942 | 691 |
| HHFFZ01 | 847388 | 1544 | WUblastx.64 | (Q9H6Y7) CDNA: FLJ21676 FIS, CLONE COL09164. | Q9H6Y7 | 89% | 835 | 1080 |
| | | | | | | 91% | 1077 | 1763 |
| HHFGI71 | 663531 | 1545 | WUblastx.64 | (Q9BGW3) HYPOTHETICAL 13.5 KDA PROTEIN. | Q9BGW3 | 75% | 1174 | 1272 |
| | | | | | | 67% | 1424 | 1269 |
| HHFGJ54 | 731870 | 1546 | WUblastx.64 | (Q9H906) CDNA FLJ13099 FIS, CLONE NT2RP3002248. | Q9H906 | 99% | 1232 | 1645 |
| | | | | | | 96% | 510 | 1259 |
| HHFGL38 | 833063 | 1547 | WUblastx.64 | (Q9H387) PRO2550. | Q9H387 | 53% | 2764 | 2465 |
| HHFGZ23 | 721653 | 1549 | WUblastx.64 | hypothetical protein 3 - human | pir\|E41925\|E41925 | 64% | 978 | 1136 |
| HHFHM47 | 638181 | 1551 | WUblastx.64 | (O60448) NEURONAL THREAD PROTEIN AD7C-NTP. | O60448 | 76% | 680 | 618 |
| | | | | | | 40% | 804 | 670 |
| | | | | | | 65% | 802 | 671 |
| | | | | | | 84% | 611 | 573 |
| | | | | | | 72% | 681 | 616 |
| | | | | | | 60% | 77 | 3 |
| | | | | | | 62% | 838 | 557 |
| HHGAA76 | 767745 | 1552 | WUblastx.64 | (Q14288) HYPOTHETICAL PROTEIN (FRAGMENT). | Q14288 | 49% | 1301 | 870 |
| | | | | | | 69% | 499 | 431 |
| | | | | | | 68% | 59 | 3 |
| | | | | | | 74% | 1455 | 1294 |
| | | | | | | 66% | 888 | 505 |
| HHGAD46 | 812646 | 1553 | WUblastx.64 | (Q9UGT4) BK65A6.2 (NOVEL SUSHI DOMAIN (SCR REPEAT) | Q9UGT4 | 85% | 148 | 783 |
| | | | | CONTAINING PROTEIN | | 67% | 3 | 203 |
| HHGBC21 | 840455 | 1555 | WUblastx.64 | (Q9H743) CDNA: FLJ21394 FIS, CLONE COL03536. | Q9H743 | 54% | 1118 | 858 |
| HHGBW55 | 638183 | 1559 | WUblastx.64 | hypothetical protein [imported] - human | pir\|T50835\|T50835 | 97% | 3 | 143 |
| HHGDR05 | 610266 | 1564 | WUblastx.64 | (Q9HAD8) CDNA FLJ11786 FIS, CLONE HEMBA1006036. | Q9HAD8 | 63% | 821 | 690 |
| HHGDR92 | 840454 | 1565 | WUblastx.64 | (Q9Y512) PROTEIN CGI-51. | CG51_HUMAN | 99% | 10 | 1104 |
| HHGDS56 | 663379 | 1566 | WUblastx.64 | (Q9NX85) CDNA FLJ20378 FIS, CLONE KAIA0536. | Q9NX85 | 57% | 1318 | 1187 |
| | | | | | | 62% | 1476 | 1309 |
| HHGDW65 | 825652 | 1567 | WUblastx.64 | (Q9GMX5) HYPOTHETICAL 12.9 KDA PROTEIN. | Q9GMX5 | 56% | 463 | 726 |
| HHPDE28 | 877640 | 1571 | WUblastx.64 | (Q9H620) CDNA: FLJ22673 FIS, CLONE HSI10503. | Q9H620 | 98% | 393 | 596 |
| HHPEB61 | 658693 | 1575 | WUblastx.64 | (Q9H743) CDNA: FLJ21394 FIS, CLONE COL03536. | Q9H743 | 50% | 777 | 935 |
| | | | | | | 54% | 622 | 804 |
| HHPFP26 | 753269 | 1576 | WUblastx.64 | (Q9BQG8) HYPOTHETICAL 32.5 KDA PROTEIN. | Q9BQG8 | 100% | 906 | 1742 |
| HHPFS11 | 570807 | 1577 | WUblastx.64 | (Q9H728) CDNA: FLJ21463 FIS, CLONE COL04765. | Q9H728 | 50% | 402 | 587 |
| HHPFS18 | 829347 | 1579 | WUblastx.64 | (Q9H728) CDNA: FLJ21463 FIS, CLONE COL04765. | Q9H728 | 75% | 2558 | 2427 |
| HHPGH34 | 535780 | 1580 | WUblastx.64 | (Q9BVD9) UNKNOWN (PROTEIN FOR MGC: 5149). | Q9BVD9 | 68% | 1019 | 972 |
| | | | | | | 64% | 835 | 794 |
| | | | | | | 68% | 963 | 850 |
| HHPGU87 | 658694 | 1582 | WUblastx.64 | SHORT ISOFORM OF O60658 | sp_vs\|O60658- | 100% | 1050 | 1274 |
| | | | | | 01\|O60658 | | | |
| HHPSE55 | 735562 | 1585 | WUblastx.64 | (Q9CQ15) 0610011N22RIK PROTEIN (RIKEN CDNA | Q9CQ15 | 79% | 67 | 846 |
| | | | | 0610011N22 GENE). | | | | |
| HHPSF70 | 709665 | 1586 | WUblastx.64 | (AAH18471) Similar to nitrogen fixation gene 1 (S. | AAH18471 | 81% | 1 | 96 |
| HHPSH74 | 638185 | 1587 | WUblastx.64 | hypothetical protein DKFZp566E044.1 - human | pir\|T46284\|T46284 | 72% | 323 | 1339 |
| | | | | | | 99% | 10 | 321 |
| | | | | | | 54% | 10 | 321 |
| | | | | | | 53% | 323 | 571 |
| | | | | | | 20% | 752 | 1030 |
| | | | | | | 87% | 1272 | 1730 |
| HHPTF26 | 857654 | 1590 | WUblastx.64 | (Q9BGW3) HYPOTHETICAL 13.5 KDA PROTEIN. | Q9BGW3 | 66% | 1006 | 752 |
| HHSAE74 | 839473 | 1592 | WUblastx.64 | (Q9P1J1) PRO1546. | Q9P1J1 | 89% | 451 | 365 |
| | | | | | | 87% | 588 | 442 |
| HHSAG62 | 847392 | 1593 | WUblastx.64 | (Q9H876) CDNA FLJ13898 FIS, CLONE THYRO1001738, | Q9H876 | 99% | 2 | 460 |
| | | | | WEAKLY SIMILAR TO TUB | | 99% | 600 | 1052 |
| | | | | | | 100% | 533 | 604 |
| HHSBJ92 | 838604 | 1595 | WUblastx.64 | (Q9BTM2) SIMILAR TO RIKEN CDNA 1300006O23 GENE | Q9BTM2 | 100% | 509 | 718 |
| | | | | (FRAGMENT). | | | | |
| HHSDB43 | 812510 | 1600 | HMMER 2.1.1 | PFAM: Zinc finger, C2H2 type | PF00096 | 117.4 | 877 | 945 |
| | | | WUblastx.64 | hypothetical protein DKFZp434H0127.1 - human (fragment) | pir\|T42688\|T42688 | 92% | 25 | 1344 |
| HHSDL07 | 899430 | 1601 | WUblastx.64 | (Q9UJH9) C380A1.2.1 (NOVEL PROTEIN (ISOFORM 1)) | Q9UJH9 | 85% | 9 | 317 |
| | | | | (UNKNOWN) (PROTEIN FO | | | | |
| HHSDX07 | 847393 | 1602 | WUblastx.64 | (Q9H9W2) CDNA FLJ12510 FIS, CLONE NT2RM2001723. | Q9H9W2 | 86% | 3 | 512 |
| | | | | | | 79% | 434 | 1066 |
| HHSFF54 | 836149 | 1603 | WUblastx.64 | (Q9BS18) UNKNOWN (PROTEIN FOR MGC: 12537). | Q9BS18 | 100% | 129 | 350 |
| HIABC70 | 838605 | 1607 | WUblastx.64 | (Q9NPJ9) APOLIPOPROTEIN B48 RECEPTOR. | Q9NPJ9 | 77% | 15 | 851 |
| | | | | | | 100% | 1047 | 1160 |
| | | | | | | 34% | 522 | 821 |
| | | | | | | 25% | 303 | 842 |
| | | | | | | 24% | 306 | 818 |
| | | | | | | 24% | 312 | 839 |
| HIBCO70 | 853360 | 1609 | HMMER 2.1.1 | PFAM: Myelin proteolipid protein (PLP or lipophilin) | PF01275 | 32.3 | 127 | 192 |
| | | | WUblastx.64 | (Q99NH0) GENE TRAP ANKYRIN REPEAT CONTAINING | Q99NH0 | 95% | 176 | 1564 |
| | | | | PROTEIN. | | 38% | 410 | 1414 |
| | | | | | | 39% | 413 | 1408 |
| | | | | | | 37% | 419 | 1411 |
| | | | | | | 39% | 413 | 1408 |
| | | | | | | 38% | 410 | 1360 |
| | | | | | | 37% | 443 | 1441 |
| | | | | | | 38% | 425 | 1420 |
| | | | | | | 37% | 608 | 1411 |
| | | | | | | 38% | 407 | 1141 |
| | | | | | | 33% | 887 | 1411 |
| HIBDA41 | 603909 | 1611 | WUblastx.64 | (Q9H387) PRO2550. | Q9H387 | 80% | 404 | 697 |
| HIBEC45 | 822854 | 1612 | WUblastx.64 | (Q9BGW3) HYPOTHETICAL 13.5 KDA PROTEIN. | Q9BGW3 | 63% | 1023 | 1283 |
| HILBW03 | 841377 | 1613 | WUblastx.64 | (Q9NVS4) CDNA FLJ10546 FIS, CLONE NT2RP2001721. | Q9NVS4 | 97% | 705 | 1163 |
| HISAE16 | 845233 | 1614 | WUblastx.64 | (Q9H728) CDNA: FLJ21463 FIS, CLONE COL04765. | Q9H728 | 85% | 7 | 90 |
| HISAG53 | 843902 | 1615 | WUblastx.64 | (BAB55426) CDNA FLJ14972 fis, clone THYRO1000715. | BAB55426 | 100% | 84 | 122 |
| | | | | | | 83% | 952 | 1614 |
| | | | | | | 78% | 127 | 993 |
| HISAN63 | 797658 | 1616 | WUblastx.64 | (O00363) PUTATIVE P150. | O00363 | 33% | 1609 | 1427 |
| | | | | | | 29% | 1299 | 1045 |
| | | | | | | 59% | 1454 | 1392 |
| | | | | | | 35% | 716 | 384 |
| HISAT78 | 840961 | 1617 | WUblastx.64 | (Q9NUD5) DJ1103G7.7 (PUTATIVE NOVEL PROTEIN). | Q9NUD5 | 66% | 155 | 280 |
| | | | | | | 96% | 13 | 108 |
| | | | | | | 29% | 594 | 767 |
| | | | | | | 100% | 114 | 194 |
| | | | | | | 32% | 591 | 785 |
| | | | | | | 50% | 538 | 567 |
| | | | | | | 100% | 576 | 743 |
| | | | | | | 98% | 280 | 567 |
| HISBA38 | 561711 | 1618 | WUblastx.64 | (Q9H387) PRO2550. | Q9H387 | 53% | 919 | 836 |
| | | | | | | 53% | 996 | 907 |
| | | | | | | 51% | 842 | 687 |
| HISBB66 | 839808 | 1619 | WUblastx.64 | (O95627) POTENTIAL TRANSCRIPTIONAL REPRESSOR | O95627 | 88% | 2 | 451 |
| | | | | NOT4HP. | | | | |
| HISEJ52 | 886777 | 1623 | WUblastx.64 | (Q9Y6J0) CALCINEURIN-BINDING PROTEIN CABIN 1 | CABI_HUMAN | 94% | 480 | 1697 |
| | | | | (CALCINEURIN I | | | | |
| HJABC58 | 753272 | 1624 | WUblastx.64 | (Q9H743) CDNA: FLJ21394 FIS, CLONE COL03536. | Q9H743 | 68% | 993 | 928 |
| | | | | | | 73% | 1186 | 998 |
| HJABS31 | 825607 | 1627 | WUblastx.64 | (AAG49400) Ring-H2 protein. | AAG49400 | 90% | 1 | 1221 |
| HJACE25 | 835517 | 1629 | WUblastx.64 | (O75921) RNA POLYMERASE II TERMINATION FACTOR. | O75921 | 95% | 381 | 662 |
| | | | | | | 91% | 64 | 390 |
| HJACK21 | 664506 | 1630 | WUblastx.64 | (Q9CYB5) 5730552M22RIK PROTEIN. | Q9CYB5 | 98% | 530 | 1123 |
| HJBCG74 | 839361 | 1631 | WUblastx.64 | (Q9UNW1) MULTIPLE INOSITOL POLYPHOSPHATE | Q9UNW1 | 88% | 33 | 560 |
| | | | | PHOSPHATASE. | | 99% | 560 | 1492 |
| HJBCO21 | 695727 | 1632 | WUblastx.64 | (Q9Y6E5) HSPC024-ISO. | Q9Y6E5 | 84% | 9 | 482 |
| HJBCQ40 | 831119 | 1633 | WUblastx.64 | (BAB55245) CDNA FLJ14722 fis, clone NT2RP3001621. | BAB55245 | 84% | 58 | 1068 |
| HJBDM36 | 773168 | 1634 | WUblastx.64 | (O15498) SNARE PROTEIN YKT6. | O15498 | 92% | 127 | 720 |
| HJMAZ60 | 844796 | 1637 | WUblastx.64 | (Q9D9R1) ADULT MALE TESTIS CDNA, RIKEN FULL- | Q9D9R1 | 87% | 482 | 1054 |
| | | | | LENGTH ENRICHED LIBRARY, | | 88% | 14 | 484 |
| HJMBB20 | 824264 | 1638 | WUblastx.64 | ISOFORM GAC OF O94925 | sp_vs\|O94925- | 99% | 3 | 527 |
| | | | | | 02\|O94925 | | | |
| HJMBB20 | 842673 | 1639 | WUblastx.64 | ISOFORM GAC OF O94925 | sp_vs\|O94925- | 100% | 4 | 1461 |
| | | | | | 02\|O94925 | | | |
| HJMBB20 | 844890 | 1640 | WUblastx.64 | ISOFORM GAC OF O94925 | sp_vs\|O94925- | 100% | 4 | 1461 |
| | | | | | 02\|O94925 | | | |
| HJMBK59 | 664490 | 1641 | WUblastx.64 | (O75935) DYNACTIN SUBUNIT. | O75935 | 100% | 2 | 286 |
| HJMBP01 | 638190 | 1642 | WUblastx.64 | (AAH00573) HSPC163 protein. | AAH00573 | 100% | 13 | 174 |
| HJPAF69 | 589794 | 1646 | WUblastx.64 | (Q9H387) PRO2550. | Q9H387 | 77% | 439 | 531 |
| | | | | | | 73% | 278 | 424 |
| HJPAQ19 | 566832 | 1647 | WUblastx.64 | hypothetical protein DKFZp564O092.1 - human (fragment) | pir\|T08694\|T08694 | 78% | 9 | 869 |
| HJPAZ35 | 845379 | 1648 | WUblastx.64 | (Q9Y262) HSPC025. | Q9Y262 | 95% | 126 | 1745 |
| HJPBI77 | 602875 | 1649 | WUblastx.64 | (Q9V756) CG10155 PROTEIN. | Q9V756 | 42% | 16 | 249 |
| HJPBN96 | 610087 | 1650 | WUblastx.64 | (Q9NX09) CDNA FLJ20500 FIS, CLONE KAT09159. | Q9NX09 | 100% | 106 | 288 |
| | | | | | | 100% | 70 | 108 |
| HJPBU47 | 824063 | 1651 | WUblastx.64 | (Q9NPM0) 8D6 ANTIGEN (FRAGMENT). | Q9NPM0 | 100% | 240 | 377 |
| | | | | | | 77% | 315 | 380 |
| | | | | | | 73% | 261 | 329 |
| | | | | | | 80% | 329 | 844 |
| HJPDK61 | 844034 | 1654 | WUblastx.64 | (Q9V7R7) CG8311 PROTEIN. | Q9V7R7 | 41% | 466 | 1194 |
| HKABI53 | 805966 | 1655 | WUblastx.64 | (Q9BUP3) TAT-INTERACTING PROTEIN (30 KD). | Q9BUP3 | 93% | 126 | 212 |
| | | | | | | 99% | 212 | 778 |
| HKABN63 | 566840 | 1656 | WUblastx.64 | (Q9BRZ8) SIMILAR TO RIKEN CDNA 1810009K13 GENE. | Q9BRZ8 | 85% | 40 | 306 |
| | | | | | | 98% | 263 | 700 |
| HKACA25 | 824087 | 1657 | WUblastx.64 | (Q9BGW3) HYPOTHETICAL 13.5 KDA PROTEIN. | Q9BGW3 | 64% | 1493 | 1543 |
| | | | | | | 66% | 1276 | 1488 |
| HKACO64 | 897591 | 1658 | WUblastx.64 | (Q9P195) PRO1722. | Q9P195 | 61% | 694 | 593 |
| | | | | | | 58% | 930 | 748 |
| HKACX90 | 604042 | 1660 | WUblastx.64 | (Q9CZH5) 2700094L05RIK PROTEIN. | Q9CZH5 | 69% | 13 | 510 |
| HKADI27 | 1028177 | 1661 | WUblastx.64 | (O35390) ENDO-ALPHA-D-MANNOSIDASE. | O35390 | 65% | 302 | 562 |
| | | | | | | 51% | 531 | 602 |
| | | | | | | 87% | 574 | 1512 |
| HKADN26 | 802131 | 1662 | WUblastx.64 | (Q24333) ELASTIN LIKE PROTEIN (FRAGMENT). | Q24333 | 48% | 57 | 263 |
| HKADT55 | 668243 | 1664 | WUblastx.64 | (Q9CS80) 5730420G12RIK PROTEIN (FRAGMENT). | Q9CS80 | 97% | 454 | 708 |
| | | | | | | 93% | 13 | 57 |
| HKAEK58 | 695729 | 1665 | HMMER 2.1.1 | PFAM: Acyl-CoA dehydrogenase | PF00441 | 449.8 | 160 | 1269 |
| | | | WUblastx.64 | (Q9UKU7) ACYL-COENZYME A DEHYDROGENASE-8. | Q9UKU7 | 100% | 39 | 113 |
| | | | | | | 99% | 112 | 1284 |
| HKAEK72 | 840457 | 1666 | HMMER 2.1.1 | PFAM: Sugar (and other) transporter | PF00083 | 70.8 | 270 | 575 |
| | | | WUblastx.64 | (Q9UGQ3) SUGAR TRANSPORTER (GLUCOSE | Q9UGQ3 | 99% | 9 | 602 |
| | | | | TRANSPORTER 9). | | | | |
| HKAFQ41 | 847281 | 1668 | WUblastx.64 | (O94771) TRANSCRIPTION FACTOR-LIKE 5. | O94771 | 84% | 36 | 896 |
| HKAHH71 | 846826 | 1669 | WUblastx.64 | (Q9VAA6) CG7950 PROTEIN. | Q9VAA6 | 57% | 31 | 348 |
| HKAKU90 | 838608 | 1671 | WUblastx.64 | (Q9H2T6) ANTIGEN ART1/P17. | Q9H2T6 | 85% | 19 | 1230 |
| HKFAA15 | 753275 | 1673 | WUblastx.64 | (Q9P195) PRO1722. | Q9P195 | 67% | 1748 | 1593 |
| | | | | | | 76% | 1605 | 1465 |
| HKGAJ81 | 581063 | 1676 | WUblastx.64 | (Q9H387) PRO2550. | Q9H387 | 81% | 445 | 335 |
| | | | | | | 48% | 1240 | 1166 |
| | | | | | | 70% | 620 | 429 |
| HKGAK45 | 809093 | 1677 | WUblastx.64 | (Q9H387) PRO2550. | Q9H387 | 63% | 1946 | 1815 |
| | | | | | | 68% | 2088 | 1945 |
| HKGAP57 | 841627 | 1679 | WUblastx.64 | (Q9NX85) CDNA FLJ20378 FIS, CLONE KAIA0536. | Q9NX85 | 54% | 770 | 639 |
| | | | | | | 72% | 907 | 767 |
| HKGAW41 | 858745 | 1680 | WUblastx.64 | (Q9H728) CDNA: FLJ21463 FIS, CLONE COL04765. | Q9H728 | 68% | 1458 | 1327 |
| | | | | | | 71% | 1622 | 1431 |
| HKGBA21 | 822870 | 1681 | WUblastx.64 | (O00367) L1 ELEMENT L1.19 P40 PROTEIN. | O00367 | 55% | 1697 | 1783 |
| | | | | | | 30% | 810 | 1064 |
| | | | | | | 50% | 1279 | 1731 |
| HKGBC33 | 823368 | 1682 | WUblastx.64 | (Q9UI50) PRO0657 (FRAGMENT). | Q9UI50 | 76% | 783 | 1001 |
| HKGBC73 | 608169 | 1683 | WUblastx.64 | (Q9BGV8) HYPOTHETICAL 10.0 KDA PROTEIN. | Q9BGV8 | 54% | 74 | 9 |
| | | | | | | 78% | 133 | 77 |
| HKGBF61 | 658697 | 1684 | WUblastx.64 | (AAK55521) PRO0764. | AAK55521 | 70% | 978 | 919 |
| | | | | | | 39% | 1700 | 1587 |
| | | | | | | 59% | 138 | 73 |
| | | | | | | 70% | 1171 | 980 |
| HKGBH54 | 588482 | 1685 | WUblastx.64 | (Q9UHT1) PRO1902 PROTEIN. | Q9UHT1 | 61% | 2206 | 2114 |
| | | | | | | 43% | 1994 | 1884 |
| | | | | | | 54% | 2135 | 1959 |
| HKGBP52 | 899282 | 1686 | WUblastx.64 | (Q9NX85) CDNA FLJ20378 FIS, CLONE KAIA0536. | Q9NX85 | 68% | 1562 | 1440 |
| | | | | | | 76% | 1726 | 1556 |
| HKGCE23 | 564825 | 1687 | WUblastx.64 | (Q9D445) 4933414E04RIK PROTEIN. | Q9D445 | 60% | 1456 | 1749 |
| HKGCE62 | 638200 | 1688 | WUblastx.64 | (Q9UHT1) PRO1902 PROTEIN. | Q9UHT1 | 63% | 995 | 897 |
| | | | | | | 61% | 1131 | 985 |
| HKGCK41 | 559327 | 1689 | WUblastx.64 | (Q9NQ89) MIB001 PROTEIN. | Q9NQ89 | 93% | 20 | 583 |
| HKGCK41 | 795256 | 1690 | WUblastx.64 | (Q9NQ89) MIB001 PROTEIN. | Q9NQ89 | 93% | 31 | 591 |
| HKGDA95 | 581064 | 1693 | WUblastx.64 | (Q9BYC7) MITOCHONDRIAL RIBOSOMAL PROTEIN | Q9BYC7 | 98% | 77 | 313 |
| | | | | BMRP36A. | | 98% | 618 | 782 |
| | | | | | | 82% | 428 | 625 |
| HKGDO12 | 857225 | 1694 | WUblastx.64 | (O60448) NEURONAL THREAD PROTEIN AD7C-NTP. | O60448 | 55% | 1223 | 1170 |
| | | | | | | 72% | 1429 | 1277 |
| | | | | | | 57% | 1437 | 1222 |
| | | | | | | 48% | 1218 | 1129 |
| | | | | | | 56% | 1289 | 1146 |
| | | | | | | 79% | 1441 | 1223 |
| HKIME53 | 636982 | 1695 | WUblastx.64 | (Q9H3S2) HCCA2 PROTEIN. | Q9H3S2 | 100% | 4 | 30 |
| | | | | | | 100% | 29 | 70 |
| | | | | | | 89% | 63 | 446 |
| HKIMG23 | 738671 | 1696 | WUblastx.64 | (O75896) FUS1 PROTEIN. | FUS1_HUMAN | 76% | 217 | 255 |
| | | | | | | 100% | 131 | 172 |
| | | | | | | 100% | 246 | 458 |
| HKMLF77 | 604743 | 1704 | WUblastx.64 | (Q9NX85) CDNA FLJ20378 FIS, CLONE KAIA0536. | Q9NX85 | 91% | 673 | 638 |
| | | | | | | 88% | 737 | 684 |
| | | | | | | 52% | 627 | 457 |
| HKMLM32 | 826523 | 1705 | WUblastx.64 | (Q9P0E3) HSPC093 (FRAGMENT). | Q9P0E3 | 57% | 861 | 1001 |
| HKMLR17 | 847432 | 1706 | HMMER 2.1.1 | PFAM: CUB domain | PF00431 | 145 | 425 | 760 |
| | | | WUblastx.64 | (Q9UKZ9) PROCOLLAGEN C-TERMINAL PROTEINASE | Q9UKZ9 | 94% | 8 | 1210 |
| | | | | ENHANCER PROTEIN 2. | | | | |
| HKMLT89 | 826167 | 1707 | WUblastx.64 | (Q9HD86) NAG18. | Q9HD86 | 87% | 1141 | 1233 |
| HKMLV05 | 663924 | 1708 | WUblastx.64 | (Q9H387) PRO2550. | Q9H387 | 81% | 1559 | 1290 |
| HKMLV25 | 695731 | 1709 | WUblastx.64 | (Q9BT42) SIMILAR TO LR8 PROTEIN. | Q9BT42 | 97% | 328 | 474 |
| | | | | | | 40% | 266 | 340 |
| | | | | | | 99% | 2 | 334 |
| HKMMD91 | 847394 | 1712 | WUblastx.64 | (AAH07729) Similar to RIKEN cDNA 2810021O14 gene. | AAH07729 | 100% | 1150 | 752 |
| HKMMP90 | 746876 | 1713 | WUblastx.64 | (O40947) ORF 73. | O40947 | 30% | 237 | 398 |
| | | | | | | 28% | 240 | 443 |
| | | | | | | 30% | 210 | 317 |
| | | | | | | 24% | 1054 | 1569 |
| | | | | | | 25% | 1054 | 1659 |
| | | | | | | 24% | 1054 | 1659 |
| | | | | | | 25% | 1054 | 1659 |
| | | | | | | 25% | 1060 | 1662 |
| | | | | | | 23% | 1054 | 1677 |
| HKPAC10 | 527238 | 1715 | WUblastx.64 | (Q9HAD8) CDNA FLJ11786 FIS, CLONE HEMBA1006036. | Q9HAD8 | 47% | 970 | 677 |
| HKPAC50 | 830367 | 1716 | WUblastx.64 | (O95139) NADH-UBIQUINONE OXIDOREDUCTASE B17 | NB7M_HUMAN | 61% | 106 | 324 |
| | | | | SUBUNIT (EC 1.6 | | | | |
| HKTAC18 | 831292 | 1718 | WUblastx.64 | (Q9Y5W8) SORTING NEXIN 13 (FRAGMENT). | SNXD_HUMAN | 88% | 3 | 53 |
| | | | | | | 96% | 38 | 400 |
| HL1SA89 | 839594 | 1719 | WUblastx.64 | (Q9Y399) MITOCHONDRIAL 28S RIBOSOMAL PROTEIN S2 | Q9Y399 | 99% | 63 | 641 |
| | | | | (MRP-S2). | | | | |
| HL2AB60 | 722226 | 1720 | WUblastx.64 | SHORT ISOFORM OF Q9Y679 | sp_vs\|Q9Y679- | 91% | 64 | 1293 |
| | | | | | 01\|Q9Y679 | | | |
| HL3AF32 | 753468 | 1722 | WUblastx.64 | (Q9CZ73) 2810049G06RIK PROTEIN. | Q9CZ73 | 76% | 6 | 527 |
| HLDAV70 | 623603 | 1723 | WUblastx.64 | (Q9UJW0) DYNACTIN P62 SUBUNIT (CDNA FLJ20292 FIS, | Q9UJW0 | 100% | 175 | 285 |
| | | | | CLONE HEP05374). | | | | |
| HLDBL62 | 899498 | 1724 | WUblastx.64 | (Q9NYC7) HEPATOCELLULAR CARCINOMA-ASSOCIATED | Q9NYC7 | 78% | 36 | 740 |
| | | | | ANTIGEN 112. | | | | |
| HLDBV18 | 805684 | 1725 | WUblastx.64 | (Q9H7D5) CDNA: FLJ21022 FIS, CLONE CAE06383. | Q9H7D5 | 94% | 284 | 1198 |
| HLDBV54 | 570813 | 1726 | HMMER 2.1.1 | PFAM: Sec1 family | PF00995 | 18.7 | 180 | 332 |
| HLDNF18 | 821599 | 1730 | WUblastx.64 | (Q9NWI8) CDNA FLJ20823 FIS, CLONE ADSE00282 (SIMILAR | Q9NWI8 | 78% | 17 | 583 |
| | | | | TO TRANSLOCASE O | | | | |
| HLDNN84 | 612801 | 1731 | WUblastx.64 | (Q9UHT1) PRO1902 PROTEIN. | Q9UHT1 | 51% | 751 | 849 |
| | | | | | | 59% | 600 | 755 |
| HLDOD77 | 610208 | 1732 | WUblastx.64 | (Q9GMX5) HYPOTHETICAL 12.9 KDA PROTEIN. | Q9GMX5 | 71% | 513 | 617 |
| | | | | | | 62% | 395 | 523 |
| HLDOL74 | 812765 | 1733 | WUblastx.64 | (Q9P0A2) HSPC279 (FRAGMENT). | Q9P0A2 | 94% | 57 | 671 |
| HLDRU08 | 701995 | 1735 | WUblastx.64 | (Q9NVD7) CDNA FLJ10793 FIS, CLONE NT2RP4000588 | Q9NVD7 | 99% | 13 | 729 |
| | | | | (ALPHA-PARVIN). | | | | |
| HLDXF43 | 514022 | 1736 | WUblastx.64 | cytochrome-c oxidase (EC 1.9.3.1) chain II - human mitochondrion | pir\|A00472\|OBHU2 | 52% | 164 | 559 |
| HLEAA10 | 824265 | 1737 | WUblastx.64 | (Q13579) MARINER TRANSPOSASE. | Q13579 | 85% | 842 | 741 |
| | | | | | | 77% | 738 | 13 |
| HLHAE14 | 865625 | 1739 | WUblastx.64 | (Q9H7S6) CDNA FLJ14310 FIS, CLONE PLACE3000271. | Q9H7S6 | 66% | 1412 | 1528 |
| | | | | | | 44% | 935 | 1060 |
| HLHAE14 | 886763 | 1740 | WUblastx.64 | (Q9H7S6) CDNA FLJ14310 FIS, CLONE PLACE3000271. | Q9H7S6 | 66% | 1412 | 1528 |
| | | | | | | 44% | 935 | 1060 |
| HLHBS54 | 837503 | 1741 | WUblastx.64 | (Q9NZV5) SELENOPROTEIN N PRECURSOR. | SELN_HUMAN | 92% | 1 | 1455 |
| HLHCG24 | 847398 | 1744 | WUblastx.64 | (Q9BZE5) PGC-1 RELATED CO-ACTIVATOR. | Q9BZE5 | 82% | 10 | 615 |
| HLHCN51 | 836150 | 1746 | WUblastx.64 | (Q9D1H8) 1110007K17RIK PROTEIN. | Q9D1H8 | 72% | 1588 | 1514 |
| | | | | | | 48% | 1514 | 1275 |
| HLHCT96 | 886178 | 1747 | WUblastx.64 | (Q9H6G8) CDNA: FLJ22294 FIS, CLONE HRC04426. | Q9H6G8 | 90% | 1976 | 1917 |
| | | | | | | 68% | 2152 | 1955 |
| HLHDJ05 | 841732 | 1750 | WUblastx.64 | (Q9BGW3) HYPOTHETICAL 13.5 KDA PROTEIN. | Q9BGW3 | 68% | 812 | 708 |
| | | | | | | 66% | 708 | 547 |
| HLHDL37 | 847399 | 1751 | WUblastx.64 | (Q9NX17) CDNA FLJ20489 FIS, CLONE KAT08285. | Q9NX17 | 78% | 690 | 571 |
| HLHDL69 | 883335 | 1752 | WUblastx.64 | (O09014) PEPTIDE/HISTIDINE TRANSPORTER. | O09014 | 88% | 305 | 592 |
| | | | | | | 72% | 598 | 1314 |
| HLHDL69 | 850691 | 1753 | WUblastx.64 | (O09014) PEPTIDE/HISTIDINE TRANSPORTER. | O09014 | 75% | 305 | 340 |
| | | | | | | 78% | 330 | 1484 |
| HLHDL69 | 843836 | 1754 | WUblastx.64 | (O09014) PEPTIDE/HISTIDINE TRANSPORTER. | O09014 | 75% | 305 | 340 |
| | | | | | | 78% | 330 | 1484 |
| HLHDL69 | 855906 | 1755 | WUblastx.64 | (O09014) PEPTIDE/HISTIDINE TRANSPORTER. | O09014 | 75% | 305 | 340 |
| | | | | | | 78% | 330 | 1484 |
| HLHDM38 | 566843 | 1756 | WUblastx.64 | hypothetical protein DKFZp434L0130.1 - human | pir\|T46471\|T46471 | 45% | 6 | 326 |
| | | | | | | 39% | 181 | 339 |
| | | | | | | 61% | 476 | 886 |
| HLHDR92 | 692150 | 1757 | WUblastx.64 | (Q9NX85) CDNA FLJ20378 FIS, CLONE KAIA0536. | Q9NX85 | 77% | 1252 | 1172 |
| | | | | | | 58% | 1181 | 1095 |
| HLHDY94 | 847121 | 1758 | WUblastx.64 | (O00572) HYPOTHETICAL 43.0 KDA PROTEIN. | O00572 | 56% | 637 | 876 |
| | | | | | | 61% | 18 | 752 |
| HLHEI72 | 874180 | 1761 | HMMER 2.1.1 | PFAM: Eukaryotic protein kinase domain | PF00069 | 106.7 | 101 | 403 |
| | | | WUblastx.64 | (Q9Y6S4) SIMILARITY IS TO SERINE/THREONINE-PROTEIN | Q9Y6S4 | 81% | 589 | 621 |
| | | | | KINASE (FRAGMENT). | | 97% | 89 | 526 |
| HLHEX62 | 608285 | 1762 | WUblastx.64 | (Q9H387) PRO2550. | Q9H387 | 70% | 1102 | 833 |
| HLHFP09 | 805967 | 1764 | WUblastx.64 | ISOFORM 2 OF O95460 | sp_vs\|O95460- | 98% | 3 | 881 |
| | | | | | 01\|O95460 | 38% | 102 | 740 |
| HLHGG78 | 638210 | 1765 | WUblastx.64 | (O95989) DIPHOSPHOINOSITOL POLYPHOSPHATE | O95989 | 100% | 10 | 291 |
| | | | | PHOSPHOHYDROLASE. | | | | |
| HLHSQ35 | 570814 | 1767 | WUblastx.64 | (Q9JIX6) RNA BINDING PROTEIN NAPOR-3 (FRAGMENT). | Q9JIX6 | 100% | 671 | 712 |
| | | | | | | 87% | 711 | 827 |
| HLHTP55 | 847322 | 1769 | WUblastx.64 | (Q9H728) CDNA: FLJ21463 FIS, CLONE COL04765. | Q9H728 | 50% | 320 | 433 |
| | | | | | | 56% | 462 | 635 |
| HLIBD74 | 604914 | 1770 | WUblastx.64 | (Q9H797) CDNA: FLJ21128 FIS, CLONE CAS06258. | Q9H797 | 98% | 12 | 290 |
| HLIBE41 | 772762 | 1771 | WUblastx.64 | (Q9D0Q3) 1300007B24RIK PROTEIN. | Q9D0Q3 | 58% | 71 | 409 |
| HLLAX64 | 827292 | 1775 | WUblastx.64 | (BAB55004) CDNA FLJ14357 fis, clone HEMBA1000005, h | BAB55004 | 96% | 1020 | 1502 |
| | | | | | | 91% | 27 | 416 |
| | | | | | | 77% | 364 | 417 |
| | | | | | | 25% | 996 | 1196 |
| | | | | | | 97% | 395 | 1057 |
| | | | | | | 32% | 761 | 862 |
| | | | | | | 28% | 752 | 973 |
| | | | | | | 28% | 1257 | 1478 |
| | | | | | | 45% | 611 | 676 |
| | | | | | | 45% | 1428 | 1499 |
| | | | | | | 17% | 1002 | 1229 |
| HLLAX95 | 588405 | 1776 | WUblastx.64 | (Q9GMX5) HYPOTHETICAL 12.9 KDA PROTEIN. | Q9GMX5 | 52% | 541 | 603 |
| | | | | | | 65% | 381 | 521 |
| HLMCT51 | 772579 | 1780 | WUblastx.64 | (Q9DAD1) 1700013E09RIK PROTEIN. | Q9DAD1 | 55% | 443 | 883 |
| HLMCT95 | 570815 | 1781 | WUblastx.64 | (Q9N083) UNNAMED PORTEIN PRODUCT. | Q9N083 | 53% | 1414 | 1121 |
| HLMDD65 | 566891 | 1782 | WUblastx.64 | (P20591) INTERFERON-REGULATED RESISTANCE GTP- | MX1_HUMAN | 100% | 489 | 575 |
| | | | | BINDING PROTEI | | 70% | 580 | 720 |
| HLMFB62 | 604915 | 1785 | WUblastx.64 | (Q9H700) CDNA: FLJ21617 FIS, CLONE COL07481. | Q9H700 | 68% | 154 | 2 |
| HLMFG52 | 602166 | 1786 | WUblastx.64 | (Q9UHT5) PRO1848. | Q9UHT5 | 71% | 837 | 941 |
| HLMFU53 | 801936 | 1787 | WUblastx.64 | (Q9ESD6) LNV. | Q9ESD6 | 67% | 1141 | 620 |
| HLMHG68 | 580850 | 1788 | WUblastx.64 | (Q9HAI5) CDNA FLJ11583 FIS, CLONE HEMBA1003680, | Q9HAI5 | 92% | 305 | 775 |
| | | | | WEAKLY SIMILAR TO PUT | | | | |
| HLMHN06 | 853606 | 1789 | WUblastx.64 | probable transposase - human transposon MER37 | pir\|S72481\|S72481 | 59% | 456 | 286 |
| | | | | | | 80% | 262 | 107 |
| HLMIM84 | 588487 | 1791 | WUblastx.64 | (Q9Y3B0) CGI-105 PROTEIN. | Q9Y3B0 | 84% | 296 | 334 |
| | | | | | | 98% | 645 | 806 |
| HLMIW76 | 570816 | 1794 | WUblastx.64 | (O60448) NEURONAL THREAD PROTEIN AD7C-NTP. | O60448 | 85% | 531 | 490 |
| | | | | | | 57% | 528 | 472 |
| | | | | | | 59% | 600 | 535 |
| | | | | | | 57% | 528 | 472 |
| | | | | | | 77% | 744 | 718 |
| | | | | | | 63% | 601 | 536 |
| | | | | | | 66% | 752 | 591 |
| | | | | | | 69% | 736 | 590 |
| | | | | | | 70% | 737 | 474 |
| HLQAD72 | 853613 | 1798 | HMMER 2.1.1 | PFAM: Pancreatic ribonucleases | PF00074 | 213.4 | 208 | 564 |
| | | | WUblastx.64 | ribonuclease 4 (EC 3.1.—.—) precursor - human | pir\|I52489\|I52489 | 90% | 124 | 564 |
| HLQAM30 | 609880 | 1799 | WUblastx.64 | (Q9UHT1) PRO1902 PROTEIN. | Q9UHT1 | 76% | 648 | 610 |
| | | | | | | 57% | 490 | 398 |
| | | | | | | 73% | 617 | 480 |
| HLQAM59 | 560662 | 1800 | WUblastx.64 | (AAH08373) Similar to hypothetical protein PRO1722. | AAH08373 | 82% | 879 | 829 |
| | | | | | | 54% | 754 | 722 |
| | | | | | | 63% | 1018 | 881 |
| HLQBB23 | 745364 | 1801 | WUblastx.64 | (Q9CYS6) 2810459M11RIK PROTEIN. | Q9CYS6 | 44% | 38 | 286 |
| HLQCY09 | 745384 | 1804 | WUblastx.64 | (Q9NX17) CDNA FLJ20489 FIS, CLONE KAT08285. | Q9NX17 | 57% | 884 | 843 |
| | | | | | | 58% | 759 | 505 |
| HLQDK45 | 621414 | 1807 | WUblastx.64 | (Q9CPU5) 2700019M19RIK PROTEIN. | Q9CPU5 | 100% | 615 | 737 |
| HLQDM47 | 743237 | 1808 | WUblastx.64 | giant protein p619 - human | pir\|S71752\|S71752 | 92% | 377 | 616 |
| HLTDI20 | 610269 | 1817 | WUblastx.64 | (Q9H6C9) CDNA: FLJ22385 FIS, CLONE HRC07610. | Q9H6C9 | 70% | 5 | 76 |
| | | | | | | 95% | 58 | 186 |
| HLTDI65 | 740756 | 1818 | WUblastx.64 | (O60448) NEURONAL THREAD PROTEIN AD7C-NTP. | O60448 | 41% | 1290 | 1382 |
| | | | | | | 50% | 1456 | 1623 |
| | | | | | | 46% | 1881 | 2027 |
| | | | | | | 47% | 1881 | 2018 |
| | | | | | | 54% | 1958 | 2029 |
| | | | | | | 54% | 1878 | 1949 |
| | | | | | | 41% | 1513 | 1605 |
| | | | | | | 57% | 2095 | 2157 |
| | | | | | | 55% | 1955 | 2038 |
| | | | | | | 60% | 1275 | 1484 |
| | | | | | | 54% | 1372 | 1464 |
| | | | | | | 47% | 2095 | 2163 |
| | | | | | | 42% | 2008 | 2157 |
| | | | | | | 64% | 1472 | 1513 |
| | | | | | | 61% | 1263 | 1463 |
| | | | | | | 36% | 1939 | 2079 |
| | | | | | | 32% | 1296 | 1460 |
| | | | | | | 50% | 1363 | 1470 |
| | | | | | | 61% | 2015 | 2149 |
| | | | | | | 46% | 1315 | 1608 |
| HLTDK30 | 834810 | 1819 | WUblastx.64 | (Q9HA72) CDNA FLJ12133 FIS, CLONE MAMMA1000278 | Q9HA72 | 100% | 511 | 747 |
| | | | | (SIMILAR TO HYPOTHETIC | | 97% | 231 | 506 |
| | | | | | | 97% | 740 | 1180 |
| HLTDL37 | 638213 | 1820 | WUblastx.64 | (Q9Y383) CGI-74 PROTEIN. | Q9Y383 | 82% | 2 | 754 |
| | | | | | | 66% | 1084 | 1155 |
| | | | | | | 37% | 974 | 1078 |
| HLTDU35 | 827293 | 1821 | WUblastx.64 | (Q9N083) UNNAMED PORTEIN PRODUCT. | Q9N083 | 44% | 1118 | 954 |
| | | | | | | 62% | 954 | 820 |
| HLTEH84 | 782094 | 1823 | WUblastx.64 | (Q9H5P9) CDNA: FLJ23188 FIS, CLONE LNG12038. | Q9H5P9 | 97% | 15 | 491 |
| HLTEL39 | 853615 | 1824 | WUblastx.64 | (Q9H743) CDNA: FLJ21394 FIS, CLONE COL03536. | Q9H743 | 39% | 1391 | 1218 |
| | | | | | | 70% | 1536 | 1387 |
| HLTEW52 | 663148 | 1826 | WUblastx.64 | (Q9NX85) CDNA FLJ20378 FIS, CLONE KAIA0536. | Q9NX85 | 70% | 1498 | 1244 |
| HLTEZ36 | 821676 | 1827 | WUblastx.64 | (Q9H387) PRO2550. | Q9H387 | 76% | 7 | 171 |
| HLTGG14 | 824068 | 1828 | WUblastx.64 | (Q9N032) UNNAMED PROTEIN PRODUCT. | Q9N032 | 70% | 1142 | 1020 |
| HLUAF94 | 794116 | 1829 | WUblastx.64 | (Q9UI50) PRO0657 (FRAGMENT). | Q9UI50 | 75% | 1438 | 1473 |
| | | | | | | 72% | 1256 | 1444 |
| HLWAH33 | 855954 | 1830 | WUblastx.64 | (Q9NSI3) PRED43 PROTEIN (FRAGMENT). | Q9NSI3 | 100% | 1660 | 1761 |
| | | | | | | 96% | 25 | 102 |
| HLWAO11 | 885339 | 1831 | WUblastx.64 | (Q9ES77) POLYDOM PROTEIN PRECURSOR. | Q9ES77 | 76% | 14 | 2656 |
| | | | | | | 32% | 14 | 2371 |
| | | | | | | 32% | 2 | 2383 |
| | | | | | | 29% | 152 | 2635 |
| | | | | | | 28% | 14 | 2371 |
| | | | | | | 27% | 14 | 1699 |
| | | | | | | 28% | 506 | 1408 |
| | | | | | | 30% | 2 | 628 |
| | | | | | | 29% | 38 | 640 |
| | | | | | | 27% | 161 | 787 |
| | | | | | | 28% | 1469 | 2020 |
| | | | | | | 31% | 2084 | 2617 |
| | | | | | | 34% | 2267 | 2659 |
| | | | | | | 33% | 14 | 373 |
| | | | | | | 32% | 80 | 448 |
| | | | | | | 32% | 2021 | 2635 |
| | | | | | | 35% | 1019 | 1297 |
| | | | | | | 29% | 1472 | 1969 |
| | | | | | | 22% | 494 | 1990 |
| | | | | | | 33% | 1745 | 2074 |
| | | | | | | 25% | 14 | 478 |
| | | | | | | 27% | 1067 | 1597 |
| | | | | | | 28% | 1886 | 2179 |
| | | | | | | 26% | 170 | 895 |
| | | | | | | 24% | 1310 | 1771 |
| | | | | | | 26% | 2249 | 2638 |
| | | | | | | 30% | 1430 | 1654 |
| | | | | | | 22% | 1142 | 1609 |
| | | | | | | 35% | 1145 | 1288 |
| | | | | | | 36% | 2003 | 2110 |
| | | | | | | 18% | 1382 | 2194 |
| | | | | | | 35% | 95 | 187 |
| | | | | | | 24% | 455 | 709 |
| | | | | | | 27% | 2354 | 2560 |
| | | | | | | 25% | 440 | 673 |
| | | | | | | 33% | 173 | 271 |
| HLWAX50 | 809094 | 1833 | WUblastx.64 | (AAC08702) Meltrin-L precursor. | AAC08702 | 92% | 628 | 1629 |
| | | | | | | 93% | 1587 | 2273 |
| | | | | | | 64% | 178 | 255 |
| | | | | | | 39% | 1553 | 1669 |
| | | | | | | 97% | 257 | 661 |
| HLWBK16 | 638217 | 1835 | WUblastx.64 | (Q9UEV9) ACTIN-BINDING PROTEIN HOMOLOG ABP-278. | Q9UEV9 | 94% | 679 | 1191 |
| | | | | | | 28% | 572 | 700 |
| | | | | | | 52% | 590 | 658 |
| | | | | | | 57% | 605 | 658 |
| | | | | | | 58% | 593 | 658 |
| | | | | | | 34% | 673 | 750 |
| | | | | | | 29% | 682 | 1185 |
| | | | | | | 50% | 593 | 652 |
| | | | | | | 37% | 593 | 721 |
| | | | | | | 33% | 727 | 1164 |
| | | | | | | 37% | 853 | 1125 |
| | | | | | | 30% | 664 | 1179 |
| | | | | | | 53% | 590 | 775 |
| | | | | | | 31% | 593 | 775 |
| | | | | | | 34% | 730 | 1188 |
| | | | | | | 34% | 691 | 1185 |
| | | | | | | 32% | 745 | 1125 |
| | | | | | | 32% | 590 | 775 |
| | | | | | | 37% | 706 | 1185 |
| | | | | | | 32% | 691 | 1170 |
| | | | | | | 32% | 688 | 1179 |
| | | | | | | 37% | 688 | 1173 |
| | | | | | | 37% | 703 | 1185 |
| | | | | | | 31% | 703 | 1182 |
| | | | | | | 28% | 703 | 1176 |
| | | | | | | 36% | 715 | 1149 |
| | | | | | | 30% | 703 | 1188 |
| | | | | | | 32% | 949 | 1173 |
| | | | | | | 32% | 691 | 1158 |
| | | | | | | 28% | 691 | 1185 |
| | | | | | | 41% | 706 | 1185 |
| | | | | | | 36% | 593 | 775 |
| | | | | | | 32% | 593 | 775 |
| | | | | | | 26% | 551 | 775 |
| | | | | | | 31% | 691 | 1179 |
| | | | | | | 34% | 593 | 775 |
| | | | | | | 30% | 748 | 1125 |
| HLYAJ79 | 608289 | 1839 | WUblastx.64 | (Q9B2U5) ATP SYNTHASE 6. | Q9B2U5 | 63% | 301 | 807 |
| HLYAT54 | 581067 | 1842 | WUblastx.64 | (Q9H9F0) CDNA FLJ12802 FIS, CLONE NT2RP2002124, | Q9H9F0 | 93% | 35 | 220 |
| | | | | WEAKLY SIMILAR TO UBI | | | | |
| HLYBC81 | 588490 | 1843 | WUblastx.64 | (Q9HBW6) NAG13. | Q9HBW6 | 43% | 1373 | 1711 |
| HLYBD09 | 610019 | 1844 | WUblastx.64 | (Q9NX85) CDNA FLJ20378 FIS, CLONE KAIA0536. | Q9NX85 | 69% | 1546 | 1644 |
| | | | | | | 65% | 1391 | 1513 |
| HLYBL67 | 834538 | 1845 | WUblastx.64 | (Q9NRE8) PADI-H PROTEIN. | Q9NRE8 | 64% | 335 | 294 |
| | | | | | | 61% | 304 | 158 |
| HLYBN23 | 667995 | 1847 | WUblastx.64 | (Q9UI59) PRO0478 PROTEIN. | Q9UI59 | 83% | 1397 | 1450 |
| | | | | | | 80% | 1333 | 1395 |
| HLYBT28 | 608152 | 1850 | WUblastx.64 | (Q9N083) UNNAMED PORTEIN PRODUCT. | Q9N083 | 54% | 1082 | 774 |
| HLYBY04 | 596819 | 1852 | WUblastx.64 | (Q9H387) PRO2550. | Q9H387 | 83% | 1565 | 1530 |
| | | | | | | 71% | 1533 | 1270 |
| HLYCE15 | 621407 | 1853 | WUblastx.64 | (Q9P147) PRO2822. | Q9P147 | 75% | 518 | 420 |
| HLYCH04 | 608295 | 1854 | WUblastx.64 | (O62658) LINE-1 ELEMENT ORF2. | O62658 | 47% | 106 | 273 |
| | | | | | | 45% | 7 | 39 |
| HLYDE38 | 735987 | 1856 | WUblastx.64 | (Q9N083) UNNAMED PORTEIN PRODUCT. | Q9N083 | 47% | 987 | 835 |
| | | | | | | 68% | 1091 | 1005 |
| HLYDG55 | 835625 | 1857 | WUblastx.64 | (Q9H5R3) CDNA: FLJ23147 FIS, CLONE LNG09295. | Q9H5R3 | 73% | 638 | 423 |
| HLYEA60 | 685469 | 1859 | WUblastx.64 | (Q9UI50) PRO0657 (FRAGMENT). | Q9UI50 | 50% | 104 | 181 |
| | | | | | | 70% | 27 | 116 |
| HLYEJ14 | 853362 | 1860 | WUblastx.64 | (O95498) VASCULAR NON-INFLAMMATORY MOLECULE 2 | VNN2_HUMAN | 97% | 94 | 1653 |
| | | | | PRECURSOR (VA | | | | |
| HLYEJ44 | 838149 | 1861 | WUblastx.64 | (Q9H400) DJ583P15.4.1 (NOVEL PROTEIN (TRANSLATION OF | Q9H400 | 100% | 124 | 153 |
| | | | | CDNA FLJ20406 (E | | 80% | 273 | 1007 |
| HLYEU51 | 607815 | 1862 | WUblastx.64 | (Q9NX85) CDNA FLJ20378 FIS, CLONE KAIA0536. | Q9NX85 | 67% | 691 | 563 |
| | | | | | | 78% | 857 | 708 |
| HLYGV19 | 826334 | 1863 | WUblastx.64 | (Q9H0W4) HYPOTHETICAL 19.2 KDA PROTEIN. | Q9H0W4 | 72% | 195 | 644 |
| HMABK52 | 853363 | 1864 | WUblastx.64 | (Q9N032) UNNAMED PROTEIN PRODUCT. | Q9N032 | 62% | 1136 | 1002 |
| HMACL77 | 853365 | 1866 | WUblastx.64 | (O95564) HYPOTHETICAL 30.9 KDA PROTEIN. | O95564 | 100% | 8 | 256 |
| HMACT74 | 843744 | 1867 | WUblastx.64 | gamma-interferon-inducible protein IP-30 precursor - human | pir\|A43708\|A43708 | 94% | 403 | 639 |
| HMADJ14 | 843725 | 1868 | WUblastx.64 | (Q9H295) DC-SPECIFIC TRANSMEMBRANE PROTEIN. | Q9H295 | 96% | 871 | 945 |
| | | | | | | 90% | 47 | 880 |
| HMADJ74 | 795479 | 1869 | WUblastx.64 | (Q9H295) DC-SPECIFIC TRANSMEMBRANE PROTEIN. | Q9H295 | 100% | 1010 | 1393 |
| | | | | | | 93% | 186 | 1067 |
| HMAEA58 | 872563 | 1870 | WUblastx.64 | (Q9NX85) CDNA FLJ20378 FIS, CLONE KAIA0536. | Q9NX85 | 36% | 584 | 519 |
| | | | | | | 59% | 1339 | 1172 |
| HMAGF01 | 837235 | 1871 | WUblastx.64 | (Q9UJ41) RAB5 GDP/GTP EXCHANGE FACTOR | Q9UJ41 | 89% | 71 | 1543 |
| | | | | HOMOLOGUE. | | | | |
| HMCED78 | 829071 | 1873 | WUblastx.64 | (Q9NWY5) CDNA FLJ20533 FIS, CLONE KAT10931. | Q9NWY5 | 98% | 380 | 862 |
| HMCFN86 | 886182 | 1874 | WUblastx.64 | (Q9BVB2) UNKNOWN (PROTEIN FOR IMAGE: 3459631) | Q9BVB2 | 100% | 22 | 294 |
| | | | | (FRAGMENT). | | | | |
| HMCGJ47 | 699850 | 1875 | WUblastx.64 | (AAK29328) Serine palmitoyltransferase. | AAK29328 | 91% | 11 | 511 |
| | | | | | | 91% | 495 | 1430 |
| HMCGK88 | 654854 | 1876 | WUblastx.64 | (Q9BT48) SIMILAR TO HYPOTHETICAL PROTEIN FLJ20116. | Q9BT48 | 100% | 506 | 330 |
| | | | | | | 92% | 982 | 506 |
| HMCIH27 | 862038 | 1877 | WUblastx.64 | (Q9H728) CDNA: FLJ21463 FIS, CLONE COL04765. | Q9H728 | 70% | 1293 | 1063 |
| HMDAE88 | 638222 | 1881 | WUblastx.64 | (Q9H3C0) PRO0898. | Q9H3C0 | 57% | 1001 | 843 |
| | | | | | | 81% | 844 | 734 |
| HMDAM39 | 602907 | 1885 | WUblastx.64 | (Q9P195) PRO1722. | Q9P195 | 66% | 648 | 388 |
| HMEAA41 | 587304 | 1886 | WUblastx.64 | (Q9H6H3) CDNA: FLJ22282 FIS, CLONE HRC03861. | Q9H6H3 | 100% | 9 | 419 |
| HMEEH21 | 603187 | 1888 | WUblastx.64 | (Q9N083) UNNAMED PORTEIN PRODUCT. | Q9N083 | 65% | 280 | 504 |
| HMEEZ07 | 638225 | 1890 | WUblastx.64 | (Q9UK97) F-BOX ONLY PROTEIN 9. | FBX9_HUMAN | 100% | 795 | 917 |
| HMEIH57 | 840370 | 1892 | WUblastx.64 | (Q14288) HYPOTHETICAL PROTEIN (FRAGMENT). | Q14288 | 74% | 238 | 11 |
| | | | | | | 58% | 1348 | 1190 |
| | | | | | | 50% | 1236 | 256 |
| HMEIJ21 | 767276 | 1893 | WUblastx.64 | (Q9H067) HYPOTHETICAL 66.5 KDA PROTEIN. | Q9H067 | 61% | 2388 | 1777 |
| | | | | | | 50% | 828 | 709 |
| | | | | | | 56% | 1676 | 840 |
| HMEJC96 | 761218 | 1895 | WUblastx.64 | (O60836) MEMBRANE GLYCOPROTEIN GP36 PRECURSOR. | O60836 | 86% | 193 | 669 |
| HMEJK28 | 825591 | 1897 | WUblastx.64 | (O00479) NON-HISTONE CHROMOSOMAL PROTEIN (HIGH- | O00479 | 54% | 273 | 485 |
| | | | | MOBILITY GROUP (NONHIS | | | | |
| HMEKW44 | 825499 | 1899 | WUblastx.64 | (O18975) HYPOTHETICAL 16.6 KDA PROTEIN (FRAGMENT). | O18975 | 71% | 7 | 198 |
| HMEKW71 | 855955 | 1900 | WUblastx.64 | (Q9UHF1) NOTCH4-LIKE PROTEIN (HYPOTHETICAL 29.6 KDA | Q9UHF1 | 96% | 579 | 758 |
| | | | | PROTEIN). | | | | |
| HMHBI09 | 847402 | 1903 | WUblastx.64 | (AAH07644) Similar to RIKEN cDNA 9430029K10 gene (F | AAH07644 | 93% | 39 | 683 |
| HMHBI93 | 844729 | 1904 | WUblastx.64 | (Q9Z1S4) TGFB1-INDUCED ANTI-APOPTOTIC FACTOR 1 (12 KDA | TIAF_MOUSE | 90% | 1391 | 1735 |
| | | | | TGF- | | | | |
| HMIAC52 | 825484 | 1906 | WUblastx.64 | (AAH00713) Neighbor of A-kinase anchoring protein 9 | AAH00713 | 30% | 941 | 1201 |
| | | | | | | 52% | 988 | 1056 |
| | | | | | | 75% | 112 | 927 |
| HMIAG42 | 846339 | 1908 | WUblastx.64 | (AAK54122) RGS20 ret splice variant 1. | AAK54122 | 78% | 1071 | 1730 |
| HMIAG55 | 736020 | 1909 | WUblastx.64 | (AAD20460) Ribosomal protein L11. | AAD20460 | 67% | 424 | 609 |
| HMIAG72 | 824091 | 1910 | WUblastx.64 | (O60519) CRE BINDING PROTEIN-LIKE 2. | O60519 | 85% | 318 | 677 |
| HMIAO82 | 833070 | 1912 | WUblastx.64 | hypothetical protein DKFZp434B0814.1 - human (fragment) | pir\|T46340\|T46340 | 58% | 32 | 358 |
| | | | | | | 50% | 443 | 742 |
| HMIAR42 | 809096 | 1913 | WUblastx.64 | (Q9BVE4) SIMILAR TO INTERFERON-RELATED | Q9BVE4 | 87% | 1046 | 1165 |
| | | | | DEVELOPMENTAL REGULATOR 1. | | 91% | 831 | 1052 |
| | | | | | | 99% | 7 | 849 |
| HMIAV33 | 668252 | 1914 | WUblastx.64 | (Q9UN80) HYPOTHETICAL 149.0 KDA PROTEIN. | Q9UN80 | 34% | 1051 | 1182 |
| | | | | | | 48% | 1167 | 1337 |
| | | | | | | 40% | 603 | 430 |
| | | | | | | 41% | 138 | 10 |
| | | | | | | 28% | 1015 | 611 |
| | | | | | | 38% | 431 | 162 |
| HMIBE95 | 804597 | 1917 | WUblastx.64 | probable transposase - human transposon MER37 | pir\|S72481\|S72481 | 60% | 1932 | 2075 |
| | | | | | | 64% | 1221 | 1355 |
| | | | | | | 42% | 1355 | 1948 |
| HMKAN71 | 884161 | 1920 | WUblastx.64 | (Q96G03) Unknown (protein for MGC: 19508). | Q96G03 | 100% | 12 | 1385 |
| HMKBA33 | 596949 | 1921 | WUblastx.64 | (Q9N083) UNNAMED PORTEIN PRODUCT. | Q9N083 | 47% | 1147 | 1010 |
| | | | | | | 44% | 1248 | 1162 |
| | | | | | | 75% | 1441 | 1382 |
| | | | | | | 57% | 1314 | 1147 |
| | | | | | | 33% | 383 | 261 |
| | | | | | | 65% | 1691 | 1482 |
| HMKCK32 | 561576 | 1923 | WUblastx.64 | (Q9N083) UNNAMED PORTEIN PRODUCT. | Q9N083 | 53% | 619 | 335 |
| HMKDG69 | 588407 | 1927 | WUblastx.64 | pro-pol-dUTPase polyprotein - murine endogenous retrovirus ERV- | pir\|T29097\|T29097 | 59% | 104 | 24 |
| | | | | L (fragment) | | 34% | 700 | 116 |
| HMKDM80 | 608168 | 1928 | WUblastx.64 | (Q9H6G8) CDNA: FLJ22294 FIS, CLONE HRC04426. | Q9H6G8 | 74% | 178 | 11 |
| HMKEG88 | 634245 | 1929 | WUblastx.64 | (O00378) PUTATIVE P150. | O00378 | 47% | 294 | 4 |
| HMMAA09 | 822859 | 1930 | WUblastx.64 | (AAK55521) PRO0764. | AAK55521 | 68% | 1305 | 1249 |
| | | | | | | 67% | 1271 | 1014 |
| HMMAK92 | 610100 | 1931 | WUblastx.64 | (Q9CZ33) 2810408E11RIK PROTEIN. | Q9CZ33 | 86% | 15 | 152 |
| HMMBF22 | 780406 | 1934 | WUblastx.64 | (Q9H6V7) CDNA: FLJ21825 FIS, CLONE HEP01348. | Q9H6V7 | 56% | 1228 | 1341 |
| | | | | | | 93% | 407 | 499 |
| | | | | | | 58% | 824 | 1159 |
| HMMBH94 | 607463 | 1936 | WUblastx.64 | (AAK55521) PRO0764. | AAK55521 | 80% | 857 | 813 |
| | | | | | | 71% | 835 | 593 |
| HMMBK55 | 608179 | 1937 | WUblastx.64 | (Q9H397) PRO2852. | Q9H397 | 72% | 521 | 468 |
| | | | | | | 36% | 480 | 361 |
| | | | | | | 70% | 691 | 527 |
| HMMBT47 | 804594 | 1941 | WUblastx.64 | (Q9NX85) CDNA FLJ20378 FIS, CLONE KAIA0536. | Q9NX85 | 66% | 1238 | 1203 |
| | | | | | | 54% | 1206 | 874 |
| HMMCD35 | 607840 | 1942 | WUblastx.64 | (Q9H728) CDNA: FLJ21463 FIS, CLONE COL04765. | Q9H728 | 59% | 813 | 676 |
| | | | | | | 58% | 661 | 512 |
| HMMCD95 | 603202 | 1943 | WUblastx.64 | (Q9N083) UNNAMED PORTEIN PRODUCT. | Q9N083 | 58% | 1498 | 1397 |
| | | | | | | 63% | 1643 | 1494 |
| HMPAB26 | 580854 | 1944 | WUblastx.64 | (P78560) DEATH DOMAIN CONTAINING PROTEIN CRADD | CRAD_HUMAN | 100% | 66 | 365 |
| | | | | (CASPASE AND | | | | |
| HMQAI38 | 589964 | 1946 | WUblastx.64 | immune-responsive gene 1 - mouse (fragment) | pir\|I54546\|I54546 | 71% | 11 | 1363 |
| HMQAT69 | 799551 | 1947 | WUblastx.64 | (Q9Y5X1) SORTING NEXIN 9 (SH3 AND PX DOMAIN- | SNX9_HUMAN | 94% | 739 | 1842 |
| | | | | CONTAINING PROT | | 82% | 660 | 809 |
| | | | | | | 93% | 56 | 748 |
| HMQBL90 | 600363 | 1948 | WUblastx.64 | pre-B cell Ig lambda-like omega light chain (non-rearranging) 14.1 - | pir\|A33911\|A33911 | 52% | 879 | 1091 |
| | | | | human | | 76% | 974 | 1309 |
| HMQBV82 | 826522 | 1949 | WUblastx.64 | (Q9BGW3) HYPOTHETICAL 13.5 KDA PROTEIN. | Q9BGW3 | 61% | 739 | 876 |
| | | | | | | 72% | 969 | 868 |
| | | | | | | 40% | 651 | 592 |
| HMQCA75 | 767086 | 1950 | WUblastx.64 | (AAK55521) PRO0764. | AAK55521 | 62% | 1235 | 1071 |
| | | | | | | 72% | 1072 | 944 |
| HMQCB37 | 732168 | 1951 | WUblastx.64 | (AAK55521) PRO0764. | AAK55521 | 85% | 426 | 446 |
| | | | | | | 71% | 1087 | 1149 |
| | | | | | | 50% | 872 | 1042 |
| | | | | | | 79% | 503 | 904 |
| HMQCX41 | 603388 | 1953 | WUblastx.64 | (O60448) NEURONAL THREAD PROTEIN AD7C-NTP. | O60448 | 43% | 192 | 260 |
| | | | | | | 55% | 16 | 204 |
| HMQDM09 | 664494 | 1954 | WUblastx.64 | (Q9NZV6) SELENOPROTEIN X 1 (PROTEIN HSPC270). | SELX_HUMAN | 98% | 38 | 385 |
| HMSAP33 | 731969 | 1956 | WUblastx.64 | (Q9P147) PRO2822. | Q9P147 | 83% | 1526 | 1398 |
| HMSAZ48 | 877650 | 1957 | WUblastx.64 | probable pol polyprotein-related protein 4 - rat | pir\|S21348\|S21348 | 46% | 793 | 1218 |
| | | | | | | 66% | 722 | 784 |
| HMSBN18 | 847405 | 1958 | WUblastx.64 | (O95789) ZNF258. | O95789 | 65% | 165 | 329 |
| HMSBS25 | 826487 | 1959 | WUblastx.64 | (Q9Y642) K: CL COTRANSPORTER 3. | Q9Y642 | 77% | 1019 | 1189 |
| | | | | | | 81% | 337 | 384 |
| | | | | | | 100% | 257 | 346 |
| HMSBU14 | 844443 | 1960 | WUblastx.64 | hypothetical protein DKFZp761L0812.1 - human (fragment) | pir\|T47135\|T47135 | 41% | 954 | 1184 |
| | | | | | | 63% | 1192 | 1488 |
| HMSCB94 | 847406 | 1962 | WUblastx.64 | (Q9NX17) CDNA FLJ20489 FIS, CLONE KAT08285. | Q9NX17 | 45% | 1690 | 1589 |
| | | | | | | 80% | 1931 | 1683 |
| HMSCK12 | 825475 | 1963 | WUblastx.64 | (Q9P195) PRO1722. | Q9P195 | 62% | 771 | 613 |
| | | | | | | 81% | 622 | 491 |
| HMSCV75 | 838530 | 1965 | WUblastx.64 | (Q9NRE8) PADI-H PROTEIN. | Q9NRE8 | 40% | 1565 | 1461 |
| | | | | | | 67% | 1438 | 1301 |
| HMSCW44 | 716249 | 1967 | WUblastx.64 | (Q9P195) PRO1722. | Q9P195 | 47% | 1251 | 1102 |
| | | | | | | 66% | 1112 | 942 |
| HMSCZ19 | 847408 | 1968 | WUblastx.64 | (O60427) BC269730_2 (HYPOTHETICAL 52.0 KDA PROTEIN) | O60427 | 84% | 621 | 1124 |
| | | | | (FATTY ACID DESAT | | 94% | 1 | 675 |
| HMSDI67 | 827298 | 1969 | WUblastx.64 | probable pol polyprotein-related protein 4 - rat | pir\|S21348\|S21348 | 55% | 1255 | 1121 |
| | | | | | | 38% | 1748 | 1284 |
| HMSDR28 | 801948 | 1971 | WUblastx.64 | (Q9H728) CDNA: FLJ21463 FIS, CLONE COL04765. | Q9H728 | 76% | 1097 | 1035 |
| | | | | | | 72% | 1317 | 1102 |
| HMSFT25 | 581069 | 1972 | WUblastx.64 | (AAK55521) PRO0764. | AAK55521 | 43% | 1088 | 1198 |
| | | | | | | 61% | 918 | 1025 |
| HMSFW52 | 603177 | 1973 | WUblastx.64 | (Q9NX85) CDNA FLJ20378 FIS, CLONE KAIA0536. | Q9NX85 | 67% | 1380 | 1631 |
| HMSGU30 | 847409 | 1975 | WUblastx.64 | (Q9GMX5) HYPOTHETICAL 12.9 KDA PROTEIN. | Q9GMX5 | 55% | 1718 | 1494 |
| HMSHB42 | 792385 | 1976 | WUblastx.64 | (Q9NR81) RHOGEF (HYPOTHETICAL 59.8 KDA PROTEIN). | Q9NR81 | 97% | 4 | 867 |
| HMSHB42 | 600401 | 1977 | WUblastx.64 | (Q9NR81) RHOGEF (HYPOTHETICAL 59.8 KDA PROTEIN). | Q9NR81 | 99% | 4 | 1203 |
| HMSHN72 | 855917 | 1978 | WUblastx.64 | (Q98SS5) DOUBLECORTIN. | Q98SS5 | 91% | 650 | 754 |
| HMSHW73 | 704099 | 1980 | WUblastx.64 | (Q9P195) PRO1722. | Q9P195 | 62% | 2214 | 2134 |
| | | | | | | 65% | 2131 | 2063 |
| | | | | | | 71% | 2072 | 1935 |
| HMSII36 | 825453 | 1982 | WUblastx.64 | (AAK55521) PRO0764. | AAK55521 | 61% | 23 | 61 |
| | | | | | | 72% | 51 | 161 |
| HMSIT42 | 581070 | 1983 | WUblastx.64 | (Q9P147) PRO2822. | Q9P147 | 80% | 1160 | 936 |
| HMSJB08 | 877651 | 1984 | WUblastx.64 | (Q9D2Y4) 9130019I15RIK PROTEIN. | Q9D2Y4 | 56% | 1037 | 612 |
| | | | | | | 58% | 1987 | 1028 |
| HMSJR44 | 638098 | 1987 | WUblastx.64 | (Q9P195) PRO1722. | Q9P195 | 73% | 798 | 721 |
| | | | | | | 43% | 1168 | 1037 |
| | | | | | | 82% | 853 | 803 |
| | | | | | | 36% | 1633 | 1511 |
| | | | | | | 64% | 995 | 843 |
| HMSKQ91 | 825450 | 1988 | WUblastx.64 | (Q9HBN2) HYPOTHETICAL 15.8 KDA PROTEIN. | Q9HBN2 | 68% | 864 | 742 |
| HMTAF92 | 740784 | 1990 | WUblastx.64 | (Q9Y6I4) UBIQUITIN CARBOXYL-TERMINAL HYDROLASE 3 | UBP3_HUMAN | 93% | 2211 | 2167 |
| | | | | (EC 3.1.2. | | 84% | 2053 | 644 |
| HMTAT36 | 811885 | 1991 | WUblastx.64 | (Q9H6Z9) CDNA: FLJ21620 FIS, CLONE COL07838. | Q9H6Z9 | 100% | 1 | 117 |
| HMUAD65 | 809097 | 1993 | WUblastx.64 | (Q9H743) CDNA: FLJ21394 FIS, CLONE COL03536. | Q9H743 | 67% | 1524 | 1213 |
| HMUBK53 | 553624 | 1997 | WUblastx.64 | (Q9H8X7) CDNA FLJ13156 FIS, CLONE NT2RP3003490, | Q9H8X7 | 86% | 18 | 398 |
| | | | | WEAKLY SIMILAR TO HOM | | | | |
| HMUBY57 | 844800 | 2001 | WUblastx.64 | (Q9H5R3) CDNA: FLJ23147 FIS, CLONE LNG09295. | Q9H5R3 | 78% | 1827 | 1609 |
| HMUBZ15 | 609837 | 2002 | WUblastx.64 | (Q9BU61) SIMILAR TO NUCLEAR PROTEIN E3-3 ORF1. | Q9BU61 | 60% | 968 | 1012 |
| | | | | | | 100% | 412 | 963 |
| HMVAL15 | 822860 | 2003 | WUblastx.64 | A-kinase anchor protein 95 - human | pir\|T13161\|T13161 | 83% | 1 | 348 |
| HMVBC84 | 743191 | 2004 | WUblastx.64 | (Q9H728) CDNA: FLJ21463 FIS, CLONE COL04765. | Q9H728 | 47% | 1019 | 957 |
| | | | | | | 76% | 1135 | 1019 |
| HMVBD68 | 831130 | 2005 | WUblastx.64 | catalase (EC 1.11.1.6) - Campylobacter jejuni | pir\|I40767\|I40767 | 85% | 207 | 103 |
| HMVCG17 | 846161 | 2006 | WUblastx.64 | (Q9NZS9) APOPTOSIS REGULATOR. | Q9NZS9 | 96% | 282 | 458 |
| | | | | | | 33% | 89 | 151 |
| | | | | | | 100% | 204 | 290 |
| HMVDT89 | 831127 | 2011 | WUblastx.64 | (Q9HAT2) SIALIC ACID-SPECIFIC ACETYLESTERASE II. | Q9HAT2 | 90% | 2 | 385 |
| | | | | | | 98% | 384 | 809 |
| HMVDT89 | 875313 | 2012 | WUblastx.64 | (Q9HAT2) SIALIC ACID-SPECIFIC ACETYLESTERASE II. | Q9HAT2 | 90% | 2 | 385 |
| | | | | | | 98% | 384 | 809 |
| HMWAO65 | 839268 | 2013 | WUblastx.64 | (Q9P0A1) HSPC280 (FRAGMENT). | Q9P0A1 | 100% | 30 | 371 |
| HMWAO82 | 825427 | 2014 | WUblastx.64 | (Q9NX17) CDNA FLJ20489 FIS, CLONE KAT08285. | Q9NX17 | 84% | 461 | 366 |
| HMWBK35 | 566888 | 2016 | WUblastx.64 | (Q9NX17) CDNA FLJ20489 FIS, CLONE KAT08285. | Q9NX17 | 76% | 956 | 918 |
| | | | | | | 64% | 919 | 650 |
| HMWBL38 | 602940 | 2018 | WUblastx.64 | (Q9NX17) CDNA FLJ20489 FIS, CLONE KAT08285. | Q9NX17 | 76% | 743 | 615 |
| | | | | | | 65% | 916 | 719 |
| HMWBM48 | 566828 | 2019 | WUblastx.64 | ribosomal protein L3 precursor, mitochondrial - human | pir\|A27294\|R5HUL3 | 80% | 609 | 379 |
| | | | | | | 100% | 794 | 609 |
| HMWCG28 | 847413 | 2020 | WUblastx.64 | (Q9P1S9) KINASE DEFICIENT PROTEIN KDP (FRAGMENT). | Q9P1S9 | 84% | 35 | 892 |
| HMWCP85 | 757974 | 2021 | WUblastx.64 | Na+- dependent vitamin C (L-ascorbic acid) transporter SVCT1 - | pir\|JC7182\|JC7182 | 64% | 37 | 297 |
| | | | | human | | 79% | 1181 | 1507 |
| | | | | | | 61% | 698 | 1264 |
| | | | | | | 86% | 369 | 737 |
| HMWDG30 | 623758 | 2022 | WUblastx.64 | (Q9VQ76) CG4263 PROTEIN. | Q9VQ76 | 43% | 1364 | 1411 |
| | | | | | | 37% | 30 | 668 |
| HMWDU20 | 695743 | 2023 | WUblastx.64 | (Q9NXB8) CDNA FLJ20335 FIS, CLONE HEP11429 | Q9NXB8 | 89% | 918 | 1034 |
| | | | | (FRAGMENT). | | 75% | 347 | 454 |
| | | | | | | 93% | 1004 | 1819 |
| HMWDZ63 | 608146 | 2025 | WUblastx.64 | (P41565) ISOCITRATE DEHYDROGENASE [NAD] SUBUNIT | IDHG_RAT | 33% | 399 | 301 |
| | | | | GAMMA, MITO | | 100% | 169 | 74 |
| HMWEA77 | 839221 | 2026 | WUblastx.64 | (Q9BGX7) HYPOTHETICAL 13.0 KDA PROTEIN. | Q9BGX7 | 60% | 1066 | 1110 |
| | | | | | | 70% | 1100 | 1282 |
| HMWEC03 | 598902 | 2027 | WUblastx.64 | (Q9P0X2) HEAT SHOCK PROTEIN HSP60. | Q9P0X2 | 100% | 1066 | 1365 |
| | | | | | | 91% | 573 | 1064 |
| | | | | | | 99% | 105 | 572 |
| HMWEF46 | 825433 | 2028 | WUblastx.64 | (Q9H0G8) HYPOTHETICAL 14.0 KDA PROTEIN. | Q9H0G8 | 100% | 1113 | 1226 |
| HMWEK43 | 847414 | 2029 | WUblastx.64 | (Q9H8K0) CDNA FLJ13520 FIS, CLONE PLACE1005828. | Q9H8K0 | 46% | 940 | 1167 |
| HMWEM23 | 863105 | 2030 | WUblastx.64 | (Q96QF0) SSX2 interacting protein hRabin3A, isoform alpha2. | Q96QF0 | 96% | 1086 | 1532 |
| | | | | | | 96% | 128 | 1114 |
| HMWEM23 | 859387 | 2031 | WUblastx.64 | (Q9H673) CDNA: FLJ22548 FIS, CLONE HSI00519. | Q9H673 | 95% | 1086 | 1532 |
| | | | | | | 96% | 152 | 1114 |
| HMWEU96 | 1310888 | 2033 | WUblastx.64 | (Q9UH62) HYPOTHETICAL 42.5 KDA PROTEIN (ALEX3) | Q9UH62 | 88% | 91 | 1227 |
| | | | | (ALEX3 PROTEIN). | | | | |
| HMWEU96 | 601698 | 3110 | WUblastx.64 | (AB039669) ALEX3 [Homo sapiens] | dbj\|BAA94602.1\| | 88% | 86 | 1222 |
| HMWEX02 | 596821 | 2034 | WUblastx.64 | (Q9H7H4) FLJ00116 PROTEIN (FRAGMENT). | Q9H7H4 | 67% | 509 | 1000 |
| HMWFB65 | 638102 | 2035 | WUblastx.64 | (O95427) MCD4P HOMOLOG. | O95427 | 74% | 37 | 591 |
| | | | | | | 95% | 894 | 959 |
| | | | | | | 100% | 611 | 898 |
| | | | | | | 68% | 9 | 59 |
| HMWFD77 | 610105 | 2036 | WUblastx.64 | (Q9P1N7) PRO0974. | Q9P1N7 | 83% | 459 | 494 |
| | | | | | | 55% | 293 | 433 |
| HMWFO25 | 566855 | 2037 | WUblastx.64 | (Q9HA89) CDNA FLJ12060 FIS, CLONE HEMBB1002142. | Q9HA89 | 100% | 742 | 816 |
| HMWGM41 | 847415 | 2039 | WUblastx.64 | (Q9H8P0) CDNA FLJ13352 FIS, CLONE OVARC1002165, | Q9H8P0 | 84% | 33 | 986 |
| | | | | WEAKLY SIMILAR TO 3-O | | | | |
| HMWGO95 | 582078 | 2040 | WUblastx.64 | (Q9H728) CDNA: FLJ21463 FIS, CLONE COL04765. | Q9H728 | 82% | 1446 | 1396 |
| | | | | | | 68% | 1390 | 1145 |
| HMWGV85 | 847416 | 2041 | WUblastx.64 | (Q9H8H3) CDNA FLJ13631 FIS, CLONE PLACE1011090, | Q9H8H3 | 100% | 41 | 298 |
| | | | | HIGHLY SIMILAR TO HOM | | | | |
| HMWGZ42 | 824259 | 2042 | WUblastx.64 | (Q9BVD9) UNKNOWN (PROTEIN FOR MGC: 5149). | Q9BVD9 | 50% | 262 | 309 |
| | | | | | | 42% | 1316 | 1534 |
| HMWIQ26 | 722234 | 2045 | WUblastx.64 | (Q9NGC3) CENTAURIN GAMMA 1A PROTEIN. | Q9NGC3 | 48% | 844 | 395 |
| | | | | | | 47% | 298 | 5 |
| | | | | | | 43% | 221 | 162 |
| | | | | | | 21% | 388 | 218 |
| HMWIU49 | 800894 | 2046 | WUblastx.64 | (O95831) PROGRAMED CELL DEATH PROTEIN 8, | PCD8_HUMAN | 98% | 3 | 407 |
| | | | | MITOCHONDRIAL PREC | | 38% | 1384 | 1500 |
| | | | | | | 94% | 379 | 1362 |
| HMWJJ62 | 838612 | 2047 | WUblastx.64 | (Q9BGV8) HYPOTHETICAL 10.0 KDA PROTEIN. | Q9BGV8 | 71% | 657 | 875 |
| HMWJJ64 | 581071 | 2048 | WUblastx.64 | (Q9D0Q7) 2600005P05RIK PROTEIN. | Q9D0Q7 | 78% | 12 | 878 |
| HNAAD76 | 596801 | 2049 | WUblastx.64 | (Q9N083) UNNAMED PORTEIN PRODUCT. | Q9N083 | 65% | 1650 | 1528 |
| | | | | | | 59% | 1807 | 1646 |
| HNALD94 | 844722 | 2051 | WUblastx.64 | (Q9NX85) CDNA FLJ20378 FIS, CLONE KAIA0536. | Q9NX85 | 70% | 764 | 817 |
| | | | | | | 72% | 816 | 926 |
| HNALE44 | 785045 | 2052 | WUblastx.64 | (Q9Y503) FILAMIN, MUSCLE ISOFORM. | Q9Y503 | 100% | 12 | 86 |
| | | | | | | 30% | 916 | 1170 |
| | | | | | | 72% | 12 | 86 |
| | | | | | | 62% | 12 | 83 |
| | | | | | | 52% | 12 | 62 |
| | | | | | | 31% | 783 | 896 |
| | | | | | | 60% | 18 | 86 |
| | | | | | | 51% | 12 | 95 |
| | | | | | | 45% | 12 | 77 |
| | | | | | | 36% | 18 | 92 |
| | | | | | | 36% | 9 | 95 |
| | | | | | | 95% | 79 | 1170 |
| | | | | | | 31% | 916 | 1170 |
| | | | | | | 28% | 49 | 795 |
| | | | | | | 36% | 1096 | 1170 |
| | | | | | | 33% | 1127 | 1207 |
| | | | | | | 35% | 901 | 1170 |
| | | | | | | 31% | 112 | 801 |
| | | | | | | 30% | 1823 | 1927 |
| | | | | | | 29% | 925 | 1170 |
| | | | | | | 39% | 916 | 1170 |
| | | | | | | 30% | 916 | 1170 |
| | | | | | | 27% | 217 | 504 |
| | | | | | | 29% | 18 | 98 |
| | | | | | | 46% | 15 | 86 |
| | | | | | | 29% | 910 | 1170 |
| | | | | | | 30% | 901 | 1170 |
| | | | | | | 34% | 79 | 792 |
| | | | | | | 42% | 79 | 798 |
| | | | | | | 25% | 940 | 1170 |
| | | | | | | 30% | 79 | 792 |
| | | | | | | 32% | 916 | 1170 |
| | | | | | | 38% | 340 | 864 |
| | | | | | | 29% | 88 | 855 |
| | | | | | | 30% | 88 | 792 |
| | | | | | | 32% | 109 | 795 |
| | | | | | | 33% | 16 | 798 |
| | | | | | | 26% | 103 | 855 |
| | | | | | | 29% | 916 | 1170 |
| | | | | | | 25% | 925 | 1170 |
| | | | | | | 33% | 85 | 792 |
| | | | | | | 30% | 262 | 795 |
| | | | | | | 29% | 109 | 816 |
| | | | | | | 34% | 916 | 1164 |
| | | | | | | 32% | 520 | 792 |
| | | | | | | 26% | 751 | 1170 |
| | | | | | | 29% | 430 | 792 |
| | | | | | | 33% | 940 | 1170 |
| | | | | | | 36% | 12 | 77 |
| | | | | | | 31% | 82 | 792 |
| | | | | | | 34% | 79 | 783 |
| HNEAK38 | 631279 | 2056 | WUblastx.64 | (Q26195) PVA1 GENE. | Q26195 | 71% | 1204 | 1100 |
| | | | | | | 47% | 1383 | 1333 |
| | | | | | | 59% | 1358 | 1197 |
| HNEAK65 | 604991 | 2057 | WUblastx.64 | (Q9P195) PRO1722. | Q9P195 | 72% | 570 | 427 |
| | | | | | | 82% | 715 | 560 |
| HNEBY79 | 841769 | 2059 | WUblastx.64 | (Q9UI50) PRO0657 (FRAGMENT). | Q9UI50 | 58% | 944 | 1153 |
| | | | | | | 72% | 1270 | 1488 |
| HNECL75 | 782493 | 2061 | WUblastx.64 | (Q9HCX0) PELLINO. | Q9HCX0 | 96% | 215 | 649 |
| | | | | | | 100% | 627 | 1268 |
| HNECX90 | 834776 | 2062 | WUblastx.64 | (Q9UJL8) HYPOTHETICAL 43.5 KDA PROTEIN. | Q9UJL8 | 84% | 81 | 1265 |
| HNECX90 | 881133 | 2063 | WUblastx.64 | (Q9UJL8) HYPOTHETICAL 43.5 KDA PROTEIN. | Q9UJL8 | 84% | 81 | 1265 |
| HNEDP75 | 581072 | 2065 | WUblastx.64 | (Q9NX85) CDNA FLJ20378 FIS, CLONE KAIA0536. | Q9NX85 | 63% | 910 | 722 |
| HNEDQ02 | 846061 | 2066 | WUblastx.64 | (Q9HA25) CDNA FLJ12374 FIS, CLONE MAMMA1002470, | Q9HA25 | 76% | 941 | 1063 |
| | | | | WEAKLY SIMILAR TO PRO | | 93% | 1018 | 2013 |
| HNEDU46 | 695745 | 2067 | WUblastx.64 | (Q9H3P1) 6-PHOSPHOFRUCTO-2-KINASE HEART ISOFORM. | Q9H3P1 | 100% | 343 | 420 |
| | | | | | | 95% | 137 | 208 |
| | | | | | | 95% | 766 | 825 |
| HNFAD50 | 839369 | 2068 | WUblastx.64 | (Q9H175) HYPOTHETICAL 59.6 KDA PROTEIN. | Q9H175 | 47% | 128 | 859 |
| HNFAD50 | 843242 | 2069 | WUblastx.64 | (Q9H175) HYPOTHETICAL 59.6 KDA PROTEIN. | Q9H175 | 54% | 50 | 379 |
| HNFAG67 | 804546 | 2070 | WUblastx.64 | (O60759) CYTOHESIN BINDING PROTEIN HE. | O60759 | 73% | 327 | 857 |
| HNFCJ77 | 886185 | 2071 | WUblastx.64 | (Q9BVD9) UNKNOWN (PROTEIN FOR MGC: 5149). | Q9BVD9 | 74% | 2342 | 2250 |
| | | | | | | 63% | 1819 | 1763 |
| | | | | | | 73% | 1763 | 1719 |
| | | | | | | 61% | 2034 | 1792 |
| HNFCY57 | 877653 | 2073 | WUblastx.64 | (AAL12497) Cryopyrin. | AAL12497 | 91% | 8 | 2203 |
| HNFDL89 | 823362 | 2074 | WUblastx.64 | (Q9BT07) UNKNOWN (PROTEIN FOR MGC: 4033). | Q9BT07 | 46% | 2098 | 2193 |
| | | | | | | 100% | 1964 | 2101 |
| HNFDU92 | 602933 | 2076 | WUblastx.64 | (O60448) NEURONAL THREAD PROTEIN AD7C-NTP. | O60448 | 60% | 703 | 407 |
| | | | | | | 48% | 721 | 425 |
| | | | | | | 88% | 435 | 409 |
| | | | | | | 74% | 570 | 388 |
| | | | | | | 56% | 764 | 627 |
| | | | | | | 56% | 522 | 388 |
| | | | | | | 43% | 571 | 503 |
| | | | | | | 43% | 495 | 388 |
| | | | | | | 57% | 745 | 683 |
| | | | | | | 48% | 757 | 677 |
| HNFDY09 | 843300 | 2077 | WUblastx.64 | (Q9BZ41) BA476I15.3 (NOVEL PROTEIN SIMILAR TO SEPTIN) | Q9BZ41 | 92% | 1243 | 1281 |
| | | | | (FRAGMENT). | | 75% | 1280 | 1363 |
| | | | | | | 53% | 1104 | 1238 |
| HNFDY31 | 724955 | 2078 | WUblastx.64 | (O00571) DEAD-BOX PROTEIN 3 (HELICASE-LIKE PROTEIN | DDX3_HUMAN | 64% | 169 | 621 |
| | | | | 2) (HLP2 | | 98% | 693 | 1028 |
| HNFEA17 | 753242 | 2079 | WUblastx.64 | (Q9BRG9) UNKNOWN (PROTEIN FOR MGC: 11314). | Q9BRG9 | 94% | 965 | 1318 |
| HNFEP55 | 722236 | 2080 | WUblastx.64 | (Q9NW80) HYPOTHETICAL 73.6 KDA PROTEIN. | Q9NW80 | 41% | 877 | 966 |
| | | | | | | 65% | 158 | 862 |
| HNFET12 | 824170 | 2081 | WUblastx.64 | (Q9H743) CDNA: FLJ21394 FIS, CLONE COL03536. | Q9H743 | 75% | 1217 | 1182 |
| | | | | | | 75% | 1182 | 952 |
| HNFFR59 | 634649 | 2082 | WUblastx.64 | (Q9HA67) CDNA FLJ12155 FIS, CLONE MAMMA1000472. | Q9HA67 | 65% | 1613 | 1485 |
| HNFGR15 | 844044 | 2084 | WUblastx.64 | (Q99770) HYPOTHETICAL 15.4 KDA PROTEIN. | Q99770 | 53% | 1128 | 1172 |
| | | | | | | 90% | 824 | 886 |
| HNFGW53 | 589525 | 2086 | WUblastx.64 | (Q9NUM6) CDNA FLJ11267 FIS, CLONE PLACE1009174. | Q9NUM6 | 53% | 777 | 938 |
| HNFHV68 | 567445 | 2089 | WUblastx.64 | pro-pol-dUTPase polyprotein - murine endogenous retrovirus ERV- | pir\|T29097\|T29097 | 44% | 380 | 24 |
| | | | | L (fragment) | | | | |
| HNFIE15 | 898153 | 2090 | WUblastx.64 | (Q9H387) PRO2550. | Q9H387 | 72% | 2374 | 2300 |
| | | | | | | 62% | 2576 | 2370 |
| HNFIE29 | 852233 | 2091 | WUblastx.64 | (Q9HBS7) HYPOTHETICAL 14.2 KDA PROTEIN. | Q9HBS7 | 42% | 1484 | 1407 |
| | | | | | | 54% | 1419 | 1168 |
| HNFJE27 | 825400 | 2093 | WUblastx.64 | (Q9NUQ9) CDNA FLJ11197 FIS, CLONE PLACE1007690 | Q9NUQ9 | 93% | 986 | 1123 |
| | | | | (HYPOTHETICAL 36.7 KDA | | | | |
| HNGAC71 | 695746 | 2095 | WUblastx.64 | (Q9GKW4) HYPOTHETICAL 12.6 KDA PROTEIN. | Q9GKW4 | 77% | 64 | 11 |
| | | | | | | 85% | 138 | 79 |
| HNGAX06 | 841890 | 2099 | WUblastx.64 | (Q14288) HYPOTHETICAL PROTEIN (FRAGMENT). | Q14288 | 100% | 22 | 108 |
| HNGBE44 | 825391 | 2103 | WUblastx.64 | (O00437) AXONEMAL DYNEIN HEAVY CHAIN | O00437 | 71% | 323 | 502 |
| | | | | (FRAGMENT). | | | | |
| HNGBI83 | 566815 | 2105 | WUblastx.64 | (O60448) NEURONAL THREAD PROTEIN AD7C-NTP. | O60448 | 69% | 322 | 420 |
| | | | | | | 53% | 122 | 160 |
| | | | | | | 73% | 331 | 420 |
| | | | | | | 74% | 13 | 87 |
| | | | | | | 59% | 10 | 87 |
| | | | | | | 51% | 12 | 104 |
| | | | | | | 55% | 22 | 102 |
| | | | | | | 61% | 42 | 80 |
| | | | | | | 55% | 28 | 81 |
| HNGCF29 | 580201 | 2111 | WUblastx.64 | (Q9H387) PRO2550. | Q9H387 | 71% | 1112 | 1074 |
| | | | | | | 60% | 1069 | 842 |
| HNGCF64 | 823147 | 2112 | WUblastx.64 | (AAH07558) Unknown (protein for MGC: 15483). | AAH07558 | 48% | 1893 | 1765 |
| | | | | | | 55% | 1763 | 1629 |
| HNGDF54 | 702002 | 2113 | WUblastx.64 | (Q9N8T2) POSSIBLE SRPA. | Q9N8T2 | 29% | 13 | 654 |
| | | | | | | 27% | 14 | 679 |
| | | | | | | 27% | 14 | 679 |
| | | | | | | 29% | 13 | 654 |
| HNGDH27 | 581074 | 2115 | WUblastx.64 | (Q92722) RETINOBLASTOMA 1. | Q92722 | 45% | 290 | 99 |
| HNGDN07 | 847081 | 2116 | WUblastx.64 | (Q9UI50) PRO0657 (FRAGMENT). | Q9UI50 | 80% | 1091 | 966 |
| HNGEE06 | 689506 | 2122 | WUblastx.64 | (Q9H960) CDNA FLJ12988 FIS, CLONE NT2RP3000080. | Q9H960 | 43% | 66 | 1 |
| | | | | | | 60% | 1040 | 909 |
| HNGEN32 | 621308 | 2128 | WUblastx.64 | (Q9H5R3) CDNA: FLJ23147 FIS, CLONE LNG09295. | Q9H5R3 | 76% | 361 | 399 |
| | | | | | | 80% | 408 | 557 |
| HNGET33 | 825378 | 2131 | WUblastx.64 | (Q9H387) PRO2550. | Q9H387 | 78% | 459 | 755 |
| HNGEZ02 | 825376 | 2134 | WUblastx.64 | (Q9NX85) CDNA FLJ20378 FIS, CLONE KAIA0536. | Q9NX85 | 81% | 840 | 938 |
| HNGEZ90 | 634858 | 2135 | WUblastx.64 | (Q9H728) CDNA: FLJ21463 FIS, CLONE COL04765. | Q9H728 | 72% | 1119 | 1045 |
| | | | | | | 71% | 956 | 810 |
| HNGFD30 | 612782 | 2138 | WUblastx.64 | (O75423) ORF3, SPLICEVARIANT_A. | O75423 | 72% | 264 | 100 |
| HNGFD31 | 663532 | 2139 | WUblastx.64 | (Q9HA67) CDNA FLJ12155 FIS, CLONE MAMMA1000472. | Q9HA67 | 76% | 574 | 624 |
| | | | | | | 78% | 491 | 574 |
| HNGFG04 | 772548 | 2141 | WUblastx.64 | (Q9Y485) X-LIKE 1 PROTEIN. | Q9Y485 | 100% | 423 | 533 |
| HNGFI21 | 581075 | 2145 | WUblastx.64 | (Q9EQC8) PAPILLARY RENAL CELL CARCINOMA- | Q9EQC8 | 58% | 117 | 296 |
| | | | | ASSOCIATED PROTEIN. | | | | |
| HNGFT70 | 581079 | 2150 | WUblastx.64 | (Q9H5R3) CDNA: FLJ23147 FIS, CLONE LNG09295. | Q9H5R3 | 76% | 1073 | 855 |
| HNGGF13 | 638117 | 2153 | WUblastx.64 | hypothetical protein hc1 - mouse (fragment) | pir\|S26689\|S26689 | 38% | 13 | 183 |
| | | | | | | 37% | 13 | 186 |
| HNGGK63 | 822862 | 2154 | WUblastx.64 | (Q9QZ22) OLFACTORY RECEPTOR. | Q9QZ22 | 59% | 1224 | 1003 |
| | | | | | | 88% | 985 | 278 |
| HNGGT10 | 866179 | 2159 | HMMER 2.1.1 | PFAM: 3-beta hydroxysteroid dehydrogenase/isomerase family | PF01073 | 263.9 | 19 | 468 |
| | | | WUblastx.64 | (Q9BSN9) 3 BETA-HYDROXY-DELTA 5-C27-STEROID | Q9BSN9 | 75% | 10 | 480 |
| | | | | OXIDOREDUCTASE. | | | | |
| HNGHB89 | 722238 | 2161 | WUblastx.64 | (O88748) E-STOP PROTEIN. | O88748 | 100% | 153 | 37 |
| HNGHD07 | 608149 | 2162 | WUblastx.64 | (Q9BRA2) UNKNOWN (PROTEIN FOR MGC: 14353). | Q9BRA2 | 51% | 588 | 755 |
| | | | | | | 70% | 746 | 943 |
| HNGIK07 | 825360 | 2168 | WUblastx.64 | (Q9H3I6) BRAIN MY040 PROTEIN. | Q9H3I6 | 76% | 1139 | 912 |
| HNGIM40 | 747699 | 2169 | WUblastx.64 | (Q9H5W7) CDNA: FLJ22921 FIS, CLONE KAT06711. | Q9H5W7 | 87% | 2354 | 2208 |
| HNGIM83 | 751714 | 2170 | HMMER 2.1.1 | PFAM: HCO3-transporter family | PF00955 | 117.9 | 72 | 290 |
| | | | WUblastx.64 | (Q9UIB9) BICARBONATE TRANSPORTER. | Q9UIB9 | 74% | 9 | 290 |
| HNGIO93 | 897527 | 2171 | HMMER 2.1.1 | PFAM: Ribosomal L27 protein | PF01016 | 71.7 | −21 | −233 |
| | | | WUblastx.64 | (Q9P0M9) HSPC250 (MITOCHONDRIAL RIBOSOMAL | Q9P0M9 | 88% | 151 | 594 |
| | | | | PROTEIN L27) (L27MT) (HYPOT | | | | |
| HNGIU16 | 826717 | 2173 | WUblastx.64 | (Q9H387) PRO2550. | Q9H387 | 78% | 2322 | 2215 |
| | | | | | | 76% | 2505 | 2467 |
| | | | | | | 78% | 2467 | 2315 |
| HNGIX91 | 564574 | 2174 | WUblastx.64 | (AAH07609) Similar to hypothetical protein PRO1722. | AAH07609 | 100% | 956 | 982 |
| | | | | | | 77% | 885 | 950 |
| | | | | | | 76% | 739 | 891 |
| HNGJU60 | 825336 | 2182 | WUblastx.64 | (Q9GW02) EXTREMELY CYSTEINE/VALINE RICH PROTEIN | Q9GW02 | 51% | 166 | 258 |
| | | | | (FRAGMENT). | | 50% | 166 | 261 |
| | | | | | | 46% | 166 | 261 |
| | | | | | | 56% | 169 | 258 |
| | | | | | | 48% | 169 | 261 |
| | | | | | | 45% | 169 | 261 |
| | | | | | | 48% | 169 | 261 |
| | | | | | | 40% | 290 | 487 |
| | | | | | | 44% | 287 | 487 |
| | | | | | | 41% | 290 | 487 |
| | | | | | | 41% | 169 | 261 |
| | | | | | | 44% | 287 | 490 |
| | | | | | | 46% | 169 | 258 |
| | | | | | | 55% | 231 | 257 |
| | | | | | | 44% | 290 | 487 |
| | | | | | | 45% | 287 | 487 |
| | | | | | | 42% | 287 | 487 |
| | | | | | | 44% | 290 | 487 |
| | | | | | | 44% | 290 | 490 |
| | | | | | | 48% | 163 | 261 |
| | | | | | | 46% | 166 | 261 |
| | | | | | | 48% | 169 | 261 |
| | | | | | | 48% | 163 | 261 |
| | | | | | | 44% | 287 | 487 |
| | | | | | | 40% | 172 | 261 |
| | | | | | | 45% | 169 | 261 |
| | | | | | | 43% | 287 | 487 |
| | | | | | | 48% | 169 | 261 |
| HNGKW35 | 899408 | 2184 | WUblastx.64 | (O00627) HYPOTHETICAL 11.0 KDA PROTEIN (ORF2). | O00627 | 53% | 292 | 477 |
| HNGKY94 | 835021 | 2185 | WUblastx.64 | (Q9H728) CDNA: FLJ21463 FIS, CLONE COL04765. | Q9H728 | 66% | 581 | 501 |
| | | | | | | 69% | 777 | 583 |
| HNHAB38 | 609892 | 2188 | WUblastx.64 | (Q9H387) PRO2550. | Q9H387 | 68% | 635 | 339 |
| HNHAD34 | 612845 | 2190 | WUblastx.64 | (Q9N032) UNNAMED PROTEIN PRODUCT. | Q9N032 | 64% | 1056 | 922 |
| HNHAY26 | 704789 | 2198 | WUblastx.64 | (Q9H397) PRO2852. | Q9H397 | 85% | 2098 | 1919 |
| HNHAZ20 | 839696 | 2200 | WUblastx.64 | (Q9C074) HYPOTHETICAL 73.9 KDA PROTEIN (FRAGMENT). | Q9C074 | 81% | 1213 | 11 |
| HNHBE38 | 562730 | 2202 | WUblastx.64 | (AAK55521) PRO0764. | AAK55521 | 65% | 1131 | 1072 |
| | | | | | | 72% | 1097 | 855 |
| HNHBG18 | 604924 | 2203 | WUblastx.64 | (O00365) L1 ELEMENT L1.15 P40 PROTEIN. | O00365 | 29% | 717 | 271 |
| HNHBM16 | 566866 | 2205 | WUblastx.64 | (Q9H743) CDNA: FLJ21394 FIS, CLONE COL03536. | Q9H743 | 87% | 80 | 33 |
| | | | | | | 71% | 310 | 80 |
| HNHCH78 | 694657 | 2206 | WUblastx.64 | (AAH07609) Similar to hypothetical protein PRO1722. | AAH07609 | 100% | 270 | 290 |
| | | | | | | 88% | 194 | 271 |
| | | | | | | 75% | 49 | 195 |
| HNHCT47 | 634691 | 2210 | WUblastx.64 | (Q9H728) CDNA: FLJ21463 FIS, CLONE COL04765. | Q9H728 | 46% | 434 | 396 |
| | | | | | | 56% | 621 | 448 |
| HNHDC52 | 812424 | 2213 | WUblastx.64 | (O00365) L1 ELEMENT L1.15 P40 PROTEIN. | O00365 | 32% | 1038 | 910 |
| | | | | | | 68% | 904 | 269 |
| HNHDI17 | 738043 | 2216 | WUblastx.64 | (O95662) POT. ORF VI (FRAGMENT). | O95662 | 80% | 265 | 327 |
| | | | | | | 56% | 5 | 295 |
| HNHDR57 | 638121 | 2219 | WUblastx.64 | (O60448) NEURONAL THREAD PROTEIN AD7C-NTP. | O60448 | 58% | 1193 | 1095 |
| | | | | | | 63% | 496 | 440 |
| | | | | | | 56% | 485 | 393 |
| | | | | | | 50% | 503 | 426 |
| | | | | | | 64% | 1195 | 1124 |
| | | | | | | 33% | 658 | 440 |
| | | | | | | 41% | 1186 | 1043 |
| | | | | | | 40% | 402 | 322 |
| | | | | | | 61% | 1065 | 874 |
| | | | | | | 51% | 1177 | 923 |
| | | | | | | 36% | 486 | 331 |
| | | | | | | 31% | 1090 | 455 |
| | | | | | | 53% | 437 | 393 |
| | | | | | | 60% | 1168 | 863 |
| HNHDW34 | 607867 | 2222 | WUblastx.64 | (Q9H728) CDNA: FLJ21463 FIS, CLONE COL04765. | Q9H728 | 62% | 1175 | 1017 |
| | | | | | | 56% | 961 | 671 |
| HNHEF70 | 610115 | 2228 | WUblastx.64 | (Q9H728) CDNA: FLJ21463 FIS, CLONE COL04765. | Q9H728 | 80% | 481 | 437 |
| | | | | | | 77% | 417 | 352 |
| | | | | | | 50% | 650 | 462 |
| HNHEL22 | 607421 | 2231 | WUblastx.64 | (Q9NUL2) CDNA FLJ11292 FIS, CLONE PLACE1009665. | Q9NUL2 | 71% | 280 | 342 |
| | | | | | | 72% | 363 | 656 |
| HNHEN70 | 854712 | 2232 | WUblastx.64 | olfactory receptor OR18 - rat | pir\|S29710\|S29710 | 67% | 34 | 567 |
| HNHEP41 | 638124 | 2234 | WUblastx.64 | (Q9NX85) CDNA FLJ20378 FIS, CLONE KAIA0536. | Q9NX85 | 41% | 915 | 730 |
| | | | | | | 73% | 736 | 635 |
| HNHEZ76 | 618544 | 2238 | WUblastx.64 | (Q9HA67) CDNA FLJ12155 FIS, CLONE MAMMA1000472. | Q9HA67 | 72% | 359 | 466 |
| HNHFF81 | 732075 | 2240 | WUblastx.64 | (Q9GMP5) HYPOTHETICAL 6.6 KDA PROTEIN. | Q9GMP5 | 71% | 1208 | 1333 |
| HNHFR42 | 638127 | 2242 | WUblastx.64 | (Q9UI50) PRO0657 (FRAGMENT). | Q9UI50 | 75% | 522 | 427 |
| HNHGD95 | 609905 | 2244 | WUblastx.64 | (Q9H728) CDNA: FLJ21463 FIS, CLONE COL04765. | Q9H728 | 46% | 430 | 392 |
| | | | | | | 56% | 608 | 444 |
| HNHGR82 | 617117 | 2245 | WUblastx.64 | (Q9BGV8) HYPOTHETICAL 10.0 KDA PROTEIN. | Q9BGV8 | 48% | 125 | 39 |
| | | | | | | 56% | 262 | 110 |
| HNHGY77 | 638128 | 2247 | WUblastx.64 | (Q9BZV1) UBX DOMAIN-CONTAINING PROTEIN 1. | Q9BZV1 | 53% | 292 | 248 |
| | | | | | | 100% | 212 | 90 |
| HNHHA47 | 658743 | 2248 | WUblastx.64 | (Q9NX85) CDNA FLJ20378 FIS, CLONE KAIA0536. | Q9NX85 | 65% | 983 | 864 |
| | | | | | | 66% | 1138 | 1001 |
| HNHKI74 | 777856 | 2252 | WUblastx.64 | (Q9BGX7) HYPOTHETICAL 13.0 KDA PROTEIN. | Q9BGX7 | 64% | 350 | 541 |
| HNHLD80 | 839255 | 2254 | WUblastx.64 | (Q9HA67) CDNA FLJ12155 FIS, CLONE MAMMA1000472. | Q9HA67 | 44% | 563 | 414 |
| | | | | | | 72% | 700 | 572 |
| HNHLS76 | 853372 | 2255 | WUblastx.64 | (O15410) CAGH45. | O15410 | 74% | 146 | 316 |
| HNHMY76 | 838256 | 2259 | WUblastx.64 | (Q9NX85) CDNA FLJ20378 FIS, CLONE KAIA0536. | Q9NX85 | 75% | 576 | 647 |
| | | | | | | 83% | 520 | 555 |
| | | | | | | 75% | 659 | 778 |
| HNKAA76 | 802009 | 2264 | WUblastx.64 | (Q9BTI4) SIMILAR TO RIKEN CDNA 8430408O15 GENE. | Q9BTI4 | 84% | 323 | 1492 |
| | | | | | | 60% | 353 | 421 |
| HNTAF42 | 824082 | 2265 | WUblastx.64 | (Q9NX17) CDNA FLJ20489 FIS, CLONE KAT08285. | Q9NX17 | 63% | 380 | 673 |
| HNTCG32 | 897776 | 2266 | HMMER 2.1.1 | PFAM: Sodium/hydrogen exchanger family | PF00999 | 244.7 | 178 | 789 |
| | | | WUblastx.64 | (AAK54508) Nonselective sodium potassium/proton exc | AAK54508 | 60% | 13 | 837 |
| | | | | | | 52% | 772 | 1089 |
| HNTNY89 | 886188 | 2267 | WUblastx.64 | (Q9H400) DJ583P15.4.1 (NOVEL PROTEIN (TRANSLATION OF | Q9H400 | 90% | 338 | 1006 |
| | | | | CDNA FLJ20406 (E | | 100% | 158 | 187 |
| | | | | | | 68% | 307 | 354 |
| HNTRQ40 | 809100 | 2269 | WUblastx.64 | (Q9UBC2) EPIDERMAL GROWTH FACTOR RECEPTOR | Q9UBC2 | 64% | 1498 | 1857 |
| | | | | SUBSTRATE EPS15R. | | 76% | 11 | 451 |
| | | | | | | 92% | 492 | 1604 |
| | | | | | | 66% | 1810 | 1845 |
| | | | | | | 57% | 1567 | 1608 |
| | | | | | | 36% | 32 | 178 |
| | | | | | | 40% | 202 | 486 |
| | | | | | | 40% | 1540 | 1623 |
| | | | | | | 48% | 1567 | 1686 |
| | | | | | | 41% | 1398 | 1544 |
| | | | | | | 33% | 1395 | 1589 |
| | | | | | | 50% | 1452 | 1544 |
| | | | | | | 34% | 1377 | 1547 |
| | | | | | | 36% | 495 | 695 |
| | | | | | | 35% | 20 | 196 |
| | | | | | | 40% | 519 | 623 |
| | | | | | | 23% | 750 | 1610 |
| HOAAJ09 | 654862 | 2273 | WUblastx.64 | (Q9BVD9) UNKNOWN (PROTEIN FOR MGC: 5149). | Q9BVD9 | 82% | 560 | 510 |
| | | | | | | 77% | 769 | 572 |
| HOAAL10 | 566867 | 2274 | WUblastx.64 | (Q9P1N7) PRO0974. | Q9P1N7 | 42% | 1113 | 1217 |
| | | | | | | 58% | 929 | 1129 |
| HOABC12 | 801922 | 2276 | WUblastx.64 | (Q13391) HYPOTHETICAL PROTEIN 384D8_6. | Q13391 | 100% | 208 | 405 |
| | | | | | | 97% | 5 | 208 |
| HOABH36 | 740758 | 2277 | WUblastx.64 | (Q9BSY5) UNKNOWN (PROTEIN FOR IMAGE: 3831362) | Q9BSY5 | 94% | 147 | 1073 |
| | | | | (FRAGMENT). | | 86% | 1078 | 1353 |
| | | | | | | 83% | 10 | 177 |
| HOBNA89 | 604999 | 2278 | WUblastx.64 | microtubule-associated serine/threonine protein kinase MAST205 - | pir\|A54602\|A54602 | 51% | 369 | 7 |
| | | | | mouse | | | | |
| HOBNF51 | 580861 | 2279 | WUblastx.64 | (O00410) IMPORTIN BETA-3 SUBUNIT (KARYOPHERIN | IMB3_HUMAN | 95% | 10 | 414 |
| | | | | BETA-3 SUBUNI | | 20% | 271 | 375 |
| | | | | | | 99% | 395 | 1051 |
| HODAH24 | 656887 | 2280 | WUblastx.64 | (Q9BVD9) UNKNOWN (PROTEIN FOR MGC: 5149). | Q9BVD9 | 68% | 1326 | 1189 |
| HODAH46 | 862551 | 2281 | WUblastx.64 | (Q9H6Y7) CDNA: FLJ21676 FIS, CLONE COL09164. | Q9H6Y7 | 82% | 264 | 608 |
| HODAV25 | 787471 | 2282 | WUblastx.64 | (Q9UHS9) PRO1914 PROTEIN. | Q9UHS9 | 100% | 72 | 1 |
| HODAW64 | 840069 | 2283 | WUblastx.64 | (Q9H7T2) CDNA FLJ14295 FIS, CLONE PLACE1008426, | Q9H7T2 | 93% | 634 | 1263 |
| | | | | WEAKLY SIMILAR TO RES | | | | |
| HODAY17 | 806341 | 2284 | WUblastx.64 | (Q9H7L0) FLJ00062 PROTEIN (FRAGMENT). | Q9H7L0 | 90% | 492 | 1478 |
| | | | | | | 100% | 77 | 487 |
| HODBF86 | 605001 | 2289 | WUblastx.64 | (Q9BRM8) UNKNOWN (PROTEIN FOR MGC: 13219). | Q9BRM8 | 43% | 189 | 410 |
| HODDJ25 | 824592 | 2299 | WUblastx.64 | (Q9C0K7) AMYOTROPHIC LATERAL SCLEROSIS 2. | Q9C0K7 | 100% | 266 | 1519 |
| HODDQ06 | 834824 | 2302 | WUblastx.64 | (Q9NZK6) PDZ-BINDING KINASE. | Q9NZK6 | 94% | 200 | 1165 |
| HODEA20 | 840376 | 2303 | WUblastx.64 | (Q9BXY9) RALBP1. | Q9BXY9 | 84% | 141 | 1229 |
| | | | | | | 68% | 6 | 179 |
| HOEBI94 | 795312 | 2306 | WUblastx.64 | (Q9Y4J5) RIBONUCLEOPROTEIN (HNRNP 2H9). | Q9Y4J5 | 74% | 823 | 999 |
| | | | | | | 100% | 695 | 820 |
| | | | | | | 33% | 710 | 820 |
| | | | | | | 100% | 167 | 469 |
| HOEBJ70 | 836143 | 2307 | WUblastx.64 | (AAH09229) Unknown (protein for MGC: 16480). | AAH09229 | 100% | 560 | 646 |
| HOECB33 | 840378 | 2308 | WUblastx.64 | (Q9H6D8) CDNA: FLJ22362 FIS, CLONE HRC06544. | Q9H6D8 | 100% | 10 | 525 |
| HOECX21 | 842866 | 2309 | WUblastx.64 | (Q9HC05) CD003 PROTEIN. | Q9HC05 | 100% | 368 | 225 |
| HOEDE27 | 825262 | 2310 | WUblastx.64 | (Q9P195) PRO1722. | Q9P195 | 55% | 914 | 759 |
| | | | | | | 67% | 780 | 649 |
| HOEEK81 | 844390 | 2311 | WUblastx.64 | (BAB22091) Adult male kidney cDNA, RIKEN full-lengt | BAB22091 | 60% | 51 | 596 |
| HOEEZ62 | 638833 | 2312 | WUblastx.64 | (Q9T9V8) NADH DEHYDROGENASE SUBUNIT 3. | Q9T9V8 | 88% | 66 | 173 |
| | | | | | | 83% | 303 | 338 |
| HOEFJ26 | 847422 | 2313 | WUblastx.64 | (Q9H5R3) CDNA: FLJ23147 FIS, CLONE LNG09295. | Q9H5R3 | 77% | 1198 | 995 |
| HOFMF63 | 847423 | 2315 | WUblastx.64 | L6 surface protein - human | pir\|A42926\|A42926 | 82% | 409 | 690 |
| | | | | | | 77% | 86 | 409 |
| HOFMJ65 | 664498 | 2316 | WUblastx.64 | (P70560) COLLAGEN ALPHA 1(XII) CHAIN (FRAGMENT). | CA1C_RAT | 74% | 987 | 1160 |
| HOFMO16 | 596835 | 2318 | HMMER 2.1.1 | PFAM: 3-beta hydroxysteroid dehydrogenase/isomerase family | PF01073 | 68.3 | 149 | 346 |
| | | | WUblastx.64 | (Q9BSN9) 3 BETA-HYDROXY-DELTA 5-C27-STEROID | Q9BSN9 | 75% | 11 | 184 |
| | | | | OXIDOREDUCTASE. | | 83% | 349 | 438 |
| | | | | | | 94% | 290 | 346 |
| HOFMV22 | 812864 | 2321 | WUblastx.64 | (Q9P039) HSPC113. | Q9P039 | 60% | 180 | 293 |
| | | | | | | 50% | 4 | 198 |
| HOFNY15 | 668259 | 2323 | WUblastx.64 | (Q9H9J2) CDNA FLJ12701 FIS, CLONE NT2RP1000730. | Q9H9J2 | 73% | 69 | 326 |
| | | | | | | 83% | 331 | 999 |
| HOFNY28 | 603911 | 2324 | WUblastx.64 | interferon gamma receptor accessory factor-1 precursor - human | pir\|I38500\|I38500 | 59% | 13 | 654 |
| HOGAA41 | 843499 | 2326 | WUblastx.64 | (Q9D3B1) 6330408J20RIK PROTEIN. | Q9D3B1 | 96% | 580 | 1257 |
| HOGAB51 | 825278 | 2327 | WUblastx.64 | (Q9H5R3) CDNA: FLJ23147 FIS, CLONE LNG09295. | Q9H5R3 | 74% | 919 | 1119 |
| HOGAH40 | 790978 | 2328 | WUblastx.64 | (Q9NX63) CDNA FLJ20420 FIS, CLONE KAT02462. | Q9NX63 | 93% | 185 | 844 |
| HOGAP06 | 823364 | 2329 | WUblastx.64 | (Q9BGV8) HYPOTHETICAL 10.0 KDA PROTEIN. | Q9BGV8 | 70% | 1445 | 1669 |
| HOGAR71 | 722242 | 2331 | HMMER 2.1.1 | PFAM: PMP-22/EMP/MP20/Claudin family | PF00822 | 336 | 96 | 632 |
| | | | WUblastx.64 | (O95471) CLAUDIN-7. | CLD7_HUMAN | 100% | 87 | 719 |
| HOGCC26 | 834792 | 2332 | WUblastx.64 | (Q9HCN4) XPA BINDING PROTEIN 1. | Q9HCN4 | 87% | 19 | 1140 |
| HOGCD78 | 610217 | 2333 | WUblastx.64 | (Q9H6Q7) CDNA: FLJ21979 FIS, CLONE HEP06065 | Q9H6Q7 | 95% | 428 | 487 |
| | | | | (FRAGMENT). | | 100% | 217 | 321 |
| HOGCK03 | 847427 | 2334 | WUblastx.64 | (Q99LE1) UNKNOWN (PROTEIN FOR MGC: 7036). | Q99LE1 | 53% | 310 | 405 |
| | | | | | | 78% | 369 | 860 |
| HOGCL01 | 846353 | 2335 | HMMER 2.1.1 | PFAM: KOW motif | PF00467 | 40.2 | 332 | 442 |
| | | | WUblastx.64 | (Q96A35) Similar to mitochondrial ribosomal protein L24. | Q96A35 | 100% | 167 | 814 |
| HOHBB36 | 847428 | 2336 | WUblastx.64 | myosin I alpha chain - mouse | pir\|A45438\|A45438 | 90% | 2093 | 3 |
| | | | | | | 93% | 2237 | 2103 |
| HOHBC57 | 813392 | 2337 | WUblastx.64 | (Q9VEL9) CG4090 PROTEIN. | Q9VEL9 | 21% | 2162 | 1767 |
| | | | | | | 22% | 4081 | 3632 |
| | | | | | | 31% | 1961 | 1836 |
| | | | | | | 18% | 2582 | 1737 |
| | | | | | | 17% | 4772 | 4509 |
| | | | | | | 20% | 1793 | 1374 |
| | | | | | | 20% | 2582 | 2376 |
| | | | | | | 26% | 1897 | 1652 |
| | | | | | | 21% | 3583 | 2564 |
| | | | | | | 22% | 3550 | 2534 |
| | | | | | | 21% | 2087 | 1809 |
| | | | | | | 24% | 1970 | 1704 |
| | | | | | | 22% | 4084 | 2534 |
| | | | | | | 38% | 575 | 498 |
| | | | | | | 20% | 2021 | 1773 |
| | | | | | | 21% | 3556 | 2534 |
| HOHBO66 | 853375 | 2338 | WUblastx.64 | (Q9NY61) DED PROTEIN (APOPTOSIS ANTAGONIZING | Q9NY61 | 94% | 1322 | 828 |
| | | | | TRANSCRIPTION FACTOR). | | 88% | 844 | 212 |
| HONAH67 | 821419 | 2342 | WUblastx.64 | (Q9H7T6) CDNA FLJ14272 FIS, CLONE PLACE1004793, | Q9H7T6 | 97% | 1192 | 1338 |
| | | | | WEAKLY SIMILAR TO RET | | 96% | 513 | 1172 |
| HOOAC84 | 604043 | 2343 | WUblastx.64 | (Q9UPN3) ACTIN CROSS-LINKING FAMILY PROTEIN 7 | ACF7_HUMAN | 84% | 1324 | 1482 |
| | | | | (MACROPHIN) ( | | 100% | 325 | 444 |
| | | | | | | 100% | 592 | 690 |
| | | | | | | 29% | 1381 | 1461 |
| | | | | | | 36% | 1387 | 1461 |
| HOPBP13 | 825243 | 2344 | WUblastx.64 | (Q9P195) PRO1722. | Q9P195 | 63% | 2105 | 1851 |
| HORBI80 | 877660 | 2346 | WUblastx.64 | (Q9NY33) DIPEPTIDYL-PEPTIDASE III (EC 3.4.14.4) (DPP III) ( | DPP3_HUMAN | 100% | 30 | 92 |
| | | | | | | 99% | 92 | 2239 |
| HORBL77 | 852099 | 2347 | WUblastx.64 | (Q9CWX4) 2410001E19RIK PROTEIN. | Q9CWX4 | 27% | 852 | 1034 |
| | | | | | | 31% | 212 | 784 |
| HOSEM81 | 846354 | 2350 | WUblastx.64 | (O75872) RAB3-GAP REGULATORY DOMAIN. | O75872 | 100% | 1012 | 803 |
| HOSEO83 | 847083 | 2351 | WUblastx.64 | (Q9NX85) CDNA FLJ20378 FIS, CLONE KAIA0536. | Q9NX85 | 68% | 356 | 412 |
| | | | | | | 73% | 310 | 354 |
| | | | | | | 53% | 551 | 769 |
| HOSFR35 | 845994 | 2352 | WUblastx.64 | (Q9NXV7) CDNA FLJ20035 FIS, CLONE COL00213. | Q9NXV7 | 63% | 9 | 320 |
| | | | | | | 67% | 316 | 780 |
| HOUBC29 | 872565 | 2354 | WUblastx.64 | GTP-binding protein rab2 - rat | pir\|B39963\|B39963 | 94% | 763 | 876 |
| HOUBG39 | 601696 | 2355 | WUblastx.64 | (Q9H6G8) CDNA: FLJ22294 FIS, CLONE HRC04426. | Q9H6G8 | 79% | 1603 | 1403 |
| HOUCD12 | 605006 | 2356 | WUblastx.64 | (Q9H728) CDNA: FLJ21463 FIS, CLONE COL04765. | Q9H728 | 69% | 250 | 555 |
| HOUDB17 | 603417 | 2357 | WUblastx.64 | (Q9N083) UNNAMED PORTEIN PRODUCT. | Q9N083 | 66% | 672 | 367 |
| HOUIG68 | 793749 | 2363 | WUblastx.64 | (Q9NVC9) CDNA FLJ10808 FIS, CLONE NT2RP4000879, | Q9NVC9 | 100% | 2 | 355 |
| | | | | WEAKLY SIMILAR TO UBI | | | | |
| HOVAJ68 | 741098 | 2369 | WUblastx.64 | (Q9HA67) CDNA FLJ12155 FIS, CLONE MAMMA1000472. | Q9HA67 | 55% | 1588 | 1421 |
| HOVAW46 | 892162 | 2370 | WUblastx.64 | (O00363) PUTATIVE P150. | O00363 | 41% | 395 | 345 |
| | | | | | | 39% | 1030 | 773 |
| | | | | | | 37% | 1359 | 1009 |
| | | | | | | 71% | 759 | 697 |
| | | | | | | 45% | 697 | 359 |
| HOVBB19 | 843768 | 2371 | WUblastx.64 | catalase (EC 1.11.1.6) - Campylobacter jejuni | pir\|I40767\|I40767 | 97% | 307 | 197 |
| HOVBI16 | 581097 | 2374 | WUblastx.64 | (AAG50170) Tripartite motif protein TRIM28 alpha. | AAG50170 | 63% | 83 | 115 |
| | | | | | | 83% | 202 | 702 |
| HOVCO53 | 564632 | 2380 | WUblastx.64 | (Q9H8N2) CDNA FLJ13381 FIS, CLONE PLACE1001010. | Q9H8N2 | 52% | 1321 | 1127 |
| HPBDE33 | 853660 | 2384 | WUblastx.64 | hypothetical protein DKFZp564O0823.1 - human | pir\|T12458\|T12458 | 64% | 257 | 985 |
| HPBDE33 | 897372 | 2385 | WUblastx.64 | hypothetical protein DKFZp564O0823.1 - human | pir\|T12458\|T12458 | 65% | 257 | 985 |
| HPCAG17 | 757836 | 2387 | WUblastx.64 | (Q9H743) CDNA: FLJ21394 FIS, CLONE COL03536. | Q9H743 | 64% | 1306 | 1013 |
| HPCAG17 | 863943 | 2388 | WUblastx.64 | (Q9H387) PRO2550. | Q9H387 | 71% | 1141 | 1007 |
| | | | | | | 71% | 1008 | 850 |
| HPDDQ28 | 566793 | 2391 | WUblastx.64 | (O95357) PUTATIVE G PROTEIN-COUPLED RECEPTOR | O95357 | 98% | 231 | 440 |
| | | | | (CDNA FLJ10899 FIS, CLON | | 100% | 10 | 231 |
| HPDDT14 | 580867 | 2392 | WUblastx.64 | (Q9BGV8) HYPOTHETICAL 10.0 KDA PROTEIN. | Q9BGV8 | 71% | 193 | 5 |
| HPFCP75 | 581083 | 2399 | WUblastx.64 | (Q9NX17) CDNA FLJ20489 FIS, CLONE KAT08285. | Q9NX17 | 53% | 656 | 949 |
| HPFDB66 | 829318 | 2400 | WUblastx.64 | (Q9NTM9) BA483F11.3 (CGI-32 PROTEIN). | Q9NTM9 | 100% | 102 | 920 |
| HPFDD28 | 824856 | 2401 | WUblastx.64 | (Q9P195) PRO1722. | Q9P195 | 66% | 672 | 628 |
| | | | | | | 70% | 622 | 551 |
| | | | | | | 69% | 815 | 660 |
| HPIAK27 | 852658 | 2404 | WUblastx.64 | (AAH06621) RIKEN cDNA 2810403A07 gene. | AAH06621 | 83% | 16 | 1050 |
| | | | | | | 70% | 1286 | 1864 |
| | | | | | | 95% | 1162 | 1293 |
| | | | | | | 40% | 1162 | 1290 |
| | | | | | | 34% | 1201 | 1269 |
| | | | | | | 44% | 1174 | 1245 |
| HPIAL55 | 847429 | 2405 | WUblastx.64 | (Q9D0W4) 1110060O18RIK PROTEIN. | Q9D0W4 | 96% | 506 | 592 |
| | | | | | | 90% | 1088 | 1150 |
| | | | | | | 72% | 694 | 1002 |
| | | | | | | 100% | 82 | 231 |
| | | | | | | 90% | 1778 | 1807 |
| HPIAT18 | 877663 | 2406 | WUblastx.64 | (Q9H397) PRO2852. | Q9H397 | 84% | 3823 | 3728 |
| | | | | | | 74% | 3735 | 3571 |
| HPIAZ52 | 801924 | 2407 | WUblastx.64 | (Q9H387) PRO2550. | Q9H387 | 68% | 2082 | 1987 |
| | | | | | | 67% | 1988 | 1833 |
| HPIBA07 | 886191 | 2408 | WUblastx.64 | (Q99ML9) ARKADIA. | Q99ML9 | 73% | 61 | 1482 |
| HPIBA24 | 840379 | 2409 | WUblastx.64 | (Q9ULZ5) GONADOTROPIN INDUCIBLE TRANSCRIPTION | Q9ULZ5 | 50% | 27 | 1865 |
| | | | | REPRESSOR-4. | | 56% | 378 | 1793 |
| | | | | | | 57% | 420 | 1805 |
| | | | | | | 53% | 549 | 1868 |
| | | | | | | 53% | 330 | 1544 |
| HPIBI40 | 588944 | 2410 | WUblastx.64 | (O43264) CENTROMERE/KINETOCHORE PROTEIN ZW10 | ZW10_HUMAN | 99% | 1 | 339 |
| | | | | HOMOLOG. | | 98% | 336 | 860 |
| HPJAB75 | 841653 | 2413 | WUblastx.64 | (Q9BZ63) FKSG60. | Q9BZ63 | 80% | 1581 | 1273 |
| HPJAN76 | 826185 | 2414 | WUblastx.64 | (O43194) PUTATIVE G PROTEIN-COUPLED RECEPTOR | GP39_HUMAN | 89% | 328 | 828 |
| | | | | GPR39. | | | | |
| HPJAN76 | 854893 | 2415 | WUblastx.64 | (O43194) PUTATIVE G PROTEIN-COUPLED RECEPTOR | GP39_HUMAN | 89% | 328 | 828 |
| | | | | GPR39. | | | | |
| HPJAU94 | 826719 | 2416 | WUblastx.64 | (O00371) L1 ELEMENT L1.21 P40 PROTEIN. | O00371 | 83% | 3944 | 4159 |
| | | | | | | 56% | 3529 | 3921 |
| HPJAW78 | 812766 | 2417 | WUblastx.64 | (Q9D1W2) C030013D06RIK PROTEIN. | Q9D1W2 | 44% | 87 | 254 |
| | | | | | | 38% | 96 | 266 |
| | | | | | | 40% | 77 | 262 |
| | | | | | | 45% | 87 | 260 |
| | | | | | | 47% | 86 | 256 |
| | | | | | | 43% | 243 | 85 |
| | | | | | | 40% | 259 | 86 |
| | | | | | | 39% | 249 | 67 |
| | | | | | | 41% | 261 | 88 |
| HPJBS16 | 608307 | 2418 | WUblastx.64 | (CAC39435) Epigen protein precursor. | CAC39435 | 64% | 31 | 357 |
| HPJBU04 | 798101 | 2419 | WUblastx.64 | (Q9H743) CDNA: FLJ21394 FIS, CLONE COL03536. | Q9H743 | 72% | 830 | 567 |
| | | | | | | 47% | 2315 | 2265 |
| HPJCP75 | 886192 | 2421 | WUblastx.64 | (Q9GMX5) HYPOTHETICAL 12.9 KDA PROTEIN. | Q9GMX5 | 61% | 1459 | 1704 |
| HPJCV35 | 827317 | 2422 | WUblastx.64 | (Q9Y5S2) CDC42-BINDING PROTEIN KINASE BETA. | Q9Y5S2 | 92% | 2685 | 2951 |
| | | | | | | 100% | 533 | 610 |
| HPJCX13 | 852869 | 2423 | HMMER 2.1.1 | PFAM: Reverse transcriptase (RNA-dependent DNA polymerase) | PF00078 | 307.8 | 3321 | 4148 |
| | | | WUblastx.64 | hypothetical protein (L1H 3′ region) - human | pir\|B34087\|B34087 | 96% | 4105 | 266 |
| HPMBT05 | 658715 | 2427 | WUblastx.64 | (Q14287) HYPOTHETICAL PROTEIN (FRAGMENT). | Q14287 | 73% | 491 | 592 |
| | | | | | | 85% | 403 | 483 |
| HPMDD27 | 830748 | 2432 | WUblastx.64 | (Q9NZX0) HSPC068. | Q9NZX0 | 96% | 2 | 1417 |
| HPMDF45 | 638148 | 2433 | WUblastx.64 | (Q9NX85) CDNA FLJ20378 FIS, CLONE KAIA0536. | Q9NX85 | 67% | 1678 | 1857 |
| | | | | | | 72% | 1856 | 1987 |
| HPMDP57 | 567303 | 2434 | WUblastx.64 | (Q9H387) PRO2550. | Q9H387 | 64% | 1286 | 1074 |
| | | | | | | 77% | 1447 | 1211 |
| HPMEG72 | 795709 | 2435 | WUblastx.64 | (O00549) ORF2-LIKE PROTEIN (FRAGMENT). | O00549 | 55% | 1844 | 2056 |
| HPMFM70 | 756931 | 2436 | WUblastx.64 | (Q9H387) PRO2550. | Q9H387 | 81% | 2108 | 1998 |
| | | | | | | 61% | 2286 | 2248 |
| | | | | | | 68% | 2248 | 2105 |
| HPMFP48 | 597457 | 2437 | WUblastx.64 | (Q9P195) PRO1722. | Q9P195 | 66% | 987 | 853 |
| | | | | | | 69% | 1130 | 975 |
| HPMFW01 | 844865 | 2438 | WUblastx.64 | (Q9NP48) PUTATIVE LIPID KINASE (CDNA FLJ10842 FIS, | Q9NP48 | 97% | 973 | 1113 |
| | | | | CLONE NT2RP4001343 | | | | |
| HPMGW43 | 830452 | 2440 | WUblastx.64 | vesicle-associated membrane protein-associated protein B - human | pir\|JG0186\|JG0186 | 100% | 31 | 72 |
| | | | | | | 95% | 59 | 427 |
| HPMKB09 | 900362 | 2442 | WUblastx.64 | (Q9UJU6) SRC HOMOLOGY 3 DOMAIN-CONTAINING | Q9UJU6 | 92% | 798 | 1406 |
| | | | | PROTEIN HIP-55 (DREBRIN F). | | 92% | 117 | 656 |
| HPMSH26 | 780109 | 2443 | WUblastx.64 | (Q9NQC3) NOGO-A PROTEIN. | Q9NQC3 | 69% | 1592 | 1014 |
| | | | | | | 70% | 1748 | 1578 |
| HPMSH96 | 610023 | 2444 | WUblastx.64 | (AAH00127) Glutathione-S-transferase like, glutathi | AAH00127 | 88% | 1203 | 1505 |
| HPQAJ27 | 782957 | 2446 | WUblastx.64 | peptidyl-prolyl cis-trans isomerase NMB0281 [imported] - Neisseria | pir\|B81216\|B81216 | 54% | 1370 | 987 |
| | | | | meningitidis (strain MC58 serogroup B) | | 77% | 973 | 707 |
| HPQAN50 | 788813 | 2447 | WUblastx.64 | (O00549) ORF2-LIKE PROTEIN (FRAGMENT). | O00549 | 35% | 381 | 10 |
| | | | | | | 32% | 1151 | 222 |
| | | | | | | 38% | 1285 | 590 |
| HPRAD30 | 805969 | 2458 | WUblastx.64 | (Q9P1C6) PRO2738. | Q9P1C6 | 52% | 2465 | 2265 |
| HPRCC91 | 638151 | 2459 | WUblastx.64 | (Q9H1R7) BA534G20.4 (SUPERVILLIN) (FRAGMENT). | Q9H1R7 | 100% | 2 | 97 |
| HPRCF40 | 834808 | 2460 | WUblastx.64 | (AAH07482) Similar to conserved membrane protein at | AAH07482 | 97% | 3 | 221 |
| HPRCF50 | 638153 | 2461 | WUblastx.64 | (Q9H387) PRO2550. | Q9H387 | 66% | 1787 | 1912 |
| | | | | | | 58% | 1614 | 1790 |
| HPRCM72 | 813512 | 2463 | WUblastx.64 | (Q9D3K9) 2810468K05RIK PROTEIN. | Q9D3K9 | 45% | 296 | 526 |
| HPRCS59 | 601523 | 2464 | WUblastx.64 | (Q61787) ORF 2. | Q61787 | 30% | 746 | 189 |
| HPRCT73 | 610024 | 2465 | WUblastx.64 | (Q9NPZ5) GALACTOSYLGALACTOSYLXYLOSYLPROTEIN | B3G2_HUMAN | 96% | 1231 | 1145 |
| | | | | 3-BETA-GLUCURON | | 89% | 1476 | 1300 |
| HPTRE80 | 884167 | 2467 | WUblastx.64 | (O43819) SCO2 PROTEIN HOMOLOG PRECURSOR. | SCO2_HUMAN | 85% | 779 | 39 |
| HPTRI42 | 655362 | 2468 | WUblastx.64 | (Q9BVA7) UNKNOWN (PROTEIN FOR MGC: 5621). | Q9BVA7 | 85% | 3 | 611 |
| HPTTT62 | 561954 | 2473 | WUblastx.64 | (Q9H3X5) HYPOTHETICAL 85.5 KDA PROTEIN (FRAGMENT). | Q9H3X5 | 100% | 8 | 169 |
| HPTVH24 | 831983 | 2474 | WUblastx.64 | (Q9H7Z7) CDNA FLJ14038 FIS, CLONE HEMBA1005206. | Q9H7Z7 | 90% | 3 | 974 |
| HPTVI96 | 636064 | 2477 | WUblastx.64 | (Q9H5X3) HYPOTHETICAL 13.8 KDA PROTEIN. | Q9H5X3 | 77% | 42 | 416 |
| HPVAA15 | 783074 | 2478 | WUblastx.64 | (AAK54355) ATP-binding cassette transporter family | AAK54355 | 40% | 4 | 483 |
| | | | | | | 33% | 7 | 477 |
| | | | | | | 31% | 487 | 870 |
| | | | | | | 30% | 487 | 828 |
| HPWAS27 | 536008 | 2484 | WUblastx.64 | (Q9P0E3) HSPC093 (FRAGMENT). | Q9P0E3 | 40% | 1042 | 1146 |
| | | | | | | 65% | 512 | 625 |
| HPWAV82 | 830084 | 2486 | WUblastx.64 | (Q9H387) PRO2550. | Q9H387 | 79% | 3 | 89 |
| | | | | | | 69% | 104 | 229 |
| HPWBA36 | 840380 | 2487 | WUblastx.64 | (Q9H387) PRO2550. | Q9H387 | 54% | 1183 | 1073 |
| | | | | | | 51% | 1238 | 1152 |
| | | | | | | 62% | 1380 | 1219 |
| HPWTF23 | 843700 | 2488 | HMMER 2.1.1 | PFAM: TSC-22/dip/bun family | PF01166 | 146.4 | 442 | 621 |
| | | | WUblastx.64 | (Q99576) GLUCOCORTICOID-INDUCED LEUCINE ZIPPER | GILZ_HUMAN | 94% | 271 | 672 |
| | | | | PROTEIN (DEL | | | | |
| HPWTF23 | 844775 | 2489 | HMMER 2.1.1 | PFAM: TSC-22/dip/bun family | PF01166 | 146.4 | 442 | 621 |
| | | | WUblastx.64 | (Q99576) GLUCOCORTICOID-INDUCED LEUCINE ZIPPER | GILZ_HUMAN | 94% | 271 | 672 |
| | | | | PROTEIN (DEL | | | | |
| HPWTF53 | 844737 | 2490 | WUblastx.64 | (Q9BGV8) HYPOTHETICAL 10.0 KDA PROTEIN. | Q9BGV8 | 48% | 1855 | 2082 |
| HRAAC36 | 798104 | 2494 | WUblastx.64 | (Q26195) PVA1 GENE. | Q26195 | 65% | 835 | 758 |
| | | | | | | 62% | 750 | 565 |
| | | | | | | 41% | 2229 | 2119 |
| HRAAF59 | 847086 | 2495 | WUblastx.64 | (Q9H728) CDNA: FLJ21463 FIS, CLONE COL04765. | Q9H728 | 56% | 1519 | 1247 |
| HRAAG89 | 621271 | 2496 | WUblastx.64 | (Q9GMW5) HYPOTHETICAL 45.1 KDA PROTEIN. | Q9GMW5 | 93% | 2 | 187 |
| HRAAZ12 | 834637 | 2498 | WUblastx.64 | (AAG41897) Neuropilin-2a(17). | AAG41897 | 100% | 1361 | 1435 |
| | | | | | | 92% | 863 | 901 |
| | | | | | | 56% | 385 | 579 |
| | | | | | | 96% | 579 | 878 |
| | | | | | | 79% | 901 | 1356 |
| HRABP28 | 823344 | 2500 | WUblastx.64 | (AAK55521) PRO0764. | AAK55521 | 44% | 1136 | 975 |
| | | | | | | 44% | 1245 | 1111 |
| HRABU56 | 621381 | 2501 | WUblastx.64 | (O75876) RNA-BINDING PROTEIN. | O75876 | 90% | 105 | 320 |
| HRABZ80 | 562230 | 2502 | WUblastx.64 | (Q9H743) CDNA: FLJ21394 FIS, CLONE COL03536. | Q9H743 | 64% | 1166 | 1116 |
| | | | | | | 54% | 1104 | 1000 |
| HRACB01 | 637647 | 2503 | WUblastx.64 | (Q9BGW3) HYPOTHETICAL 13.5 KDA PROTEIN. | Q9BGW3 | 52% | 1423 | 1349 |
| | | | | | | 52% | 1344 | 1135 |
| HRACI39 | 840461 | 2504 | WUblastx.64 | (Q9N083) UNNAMED PORTEIN PRODUCT. | Q9N083 | 59% | 1346 | 1146 |
| HRADU15 | 801926 | 2505 | WUblastx.64 | (Q9H7S6) CDNA FLJ14310 FIS, CLONE PLACE3000271. | Q9H7S6 | 75% | 645 | 586 |
| | | | | | | 74% | 787 | 638 |
| HRDAH04 | 651356 | 2506 | WUblastx.64 | (Q9H728) CDNA: FLJ21463 FIS, CLONE COL04765. | Q9H728 | 38% | 1336 | 1229 |
| | | | | | | 60% | 1478 | 1329 |
| HRDBA20 | 637709 | 2507 | WUblastx.64 | (Q9HA67) CDNA FLJ12155 FIS, CLONE MAMMA1000472. | Q9HA67 | 80% | 1113 | 1069 |
| | | | | | | 71% | 1049 | 1008 |
| | | | | | | 79% | 1267 | 1106 |
| HRDBD32 | 637710 | 2508 | WUblastx.64 | (Q9HA67) CDNA FLJ12155 FIS, CLONE MAMMA1000472. | Q9HA67 | 80% | 1113 | 1069 |
| | | | | | | 71% | 1049 | 1008 |
| | | | | | | 79% | 1267 | 1106 |
| HRDBL01 | 631169 | 2509 | WUblastx.64 | (Q9P195) PRO1722. | Q9P195 | 65% | 934 | 755 |
| HRDDM85 | 799542 | 2510 | WUblastx.64 | (O95662) POT. ORF VI (FRAGMENT). | O95662 | 60% | 1034 | 1096 |
| | | | | | | 56% | 538 | 1077 |
| HRDEJ86 | 695755 | 2512 | WUblastx.64 | (Q9NX85) CDNA FLJ20378 FIS, CLONE KAIA0536. | Q9NX85 | 74% | 827 | 627 |
| HRDFE30 | 750872 | 2514 | WUblastx.64 | (Q9NWU2) BA305P22.1. | Q9NWU2 | 89% | 533 | 823 |
| | | | | | | 95% | 141 | 548 |
| HRDFT83 | 606799 | 2515 | WUblastx.64 | (O60448) NEURONAL THREAD PROTEIN AD7C-NTP. | O60448 | 60% | 442 | 377 |
| | | | | | | 84% | 584 | 528 |
| | | | | | | 60% | 439 | 380 |
| | | | | | | 53% | 578 | 459 |
| | | | | | | 61% | 932 | 768 |
| | | | | | | 30% | 778 | 641 |
| | | | | | | 68% | 779 | 714 |
| | | | | | | 70% | 942 | 769 |
| | | | | | | 58% | 387 | 337 |
| | | | | | | 47% | 948 | 892 |
| | | | | | | 42% | 584 | 294 |
| | | | | | | 100% | 691 | 668 |
| | | | | | | 62% | 948 | 664 |
| HRGCA01 | 589970 | 2516 | WUblastx.64 | (Q9H387) PRO2550. | Q9H387 | 57% | 1318 | 1016 |
| HRGCA06 | 866189 | 2517 | HMMER 2.1.1 | PFAM: Ribosomal protein S16 | PF00886 | 69.1 | 143 | 325 |
| | | | WUblastx.64 | (Q9Y3D3) 28S RIBOSOMAL PROTEIN S16, MITOCHONDRIAL | RT16_HUMAN | 99% | 74 | 445 |
| | | | | PRECURSOR | | | | |
| HRGSE38 | 898233 | 2518 | WUblastx.64 | ATPase inhibitor precursor, mitochondrial - human | pir\|JC7175\|JC7175 | 83% | 77 | 367 |
| HRLME03 | 610614 | 2520 | WUblastx.64 | (Q9H3B9) PRO0956. | Q9H3B9 | 39% | 220 | 122 |
| | | | | | | 68% | 111 | 46 |
| HROAP64 | 835467 | 2522 | WUblastx.64 | (Q24333) ELASTIN LIKE PROTEIN (FRAGMENT). | Q24333 | 100% | 46 | 117 |
| HROAS35 | 827304 | 2523 | WUblastx.64 | cytochrome-c oxidase (EC 1.9.3.1) chain III - human 1 | pir\|A00482\|OTHU3 | 77% | 483 | 881 |
| HROBJ10 | 836368 | 2525 | WUblastx.64 | (Q9Y5P3) RETINOIC ACID-INDUCED PROTEIN 2. | RAI2_HUMAN | 36% | 1719 | 1441 |
| | | | | | | 96% | 1817 | 1719 |
| | | | | | | 96% | 1054 | 671 |
| | | | | | | 100% | 1445 | 1044 |
| HRTAE88 | 822964 | 2529 | WUblastx.64 | (Q13579) MARINER TRANSPOSASE. | Q13579 | 76% | 2579 | 2845 |
| HRTAP63 | 780698 | 2530 | WUblastx.64 | (Q9Y3C9) CGI-127 PROTEIN. | Q9Y3C9 | 100% | 498 | 860 |
| HSAAN03 | 599334 | 2532 | WUblastx.64 | (Q9H387) PRO2550. | Q9H387 | 70% | 924 | 832 |
| | | | | | | 72% | 676 | 602 |
| | | | | | | 77% | 1094 | 921 |
| HSAAS05 | 703244 | 2533 | WUblastx.64 | (Q9N083) UNNAMED PORTEIN PRODUCT. | Q9N083 | 55% | 1475 | 1416 |
| | | | | | | 55% | 1419 | 1216 |
| HSAAW13 | 821334 | 2534 | WUblastx.64 | (AAK57641) CAMP-specific cyclic nucleotide phosphod | AAK57641 | 99% | 1 | 1101 |
| HSATA61 | 801927 | 2538 | WUblastx.64 | (Q9CR30) 1110007C05RIK PROTEIN. | Q9CR30 | 73% | 6 | 224 |
| HSATG66 | 824903 | 2539 | WUblastx.64 | (Q9JKP5) MUSCLEBLIND. | Q9JKP5 | 100% | 561 | 590 |
| | | | | | | 52% | 13 | 213 |
| | | | | | | 83% | 1 | 465 |
| HSATI91 | 838829 | 2540 | WUblastx.64 | hypothetical protein (L1H 3′ region) - human | pir\|B34087\|B34087 | 43% | 345 | 127 |
| | | | | | | 35% | 808 | 515 |
| | | | | | | 30% | 828 | 580 |
| | | | | | | 50% | 527 | 375 |
| | | | | | | 32% | 128 | 45 |
| HSATR50 | 826398 | 2541 | WUblastx.64 | (AAH02742) U6 snRNA-associated Sm-like protein LSm8 | AAH02742 | 100% | 397 | 483 |
| HSATT82 | 566784 | 2542 | WUblastx.64 | (Q9HAD8) CDNA FLJ11786 FIS, CLONE HEMBA1006036. | Q9HAD8 | 57% | 1004 | 891 |
| | | | | | | 68% | 915 | 766 |
| HSATW19 | 637658 | 2543 | WUblastx.64 | (Q9UI50) PRO0657 (FRAGMENT). | Q9UI50 | 75% | 448 | 669 |
| HSATW67 | 604938 | 2544 | WUblastx.64 | pro-pol-dUTPase polyprotein - murine endogenous retrovirus ERV- | pir\|T29097\|T29097 | 63% | 653 | 441 |
| | | | | L (fragment) | | 82% | 436 | 119 |
| HSATZ02 | 490895 | 2545 | WUblastx.64 | (Q9H387) PRO2550. | Q9H387 | 75% | 964 | 857 |
| | | | | | | 76% | 858 | 742 |
| HSAUB89 | 600369 | 2547 | WUblastx.64 | (Q9BGW3) HYPOTHETICAL 13.5 KDA PROTEIN. | Q9BGW3 | 62% | 359 | 631 |
| HSAUI53 | 866191 | 2548 | WUblastx.64 | retrovirus-related reverse transcriptase pseudogene - slow loris | pir\|B25313\|GNLRL1 | 42% | 362 | 9 |
| | | | | | | 32% | 562 | 365 |
| | | | | | | 44% | 942 | 868 |
| | | | | | | 44% | 1037 | 957 |
| | | | | | | 38% | 570 | 436 |
| | | | | | | 37% | 827 | 723 |
| HSAUV74 | 866193 | 2549 | WUblastx.64 | (Q9UHT1) PRO1902 PROTEIN. | Q9UHT1 | 62% | 827 | 693 |
| HSAUX39 | 823161 | 2550 | WUblastx.64 | (Q62510) ZINC FINGER PROTEIN 62 (FRAGMENT). | Q62510 | 33% | 960 | 1040 |
| | | | | | | 41% | 1319 | 1645 |
| | | | | | | 43% | 1244 | 1975 |
| | | | | | | 50% | 1343 | 1975 |
| | | | | | | 52% | 1349 | 1894 |
| | | | | | | 59% | 1412 | 1975 |
| | | | | | | 45% | 1235 | 1975 |
| | | | | | | 63% | 1385 | 1972 |
| | | | | | | 52% | 1349 | 1966 |
| | | | | | | 63% | 1388 | 1966 |
| | | | | | | 48% | 1130 | 1810 |
| | | | | | | 49% | 1244 | 1975 |
| | | | | | | 64% | 1367 | 1972 |
| | | | | | | 56% | 1223 | 1975 |
| HSAVE52 | 600370 | 2552 | WUblastx.64 | (Q9H728) CDNA: FLJ21463 FIS, CLONE COL04765. | Q9H728 | 55% | 1425 | 1366 |
| | | | | | | 56% | 1384 | 1127 |
| HSAVH32 | 603367 | 2553 | WUblastx.64 | (AAK55521) PRO0764. | AAK55521 | 73% | 811 | 767 |
| | | | | | | 56% | 789 | 547 |
| HSAVO11 | 566467 | 2555 | WUblastx.64 | (O60448) NEURONAL THREAD PROTEIN AD7C-NTP. | O60448 | 41% | 1599 | 1207 |
| | | | | | | 66% | 1597 | 1439 |
| | | | | | | 54% | 1257 | 1192 |
| | | | | | | 64% | 1582 | 1301 |
| HSAVO17 | 738007 | 2556 | WUblastx.64 | (Q9H743) CDNA: FLJ21394 FIS, CLONE COL03536. | Q9H743 | 72% | 1407 | 1129 |
| HSAVQ13 | 606818 | 2557 | WUblastx.64 | (Q9GMX5) HYPOTHETICAL 12.9 KDA PROTEIN. | Q9GMX5 | 66% | 494 | 538 |
| | | | | | | 72% | 406 | 471 |
| HSAVR85 | 786185 | 2558 | WUblastx.64 | (Q9H396) PRO2870. | Q9H396 | 100% | 3791 | 3546 |
| HSAVY92 | 606808 | 2559 | WUblastx.64 | (Q9H5T7) CDNA: FLJ23054 FIS, CLONE LNG03193. | Q9H5T7 | 100% | 19 | 123 |
| HSAVZ05 | 690151 | 2560 | WUblastx.64 | (Q9H743) CDNA: FLJ21394 FIS, CLONE COL03536. | Q9H743 | 65% | 57 | 257 |
| | | | | | | 56% | 256 | 303 |
| | | | | | | 67% | 1529 | 1212 |
| HSAWB58 | 738018 | 2561 | WUblastx.64 | (Q9BGV8) HYPOTHETICAL 10.0 KDA PROTEIN. | Q9BGV8 | 75% | 1386 | 1607 |
| HSAWH36 | 581087 | 2562 | WUblastx.64 | (Q9NX17) CDNA FLJ20489 FIS, CLONE KAT08285. | Q9NX17 | 71% | 1109 | 867 |
| HSAWM20 | 606840 | 2563 | WUblastx.64 | (Q9P147) PRO2822. | Q9P147 | 67% | 488 | 387 |
| | | | | | | 57% | 363 | 322 |
| | | | | | | 73% | 591 | 490 |
| HSAWM74 | 866195 | 2564 | WUblastx.64 | (O95166) MM46 (HT004 PROTEIN) (MAP1 LIGHT CHAIN 3 | O95166 | 100% | 8 | 85 |
| | | | | RELATED PROTEIN). | | | | |
| HSAWX70 | 872498 | 2565 | WUblastx.64 | (O00369) L1 ELEMENT L1.20 P40 PROTEIN. | O00369 | 43% | 1309 | 1088 |
| | | | | | | 73% | 1028 | 300 |
| HSAXI10 | 598726 | 2567 | WUblastx.64 | (Q9H387) PRO2550. | Q9H387 | 79% | 643 | 512 |
| | | | | | | 75% | 811 | 776 |
| | | | | | | 71% | 776 | 621 |
| HSAXL49 | 606826 | 2568 | WUblastx.64 | (Q9H387) PRO2550. | Q9H387 | 63% | 742 | 572 |
| | | | | | | 83% | 863 | 717 |
| HSAXL82 | 566801 | 2569 | WUblastx.64 | (Q9CXK1) 5730406I15RIK PROTEIN. | Q9CXK1 | 96% | 533 | 613 |
| HSAXS06 | 668260 | 2572 | WUblastx.64 | (Q9H743) CDNA: FLJ21394 FIS, CLONE COL03536. | Q9H743 | 50% | 955 | 824 |
| | | | | | | 62% | 1121 | 954 |
| HSAYL24 | 608642 | 2574 | WUblastx.64 | (Q9UI59) PRO0478 PROTEIN. | Q9UI59 | 73% | 132 | 7 |
| HSBAJ47 | 842694 | 2578 | WUblastx.64 | (Q9H189) SPHINGOSINE-1-PHOSPHATASE. | Q9H189 | 100% | 1 | 237 |
| HSDDC55 | 663277 | 2580 | WUblastx.64 | (Q9NX85) CDNA FLJ20378 FIS, CLONE KAIA0536. | Q9NX85 | 82% | 743 | 793 |
| | | | | | | 57% | 490 | 741 |
| HSDEA26 | 822812 | 2581 | WUblastx.64 | (Q9UHT1) PRO1902 PROTEIN. | Q9UHT1 | 76% | 1325 | 1387 |
| | | | | | | 75% | 1140 | 1322 |
| HSDGH56 | 853379 | 2587 | WUblastx.64 | (Q9H728) CDNA: FLJ21463 FIS, CLONE COL04765. | Q9H728 | 94% | 865 | 815 |
| | | | | | | 61% | 1096 | 1058 |
| | | | | | | 70% | 1058 | 879 |
| HSDGM01 | 608310 | 2588 | WUblastx.64 | (Q9GMX5) HYPOTHETICAL 12.9 KDA PROTEIN. | Q9GMX5 | 85% | 722 | 781 |
| | | | | | | 53% | 529 | 726 |
| HSDGM42 | 870143 | 2589 | WUblastx.64 | (Q9BT21) SIMILAR TO RIKEN CDNA 2610005L19 GENE | Q9BT21 | 92% | 360 | 2639 |
| | | | | (FRAGMENT). | | | | |
| HSDGM42 | 824916 | 2590 | WUblastx.64 | (Q9BT21) SIMILAR TO RIKEN CDNA 2610005L19 GENE | Q9BT21 | 91% | 359 | 2638 |
| | | | | (FRAGMENT). | | | | |
| HSDGM42 | 852473 | 2591 | WUblastx.64 | (Q9BT21) SIMILAR TO RIKEN CDNA 2610005L19 GENE | Q9BT21 | 95% | 1544 | 606 |
| | | | | (FRAGMENT). | | | | |
| HSDGM42 | 861925 | 2592 | WUblastx.64 | (Q9BT21) SIMILAR TO RIKEN CDNA 2610005L19 GENE | Q9BT21 | 92% | 420 | 2699 |
| | | | | (FRAGMENT). | | | | |
| HSDGM42 | 865828 | 2593 | WUblastx.64 | (Q9BT21) SIMILAR TO RIKEN CDNA 2610005L19 GENE | Q9BT21 | 92% | 420 | 2699 |
| | | | | (FRAGMENT). | | | | |
| HSDGM42 | 886748 | 2594 | WUblastx.64 | (Q9BT21) SIMILAR TO RIKEN CDNA 2610005L19 GENE | Q9BT21 | 92% | 420 | 2699 |
| | | | | (FRAGMENT). | | | | |
| HSDIK31 | 847087 | 2597 | WUblastx.64 | (O15121) PUTATIVE FATTY ACID DESATURASE MLD | O15121 | 100% | 19 | 369 |
| | | | | (DEGENERATIVE SPERMATOCYT | | 97% | 354 | 881 |
| HSDJC96 | 753284 | 2599 | WUblastx.64 | (Q9Y6A3) HYPOTHETICAL 5.6 KDA PROTEIN (FRAGMENT). | Q9Y6A3 | 100% | 1946 | 1800 |
| HSDJF04 | 695756 | 2601 | WUblastx.64 | (O95890) UNKNOWN. | O95890 | 94% | 2 | 382 |
| HSDJG47 | 847325 | 2602 | WUblastx.64 | (Q9H6U6) CDNA: FLJ21857 FIS, CLONE HEP02294. | Q9H6U6 | 84% | 59 | 1180 |
| HSDJH72 | 805971 | 2603 | WUblastx.64 | (Q9BVD9) UNKNOWN (PROTEIN FOR MGC: 5149). | Q9BVD9 | 66% | 1500 | 1447 |
| | | | | | | 71% | 1709 | 1485 |
| HSDJL07 | 895387 | 2604 | WUblastx.64 | (Q9H5R3) CDNA: FLJ23147 FIS, CLONE LNG09295. | Q9H5R3 | 64% | 764 | 898 |
| | | | | | | 82% | 1481 | 1290 |
| HSDJR49 | 741079 | 2605 | WUblastx.64 | (Q9H728) CDNA: FLJ21463 FIS, CLONE COL04765. | Q9H728 | 63% | 1000 | 1122 |
| | | | | | | 70% | 893 | 1015 |
| | | | | | | 68% | 786 | 872 |
| | | | | | | 62% | 1124 | 1210 |
| | | | | | | 73% | 1000 | 1044 |
| | | | | | | 67% | 569 | 733 |
| HSDJV24 | 806246 | 2606 | WUblastx.64 | (Q9CWT1) 2410004N11RIK PROTEIN. | Q9CWT1 | 72% | 539 | 1429 |
| HSDJV40 | 623716 | 2607 | WUblastx.64 | (Q9NX85) CDNA FLJ20378 FIS, CLONE KAIA0536. | Q9NX85 | 69% | 1105 | 977 |
| | | | | | | 59% | 1360 | 1295 |
| | | | | | | 38% | 1583 | 1401 |
| | | | | | | 60% | 1277 | 1104 |
| HSDKA64 | 600372 | 2608 | WUblastx.64 | (Q9H387) PRO2550. | Q9H387 | 80% | 1340 | 1278 |
| | | | | | | 72% | 1548 | 1342 |
| HSDKF96 | 839730 | 2610 | WUblastx.64 | (Q9N083) UNNAMED PORTEIN PRODUCT. | Q9N083 | 63% | 1672 | 1412 |
| HSDZO08 | 827460 | 2611 | WUblastx.64 | (Q9UES6) I-1 RECEPTOR CANDIDATE PROTEIN. | Q9UES6 | 74% | 1 | 393 |
| | | | | | | 30% | 1 | 156 |
| | | | | | | 92% | 449 | 1648 |
| HSEBB18 | 877813 | 2613 | WUblastx.64 | (Q9NXX4) CDNA FLJ20005 FIS, CLONE ADKA02526. | Q9NXX4 | 89% | 476 | 898 |
| HSFAM19 | 691371 | 2614 | WUblastx.64 | (O18966) EAG CHANNEL. | O18966 | 83% | 76 | 510 |
| HSHAG54 | 834781 | 2615 | WUblastx.64 | (Q9H5R3) CDNA: FLJ23147 FIS, CLONE LNG09295. | Q9H5R3 | 51% | 1028 | 738 |
| HSHAS72 | 835991 | 2616 | HMMER 2.1.1 | PFAM: G-protein gamma subunit. | PF00631 | 139.1 | 225 | 422 |
| | | | WUblastx.64 | (AAK53385) G protein gamma 12 subunit. | AAK53385 | 100% | 207 | 422 |
| HSHAX04 | 812178 | 2617 | WUblastx.64 | peptidylprolyl isomerase (EC 5.2.1.8) A - human | pir\|S66681\|S66681 | 96% | 14 | 916 |
| HSHBT15 | 581088 | 2618 | WUblastx.64 | (O95863) ZINC FINGER PROTEIN SNAI1 (SNAIL PROTEIN | SNAI_HUMAN | 100% | 570 | 680 |
| | | | | HOMOLOG) | | 79% | 10 | 570 |
| HSHCE85 | 855969 | 2619 | WUblastx.64 | (Q9Y546) DJ167A19.4 (NOVEL PROTEIN). | Q9Y546 | 100% | 202 | 1224 |
| HSIAC81 | 783076 | 2620 | WUblastx.64 | (Q9H3T4) KLOTHO-RELATED PROTEIN 1. | Q9H3T4 | 99% | 8 | 1261 |
| HSIAP01 | 897538 | 2622 | WUblastx.64 | (Q9NXP8) CDNA FLJ20124 FIS, CLONE COL06056. | Q9NXP8 | 92% | 590 | 673 |
| | | | | | | 28% | 218 | 535 |
| | | | | | | 100% | 685 | 732 |
| | | | | | | 89% | 71 | 613 |
| HSIDZ25 | 658721 | 2625 | WUblastx.64 | (Q9HBN2) HYPOTHETICAL 15.8 KDA PROTEIN. | Q9HBN2 | 37% | 1366 | 1280 |
| | | | | | | 80% | 1689 | 1597 |
| HSIEB64 | 651359 | 2626 | WUblastx.64 | (Q9P1J1) PRO1546. | Q9P1J1 | 70% | 1718 | 1747 |
| | | | | | | 60% | 1860 | 1949 |
| | | | | | | 53% | 1741 | 1875 |
| HSIFO61 | 845026 | 2628 | WUblastx.64 | (O95831) PROGRAMED CELL DEATH PROTEIN 8, | PCD8_HUMAN | 96% | 95 | 1933 |
| | | | | MITOCHONDRIAL PREC | | | | |
| HSIFO61 | 852715 | 2629 | WUblastx.64 | (O95831) PROGRAMED CELL DEATH PROTEIN 8, | PCD8_HUMAN | 96% | 183 | 2021 |
| | | | | MITOCHONDRIAL PREC | | | | |
| HSIGC63 | 877486 | 2630 | WUblastx.64 | (Q9NX85) CDNA FLJ20378 FIS, CLONE KAIA0536. | Q9NX85 | 58% | 1734 | 1354 |
| HSIGM95 | 840382 | 2631 | WUblastx.64 | (Q9H397) PRO2852. | Q9H397 | 80% | 818 | 759 |
| | | | | | | 75% | 754 | 707 |
| | | | | | | 77% | 942 | 823 |
| HSJAN83 | 825132 | 2633 | WUblastx.64 | (Q9HAD8) CDNA FLJ11786 FIS, CLONE HEMBA1006036. | Q9HAD8 | 86% | 1063 | 977 |
| | | | | | | 63% | 963 | 898 |
| | | | | | | 57% | 827 | 771 |
| | | | | | | 87% | 839 | 768 |
| | | | | | | 77% | 960 | 841 |
| HSJAQ10 | 853383 | 2634 | WUblastx.64 | (AAH05957) Solute carrier family 25 (mitochondrial | AAH05957 | 100% | 11 | 187 |
| HSJAR59 | 846364 | 2635 | WUblastx.64 | (Q9NZS6) GLUCOCORTICOID RECEPTOR AF-1 SPECIFIC | Q9NZS6 | 100% | 16 | 138 |
| | | | | ELONGATION FACTOR (FRA | | | | |
| HSJAU93 | 702019 | 2636 | WUblastx.64 | (Q9BUK4) SIMILAR TO HYPOTHETICAL PROTEIN FLJ10709. | Q9BUK4 | 74% | 123 | 728 |
| HSKHV81 | 841590 | 2646 | WUblastx.64 | (Q9HA67) CDNA FLJ12155 FIS, CLONE MAMMA1000472. | Q9HA67 | 60% | 935 | 801 |
| | | | | | | 26% | 308 | 219 |
| HSKYR49 | 806548 | 2648 | WUblastx.64 | (Q9BTV7) UNKNOWN (PROTEIN FOR IMAGE: 3357127) | Q9BTV7 | 100% | 10 | 456 |
| | | | | (FRAGMENT). | | | | |
| HSKYU81 | 899335 | 2649 | WUblastx.64 | (Q9Y2W2) SH3 DOMAIN-BINDING PROTEIN SNP70 (NPW38- | Q9Y2W2 | 84% | 950 | 1276 |
| | | | | BINDING PROTEIN NPWB | | 100% | 536 | 565 |
| | | | | | | 31% | 240 | 365 |
| | | | | | | 72% | 6 | 533 |
| HSKYY92 | 853384 | 2650 | WUblastx.64 | (Q9P0E3) HSPC093 (FRAGMENT). | Q9P0E3 | 57% | 1455 | 1351 |
| | | | | | | 50% | 1348 | 1193 |
| HSLAB11 | 823825 | 2651 | WUblastx.64 | (Q9CVT0) 1700040C17RIK PROTEIN (FRAGMENT). | Q9CVT0 | 99% | 915 | 1427 |
| | | | | | | 34% | 313 | 453 |
| | | | | | | 89% | 187 | 915 |
| HSLAS96 | 740764 | 2652 | WUblastx.64 | (Q9H387) PRO2550. | Q9H387 | 62% | 1173 | 1075 |
| | | | | | | 73% | 1378 | 1175 |
| HSLAW59 | 637669 | 2653 | WUblastx.64 | (Q9HAD8) CDNA FLJ11786 FIS, CLONE HEMBA1006036. | Q9HAD8 | 52% | 578 | 423 |
| | | | | | | 70% | 427 | 287 |
| HSLCH54 | 562018 | 2654 | WUblastx.64 | (P51805) PLEXIN A3 PRECURSOR (PLEXIN 4) | PLX4_HUMAN | 97% | 445 | 570 |
| | | | | (TRANSMEMBRANE PROT | | 81% | 9 | 446 |
| HSLCH57 | 899415 | 2655 | WUblastx.64 | SREBP cleavage activating protein - Chinese hamster | pir\|T18526\|T18526 | 92% | 1408 | 2205 |
| | | | | | | 39% | 658 | 774 |
| | | | | | | 47% | 352 | 459 |
| HSLCI86 | 737626 | 2656 | WUblastx.64 | estrogen sulfotransferase (EC 2.8.2.—) - human | pir\|JC2229\|JC2229 | 33% | 493 | 555 |
| | | | | | | 100% | 704 | 1090 |
| HSLCS31 | 604046 | 2657 | HMMER 2.1.1 | PFAM: PPR repeat | PF01535 | 22.6 | 493 | 597 |
| | | | WUblastx.64 | (Q9H9R0) CDNA FLJ12598 FIS, CLONE NT2RM4001384. | Q9H9R0 | 98% | 454 | 828 |
| | | | | | | 100% | 826 | 1047 |
| HSLCS34 | 751324 | 2658 | WUblastx.64 | (Q9NVE5) CDNA FLJ10785 FIS, CLONE NT2RP4000457, | Q9NVE5 | 70% | 40 | 576 |
| | | | | WEAKLY SIMILAR TO UBI | | 86% | 375 | 1007 |
| HSLCV16 | 772948 | 2659 | WUblastx.64 | (Q9H0J7) HYPOTHETICAL 53.4 KDA PROTEIN. | Q9H0J7 | 99% | 1 | 552 |
| | | | | | | 87% | 1537 | 1698 |
| HSLDW54 | 853386 | 2660 | WUblastx.64 | probable pol polyprotein-related protein 4 - rat | pir\|S21348\|S21348 | 52% | 732 | 631 |
| | | | | | | 44% | 625 | 452 |
| | | | | | | 34% | 1115 | 738 |
| HSLEC18 | 722249 | 2661 | WUblastx.64 | (Q96RP7) Galbetal-3GalNAc 3′- sulfotransferase. | Q96RP7 | 97% | 60 | 1319 |
| HSLEG59 | 637671 | 2662 | WUblastx.64 | (Q14287) HYPOTHETICAL PROTEIN (FRAGMENT). | Q14287 | 44% | 968 | 807 |
| | | | | | | 20% | 745 | 614 |
| | | | | | | 50% | 1150 | 941 |
| HSLFR59 | 853388 | 2663 | WUblastx.64 | hypothetical protein DKFZp434L0130.1 - human | pir\|T46471\|T46471 | 86% | 877 | 987 |
| | | | | | | 93% | 987 | 1481 |
| HSLGD91 | 883491 | 2664 | WUblastx.64 | (Q9NX85) CDNA FLJ20378 FIS, CLONE KAIA0536. | Q9NX85 | 70% | 764 | 817 |
| | | | | | | 72% | 816 | 926 |
| HSNAQ52 | 600402 | 2672 | WUblastx.64 | (Q9BGZ4) HYPOTHETICAL 11.6 KDA PROTEIN. | Q9BGZ4 | 85% | 197 | 156 |
| | | | | | | 81% | 142 | 95 |
| HSNAW06 | 580248 | 2674 | WUblastx.64 | (Q9GMI2) HYPOTHETICAL 9.4 KDA PROTEIN. | Q9GMI2 | 61% | 219 | 413 |
| HSNBQ36 | 784994 | 2678 | WUblastx.64 | (Q9NUU5) CDNA FLJ11128 FIS, CLONE PLACE1006236. | Q9NUU5 | 98% | 358 | 732 |
| HSNBS39 | 617125 | 2679 | WUblastx.64 | retrovirus-related hypothetical protein II - human 1 | pir\|S23650\|S23650 | 76% | 313 | 263 |
| | | | | | | 47% | 82 | 26 |
| | | | | | | 38% | 275 | 93 |
| HSOAT44 | 847357 | 2681 | WUblastx.64 | (Q9GZY9) CDNA: FLJ20877 FIS, CLONE ADKA02965 (CDNA: | Q9GZY9 | 100% | 10 | 195 |
| | | | | FLJ20871 FIS, CLO | | | | |
| HSOBH11 | 794000 | 2683 | WUblastx.64 | (Q9GMX5) HYPOTHETICAL 12.9 KDA PROTEIN. | Q9GMX5 | 58% | 657 | 743 |
| | | | | | | 59% | 508 | 603 |
| HSOBW65 | 778388 | 2685 | WUblastx.64 | (Q14288) HYPOTHETICAL PROTEIN (FRAGMENT). | Q14288 | 64% | 160 | 110 |
| | | | | | | 67% | 636 | 142 |
| HSPAA89 | 825099 | 2686 | WUblastx.64 | (P05142) PROLINE-RICH PROTEIN MP-2 PRECURSOR. | PRP2_MOUSE | 42% | 210 | 148 |
| | | | | | | 37% | 1144 | 641 |
| HSQBL20 | 780518 | 2696 | WUblastx.64 | (Q9UBQ5) MRNA OF MUSCLE SPECIFIC GENE M9, | Q9UBQ5 | 100% | 183 | 836 |
| | | | | COMPLETE CDS (ARG134 PROTEI | | | | |
| HSQCY74 | 886110 | 2698 | WUblastx.64 | (Q9H455) DJ383J4.4 (A NOVEL PROTEIN SIMILAR TO | Q9H455 | 99% | 10 | 1455 |
| | | | | ASPARTYL-TRNA SYNTHETA | | | | |
| HSRAA81 | 695759 | 2705 | WUblastx.64 | (CAC38441) DJ1033B10.5.1 (SAC2 (suppressor of actin | CAC38441 | 90% | 9 | 749 |
| | | | | | | 33% | 596 | 694 |
| | | | | | | 100% | 727 | 1086 |
| HSRAO56 | 719816 | 2706 | WUblastx.64 | (Q9HBS7) HYPOTHETICAL 14.2 KDA PROTEIN. | Q9HBS7 | 68% | 1419 | 1324 |
| | | | | | | 72% | 1592 | 1416 |
| HSRAV28 | 581102 | 2707 | WUblastx.64 | (Q9H387) PRO2550. | Q9H387 | 61% | 655 | 524 |
| | | | | | | 61% | 823 | 785 |
| | | | | | | 75% | 788 | 654 |
| HSRDW57 | 562019 | 2709 | WUblastx.64 | (BAB55068) CDNA FLJ14466 fis, clone MAMMA1000416. | BAB55068 | 100% | 8 | 259 |
| | | | | | | 91% | 262 | 495 |
| | | | | | | 83% | 485 | 520 |
| HSREC72 | 601368 | 2710 | WUblastx.64 | (Q9H387) PRO2550. | Q9H387 | 88% | 838 | 812 |
| | | | | | | 69% | 783 | 625 |
| HSREG42 | 839481 | 2711 | WUblastx.64 | (Q9VZZ4) PXN PROTEIN. | Q9VZZ4 | 47% | 6 | 1484 |
| HSRFD18 | 840771 | 2712 | WUblastx.64 | (Q9H941) CDNA FLJ13033 FIS, CLONE NT2RP3001126. | Q9H941 | 100% | 437 | 559 |
| HSRGZ11 | 801929 | 2713 | WUblastx.64 | (Q9BYN8) DJ534B8.3 (NOVEL PROTEIN). | Q9BYN8 | 100% | 253 | 384 |
| HSRHB59 | 840384 | 2714 | WUblastx.64 | (Q9NWT0) HYPOTHETICAL 17.7 KDA PROTEIN. | Q9NWT0 | 100% | 8 | 121 |
| | | | | | | 100% | 123 | 308 |
| HSSCC66 | 559402 | 2716 | WUblastx.64 | (Q9N083) UNNAMED PORTEIN PRODUCT. | Q9N083 | 65% | 548 | 667 |
| HSSEL28 | 838618 | 2721 | WUblastx.64 | (Q9P195) PRO1722. | Q9P195 | 68% | 755 | 1042 |
| HSSFP88 | 658726 | 2722 | HMMER 2.1.1 | PFAM: Zinc finger, C3HC4 type (RING finger) | PF00097 | 36.1 | 828 | 953 |
| | | | WUblastx.64 | (Q9H6Y7) CDNA: FLJ21676 FIS, CLONE COL09164. | Q9H6Y7 | 90% | 204 | 1133 |
| HSSGS62 | 741162 | 2723 | WUblastx.64 | (Q9GMX5) HYPOTHETICAL 12.9 KDA PROTEIN. | Q9GMX5 | 60% | 899 | 762 |
| | | | | | | 60% | 200 | 141 |
| HSSJA23 | 847089 | 2724 | WUblastx.64 | (Q9BTH7) UNKNOWN (PROTEIN FOR MGC: 5601). | Q9BTH7 | 94% | 272 | 685 |
| | | | | | | 96% | 1379 | 1561 |
| HSSJF26 | 567431 | 2725 | WUblastx.64 | (Q9HBS7) HYPOTHETICAL 14.2 KDA PROTEIN. | Q9HBS7 | 76% | 600 | 689 |
| | | | | | | 46% | 401 | 580 |
| HSSJM47 | 796096 | 2727 | WUblastx.64 | (Q9UJ98) STROMAL ANTIGEN 3, (STAG3). | Q9UJ98 | 77% | 129 | 194 |
| | | | | | | 75% | 527 | 637 |
| | | | | | | 96% | 899 | 994 |
| HSSJW30 | 779822 | 2728 | WUblastx.64 | (BAB55147) CDNA FLJ14580 fis, clone NT2RM4001204. | BAB55147 | 86% | 2 | 46 |
| | | | | | | 92% | 45 | 488 |
| HSSJW30 | 850566 | 2729 | WUblastx.64 | (BAB55147) CDNA FLJ14580 fis, clone NT2RM4001204. | BAB55147 | 67% | 14 | 703 |
| HSSJW30 | 867721 | 2730 | WUblastx.64 | (BAB55147) CDNA FLJ14580 fis, clone NT2RM4001204. | BAB55147 | 82% | 672 | 842 |
| | | | | | | 100% | 625 | 675 |
| | | | | | | 89% | 76 | 186 |
| | | | | | | 46% | 131 | 220 |
| | | | | | | 60% | 24 | 83 |
| HSSMY35 | 740765 | 2731 | WUblastx.64 | (Q9H7J9) FLJ00075 PROTEIN (FRAGMENT). | Q9H7J9 | 96% | 20 | 217 |
| HSTAL93 | 841863 | 2732 | WUblastx.64 | (AAK52433) Low density lipoprotein receptor-related | AAK52433 | 98% | 287 | 799 |
| | | | | | | 35% | 284 | 787 |
| | | | | | | 35% | 299 | 787 |
| | | | | | | 35% | 287 | 637 |
| HSUAF06 | 863206 | 2734 | WUblastx.64 | pol polyprotein - Cas-Br-E murine leukemia virus (fragment) | pir\|A26103\|A26103 | 47% | 630 | 944 |
| | | | | | | 50% | 1194 | 1307 |
| HSUBX67 | 751266 | 2735 | WUblastx.64 | (Q9N083) UNNAMED PORTEIN PRODUCT. | Q9N083 | 61% | 624 | 499 |
| | | | | | | 64% | 766 | 608 |
| HSUSB73 | 603912 | 2736 | WUblastx.64 | (Q9GMU5) HYPOTHETICAL 14.1 KDA PROTEIN. | Q9GMU5 | 57% | 1158 | 1117 |
| | | | | | | 80% | 130 | 56 |
| HSVAC05 | 836051 | 2737 | WUblastx.64 | (Q9H6G8) CDNA: FLJ22294 FIS, CLONE HRC04426. | Q9H6G8 | 64% | 688 | 539 |
| HSVBA83 | 812059 | 2742 | WUblastx.64 | (O60593) ARG/ABL-INTERACTING PROTEIN ARGBP2B | O60593 | 98% | 313 | 516 |
| | | | | (FRAGMENT). | | | | |
| HSVBY62 | 637113 | 2745 | WUblastx.64 | (Q9Y2Q7) HSPC005 PROTEIN (C11ORF10) (CHROMOSOME 11 | Q9Y2Q7 | 100% | 35 | 217 |
| | | | | OPEN READING FRAME | | | | |
| HSXAI44 | 590743 | 2750 | WUblastx.64 | (Q9H728) CDNA: FLJ21463 FIS, CLONE COL04765. | Q9H728 | 90% | 1024 | 992 |
| | | | | | | 73% | 1007 | 828 |
| HSXAS59 | 838072 | 2752 | WUblastx.64 | (Q9H728) CDNA: FLJ21463 FIS, CLONE COL04765. | Q9H728 | 85% | 1515 | 1474 |
| | | | | | | 81% | 1303 | 1256 |
| | | | | | | 62% | 1478 | 1305 |
| HSXAY60 | 737753 | 2754 | WUblastx.64 | (Q9N032) UNNAMED PROTEIN PRODUCT. | Q9N032 | 59% | 1742 | 1602 |
| HSXCA83 | 830046 | 2756 | WUblastx.64 | (Q9UHD2) TANK BINDING KINASE TBK1 (NF-KB- | Q9UHD2 | 39% | 1121 | 1219 |
| | | | | ACTIVATING KINASE NAK). | | 98% | 1215 | 1382 |
| | | | | | | 93% | 109 | 1197 |
| HSXCX20 | 658728 | 2757 | WUblastx.64 | (Q9BXA5) G-PROTEIN COUPLED RECEPTOR 91. | Q9BXA5 | 100% | 891 | 1049 |
| | | | | | | 86% | 61 | 942 |
| HSXFG21 | 805972 | 2758 | WUblastx.64 | (Q9CQQ2) 1700066F09RIK PROTEIN (FRAGMENT). | Q9CQQ2 | 47% | 499 | 933 |
| HSXFH82 | 699863 | 2759 | WUblastx.64 | (Q9MZZ7) HYPOTHETICAL 16.3 KDA PROTEIN. | Q9MZZ7 | 69% | 1447 | 1611 |
| | | | | | | 92% | 1124 | 1162 |
| | | | | | | 65% | 1146 | 1598 |
| HSYBR79 | 873848 | 2761 | WUblastx.64 | vesicle-associated membrane protein-associated protein B - human | pir\|JG0186\|JG0186 | 100% | 193 | 861 |
| HSYBV44 | 753253 | 2762 | WUblastx.64 | (Q9B2U5) ATP SYNTHASE 6. | Q9B2U5 | 66% | 84 | 761 |
| HSYBZ94 | 799543 | 2763 | WUblastx.64 | (Q9BZ73) NIR2. | Q9BZ73 | 98% | 2168 | 2392 |
| | | | | | | 99% | 2388 | 2924 |
| | | | | | | 33% | 1313 | 1399 |
| | | | | | | 33% | 1895 | 1999 |
| | | | | | | 79% | 21 | 2174 |
| HT3AB13 | 841680 | 2764 | WUblastx.64 | (Q9UP93) SHORT FORM TRANSCRIPTION FACTOR C-MAF. | Q9UP93 | 53% | 663 | 980 |
| | | | | | | 74% | 271 | 612 |
| HT4SB02 | 837688 | 2765 | HMMER 2.1.1 | PFAM: emp24/gp25L/p24 family | PF01105 | 231.4 | 78 | 521 |
| | | | WUblastx.64 | protein trafficking protein tmp21-I - human | pir\|G01159\|G01159 | 100% | 84 | 524 |
| | | | | | | 100% | 21 | 74 |
| HT4SB81 | 756723 | 2767 | WUblastx.64 | (O95621) TIC. | O95621 | 95% | 3 | 194 |
| | | | | | | 77% | 580 | 789 |
| | | | | | | 62% | 185 | 631 |
| | | | | | | 41% | 19 | 54 |
| HT4SB81 | 844512 | 2768 | WUblastx.64 | (O95621) TIC. | O95621 | 72% | 185 | 790 |
| | | | | | | 95% | 3 | 194 |
| | | | | | | 41% | 19 | 54 |
| | | | | | | 57% | 872 | 913 |
| HT4SB81 | 858154 | 2769 | WUblastx.64 | (O95621) TIC. | O95621 | 71% | 185 | 790 |
| | | | | | | 41% | 19 | 54 |
| | | | | | | 95% | 3 | 194 |
| | | | | | | 57% | 872 | 913 |
| HTABF81 | 610040 | 2771 | WUblastx.64 | (Q9NRR3) NON-KINASE CDC42 EFFECTOR PROTEIN SPEC2. | Q9NRR3 | 100% | 48 | 299 |
| HTACX63 | 602694 | 2772 | WUblastx.64 | (Q9H728) CDNA: FLJ21463 FIS, CLONE COL04765. | Q9H728 | 65% | 919 | 860 |
| | | | | | | 78% | 825 | 784 |
| | | | | | | 53% | 1067 | 921 |
| HTADC63 | 842131 | 2773 | WUblastx.64 | (Q9D7U1) 2210407P13RIK PROTEIN. | Q9D7U1 | 40% | 557 | 793 |
| | | | | | | 46% | 162 | 557 |
| HTADO61 | 695760 | 2774 | WUblastx.64 | hypothetical protein DKFZp434C1415.1 - human | pir\|T42648\|T42648 | 100% | 9 | 95 |
| HTAEC59 | 846728 | 2776 | WUblastx.64 | ubiquitin-conjugating enzyme E2.17 kB - rat | pir\|S53358\|S53358 | 100% | 409 | 591 |
| | | | | | | 100% | 156 | 383 |
| HTAED89 | 801931 | 2777 | HMMER 2.1.1 | PFAM: 7 transmembrane receptor (metabotropic glutamate family) | PF00003 | 78.6 | 1240 | 1578 |
| | | | WUblastx.64 | (O35363) CALCIUM SENSING RECEPTOR, RELATED | O35363 | 51% | 1590 | 1718 |
| | | | | SEQUENCE 2 (CALCIUM-SENSIN | | 38% | 858 | 920 |
| | | | | | | 38% | 908 | 1171 |
| | | | | | | 53% | 1216 | 1611 |
| HTAEO35 | 732379 | 2780 | WUblastx.64 | (Q9H387) PRO2550. | Q9H387 | 73% | 1476 | 1195 |
| HTDAF68 | 637685 | 2781 | WUblastx.64 | (Q9H728) CDNA: FLJ21463 FIS, CLONE COL04765. | Q9H728 | 72% | 892 | 1041 |
| | | | | | | 50% | 2 | 91 |
| | | | | | | 70% | 711 | 890 |
| HTDAI38 | 878930 | 2782 | WUblastx.64 | (Q9NX73) CDNA FLJ20400 FIS, CLONE KAT00587 | Q9NX73 | 88% | 954 | 1268 |
| | | | | (FRAGMENT). | | 30% | 361 | 669 |
| | | | | | | 34% | 1146 | 1874 |
| | | | | | | 37% | 1314 | 1898 |
| | | | | | | 100% | 343 | 678 |
| | | | | | | 32% | 930 | 1628 |
| HTECE87 | 702025 | 2786 | WUblastx.64 | (Q9NVC3) CDNA FLJ10815 FIS, CLONE NT2RP4000989, | Q9NVC3 | 100% | 53 | 133 |
| | | | | WEAKLY SIMILAR TO UNC | | 100% | 133 | 279 |
| HTEDF78 | 564215 | 2787 | WUblastx.64 | (Q9BGW3) HYPOTHETICAL 13.5 KDA PROTEIN. | Q9BGW3 | 75% | 1545 | 1423 |
| HTEDX05 | 862064 | 2789 | WUblastx.64 | (Q9D4H6) 4932415A06RIK PROTEIN. | Q9D4H6 | 79% | 16 | 441 |
| | | | | | | 86% | 429 | 1649 |
| HTEEC19 | 862065 | 2790 | WUblastx.64 | translation initiation factor IF-2 homolog [similarity] - 1 | pir\|T43483\|T43483 | 100% | 11 | 1321 |
| HTEGH03 | 815562 | 2791 | WUblastx.64 | (Q9UHB5) EPITHELIAL PROTEIN LOST IN NEOPLASM | Q9UHB5 | 93% | 32 | 928 |
| | | | | ALPHA. | | | | |
| HTEGH03 | 839477 | 2792 | WUblastx.64 | (Q9UHB5) EPITHELIAL PROTEIN LOST IN NEOPLASM | Q9UHB5 | 82% | 678 | 845 |
| | | | | ALPHA. | | 88% | 1 | 732 |
| HTEGY81 | 637689 | 2794 | WUblastx.64 | (Q9CYN5) 5730405I09RIK PROTEIN. | Q9CYN5 | 74% | 11 | 544 |
| HTEHB49 | 823145 | 2796 | WUblastx.64 | (Q9H2T7) RANBP17. | Q9H2T7 | 65% | 126 | 254 |
| | | | | | | 99% | 203 | 1537 |
| HTEHV60 | 637690 | 2798 | WUblastx.64 | (Q9D2H5) 4930486B16RIK PROTEIN. | Q9D2H5 | 88% | 72 | 1028 |
| | | | | | | 33% | 153 | 281 |
| | | | | | | 89% | 1027 | 1113 |
| HTEHW80 | 862068 | 2799 | WUblastx.64 | (Q9HAD8) CDNA FLJ11786 FIS, CLONE HEMBA1006036. | Q9HAD8 | 71% | 297 | 578 |
| HTEID25 | 737852 | 2800 | WUblastx.64 | (Q9Y4V7) DJ1178H5.3 (NOVEL PROTEIN) (FRAGMENT). | Q9Y4V7 | 100% | 259 | 384 |
| HTEIJ23 | 784268 | 2801 | WUblastx.64 | (Q9NX98) CDNA FLJ20363 FIS, CLONE HEP17001. | Q9NX98 | 93% | 107 | 1303 |
| HTEIM62 | 806472 | 2802 | WUblastx.64 | (Q9H3C1) PRO0872. | Q9H3C1 | 81% | 62 | 15 |
| | | | | | | 76% | 123 | 61 |
| HTEIV33 | 603393 | 2803 | WUblastx.64 | hypothetical protein DKFZp761L0812.1 - human (fragment) | pir\|T47135\|T47135 | 53% | 259 | 11 |
| HTEJD61 | 828178 | 2807 | WUblastx.64 | (BAB49394) Ml12208 protein. | BAB49394 | 37% | 437 | 682 |
| | | | | | | 27% | 21 | 380 |
| | | | | | | 30% | 437 | 682 |
| | | | | | | 27% | 9 | 383 |
| | | | | | | 24% | 18 | 392 |
| | | | | | | 29% | 21 | 386 |
| | | | | | | 32% | 401 | 682 |
| | | | | | | 30% | 138 | 395 |
| | | | | | | 24% | 452 | 682 |
| | | | | | | 27% | 90 | 380 |
| | | | | | | 30% | 395 | 679 |
| | | | | | | 28% | 437 | 682 |
| | | | | | | 26% | 392 | 592 |
| | | | | | | 30% | 12 | 386 |
| HTEJL16 | 603409 | 2810 | WUblastx.64 | (Q9CPU8) 4921511D23RIK PROTEIN. | Q9CPU8 | 71% | 453 | 412 |
| | | | | | | 34% | 1042 | 722 |
| | | | | | | 34% | 1027 | 698 |
| | | | | | | 80% | 412 | 257 |
| | | | | | | 32% | 952 | 728 |
| | | | | | | 64% | 1030 | 596 |
| HTEKD35 | 604979 | 2813 | WUblastx.64 | (Q9D6N1) CARBONIC ANHYDRASE (EC 4.2.1.1) | Q9D6N1 | 89% | 40 | 594 |
| | | | | (CARBONATE DEHYDRATASE). | | | | |
| HTEKP82 | 694648 | 2814 | WUblastx.64 | (Q9D9W1) 1700027A23RIK PROTEIN. | Q9D9W1 | 68% | 147 | 689 |
| HTEKV69 | 877673 | 2815 | WUblastx.64 | (Q9D400) 4933425K02RIK PROTEIN. | Q9D400 | 61% | 157 | 1005 |
| | | | | | | 66% | 1052 | 1096 |
| | | | | | | 35% | 52 | 210 |
| HTFOB75 | 900824 | 2818 | WUblastx.64 | (Q9BX86) HP95. | Q9BX86 | 96% | 162 | 2366 |
| | | | | | | 50% | 2469 | 2675 |
| | | | | | | 21% | 1857 | 2354 |
| HTGAA35 | 737945 | 2819 | WUblastx.64 | (Q9NX85) CDNA FLJ20378 FIS, CLONE KAIA0536. | Q9NX85 | 64% | 1474 | 1349 |
| | | | | | | 78% | 1632 | 1465 |
| HTGAD74 | 834464 | 2820 | WUblastx.64 | (Q9UHT1) PRO1902 PROTEIN. | Q9UHT1 | 66% | 665 | 621 |
| | | | | | | 67% | 868 | 668 |
| HTGAP05 | 637715 | 2821 | WUblastx.64 | (Q9NX85) CDNA FLJ20378 FIS, CLONE KAIA0536. | Q9NX85 | 65% | 871 | 749 |
| | | | | | | 73% | 990 | 868 |
| HTGAR21 | 838159 | 2823 | WUblastx.64 | (Q9BVD9) UNKNOWN (PROTEIN FOR MGC: 5149). | Q9BVD9 | 80% | 864 | 820 |
| | | | | | | 67% | 1081 | 878 |
| HTGAS70 | 827320 | 2824 | WUblastx.64 | (AAH00037) DNA fragmentation factor, 45 kD, alpha p | AAH00037 | 95% | 290 | 1216 |
| HTGAT65 | 688864 | 2825 | WUblastx.64 | (Q9P0D8) HSPC098 (FRAGMENT). | Q9P0D8 | 42% | 1074 | 1130 |
| | | | | | | 60% | 1469 | 1573 |
| HTGAU17 | 605125 | 2826 | WUblastx.64 | (Q9BGW3) HYPOTHETICAL 13.5 KDA PROTEIN. | Q9BGW3 | 58% | 621 | 692 |
| | | | | | | 44% | 703 | 876 |
| HTGBK95 | 834490 | 2828 | WUblastx.64 | (Q9GMX5) HYPOTHETICAL 12.9 KDA PROTEIN. | Q9GMX5 | 66% | 126 | 55 |
| | | | | | | 70% | 235 | 116 |
| HTGCC01 | 598903 | 2829 | WUblastx.64 | (Q9H387) PRO2550. | Q9H387 | 73% | 1099 | 962 |
| | | | | | | 68% | 963 | 784 |
| HTGCK43 | 828867 | 2830 | WUblastx.64 | (P82914) 28S RIBOSOMAL PROTEIN S15, MITOCHONDRIAL | RT15_HUMAN | 91% | 862 | 92 |
| | | | | PRECURSOR | | | | |
| HTGDS43 | 605094 | 2831 | WUblastx.64 | (O60921) HUS1+- LIKE PROTEIN. | O60921 | 97% | 706 | 831 |
| HTGDS92 | 839478 | 2832 | WUblastx.64 | (Q9H728) CDNA: FLJ21463 FIS, CLONE COL04765. | Q9H728 | 69% | 1300 | 1001 |
| HTGEX34 | 877490 | 2833 | WUblastx.64 | (Q9H387) PRO2550. | Q9H387 | 77% | 2277 | 1966 |
| HTGGM37 | 827310 | 2835 | WUblastx.64 | (Q9NUM6) CDNA FLJ11267 FIS, CLONE PLACE1009174. | Q9NUM6 | 76% | 1781 | 1909 |
| HTGGN22 | 782853 | 2836 | WUblastx.64 | (Q9H5R3) CDNA: FLJ23147 FIS, CLONE LNG09295. | Q9H5R3 | 57% | 741 | 664 |
| | | | | | | 66% | 682 | 524 |
| HTHBC58 | 839916 | 2838 | WUblastx.64 | (Q9H387) PRO2550. | Q9H387 | 80% | 1267 | 1208 |
| | | | | | | 71% | 1452 | 1294 |
| HTHBQ29 | 561547 | 2840 | WUblastx.64 | (Q9BGV8) HYPOTHETICAL 10.0 KDA PROTEIN. | Q9BGV8 | 78% | 786 | 1010 |
| HTHBZ91 | 637697 | 2842 | WUblastx.64 | (O60448) NEURONAL THREAD PROTEIN AD7C-NTP. | O60448 | 53% | 823 | 668 |
| | | | | | | 61% | 948 | 802 |
| | | | | | | 69% | 743 | 705 |
| | | | | | | 44% | 458 | 273 |
| | | | | | | 52% | 947 | 747 |
| | | | | | | 59% | 594 | 466 |
| | | | | | | 61% | 963 | 748 |
| | | | | | | 50% | 360 | 313 |
| | | | | | | 36% | 891 | 802 |
| | | | | | | 39% | 948 | 880 |
| | | | | | | 57% | 569 | 324 |
| | | | | | | 50% | 493 | 425 |
| | | | | | | 25% | 848 | 561 |
| | | | | | | 48% | 408 | 289 |
| | | | | | | 26% | 425 | 249 |
| | | | | | | 34% | 454 | 272 |
| | | | | | | 30% | 513 | 301 |
| | | | | | | 52% | 588 | 367 |
| HTHCA30 | 637124 | 2843 | WUblastx.64 | (Q9BVD9) UNKNOWN (PROTEIN FOR MGC: 5149). | Q9BVD9 | 67% | 627 | 466 |
| HTHDB20 | 669032 | 2845 | WUblastx.64 | (Q9H728) CDNA: FLJ21463 FIS, CLONE COL04765. | Q9H728 | 79% | 426 | 355 |
| | | | | | | 60% | 629 | 429 |
| HTHDF45 | 621313 | 2846 | WUblastx.64 | (Q9H387) PRO2550. | Q9H387 | 42% | 987 | 691 |
| HTHDF86 | 815686 | 2847 | WUblastx.64 | (Q9NX85) CDNA FLJ20378 FIS, CLONE KAIA0536. | Q9NX85 | 63% | 1184 | 1249 |
| | | | | | | 83% | 1029 | 1193 |
| | | | | | | 50% | 1495 | 1247 |
| HTHDP65 | 637699 | 2849 | WUblastx.64 | (Q9H387) PRO2550. | Q9H387 | 100% | 42 | 16 |
| | | | | | | 66% | 205 | 35 |
| HTHDV50 | 789402 | 2851 | WUblastx.64 | (Q9GMI7) HYPOTHETICAL 9.0 KDA PROTEIN. | Q9GMI7 | 47% | 299 | 78 |
| HTJMA64 | 775181 | 2852 | WUblastx.64 | (Q9H728) CDNA: FLJ21463 FIS, CLONE COL04765. | Q9H728 | 75% | 1065 | 1211 |
| | | | | | | 75% | 1369 | 1500 |
| | | | | | | 52% | 1209 | 1391 |
| | | | | | | 44% | 1187 | 1267 |
| | | | | | | 64% | 893 | 1087 |
| HTLAD74 | 638978 | 2854 | WUblastx.64 | (P78525) MYB PROTO-ONCOGENE PROTEIN (C-MYB). | P78525 | 48% | 929 | 633 |
| HTLAF81 | 855970 | 2855 | WUblastx.64 | (Q9BUS3) UNKNOWN (PROTEIN FOR IMAGE: 3461487) | Q9BUS3 | 72% | 306 | 1073 |
| | | | | (FRAGMENT). | | | | |
| HTLBF46 | 839774 | 2856 | HMMER 2.1.1 | PFAM: Papain family cysteine protease | PF00112 | 255 | 176 | 751 |
| | | | WUblastx.64 | (Q9UBX1) CATHEPSIN F PRECURSOR (EC 3.4.22.41) (CATSF). | CATF_HUMAN | 99% | 56 | 757 |
| HTLBF63 | 762847 | 2857 | HMMER 2.1.1 | PFAM: MYND finger | PF01753 | 53.8 | 652 | 762 |
| | | | WUblastx.64 | (O75800) BLU PROTEIN. | O75800 | 94% | 10 | 792 |
| HTLCX82 | 847091 | 2858 | WUblastx.64 | (Q9BTZ4) SIMILAR TO EXPRESSED SEQUENCE 2 | Q9BTZ4 | 100% | 127 | 258 |
| | | | | EMBRYONIC LETHAL (FRAGMENT). | | 72% | 237 | 629 |
| HTLDN34 | 866199 | 2860 | WUblastx.64 | (O94993) SOX30 PROTEIN. | O94993 | 82% | 242 | 751 |
| | | | | | | 89% | 726 | 842 |
| | | | | | | 69% | 9 | 137 |
| HTLDP19 | 885353 | 2861 | WUblastx.64 | (Q9D5P4) 4930403J07RIK PROTEIN. | Q9D5P4 | 62% | 530 | 751 |
| | | | | | | 84% | 8 | 121 |
| | | | | | | 61% | 159 | 581 |
| HTLEJ24 | 608317 | 2863 | WUblastx.64 | (Q9D7G6) 2310009N05RIK PROTEIN. | Q9D7G6 | 84% | 2 | 619 |
| HTLEJ75 | 815631 | 2864 | WUblastx.64 | (AAK52668) MMS19. | AAK52668 | 92% | 31 | 2133 |
| HTLEJ75 | 762849 | 2865 | WUblastx.64 | (BAB55315) CDNA FLJ14804 fis, clone NT2RP4001638, w | BAB55315 | 85% | 7 | 798 |
| HTLEP55 | 637704 | 2866 | WUblastx.64 | (AAL37611) Carboxypeptidase A5. | AAL37611 | 97% | 1242 | 1352 |
| | | | | | | 92% | 1171 | 1251 |
| | | | | | | 53% | 561 | 656 |
| | | | | | | 100% | 178 | 561 |
| | | | | | | 87% | 608 | 1168 |
| HTLEV80 | 866200 | 2867 | WUblastx.64 | (O15020) BETA-SPECTRIN III (FNTA III SPECTRIN). | O15020 | 100% | 9 | 452 |
| HTLEZ57 | 634874 | 2868 | WUblastx.64 | (Q9P195) PRO1722. | Q9P195 | 57% | 662 | 531 |
| | | | | | | 59% | 121 | 26 |
| | | | | | | 62% | 481 | 401 |
| HTLFA90 | 740770 | 2869 | WUblastx.64 | (Q9BRY0) UNKNOWN (PROTEIN FOR IMAGE: 2966557) | Q9BRY0 | 100% | 2 | 1072 |
| | | | | (FRAGMENT). | | | | |
| HTLGL33 | 835020 | 2870 | WUblastx.64 | N-type calcium channel alpha-1 chain, 1 | pir\|T45115\|T45115 | 22% | 364 | 1092 |
| HTLGQ25 | 898114 | 2871 | HMMER 2.1.1 | PFAM: Immunoglobulin domain | PF00047 | 26.6 | 153 | 377 |
| | | | WUblastx.64 | (Q9H106) DJ576H24.4 (NOVEL PROTEIN MEMBER OF THE | Q9H106 | 100% | 114 | 443 |
| | | | | PTPNS (PROTEIN TYROS | | | | |
| HTLGS72 | 897278 | 2872 | WUblastx.64 | (Q9JJC0) BRAIN CDNA, CLONE MNCB-2717. | Q9JJC0 | 34% | 6 | 563 |
| HTLGY50 | 839479 | 2873 | WUblastx.64 | (O73884) PUTATIVE PHOSPHATASE. | O73884 | 39% | 987 | 1100 |
| | | | | | | 65% | 589 | 1002 |
| HTLHN86 | 896930 | 2874 | WUblastx.64 | (BAB55144) CDNA FLJ14576 fis, clone NT2RM4001092, w | BAB55144 | 95% | 318 | 938 |
| HTLHN86 | 838287 | 2875 | WUblastx.64 | (BAB55144) CDNA FLJ14576 fis, clone NT2RM4001092, w | BAB55144 | 95% | 318 | 938 |
| HTLHN86 | 843766 | 2876 | WUblastx.64 | (BAB55144) CDNA FLJ14576 fis, clone NT2RM4001092, w | BAB55144 | 95% | 318 | 938 |
| HTLHN86 | 883351 | 2877 | WUblastx.64 | (BAB55144) CDNA FLJ14576 fis, clone NT2RM4001092, w | BAB55144 | 95% | 318 | 938 |
| HTLIW29 | 899417 | 2878 | HMMER 2.1.1 | PFAM: Trypsin | PF00089 | 226.4 | 133 | 852 |
| | | | WUblastx.64 | (Q9Y6M0) TESTISIN PRECURSOR (EC 3.4.21.—) (EOSINOPHIL | TEST_HUMAN | 100% | 67 | 885 |
| | | | | SERIN | | | | |
| HTLJC15 | 898235 | 2879 | WUblastx.64 | (Q9D123) 1110032O16RIK PROTEIN. | Q9D123 | 71% | 996 | 1715 |
| HTNAL14 | 886203 | 2880 | WUblastx.64 | (Q9NXU2) CDNA FLJ20054 FIS, CLONE COL00849. | Q9NXU2 | 100% | 580 | 687 |
| HTNBJ15 | 834872 | 2882 | WUblastx.64 | (Q9H055) HYPOTHETICAL 13.8 KDA PROTEIN. | Q9H055 | 99% | 1536 | 1889 |
| HTNBJ15 | 845783 | 2883 | WUblastx.64 | (Q9H055) HYPOTHETICAL 13.8 KDA PROTEIN. | Q9H055 | 99% | 1536 | 1889 |
| HTNBJ15 | 853916 | 2884 | WUblastx.64 | (Q9H055) HYPOTHETICAL 13.8 KDA PROTEIN. | Q9H055 | 99% | 1536 | 1889 |
| HTNBJ15 | 884024 | 2885 | WUblastx.64 | (Q9H055) HYPOTHETICAL 13.8 KDA PROTEIN. | Q9H055 | 99% | 1536 | 1889 |
| HTOAO58 | 855972 | 2889 | WUblastx.64 | (Q9GZW5) SCAN DOMAIN-CONTAINING PROTEIN 2 | Q9GZW5 | 49% | 974 | 1321 |
| | | | | (SCAND2). | | | | |
| HTOAT56 | 702026 | 2890 | WUblastx.64 | (AAH00407) Synaptogyrin 2. | AAH00407 | 82% | 425 | 673 |
| | | | | | | 83% | 10 | 495 |
| HTOBG07 | 566862 | 2891 | WUblastx.64 | (Q9H288) SEROLOGICALLY DEFINED BREAST CANCER | Q9H288 | 100% | 225 | 1343 |
| | | | | ANTIGEN NY-BR-16. | | 41% | 498 | 1343 |
| | | | | | | 37% | 438 | 1343 |
| | | | | | | 37% | 276 | 1187 |
| | | | | | | 33% | 258 | 1319 |
| | | | | | | 34% | 462 | 1304 |
| | | | | | | 30% | 462 | 1286 |
| | | | | | | 50% | 798 | 953 |
| | | | | | | 44% | 1182 | 1343 |
| | | | | | | 66% | 941 | 967 |
| | | | | | | 25% | 261 | 839 |
| | | | | | | 39% | 1098 | 1247 |
| | | | | | | 100% | 42 | 71 |
| HTOBG62 | 566830 | 2892 | WUblastx.64 | (Q9H728) CDNA: FLJ21463 FIS, CLONE COL04765. | Q9H728 | 66% | 1378 | 1112 |
| HTODO45 | 823125 | 2895 | WUblastx.64 | (AAH08373) Similar to hypothetical protein PRO1722. | AAH08373 | 67% | 1408 | 1226 |
| HTOET03 | 845230 | 2899 | WUblastx.64 | (Q9BQC3) SIMILAR TO DIPTHERIA TOXIN RESISTANCE | Q9BQC3 | 83% | 4 | 1041 |
| | | | | PROTEIN REQUIRED FOR D | | | | |
| HTOET03 | 837213 | 2900 | WUblastx.64 | (Q9BQC3) SIMILAR TO DIPTHERIA TOXIN RESISTANCE | Q9BQC3 | 83% | 4 | 1041 |
| | | | | PROTEIN REQUIRED FOR D | | | | |
| HTOFA11 | 637719 | 2902 | WUblastx.64 | (Q30086) MHC CLASS II HLA-DQ-ALPHA (DR2-DQW1/DR4 | Q30086 | 96% | 1348 | 1635 |
| | | | | DQW3) (FRAGMENT). | | 80% | 1962 | 2069 |
| | | | | | | 97% | 694 | 942 |
| | | | | | | 68% | 1882 | 1968 |
| HTOFC33 | 824604 | 2903 | WUblastx.64 | (Q9H387) PRO2550. | Q9H387 | 65% | 900 | 754 |
| | | | | | | 73% | 1069 | 878 |
| HTOGB79 | 762835 | 2904 | WUblastx.64 | (O60448) NEURONAL THREAD PROTEIN AD7C-NTP. | O60448 | 52% | 1639 | 1917 |
| | | | | | | 60% | 1642 | 1806 |
| | | | | | | 50% | 1661 | 1825 |
| | | | | | | 31% | 1465 | 1530 |
| | | | | | | 26% | 1238 | 1528 |
| | | | | | | 27% | 69 | 227 |
| | | | | | | 60% | 1854 | 1928 |
| | | | | | | 43% | 1797 | 1865 |
| | | | | | | 32% | 1420 | 1542 |
| | | | | | | 75% | 2727 | 2596 |
| | | | | | | 52% | 2606 | 2472 |
| | | | | | | 42% | 1214 | 1137 |
| | | | | | | 77% | 2727 | 2551 |
| | | | | | | 49% | 2661 | 2500 |
| | | | | | | 42% | 2663 | 2553 |
| | | | | | | 56% | 1213 | 1166 |
| | | | | | | 45% | 2715 | 2596 |
| | | | | | | 68% | 1284 | 1219 |
| | | | | | | 41% | 1302 | 1141 |
| | | | | | | 55% | 1332 | 1273 |
| | | | | | | 48% | 1332 | 1264 |
| | | | | | | 52% | 2730 | 2674 |
| | | | | | | 55% | 1333 | 1274 |
| | | | | | | 55% | 1208 | 1155 |
| | | | | | | 60% | 1339 | 1157 |
| | | | | | | 62% | 2756 | 2478 |
| HTOHE22 | 821698 | 2905 | WUblastx.64 | (Q9NX85) CDNA FLJ20378 FIS, CLONE KAIA0536. | Q9NX85 | 75% | 1008 | 1217 |
| HTOHG63 | 834832 | 2906 | WUblastx.64 | (Q9H8L6) CDNA FLJ13465 FIS, CLONE PLACE1003493, | Q9H8L6 | 98% | 2 | 670 |
| | | | | WEAKLY SIMILAR TO END | | | | |
| HTOHJ93 | 762836 | 2907 | WUblastx.64 | (Q9H743) CDNA: FLJ21394 FIS, CLONE COL03536. | Q9H743 | 70% | 1323 | 1048 |
| HTOHN40 | 843372 | 2910 | WUblastx.64 | (Q9NX85) CDNA FLJ20378 FIS, CLONE KAIA0536. | Q9NX85 | 64% | 1889 | 1839 |
| | | | | | | 50% | 1845 | 1654 |
| HTOHR59 | 762850 | 2911 | WUblastx.64 | (AAH07609) Similar to hypothetical protein PRO1722. | AAH07609 | 92% | 1249 | 1127 |
| HTOHS29 | 722256 | 2912 | WUblastx.64 | (AAH08373) Similar to hypothetical protein PRO1722. | AAH08373 | 80% | 129 | 10 |
| HTOID65 | 636069 | 2913 | WUblastx.64 | (Q9H387) PRO2550. | Q9H387 | 56% | 630 | 761 |
| | | | | | | 50% | 467 | 658 |
| | | | | | | 77% | 1420 | 1316 |
| | | | | | | 78% | 1314 | 1165 |
| HTOIE17 | 688061 | 2914 | WUblastx.64 | (Q9NWI4) CDNA FLJ20837 FIS, CLONE ADKA02602. | Q9NWI4 | 66% | 942 | 889 |
| | | | | | | 61% | 1078 | 938 |
| HTOIG16 | 845999 | 2915 | WUblastx.64 | (Q9H728) CDNA: FLJ21463 FIS, CLONE COL04765. | Q9H728 | 93% | 1558 | 1511 |
| | | | | | | 63% | 1793 | 1563 |
| HTOIH39 | 839245 | 2916 | WUblastx.64 | (O60448) NEURONAL THREAD PROTEIN AD7C-NTP. | O60448 | 53% | 750 | 1106 |
| | | | | | | 46% | 53 | 130 |
| | | | | | | 50% | 1095 | 1184 |
| | | | | | | 51% | 840 | 1049 |
| | | | | | | 57% | 64 | 126 |
| | | | | | | 56% | 14 | 121 |
| | | | | | | 54% | 987 | 1151 |
| | | | | | | 54% | 29 | 133 |
| | | | | | | 40% | 1039 | 1167 |
| | | | | | | 68% | 19 | 93 |
| HTOJB02 | 600376 | 2918 | WUblastx.64 | (O60448) NEURONAL THREAD PROTEIN AD7C-NTP. | O60448 | 54% | 780 | 652 |
| | | | | | | 33% | 1322 | 1143 |
| | | | | | | 50% | 1275 | 1108 |
| | | | | | | 66% | 919 | 770 |
| | | | | | | 47% | 682 | 626 |
| | | | | | | 52% | 1235 | 1161 |
| | | | | | | 40% | 889 | 770 |
| | | | | | | 50% | 787 | 632 |
| | | | | | | 58% | 816 | 727 |
| | | | | | | 41% | 1424 | 1338 |
| | | | | | | 62% | 708 | 661 |
| | | | | | | 37% | 784 | 614 |
| | | | | | | 56% | 918 | 658 |
| | | | | | | 58% | 1411 | 1265 |
| | | | | | | 56% | 1274 | 1134 |
| | | | | | | 30% | 1275 | 1093 |
| | | | | | | 57% | 1403 | 1251 |
| | | | | | | 59% | 1424 | 1098 |
| | | | | | | 60% | 949 | 713 |
| HTOJJ26 | 821702 | 2919 | WUblastx.64 | (Q9UHT1) PRO1902 PROTEIN. | Q9UHT1 | 71% | 2969 | 2844 |
| HTOJP25 | 853623 | 2920 | WUblastx.64 | hypothetical L1 protein (third intron of gene TS) - human | pir\|JU0033\|JU0033 | 60% | 1388 | 1519 |
| HTOJS23 | 737735 | 2921 | WUblastx.64 | (Q9H728) CDNA: FLJ21463 FIS, CLONE COL04765. | Q9H728 | 57% | 1564 | 1523 |
| | | | | | | 46% | 1670 | 1575 |
| | | | | | | 59% | 1833 | 1657 |
| HTOJY56 | 664504 | 2922 | WUblastx.64 | (Q9P1F2) PRO2032. | Q9P1F2 | 100% | 88 | 240 |
| HTPCO75 | 853645 | 2925 | WUblastx.64 | (O00549) ORF2-LIKE PROTEIN (FRAGMENT). | O00549 | 43% | 325 | 26 |
| | | | | | | 36% | 1318 | 1253 |
| HTPDD68 | 590530 | 2927 | WUblastx.64 | (Q9H0G2) HYPOTHETICAL 136.4 KDA PROTEIN. | Q9H0G2 | 88% | 10 | 2004 |
| HTSET62 | 833692 | 2930 | WUblastx.64 | (Q9HCS4) HMG-BOX TRANSCRIPTION FACTOR TCF-3. | Q9HCS4 | 95% | 59 | 124 |
| | | | | | | 66% | 124 | 327 |
| HTSFV18 | 609939 | 2931 | HMMER 2.1.1 | PFAM: Low-density lipoprotein receptor domain class A | PF00057 | 49.4 | 170 | 280 |
| | | | WUblastx.64 | LDL receptor related protein 105 - human | pir\|T00204\|T00204 | 82% | 10 | 984 |
| HTSGO13 | 789723 | 2932 | WUblastx.64 | (Q9NWJ5) CDNA FLJ20807 FIS, CLONE ADSE01784. | Q9NWJ5 | 99% | 195 | 548 |
| | | | | | | 97% | 489 | 845 |
| HTSGO88 | 634834 | 2933 | WUblastx.64 | (O60448) NEURONAL THREAD PROTEIN AD7C-NTP. | O60448 | 76% | 797 | 612 |
| | | | | | | 52% | 640 | 521 |
| | | | | | | 66% | 636 | 574 |
| | | | | | | 45% | 560 | 492 |
| | | | | | | 69% | 791 | 627 |
| | | | | | | 61% | 137 | 75 |
| HTTAH05 | 772560 | 2934 | WUblastx.64 | (Q9H397) PRO2852. | Q9H397 | 60% | 548 | 676 |
| | | | | | | 39% | 684 | 926 |
| HTTBJ38 | 863131 | 2936 | WUblastx.64 | (Q9VST7) CG4911 PROTEIN. | Q9VST7 | 25% | 497 | 1177 |
| HTTDB11 | 638132 | 2937 | WUblastx.64 | (Q99LX8) UNKNOWN (PROTEIN FOR MGC: 7346). | Q99LX8 | 100% | 130 | 240 |
| HTTDG27 | 608318 | 2938 | WUblastx.64 | (O62658) LINE-1 ELEMENT ORF2. | O62658 | 44% | 454 | 380 |
| | | | | | | 35% | 392 | 3 |
| HTTDN24 | 766485 | 2939 | WUblastx.64 | (Q9BVN5) HYPOTHETICAL 120.6 KDA PROTEIN. | Q9BVN5 | 95% | 628 | 1725 |
| | | | | | | 32% | 937 | 1593 |
| | | | | | | 95% | 3 | 629 |
| | | | | | | 32% | 1114 | 1596 |
| HTTDO33 | 899418 | 2940 | WUblastx.64 | (Q96GQ9) Unknown (protein for MGC: 16648). | Q96GQ9 | 95% | 22 | 753 |
| HTTEO25 | 853403 | 2942 | WUblastx.64 | (Q9BWK9) UNKNOWN (PROTEIN FOR IMAGE: 2900813) | Q9BWK9 | 97% | 1314 | 1424 |
| | | | | (FRAGMENT). | | | | |
| HTTEP11 | 562023 | 2943 | WUblastx.64 | hypothetical protein DKFZp434C0927.1 - human | pir\|T46441\|T46441 | 70% | 753 | 830 |
| | | | | | | 74% | 1006 | 1110 |
| | | | | | | 51% | 812 | 928 |
| | | | | | | 100% | 625 | 753 |
| HTTES77 | 844417 | 2944 | WUblastx.64 | (AAK40083) Inhibin binding protein long isoform. | AAK40083 | 82% | 697 | 2085 |
| | | | | | | 37% | 3 | 725 |
| | | | | | | 31% | 6 | 713 |
| | | | | | | 30% | 93 | 704 |
| | | | | | | 36% | 659 | 733 |
| | | | | | | 39% | 697 | 1818 |
| | | | | | | 34% | 697 | 1815 |
| | | | | | | 33% | 982 | 1818 |
| | | | | | | 88% | 3 | 719 |
| | | | | | | 33% | 697 | 1827 |
| | | | | | | 31% | 1096 | 1821 |
| | | | | | | 31% | 736 | 1833 |
| | | | | | | 35% | 45 | 719 |
| | | | | | | 28% | 901 | 1761 |
| | | | | | | 35% | 6 | 737 |
| | | | | | | 34% | 9 | 680 |
| | | | | | | 32% | 45 | 716 |
| | | | | | | 36% | 1240 | 1818 |
| HTTFG15 | 600377 | 2946 | WUblastx.64 | (Q9GMK2) HYPOTHETICAL 10.0 KDA PROTEIN. | Q9GMK2 | 66% | 327 | 482 |
| HTWAM19 | 618318 | 2947 | WUblastx.64 | (Q9H728) CDNA: FLJ21463 FIS, CLONE COL04765. | Q9H728 | 76% | 1852 | 1763 |
| | | | | | | 64% | 1764 | 1525 |
| HTWBO30 | 655371 | 2949 | WUblastx.64 | (Q9N083) UNNAMED PORTEIN PRODUCT. | Q9N083 | 47% | 560 | 453 |
| | | | | | | 55% | 751 | 578 |
| HTWBZ57 | 828030 | 2950 | WUblastx.64 | (O95273) D-TYPE CYCLIN-INTERACTING PROTEIN 1. | O95273 | 87% | 218 | 1276 |
| HTWCC10 | 747687 | 2951 | WUblastx.64 | (Q9NX85) CDNA FLJ20378 FIS, CLONE KAIA0536. | Q9NX85 | 60% | 1051 | 947 |
| | | | | | | 63% | 1241 | 1095 |
| HTWCE14 | 762839 | 2952 | WUblastx.64 | (Q9BSZ7) UNKNOWN (PROTEIN FOR MGC: 4322). | Q9BSZ7 | 100% | 121 | 231 |
| HTWCT76 | 767758 | 2953 | WUblastx.64 | (Q9BGW3) HYPOTHETICAL 13.5 KDA PROTEIN. | Q9BGW3 | 68% | 1550 | 1368 |
| | | | | | | 58% | 1361 | 1311 |
| HTWDJ17 | 784037 | 2954 | WUblastx.64 | (Q9CYV6) 2810439F02RIK PROTEIN. | Q9CYV6 | 93% | 17 | 1255 |
| HTWDM89 | 569787 | 2955 | WUblastx.64 | (Q9P195) PRO1722. | Q9P195 | 63% | 1413 | 1267 |
| | | | | | | 61% | 1277 | 1098 |
| HTWEQ36 | 823369 | 2958 | WUblastx.64 | (Q9NXK9) CDNA FLJ20187 FIS, CLONE COLF0433. | Q9NXK9 | 68% | 748 | 891 |
| HTWFA88 | 596942 | 2960 | WUblastx.64 | probable transposase - human transposon MER37 | pir\|S72481\|S72481 | 58% | 1286 | 1357 |
| | | | | | | 70% | 1350 | 1559 |
| | | | | | | 51% | 709 | 1272 |
| HTWFO43 | 858741 | 2962 | WUblastx.64 | (O60448) NEURONAL THREAD PROTEIN AD7C-NTP. | O60448 | 67% | 890 | 627 |
| | | | | | | 62% | 1241 | 1056 |
| | | | | | | 63% | 754 | 689 |
| | | | | | | 62% | 1108 | 980 |
| | | | | | | 65% | 1242 | 1102 |
| | | | | | | 61% | 905 | 744 |
| | | | | | | 53% | 684 | 601 |
| | | | | | | 40% | 790 | 665 |
| | | | | | | 58% | 675 | 625 |
| | | | | | | 34% | 1184 | 975 |
| | | | | | | 35% | 863 | 744 |
| | | | | | | 61% | 1257 | 1039 |
| | | | | | | 45% | 1063 | 992 |
| | | | | | | 64% | 657 | 607 |
| | | | | | | 40% | 1215 | 1087 |
| | | | | | | 34% | 778 | 659 |
| | | | | | | 100% | 1016 | 996 |
| HTXAD75 | 745410 | 2965 | WUblastx.64 | (Q9GLG1) CALPAIN 2. | Q9GLG1 | 92% | 345 | 917 |
| HTXAR92 | 656935 | 2966 | WUblastx.64 | (Q9H728) CDNA: FLJ21463 FIS, CLONE COL04765. | Q9H728 | 77% | 1578 | 1297 |
| HTXBU88 | 604985 | 2968 | WUblastx.64 | (Q9NX85) CDNA FLJ20378 FIS, CLONE KAIA0536. | Q9NX85 | 75% | 771 | 736 |
| | | | | | | 65% | 739 | 680 |
| | | | | | | 60% | 701 | 453 |
| HTXCP27 | 892364 | 2969 | WUblastx.64 | (AAH00057) Protein phosphatase 1G (formerly 2C), ma | AAH00057 | 97% | 521 | 628 |
| | | | | | | 100% | 946 | 1149 |
| | | | | | | 98% | 285 | 524 |
| HTXCU30 | 839846 | 2970 | WUblastx.64 | (Q9H728) CDNA: FLJ21463 FIS, CLONE COL04765. | Q9H728 | 81% | 706 | 641 |
| | | | | | | 80% | 639 | 577 |
| | | | | | | 59% | 875 | 684 |
| HTXCV44 | 740773 | 2971 | WUblastx.64 | (Q9HA67) CDNA FLJ12155 FIS, CLONE MAMMA1000472. | Q9HA67 | 52% | 883 | 945 |
| | | | | | | 70% | 809 | 898 |
| | | | | | | 63% | 630 | 803 |
| | | | | | | 63% | 1521 | 1366 |
| | | | | | | 68% | 1370 | 1323 |
| HTXDJ75 | 562780 | 2973 | WUblastx.64 | (Q26195) PVA1 GENE. | Q26195 | 51% | 1598 | 1335 |
| HTXDT72 | 778083 | 2977 | WUblastx.64 | (Q9BSV9) SIMILAR TO 95 KDA RETINOBLASTOMA | Q9BSV9 | 100% | 8 | 400 |
| | | | | PROTEIN BINDING PROTEIN, KI | | | | |
| HTXDZ68 | 824545 | 2979 | WUblastx.64 | (Q9P0D0) HSPC106 (FRAGMENT). | Q9P0D0 | 72% | 80 | 277 |
| | | | | | | 54% | 136 | 498 |
| HTXEN33 | 589556 | 2980 | WUblastx.64 | (Q99419) ICSAT TRANSCRIPTION FACTOR (FRAGMENT). | Q99419 | 78% | 843 | 968 |
| HTXJD08 | 566885 | 2985 | WUblastx.64 | (Q14288) HYPOTHETICAL PROTEIN (FRAGMENT). | Q14288 | 59% | 743 | 1111 |
| | | | | | | 47% | 604 | 756 |
| | | | | | | 45% | 395 | 583 |
| HTXJD85 | 840391 | 2986 | WUblastx.64 | (Q9HAD8) CDNA FLJ11786 FIS, CLONE HEMBA1006036. | Q9HAD8 | 52% | 1093 | 818 |
| HTXJI59 | 869905 | 2988 | WUblastx.64 | (O15290) P66SHC. | O15290 | 93% | 1708 | 1571 |
| HTXJJ92 | 688062 | 2989 | WUblastx.64 | (Q9N044) UNNAMED PROTEIN PRODUCT. | Q9N044 | 59% | 709 | 614 |
| | | | | | | 66% | 611 | 531 |
| HTXJM94 | 853413 | 2990 | WUblastx.64 | (Q9Y2S9) HSPC019. | Q9Y2S9 | 83% | 44 | 262 |
| HTXJW06 | 789201 | 2992 | WUblastx.64 | (Q9UI28) ADRENAL GLAND PROTEIN AD-003. | Q9UI28 | 100% | 868 | 623 |
| HTXKB57 | 844329 | 2993 | WUblastx.64 | (Q9P073) HSPC309 (FRAGMENT). | Q9P073 | 94% | 1072 | 1128 |
| | | | | | | 65% | 1125 | 1523 |
| HTXKH40 | 600378 | 2995 | WUblastx.64 | (Q9Y380) CGI-71 PROTEIN. | Q9Y380 | 94% | 9 | 290 |
| HTXKK76 | 858755 | 2996 | WUblastx.64 | pro-pol-dUTPase polyprotein - murine endogenous retrovirus ERV- | pir\|T29097\|T29097 | 44% | 466 | 2 |
| | | | | L (fragment) | | | | |
| HTXKL53 | 783141 | 2997 | WUblastx.64 | (Q9Y3F0) CGI-05 PROTEIN. | Q9Y3F0 | 100% | 1315 | 1359 |
| | | | | | | 90% | 3 | 89 |
| HTXLC05 | 843523 | 3000 | WUblastx.64 | (Q9H189) SPHINGOSINE-1-PHOSPHATASE. | Q9H189 | 25% | 4 | 531 |
| HTXLY94 | 844165 | 3003 | WUblastx.64 | hypothetical protein DKFZp586F0424.1 - human (fragment) | pir\|T14744\|T14744 | 64% | 77 | 643 |
| HTXNV66 | 840597 | 3004 | WUblastx.64 | (Q9UJY4) ADP-RIBOSYLATION FACTOR BINDING PROTEIN | GGA2_HUMAN | 99% | 18 | 431 |
| | | | | GGA2 (GOLG | | | | |
| HTXOW27 | 839280 | 3006 | WUblastx.64 | (Q9P2V7) PROTEIN CONTAINING CXXC DOMAIN 1 | Q9P2V7 | 100% | 1652 | 2086 |
| | | | | (HYPOTHETICAL 75.7 KDA PROT | | 92% | 1309 | 1656 |
| | | | | | | 78% | 229 | 1188 |
| HTXPD86 | 834772 | 3007 | WUblastx.64 | (Q9UGP9) WD-REPEAT PROTEIN 5 (FRAGMENT). | WDR5_HUMAN | 95% | 74 | 1132 |
| HTXPT57 | 897834 | 3008 | WUblastx.64 | (O60448) NEURONAL THREAD PROTEIN AD7C-NTP. | O60448 | 60% | 939 | 838 |
| | | | | | | 52% | 693 | 544 |
| | | | | | | 42% | 564 | 451 |
| | | | | | | 53% | 471 | 427 |
| | | | | | | 26% | 722 | 543 |
| | | | | | | 35% | 725 | 474 |
| | | | | | | 37% | 1123 | 938 |
| | | | | | | 45% | 974 | 849 |
| | | | | | | 53% | 705 | 526 |
| | | | | | | 40% | 1054 | 911 |
| | | | | | | 53% | 911 | 834 |
| | | | | | | 75% | 1104 | 1069 |
| | | | | | | 64% | 891 | 841 |
| | | | | | | 51% | 551 | 432 |
| | | | | | | 57% | 425 | 384 |
| | | | | | | 52% | 1084 | 926 |
| HTYSJ88 | 598718 | 3009 | WUblastx.64 | (Q9NX85) CDNA FLJ20378 FIS, CLONE KAIA0536. | Q9NX85 | 64% | 729 | 457 |
| HUFAB57 | 587275 | 3012 | WUblastx.64 | ISOFORM B OF Q9UNP9 | sp_vs\|Q9UNP9- | 94% | 1266 | 1316 |
| | | | | | 01\|Q9UNP9 | 53% | 826 | 1035 |
| HUFAO92 | 608175 | 3014 | WUblastx.64 | (Q9D922) 1810010G06RIK PROTEIN. | Q9D922 | 69% | 232 | 522 |
| HUFAO94 | 668267 | 3015 | WUblastx.64 | (Q9UI14) PRENYLATED RAB ACCEPTOR 1. | Q9UI14 | 100% | 3 | 551 |
| HUFAP33 | 600379 | 3016 | HMMER 2.1.1 | PFAM: Zona pellucida-like domain | PF00100 | 223.2 | 282 | 1016 |
| | | | WUblastx.64 | (Q9Y211) DMBT1 PROTEIN. | Q9Y211 | 93% | 228 | 1016 |
| | | | | | | 100% | 26 | 226 |
| | | | | | | 43% | 29 | 217 |
| | | | | | | 41% | 445 | 546 |
| | | | | | | 38% | 445 | 546 |
| | | | | | | 38% | 445 | 522 |
| | | | | | | 100% | 1013 | 1117 |
| HUFBV62 | 742892 | 3020 | WUblastx.64 | (Q9CWU4) 2410004B18RIK PROTEIN. | Q9CWU4 | 76% | 76 | 264 |
| HUKAD46 | 604986 | 3024 | WUblastx.64 | (Q9NX85) CDNA FLJ20378 FIS, CLONE KAIA0536. | Q9NX85 | 46% | 589 | 747 |
| | | | | | | 63% | 377 | 598 |
| HUKCS86 | 826468 | 3027 | WUblastx.64 | (Q9NX09) CDNA FLJ20500 FIS, CLONE KAT09159. | Q9NX09 | 82% | 201 | 896 |
| HUKCS86 | 844245 | 3028 | WUblastx.64 | (Q9NX09) CDNA FLJ20500 FIS, CLONE KAT09159. | Q9NX09 | 82% | 201 | 896 |
| HUKEA22 | 702029 | 3029 | WUblastx.64 | (Q9PTD7) CINGULIN. | Q9PTD7 | 68% | 575 | 12 |
| HUKFC71 | 1300740 | 3032 | WUblastx.64 | (P82914) 28S RIBOSOMAL PROTEIN S15, MITOCHONDRIAL | RT15_HUMAN | 97% | 292 | 414 |
| | | | | PRECURSOR | | 65% | 408 | 929 |
| HUKFC71 | 845161 | 3111 | blastx.2 | MITOCHONDRIAL 28S RIBOSOMAL PROTEIN S15 (MRP- | sp\|P82914\|P82914 | 100% | 293 | 931 |
| | | | | S15). | | | | |
| HUKFV37 | 844644 | 3033 | WUblastx.64 | (AAH00407) Synaptogyrin 2. | AAH00407 | 91% | 49 | 720 |
| HUNAL39 | 559448 | 3035 | WUblastx.64 | (Q14288) HYPOTHETICAL PROTEIN (FRAGMENT). | Q14288 | 81% | 1009 | 629 |
| HUSAO04 | 877889 | 3036 | HMMER 2.1.1 | PFAM: tRNA synthetases class I (W and Y) | PF00579 | 260.4 | 255 | 965 |
| | | | WUblastx.64 | (Q9H817) CDNA FLJ13995 FIS, CLONE Y79AA1002209, | Q9H817 | 92% | 30 | 1451 |
| | | | | WEAKLY SIMILAR TO TYR | | | | |
| HUSAO04 | 870791 | 3037 | HMMER 2.1.1 | PFAM: tRNA synthetases class I (W and Y) | PF00579 | 212.2 | 297 | 965 |
| | | | WUblastx.64 | (Q9H817) CDNA FLJ13995 FIS, CLONE Y79AA1002209, | Q9H817 | 92% | 30 | 1451 |
| | | | | WEAKLY SIMILAR TO TYR | | | | |
| HUSCA09 | 853417 | 3038 | HMMER 2.1.1 | PFAM: Leucine Rich Repeat | PF00560 | 69.9 | 1259 | 1327 |
| | | | WUblastx.64 | (Q9H075) HYPOTHETICAL 81.8 KDA PROTEIN. | Q9H075 | 52% | 44 | 1615 |
| HUSCJ01 | 740775 | 3039 | WUblastx.64 | (Q9CWP6) 2410013I23RIK PROTEIN. | Q9CWP6 | 70% | 1 | 252 |
| HUSGB23 | 704094 | 3040 | WUblastx.64 | (Q9H0F5) HYPOTHETICAL 43.9 KDA PROTEIN. | Q9H0F5 | 97% | 143 | 247 |
| HUSGY15 | 759888 | 3043 | WUblastx.64 | (Q9JKN1) ZINC TRANSPORTER LIKE 2 (1810059J10RIK | Q9JKN1 | 76% | 162 | 1289 |
| | | | | PROTEIN). | | | | |
| HUSHD41 | 866498 | 3044 | WUblastx.64 | (BAB55441) CDNA FLJ14993 fis, clone Y79AA1001874, w | BAB55441 | 86% | 2575 | 1541 |
| | | | | | | 50% | 2569 | 2483 |
| HUSHK65 | 847188 | 3045 | HMMER 2.1.1 | PFAM: CUB domain | PF00431 | 292.1 | 887 | 1222 |
| | | | WUblastx.64 | (AAG41897) Neuropilin-2a(17). | AAG41897 | 97% | 806 | 2122 |
| | | | | | | 95% | 2727 | 3023 |
| | | | | | | 82% | 3046 | 3579 |
| | | | | | | 92% | 2089 | 2721 |
| | | | | | | 32% | 2086 | 2619 |
| | | | | | | 31% | 1547 | 2086 |
| | | | | | | 92% | 3008 | 3046 |
| HUSIK45 | 853932 | 3046 | WUblastx.64 | (Q96CN8) Hypothetical 30.9 kDa protein (Fragment). | Q96CN8 | 91% | 23 | 454 |
| HUSIO57 | 886206 | 3047 | WUblastx.64 | (Q9Y3E2) HYPOTHETICAL PROTEIN CGI-143. | YCE3_HUMAN | 100% | 170 | 565 |
| HUSIR70 | 838163 | 3049 | WUblastx.64 | (Q9HDC9) BSCV PROTEIN (FRAGMENT). | Q9HDC9 | 97% | 1 | 345 |
| HUSXP50 | 561962 | 3050 | WUblastx.64 | (Q63777) HYPOTHETICAL 32.0 KDA PROTEIN. | Q63777 | 26% | 178 | 291 |
| | | | | | | 57% | 27 | 68 |
| | | | | | | 55% | 113 | 172 |
| HUVCQ68 | 561963 | 3053 | WUblastx.64 | (Q9BV40) SIMILAR TO VESICLE-ASSOCIATED MEMBRANE | Q9BV40 | 82% | 40 | 339 |
| | | | | PROTEIN 8 (ENDOBREVIN | | | | |
| HUVEG53 | 797556 | 3055 | WUblastx.64 | (O62658) LINE-1 ELEMENT ORF2. | O62658 | 35% | 1843 | 1676 |
| | | | | | | 39% | 2148 | 1939 |
| | | | | | | 60% | 1391 | 1263 |
| HWAAH11 | 815548 | 3056 | WUblastx.64 | (Q9HAB3) CDNA FLJ11856 FIS, CLONE HEMBA1006789 | Q9HAB3 | 74% | 362 | 754 |
| | | | | (SIMILAR TO HYPOTHETIC | | | | |
| HWAAQ28 | 806588 | 3057 | WUblastx.64 | (Q9NZZ8) HSPC169 (HYPOTHETICAL 33.9 KDA PROTEIN). | Q9NZZ8 | 96% | 62 | 676 |
| | | | | | | 23% | 649 | 801 |
| | | | | | | 100% | 651 | 980 |
| HWAAY60 | 745917 | 3058 | WUblastx.64 | (Q9BQA1) BA552M11.2.2 (NOVEL PROTEIN (ISOFORM 2)) | Q9BQA1 | 76% | 504 | 722 |
| | | | | (UNKNOWN) (PROTEIN | | | | |
| HWABR43 | 823367 | 3059 | WUblastx.64 | (Q9BVD9) UNKNOWN (PROTEIN FOR MGC: 5149). | Q9BVD9 | 75% | 2081 | 2034 |
| | | | | | | 79% | 2266 | 2093 |
| HWACZ33 | 827311 | 3061 | WUblastx.64 | (Q9CTA6) 1110035E02RIK PROTEIN (FRAGMENT). | Q9CTA6 | 62% | 389 | 436 |
| | | | | | | 73% | 234 | 392 |
| HWADV90 | 897732 | 3062 | WUblastx.64 | (Q9NX17) CDNA FLJ20489 FIS, CLONE KAT08285. | Q9NX17 | 78% | 2375 | 2163 |
| HWAEB52 | 873207 | 3063 | WUblastx.64 | (Q9H8U5) CDNA FLJ13219 FIS, CLONE NT2RP4001849, | Q9H8U5 | 68% | 878 | 1426 |
| | | | | WEAKLY SIMILAR TO SH3 | | 60% | 389 | 685 |
| | | | | | | 23% | 356 | 667 |
| | | | | | | 28% | 874 | 1113 |
| | | | | | | 31% | 1191 | 1286 |
| | | | | | | 40% | 344 | 442 |
| | | | | | | 35% | 299 | 466 |
| HWBAK71 | 853581 | 3064 | WUblastx.64 | (Q9T9V8) NADH DEHYDROGENASE SUBUNIT 3. | Q9T9V8 | 87% | 77 | 175 |
| | | | | | | 83% | 305 | 340 |
| HWBBU75 | 780360 | 3065 | WUblastx.64 | (Q9R189) MUNC13-4 PROTEIN. | Q9R189 | 82% | 1454 | 2362 |
| | | | | | | 73% | 913 | 1434 |
| | | | | | | 80% | 194 | 952 |
| | | | | | | 62% | 2229 | 2729 |
| | | | | | | 31% | 1586 | 1711 |
| | | | | | | 34% | 401 | 532 |
| HWBCN81 | 853580 | 3066 | WUblastx.64 | (Q9H101) DJ776F14.2 (A NOVEL PROTEIN MEMBER OF THE | Q9H101 | 94% | 195 | 560 |
| | | | | PTPNS (PROTEIN TYR | | 33% | 222 | 560 |
| | | | | | | 100% | 150 | 221 |
| HWBCX93 | 853418 | 3068 | WUblastx.64 | (Q9NX85) CDNA FLJ20378 FIS, CLONE KAIA0536. | Q9NX85 | 80% | 642 | 553 |
| | | | | | | 84% | 796 | 641 |
| HWHGV77 | 788555 | 3072 | WUblastx.64 | (Q9D6W1) 2310050C09RIK PROTEIN. | Q9D6W1 | 70% | 136 | 621 |
| | | | | | | 51% | 127 | 552 |
| | | | | | | 37% | 127 | 588 |
| | | | | | | 47% | 124 | 318 |
| | | | | | | 100% | 721 | 756 |
| HWHGW09 | 702032 | 3073 | HMMER 2.1.1 | PFAM: Uncharacterized protein family | PF01027 | 68.3 | 271 | 444 |
| | | | WUblastx.64 | (Q9Y3C2) CGI-119 PROTEIN. | Q9Y3C2 | 84% | 256 | 450 |
| HWHPU44 | 778090 | 3075 | WUblastx.64 | (Q9H1C8) PUTATIVE CYTOPLASMATIC PROTEIN. | Q9H1C8 | 97% | 311 | 547 |
| HWLAT50 | 840753 | 3077 | WUblastx.64 | (Q99JR4) UNKNOWN (PROTEIN FOR IMAGE: 3599558) | Q99JR4 | 48% | 1864 | 2106 |
| | | | | (FRAGMENT). | | | | |
| HWLGP26 | 834770 | 3079 | WUblastx.64 | (Q9NP87) DNA POLYMERASE MU. | Q9NP87 | 93% | 674 | 760 |
| | | | | | | 100% | 269 | 298 |
| | | | | | | 94% | 295 | 465 |
| | | | | | | 87% | 432 | 623 |
| | | | | | | 100% | 3 | 254 |
| HWLHO31 | 837480 | 3080 | WUblastx.64 | (Q9NQT8) KINESIN-LIKE PROTEIN GAKIN. | Q9NQT8 | 100% | 41 | 205 |
| | | | | | | 96% | 190 | 1674 |
| HWLJN08 | 800626 | 3082 | WUblastx.64 | (Q9BX68) HIT-17 KDA. | Q9BX68 | 99% | 434 | 844 |
| HWLRE03 | 831198 | 3083 | WUblastx.64 | (O60646) HYPOTHETICAL 53.8 KDA PROTEIN (FRAGMENT). | O60646 | 100% | 1008 | 1232 |
| | | | | | | 99% | 1238 | 2431 |
| HWTBL86 | 791720 | 3089 | WUblastx.64 | hypothetical protein DKFZp434N0535.1 - human (fragment) | pir\|T17285\|T17285 | 91% | 1 | 1080 |
| HWTBX66 | 732187 | 3090 | WUblastx.64 | (Q9BRI8) UNKNOWN (PROTEIN FOR MGC: 11332). | Q9BRI8 | 71% | 63 | 1073 |
| HYAAD61 | 897736 | 3092 | WUblastx.64 | (O21101) ATPASE 6/8 (FRAGMENT). | O21101 | 56% | 2009 | 2179 |
| HYBAP75 | 853561 | 3094 | WUblastx.64 | (Q9N032) UNNAMED PROTEIN PRODUCT. | Q9N032 | 64% | 909 | 1025 |

RACE Protocol for Recovery of Full-Length Genes

[0195] Partial cDNA clones can be made full-length by utilizing the rapid amplification of cDNA ends (RACE) procedure described in Frohman, M. A., et al., Proc. Nat'l. Acad. Sci. USA, 85:8998-9002 (1988). A cDNA clone missing either the 5′ or 3′ end can be reconstructed to include the absent base pairs extending to the translational start or stop codon, respectively. In some cases, cDNAs are missing the start codon of translation, therefor. The following briefly describes a modification of this original 5′ RACE procedure. Poly A+ or total RNA is reverse transcribed with Superscript II (Gibco/BRL) and an antisense or complementary primer specific to the cDNA sequence. The primer is removed from the reaction with a Microcon Concentrator (Amicon). The first-strand cDNA is then tailed with dATP and terminal deoxynucleotide transferase (Gibco/BRL). Thus, an anchor sequence is produced which is needed for PCR amplification. The second strand is synthesized from the da-tail in PCR buffer, Taq DNA polymerase (Perkin-Elmer Cetus), an oligo-dT primer containing three adjacent restriction sites (XhoI, SalI and ClaI) at the 5′ end and a primer containing just these restriction sites. This double-stranded cDNA is PCR amplified for 40 cycles with the same primers as well as a nested cDNA-specific antisense primer. The PCR products are size-separated on an ethidium bromide-agarose gel and the region of gel containing cDNA products the predicted size of missing protein-coding DNA is removed. cDNA is purified from the agarose with the Magic PCR Prep kit (Promega), restriction digested with XhoI or SalI, and ligated to a plasmid such as pbluescript SKII (Stratagene) at XhoI and EcoRV sites. This DNA is transformed into bacteria and the plasmid clones sequenced to identify the correct protein-coding inserts. Correct 5′ ends are confirmed by comparing this sequence with the putatively identified homologue and overlap with the partial cDNA clone. Similar methods known in the art and/or commercial kits are used to amplify and recover 3′ ends.

[0196] Several quality-controlled kits are commercially available for purchase. Similar reagents and methods to those above are supplied in kit form from Gibco/BRL for both 5′ and 3′ RACE for recovery of full length genes. A second kit is available from Clontech which is a modification of a related technique, SLIC (single-stranded ligation to single-stranded cDNA), developed by Dumas et al., Nucleic Acids Res., 19:5227-32 (1991). The major differences in procedure are that the RNA is alkaline hydrolyzed after reverse transcription and RNA ligase is used to join a restriction site-containing anchor primer to the first-strand cDNA. This obviates the necessity for the dA-tailing reaction which results in a polyT stretch that is difficult to sequence past.

[0197] An alternative to generating 5′ or 3′ cDNA from RNA is to use cDNA library double-stranded DNA. An asymmetric PCR-amplified antisense cDNA strand is synthesized with an antisense cDNA-specific primer and a plasmid-anchored primer. These primers are removed and a symmetric PCR reaction is performed with a nested cDNA-specific antisense primer and the plasmid-anchored primer.

RNA Ligase Protocol for Generating the 5′ or 3′ End Sequences To Obtain Full Length Genes

[0198] Once a gene of interest is identified, several methods are available for the identification of the 5′ or 3′ portions of the gene which may not be present in the original cDNA plasmid. These methods include, but are not limited to, filter probing, clone enrichment using specific probes and protocols similar and identical to 5′ and 3′ RACE. While the full length gene may be present in the library and can be identified by probing, a useful method for generating the 5′ or 3′ end is to use the existing sequence information from the original cDNA to generate the missing information. A method similar to 5′ RACE is available for generating the missing 5′ end of a desired full-length gene. (This method was published by Fromont-Racine et al., Nucleic Acids Res., 21(7):1683-1684 (1993)). Briefly, a specific RNA oligonucleotide is ligated to the 5′ ends of a population of RNA presumably containing full-length gene RNA transcript and a primer set containing a primer specific to the ligated RNA oligonucleotide and a primer specific to a known sequence of the gene of interest, is used to PCR amplify the 5′ portion of the desired full length gene which may then be sequenced and used to generate the full length gene. This method starts with total RNA isolated from the desired source, poly A RNA may be used but is not a prerequisite for this procedure. The RNA preparation may then be treated with phosphatase if necessary to eliminate 5′ phosphate groups on degraded or damaged RNA which may interfere with the later RNA ligase step. The phosphatase if used is then inactivated and the RNA is treated with tobacco acid pyrophosphatase in order to remove the cap structure present at the 5′ ends of messenger RNAs. This reaction leaves a 5′ phosphate group at the 5′ end of the cap cleaved RNA which can then be ligated to an RNA oligonucleotide using T4 RNA ligase. This modified RNA preparation can then be used as a template for first strand cDNA synthesis using a gene specific oligonucleotide. The first strand synthesis reaction can then be used as a template for PCR amplification of the desired 5′ end using a primer specific to the ligated RNA oligonucleotide and a primer specific to the known sequence of the gene of interest. The resultant product is then sequenced and analyzed to confirm that the 5′ end sequence belongs to the relevant gene.

[0199] The present invention also relates to vectors or plasmids which include such DNA sequences, as well as the use of the DNA sequences. The material deposited with the ATCC (e.g., as described in columns 2 and 3 of Table 1A, and/or as set forth in Table 1B, Table 6, or Table 7) is a mixture of cDNA clones derived from a variety of human tissue and cloned in either a plasmid vector or a phage vector, as described, for example, in Table 1A and Table 7. These deposits are referred to as “the deposits” herein. The tissues from which some of the clones were derived are listed in Table 7, and the vector in which the corresponding cDNA is contained is also indicated in Table 7. The deposited material includes cDNA clones corresponding to SEQ ID NO:X described, for example, in Table 1A and/or 1B (ATCC Deposit No:Z). A clone which is isolatable from the ATCC Deposits by use of a sequence listed as SEQ ID NO:X, may include the entire coding region of a human gene or in other cases such clone may include a substantial portion of the coding region of a human gene. Furthermore, although the sequence listing may in some instances list only a portion of the DNA sequence in a clone included in the ATCC Deposits, it is well within the ability of one skilled in the art to sequence the DNA included in a clone contained in the ATCC Deposits by use of a sequence (or portion thereof) described in, for example Tables 1A and/or 1B or 2, by procedures hereinafter further described, and others apparent to those skilled in the art.

[0200] Also provided in Table 1A and 7 is the name of the vector which contains the cDNA clone. Each vector is routinely used in the art. The following additional information is provided for convenience.

[0201] Vectors Lambda Zap (U.S. Pat. Nos. 5,128,256 and 5,286,636), Uni-Zap XR (U.S. Pat. Nos. 5,128,256 and 5,286,636), Zap Express (U.S. Pat. Nos. 5,128,256 and 5,286,636), pbluescript (pBS) (Short, J. M. et al., Nucleic Acids Res. 16:7583-7600 (1988); Alting-Mees, M. A. and Short, J. M., Nucleic Acids Res. 17:9494 (1989)) and pBK (Alting-Mees, M. A. et al., Strategies 5:58-61 (1992)) are commercially available from Stratagene Cloning Systems, Inc., 11011 N. Torrey Pines Road, La Jolla, Calif., 92037. pBS contains an ampicillin resistance gene and pBK contains a neomycin resistance gene. Phagemid pBS may be excised from the Lambda Zap and Uni-Zap XR vectors, and phagemid pBK may be excised from the Zap Express vector. Both phagemids may be transformed into E. coli strain XL-1 Blue, also available from Stratagene.

[0202] Vectors pSport1, pCMVSport 1.0, pCMVSport 2.0 and pCMVSport 3.0, were obtained from Life Technologies, Inc., P.O. Box 6009, Gaithersburg, Md. 20897. All Sport vectors contain an ampicillin resistance gene and may be transformed into E. coli strain DH10B, also available from Life Technologies. See, for instance, Gruber, C. E., et al., Focus 15:59-(1993). Vector lafmid BA (Bento Soares, Columbia University, New York, N.Y.) contains an ampicillin resistance gene and can be transformed into E. coli strain XL-1 Blue. Vector pCR®2.1, which is available from Invitrogen, 1600 Faraday Avenue, Carlsbad, Calif. 92008, contains an ampicillin resistance gene and may be transformed into E. coli strain DH10B, available from Life Technologies. See, for instance, Clark, J. M., Nuc. Acids Res. 16:9677-9686 (1988) and Mead, D. et al., Bio/Technology 9: (1991).

[0203] The present invention also relates to the genes corresponding to SEQ ID NO:X, SEQ ID NO:Y, and/or the deposited clone (ATCC Deposit No:Z). The corresponding gene can be isolated in accordance with known methods using the sequence information disclosed herein. Such methods include preparing probes or primers from the disclosed sequence and identifying or amplifying the corresponding gene from appropriate sources of genomic material.

[0204] Also provided in the present invention are allelic variants, orthologs, and/or species homologs. Procedures known in the art can be used to obtain full-length genes, allelic variants, splice variants, full-length coding portions, orthologs, and/or species homologs of genes corresponding to SEQ ID NO:X or the complement thereof, polypeptides encoded by genes corresponding to SEQ ID NO:X or the complement thereof, and/or the cDNA contained in ATCC Deposit No:Z, using information from the sequences disclosed herein or the clones deposited with the ATCC. For example, allelic variants and/or species homologs may be isolated and identified by making suitable probes or primers from the sequences provided herein and screening a suitable nucleic acid source for allelic variants and/or the desired homologue.

[0205] The polypeptides of the invention can be prepared in any suitable manner. Such polypeptides include isolated naturally occurring polypeptides, recombinantly produced polypeptides, synthetically produced polypeptides, or polypeptides produced by a combination of these methods. Means for preparing such polypeptides are well understood in the art.

[0206] The polypeptides may be in the form of the secreted protein, including the mature form, or may be a part of a larger protein, such as a fusion protein (see below). It is often advantageous to include an additional amino acid sequence which contains secretory or leader sequences, pro-sequences, sequences which aid in purification, such as multiple histidine residues, or an additional sequence for stability during recombinant production.

[0207] The polypeptides of the present invention are preferably provided in an isolated form, and preferably are substantially purified. A recombinantly produced version of a polypeptide, including the secreted polypeptide, can be substantially purified using techniques described herein or otherwise known in the art, such as, for example, by the one-step method described in Smith and Johnson, Gene 67:31-40 (1988). Polypeptides of the invention also can be purified from natural, synthetic or recombinant sources using techniques described herein or otherwise known in the art, such as, for example, antibodies of the invention raised against the polypeptides of the present invention in methods which are well known in the art.

[0208] The present invention provides a polynucleotide comprising, or alternatively consisting of, the nucleic acid sequence of SEQ ID NO:X, and/or the cDNA sequence contained in ATCC Deposit No:Z. The present invention also provides a polypeptide comprising, or alternatively, consisting of, the polypeptide sequence of SEQ ID NO:Y, a polypeptide encoded by SEQ ID NO:X or a complement thereof, a polypeptide encoded by the cDNA contained in ATCC Deposit No:Z, and/or the polypeptide sequence encoded by a nucleotide sequence in SEQ ID NO:B as defined in column 6 of Table 1C. Polynucleotides encoding a polypeptide comprising, or alternatively consisting of the polypeptide sequence of SEQ ID NO:Y, a polypeptide encoded by SEQ ID NO:X, a polypeptide encoded by the cDNA contained in ATCC Deposit No:Z, and/or a polypeptide sequence encoded by a nucleotide sequence in SEQ ID NO:B as defined in column 6 of Table 1C are also encompassed by the invention. The present invention further encompasses a polynucleotide comprising, or alternatively consisting of, the complement of the nucleic acid sequence of SEQ ID NO:X, a nucleic acid sequence encoding a polypeptide encoded by the complement of the nucleic acid sequence of SEQ ID NO:X, and/or the cDNA contained in ATCC Deposit No:Z.

[0209] Moreover, representative examples of polynucleotides of the invention comprise, or alternatively consist of, one, two, three, four, five, six, seven, eight, nine, ten, or more of the sequences delineated in Table 1C column 6, or any combination thereof. Additional, representative examples of polynucleotides of the invention comprise, or alternatively consist of, one, two, three, four, five, six, seven, eight, nine, ten, or more of the complementary strand(s) of the sequences delineated in Table 1C column 6, or any combination thereof. In further embodiments, the above-described polynucleotides of the invention comprise, or alternatively consist of, sequences delineated in Table 1C, column 6, and have a nucleic acid sequence which is different from that of the BAC fragment having the sequence disclosed in SEQ ID NO:B (see Table 1C, column 5). In additional embodiments, the above-described polynucleotides of the invention comprise, or alternatively consist of, sequences delineated in Table 1C, column 6, and have a nucleic acid sequence which is different from that published for the BAC clone identified as BAC ID NO:A (see Table 1C, column 4). In additional embodiments, the above-described polynucleotides of the invention comprise, or alternatively consist of, sequences delineated in Table 1C, column 6, and have a nucleic acid sequence which is different from that contained in the BAC clone identified as BAC ID NO:A (see Table 1C, column 4). Polypeptides encoded by these polynucleotides, other polynucleotides that encode these polypeptides, and antibodies that bind these polypeptides are also encompassed by the invention. Additionally, fragments and variants of the above-described polynucleotides and polypeptides are also encompassed by the invention.

[0210] Further, representative examples of polynucleotides of the invention comprise, or alternatively consist of, one, two, three, four, five, six, seven, eight, nine, ten, or more of the sequences delineated in column 6 of Table 1C which correspond to the same Clone ID (see Table 1C, column 1), or any combination thereof. Additional, representative examples of polynucleotides of the invention comprise, or alternatively consist of, one, two, three, four, five, six, seven, eight, nine, ten, or more of the complementary strand(s) of the sequences delineated in column 6 of Table 1C which correspond to the same Clone ID (see Table 1C, column 1), or any combination thereof. In further embodiments, the above-described polynucleotides of the invention comprise, or alternatively consist of, sequences delineated in column 6 of Table 1C which correspond to the same Clone ID (see Table 1C, column 1) and have a nucleic acid sequence which is different from that of the BAC fragment having the sequence disclosed in SEQ ID NO:B (see Table 1C, column 5). In additional embodiments, the above-described polynucleotides of the invention comprise, or alternatively consist of, sequences delineated in column 6 of Table 1C which correspond to the same Clone ID (see Table 1C, column 1) and have a nucleic acid sequence which is different from that published for the BAC clone identified as BAC ID NO:A (see Table 1C, column 4). In additional embodiments, the above-described polynucleotides of the invention comprise, or alternatively consist of, sequences delineated in column 6 of Table 1C which correspond to the same Clone ID (see Table 1C, column 1) and have a nucleic acid sequence which is different from that contained in the BAC clone identified as BAC ID NO:A (see Table 1C, column 4). Polypeptides encoded by these polynucleotides, other polynucleotides that encode these polypeptides, and antibodies that bind these polypeptides are also encompassed by the invention. Additionally, fragments and variants of the above-described polynucleotides and polypeptides are also encompassed by the invention.

[0211] Further, representative examples of polynucleotides of the invention comprise, or alternatively consist of, one, two, three, four, five, six, seven, eight, nine, ten, or more of the sequences delineated in column 6 of Table 1C which correspond to the same contig sequence identifier SEQ ID NO:X (see Table 1C, column 2), or any combination thereof. Additional, representative examples of polynucleotides of the invention comprise, or alternatively consist of, one, two, three, four, five, six, seven, eight, nine, ten, or more of the complementary strand(s) of the sequences delineated in column 6 of Table 1C which correspond to the same contig sequence identifier SEQ ID NO:X (see Table 1C, column 2), or any combination thereof. In further embodiments, the above-described polynucleotides of the invention comprise, or alternatively consist of, sequences delineated in column 6 of Table 1C which correspond to the same contig sequence identifier SEQ ID NO:X (see Table 1C, column 2) and have a nucleic acid sequence which is different from that of the BAC fragment having the sequence disclosed in SEQ ID NO:B (see Table 1C, column 5). In additional embodiments, the above-described polynucleotides of the invention comprise, or alternatively consist of, sequences delineated in column 6 of Table 1C which correspond to the same contig sequence identifier SEQ ID NO:X (see Table 1C, column 2) and have a nucleic acid sequence which is different from that published for the BAC clone identified as BAC ID NO:A (see Table 1C, column 4). In additional embodiments, the above-described polynucleotides of the invention comprise, or alternatively consist of, sequences delineated in column 6 of Table 1C which correspond to the same contig sequence identifier SEQ ID NO:X (see Table 1C, column 2) and have a nucleic acid sequence which is different from that contained in the BAC clone identified as BAC ID NO:A (See Table 1C, column 4). Polypeptides encoded by these polynucleotides, other polynucleotides that encode these polypeptides, and antibodies that bind these polypeptides are also encompassed by the invention. Additionally, fragments and variants of the above-described polynucleotides and polypeptides are also encompassed by the invention.

[0212] Moreover, representative examples of polynucleotides of the invention comprise, or alternatively consist of, one, two, three, four, five, six, seven, eight, nine, ten, or more of the sequences delineated in the same row of Table 1C column 6, or any combination thereof. Additional, representative examples of polynucleotides of the invention comprise, or alternatively consist of, one, two, three, four, five, six, seven, eight, nine, ten, or more of the complementary strand(s) of the sequences delineated in the same row of Table 1C column 6, or any combination thereof. In preferred embodiments, the polynucleotides of the invention comprise, or alternatively consist of, one, two, three, four, five, six, seven, eight, nine, ten, or more of the complementary strand(s) of the sequences delineated in the same row of Table 1C column 6, wherein sequentially delineated sequences in the table (i.e. corresponding to those exons located closest to each other) are directly contiguous in a 5′ to 3′ orientation. In further embodiments, above-described polynucleotides of the invention comprise, or alternatively consist of, sequences delineated in the same row of Table 1C, column 6, and have a nucleic acid sequence which is different from that of the BAC fragment having the sequence disclosed in SEQ ID NO:B (see Table 1C, column 5). In additional embodiments, the above-described polynucleotides of the invention comprise, or alternatively consist of, sequences delineated in the same row of Table 1C, column 6, and have a nucleic acid sequence which is different from that published for the BAC clone identified as BAC ID NO:A (see Table 1C, column 4). In additional embodiments, the above-described polynucleotides of the invention comprise, or alternatively consist of, sequences delineated in the same row of Table 1C, column 6, and have a nucleic acid sequence which is different from that contained in the BAC clone identified as BAC ID NO:A (see Table 1C, column 4). Polypeptides encoded by these polynucleotides, other polynucleotides that encode these polypeptides, and antibodies that bind these polypeptides are also encompassed by the invention.

[0213] In additional specific embodiments, polynucleotides of the invention comprise, or alternatively consist of, one, two, three, four, five, six, seven, eight, nine, ten, or more of the sequences delineated in column 6 of Table 1C, and the polynucleotide sequence of SEQ ID NO:X (e.g., as defined in Table 1C, column 2) or fragments or variants thereof. Polypeptides encoded by these polynucleotides, other polynucleotides that encode these polypeptides, and antibodies that bind these polypeptides are also encompassed by the invention.

[0214] In additional specific embodiments, polynucleotides of the invention comprise, or alternatively consist of, one, two, three, four, five, six, seven, eight, nine, ten, or more of the sequences delineated in column 6 of Table 1C which correspond to the same Clone ID (see Table 1C, column 1), and the polynucleotide sequence of SEQ ID NO:X (e.g., as defined in Table 1A, 1B, or 1C) or fragments or variants thereof. In preferred embodiments, the delineated sequence(s) and polynucleotide sequence of SEQ ID NO:X correspond to the same Clone ID. Polypeptides encoded by these polynucleotides, other polynucleotides that encode these polypeptides, and antibodies that bind these polypeptides are also encompassed by the invention.

[0215] In further specific embodiments, polynucleotides of the invention comprise, or alternatively consist of, one, two, three, four, five, six, seven, eight, nine, ten, or more of the sequences delineated in the same row of column 6 of Table 1C, and the polynucleotide sequence of SEQ ID NO:X (e.g., as defined in Table 1A, 1B, or 1C) or fragments or variants thereof. In preferred embodiments, the delineated sequence(s) and polynucleotide sequence of SEQ ID NO:X correspond to the same row of column 6 of Table 1C. Polypeptides encoded by these polynucleotides, other polynucleotides that encode these polypeptides, and antibodies that bind these polypeptides are also encompassed by the invention.

[0216] In additional specific embodiments, polynucleotides of the invention comprise, or alternatively consist of a polynucleotide sequence in which the 3′ 10 polynucleotides of one of the sequences delineated in column 6 of Table 1C and the 5′ 10 polynucleotides of the sequence of SEQ ID NO:X are directly contiguous. Nucleic acids which hybridize to the complement of these 20 contiguous polynucleotides under stringent hybridization conditions or alternatively, under lower stringency conditions, are also encompassed by the invention. Polypeptides encoded by these polynucleotides and/or nucleic acids, other polynucleotides and/or nucleic acids that encode these polypeptides, and antibodies that bind these polypeptides are also encompassed by the invention. Additionally, fragments and variants of the above-described polynucleotides, nucleic acids, and polypeptides are also encompassed by the invention.

[0217] In additional specific embodiments, polynucleotides of the invention comprise, or alternatively consist of, a polynucleotide sequence in which the 3′ 10 polynucleotides of one of the sequences delineated in column 6 of Table 1C and the 5′ 10 polynucleotides of a fragment or variant of the sequence of SEQ ID NO:X are directly contiguous Nucleic acids which hybridize to the complement of these 20 contiguous polynucleotides under stringent hybridization conditions or alternatively, under lower stringency conditions, are also encompassed by the invention. Polypeptides encoded by these polynucleotides and/or nucleic acids, other polynucleotides and/or nucleic acids encoding these polypeptides, and antibodies that bind these polypeptides are also encompassed by the invention. Additionally, fragments and variants of the above-described polynucleotides, nucleic acids, and polypeptides are also encompassed by the invention.

[0218] In specific embodiments, polynucleotides of the invention comprise, or alternatively consist of, a polynucleotide sequence in which the 3′ 10 polynucleotides of the sequence of SEQ ID NO:X and the 5′ 10 polynucleotides of the sequence of one of the sequences delineated in column 6 of Table 1C are directly contiguous. Nucleic acids which hybridize to the complement of these 20 contiguous polynucleotides under stringent hybridization conditions or alternatively, under lower stringency conditions, are also encompassed by the invention. Polypeptides encoded by these polynucleotides and/or nucleic acids, other polynucleotides and/or nucleic acids encoding these polypeptides, and antibodies that bind these polypeptides are also encompassed by the invention. Additionally, fragments and variants of the above-described polynucleotides, nucleic acids, and polypeptides are also encompassed by the invention.

[0219] In specific embodiments, polynucleotides of the invention comprise, or alternatively consist of, a polynucleotide sequence in which the 3′ 10 polynucleotides of a fragment or variant of the sequence of SEQ ID NO:X and the 5′ 10 polynucleotides of the sequence of one of the sequences delineated in column 6 of Table 1C are directly contiguous. Nucleic acids which hybridize to the complement of these 20 contiguous polynucleotides under stringent hybridization conditions or alternatively, under lower stringency conditions, are also encompassed by the invention. Polypeptides encoded by these polynucleotides and/or nucleic acids, other polynucleotides and/or nucleic acids encoding these polypeptides, and antibodies that bind these polypeptides are also encompassed by the invention. Additionally, fragments and variants of the above-described polynucleotides, nucleic acids, and polypeptides, are also encompassed by the invention.

[0220] In further specific embodiments, polynucleotides of the invention comprise, or alternatively consist of, a polynucleotide sequence in which the 3′ 10 polynucleotides of one of the sequences delineated in column 6 of Table 1C and the 5′ 10 polynucleotides of another sequence in column 6 are directly contiguous. Nucleic acids which hybridize to the complement of these 20 contiguous polynucleotides under stringent hybridization conditions or alternatively, under lower stringency conditions, are also encompassed by the invention. Polypeptides encoded by these polynucleotides and/or nucleic acids, other polynucleotides and/or nucleic acids encoding these polypeptides, and antibodies that bind these polypeptides are also encompassed by the invention. Additionally, fragments and variants of the above-described polynucleotides, nucleic acids, and polypeptides are also encompassed by the invention.

[0221] In specific embodiments, polynucleotides of the invention comprise, or alternatively consist of, a polynucleotide sequence in which the 3′ 10 polynucleotides of one of the sequences delineated in column 6 of Table 1C and the 5′ 10 polynucleotides of another sequence in column 6 corresponding to the same Clone ID (see Table 1C, column 1) are directly contiguous. Nucleic acids which hybridize to the complement of these 20 lower stringency conditions, are also encompassed by the invention. Polypeptides encoded by these polynucleotides and/or nucleic acids, other polynucleotides and/or nucleic acids encoding these polypeptides, and antibodies that bind these polypeptides are also encompassed by the invention. Additionally, fragments and variants of the above-described polynucleotides, nucleic acids, and polypeptides are also encompassed by the invention.

[0222] In specific embodiments, polynucleotides of the invention comprise, or alternatively consist of, a polynucleotide sequence in which the 3′ 10 polynucleotides of one sequence in column 6 corresponding to the same contig sequence identifier SEQ ID NO:X (see Table 1C, column 2) are directly contiguous. Nucleic acids which hybridize to the complement of these 20 contiguous polynucleotides under stringent hybridization conditions or alternatively, under lower stringency conditions, are also encompassed by the invention. Polypeptides encoded by these polynucleotides and/or nucleic acids, other polynucleotides and/or nucleic acids encoding these polypeptides, and antibodies that bind these polypeptides are also encompassed by the invention. Additionally, fragments and variants of the above-described polynucleotides, nucleic acids, and polypeptides are also encompassed by the invention.

[0223] In specific embodiments, polynucleotides of the invention comprise, or alternatively consist of a polynucleotide sequence in which the 3′ 10 polynucleotides of one of the sequences delineated in column 6 of Table 1C and the 5′ 10 polynucleotides of another sequence in column 6 corresponding to the same row are directly contiguous. In preferred embodiments, the 3′ 10 polynucleotides of one of the sequences delineated in column 6 of Table 1C is directly contiguous with the 5′ 10 polynucleotides of the next sequential exon delineated in Table 1C, column 6. Nucleic acids which hybridize to the complement of these 20 contiguous polynucleotides under stringent hybridization conditions or alternatively, under lower stringency conditions, are also encompassed by the invention. Polypeptides encoded by these polynucleotides and/or nucleic acids, other polynucleotides and/or nucleic acids encoding these polypeptides, and antibodies that bind these polypeptides are also encompassed by the invention. Additionally, fragments and variants of the above-described polynucleotides, nucleic acids, and polypeptides are also encompassed by the invention.

Table 3

[0224] Many polynucleotide sequences, such as EST sequences, are publicly available and accessible through sequence databases and may have been publicly available prior to conception of the present invention. Preferably, such related polynucleotides are specifically excluded from the scope of the present invention. Accordingly, for each contig sequence (SEQ ID NO:X) listed in the fifth column of Table 1A and/or the fourth column of Table 1B.1, preferably excluded are one or more polynucleotides comprising a nucleotide sequence described by the general formula of a−b, where a is any integer between 1 and the final nucleotide minus 15 of SEQ ID NO:X, b is an integer of 15 to the final nucleotide of SEQ ID NO:X, where both a and b correspond to the positions of nucleotide residues shown in SEQ ID NO:X, and where b is greater than or equal to a+14. More specifically, preferably excluded are one or more polynucleotides comprising a nucleotide sequence described by the general formula of a−b, where a and b are integers as defined in columns 4 and 5, respectively, of Table 3. In specific embodiments, the polynucleotides of the invention do not consist of at least one, two, three, four, five, ten, or more of the specific polynucleotide sequences referenced by the Genbank Accession No. as disclosed in column 6 of Table 3 (including for example, published sequence in connection with a particular BAC clone). In further embodiments, preferably excluded from the invention are the specific polynucleotide sequence(s) contained in the clones corresponding to at least one, two, three, four, five, ten, or more of the available material having the accession numbers identified in the sixth column of this Table (including for example, the actual sequence contained in an identified BAC clone). In no way is this listing meant to encompass all of the sequences which may be excluded by the general formula, it is just a representative example. All references available through these accessions are hereby incorporated by reference in their entirety.

LENGTHY TABLE REFERENCED HERE
US20070298491A1-20071227-T00005
Please refer to the end of the specification for access instructions.

Description of Table 4

[0225] Table 4 provides a key to the tissue/cell source identifier code disclosed in Table 1B.2, column 5. Column 1 of Table 4 provides the tissue/cell source identifier code disclosed in Table 1B.2, Column 5. Columns 2-5 provide a description of the tissue or cell source. Note that “Description” and “Tissue” sources (i.e. columns 2 and 3) having the prefix “a-” indicates organs, tissues, or cells derived from “adult” sources. Codes corresponding to diseased tissues are indicated in column 6 with the word “disease.” The use of the word “disease” in column 6 is non-limiting. The tissue or cell source may be specific (e.g. a neoplasm), or may be disease-associated (e.g., a tissue sample from a normal portion of a diseased organ). Furthermore, tissues and/or cells lacking the “disease” designation may still be derived from sources directly or indirectly involved in a disease state or disorder, and therefore may have a further utility in that disease state or disorder. In numerous cases where the tissue/cell source is a library, column 7 identifies the vector used to generate the library.

TABLE 4

| Code | Description | Tissue | Organ | Cell Line | Disease | Vector |
|---|---|---|---|---|---|---|
| AR022 | a_Heart | a_Heart | | | | |
| AR023 | a_Liver | a_Liver | | | | |
| AR024 | a_mammary gland | a_mammary gland | | | | |
| AR025 | a_Prostate | a_Prostate | | | | |
| AR026 | a_small intestine | a_small intestine | | | | |
| AR027 | a_Stomach | a_Stomach | | | | |
| AR028 | Blood B cells | Blood B cells | | | | |
| AR029 | Blood B cells activated | Blood B cells activated | | | | |
| AR030 | Blood B cells resting | Blood B cells resting | | | | |
| AR031 | Blood T cells activated | Blood T cells activated | | | | |
| AR032 | Blood T cells resting | Blood T cells resting | | | | |
| AR033 | brain | brain | | | | |
| AR034 | breast | breast | | | | |
| AR035 | breast cancer | breast cancer | | | | |
| AR036 | Cell Line CAOV3 | Cell Line CAOV3 | | | | |
| AR037 | cell line PA-1 | cell line PA-1 | | | | |
| AR038 | cell line transformed | cell line transformed | | | | |
| AR039 | colon | colon | | | | |
| AR040 | colon (9808co65R) | colon (9808co65R) | | | | |
| AR041 | colon (9809co15) | colon (9809co15) | | | | |
| AR042 | colon cancer | colon cancer | | | | |
| AR043 | colon cancer (9808co64R) | colon cancer (9808co64R) | | | | |
| AR044 | colon cancer 9809co14 | colon cancer 9809co14 | | | | |
| AR050 | Donor II B Cells 24 hrs | Donor II B Cells 24 hrs | | | | |
| AR051 | Donor II B Cells 72 hrs | Donor II B Cells 72 hrs | | | | |
| AR052 | Donor II B-Cells 24 hrs. | Donor II B-Cells 24 hrs. | | | | |
| AR053 | Donor II B-Cells 72 hrs | Donor II B-Cells 72 hrs | | | | |
| AR054 | Donor II Resting B Cells | Donor II Resting B Cells | | | | |
| AR055 | Heart | Heart | | | | |
| AR056 | Human Lung (clonetech) | Human Lung (clonetech) | | | | |
| AR057 | Human Mammary (clontech) | Human Mammary (clontech) | | | | |
| AR058 | Human Thymus (clonetech) | Human Thymus (clonetech) | | | | |
| AR059 | Jurkat (unstimulated) | Jurkat (unstimulated) | | | | |
| AR060 | Kidney | Kidney | | | | |
| AR061 | Liver | Liver | | | | |
| AR062 | Liver (Clontech) | Liver (Clontech) | | | | |
| AR063 | Lymphocytes chronic lymphocytic leukaemia | Lymphocytes chronic | | | | |
| | | lymphocytic leukaemia | | | | |
| AR064 | Lymphocytes diffuse large B cell lymphoma | Lymphocytes diffuse | | | | |
| | | large B cell lymphoma | | | | |
| AR065 | Lymphocytes follicular lymphoma | Lymphocytes follicular | | | | |
| | | lymphoma | | | | |
| AR066 | normal breast | normal breast | | | | |
| AR067 | Normal Ovarian (4004901) | Normal Ovarian (4004901) | | | | |
| AR068 | Normal Ovary 9508G045 | Normal Ovary 9508G045 | | | | |
| AR069 | Normal Ovary 9701G208 | Normal Ovary 9701G208 | | | | |
| AR070 | Normal Ovary 9806G005 | Normal Ovary 9806G005 | | | | |
| AR071 | Ovarian Cancer | Ovarian Cancer | | | | |
| AR072 | Ovarian Cancer (9702G001) | Ovarian Cancer (9702G001) | | | | |
| AR073 | Ovarian Cancer (9707G029) | Ovarian Cancer (9707G029) | | | | |
| AR074 | Ovarian Cancer (9804G011) | Ovarian Cancer (9804G011) | | | | |
| AR075 | Ovarian Cancer (9806G019) | Ovarian Cancer (9806G019) | | | | |
| AR076 | Ovarian Cancer (9807G017) | Ovarian Cancer (9807G017) | | | | |
| AR077 | Ovarian Cancer (9809G001) | Ovarian Cancer (9809G001) | | | | |
| AR078 | ovarian cancer 15799 | ovarian cancer 15799 | | | | |
| AR079 | Ovarian Cancer 17717AID | Ovarian Cancer 17717AID | | | | |
| AR080 | Ovarian Cancer 4004664B1 | Ovarian Cancer 4004664B1 | | | | |
| AR081 | Ovarian Cancer 4005315A1 | Ovarian Cancer 4005315A1 | | | | |
| AR082 | ovarian cancer 94127303 | ovarian cancer 94127303 | | | | |
| AR083 | Ovarian Cancer 96069304 | Ovarian Cancer 96069304 | | | | |
| AR084 | Ovarian Cancer 9707G029 | Ovarian Cancer 9707G029 | | | | |
| AR085 | Ovarian Cancer 9807G045 | Ovarian Cancer 9807G045 | | | | |
| AR086 | ovarian cancer 9809G001 | ovarian cancer 9809G001 | | | | |
| AR087 | Ovarian Cancer 9905C032RC | Ovarian Cancer 9905C032RC | | | | |
| AR088 | Ovarian cancer 9907 C00 3rd | Ovarian cancer 9907 C00 3rd | | | | |
| AR089 | Prostate | Prostate | | | | |
| AR090 | Prostate (clonetech) | Prostate (clonetech) | | | | |
| AR091 | prostate cancer | prostate cancer | | | | |
| AR092 | prostate cancer #15176 | prostate cancer #15176 | | | | |
| AR093 | prostate cancer #15509 | prostate cancer #15509 | | | | |
| AR094 | prostate cancer #15673 | prostate cancer #15673 | | | | |
| AR095 | Small Intestine (Clontech) | Small Intestine (Clontech) | | | | |
| AR096 | Spleen | Spleen | | | | |
| AR097 | Thymus T cells activated | Thymus T cells activated | | | | |
| AR098 | Thymus T cells resting | Thymus T cells resting | | | | |
| AR099 | Tonsil | Tonsil | | | | |
| AR100 | Tonsil geminal center centroblast | Tonsil geminal | | | | |
| | | center centroblast | | | | |
| AR101 | Tonsil germinal center B cell | Tonsil germinal center B cell | | | | |
| AR102 | Tonsil lymph node | Tonsil lymph node | | | | |
| AR103 | Tonsil memory B cell | Tonsil memory B cell | | | | |
| AR104 | Whole Brain | Whole Brain | | | | |
| AR105 | Xenograft ES-2 | Xenograft ES-2 | | | | |
| AR106 | Xenograft SW626 | Xenograft SW626 | | | | |
| AR119 | 001: IL-2 | 001: IL-2 | | | | |
| AR120 | 001: IL-2.1 | 001: IL-2.1 | | | | |
| AR121 | 001: IL-2_b | 001: IL-2_b | | | | |
| AR124 | 002: Monocytes untreated (1 hr) | 002: Monocytes untreated (1 hr) | | | | |
| AR125 | 002: Monocytes untreated (5 hrs) | 002: Monocytes untreated | | | | |
| | | (5 hrs) | | | | |
| AR126 | 002: Control.1C | 002: Control.1C | | | | |
| AR127 | 002: IL2.1C | 002: IL2.1C | | | | |
| AR130 | 003: Placebo-treated Rat Lacrimal Gland | 003: Placebo-treated Rat | | | | |
| | | Lacrimal Gland | | | | |
| AR131 | 003: Placebo-treated Rat Submandibular Gland | 003: Placebo-treated Rat | | | | |
| | | Submandibular Gland | | | | |
| AR135 | 004: Monocytes untreated (5 hrs) | 004: Monocytes untreated | | | | |
| | | (5 hrs) | | | | |
| AR136 | 004: Monocytes untreated 1 hr | 004: Monocytes untreated 1 hr | | | | |
| AR139 | 005: Placebo (48 hrs) | 005: Placebo (48 hrs) | | | | |
| AR140 | 006: pC4 (24 hrs) | 006: pC4 (24 hrs) | | | | |
| AR141 | 006: pC4 (48 hrs) | 006: pC4 (48 hrs) | | | | |
| AR152 | 007: PHA(1 hr) | 007: PHA(1 hr) | | | | |
| AR153 | 007: PHA(6 HRS) | 007: PHA(6 HRS) | | | | |
| AR154 | 007: PMA(6 hrs) | 007: PMA(6 hrs) | | | | |
| AR155 | 008: 1449_#2 | 008: 1449_#2 | | | | |
| AR161 | 01: A - max 24 | 01: A —max 24 | | | | |
| AR162 | 01: A - max 26 | 01: A —max 26 | | | | |
| AR163 | 01: A - max 30 | 01: A —max 30 | | | | |
| AR164 | 01: B - max 24 | 01: B —max 24 | | | | |
| AR165 | 01: B - max 26 | 01: B —max 26 | | | | |
| AR166 | 01: B - max 30 | 01: B —max 30 | | | | |
| AR167 | 1449 Sample | 1449 Sample | | | | |
| AR168 | 3T3P10 1.0 uM insulin | 3T3P10 1.0 uM insulin | | | | |
| AR169 | 3T3P10 10 nM Insulin | 3T3P10 10 nM Insulin | | | | |
| AR170 | 3T3P10 10 uM insulin | 3T3P10 10 uM insulin | | | | |
| AR171 | 3T3P10 No Insulin | 3T3P10 No Insulin | | | | |
| AR172 | 3T3P4 | 3T3P4 | | | | |
| AR173 | Adipose (41892) | Adipose (41892) | | | | |
| AR174 | Adipose Diabetic (41611) | Adipose Diabetic (41611) | | | | |
| AR175 | Adipose Diabetic (41661) | Adipose Diabetic (41661) | | | | |
| AR176 | Adipose Diabetic (41689) | Adipose Diabetic (41689) | | | | |
| AR177 | Adipose Diabetic (41706) | Adipose Diabetic (41706) | | | | |
| AR178 | Adipose Diabetic (42352) | Adipose Diabetic (42352) | | | | |
| AR179 | Adipose Diabetic (42366) | Adipose Diabetic (42366) | | | | |
| AR180 | Adipose Diabetic (42452) | Adipose Diabetic (42452) | | | | |
| AR181 | Adipose Diabetic (42491) | Adipose Diabetic (42491) | | | | |
| AR182 | Adipose Normal (41843) | Adipose Normal (41843) | | | | |
| AR183 | Adipose Normal (41893) | Adipose Normal (41893) | | | | |
| AR184 | Adipose Normal (42452) | Adipose Normal (42452) | | | | |
| AR185 | Adrenal Gland | Adrenal Gland | | | | |
| AR186 | Adrenal Gland + Whole Brain | Adrenal Gland + Whole Brain | | | | |
| AR187 | B7(1 hr) + (inverted) | B7(1 hr) + (inverted) | | | | |
| AR188 | Breast (18275A2B) | Breast (18275A2B) | | | | |
| AR189 | Breast (4004199) | Breast (4004199) | | | | |
| AR190 | Breast (4004399) | Breast (4004399) | | | | |
| AR191 | Breast (4004943B7) | Breast (4004943B7) | | | | |
| AR192 | Breast (4005570B1) | Breast (4005570B1) | | | | |
| AR193 | Breast Cancer (4004127A30) | Breast Cancer (4004127A30) | | | | |
| AR194 | Breast Cancer (400443A21) | Breast Cancer (400443A21) | | | | |
| AR195 | Breast Cancer (4004643A2) | Breast Cancer (4004643A2) | | | | |
| AR196 | Breast Cancer (4004710A7) | Breast Cancer (4004710A7) | | | | |
| AR197 | Breast Cancer (4004943A21) | Breast Cancer (4004943A21) | | | | |
| AR198 | Breast Cancer (400553A2) | Breast Cancer (400553A2) | | | | |
| AR199 | Breast Cancer (9805C046R) | Breast Cancer (9805C046R) | | | | |
| AR200 | Breast Cancer (9806C012R) | Breast Cancer (9806C012R) | | | | |
| AR201 | Breast Cancer (ODQ 45913) | Breast Cancer (ODQ 45913) | | | | |
| AR202 | Breast Cancer (ODQ45913) | Breast Cancer (ODQ45913) | | | | |
| AR203 | Breast Cancer (ODQ4591B) | Breast Cancer (ODQ4591B) | | | | |
| AR204 | Colon Cancer (15663) | Colon Cancer (15663) | | | | |
| AR205 | Colon Cancer (4005144A4) | Colon Cancer (4005144A4) | | | | |
| AR206 | Colon Cancer (4005413A4) | Colon Cancer (4005413A4) | | | | |
| AR207 | Colon Cancer (4005570B1) | Colon Cancer (4005570B1) | | | | |
| AR208 | Control RNA #1 | Control RNA #1 | | | | |
| AR209 | Control RNA #2 | Control RNA #2 | | | | |
| AR210 | Cultured Preadipocyte (blue) | Cultured Preadipocyte (blue) | | | | |
| AR211 | Cultured Preadipocyte (Red) | Cultured Preadipocyte (Red) | | | | |
| AR212 | Donor II B-Cells 24 hrs | Donor II B-Cells 24 hrs | | | | |
| AR213 | Donor II Resting B-Cells | Donor II Resting B-Cells | | | | |
| AR214 | H114EP12 10 nM Insulin | H114EP12 10 nM Insulin | | | | |
| AR215 | H114EP12 (10 nM insulin) | H114EP12 (10 nM insulin) | | | | |
| AR216 | H114EP12 (2.6 ug/ul) | H114EP12 (2.6 ug/ul) | | | | |
| AR217 | H114EP12 (3.6 ug/ul) | H114EP12 (3.6 ug/ul) | | | | |
| AR218 | HUVEC #1 | HUVEC #1 | | | | |
| AR219 | HUVEC #2 | HUVEC #2 | | | | |
| AR221 | L6 undiff. | L6 undiff. | | | | |
| AR222 | L6 Undifferentiated | L6 Undifferentiated | | | | |
| AR223 | L6P8 + 10 nM Insulin | L6P8 + 10 nM Insulin | | | | |
| AR224 | L6P8 + HS | L6P8 + HS | | | | |
| AR225 | L6P8 10 nM Insulin | L6P8 10 nM Insulin | | | | |
| AR226 | Liver (00-06-A007B) | Liver (00-06-A007B) | | | | |
| AR227 | Liver (96-02-A075) | Liver (96-02-A075) | | | | |
| AR228 | Liver (96-03-A144) | Liver (96-03-A144) | | | | |
| AR229 | Liver (96-04-A138) | Liver (96-04-A138) | | | | |
| AR230 | Liver (97-10-A074B) | Liver (97-10-A074B) | | | | |
| AR231 | Liver (98-09-A242A) | Liver (98-09-A242A) | | | | |
| AR232 | Liver Diabetic (1042) | Liver Diabetic (1042) | | | | |
| AR233 | Liver Diabetic (41616) | Liver Diabetic (41616) | | | | |
| AR234 | Liver Diabetic (41955) | Liver Diabetic (41955) | | | | |
| AR235 | Liver Diabetic (42352R) | Liver Diabetic (42352R) | | | | |
| AR236 | Liver Diabetic (42366) | Liver Diabetic (42366) | | | | |
| AR237 | Liver Diabetic (42483) | Liver Diabetic (42483) | | | | |
| AR238 | Liver Diabetic (42491) | Liver Diabetic (42491) | | | | |
| AR239 | Liver Diabetic (99-09-A281A) | Liver Diabetic (99-09-A281A) | | | | |
| AR240 | Lung | Lung | | | | |
| AR241 | Lung (27270) | Lung (27270) | | | | |
| AR242 | Lung (2727Q) | Lung (2727Q) | | | | |
| AR243 | Lung Cancer (4005116A1) | Lung Cancer (4005116A1) | | | | |
| AR244 | Lung Cancer (4005121A5) | Lung Cancer (4005121A5) | | | | |
| AR245 | Lung Cancer (4005121A5)) | Lung Cancer (4005121A5)) | | | | |
| AR246 | Lung Cancer (4005340A4) | Lung Cancer (4005340A4) | | | | |
| AR247 | Mammary Gland | Mammary Gland | | | | |
| AR248 | Monocyte (CT) | Monocyte (CT) | | | | |
| AR249 | Monocyte (OCT) | Monocyte (OCT) | | | | |
| AR250 | Monocytes (CT) | Monocytes (CT) | | | | |
| AR251 | Monocytes (INFG 18 hr) | Monocytes (INFG 18 hr) | | | | |
| AR252 | Monocytes (INFG 18 hr) | Monocytes (INFG 18 hr) | | | | |
| AR253 | Monocytes (INFG 8-11) | Monocytes (INFG 8-11) | | | | |
| AR254 | Monocytes (O CT) | Monocytes (O CT) | | | | |
| AR255 | Muscle (91-01-A105) | Muscle (91-01-A105) | | | | |
| AR256 | Muscle (92-04-A059) | Muscle (92-04-A059) | | | | |
| AR257 | Muscle (97-11-A056d) | Muscle (97-11-A056d) | | | | |
| AR258 | Muscle (99-06-A210A) | Muscle (99-06-A210A) | | | | |
| AR259 | Muscle (99-07-A203B) | Muscle (99-07-A203B) | | | | |
| AR260 | Muscle (99-7-A203B) | Muscle (99-7-A203B) | | | | |
| AR261 | Muscle Diabetic (42352R) | Muscle Diabetic (42352R) | | | | |
| AR262 | Muscle Diabetic (42366) | Muscle Diabetic (42366) | | | | |
| AR263 | NK-19 Control | NK-19 Control | | | | |
| AR264 | NK-19 IL Treated 72 hrs | NK-19 IL Treated 72 hrs | | | | |
| AR265 | NK-19 UK Treated 72 hrs. | NK-19 UK Treated 72 hrs. | | | | |
| AR266 | Omentum Normal (94-08-B009) | Omentum Normal (94-08-B009) | | | | |
| AR267 | Omentum Normal (97-01-A039A) | Omentum Normal (97-01- | | | | |
| | | A039A) | | | | |
| AR268 | Omentum Normal (97-04-A114C) | Omentum Normal | | | | |
| | | (97-04-A114C) | | | | |
| AR269 | Omentum Normal (97-06-A117C) | Omentum Normal | | | | |
| | | (97-06-A117C) | | | | |
| AR270 | Omentum Normal (97-09-B004C) | Omentum Normal | | | | |
| | | (97-09-B004C) | | | | |
| AR271 | Ovarian Cancer (17717AID) | Ovarian Cancer (17717AID) | | | | |
| AR272 | Ovarian Cancer (9905C023RC) | Ovarian Cancer (9905C023RC) | | | | |
| AR273 | Ovarian Cancer (9905C032RC) | Ovarian Cancer (9905C032RC) | | | | |
| AR274 | Ovary (9508G045) | Ovary (9508G045) | | | | |
| AR275 | Ovary (9701G208) | Ovary (9701G208) | | | | |
| AR276 | Ovary 9806G005 | Ovary 9806G005 | | | | |
| AR277 | Pancreas | Pancreas | | | | |
| AR278 | Placebo | Placebo | | | | |
| AR279 | rIL2 Control | rIL2 Control | | | | |
| AR280 | RSS288L | RSS288L | | | | |
| AR281 | RSS288LC | RSS288LC | | | | |
| AR282 | Salivary Gland | Salivary Gland | | | | |
| AR283 | Skeletal Muscle | Skeletal Muscle | | | | |
| AR284 | Skeletal Muscle (91-01-A105) | Skeletal Muscle (91-01-A105) | | | | |
| AR285 | Skeletal Muscle (42180) | Skeletal Muscle (42180) | | | | |
| AR286 | Skeletal Muscle (42386) | Skeletal Muscle (42386) | | | | |
| AR287 | Skeletal Muscle (42461) | Skeletal Muscle (42461) | | | | |
| AR288 | Skeletal Muscle (91-01-A105) | Skeletal Muscle (91-01-A105) | | | | |
| AR289 | Skeletal Muscle (92-04-A059) | Skeletal Muscle (92-04-A059) | | | | |
| AR290 | Skeletal Muscle (96-08-A171) | Skeletal Muscle (96-08-A171) | | | | |
| AR291 | Skeletal Muscle (97-07-A190A) | Skeletal Muscle (97-07-A190A) | | | | |
| AR292 | Skeletal Muscle Diabetic (42352) | Skeletal Muscle Diabetic | | | | |
| | | (42352) | | | | |
| AR293 | Skeletal Muscle Diabetic (42366) | Skeletal Muscle Diabetic | | | | |
| | | (42366) | | | | |
| AR294 | Skeletal Muscle Diabetic (42395) | Skeletal Muscle Diabetic | | | | |
| | | (42395) | | | | |
| AR295 | Skeletal Muscle Diabetic (42483) | Skeletal Muscle Diabetic | | | | |
| | | (42483) | | | | |
| AR296 | Skeletal Muscle Diabetic (42491) | Skeletal Muscle Diabetic | | | | |
| | | (42491) | | | | |
| AR297 | Skeletal Muscle Diabetic 42352 | Skeletal Muscle Diabetic 42352 | | | | |
| AR298 | Skeletal Musle (42461) | Skeletal Musle (42461) | | | | |
| AR299 | Small Intestine | Small Intestine | | | | |
| AR300 | Stomach | Stomach | | | | |
| AR301 | T-Cell + HDPBQ71.fc 1449 16 hrs | T-Cell + HDPBQ71.fc 1449 | | | | |
| | | 16 hrs | | | | |
| AR302 | T-Cell + HDPBQ71.fc 1449 6 hrs | T-Cell + HDPBQ71.fc 1449 | | | | |
| | | 6 hrs | | | | |
| AR303 | T-Cell + IL2 16 hrs | T-Cell + IL2 16 hrs | | | | |
| AR304 | T-Cell + IL2 6 hrs | T-Cell + IL2 6 hrs | | | | |
| AR306 | T-Cell Untreated 16 hrs | T-Cell Untreated 16 hrs | | | | |
| AR307 | T-Cell Untreated 6 hrs | T-Cell Untreated 6 hrs | | | | |
| AR308 | T-Cells 24 hours | T-Cells 24 hours | | | | |
| AR309 | T-Cells 24 hrs | T-Cells 24 hrs | | | | |
| AR310 | T-Cells 24 hrs. | T-Cells 24 hrs. | | | | |
| AR311 | T-Cells 24 hrs | T-Cells 24 hrs | | | | |
| AR312 | T-Cells 4 days | T-Cells 4 days | | | | |
| AR313 | Thymus | Thymus | | | | |
| AR314 | TRE | TRE | | | | |
| AR315 | TREC | TREC | | | | |
| AR316 | Virtual Mixture | Virtual Mixture | | | | |
| AR317 | B lymphocyte, | B lymphocyte, | | | | |
| AR318 | (non-T; non-B) | (non-T; non-B) | | | | |
| AR326 | 001-293 RNA (Vector Control) | 001-293 RNA (Vector Control) | | | | |
| AR327 | 001: Control | 001: Control | | | | |
| AR328 | 001: Control.1 | 001: Control.1 | | | | |
| AR355 | Acute Lymphocyte Leukemia | Acute Lymphocyte Leukemia | | | | |
| AR356 | AML Patient #11 | AML Patient #11 | | | | |
| AR357 | AML Patient #2 | AML Patient #2 | | | | |
| AR358 | AML Patient #2 SGAH | AML Patient #2 SGAH | | | | |
| AR359 | AML Patient#2 | AML Patient#2 | | | | |
| AR360 | Aorta | Aorta | | | | |
| AR361 | B Cell | B Cell | | | | |
| AR362 | B lymphoblast | B lymphoblast | | | | |
| AR363 | B lymphocyte | B lymphocyte | | | | |
| AR364 | B lymphocytes | B lymphocytes | | | | |
| AR365 | B-cell | B-cell | | | | |
| AR366 | B-Cells | B-Cells | | | | |
| AR367 | B-Lymphoblast | B-Lymphoblast | | | | |
| AR368 | B-Lymphocytes | B-Lymphocytes | | | | |
| AR369 | Bladder | Bladder | | | | |
| AR370 | Bone Marrow | Bone Marrow | | | | |
| AR371 | Bronchial Epithelial Cell | Bronchial Epithelial Cell | | | | |
| AR372 | Bronchial Epithelial Cells | Bronchial Epithelial Cells | | | | |
| AR373 | Caco-2A | Caco-2A | | | | |
| AR374 | Caco-2B | Caco-2B | | | | |
| AR375 | Caco-2C | Caco-2C | | | | |
| AR376 | Cardiac #1 | Cardiac #1 | | | | |
| AR377 | Cardiac #2 | Cardiac #2 | | | | |
| AR378 | Chest Muscle | Chest Muscle | | | | |
| AR381 | Dendritic Cell | Dendritic Cell | | | | |
| AR382 | Dendritic cells | Dendritic cells | | | | |
| AR383 | E. coli | E. coli | | | | |
| AR384 | Epithelial Cells | Epithelial Cells | | | | |
| AR385 | Esophagus | Esophagus | | | | |
| AR386 | FPPS | FPPS | | | | |
| AR387 | FPPSC | FPPSC | | | | |
| AR388 | HepG2 Cell Line | HepG2 Cell Line | | | | |
| AR389 | HepG2 Cell line Buffer 1 hr. | HepG2 Cell line Buffer 1 hr. | | | | |
| AR390 | HepG2 Cell line Buffer 06 hr | HepG2 Cell line Buffer 06 hr | | | | |
| AR391 | HepG2 Cell line Buffer 24 hr. | HepG2 Cell line Buffer 24 hr. | | | | |
| AR392 | HepG2 Cell line Insulin 01 hr. | HepG2 Cell line Insulin 01 hr. | | | | |
| AR393 | HepG2 Cell line Insulin 06 hr. | HepG2 Cell line Insulin 06 hr. | | | | |
| AR394 | HepG2 Cell line Insulin 24 hr. | HepG2 Cell line Insulin 24 hr. | | | | |
| AR398 | HMC-1 | HMC-1 | | | | |
| AR399 | HMCS | HMCS | | | | |
| AR400 | HMSC | HMSC | | | | |
| AR401 | HUVEC #3 | HUVEC #3 | | | | |
| AR402 | HUVEC #4 | HUVEC #4 | | | | |
| AR404 | KIDNEY NORMAL | KIDNEY NORMAL | | | | |
| AR405 | KIDNEY TUMOR | KIDNEY TUMOR | | | | |
| AR406 | KIDNEY TUMOR | | | | | |
| AR407 | Lymph Node | Lymph Node | | | | |
| AR408 | Macrophage | Macrophage | | | | |
| AR409 | Megakarioblast | Megakarioblast | | | | |
| AR410 | Monocyte | Monocyte | | | | |
| AR411 | Monocytes | Monocytes | | | | |
| AR412 | Myocardium | Myocardium | | | | |
| AR413 | Myocardium #3 | Myocardium #3 | | | | |
| AR414 | Myocardium #4 | Myocardium #4 | | | | |
| AR415 | Myocardium #5 | Myocardium #5 | | | | |
| AR416 | NK | NK | | | | |
| AR417 | NK cell | NK cell | | | | |
| AR418 | NK cells | NK cells | | | | |
| AR419 | NKYa | NKYa | | | | |
| AR420 | NKYa019 | NKYa019 | | | | |
| AR421 | Ovary | Ovary | | | | |
| AR422 | Patient #11 | Patient #11 | | | | |
| AR423 | Peripheral blood | Peripheral blood | | | | |
| AR424 | Primary Adipocytes | Primary Adipocytes | | | | |
| AR425 | Promyeloblast | Promyeloblast | | | | |
| AR427 | RSSWT | RSSWT | | | | |
| AR428 | RSSWTC | RSSWTC | | | | |
| AR429 | SW 480(G1) | SW 480(G1) | | | | |
| AR430 | SW 480(G2) | SW 480(G2) | | | | |
| AR431 | SW 480(G3) | SW 480(G3) | | | | |
| AR432 | SW 480(G4) | SW 480(G4) | | | | |
| AR433 | SW 480(G5) | SW 480(G5) | | | | |
| AR434 | T Lymphoblast | T Lymphoblast | | | | |
| AR435 | T Lymphocyte | T Lymphocyte | | | | |
| AR436 | T-Cell | T-Cell | | | | |
| AR438 | T-Cell, | T-Cell, | | | | |
| AR439 | T-Cells | T-Cells | | | | |
| AR440 | T-lymphoblast | T-lymphoblast | | | | |
| AR441 | Th 1 | Th 1 | | | | |
| AR442 | Th 2 | Th 2 | | | | |
| AR443 | Th1 | Th1 | | | | |
| AR444 | Th2 | Th2 | | | | |
| H0002 | Human Adult Heart | Human Adult Heart | Heart | | | Uni-ZAP XR |
| H0003 | Human Adult Liver | Human Adult Liver | Liver | | | Uni-ZAP XR |
| H0004 | Human Adult Spleen | Human Adult Spleen | Spleen | | | Uni-ZAP XR |
| H0007 | Human Cerebellum | Human Cerebellum | Brain | | | Uni-ZAP XR |
| H0008 | Whole 6 Week Old Embryo | | | | | Uni-ZAP XR |
| H0009 | Human Fetal Brain | | | | | Uni-ZAP XR |
| H0010 | Human Fetal Hepatic | Human Fetal Liver | Liver | | | Uni-ZAP XR |
| H0011 | Human Fetal Kidney | Human Fetal Kidney | Kidney | | | Uni-ZAP XR |
| H0012 | Human Fetal Kidney | Human Fetal Kidney | Kidney | | | Uni-ZAP XR |
| H0013 | Human 8 Week Whole Embryo | Human 8 Week Old Embryo | Embryo | | | Uni-ZAP XR |
| H0014 | Human Gall Bladder | Human Gall Bladder | Gall Bladder | | | Uni-ZAP XR |
| H0015 | Human Gall Bladder, fraction II | Human Gall Bladder | Gall Bladder | | | Uni-ZAP XR |
| H0018 | Human Greater Omentum, fII remake | Human Greater Omentum | peritoneum | | | Uni-ZAP XR |
| H0019 | Human Fetal Heart | Human Fetal Heart | Heart | | | pBluescript |
| H0020 | Human Hippocampus | Human Hippocampus | Brain | | | Uni-ZAP XR |
| H0021 | Human Infant Adrenal Gland | Human Infant Adrenal Gland | Adrenal | | | Uni-ZAP XR |
| | | | gland | | | |
| H0022 | Jurkat Cells | Jurkat T-Cell Line | | | | Lambda ZAP II |
| H0023 | Human Fetal Lung | | | | | Uni-ZAP XR |
| H0024 | Human Fetal Lung III | Human Fetal Lung | Lung | | | Uni-ZAP XR |
| H0025 | Human Adult Lymph Node | Human Adult Lymph Node | Lymph Node | | | Lambda ZAP II |
| H0026 | Namalwa Cells | Namalwa B-Cell Line, EBV | | | | Lambda ZAP II |
| | | immortalized | | | | |
| H0028 | Human Old Ovary | Human Old Ovary | Ovary | | | pBluescript |
| H0029 | Human Pancreas | Human Pancreas | Pancreas | | | Uni-ZAP XR |
| H0030 | Human Placenta | | | | | Uni-ZAP XR |
| H0031 | Human Placenta | Human Placenta | Placenta | | | Uni-ZAP XR |
| H0032 | Human Prostate | Human Prostate | Prostate | | | Uni-ZAP XR |
| H0033 | Human Pituitary | Human Pituitary | | | | Uni-ZAP XR |
| H0035 | Human Salivary Gland | Human Salivary Gland | Salivary | | | Uni-ZAP XR |
| | | | gland | | | |
| H0036 | Human Adult Small Intestine | Human Adult Small Intestine | Small Int. | | | Uni-ZAP XR |
| H0037 | Human Adult Small Intestine | Human Adult Small Intestine | Small Int. | | | pBluescript |
| H0038 | Human Testes | Human Testes | Testis | | | Uni-ZAP XR |
| H0039 | Human Pancreas Tumor | Human Pancreas Tumor | Pancreas | | disease | Uni-ZAP XR |
| H0040 | Human Testes Tumor | Human Testes Tumor | Testis | | disease | Uni-ZAP XR |
| H0041 | Human Fetal Bone | Human Fetal Bone | Bone | | | Uni-ZAP XR |
| H0042 | Human Adult Pulmonary | Human Adult Pulmonary | Lung | | | Uni-ZAP XR |
| H0044 | Human Cornea | Human Cornea | eye | | | Uni-ZAP XR |
| H0045 | Human Esophagus, Cancer | Human Esophagus, cancer | Esophagus | | disease | Uni-ZAP XR |
| H0046 | Human Endometrial Tumor | Human Endometrial Tumor | Uterus | | disease | Uni-ZAP XR |
| H0047 | Human Fetal Liver | Human Fetal Liver | Liver | | | Uni-ZAP XR |
| H0048 | Human Pineal Gland | Human Pineal Gland | | | | Uni-ZAP XR |
| H0049 | Human Fetal Kidney | Human Fetal Kidney | Kidney | | | Uni-ZAP XR |
| H0050 | Human Fetal Heart | Human Fetal Heart | Heart | | | Uni-ZAP XR |
| H0051 | Human Hippocampus | Human Hippocampus | Brain | | | Uni-ZAP XR |
| H0052 | Human Cerebellum | Human Cerebellum | Brain | | | Uni-ZAP XR |
| H0053 | Human Adult Kidney | Human Adult Kidney | Kidney | | | Uni-ZAP XR |
| H0056 | Human Umbilical Vein, Endo. remake | Human Umbilical Vein | Umbilical | | | Uni-ZAP XR |
| | | Endothelial Cells | vein | | | |
| H0057 | Human Fetal Spleen | | | | | Uni-ZAP XR |
| H0058 | Human Thymus Tumor | Human Thymus Tumor | Thymus | | disease | Lambda ZAP II |
| H0059 | Human Uterine Cancer | Human Uterine Cancer | Uterus | | disease | Lambda ZAP II |
| H0060 | Human Macrophage | Human Macrophage | Blood | Cell Line | | pBluescript |
| H0061 | Human Macrophage | Human Macrophage | Blood | Cell Line | | pBluescript |
| H0062 | Human Thymus | Human Thymus | Thymus | | | Uni-ZAP XR |
| H0063 | Human Thymus | Human Thymus | Thymus | | | Uni-ZAP XR |
| H0064 | Human Right Hemisphere of Brain | Human Brain, right hemisphere | Brain | | | Uni-ZAP XR |
| H0067 | Human left hemisphere, adult | Human Left Hemisphere, Adult | Brain | | | Lambda ZAP II |
| H0068 | Human Skin Tumor | Human Skin Tumor | Skin | | disease | Uni-ZAP XR |
| H0069 | Human Activated T-Cells | Activated T-Cells | Blood | Cell Line | | Uni-ZAP XR |
| H0070 | Human Pancreas | Human Pancreas | Pancreas | | | Uni-ZAP XR |
| H0071 | Human Infant Adrenal Gland | Human Infant Adrenal Gland | Adrenal | | | Uni-ZAP XR |
| | | | gland | | | |
| H0073 | Human Leiomyeloid Carcinoma | Human Leiomyeloid Carcinoma | Muscle | | disease | Uni-ZAP XR |
| H0074 | Human Platelets | Human Platelets | Blood | Cell Line | | Uni-ZAP XR |
| H0075 | Human Activated T-Cells (II) | Activated T-Cells | Blood | Cell Line | | Uni-ZAP XR |
| H0077 | Human Thymus Tumor | Human Thymus Tumor | Thymus | | disease | Lambda ZAP II |
| H0078 | Human Lung Cancer | Human Lung Cancer | Lung | | disease | Lambda ZAP II |
| H0079 | Human Whole 7 Week Old Embryo (II) | Human Whole 7 Week Old | Embryo | | | Uni-ZAP XR |
| | | Embryo | | | | |
| H0080 | Human Whole 6 Week Old Embryo (II) | Human Whole Six Week Old | Embryo | | | Lambda ZAP II |
| | | Embryo | | | | |
| H0081 | Human Fetal Epithelium (Skin) | Human Fetal Skin | Skin | | | Uni-ZAP XR |
| H0082 | Human Fetal Muscle | Human Fetal Muscle | Sk Muscle | | | Uni-ZAP XR |
| H0083 | HUMAN JURKAT MEMBRANE BOUND | Jurkat Cells | | | | Uni-ZAP XR |
| | POLYSOMES | | | | | |
| H0085 | Human Colon | Human Colon | | | | Lambda ZAP II |
| H0086 | Human epithelioid sarcoma | Epithelioid Sarcoma, muscle | Sk Muscle | | disease | Uni-ZAP XR |
| H0087 | Human Thymus | Human Thymus | | | | pBluescript |
| H0090 | Human T-Cell Lymphoma | T-Cell Lymphoma | T-Cell | | disease | Uni-ZAP XR |
| H0092 | Human Pancreas Tumor | Human Pancreas Tumor | Pancreas | | disease | Uni-ZAP XR |
| H0093 | Human Greater Omentum Tumor | Human Greater Omentum | peritoneum | | disease | Uni-ZAP XR |
| H0095 | Human Greater Omentum, RNA Remake | Human Greater Omentum | peritoneum | | | Uni-ZAP XR |
| H0097 | Human Adult Heart, subtracted | Human Adult Heart | Heart | | | pBluescript |
| H0098 | Human Adult Liver, subtracted | Human Adult Liver | Liver | | | Uni-ZAP XR |
| H0099 | Human Lung Cancer, subtracted | Human Lung Cancer | Lung | | | pBluescript |
| H0100 | Human Whole Six Week Old Embryo | Human Whole Six Week Old | Embryo | | | Uni-ZAP XR |
| | | Embryo | | | | |
| H0101 | Human 7 Weeks Old Embryo, subtracted | Human Whole 7 Week Old | Embryo | | | Lambda ZAP II |
| | | Embryo | | | | |
| H0102 | Human Whole 6 Week Old Embryo (II), subt | Human Whole Six Week Old | Embryo | | | pBluescript |
| | | Embryo | | | | |
| H0103 | Human Fetal Brain, subtracted | Human Fetal Brain | Brain | | | Uni-ZAP XR |
| H0105 | Human Fetal Heart, subtracted | Human Fetal Heart | Heart | | | pBluescript |
| H0107 | Human Infant Adrenal Gland, subtracted | Human Infant Adrenal Gland | Adrenal | | | pBluescript |
| | | | gland | | | |
| H0108 | Human Adult Lymph Node, subtracted | Human Adult Lymph Node | Lymph Node | | | Uni-ZAP XR |
| H0109 | Human Macrophage, subtracted | Macrophage | Blood | Cell Line | | pBluescript |
| H0110 | Human Old Ovary, subtracted | Human Old Ovary | Ovary | | | pBluescript |
| H0111 | Human Placenta, subtracted | Human Placenta | Placenta | | | pBluescript |
| H0113 | Human skin Tumor, subtracted | Human Skin Tumor | Skin | | | Uni-ZAP XR |
| H0116 | Human Thymus Tumor, subtracted | Human Thymus Tumor | Thymus | | | pBluescript |
| H0117 | Human Uterine Cancer, subtracted | Human Uterine Cancer | Uterus | | | pBluescript |
| H0119 | Human Pediatric Kidney | Human Pediatric Kidney | Kidney | | | Uni-ZAP XR |
| H0120 | Human Adult Spleen, subtracted | Human Adult Spleen | Spleen | | | Uni-ZAP XR |
| H0121 | Human Cornea, subtracted | Human Cornea | eye | | | Uni-ZAP XR |
| H0122 | Human Adult Skeletal Muscle | Human Skeletal Muscle | Sk Muscle | | | Uni-ZAP XR |
| H0123 | Human Fetal Dura Mater | Human Fetal Dura Mater | Brain | | | Uni-ZAP XR |
| H0124 | Human Rhabdomyosarcoma | Human Rhabdomyosarcoma | Sk Muscle | | disease | Uni-ZAP XR |
| H0125 | Cem cells cyclohexamide treated | Cyclohexamide Treated Cem, | Blood | Cell Line | | Uni-ZAP XR |
| | | Jurkat, Raji, and Supt | | | | |
| H0128 | Jurkat cells, thiouridine activated | Jurkat Cells | | | | Uni-ZAP XR |
| H0129 | Jurkat cells, thiouridine activated, fract II | Jurkat Cells | | | | Uni-ZAP XR |
| H0130 | LNCAP untreated | LNCAP Cell Line | Prostate | Cell Line | | Uni-ZAP XR |
| H0131 | LNCAP + o.3 nM R1881 | LNCAP Cell Line | Prostate | Cell Line | | Uni-ZAP XR |
| H0132 | LNCAP + 30 nM R1881 | LNCAP Cell Line | Prostate | Cell Line | | Uni-ZAP XR |
| H0134 | Raji Cells, cyclohexamide treated | Cyclohexamide Treated Cem, | Blood | Cell Line | | Uni-ZAP XR |
| | | Jurkat, Raji, and Supt | | | | |
| H0135 | Human Synovial Sarcoma | Human Synovial Sarcoma | Synovium | | | Uni-ZAP XR |
| H0136 | Supt Cells, cyclohexamide treated | Cyclohexamide Treated Cem, | Blood | Cell Line | | Uni-ZAP XR |
| | | Jurkat, Raji, and Supt | | | | |
| H0140 | Activated T-Cells, 8 hrs. | Activated T-Cells | Blood | Cell Line | | Uni-ZAP XR |
| H0141 | Activated T-Cells, 12 hrs. | Activated T-Cells | Blood | Cell Line | | Uni-ZAP XR |
| H0142 | MCF7 Cell Line | MCF7 Cell line | Breast | Cell Line | | Uni-ZAP XR |
| H0144 | Nine Week Old Early Stage Human | 9 Wk Old Early Stage Human | Embryo | | | Uni-ZAP XR |
| H0147 | Human Adult Liver | Human Adult Liver | Liver | | | Uni-ZAP XR |
| H0149 | 7 Week Old Early Stage Human, subtracted | Human Whole 7 Week Old | Embryo | | | Uni-ZAP XR |
| | | Embryo | | | | |
| H0150 | Human Epididymus | Epididymis | Testis | | | Uni-ZAP XR |
| H0151 | Early Stage Human Liver | Human Fetal Liver | Liver | | | Uni-ZAP XR |
| H0152 | Early Stage Human Liver, fract (II) | Human Fetal Liver | Liver | | | Uni-ZAP XR |
| H0154 | Human Fibrosarcoma | Human Skin Fibrosarcoma | Skin | | disease | Uni-ZAP XR |
| H0155 | Human Thymus, subtracted | Human Thymus Tumor | Thymus | | | pBluescript |
| H0156 | Human Adrenal Gland Tumor | Human Adrenal Gland Tumor | Adrenal | | disease | Uni-ZAP XR |
| | | | Gland | | | |
| H0157 | Activated T-Cells, 0 hrs, ligation 2 | Activated T-Cells | Blood | Cell Line | | Uni-ZAP XR |
| H0158 | Activated T-Cells, 4 hrs., ligation 2 | Activated T-Cells | Blood | Cell Line | | Uni-ZAP XR |
| H0159 | Activated T-Cells, 8 hrs., ligation 2 | Activated T-Cells | Blood | Cell Line | | Uni-ZAP XR |
| H0163 | Human Synovium | Human Synovium | Synovium | | | Uni-ZAP XR |
| H0164 | Human Trachea Tumor | Human Trachea Tumor | Trachea | | disease | Uni-ZAP XR |
| H0165 | Human Prostate Cancer, Stage B2 | Human Prostate Cancer, | Prostate | | disease | Uni-ZAP XR |
| | | stage B2 | | | | |
| H0166 | Human Prostate Cancer, Stage B2 fraction | Human Prostate Cancer, | Prostate | | disease | Uni-ZAP XR |
| | | stage B2 | | | | |
| H0167 | Activated T-Cells, 24 hrs. | Activated T-Cells | Blood | Cell Line | | Uni-ZAP XR |
| H0168 | Human Prostate Cancer, Stage C | Human Prostate Cancer, stage C | Prostate | | disease | Uni-ZAP XR |
| H0169 | Human Prostate Cancer, Stage C fraction | Human Prostate Cancer, stage C | Prostate | | disease | Uni-ZAP XR |
| H0170 | 12 Week Old Early Stage Human | Twelve Week Old Early Stage | Embryo | | | Uni-ZAP XR |
| | | Human | | | | |
| H0171 | 12 Week Old Early Stage Human, II | Twelve Week Old Early Stage | Embryo | | | Uni-ZAP XR |
| | | Human | | | | |
| H0172 | Human Fetal Brain, random primed | Human Fetal Brain | Brain | | | Lambda ZAP II |
| H0173 | Human Cardiomyopathy, RNA remake | Human Cardiomyopathy | Heart | | disease | Uni-ZAP XR |
| H0175 | H. Adult Spleen, ziplox | | | | | pSport1 |
| H0176 | CAMA1Ee Cell Line | CAMA1Ee Cell Line | Breast | Cell Line | | Uni-ZAP XR |
| H0177 | CAMA1Ee Cell Line | CAMA1Ee Cell Line | Breast | Cell Line | | Uni-ZAP XR |
| H0178 | Human Fetal Brain | Human Fetal Brain | Brain | | | Uni-ZAP XR |
| H0179 | Human Neutrophil | Human Neutrophil | Blood | Cell Line | | Uni-ZAP XR |
| H0181 | Human Primary Breast Cancer | Human Primary Breast Cancer | Breast | | disease | Uni-ZAP XR |
| H0182 | Human Primary Breast Cancer | Human Primary Breast Cancer | Breast | | disease | Uni-ZAP XR |
| H0183 | Human Colon Cancer | Human Colon Cancer | Colon | | disease | Uni-ZAP XR |
| H0184 | Human Colon Cancer, metasticized to live | Human Colon Cancer, | Liver | | disease | Lambda ZAP II |
| | | metasticized to liver | | | | |
| H0185 | Activated T-Cell labeled with 4-thioluri | T-Cells | Blood | Cell Line | | Lambda ZAP II |
| H0186 | Activated T-Cell | T-Cells | Blood | Cell Line | | Lambda ZAP II |
| H0187 | Resting T-Cell | T-Cells | Blood | Cell Line | | Lambda ZAP II |
| H0188 | Human Normal Breast | Human Normal Breast | Breast | | | Uni-ZAP XR |
| H0189 | Human Resting Macrophage | Human Macrophage/Monocytes | Blood | Cell Line | | Uni-ZAP XR |
| H0190 | Human Activated Macrophage (LPS) | Human Macrophage/Monocytes | Blood | Cell Line | | Uni-ZAP XR |
| H0191 | Human Activated Macrophage (LPS), thiour | Human Macrophage/Monocytes | Blood | Cell Line | | Uni-ZAP XR |
| H0192 | Cem Cells, cyclohexamide treated, subtra | Cyclohexamide Treated Cem, | Blood | Cell Line | | Uni-ZAP XR |
| | | Jurkat, Raji, and Supt | | | | |
| H0193 | Cem Cells, cyclohexamide treated, differ | Cyclohexamide Treated Cem, | Blood | Cell Line | | Uni-ZAP XR |
| | | Jurkat, Raji, and Supt | | | | |
| H0194 | Human Cerebellum, subtracted | Human Cerebellum | Brain | | | pBluescript |
| H0196 | Human Cardiomyopathy, subtracted | Human Cardiomyopathy | Heart | | | Uni-ZAP XR |
| H0197 | Human Fetal Liver, subtracted | Human Fetal Liver | Liver | | | Uni-ZAP XR |
| H0198 | Human Fetal Liver, subtracted, pos. clon | Human Fetal Liver | Liver | | | Uni-ZAP XR |
| H0199 | Human Fetal Liver, subtracted, neg clone | Human Fetal Liver | Liver | | | Uni-ZAP XR |
| H0200 | Human Greater Omentum, fract II remake, | Human Greater Omentum | peritoneum | | | Uni-ZAP XR |
| H0201 | Human Hippocampus, subtracted | Human Hippocampus | Brain | | | pBluescript |
| H0202 | Jurkat Cells, cyclohexamide treated, subtraction | Cyclohexamide Treated Cem, | Blood | Cell Line | | Uni-ZAP XR |
| | | Jurkat, Raji, and Supt | | | | |
| H0203 | Jurkat Cells, cyclohexamide treated, dif | Cyclohexamide Treated Cem, | Blood | Cell Line | | Uni-ZAP XR |
| | | Jurkat, Raji, and Supt | | | | |
| H0204 | Human Colon Cancer, subtracted | Human Colon Cancer | Colon | | | pBluescript |
| H0205 | Human Colon Cancer, differential | Human Colon Cancer | Colon | | | pBluescript |
| H0207 | LNCAP, differential expression | LNCAP Cell Line | Prostate | Cell Line | | pBluescript |
| H0208 | Early Stage Human Lung, subtracted | Human Fetal Lung | Lung | | | pBluescript |
| H0209 | Human Cerebellum, differentially expressed | Human Cerebellum | Brain | | | Uni-ZAP XR |
| H0211 | Human Prostate, differential expression | Human Prostate | Prostate | | | pBluescript |
| H0212 | Human Prostate, subtracted | Human Prostate | Prostate | | | pBluescript |
| H0213 | Human Pituitary, subtracted | Human Pituitary | | | | Uni-ZAP XR |
| H0214 | Raji cells, cyclohexamide treated, subtracted | Cyclohexamide Treated Cem, | Blood | Cell Line | | pBluescript |
| | | Jurkat, Raji, and Supt | | | | |
| H0215 | Raji cells, cyclohexamide treated, differentially | Cyclohexamide Treated Cem, | Blood | Cell Line | | pBluescript |
| | expressed | Jurkat, Raji, and Supt | | | | |
| H0216 | Supt cells, cyclohexamide treated, subtracted | Cyclohexamide Treated Cem, | Blood | Cell Line | | pBluescript |
| | | Jurkat, Raji, and Supt | | | | |
| H0217 | Supt cells, cyclohexamide treated, differentially | Cyclohexamide Treated Cem, | Blood | Cell Line | | pBluescript |
| | expressed | Jurkat, Raji, and Supt | | | | |
| H0218 | Activated T-Cells, 0 hrs, subtracted | Activated T-Cells | Blood | Cell Line | | Uni-ZAP XR |
| H0219 | Activated T-Cells, 0 hrs, | Activated T-Cells | Blood | Cell Line | | Uni-ZAP XR |
| | differentially expressed | | | | | |
| H0220 | Activated T-Cells, 4 hrs, subtracted | Activated T-Cells | Blood | Cell Line | | Uni-ZAP XR |
| H0222 | Activated T-Cells, 8 hrs, subtracted | Activated T-Cells | Blood | Cell Line | | Uni-ZAP XR |
| H0224 | Activated T-Cells, 12 hrs, subtracted | Activated T-Cells | Blood | Cell Line | | Uni-ZAP XR |
| H0225 | Activated T-Cells, 12 hrs, differentially | Activated T-Cells | Blood | Cell Line | | Uni-ZAP XR |
| | expressed | | | | | |
| H0228 | C7MCF7 cell line, estrogen treated | C7MCF7 Cell Line, estrogen | Breast | Cell Line | | Uni-ZAP XR |
| | | treated | | | | |
| H0229 | Early Stage Human Brain, random primed | Early Stage Human Brain | Brain | | | Lambda ZAP II |
| H0230 | Human Cardiomyopathy, diff exp | Human Cardiomyopathy | Heart | | disease | Uni-ZAP XR |
| H0231 | Human Colon, subtraction | Human Colon | | | | pBluescript |
| H0232 | Human Colon, differential expression | Human Colon | | | | pBluescript |
| H0233 | Human Fetal Heart, Differential | Human Fetal Heart | Heart | | | pBluescript |
| | (Adult-Specific) | | | | | |
| H0234 | human colon cancer, metastatic to liver, | Human Colon Cancer, | Liver | | | pBluescript |
| | differentially expressed | metasticized to liver | | | | |
| H0235 | Human colon cancer, metaticized to liver, | Human Colon Cancer, | Liver | | | pBluescript |
| | subtraction | metasticized to liver | | | | |
| H0239 | Human Kidney Tumor | Human Kidney Tumor | Kidney | | disease | Uni-ZAP XR |
| H0241 | C7MCF7 cell line, estrogen treated, subtraction | C7MCF7 Cell Line, estrogen | Breast | Cell Line | | Uni-ZAP XR |
| | | treated | | | | |
| H0242 | Human Fetal Heart, Differential | Human Fetal Heart | Heart | | | pBluescript |
| | (Fetal-Specific) | | | | | |
| H0244 | Human 8 Week Whole Embryo, subtracted | Human 8 Week Old Embryo | Embryo | | | Uni-ZAP XR |
| H0246 | Human Fetal Liver-Enzyme subtraction | Human Fetal Liver | Liver | | | Uni-ZAP XR |
| H0247 | Human Membrane Bound Polysomes-Enzyme | Human Membrane Bound | Blood | Cell Line | | Uni-ZAP XR |
| | Subtraction | Polysomes | | | | |
| H0249 | HE7, subtracted by hybridization with E7 | Human Whole 7 Week Old | Embryo | | | Uni-ZAP XR |
| | cDNA | Embryo | | | | |
| H0250 | Human Activated Monocytes | Human Monocytes | | | | Uni-ZAP XR |
| H0251 | Human Chondrosarcoma | Human Chondrosarcoma | Cartilage | | disease | Uni-ZAP XR |
| H0252 | Human Osteosarcoma | Human Osteosarcoma | Bone | | disease | Uni-ZAP XR |
| H0253 | Human adult testis, large inserts | Human Adult Testis | Testis | | | Uni-ZAP XR |
| H0254 | Breast Lymph node cDNA library | Breast Lymph Node | Lymph Node | | | Uni-ZAP XR |
| H0255 | breast lymph node CDNA library | Breast Lymph Node | Lymph Node | | | Lambda ZAP II |
| H0256 | HL-60, unstimulated | Human HL-60 Cells, | Blood | Cell Line | | Uni-ZAP XR |
| | | unstimulated | | | | |
| H0257 | HL-60, PMA 4 H | HL-60 Cells, PMA | Blood | Cell Line | | Uni-ZAP XR |
| | | stimulated 4 H | | | | |
| H0261 | H. cerebellum, Enzyme subtracted | Human Cerebellum | Brain | | | Uni-ZAP XR |
| H0263 | human colon cancer | Human Colon Cancer | Colon | | disease | Lambda ZAP II |
| H0264 | human tonsils | Human Tonsil | Tonsil | | | Uni-ZAP XR |
| H0265 | Activated T-Cell (12 hs)/Thiouridine | T-Cells | Blood | Cell Line | | Uni-ZAP XR |
| | labelledEco | | | | | |
| H0266 | Human Microvascular Endothelial Cells, | HMEC | Vein | Cell Line | | Lambda ZAP II |
| | fract. A | | | | | |
| H0267 | Human Microvascular Endothelial Cells, | HMEC | Vein | Cell Line | | Lambda ZAP II |
| | fract. B | | | | | |
| H0268 | Human Umbilical Vein Endothelial Cells, | HUVE Cells | Umbilical | Cell Line | | Lambda ZAP II |
| | fract. A | | vein | | | |
| H0269 | Human Umbilical Vein Endothelial Cells, | HUVE Cells | Umbilical | Cell Line | | Lambda ZAP II |
| | fract. B | | vein | | | |
| H0270 | HPAS (human pancreas, subtracted) | Human Pancreas | Pancreas | | | Uni-ZAP XR |
| H0271 | Human Neutrophil, Activated | Human Neutrophil —Activated | Blood | Cell Line | | Uni-ZAP XR |
| H0272 | HUMAN TONSILS, FRACTION 2 | Human Tonsil | Tonsil | | | Uni-ZAP XR |
| H0274 | Human Adult Spleen, fractionII | Human Adult Spleen | Spleen | | | Uni-ZAP XR |
| H0275 | Human Infant Adrenal Gland, Subtracted | Human Infant Adrenal Gland | Adrenal | | | pBluescript |
| | | | gland | | | |
| H0279 | K562 cells | K562 Cell line | cell line | Cell Line | | ZAP Express |
| H0280 | K562 + PMA (36 hrs) | K562 Cell line | cell line | Cell Line | | ZAP Express |
| H0281 | Lymph node, abnorm. cell line (ATCC #7225) | Lymph Node, abnormal cell line | Lymph Node | Cell Line | | ZAP Express |
| H0282 | HBGB″s differential consolidation | Human Primary Breast Cancer | Breast | | | Uni-ZAP XR |
| H0284 | Human OB MG63 control fraction I | Human Osteoblastoma | Bone | Cell Line | | Uni-ZAP XR |
| | | MG63 cell line | | | | |
| H0286 | Human OB MG63 treated (10 nM E2) | Human Osteoblastoma | Bone | Cell Line | | Uni-ZAP XR |
| | fraction I | MG63 cell line | | | | |
| H0288 | Human OB HOS control fraction I | Human Osteoblastoma HOS cell | Bone | Cell Line | | Uni-ZAP XR |
| | | line | | | | |
| H0290 | Human OB HOS treated (1 nM E2) fraction I | Human Osteoblastoma HOS cell | Bone | Cell Line | | Uni-ZAP XR |
| | | line | | | | |
| H0292 | Human OB HOS treated (10 nM E2) fraction I | Human Osteoblastoma HOS cell | Bone | Cell Line | | Uni-ZAP XR |
| | | line | | | | |
| H0293 | WI 38 cells | | | | | Uni-ZAP XR |
| H0294 | Amniotic Cells - TNF induced | Amniotic Cells - TNF | Placenta | Cell Line | | Uni-ZAP XR |
| | | induced | | | | |
| H0295 | Amniotic Cells - Primary Culture | Amniotic Cells - Primary | Placenta | Cell Line | | Uni-ZAP XR |
| | | Culture | | | | |
| H0298 | HCBB″s differential consolidation | CAMA1Ee Cell Line | Breast | Cell Line | | Uni-ZAP XR |
| H0299 | HCBA″s differential consolidation | CAMA1Ee Cell Line | Breast | Cell Line | | Uni-ZAP XR |
| H0300 | CD34 positive cells (Cord Blood) | CD34 Positive Cells | Cord Blood | | | ZAP Express |
| H0305 | CD34 positive cells (Cord Blood) | CD34 Positive Cells | Cord Blood | | | ZAP Express |
| H0306 | CD34 depleted Buffy Coat (Cord Blood) | CD34 Depleted Buffy | Cord Blood | | | ZAP Express |
| | | Coat (Cord Blood) | | | | |
| H0309 | Human Chronic Synovitis | Synovium, Chronic Synovitis/ | Synovium | | disease | Uni-ZAP XR |
| | | Osteoarthritis | | | | |
| H0310 | human caudate nucleus | Brain | Brain | | | Uni-ZAP XR |
| H0313 | human pleural cancer | pleural cancer | | | disease | pBluescript |
| H0316 | HUMAN STOMACH | Human Stomach | Stomach | | | Uni-ZAP XR |
| H0318 | HUMAN B CELL LYMPHOMA | Human B Cell Lymphoma | Lymph Node | | disease | Uni-ZAP XR |
| H0320 | Human frontal cortex | Human Frontal Cortex | Brain | | | Uni-ZAP XR |
| H0321 | HUMAN SCHWANOMA | Schwanoma | Nerve | | disease | Uni-ZAP XR |
| H0327 | human corpus colosum | Human Corpus Callosum | Brain | | | Uni-ZAP XR |
| H0328 | human ovarian cancer | Ovarian Cancer | Ovary | | disease | Uni-ZAP XR |
| H0329 | Dermatofibrosarcoma Protuberance | Dermatofibrosarcoma | Skin | | disease | Uni-ZAP XR |
| | | Protuberans | | | | |
| H0330 | HCBB″s Subtractive (- mito genes) | CAMA1Ee Cell Line | Breast | Cell Line | | Uni-ZAP XR |
| H0331 | Hepatocellular Tumor | Hepatocellular Tumor | Liver | | disease | Lambda ZAP II |
| H0333 | Hemangiopericytoma | Hemangiopericytoma | Blood vessel | | disease | Lambda ZAP II |
| H0334 | Kidney cancer | Kidney Cancer | Kidney | | disease | Uni-ZAP XR |
| H0339 | Duodenum | Duodenum | | | | Uni-ZAP XR |
| H0340 | Corpus Callosum | Corpus Collosum-93052 | | | | Uni-ZAP XR |
| H0341 | Bone Marrow Cell Line (RS4; 11) | Bone Marrow Cell Line RS4; 11 | Bone | Cell Line | | Uni-ZAP XR |
| | | | Marrow | | | |
| H0342 | Lingual Gyrus | Lingual Gyrus | Brain | | | Uni-Zap XR |
| H0343 | stomach cancer (human) | Stomach Cancer - 5383A | | | disease | Uni-ZAP XR |
| | | (human) | | | | |
| H0344 | Adipose tissue (human) | Adipose - 6825A (human) | | | | Uni-ZAP XR |
| H0345 | SKIN | Skin - 4000868H | Skin | | | Uni-ZAP XR |
| H0346 | Brain-medulloblastoma | Brain (Medulloblastoma)- | Brain | | disease | Uni-ZAP XR |
| | | 9405C006R | | | | |
| H0349 | human adult liver cDNA library | Human Adult Liver | Liver | | | pCMVSport 1 |
| H0350 | Human Fetal Liver, mixed 10 & 14 week | Human Fetal Liver, | Liver | | | Uni-ZAP XR |
| | | mixed 10&14 | | | | |
| | | Week | | | | |
| H0351 | Glioblastoma | Glioblastoma | Brain | | disease | Uni-ZAP XR |
| H0352 | wilm″s tumor | Wilm″s Tumor | | | disease | Uni-ZAP XR |
| H0354 | Human Leukocytes | Human Leukocytes | Blood | Cell Line | | pCMVSport 1 |
| H0355 | Human Liver | Human Liver, normal Adult | | | | pCMVSport 1 |
| H0356 | Human Kidney | Human Kidney | Kidney | | | pCMVSport 1 |
| H0357 | H. Normalized Fetal Liver, II | Human Fetal Liver | Liver | | | Uni-ZAP XR |
| H0359 | KMH2 cell line | KMH2 | | | | ZAP Express |
| H0360 | Hemangiopericytoma | Hemangiopericytoma | | | disease | |
| H0361 | Human rejected kidney | Human Rejected Kidney | | | disease | pBluescript |
| H0362 | HeLa cell line | HELA CELL LINE | | | | pSport1 |
| H0363 | Human Brain Medulla, subtracted | Human Brain Medulla | | | | pBluescript |
| H0364 | Human Osteoclastoma, excised | Human Osteoclastoma | | | disease | pBluescript |
| H0365 | Osteoclastoma-normalized B | Human Osteoclastoma | | | disease | Uni-ZAP XR |
| H0366 | L428 cell line | L428 | | | | ZAP Express |
| H0369 | H. Atrophic Endometrium | Atrophic Endometrium and | | | | Uni-ZAP XR |
| | | myometrium | | | | |
| H0370 | H. Lymph node breast Cancer | Lymph node with Met. Breast | | | disease | Uni-ZAP XR |
| | | Cancer | | | | |
| H0371 | Eosinophils-Hypereosinophilia patient | Eosinophils-Hypereosinophilia | | | disease | Uni-ZAP XR |
| | | patient | | | | |
| H0372 | Human Testes | Human Testes | Testis | | | pCMVSport 1 |
| H0373 | Human Heart | Human Adult Heart | Heart | | | pCMVSport 1 |
| H0374 | Human Brain | Human Brain | | | | pCMVSport 1 |
| H0375 | Human Lung | Human Lung | | | | pCMVSport 1 |
| H0376 | Human Spleen | Human Adult Spleen | Spleen | | | pCMVSport 1 |
| H0379 | Human Tongue, frac 1 | Human Tongue | | | | pSport1 |
| H0380 | Human Tongue, frac 2 | Human Tongue | | | | pSport1 |
| H0381 | Bone Cancer | Bone Cancer | | | disease | Uni-ZAP XR |
| H0383 | Human Prostate BPH, re-excision | Human Prostate BPH | | | | Uni-ZAP XR |
| H0384 | Brain, Kozak | Human Brain | | | | pCMVSport 1 |
| H0385 | H. Leukocytes, Kozak | Human Leukocytes | Blood | Cell Line | | pCMVSport 1 |
| H0386 | Leukocyte and Lung; 4 screens | Human Leukocytes | Blood | Cell Line | | pCMVSport 1 |
| H0388 | Human Rejected Kidney, 704 re-excision | Human Rejected Kidney | | | disease | pBluescript |
| H0389 | H. Brain, X-Chromosome hybridization | Human Brain | | | | pCMVSport 1 |
| H0390 | Human Amygdala Depression, re-excision | Human Amygdala Depression | | | disease | pBluescript |
| H0391 | H. Meniingima, M6 | Human Meningima | brain | | | pSport1 |
| H0392 | H. Meningima, M1 | Human Meningima | brain | | | pSport1 |
| H0393 | Fetal Liver, subtraction II | Human Fetal Liver | Liver | | | pBluescript |
| H0394 | A-14 cell line | Redd-Sternberg cell | | | | ZAP Express |
| H0395 | A1-CELL LINE | Redd-Sternberg cell | | | | ZAP Express |
| H0396 | L1 Cell line | Redd-Sternberg cell | | | | ZAP Express |
| H0398 | Human Newborn Bladder | Human Newborn Bladder | | | | pBluescript |
| H0399 | Human Kidney Cortex, re-rescue | Human Kidney Cortex | | | | Lambda ZAP II |
| H0400 | Human Striatum Depression, re-rescue | Human Brain, Striatum | Brain | | | Lambda ZAP II |
| | | Depression | | | | |
| H0401 | Human Pituitary, subtracted V | Human Pituitary | | | | pBluescript |
| H0402 | CD34 depleted Buffy Coat (Cord Blood), re- | CD34 Depleted Buffy | Cord Blood | | | ZAP Express |
| | excision | Blood) | Coat (Cord | | | |
| H0403 | H. Umbilical Vein Endothelial Cells, | HUVE Cells | Umbilical | Cell Line | | Uni-ZAP XR |
| | IL4 induced | | vein | | | |
| H0404 | H. Umbilical Vein endothelial cells, uninduced | HUVE Cells | Umbilical | Cell Line | | Uni-ZAP XR |
| | | | vein | | | |
| H0405 | Human Pituitary, subtracted VI | Human Pituitary | | | | pBluescript |
| H0406 | H Amygdala Depression, subtracted | Human Amygdala Depression | | | | Uni-ZAP XR |
| H0408 | Human kidney Cortex, subtracted | Human Kidney Cortex | | | | pBluescript |
| H0409 | H. Striatum Depression, subtracted | Human Brain, Striatum | Brain | | | pBluescript |
| | | Depression | | | | |
| H0410 | H. Male bladder, adult | H Male Bladder, Adult | Bladder | | | pSport1 |
| H0411 | H Female Bladder, Adult | Human Female Adult Bladder | Bladder | | | pSport1 |
| H0412 | Human umbilical vein endothelial cells, IL-4 | HUVE Cells | Umbilical | Cell Line | | pSport1 |
| | induced | | vein | | | |
| H0413 | Human Umbilical Vein Endothelial Cells, | HUVE Cells | Umbilical | Cell Line | | pSport1 |
| | uninduced | | vein | | | |
| H0414 | Ovarian Tumor I, OV5232 | Ovarian Tumor, OV5232 | Ovary | | disease | pSport1 |
| H0415 | H. Ovarian Tumor, II, OV5232 | Ovarian Tumor, OV5232 | Ovary | | disease | pCMVSport 2.0 |
| H0416 | Human Neutrophils, Activated, re-excision | Human Neutrophil - Activated | Blood | Cell Line | | pBluescript |
| H0417 | Human Pituitary, subtracted VIII | Human Pituitary | | | | pBluescript |
| H0418 | Human Pituitary, subtracted VII | Human Pituitary | | | | pBluescript |
| H0419 | Bone Cancer, re-excision | Bone Cancer | | | | Uni-ZAP XR |
| H0421 | Human Bone Marrow, re-excision | Bone Marrow | | | | pBluescript |
| H0422 | T-Cell PHA 16 hrs | T-Cells | Blood | Cell Line | | pSport1 |
| H0423 | T-Cell PHA 24 hrs | T-Cells | Blood | Cell Line | | pSport1 |
| H0424 | Human Pituitary, subt IX | Human Pituitary | | | | pBluescript |
| H0427 | Human Adipose | Human Adipose, left hiplipoma | | | | pSport1 |
| H0428 | Human Ovary | Human Ovary Tumor | Ovary | | | pSport1 |
| H0429 | K562 + PMA (36 hrs), re-excision | K562 Cell line | cell line | Cell Line | | ZAP Express |
| H0431 | H. Kidney Medulla, re-excision | Kidney medulla | Kidney | | | pBluescript |
| H0432 | H. Kidney Pyramid | Kidney pyramids | Kidney | | | pBluescript |
| H0433 | Human Umbilical Vein Endothelial cells, | HUVE Cells | Umbilical | Cell Line | | pBluescript |
| | frac B, re-excision | | vein | | | |
| H0434 | Human Brain, striatum, re-excision | Human Brain, Striatum | | | | pBluescript |
| H0435 | Ovarian Tumor Oct. 3, 1995 | Ovarian Tumor, OV350721 | Ovary | | | pCMVSport 2.0 |
| H0436 | Resting T-Cell Library, II | T-Cells | Blood | Cell Line | | pSport1 |
| H0437 | H Umbilical Vein Endothelial Cells, frac A, re- | HUVE Cells | Umbilical | Cell Line | | Lambda ZAP II |
| | excision | | vein | | | |
| H0438 | H. Whole Brain #2, re-excision | Human Whole Brain #2 | | | | ZAP Express |
| H0439 | Human Eosinophils | Eosinophils | | | | pBluescript |
| H0440 | FGF enriched mixed library | Mixed libraries | | | | pCMVSport 1 |
| H0441 | H. Kidney Cortex, subtracted | Kidney cortex | Kidney | | | pBluescript |
| H0442 | H. Striatum Depression, subt II | Human Brain, Striatum | Brain | | | pBluescript |
| | | Depression | | | | |
| H0443 | H. Adipose, subtracted | Human Adipose, left hiplipoma | | | | pSport1 |
| H0444 | Spleen metastic melanoma | Spleen, Metastic malignant | Spleen | | disease | pSport1 |
| | | melanoma | | | | |
| H0445 | Spleen, Chronic lymphocytic leukemia | Human Spleen, CLL | Spleen | | disease | pSport1 |
| H0447 | Salivary gland, re-excision | Human Salivary Gland | Salivary | | | Uni-ZAP XR |
| | | | gland | | | |
| H0448 | Salivary gland, subtracted | Human Salivary Gland | Salivary | | | Lambda ZAP II |
| | | | gland | | | |
| H0449 | CD34+ cell, I | CD34 positive cells | | | | pSport1 |
| H0450 | CD34+cells, II | CD34 positive cells | | | | pCMVSport 2.0 |
| H0453 | H. Kidney Pyramid, subtracted | Kidney pyramids | Kidney | | | pBluescript |
| H0455 | H. Striatum Depression, subt | Human Brain, Striatum | Brain | | | pBluescript |
| | | Depression | | | | |
| H0456 | H Kidney Cortex, subtracted III | Human Kidney Cortex | | | | pBluescript |
| H0457 | Human Eosinophils | Human Eosinophils | | | | pSport1 |
| H0458 | CD34+ cell, I, frac II | CD34 positive cells | | | | pSport1 |
| H0459 | CD34+cells, II, FRACTION 2 | CD34 positive cells | | | | pCMVSport 2.0 |
| H0461 | H. Kidney Medulla, subtracted | Kidney medulla | Kidney | | | pBluescript |
| H0462 | H. Amygdala Depression, subtracted | | Brain | | | pBluescript |
| H0477 | Human Tonsil, Lib 3 | Human Tonsil | Tonsil | | | pSport1 |
| H0478 | Salivary Gland, Lib 2 | Human Salivary Gland | Salivary | | | pSport1 |
| | | | gland | | | |
| H0479 | Salivary Gland, Lib 3 | Human Salivary Gland | Salivary | | | pSport1 |
| | | | gland | | | |
| H0480 | L8 cell line | L8 cell line | | | | ZAP Express |
| H0483 | Breast Cancer cell line, MDA 36 | Breast Cancer Cell line, | | | | pSport1 |
| | | MDA 36 | | | | |
| H0484 | Breast Cancer Cell line, angiogenic | Breast Cancer | | | | pSport1 |
| | | Cell line, Angiogenic, 3 6T3 | | | | |
| H0485 | Hodgkin″s Lymphoma I | Hodgkin″s Lymphoma I | | | disease | pCMVSport 2.0 |
| H0486 | Hodgkin″s Lymphoma II | Hodgkin″s Lymphoma II | | | disease | pCMVSport 2.0 |
| H0487 | Human Tonsils, lib I | Human Tonsils | | | | pCMVSport 2.0 |
| H0488 | Human Tonsils, Lib 2 | Human Tonsils | | | | pCMVSport 2.0 |
| H0489 | Crohn″Disease | Ileum | Intestine | | disease | pSport1 |
| H0490 | H1-60, untreated, subtracted | Human HL-60 Cells, | Blood | Cell Line | | Uni-ZAP XR |
| | | unstimulated | | | | |
| H0491 | HL-60, PMA 4 H, subtracted | HL-60 Cells, PMA | Blood | Cell Line | | Uni-ZAP XR |
| | | stimulated 4 H | | | | |
| H0492 | HL-60, RA 4 h, Subtracted | HL-60 Cells, RA stimulated for | Blood | Cell Line | | Uni-ZAP XR |
| | | 4 H | | | | |
| H0493 | HL-60, PMA 1d, subtracted | HL-60 Cells, PMA | Blood | Cell Line | | Uni-ZAP XR |
| | | stimulated for | | | | |
| | | 1 day | | | | |
| H0494 | Keratinocyte | Keratinocyte | | | | pCMVSport 2.0 |
| H0497 | HEL cell line | HEL cell line | | HEL | | pSport1 |
| | | | | 92.1.7 | | |
| H0505 | Human Astrocyte | Human Astrocyte | | | | pSport1 |
| H0506 | Ulcerative Colitis | Colon | Colon | | | pSport1 |
| H0509 | Liver, Hepatoma | Human Liver, Hepatoma, | Liver | | disease | pCMVSport 3.0 |
| | | patient 8 | | | | |
| H0510 | Human Liver, normal | Human Liver, normal, | Liver | | | pCMVSport 3.0 |
| | | Patient # 8 | | | | |
| H0512 | Keratinocyte, lib 3 | Keratinocyte | | | | pCMVSport 2.0 |
| H0517 | Nasal polyps | Nasal polyps | | | | pCMVSport 2.0 |
| H0518 | pBMC stimulated w/ poly I/C | pBMC stimulated with poly I/C | | | | pCMVSport 3.0 |
| H0519 | NTERA2, control | NTERA2, Teratocarcinoma cell | | | | pCMVSport 3.0 |
| | | line | | | | |
| H0520 | NTERA2 + retinoic acid, 14 days | NTERA2, Teratocarcinoma cell | | | | pSport1 |
| | | line | | | | |
| H0521 | Primary Dendritic Cells, lib 1 | Primary Dendritic cells | | | | pCMVSport 3.0 |
| H0522 | Primary Dendritic cells, frac 2 | Primary Dendritic cells | | | | pCMVSport 3.0 |
| H0523 | Primary Dendritic cells, CapFinder2, frac 1 | Primary Dendritic cells | | | | pSport1 |
| H0524 | Primary Dendritic Cells, CapFinder, frac 2 | Primary Dendritic cells | | | | pSport1 |
| H0525 | PCR, pBMC I/C treated | pBMC stimulated with poly I/C | | | | PCRII |
| H0528 | Poly[I]/Poly[C] Normal Lung Fibroblasts | Poly[I]/Poly[C] Normal Lung | | | | pCMVSport 3.0 |
| | | Fibroblasts | | | | |
| H0529 | Myoloid Progenitor Cell Line | IF-1 Cell Line; Myoloid | | | | pCMVSport 3.0 |
| | | progenitor cell line | | | | |
| H0530 | Human Dermal Endothelial Cells, untreated | Human Dermal | | | | pSport1 |
| | | Endothelial Cells; | | | | |
| | | untreated | | | | |
| H0535 | Human ovary tumor cell OV350721 | Ovarian Tumor, OV350721 | Ovary | | disease | pSport1 |
| H0537 | H. Primary Dendritic Cells, lib 3 | Primary Dendritic cells | | | | pCMVSport 2.0 |
| H0538 | Merkel Cells | Merkel cells | Lymph node | | | pSport1 |
| H0539 | Pancreas Islet Cell Tumor | Pancreas Islet Cell Tumour | Pancreas | | disease | pSport1 |
| H0540 | Skin, burned | Skin, leg burned | Skin | | | pSport1 |
| H0542 | T Cell helper I | Helper T cell | | | | pCMVSport 3.0 |
| H0543 | T cell helper II | Helper T cell | | | | pCMVSport 3.0 |
| H0544 | Human endometrial stromal cells | Human endometrial stromal cells | | | | pCMVSport 3.0 |
| H0545 | Human endometrial stromal cells-treated with | Human endometrial stromal | | | | pCMVSport 3.0 |
| | progesterone | treated with proge | cells- | | | |
| H0546 | Human endometrial stromal cells-treated with | Human endometrial | | | | pCMVSport 3.0 |
| | estradiol | treated with estra | stromal cells- | | | |
| H0547 | NTERA2 teratocarcinoma cell line + retinoic | NTERA2, Teratocarcinoma cell | | | | pSport1 |
| | acid (14 days) | line | | | | |
| H0549 | H. Epididiymus, caput & corpus | Human Epididiymus, caput and | | | | Uni-ZAP XR |
| | | corpus | | | | |
| H0550 | H. Epididiymus, cauda | Human Epididiymus, cauda | | | | Uni-ZAP XR |
| H0551 | Human Thymus Stromal Cells | Human Thymus Stromal Cells | | | | pCMVSport 3.0 |
| H0552 | Signal trap, Femur Bone Marrow, pooled | Femur Bone marrow, | | | | Other |
| | | pooled from | | | | |
| | | 8 male/female | | | | |
| H0553 | Human Placenta | Human Placenta | | | | pCMVSport 3.0 |
| H0555 | Rejected Kidney, lib 4 | Human Rejected Kidney | Kidney | | disease | pCMVSport 3.0 |
| H0556 | Activated T-cell(12 h)/Thiouridine-re-excision | T-Cells | Blood | Cell Line | | Uni-ZAP XR |
| H0559 | HL-60, PMA 4 H, re-excision | HL-60 Cells, PMA | Blood | Cell Line | | Uni-ZAP XR |
| | | stimulated 4 H | | | | |
| H0560 | KMH2 | KMH2 | | | | pCMVSport 3.0 |
| H0561 | L428 | L428 | | | | pCMVSport 3.0 |
| H0562 | Human Fetal Brain, normalized c5-11-26 | Human Fetal Brain | | | | pCMVSport 2.0 |
| H0563 | Human Fetal Brain, normalized 50021F | Human Fetal Brain | | | | pCMVSport 2.0 |
| H0564 | Human Fetal Brain, normalized C5001F | Human Fetal Brain | | | | pCMVSport 2.0 |
| H0565 | HUman Fetal Brain, normalized 100024F | Human Fetal Brain | | | | pCMVSport 2.0 |
| H0566 | Human Fetal Brain, normalized c50F | Human Fetal Brain | | | | pCMVSport 2.0 |
| H0567 | Human Fetal Brain, normalized A5002F | Human Fetal Brain | | | | pCMVSport 2.0 |
| H0569 | Human Fetal Brain, normalized CO | Human Fetal Brain | | | | pCMVSport 2.0 |
| H0570 | Human Fetal Brain, normalized C500H | Human Fetal Brain | | | | pCMVSport 2.0 |
| H0571 | Human Fetal Brain, normalized C500HE | Human Fetal Brain | | | | pCMVSport 2.0 |
| H0572 | Human Fetal Brain, normalized AC5002 | Human Fetal Brain | | | | pCMVSport 2.0 |
| H0574 | Hepatocellular Tumor; re-excision | Hepatocellular Tumor | Liver | | disease | Lambda ZAP II |
| H0575 | Human Adult Pulmonary; re-excision | Human Adult Pulmonary | Lung | | | Uni-ZAP XR |
| H0576 | Resting T-Cell; re-excision | T-Cells | Blood | Cell Line | | Lambda ZAP II |
| H0578 | Human Fetal Thymus | Fetal Thymus | Thymus | | | pSport1 |
| H0579 | Pericardium | Pericardium | Heart | | | pSport1 |
| H0580 | Dendritic cells, pooled | Pooled dendritic cells | | | | pCMVSport 3.0 |
| H0581 | Human Bone Marrow, treated | Human Bone Marrow | Bone | | | pCMVSport 3.0 |
| | | | Marrow | | | |
| H0583 | B Cell lymphoma | B Cell Lymphoma | B Cell | | disease | pCMVSport 3.0 |
| H0584 | Activated T-cells, 24 hrs, re-excision | Activated T-Cells | Blood | Cell Line | | Uni-ZAP XR |
| H0585 | Activated T-Cells, 12 hrs, re-excision | Activated T-Cells | Blood | Cell Line | | Uni-ZAP XR |
| H0586 | Healing groin wound, 6.5 hours post incision | healing groin wound, 6.5 hours | groin | | disease | pCMVSport 3.0 |
| | | post incision —2/ | | | | |
| H0587 | Healing groin wound; 7.5 hours post incision | Groin-Feb. 19, 1997 | groin | | disease | pCMVSport 3.0 |
| H0589 | CD34 positive cells (cord blood), re-ex | CD34 Positive Cells | Cord Blood | | | ZAP Express |
| H0590 | Human adult small intestine, re-excision | Human Adult Small Intestine | Small Int. | | | Uni-ZAP XR |
| H0591 | Human T-cell lymphoma; re-excision | T-Cell Lymphoma | T-Cell | | disease | Uni-ZAP XR |
| H0592 | Healing groin wound - zero hr post-incision | HGS wound healing project; | | | disease | PCMVSport 3.0 |
| | (control) | abdomen | | | | |
| H0593 | Olfactory epithelium; nasalcavity | Olfactory epithelium | | | | pCMVSport 3.0 |
| | | from roof of | | | | |
| | | left nasal cacit | | | | |
| H0594 | Human Lung Cancer; re-excision | Human Lung Cancer | Lung | | disease | Lambda ZAP II |
| H0595 | Stomach cancer (human); re-excision | Stomach Cancer - | | | disease | Uni-ZAP XR |
| | | 5383A (human) | | | | |
| H0596 | Human Colon Cancer; re-excision | Human Colon Cancer | Colon | | | Lambda ZAP II |
| H0597 | Human Colon; re-excision | Human Colon | | | | Lambda ZAP II |
| H0598 | Human Stomach; re-excision | Human Stomach | Stomach | | | Uni-ZAP XR |
| H0599 | Human Adult Heart; re-excision | Human Adult Heart | Heart | | | Uni-ZAP XR |
| H0600 | Healing Abdomen wound; 70&90 min post | Abdomen | | | disease | pCMVSport 3.0 |
| | incision | | | | | |
| H0601 | Healing Abdomen Wound; 15 days post | Abdomen | | | disease | pCMVSport 3.0 |
| | incision | | | | | |
| H0602 | Healing Abdomen Wound; 21&29 days post | Abdomen | | | disease | pCMVSport 3.0 |
| | incision | | | | | |
| H0604 | Human Pituitary, re-excision | Human Pituitary | | | | pBluescript |
| H0606 | Human Primary Breast Cancer; re-excision | Human Primary Breast Cancer | Breast | | disease | Uni-ZAP XR |
| H0607 | H. Leukocytes, normalized cot 50A3 | H. Leukocytes | | | | pCMVSport 1 |
| H0608 | H. Leukocytes, control | H. Leukocytes | | | | pCMVSport 1 |
| H0609 | H. Leukocytes, normalized cot >500A | H. Leukocytes | | | | pCMVSport 1 |
| H0610 | H. Leukocytes, normalized cot 5A | H. Leukocytes | | | | pCMVSport 1 |
| H0611 | H. Leukocytes, normalized cot 500 B | H. Leukocytes | | | | pCMVSport 1 |
| H0612 | H. Leukocytes, normalized cot 50 B | H. Leukocytes | | | | pCMVSport 1 |
| H0613 | H. Leukocytes, normalized cot 5B | H. Leukocytes | | | | pCMVSport 1 |
| H0614 | H. Leukocytes, normalized cot 500 A | H. Leukocytes | | | | pCMVSport 1 |
| H0615 | Human Ovarian Cancer Reexcision | Ovarian Cancer | Ovary | | disease | Uni-ZAP XR |
| H0616 | Human Testes, Reexcision | Human Testes | Testis | | | Uni-ZAP XR |
| H0617 | Human Primary Breast Cancer Reexcision | Human Primary Breast Cancer | Breast | | disease | Uni-ZAP XR |
| H0618 | Human Adult Testes, Large Inserts, Reexcision | Human Adult Testis | Testis | | | Uni-ZAP XR |
| H0619 | Fetal Heart | Human Fetal Heart | Heart | | | Uni-ZAP XR |
| H0620 | Human Fetal Kidney; Reexcision | Human Fetal Kidney | Kidney | | | Uni-ZAP XR |
| H0622 | Human Pancreas Tumor; Reexcision | Human Pancreas Tumor | Pancreas | | disease | Uni-ZAP XR |
| H0623 | Human Umbilical Vein; Reexcision | Human Umbilical Vein | Umbilical | | | Uni-ZAP XR |
| | | Endothelial Cells | vein | | | |
| H0624 | 12 Week Early Stage Human II; Reexcision | Twelve Week Old Early Stage | Embryo | | | Uni-ZAP XR |
| | | Human | | | | |
| H0625 | Ku 812F Basophils Line | Ku 812F Basophils | | | | pSport1 |
| H0626 | Saos2 Cells; Untreated | Saos2 Cell Line; Untreated | | | | pSport1 |
| H0627 | Saos2 Cells; Vitamin D3 Treated | Saos2 Cell Line; Vitamin D3 | | | | pSport1 |
| | | Treated | | | | |
| H0628 | Human Pre-Differentiated Adipocytes | Human Pre-Differentiated | | | | Uni-ZAP XR |
| | | Adipocytes | | | | |
| H0629 | Human Leukocyte, control #2 | Human Normalized leukocyte | | | | pCMVSport 1 |
| H0630 | Human Leukocytes, normalized control #4 | Human Normalized leukocyte | | | | pCMVSport 1 |
| H0631 | Saos2, Dexamethosome Treated | Saos2 Cell Line; | | | | pSport1 |
| | | Dexamethosome | | | | |
| | | Treated | | | | |
| H0632 | Hepatocellular Tumor; re-excision | Hepatocellular Tumor | Liver | | | Lambda ZAP II |
| H0633 | Lung Carcinoma A549 TNFalpha activated | TNFalpha | | | disease | pSport1 |
| | | activated A549 - Lung | | | | |
| | | Carcinoma | | | | |
| H0634 | Human Testes Tumor, re-excision | Human Testes Tumor | Testis | | disease | Uni-ZAP XR |
| H0635 | Human Activated T-Cells, re-excision | Activated T-Cells | Blood | Cell Line | | Uni-ZAP XR |
| H0637 | Dendritic Cells From CD34 Cells | Dentritic cells from CD34 cells | | | | pSport1 |
| H0638 | CD40 activated monocyte dendridic cells | CD40 activated monocyte | | | | pSport1 |
| | | dendridic cells | | | | |
| H0639 | Ficolled Human Stromal Cells, 5Fu treated | Ficolled Human Stromal Cells, | | | | Other |
| | | 5Fu treated | | | | |
| H0640 | Ficolled Human Stromal Cells, Untreated | Ficolled Human Stromal Cells, | | | | Other |
| | | Untreated | | | | |
| H0641 | LPS activated derived dendritic cells | LPS activated monocyte derived | | | | pSport1 |
| | | dendritic cells | | | | |
| H0642 | Hep G2 Cells, lambda library | Hep G2 Cells | | | | Other |
| H0643 | Hep G2 Cells, PCR library | Hep G2 Cells | | | | Other |
| H0644 | Human Placenta (re-excision) | Human Placenta | Placenta | | | Uni-ZAP XR |
| H0645 | Fetal Heart, re-excision | Human Fetal Heart | Heart | | | Uni-ZAP XR |
| H0646 | Lung, Cancer (4005313 A3): Invasive Poorly | Metastatic squamous cell lung | | | | pSport1 |
| | Differentiated Lung Adenocarcinoma, | carcinoma, poorly di | | | | |
| H0647 | Lung, Cancer (4005163 B7): Invasive, Poorly | Invasive poorly differentiated | | | disease | pSport1 |
| | Diff. Adenocarcinoma, Metastatic | lung adenocarcinoma | | | | |
| H0648 | Ovary, Cancer: (4004562 B6) Papillary Serous | Papillary Cstic neoplasm of low | | | disease | pSport1 |
| | Cystic Neoplasm, Low Malignant Pot | malignant potentia | | | | |
| H0649 | Lung, Normal: (4005313 B1) | Normal Lung | | | | pSport1 |
| H0650 | B-Cells | B-Cells | | | | pCMVSport 3.0 |
| H0651 | Ovary, Normal: (9805C040R) | Normal Ovary | | | | pSport1 |
| H0652 | Lung, Normal: (4005313 B1) | Normal Lung | | | | pSport1 |
| H0653 | Stromal Cells | Stromal Cells | | | | pSport1 |
| H0654 | Lung, Cancer: (4005313 A3) Invasive Poorly- | Metastatic Squamous cell lung | | | | Other |
| | differentiated Metastatic lung adenoc | Carcinoma poorly dif | | | | |
| H0656 | B-cells (unstimulated) | B-cells (unstimulated) | | | | pSport1 |
| H0657 | B-cells (stimulated) | B-cells (stimulated) | | | | pSport1 |
| H0658 | Ovary, Cancer (9809C332): Poorly | 9809C332 - Poorly differentiate | Ovary & | | disease | pSport1 |
| | differentiated adenocarcinoma | | Fallopian | | | |
| | | | Tubes | | | |
| H0659 | Ovary, Cancer (15395A1F): Grade II Papillary | Grade II Papillary Carcinoma, | Ovary | | disease | pSport1 |
| | Carcinoma | Ovary | | | | |
| H0660 | Ovary, Cancer: (15799A1F) Poorly | Poorly differentiated carcinoma, | | | disease | pSport1 |
| | differentiated carcinoma | ovary | | | | |
| H0661 | Breast, Cancer: (4004943 A5) | Breast cancer | | | disease | pSport1 |
| H0662 | Breast, Normal: (4005522B2) | Normal Breast - #4005522(B2) | Breast | | | pSport1 |
| H0663 | Breast, Cancer: (4005522 A2) | Breast Cancer - #4005522(A2) | Breast | | disease | pSport1 |
| H0664 | Breast, Cancer: (9806C012R) | Breast Cancer | Breast | | disease | pSport1 |
| H0665 | Stromal cells 3.88 | Stromal cells 3.88 | | | | pSport1 |
| H0666 | Ovary, Cancer: (4004332 A2) | Ovarian Cancer, Sample | | | disease | pSport1 |
| | | #4004332A2 | | | | |
| H0667 | Stromal cells(HBM3.18) | Stromal cell(HBM 3.18) | | | | pSport1 |
| H0668 | stromal cell clone 2.5 | stromal cell clone 2.5 | | | | pSport1 |
| H0669 | Breast, Cancer: (4005385 A2) | Breast Cancer (4005385A2) | Breast | | | pSport1 |
| H0670 | Ovary, Cancer(4004650 A3): Well- | Ovarian Cancer - 4004650A3 | | | | pSport1 |
| | Differentiated Micropapillary | | | | | |
| | Serous Carcinoma | | | | | |
| H0671 | Breast, Cancer: (9802C02OE) | Breast Cancer-Sample # | | | | pSport1 |
| | | 9802C02OE | | | | |
| H0672 | Ovary, Cancer: (4004576 A8) | Ovarian Cancer(4004576A8) | Ovary | | | pSport1 |
| H0673 | Human Prostate Cancer, Stage B2; re-excision | Human Prostate Cancer, | Prostate | | | Uni-ZAP XR |
| | | stage B2 | | | | |
| H0674 | Human Prostate Cancer, Stage C; re-excission | Human Prostate Cancer, | Prostate | | | Uni-ZAP XR |
| | | stage C | | | | |
| H0675 | Colon, Cancer: (9808C064R) | Colon Cancer 9808C064R | | | | pCMVSport 3.0 |
| H0676 | Colon, Cancer: (9808C064R)-total RNA | Colon Cancer 9808C064R | | | | pCMVSport 3.0 |
| H0677 | TNFR degenerate oligo | B-Cells | | | | PCRII |
| H0678 | screened clones from placental library | Placenta | Placenta | | | Other |
| H0679 | screened clones from Tonsil library | Human Tonsils | | | | Other |
| H0682 | Serous Papillary Adenocarcinoma | serous papillary adenocarcinoma | | | | pCMVSport 3.0 |
| | | (9606G304SPA3B) | | | | |
| H0683 | Ovarian Serous Papillary Adenocarcinoma | Serous papillary | | | | pCMVSport 3.0 |
| | | adenocarcinoma, | | | | |
| | | stage 3C (9804G01 | | | | |
| H0684 | Serous Papillary Adenocarcinoma | Ovarian Cancer-9810G606 | Ovaries | | | pCMVSport 3.0 |
| H0685 | Adenocarcinoma of Ovary, Human Cell Line, # | Adenocarcinoma of Ovary, | | | | pCMVSport 3.0 |
| | OVCAR-3 | Human Cell Line, # OVCAR- | | | | |
| H0686 | Adenocarcinoma of Ovary, Human Cell Line | Adenocarcinoma of Ovary, | | | | pCMVSport 3.0 |
| | | Human Cell Line, # SW-626 | | | | |
| H0687 | Human normal ovary(#9610G215) | Human normal | Ovary | | | pCMVSport 3.0 |
| | | ovary(#9610G215) | | | | |
| H0688 | Human Ovarian Cancer(#9807G017) | Human Ovarian | | | | pCMVSport 3.0 |
| | | cancer(#9807G017), | | | | |
| | | mRNA from | | | | |
| | | Maura Ru | | | | |
| H0689 | Ovarian Cancer | Ovarian Cancer, #9806G019 | | | | pCMVSport 3.0 |
| H0690 | Ovarian Cancer, #9702G001 | Ovarian Cancer, #9702G001 | | | | pCMVSport 3.0 |
| H0691 | Normal Ovary, #9710G208 | normal ovary, #9710G208 | | | | pCMVSport 3.0 |
| H0692 | BLyS Receptor from Expression Cloning | B Cell Lymphoma | B Cell | | | pCMVSport 3.0 |
| H0693 | Normal Prostate #ODQ3958EN | Normal Prostate Tissue # | | | | pCMVSport 3.0 |
| | | ODQ3958EN | | | | |
| H0694 | Prostate gland adenocarcinoma | Prostate gland, adenocarcinoma, | prostate | | | pCMVSport 3.0 |
| | | mod/diff, gleason | gland | | | |
| H0695 | mononucleocytes from patient | mononucleocytes from patient at | | | | pCMVSport 3.0 |
| | | Shady Grove Hospit | | | | |
| N0006 | Human Fetal Brain | Human Fetal Brain | | | | |
| N0007 | Human Hippocampus | Human Hippocampus | | | | |
| N0009 | Human Hippocampus, prescreened | Human Hippocampus | | | | |
| N0011 | Human Brain | Human Brain | | | | |
| S0001 | Brain frontal cortex | Brain frontal cortex | Brain | | | Lambda ZAP II |
| S0002 | Monocyte activated | Monocyte-activated | blood | Cell Line | | Uni-ZAP XR |
| S0003 | Human Osteoclastoma | Osteoclastoma | bone | | disease | Uni-ZAP XR |
| S0004 | Prostate | Prostate BPH | Prostate | | | Lambda ZAP II |
| S0005 | Heart | Heart-left ventricle | Heart | | | pCDNA |
| S0006 | Neuroblastoma | Human Neural Blastoma | | | disease | pCDNA |
| S0007 | Early Stage Human Brain | Human Fetal Brain | | | | Uni-ZAP XR |
| S0010 | Human Amygdala | Amygdala | | | | Uni-ZAP XR |
| S0011 | STROMAL - OSTEOCLASTOMA | Osteoclastoma | bone | | disease | Uni-ZAP XR |
| S0013 | Prostate | Prostate | prostate | | | Uni-ZAP XR |
| S0014 | Kidney Cortex | Kidney cortex | Kidney | | | Uni-ZAP XR |
| S0015 | Kidney medulla | Kidney medulla | Kidney | | | Uni-ZAP XR |
| S0016 | Kidney Pyramids | Kidney pyramids | Kidney | | | Uni-ZAP XR |
| S0021 | Whole brain | Whole brain | Brain | | | ZAP Express |
| S0022 | Human Osteoclastoma Stromal Cells - | Osteoclastoma | | | | Uni-ZAP XR |
| | unamplified Stromal Cells | | | | | |
| S0024 | Human Kidney Medulla - unamplified | Human Kidney Medulla | | | | |
| S0025 | Human Kidney Pyramids - unamplified | Human Kidney Pyramids | | | | |
| S0026 | Stromal cell TF274 | stromal | Bone | Cell Line | | Uni-ZAP XR |
| | cell | | marrow | | | |
| S0027 | Smooth muscle, serum treated | Smooth muscle | Pulmanary | Cell Line | | Uni-ZAP XR |
| | | | artery | | | |
| S0028 | Smooth muscle, control | Smooth muscle | Pulmanary | Cell Line | | Uni-ZAP XR |
| | | | artery | | | |
| S0029 | brain stem | Brain stem | brain | | | Uni-ZAP XR |
| S0030 | Brain pons | Brain Pons | Brain | | | Uni-ZAP XR |
| S0031 | Spinal cord | Spinal cord | spinal cord | | | Uni-ZAP XR |
| S0032 | Smooth muscle-ILb induced | Smooth muscle | Pulmanary | Cell Line | | Uni-ZAP XR |
| | | | artery | | | |
| S0035 | Brain medulla oblongata | Brain medulla oblongata | Brain | | | Uni-ZAP XR |
| S0036 | Human Substantia Nigra | Human Substantia Nigra | | | | Uni-ZAP XR |
| S0037 | Smooth muscle, IL1b induced | Smooth muscle | Pulmanary | Cell Line | | Uni-ZAP XR |
| | | | artery | | | |
| S0038 | Human Whole Brain #2 —Oligo dT >1.5 Kb | Human Whole Brain #2 | | | | ZAP Express |
| S0039 | Hypothalamus | Hypothalamus | Brain | | | Uni-ZAP XR |
| S0040 | Adipocytes | Human Adipocytes from | | | | Uni-ZAP XR |
| | | Osteoclastoma | | | | |
| S0041 | Thalamus | Human Thalamus | | | | Uni-ZAP XR |
| S0042 | Testes | Human Testes | | | | ZAP Express |
| S0044 | Prostate BPH | prostate BPH | Prostate | | disease | Uni-ZAP XR |
| S0045 | Endothelial cells-control | Endothelial cell | endothelial | Cell Line | | Uni-ZAP XR |
| | | | cell-lung | | | |
| S0046 | Endothelial-induced | Endothelial cell | endothelial | Cell Line | | Uni-ZAP XR |
| | | | cell-lung | | | |
| S0048 | Human Hypothalamus, Alzheimer″s | Human Hypothalamus, | | | disease | Uni-ZAP XR |
| | | Alzheimer″s | | | | |
| S0049 | Human Brain, Striatum | Human Brain, Striatum | | | | Uni-ZAP XR |
| S0050 | Human Frontal Cortex, Schizophrenia | Human Frontal Cortex, | | | disease | Uni-ZAP XR |
| | | Schizophrenia | | | | |
| S0051 | Human Hypothalmus, Schizophrenia | Human Hypothalamus, | | | disease | Uni-ZAP XR |
| | | Schizophrenia | | | | |
| S0052 | neutrophils control | human neutrophils | blood | Cell Line | | Uni-ZAP XR |
| S0053 | Neutrophils IL-1 and LPS induced | human neutrophil induced | blood | Cell Line | | Uni-ZAP XR |
| S0106 | STRIATUM DEPRESSION | | BRAIN | | disease | Uni-ZAP XR |
| S0110 | Brain Amygdala Depression | | Brain | | disease | Uni-ZAP XR |
| S0112 | Hypothalamus | | Brain | | | Uni-ZAP XR |
| S0114 | Anergic T-cell | Anergic T-cell | | Cell Line | | Uni-ZAP XR |
| S0116 | Bone marrow | Bone marrow | Bone | | | Uni-ZAP XR |
| | | | marrow | | | |
| S0118 | Smooth muscle control 2 | Smooth muscle | Pulmanary | Cell Line | | Uni-ZAP XR |
| | | | artery | | | |
| S0122 | Osteoclastoma-normalized A | Osteoclastoma | bone | | disease | pBluescript |
| S0124 | Smooth muscle-edited A | Smooth muscle | Pulmanary | Cell Line | | Uni-ZAP XR |
| | | | artery | | | |
| S0126 | Osteoblasts | Osteoblasts | Knee | Cell Line | | Uni-ZAP XR |
| S0132 | Epithelial-TNFa and INF induced | Airway Epithelial | | | | Uni-ZAP XR |
| S0134 | Apoptotic T-cell | apoptotic cells | | Cell Line | | Uni-ZAP XR |
| S0136 | PERM TF274 | stromal cell | Bone | Cell Line | | Lambda ZAP II |
| | | | marrow | | | |
| S0140 | eosinophil-IL5 induced | eosinophil | lung | Cell Line | | Uni-ZAP XR |
| S0142 | Macrophage-oxLDL | macrophage-oxidized LDL | blood | Cell Line | | Uni-ZAP XR |
| | | treated | | | | |
| S0144 | Macrophage (GM-CSF treated) | Macrophage (GM-CSF treated) | | | | Uni-ZAP XR |
| S0146 | prostate-edited | prostate BPH | Prostate | | | Uni-ZAP XR |
| S0148 | Normal Prostate | Prostate | prostate | | | Uni-ZAP XR |
| S0150 | LNCAP prostate cell line | LNCAP Cell Line | Prostate | Cell Line | | Uni-ZAP XR |
| S0152 | PC3 Prostate cell line | PC3 prostate cell line | | | | Uni-ZAP XR |
| S0168 | Prostate/LNCAP, subtraction I | PC3 prostate cell line | | | | pBluescript |
| S0174 | Prostate-BPH subtracted II | Human Prostate BPH | | | | pBluescript |
| S0176 | Prostate, normal, subtraction I | Prostate | prostate | | | Uni-ZAP XR |
| S0180 | Bone Marrow Stroma, TNF&LPS ind | Bone Marrow Stroma, TNF & | | | disease | Uni-ZAP XR |
| | | LPS induced | | | | |
| S0182 | Human B Cell 8866 | Human B-Cell 8866 | | | | Uni-ZAP XR |
| S0184 | 7TM Receptor enriched, lib II | PBLS, 7TM receptor enriched | | | | Other |
| S0188 | Prostate, BPH, Lib 2 | Human Prostate BPH | | | disease | pSport1 |
| S0190 | Prostate BPH, Lib 2, subtracted | Human Prostate BPH | | | | pSport1 |
| S0192 | Synovial Fibroblasts (control) | Synovial Fibroblasts | | | | pSport1 |
| S0194 | Synovial hypoxia | Synovial Fibroblasts | | | | pSport1 |
| S0196 | Synovial IL-1/TNF stimulated | Synovial Fibroblasts | | | | pSport1 |
| S0202 | 7TM-pbdd | PBLS, 7TM receptor enriched | | | | PCRII |
| S0206 | Smooth Muscle - HASTE normalized | Smooth muscle | Pulmanary | Cell Line | | pBluescript |
| | | | artery | | | |
| S0208 | Messangial cell, frac 1 | Messangial cell | | | | pSport1 |
| S0210 | Messangial cell, frac 2 | Messangial cell | | | | pSport1 |
| S0212 | Bone Marrow Stromal Cell, untreated | Bone Marrow Stromal | | | | pSport1 |
| | | Cell, untreated | | | | |
| S0214 | Human Osteoclastoma, re-excision | Osteoclastoma | bone | | disease | Uni-ZAP XR |
| S0216 | Neutrophils IL-1 and LPS induced | human neutrophil induced | blood | Cell Line | | Uni-ZAP XR |
| S0218 | Apoptotic T-cell, re-excision | apoptotic cells | | Cell Line | | Uni-ZAP XR |
| S0220 | H. hypothalamus, frac A; re-excision | Hypothalamus | Brain | | | ZAP Express |
| S0222 | H. Frontal cortex, epileptic; re-excision | H. Brain, Frontal Cortex, | Brain | | disease | Uni-ZAP XR |
| | | Epileptic | | | | |
| S0242 | Synovial Fibroblasts (I11/TNF), subt | Synovial Fibroblasts | | | | pSport1 |
| S0250 | Human Osteoblasts II | Human Osteoblasts | Femur | | disease | pCMVSport 2.0 |
| S0252 | 7TM-PIMIX | PBLS, 7TM receptor enriched | | | | PCRII |
| S0256 | 7TM-PHMIX | PBLS, 7TM receptor enriched | | | | PCRII |
| S0260 | Spinal Cord, re-excision | Spinal cord | spinal cord | | | Uni-ZAP XR |
| S0264 | PPMIX | PPMIX (Human Pituitary) | Pituitary | | | PCRII |
| S0266 | PLMIX | PLMIX (Human Lung) | Lung | | | PCRII |
| S0268 | PRMIX | PRMIX (Human Prostate) | prostate | | | PCRII |
| S0270 | PTMIX | PTMIX (Human Thymus) | Thymus | | | PCRII |
| S0276 | Synovial hypoxia-RSF subtracted | Synovial fobroblasts | Synovial | | | pSport1 |
| | | (rheumatoid) | tissue | | | |
| S0278 | H Macrophage (GM-CSF treated), re-excision | Macrophage (GM-CSF treated) | | | | Uni-ZAP XR |
| S0280 | Human Adipose Tissue, re-excision | Human Adipose Tissue | | | | Uni-ZAP XR |
| S0282 | Brain Frontal Cortex, re-excision | Brain frontal cortex | Brain | | | Lambda ZAP II |
| S0292 | Osteoartbritis (OA-4) | Human Osteoartbritic Cartilage | Bone | | disease | pSport1 |
| S0294 | Larynx tumor | Larynx tumor | Larynx, | | disease | pSport1 |
| | | | vocal cord | | | |
| S0296 | Normal lung | Normal lung | Lung | | | pSport1 |
| S0298 | Bone marrow stroma, treated | Bone marrow stroma, treatedSB | Bone | | | pSport1 |
| | | | marrow | | | |
| S0300 | Frontal lobe, dementia; re-excision | Frontal Lobe | Brain | | | Uni-ZAP XR |
| | | dementia/Alzheimer″s | | | | |
| S0306 | Larynx normal #10 261-273 | Larynx normal | | | | pSport1 |
| S0308 | Spleen/normal | Spleen normal | | | | pSport1 |
| S0310 | Normal trachea | Normal trachea | | | | pSport1 |
| S0312 | Human osteoartbritic; fraction II | Human osteoartbritic cartilage | | | disease | pSport1 |
| S0314 | Human osteoartbritis; fraction I | Human osteoartbritic cartilage | | | disease | pSport1 |
| S0316 | Human Normal Cartilage, Fraction I | Human Normal Cartilage | | | | pSport1 |
| S0318 | Human Normal Cartilage Fraction II | Human Normal Cartilage | | | | pSport1 |
| S0320 | Human Larynx | Larynx | Epiglottis | | | pSport1 |
| S0322 | Siebben Polyposis | Siebben Polyposis | | | | pSport1 |
| S0324 | Human Brain | Brain | Cerebellum | | | pSport1 |
| S0328 | Palate carcinoma | Palate carcinoma | Uvula | | disease | pSport1 |
| S0330 | Palate normal | Palate normal | Uvula | | | pSport1 |
| S0332 | Pharynx carcinoma | Pharynx carcinoma | Hypo- | | | pSport1 |
| | | | pharynx | | | |
| S0334 | Human Normal Cartilage Fraction III | Human Normal Cartilage | | | | pSport1 |
| S0336 | Human Normal Cartilage Fraction IV | Human Normal Cartilage | | | | pSport1 |
| S0338 | Human Osteoarthritic Cartilage Fraction III | Human osteoartbritic cartilage | | | disease | pSport1 |
| S0340 | Human Osteoarthritic Cartilage Fraction IV | Human osteoartbritic cartilage | | | disease | pSport1 |
| S0342 | Adipocytes; re-excision | Human Adipocytes from | | | | Uni-ZAP XR |
| | | Osteoclastoma | | | | |
| S0344 | Macrophage-oxLDL; re-excision | macrophage-oxidized | blood | Cell Line | | Uni-ZAP XR |
| | | LDL treated | | | | |
| S0346 | Human Amygdala; re-excision | Amygdala | | | | Uni-ZAP XR |
| S0348 | Cheek Carcinoma | Cheek Carcinoma | | | disease | pSport1 |
| S0350 | Pharynx Carcinoma | Pharynx carcinoma | Hypo- | | disease | pSport1 |
| | | | pharynx | | | |
| S0352 | Larynx Carcinoma | Larynx carcinoma | | | disease | pSport1 |
| S0354 | Colon Normal II | Colon Normal | Colon | | | pSport1 |
| S0356 | Colon Carcinoma | Colon Carcinoma | Colon | | disease | pSport1 |
| S0358 | Colon Normal III | Colon Normal | Colon | | | pSport1 |
| S0360 | Colon Tumor II | Colon Tumor | Colon | | disease | pSport1 |
| S0362 | Human Gastrocnemius | Gastrocnemius muscle | | | | pSport1 |
| S0364 | Human Quadriceps | Quadriceps muscle | | | | pSport1 |
| S0366 | Human Soleus | Soleus Muscle | | | | pSport1 |
| S0368 | Human Pancreatic Langerhans | Islets of Langerhans | | | | pSport1 |
| S0370 | Larynx carcinoma II | Larynx carcinoma | | | disease | pSport1 |
| S0372 | Larynx carcinoma III | Larynx carcinoma | | | disease | pSport1 |
| S0374 | Normal colon | Normal colon | | | | pSport1 |
| S0376 | Colon Tumor | Colon Tumor | | | disease | pSport1 |
| S0378 | Pancreas normal PCA4 No | Pancreas Normal PCA4 No | | | | pSport1 |
| S0380 | Pancreas Tumor PCA4 Tu | Pancreas Tumor PCA4 Tu | | | disease | pSport1 |
| S0382 | Larynx carcinoma IV | Larynx carcinoma | | | disease | pSport1 |
| S0384 | Tongue carcinoma | Tongue carcinoma | | | disease | pSport1 |
| S0386 | Human Whole Brain, re-excision | Whole brain | Brain | | | ZAP Express |
| S0388 | Human Hypothalamus, schizophrenia, | Human | | | disease | Uni-ZAP XR |
| | re-excision Hypothalamus, | Schizophrenia | | | | |
| S0390 | Smooth muscle, control; re-excision | Smooth muscle | Pulmanary | Cell Line | | Uni-ZAP XR |
| | | | artery | | | |
| S0392 | Salivary Gland | Salivary gland; normal | | | | pSport1 |
| S0394 | Stomach; normal | Stomach; normal | | | | pSport1 |
| S0396 | Uterus; normal | Uterus; normal | | | | pSport1 |
| S0398 | Testis; normal | Testis; normal | | | | pSport1 |
| S0400 | Brain; normal | Brain; normal | | | | pSport1 |
| S0402 | Adrenal Gland, normal | Adrenal gland; normal | | | | pSport1 |
| S0404 | Rectum normal | Rectum, normal | | | | pSport1 |
| S0406 | Rectum tumour | Rectum tumour | | | | pSport1 |
| S0408 | Colon, normal | Colon, normal | | | | pSport1 |
| S0410 | Colon, tumour | Colon, tumour | | | | pSport1 |
| S0412 | Temporal cortex-Alzheizmer; subtracted | Temporal cortex, alzheimer | | | disease | Other |
| S0414 | Hippocampus, Alzheimer Subtracted | Hippocampus, Alzheimer | | | | Other |
| | | Subtracted | | | | |
| S0418 | CHME Cell Line; treated 5 hrs | CHME Cell Line; treated | | | | pCMVSport 3.0 |
| S0420 | CHME Cell Line, untreated | CHME Cell line, untreatetd | | | | pSport1 |
| S0422 | Mo7e Cell Line GM-CSF treated (1 ng/ml) | Mo7e Cell Line GM-CSF treated | | | | pCMVSport 3.0 |
| | | (1 ng/ml) | | | | |
| S0424 | TF-1 Cell Line GM-CSF Treated | TF-1 Cell Line GM-CSF Treated | | | | pSport1 |
| S0426 | Monocyte activated; re-excision | Monocyte-activated | blood | Cell Line | | Uni-ZAP XR |
| S0428 | Neutrophils control; re-excision | human neutrophils | blood | Cell Line | | Uni-ZAP XR |
| S0430 | Aryepiglottis Normal | Aryepiglottis Normal | | | | pSport1 |
| S0432 | Sinus piniformis Tumour | Sinus piniformis Tumour | | | | pSport1 |
| S0434 | Stomach Normal | Stomach Normal | | | disease | pSport1 |
| S0436 | Stomach Tumour | Stomach Tumour | | | disease | pSport1 |
| S0438 | Liver Normal Met5No | Liver Normal Met5No | | | | pSport1 |
| S0440 | Liver Tumour Met 5 Tu | Liver Tumour | | | | pSport1 |
| S0442 | Colon Normal | Colon Normal | | | | pSport1 |
| S0444 | Colon Tumor | Colon Tumour | | | disease | pSport1 |
| S0446 | Tongue Tumour | Tongue Tumour | | | | pSport1 |
| S0448 | Larynx Normal | Larynx Normal | | | | pSport1 |
| S0450 | Larynx Tumour | Larynx Tumour | | | | pSport1 |
| S0452 | Thymus | Thymus | | | | pSport1 |
| S0454 | Placenta | Placenta | Placenta | | | pSport1 |
| S0456 | Tongue Normal | Tongue Normal | | | | pSport1 |
| S0458 | Thyroid Normal (SDCA2 No) | Thyroid normal | | | | pSport1 |
| S0460 | Thyroid Tumour | Thyroid Tumour | | | | pSport1 |
| S0462 | Thyroid Thyroiditis | Thyroid Thyroiditis | | | | pSport1 |
| S0464 | Larynx Normal | Larynx Normal | | | | pSport1 |
| S0466 | Larynx Tumor | Larynx Tumor | | | disease | pSport1 |
| S0468 | Ea.hy.926 cell line | Ea.hy.926 cell line | | | | pSport1 |
| S0470 | Adenocarcinoma | PYFD | | | disease | pSport1 |
| S0472 | Lung Mesothelium | PYBT | | | | pSport1 |
| S0474 | Human blood platelets | Platelets | Blood | | | Other |
| | | | platelets | | | |
| S0665 | Human Amygdala; re-excission | Amygdala | | | | Uni-ZAP XR |
| S3012 | Smooth Muscle Serum Treated, Norm | Smooth muscle | Pulmanary | Cell Line | | pBluescript |
| | | | artery | | | |
| S3014 | Smooth muscle, serum induced, re-exc | Smooth muscle | Pulmanary | Cell Line | | pBluescript |
| | | | artery | | | |
| S6014 | H. hypothalamus, frac A | Hypothalamus | Brain | | | ZAP Express |
| S6016 | H. Frontal Cortex, Epileptic | H. Brain, Frontal Cortex, | Brain | | disease | Uni-ZAP XR |
| | | Epileptic | | | | |
| S6022 | H. Adipose Tissue | Human Adipose Tissue | | | | Uni-ZAP XR |
| S6024 | Alzheimers, spongy change | Alzheimer″s/Spongy change | Brain | | disease | Uni-ZAP XR |
| S6026 | Frontal Lobe, Dementia | Frontal Lobe | Brain | | | Uni-ZAP XR |
| | | dementia/Alzheimer″s | | | | |
| S6028 | Human Manic Depression Tissue | Human Manic depression tissue | Brain | | disease | Uni-ZAP XR |
| T0001 | Human Brown Fat | Brown Fat | | | | pBluescript SK− |
| T0002 | Activated T-cells | Activated T-Cell, PBL fraction | Blood | Cell Line | | pBluescript SK− |
| T0003 | Human Fetal Lung | Human Fetal Lung | | | | pBluescript SK− |
| T0004 | Human White Fat | Human White Fat | | | | pBluescript SK− |
| T0006 | Human Pineal Gland | Human Pinneal Gland | | | | pBluescript SK− |
| T0007 | Colon Epithelium | Colon Epithelium | | | | pBluescriptISK− |
| T0008 | Colorectal Tumor | Colorectal Tumor | | | disease | pBluescript SK− |
| T0010 | Human Infant Brain | Human Infant Brain | | | | Other |
| T0023 | Human Pancreatic Carcinoma | Human Pancreatic Carcinoma | | | disease | pBluescript SK− |
| T0039 | HSA172 Cells | Human H5A172 cell line | | | | pBluescript SK− |
| T0040 | HSC172 cells | SA172 Cells | | | | pBluescript SK− |
| T0041 | Jurkat T-cell G1 phase | Jurkat T-cell | | | | pBluescript SK− |
| T0042 | Jurkat T-Cell, S phase | Jurkat T-Cell Line | | | | pBluescript SK− |
| T0047 | T lymphocytes >70 | T lymphocytes >70 | | | | pBluescript SK− |
| T0048 | Human Aortic Endothelium | Human Aortic Endothilium | | | | pBluescript SK− |
| T0049 | Aorta endothelial cells + TNF-a | Aorta endothelial cells | | | | pBluescript SK− |
| T0060 | Human White Adipose | Human White Fat | | | | pBluescript SK− |
| T0067 | Human Thyroid | Human Thyroid | | | | pBluescript SK− |
| T0068 | Normal Ovary, Premenopausal | Normal Ovary, Premenopausal | | | | pBluescript SK− |
| T0069 | Human Uterus, normal | Human Uterus, normal | | | | pBluescript SK− |
| T0070 | Human Adrenal Gland | Human Adrenal Gland | | | | pBluescript SK− |
| T0071 | Human Bone Marrow | Human Bone Marrow | | | | pBluescript SK− |
| T0078 | Human Liver, normal adult | Human Liver, normal Adult | | | | pBluescript SK− |
| T0079 | Human Kidney, normal Adult | Human Kidney, normal Adult | | | | pBluescript SK− |
| T0082 | Human Adult Retina | Human Adult Retina | | | | pBluescript SK− |
| T0090 | Liver, normal | | | | | pBluescript SK− |
| T0091 | Liver, hepatocellular carcinoma | | | | | pBluescript SK− |
| T0104 | HCC cell line metastisis to liver | | | | | pBluescript SK− |
| T0109 | Human (HCC) cell line liver (mouse) | | | | | pBluescript SK− |
| | metastasis, remake | | | | | |
| T0110 | Human colon carcinoma (HCC) cell line, | | | | | pBluescript SK− |
| | remake | | | | | |
| T0112 | Human (Caco-2) cell line, adenocarcinoma, | | | | | pBluescript SK− |
| | colon | | | | | |
| T0114 | Human (Caco-2) cell line, adenocarcinoma, | | | | | pBluescript SK− |
| | colon, remake | | | | | |
| T0115 | Human Colon Carcinoma (HCC) cell line | | | | | pBluescript SK− |
| L0002 | Atrium cDNA library Human heart | | | | | |
| L0004 | ClonTech HL 1065a | | | | | |
| L0005 | Clontech human aorta polyA+ mRNA (#6572) | | | | | |
| L0009 | EST from 8p21.3-p22 | | | | | |
| L0012 | HDMEC cDNA library | | | | | |
| L0015 | Human | | | | | |
| L0021 | Human adult (K. Okubo) | | | | | |
| L0022 | Human adult lung 3″ directed MboI cDNA | | | | | |
| L0024 | Human brain ARSanders | | | | | |
| L0032 | Human chromosome 12p cDNAs | | | | | |
| L0034 | Human chromosome 14 | | | | | |
| L0038 | Human chromosome 6 | | | | | |
| L0040 | Human colon mucosa | | | | | |
| L0041 | Human epidermal keratinocyte | | | | | |
| L0045 | Human keratinocyte differential | | | | | |
| | display (B. Lin) | | | | | |
| L0051 | Human mRNA (Tripodis and Ragoussis) | | | | | |
| L0052 | Human normalized K562-cDNA | | | | | |
| L0055 | Human promyelocyte | | | | | |
| L0060 | Human thymus NSTH II | | | | | |
| L0065 | Liver HepG2 cell line. | | | | | |
| L0070 | Selected chromosome 21 cDNA library | | | | | |
| L0096 | Subtracted human retina | | | | | |
| L0097 | Subtracted human retinal pigment | | | | | |
| | epithelium (RPE) | | | | | |
| L0103 | DKFZphamy1 | amygdala | | | | |
| L0105 | Human aorta polyA+ (TFujiwara) | aorta | | | | |
| L0109 | Human brain cDNA | brain | | | | |
| L0118 | Human fetal brain S. Meier-Ewert | brain | | | | |
| L0126 | Human fibroblast cDNA | fibroblast | | | | |
| L0138 | Human normal gingiva | normal gingiva | | | | |
| L0141 | Human pancreatic islet cell | pancreatic islet | | | | |
| L0142 | Human placenta cDNA (TFujiwara) | placenta | | | | |
| L0143 | Human placenta polyA+ (TFujiwara) | placenta | | | | |
| L0146 | Human fovea cDNA | retinal fovea | | | | |
| L0149 | DKFZphsnu1 | subthalamic nucleus | | | | |
| L0151 | Human testis (C. De Smet) | testis | | | | |
| L0157 | Human fetal brain (TFujiwara) | | brain | | | |
| L0158 | Human fetal brain QBoqin | | brain | | | |
| L0162 | Human brain frontal cortex | frontal cortex | brain | | | |
| L0163 | Human heart cDNA (YNakamura) | | heart | | | |
| L0171 | Human lung adenocarcinoma A549 | lung adenocarcinoma | | A549 | | |
| L0175 | Human retina cell line ARPE-19 | retina | | ARPE-19 | | |
| L0177 | Human newborn melanocytes (T. Vogt) | | | Clonetics | | |
| | | | | Corp. | | |
| | | | | (San | | |
| | | | | Diego, | | |
| | | | | CA) | | |
| | | | | strain #68 | | |
| | | | | and | | |
| | | | | 2486 | | |
| L0182 | Human HeLa (Y. Wang) | | | HeLa | | |
| L0186 | Human salivary gland cell line HSG | salivary gland | | HSG | | |
| L0194 | Human pancreatic cancer cell line Patu 8988t | pancreatic cancer | | Patu 8988t | | |
| L0351 | Infant brain, Bento Soares | | | | | BA, M13-derived |
| L0352 | Normalized infant brain, Bento Soares | | | | | BA, M13-derived |
| L0353 | 21q Placenta, F. Tassone and K. Gardiner | | | | | Bluescript |
| L0355 | P, Human foetal Brain Whole tissue | | | | | Bluescript |
| L0356 | S, Human foetal Adrenals tissue | | | | | Bluescript |
| L0361 | Stratagene ovary (#937217) | | ovary | | | Bluescript SK |
| L0362 | Stratagene ovarian cancer (#937219) | | | | | Bluescript SK− |
| L0363 | NCI_CGAP_GC2 | germ cell tumor | | | | Bluescript SK− |
| L0364 | NCI_CGAP_GC5 | germ cell tumor | | | | Bluescript SK− |
| L0365 | NCI_CGAP_Phe1 | pheochromocytoma | | | | Bluescript SK− |
| L0366 | Stratagene schizo brain S11 | schizophrenic brain S-11 frontal | | | | Bluescript SK− |
| | | lobe | | | | |
| L0367 | NCI_CGAP_Sch1 | Schwannoma tumor | | | | Bluescript SK− |
| L0368 | NCI_CGAP_SS1 | synovial sarcoma | | | | Bluescript SK− |
| L0369 | NCI_CGAP_AA1 | adrenal adenoma | adrenal | | | Bluescript SK− |
| | | | gland | | | |
| L0370 | Johnston frontal cortex | pooled frontal lobe | brain | | | Bluescript SK− |
| L0371 | NCI_CGAP_Br3 | breast tumor | breast | | | Bluescript SK− |
| L0372 | NCI_CGAP_Col2 | colon tumor | colon | | | Bluescript SK− |
| L0373 | NCI_CGAP_Col1 | tumor | colon | | | Bluescript SK− |
| L0374 | NCI_CGAP_Co2 | tumor | colon | | | Bluescript SK− |
| L0375 | NCI_CGAP_Kid6 | kidney tumor | kidney | | | Bluescript SK− |
| L0376 | NCI_CGAP_Lar1 | larynx | larynx | | | Bluescript SK− |
| L0377 | NCI_CGAP_HN2 | squamous cell carcinoma from | larynx | | | Bluescript SK− |
| | | vocal cord | | | | |
| L0378 | NCI_CGAP_Lu1 | lung tumor | lung | | | Bluescript SK− |
| L0379 | NCI_CGAP_Lym3 | lymphoma | lymph node | | | Bluescript SK− |
| L0380 | NCI_CGAP_HN1 | squamous cell carcinoma | lymph node | | | Bluescript SK− |
| L0381 | NCI_CGAP_HN4 | squamous cell carcinoma | pharynx | | | Bluescript SK− |
| L0382 | NCI_CGAP_Pr25 | epithelium (cell line) | prostate | | | Bluescript SK− |
| L0383 | NCI_CGAP_Pr24 | invasive tumor (cell line) | prostate | | | Bluescript SK− |
| L0384 | NCI_CGAP_Pr23 | prostate tumor | prostate | | | Bluescript SK− |
| L0385 | NCI_CGAP_Gas1 | gastric tumor | stomach | | | Bluescript SK− |
| L0386 | NCI_CGAP_HN3 | squamous cell carcinoma from | tongue | | | Bluescript SK− |
| | | base of tongue | | | | |
| L0387 | NCI_CGAP_GCB0 | germinal center B-cells | tonsil | | | Bluescript SK− |
| L0388 | NCI_CGAP_HN6 | normal gingiva (cell line from | | | | Bluescript SK− |
| | | immortalized kerati | | | | |
| L0389 | NCI_CGAP_HN5 | normal gingiva (cell line from | | | | Bluescript SK− |
| | | primary keratinocyt | | | | |
| L0393 | B, Human Liver tissue | | | | | gt11 |
| L0394 | H, Human adult Brain Cortex tissue | | | | | gt11 |
| L0404 | b4HB3MA Cot109 + 103 + 85-Bio | | | | | Lafmid A |
| L0405 | b4HB3MA Cot109 + 103-Bio | | | | | Lafmid A |
| L0411 | 1-NIB | | | | | Lafmid BA |
| L0414 | b4HB3MA | | | | | Lafmid BA |
| L0415 | b4HB3MA Cot8-HAP-Ft | | | | | Lafmid BA |
| L0416 | b4HB3MA-Cot0.38-HAP-B | | | | | Lafmid BA |
| L0417 | b4HB3MA-Cot0.38-HAP-Ft-6 | | | | | Lafmid BA |
| L0422 | b4HB3MA-Cot12-HAP-B | | | | | Lafmid BA |
| L0424 | b4HB3MA-Cot14.5 | | | | | Lafmid BA |
| L0425 | b4HB3MA-Cot18-Bio | | | | | Lafmid BA |
| L0426 | b4HB3MA-Cot51.5-HAP-Ft | | | | | Lafmid BA |
| L0427 | b4HB3MA-FT20%-Biotin | | | | | Lafmid BA |
| L0428 | Cot1374Ft-4HB3MA | | | | | Lafmid BA |
| L0430 | Cot250Ft-b4HB3MA | | | | | Lafmid BA |
| L0434 | Infant brain library of Dr. M. Soares | | | | | lafmid BA |
| L0435 | Infant brain, LLNL array of Dr. M. | | | | | lafmid BA |
| | Soares 1NIB | | | | | |
| L0437 | N-b4HB3MA-Cot109 | | | | | Lafmid BA |
| L0438 | normalized infant brain cDNA | total brain | brain | | | lafmid BA |
| L0439 | Soares infant brain 1NIB | | whole brain | | | Lafmid BA |
| L0441 | 2HB3MK | | | | | Lafmid BK |
| L0442 | 4HB3MK | | | | | Lafmid BK |
| L0443 | b4HB3MK | | | | | Lafmid BK |
| L0446 | N4HB3MK | | | | | Lafmid BK |
| L0447 | NHB3MK | | | | | Lafmid BK |
| L0448 | 3HFLSK20 | | | | | Lafmid K |
| L0451 | N3HFLSK20 | | | | | Lafmid K |
| L0453 | BATM1 | | | | | lambda gt10 |
| L0454 | Clontech adult human fat cell library HL1108A | | | | | lambda gt10 |
| L0455 | Human retina cDNA randomly primed | retina | eye | | | lambda gt10 |
| | sublibrary | | | | | |
| L0456 | Human retina cDNA Tsp509I-cleaved | retina | eye | | | lambda gt10 |
| | sublibrary | | | | | |
| L0457 | multi-tissue normalized short-fragment | multi-tissue | pooled | | | lambda gt10 |
| L0459 | Adult heart, Clontech | | | | | Lambda gt11 |
| L0460 | Adult heart, Lambda gt11 | | | | | Lambda gt11 |
| L0462 | WATM1 | | | | | lambda gt11 |
| L0463 | fetal brain cDNA | brain | brain | | | lambda gt11 |
| L0465 | TEST1, Human adult Testis tissue | | | | | lambda nm1149 |
| L0468 | HE6W | | | | | lambda zap |
| L0469 | T, Human adult Rhabdomyosarcoma cell-line | | | | | Lambda Zap |
| L0470 | BL29 Burkitt″s lymphoma, Pascalis Sideras | | | | | lambda ZAP 2 |
| L0471 | Human fetal heart, Lambda ZAP Express | | | | | Lambda ZAP |
| | | | | | | Express |
| L0475 | KG1-a Lambda Zap Express cDNA library | | | KG1-a | | Lambda Zap |
| | | | | | | Express |
| | | | | | | (Stratagene) |
| L0476 | Fetal brain, Stratagene | | | | | Lambda ZAP II |
| L0477 | HPLA CCLee | placenta | | | | Lambda ZAP II |
| L0480 | Stratagene cat#937212 (1992) | | | | | Lambda ZAP, |
| | | | | | | pBluescript SK(−) |
| L0481 | CD34+DIRECTIONAL | | | | | Lambda ZAPII |
| L0483 | Human pancreatic islet | | | | | Lambda ZAPII |
| L0485 | STRATAGENE Human skeletal muscle cDNA | skeletal muscle | leg muscle | | | Lambda ZAPII |
| | library, cat. #936215. | | | | | |
| L0487 | Human peripheral blood (Steve Elledge) | whole peripheral blood | | | | Lambda-Yes |
| L0492 | Human Genomic | | | | | pAMP |
| L0493 | NCI_CGAP_Ov26 | papillary serous carcinoma | ovary | | | pAMP1 |
| L0497 | NCI_CGAP_HSC4 | CD34+, CD38− from | bone marrow | | | pAMP1 |
| | | normal bone marrow donor | | | | |
| L0498 | NCI_CGAP_HSC3 | CD34+, T negative, patient with | bone marrow | | | pAMP1 |
| | | chronic myelogenou | | | | |
| L0499 | NCI_CGAP_HSC2 | stem cell 34+/38+ | bone marrow | | | pAMP1 |
| L0500 | NCI_CGAP_Brn20 | oligodendroglioma | brain | | | pAMP1 |
| L0501 | NCI_CGAP_Brn21 | oligodendroglioma | brain | | | pAMP1 |
| L0502 | NCI_CGAP_Br15 | adenocarcinoma | breast | | | pAMP1 |
| L0503 | NCI_CGAP_Br17 | adenocarcinoma | breast | | | pAMP1 |
| L0504 | NCI_CGAP_Br13 | breast carcinoma in situ | breast | | | pAMP1 |
| L0505 | NCI_CGAP_Br12 | invasive carcinoma | breast | | | pAMP1 |
| L0506 | NCI_CGAP_Br16 | lobullar carcinoma in situ | breast | | | pAMP1 |
| L0507 | NCI_CGAP_Br14 | normal epithelium | breast | | | pAMP1 |
| L0508 | NCI_CGAP_Lu25 | bronchioalveolar carcinoma | lung | | | pAMP1 |
| L0509 | NCI_CGAP_Lu26 | invasive adenocarcinoma | lung | | | pAMP1 |
| L0510 | NCI_CGAP_Ov33 | borderline ovarian carcinoma | ovary | | | pAMP1 |
| L0511 | NCI_CGAP_Ov34 | borderline ovarian carcinoma | ovary | | | pAMP1 |
| L0512 | NCI_CGAP_Ov36 | borderline ovarian carcinoma | ovary | | | pAMP1 |
| L0513 | NCI_CGAP_Ov37 | early stage papillary serous | ovary | | | pAMP1 |
| | | carcinoma | | | | |
| L0514 | NCI_CGAP_Ov31 | papillary serous carcinoma | ovary | | | pAMP1 |
| L0515 | NCI_CGAP_Ov32 | papillary serous carcinoma | ovary | | | pAMP1 |
| L0516 | Chromosome 19p12-p13.1 exon | | | | | pAMP10 |
| L0517 | NCI_CGAP_Pr1 | | | | | pAMP10 |
| L0518 | NCI_CGAP_Pr2 | | | | | pAMP10 |
| L0519 | NCI_CGAP_Pr3 | | | | | pAMP10 |
| L0520 | NCI_CGAP_Alv1 | alveolar rhabdomyosarcoma | | | | pAMP10 |
| L0521 | NCI_CGAP_Ew1 | Ewing″s sarcoma | | | | pAMP10 |
| L0522 | NCI_CGAP_Kid1 | kidney | | | | pAMP10 |
| L0523 | NCI_CGAP_Lip2 | liposarcoma | | | | pAMP10 |
| L0524 | NCI_CGAP_Li1 | liver | | | | pAMP10 |
| L0525 | NCI_CGAP_Li2 | liver | | | | pAMP10 |
| L0526 | NCI_CGAP_Pr12 | metastatic prostate bone lesion | | | | pAMP10 |
| L0527 | NCI_CGAP_Ov2 | ovary | | | | pAMP10 |
| L0528 | NCI_CGAP_Pr5 | prostate | | | | pAMP10 |
| L0529 | NCI_CGAP_Pr6 | prostate | | | | pAMP10 |
| L0530 | NCI_CGAP_Pr8 | prostate | | | | pAMP10 |
| L0531 | NCI_CGAP_Pr20 | prostate metastasis, liver | | | | pAMP10 |
| L0532 | NCI_CGAP_Thy1 | thyroid | | | | pAMP10 |
| L0533 | NCI_CGAP_HSC1 | stem cells | bone marrow | | | pAMP10 |
| L0534 | Chromosome 7 Fetal Brain cDNA Library | brain | brain | | | pAMP10 |
| L0535 | NCI_CGAP_Br5 | infiltrating ductal carcinoma | breast | | | pAMP10 |
| L0536 | NCI_CGAP_Br4 | normal ductal tissue | breast | | | pAMP10 |
| L0537 | NCI_CGAP_Ov6 | normal cortical stroma | ovary | | | pAMP10 |
| L0539 | Chromosome 7 Placental cDNA Library | | placenta | | | pAMP10 |
| L0540 | NCI_CGAP_Pr10 | invasive prostate tumor | prostate | | | pAMP10 |
| L0541 | NCI_CGAP_Pr7 | low-grade prostatic neoplasia | prostate | | | pAMP10 |
| L0542 | NCI_CGAP_Pr11 | normal prostatic epithelial cells | prostate | | | pAMP10 |
| L0543 | NCI_CGAP_Pr9 | normal prostatic epithelial cells | prostate | | | pAMP10 |
| L0544 | NCI_CGAP_Pr4 | prostatic intraepithelial | prostate | | | pAMP10 |
| | | neoplasia - high grade | | | | |
| L0545 | NCI_CGAP_Pr4.1 | prostatic intraepithelial | prostate | | | pAMP10 |
| | | neoplasia - high grade | | | | |
| L0546 | NCI_CGAP_Pr18 | stroma | prostate | | | pAMP10 |
| L0547 | NCI_CGAP_Pr16 | tumor | prostate | | | pAMP10 |
| L0548 | Chromosome 7 Thymus cDNA Library | thymus | thymus | | | pAMP10 |
| L0549 | NCI_CGAP_HN10 | carcinoma in situ | | | | pAMP10 |
| | | from retromolar trigone | | | | |
| L0550 | NCI_CGAP_HN9 | normal squamous epithelium | | | | pAMP10 |
| | | from retromolar trigone | | | | |
| L0551 | NCI_CGAP_HN7 | normal squamous epithelium, | | | | pAMP10 |
| | | floor of mouth | | | | |
| L0552 | NCI_CGAP_HN8 | well-differentiated invasive | | | | pAMP10 |
| | | carcinoma, floor of m | | | | |
| L0553 | NCI_CGAP_Co22 | colonic adenocarcinoma | colon | | | pAMP10 |
| L0554 | NCI_CGAP_Li8 | | liver | | | pAMP10 |
| L0555 | NCI_CGAP_Lu34 | large cell carcinoma | lung | | | pAMP10 |
| L0556 | NCI_CGAP_Lu34.1 | large cell carcinoma | lung | | | pAMP10 |
| L0558 | NCI_CGAP_Ov40 | endometrioid ovarian metastasis | ovary | | | pAMP10 |
| L0559 | NCI_CGAP_Ov39 | papillary serous ovarian | ovary | | | pAMP10 |
| | | metastasis | | | | |
| L0560 | NCI_CGAP_HN12 | moderate to poorly differentiated | tongue | | | pAMP10 |
| | | invasive carcino | | | | |
| L0561 | NCI_CGAP_HN11 | normal squamous epithelium | tongue | | | pAMP10 |
| L0562 | Chromosome 7 HeLa cDNA Library | | | HeLa cell | | pAMP10 |
| | | | | line; | | |
| | | | | ATCC | | |
| L0563 | Human Bone Marrow Stromal Fibroblast | bone marrow | | | | pBluescript |
| L0564 | Jia bone marrow stroma | bone marrow stroma | | | | pBluescript |
| L0565 | Normal Human Trabecular Bone Cells | Bone | Hip | | | pBluescript |
| L0579 | Human fetal brain QBoqin2 | cerebrum and cerebellum | | | | pBluescript SK |
| L0581 | Stratagene liver (#937224) | | liver | | | pBluescript SK |
| L0583 | Stratagene cDNA library Human fibroblast, | | | | | pBluescript SK(+) |
| | cat#937212 | | | | | |
| L0584 | Stratagene cDNA library Human heart, | | | | | pBluescript SK(+) |
| | cat#936208 | | | | | |
| L0586 | HTCDL1 | | | | | pBluescript SK(−) |
| L0587 | Stratagene colon HT29 (#937221) | | | | | pBluescript SK− |
| L0588 | Stratagene endothelial cell 937223 | | | | | pBluescript SK− |
| L0589 | Stratagene fetal retina 937202 | | | | | pBluescript SK− |
| L0590 | Stratagene fibroblast (#937212) | | | | | pBluescript SK− |
| L0591 | Stratagene HeLa cell s3 937216 | | | | | pBluescript SK− |
| L0592 | Stratagene hNT neuron (#937233) | | | | | pBluescript SK− |
| L0593 | Stratagene neuroepithelium (#937231) | | | | | pBluescript SK− |
| L0594 | Stratagene neuroepithelium NT2RAMI 937234 | | | | | pBluescript SK− |
| L0595 | Stratagene NT2 neuronal precursor 937230 | neuroepithelial cells | brain | | | pBluescript SK− |
| L0596 | Stratagene colon (#937204) | | colon | | | pBluescript SK− |
| L0597 | Stratagene corneal stroma (#937222) | | cornea | | | pBluescript SK− |
| L0598 | Morton Fetal Cochlea | cochlea | ear | | | pBluescript SK− |
| L0599 | Stratagene lung (#937210) | | lung | | | pBluescript SK− |
| L0600 | Weizmann Olfactory Epithelium | olfactory epithelium | nose | | | pBluescript SK− |
| L0601 | Stratagene pancreas (#937208) | | pancreas | | | pBluescript SK− |
| L0602 | Pancreatic Islet | pancreatic islet | pancreas | | | pBluescript SK− |
| L0603 | Stratagene placenta (#937225) | | placenta | | | pBluescript SK− |
| L0604 | Stratagene muscle 937209 | muscle | skeletal | | | pBluescript SK− |
| | | | muscle | | | |
| L0605 | Stratagene fetal spleen (#937205) | fetal spleen | spleen | | | pBluescript SK− |
| L0606 | NCI_CGAP_Lym5 | follicular lymphoma | lymph node | | | pBluescript SK− |
| L0607 | NCI_CGAP_Lym6 | mantle cell lymphoma | lymph node | | | pBluescript SK− |
| L0608 | Stratagene lung carcinoma 937218 | lung carcinoma | lung | NCI-H69 | | pBluescript SK− |
| L0609 | Schiller astrocytoma | astrocytoma | brain | | | pBluescript SK− |
| | | | | | | (Stratagene) |
| L0611 | Schiller meningioma | meningioma | brain | | | pBluescript SK− |
| | | | | | | (Stratagene) |
| L0612 | Schiller oligodendroglioma | oligodendroglioma | brain | | | pBluescript SK− |
| | | | | | | (Stratagene) |
| L0615 | 22 week old human fetal liver cDNA library | | | | | pBluescriptII |
| | | | | | | SK(−) |
| L0617 | Chromosome 22 exon | | | | | pBluescriptIIKS+ |
| L0619 | Chromosome 9 exon II | | | | | pBluescriptIIKS+ |
| L0622 | HM1 | | | | | pcDNAII |
| | | | | | | (Invitrogen) |
| L0623 | HM3 | pectoral muscle (after | | | | pcDNAII |
| | | | | | | (Invitrogen) |
| | | mastectomy) | | | | |
| L0625 | NCI_CGAP_AR1 | bulk alveolar tumor | | | | pCMV-SPORT2 |
| L0626 | NCI_CGAP_GC1 | bulk germ cell seminoma | | | | pCMV-SPORT2 |
| L0627 | NCI_CGAP_Co1 | bulk tumor | colon | | | pCMV-SPORT2 |
| L0628 | NCI_CGAP_Ov1 | ovary bulk tumor | ovary | | | pCMV-SPORT2 |
| L0629 | NCI_CGAP_Me13 | metastatic melanoma to bowel | bowel (skin | | | pCMV-SPORT4 |
| | | | primary) | | | |
| L0630 | NCI_CGAP_CNS1 | substantia nigra | brain | | | pCMV-SPORT4 |
| L0631 | NCI_CGAP_Br7 | | breast | | | pCMV-SPORT4 |
| L0632 | NCI_CGAP_Li5 | hepatic adenoma | liver | | | pCMV-SPORT4 |
| L0633 | NCI_CGAP_Lu6 | small cell carcinoma | lung | | | pCMV-SPORT4 |
| L0634 | NCI_CGAP_Ov8 | serous adenocarcinoma | ovary | | | pCMV-SPORT4 |
| L0635 | NCI_CGAP_PNS1 | dorsal root ganglion | peripheral | | | pCMV-SPORT4 |
| | | | nervous | | | |
| | | | system | | | |
| L0636 | NCI_CGAP_Pit1 | four pooled pituitary adenomas | brain | | | pCMV-SPORT6 |
| L0637 | NCI_CGAP_Brn53 | three pooled meningiomas | brain | | | pCMV-SPORT6 |
| L0638 | NCI_CGAP_Brn35 | tumor, 5 pooled (see description) | brain | | | pCMV-SPORT6 |
| L0639 | NCI_CGAP_Brn52 | tumor, 5 pooled (see description) | brain | | | pCMV-SPORT6 |
| L0640 | NCI_CGAP_Br18 | four pooled high-grade tumors, | breast | | | pCMV-SPORT6 |
| | | including two prima | | | | |
| L0641 | NCI_CGAP_Co17 | juvenile granulosa tumor | colon | | | pCMV-SPORT6 |
| L0642 | NCI_CGAP_Co18 | moderately differentiated | colon | | | pCMV-SPORT6 |
| | | adenocarcinoma | | | | |
| L0643 | NCI_CGAP_Co19 | moderately differentiated | colon | | | pCMV-SPORT6 |
| | | adenocarcinoma | | | | |
| L0644 | NCI_CGAP_Co20 | moderately differentiated | colon | | | pCMV-SPORT6 |
| | | adenocarcinoma | | | | |
| L0645 | NCI_CGAP_Co21 | moderately differentiated | colon | | | pCMV-SPORT6 |
| | | adenocarcinoma | | | | |
| L0646 | NCI_CGAP_Co14 | moderately-differentiated | colon | | | pCMV-SPORT6 |
| | | adenocarcinoma | | | | |
| L0647 | NCI_CGAP_Sar4 | five pooled sarcomas, including | connective | | | pCMV-SPORT6 |
| | | myxoid liposarcoma | tissue | | | |
| L0648 | NCI_CGAP_Eso2 | squamous cell carcinoma | esophagus | | | pCMV-SPORT6 |
| L0649 | NCI_CGAP_GU1 | 2 pooled high-grade transitional | genitourinary | | | pCMV-SPORT6 |
| | | cell tumors | tract | | | |
| L0650 | NCI_CGAP_Kid13 | 2 pooled Wilms″ tumors, one | kidney | | | pCMV-SPORT6 |
| | | primary and one metast | | | | |
| L0651 | NCI_CGAP_Kid8 | renal cell tumor | kidney | | | pCMV-SPORT6 |
| L0652 | NCI_CGAP_Lu27 | four pooled poorly-differentiated | lung | | | pCMV-SPORT6 |
| | | adenocarcinomas | | | | |
| L0653 | NCI_CGAP_Lu28 | two pooled squamous cell | lung | | | pCMV-SPORT6 |
| | | carcinomas | | | | |
| L0654 | NCI_CGAP_Lu31 | | lung, cell | | | pCMV-SPORT6 |
| | | | line | | | |
| L0655 | NCI_CGAP_Lym12 | lymphoma, follicular mixed | lymph node | | | pCMV-SPORT6 |
| | | small and large cell | | | | |
| L0656 | NCI_CGAP_Ov38 | normal epithelium | ovary | | | pCMV-SPORT6 |
| L0657 | NCI_CGAP_Ov23 | tumor, 5 pooled (see description) | ovary | | | pCMV-SPORT6 |
| L0658 | NCI_CGAP_Ov35 | tumor, 5 pooled (see description) | ovary | | | pCMV-SPORT6 |
| L0659 | NCI_CGAP_Pan1 | adenocarcinoma | pancreas | | | pCMV-SPORT6 |
| L0661 | NCI_CGAP_Mel15 | malignant melanoma, metastatic | skin | | | pCMV-SPORT6 |
| | | to lymph node | | | | |
| L0662 | NCI_CGAP_Gas4 | poorly differentiated | stomach | | | pCMV-SPORT6 |
| | | adenocarcinoma with signet r | | | | |
| L0663 | NCI_CGAP_Ut2 | moderately-differentiated | uterus | | | pCMV-SPORT6 |
| | | endometrial adenocarcino | | | | |
| L0664 | NCI_CGAP_Ut3 | poorly-differentiated endometrial | uterus | | | pCMV-SPORT6 |
| | | adenocarcinoma, | | | | |
| L0665 | NCI_CGAP_Ut4 | serous papillary carcinoma, high | uterus | | | pCMV-SPORT6 |
| | | grade, 2 pooled t | | | | |
| L0666 | NCI_CGAP_Ut1 | well-differentiated endometrial | uterus | | | pCMV-SPORT6 |
| | | adenocarcinoma, 7 | | | | |
| L0667 | NCI_CGAP_CML1 | myeloid cells, 18 pooled CML | whole blood | | | pCMV-SPORT6 |
| | | cases, BCR/ABL rearra | | | | |
| L0669 | Human MCF7 cDNA subtracted with | breast adenocarcinoma | breast | MCF7 | | pCR II |
| | MDA-MB-231 cDNA | | | | | [Invitrogen] |
| L0681 | Stanley Frontal SN individual | frontal lobe (see description) | brain | | | pCR2.1 |
| | | | | | | (Invitrogen) |
| L0682 | Stanley Frontal NB pool 2 | frontal lobe (see description) | brain | | | pCR2.1-TOPO |
| | | | | | | (Invitrogen) |
| L0683 | Stanley Frontal NS pool 2 | frontal lobe (see description) | brain | | | pCR2.1-TOPO |
| | | | | | | (Invitrogen) |
| L0684 | Stanley Frontal SB pool 1 | frontal lobe (see description) | brain | | | pCR2.1-TOPO |
| | | | | | | (Invitrogen) |
| L0685 | Stanley Frontal SN pool 1 | frontal lobe (see description) | brain | | | pCR2.1-TOPO |
| | | | | | | (Invitrogen) |
| L0686 | Stanley Frontal SN pool 2 | frontal lobe (see description) | brain | | | pCR2.1-TOPO |
| | | | | | | (Invitrogen) |
| L0687 | Stanley Hippocampus NB pool 1 | hippocampus (see description) | brain | | | pCR2.1-TOPO |
| | | | | | | (Invitrogen) |
| L0688 | Stanley Hippocampus SB pool 1 | hippocampus (see description) | brain | | | pCR2.1-TOPO |
| | | | | | | (Invitrogen) |
| L0689 | Stanley Hippocampus SN pool 1 | hippocampus (see description) | brain | | | pCR2.1-TOPO |
| | | | | | | (Invitrogen) |
| L0695 | Human Glialblastoma Cell | | Brain | BT-325 | | PCRII, Invitrogen |
| L0697 | Testis 1 | | | | | PGEM 5zf(+) |
| L0698 | Testis 2 | | | | | PGEM 5zf(+) |
| L0700 | Outward Alu-primed hncDNA library | | | | | pGEM-3Z |
| L0709 | NIH_MGC_21 | choriocarcinoma | placenta | | | pOTB7 |
| L0710 | NIH_MGC_7 | small cell carcinoma | lung | MGC3 | | pOTB7 |
| L0716 | PMA-induced HL60 cell subtraction library | | | PMA- | | pSPORT1 |
| | | | | induced | | |
| | | | | HL60 | | |
| | | | | human | | |
| | | | | leukemic | | |
| | | | | cell line | | |
| L0717 | Gessler Wilms tumor | | | | | pSPORT1 |
| L0718 | Testis 5 | | | | | pSPORT1 |
| L0719 | human embryo cDNA library | Whole embryo | | | | pSPORT1 |
| L0731 | Soares_pregnant_uterus_NbHPU | | uterus | | | pT7T3-Pac |
| L0738 | Human colorectal cancer | | | | | pT7T3D |
| L0740 | Soares melanocyte 2NbHM | melanocyte | | | | pT7T3D |
| | | | | | | (Pharmacia) |
| | | | | | | with a modified |
| | | | | | | polylinker |
| L0741 | Soares adult brain N2b4HB55Y | | brain | | | pT7T3D |
| | | | | | | (Pharmacia) |
| | | | | | | with a modified |
| | | | | | | polylinker |
| L0742 | Soares adult brain N2b5HB55Y | | brain | | | pT7T3D |
| | | | | | | (Pharmacia) |
| | | | | | | with a modified |
| | | | | | | polylinker |
| L0743 | Soares breast 2NbHBst | | breast | | | pT7T3D |
| | | | | | | (Pharmacia) |
| | | | | | | with a modified |
| | | | | | | polylinker |
| L0744 | Soares breast 3NbHBst | | breast | | | pT7T3D |
| | | | | | | (Pharmacia) |
| | | | | | | with a modified |
| | | | | | | polylinker |
| L0745 | Soares retina N2b4HR | retina | eye | | | pT7T3D |
| | | | | | | (Pharmacia) |
| | | | | | | with a modified |
| | | | | | | polylinker |
| L0746 | Soares retina N2b5HR | retina | eye | | | pT7T3D |
| | | | | | | (Pharmacia) |
| | | | | | | with a modified |
| | | | | | | polylinker |
| L0747 | Soares_fetal_heart_NbHH19W | | heart | | | pT7T3D |
| | | | | | | (Pharmacia) |
| | | | | | | with a modified |
| | | | | | | polylinker |
| L0748 | Soares fetal liver spleen 1NFLS | | Liver and | | | pT7T3D |
| | | | Spleen | | | (Pharmacia) |
| | | | | | | with a modified |
| | | | | | | polylinker |
| L0749 | Soares_fetal_liver_spleen_1NFLS_S1 | | Liver and | | | pT7T3D |
| | | | Spleen | | | (Pharmacia) |
| | | | | | | with a modified |
| | | | | | | polylinker |
| L0750 | Soares_fetal_lung_NbHL19W | | lung | | | pT7T3D |
| | | | | | | (Pharmacia) |
| | | | | | | with a modified |
| | | | | | | polylinker |
| L0751 | Soares ovary tumor NbHOT | ovarian tumor | ovary | | | pT7T3D |
| | | | | | | (Pharmacia) |
| | | | | | | with a modified |
| | | | | | | polylinker |
| L0752 | Soares_parathyroid_tumor_NbHPA | parathyroid tumor | parathyroid | | | pT7T3D |
| | | | gland | | | (Pharmacia) |
| | | | | | | with a modified |
| | | | | | | polylinker |
| L0753 | Soares_pineal_gland_N3HPG | | pineal gland | | | pT7T3D |
| | | | | | | (Pharmacia) |
| | | | | | | with a modified |
| | | | | | | polylinker |
| L0754 | Soares placenta Nb2HP | | placenta | | | pT7T3D |
| | | | | | | (Pharmacia) |
| | | | | | | with a modified |
| | | | | | | polylinker |
| L0755 | Soares_placenta_8to9weeks_2NbHP8to9W | | placenta | | | pT7T3D |
| | | | | | | (Pharmacia) |
| | | | | | | with a modified |
| | | | | | | polylinker |
| L0756 | Soares_multiple_sclerosis_2NbHMSP | multiple sclerosis lesions | | | | pT7T3D |
| | | | | | | (Pharmacia) |
| | | | | | | with a modified |
| | | | | | | polylinker |
| | | | | | | V_TYPE |
| L0757 | Soares_senescent_fibroblasts_NbHSF | senescent fibroblast | | | | pT7T3D |
| | | | | | | (Pharmacia) |
| | | | | | | with a modified |
| | | | | | | polylinker |
| | | | | | | V_TYPE |
| L0758 | Soares_testis_NHT | | | | | pT7T3D-Pac |
| | | | | | | (Pharmacia) |
| | | | | | | with a modified |
| | | | | | | polylinker |
| L0759 | Soares_total_fetus_Nb2HF8_9w | | | | | pT7T3D-Pac |
| | | | | | | (Pharmacia) |
| | | | | | | with a |
| | | | | | | modified |
| | | | | | | polylinker |
| L0760 | Barstead aorta HPLRB3 | aorta | | | | pT7T3D-Pac |
| | | | | | | (Pharmacia) |
| | | | | | | with a modified |
| | | | | | | polylinker |
| L0761 | NCI_CGAP_CLL1 | B-cell, chronic lymphotic | | | | pT7T3D-Pac |
| | | | | | | (Pharmacia) |
| | | leukemia | | | | with a modified |
| | | | | | | polylinker |
| L0762 | NCI_CGAP_Br1.1 | breast | | | | pT7T3D-Pac |
| | | | | | | (Pharmacia) |
| | | | | | | with a modified |
| | | | | | | polylinker |
| L0763 | NCI_CGAP_Br2 | breast | | | | pT7T3D-Pac |
| | | | | | | (Pharmacia) |
| | | | | | | with a modified |
| | | | | | | polylinker |
| L0764 | NCI_CGAP_Co3 | colon | | | | pT7T3D-Pac |
| | | | | | | (Pharmacia) |
| | | | | | | with a modified |
| | | | | | | polylinker |
| L0765 | NCI_CGAP_Co4 | colon | | | | pT7T3D-Pac |
| | | | | | | (Pharmacia) |
| | | | | | | with a modified |
| | | | | | | polylinker |
| L0766 | NCI_CGAP_GCB1 | germinal center B cell | | | | pT7T3D-Pac |
| | | | | | | (Pharmacia) |
| | | | | | | with a modified |
| | | | | | | polylinker |
| L0767 | NCI_CGAP_GC3 | pooled germ cell tumors | | | | pT7T3D-Pac |
| | | | | | | (Pharmacia) |
| | | | | | | with a modified |
| | | | | | | polylinker |
| L0768 | NCI_CGAP_GC4 | pooled germ cell tumors | | | | pT7T3D-Pac |
| | | | | | | (Pharmacia) |
| | | | | | | with a modified |
| | | | | | | polylinker |
| L0769 | NCI_CGAP_Brn25 | anaplastic oligodendroglioma | brain | | | pT7T3D-Pac |
| | | | | | | (Pharmacia) |
| | | | | | | with a modified |
| | | | | | | polylinker |
| L0770 | NCI_CGAP_Brn23 | glioblastoma (pooled) | brain | | | pT7T3D-Pac |
| | | | | | | (Pharmacia) |
| | | | | | | with a modified |
| | | | | | | polylinker |
| L0771 | NCI_CGAP_Co8 | adenocarcinoma | colon | | | pT7T3D-Pac |
| | | | | | | (Pharmacia) |
| | | | | | | with a modified |
| | | | | | | polylinker |
| L0772 | NCI_CGAP_Co10 | colon tumor RER+ | colon | | | pT7T3D-Pac |
| | | | | | | (Pharmacia) |
| | | | | | | with a modified |
| | | | | | | polylinker |
| L0773 | NCI_CGAP_Co9 | colon tumor RER+ | colon | | | pT7T3D-Pac |
| | | | | | | (Pharmacia) |
| | | | | | | with a modified |
| | | | | | | polylinker |
| L0774 | NCI_CGAP_Kid3 | | kidney | | | pT7T3D-Pac |
| | | | | | | (Pharmacia) |
| | | | | | | with a modified |
| | | | | | | polylinker |
| L0775 | NCI_CGAP_Kid5 | 2 pooled tumors (clear cell type) | kidney | | | pT7T3D-Pac |
| | | | | | | (Pharmacia) |
| | | | | | | with a modified |
| | | | | | | polylinker |
| L0776 | NCI_CGAP_Lu5 | carcinoid | lung | | | pT7T3D-Pac |
| | | | | | | (Pharmacia) |
| | | | | | | with a modified |
| | | | | | | polylinker |
| L0777 | Soares_NhHMPu_S1 | Pooled human melanocyte, fetal | mixed | | | pT7T3D-Pac |
| | | heart, and pregnant | (see below) | | | (Pharmacia) |
| | | | | | | with a modified |
| | | | | | | polylinker |
| L0778 | Barstead pancreas HPLRB1 | | pancreas | | | pT7T3D-Pac |
| | | | | | | (Pharmacia) |
| | | | | | | with a modified |
| | | | | | | polylinker |
| L0779 | Soares_NFL_T_GBC_S1 | | pooled | | | pT7T3D-Pac |
| | | | | | | (Pharmacia) |
| | | | | | | with a modified |
| | | | | | | polylinker |
| L0780 | Soares_NSF_F8_9W_OT_PA_P_S1 | | pooled | | | pT7T3D-Pac |
| | | | | | | (Pharmacia) |
| | | | | | | with a modified |
| | | | | | | polylinker |
| L0782 | NCI_CGAP_Pr21 | normal prostate | prostate | | | pT7T3D-Pac |
| | | | | | | (Pharmacia) |
| | | | | | | with a modified |
| | | | | | | polylinker |
| L0783 | NCI_CGAP_Pr22 | normal prostate | prostate | | | pT7T3D-Pac |
| | | | | | | (Pharmacia) |
| | | | | | | with a modified |
| | | | | | | polylinker |
| L0784 | NCI_CGAP_Lei2 | leiomyosarcoma | soft tissue | | | pT7T3D-Pac |
| | | | | | | (Pharmacia) |
| | | | | | | with a modified |
| | | | | | | polylinker |
| L0785 | Barstead spleen HPLRB2 | | spleen | | | pT7T3D-Pac |
| | | | | | | (Pharmacia) |
| | | | | | | with a modified |
| | | | | | | polylinker |
| L0786 | Soares_NbHFB | | whole brain | | | pT7T3D-Pac |
| | | | | | | (Pharmacia) |
| | | | | | | with a modified |
| | | | | | | polylinker |
| L0787 | NCI_CGAP_Sub1 | | | | | pT7T3D-Pac |
| | | | | | | (Pharmacia) |
| | | | | | | with a modified |
| | | | | | | polylinker |
| L0788 | NCI_CGAP_Sub2 | | | | | pT7T3D-Pac |
| | | | | | | (Pharmacia) |
| | | | | | | with a modified |
| | | | | | | polylinker |
| L0789 | NCI_CGAP_Sub3 | | | | | pT7T3D-Pac |
| | | | | | | (Pharmacia) |
| | | | | | | with a modified |
| | | | | | | polylinker |
| L0790 | NCI_CGAP_Sub4 | | | | | pT7T3D-Pac |
| | | | | | | (Pharmacia) |
| | | | | | | with a modified |
| | | | | | | polylinker |
| L0791 | NCI_CGAP_Sub5 | | | | | pT7T3D-Pac |
| | | | | | | (Pharmacia) |
| | | | | | | with a modified |
| | | | | | | polylinker |
| L0792 | NCI_CGAP_Sub6 | | | | | pT7T3D-Pac |
| | | | | | | (Pharmacia) |
| | | | | | | with a modified |
| | | | | | | polylinker |
| L0793 | NCI_CGAP_Sub7 | | | | | pT7T3D-Pac |
| | | | | | | (Pharmacia) |
| | | | | | | with a modified |
| | | | | | | polylinker |
| L0794 | NCI_CGAP_GC6 | pooled germ cell tumors | | | | pT7T3D-Pac |
| | | | | | | (Pharmacia) |
| | | | | | | with a modified |
| | | | | | | polylinker |
| L0796 | NCI_CGAP_Brn50 | medulloblastoma | brain | | | pT7T3D-Pac |
| | | | | | | (Pharmacia) |
| | | | | | | with a modified |
| | | | | | | polylinker |
| L0800 | NCI_CGAP_Co16 | colon tumor, RER+ | colon | | | pT7T3D-Pac |
| | | | | | | (Pharmacia) |
| | | | | | | with a modified |
| | | | | | | polylinker |
| L0803 | NCI_CGAP_Kid11 | | kidney | | | pT7T3D-Pac |
| | | | | | | (Pharmacia) |
| | | | | | | with a modified |
| | | | | | | polylinker |
| L0804 | NCI_CGAP_Kid12 | 2 pooled tumors (clear cell type) | kidney | | | pT7T3D-Pac |
| | | | | | | (Pharmacia) |
| | | | | | | with a modified |
| | | | | | | polylinker |
| L0805 | NCI_CGAP_Lu24 | carcinoid | lung | | | pT7T3D-Pac |
| | | | | | | (Pharmacia) |
| | | | | | | with a modified |
| | | | | | | polylinker |
| L0806 | NCI_CGAP_Lu19 | squamous cell carcinoma, poorly | lung | | | pT7T3D-Pac |
| | | | | | | (Pharmacia) |
| | | differentiated (4 | | | | with a modified |
| | | | | | | polylinker |
| L0807 | NCI_CGAP_Ov18 | fibrotheoma | ovary | | | pT7T3D-Pac |
| | | | | | | (Pharmacia) |
| | | | | | | with a modified |
| | | | | | | polylinker |
| L0808 | Barstead prostate BPH HPLRB4 1 | | prostate | | | pT7T3D-Pac |
| | | | | | | (Pharmacia) |
| | | | | | | with a modified |
| | | | | | | polylinker |
| L0809 | NCI_CGAP_Pr28 | | prostate | | | pT7T3D-Pac |
| | | | | | | (Pharmacia) |
| | | | | | | with a modified |
| | | | | | | polylinker |
| L0811 | BATM2 | | | | | PTZ18 |
| L0988 | BT0387 | | breast | | | puc18 |
| L1430 | CT0225 | | colon | | | puc18 |
| L1562 | CN0027 | | colon_normal | | | puc18 |
| L1819 | HT0268 | | head_neck | | | puc18 |
| L2138 | ST0186 | | stomach | | | puc18 |
| L2245 | NEM subtracted human fetal kidney cDNA | | | | | pUEX1 |
| L2250 | Human cerebral cortex | cerebral cortex | | | | |
| L2251 | Human fetal lung | Fetal lung | | | | |
| L2252 | Human placenta | placenta | | | | |
| L2255 | GLC | corresponding non cancerous | | | | pBluescript sk(−) |
| | | liver tissue | | | | |
| L2257 | NIH_MGC_65 | adenocarcinoma | colon | | | pCMV-SPORT6 |
| L2258 | NIH_MGC_67 | retinoblastoma | eye | | | pCMV-SPORT6 |
| L2259 | NIH_MGC_68 | large cell carcinoma | lung | | | pCMV-SPORT6 |
| L2260 | NIH_MGC_69 | large cell carcinoma, | lung | | | pCMV-SPORT6 |
| | | undifferentiated | | | | |
| L2261 | NIH_MGC_70 | epithelioid carcinoma | pancreas | | | pCMV-SPORT6 |
| L2262 | NIH_MGC_72 | melanotic melanoma | skin | | | pCMV-SPORT6 |
| L2263 | NIH_MGC_66 | adenocarcinoma | ovary | | | pCMV-SPORT6 |
| L2264 | NIH_MGC_71 | leiomyosarcoma | uterus | | | pCMV-SPORT6 |
| L2265 | NIH_MGC_39 | adenocarcinoma | pancreas | | | pOTB7 |
| L2269 | NCI_CGAP_Thy11 | follicular carcinoma | thyroid | | | pAMP10 |
| L2270 | Lupski_dorsal_root_ganglion | dorsal root ganglia | | | | pCMV-SPORT6 |
| | | | | | | (Life |
| | | | | | | Tech- |
| | | | | | | nologies) |
| L2285 | BT0723 | | breast | | | puc18 |
| L2289 | BT0757 | | breast | | | puc18 |
| L2293 | BT0762 | | breast | | | puc18 |
| L2300 | BT0789 | | breast | | | puc18 |
| L2323 | CT0406 | | colon | | | puc18 |
| L2336 | CT0428 | | colon | | | puc18 |
| L2352 | UT0001 | | uterus_tumor | | | puc18 |
| L2357 | UT0021 | | uterus_tumor | | | puc18 |
| L2359 | UT0023 | | uterus_tumor | | | puc18 |
| L2368 | UT0041 | | uterus_tumor | | | puc18 |
| L2380 | NN0068 | | nervous_normal | | | puc18 |
| L2381 | NN0070 | | nervous_normal | | | puc18 |
| L2402 | NN0118 | | nervous_normal | | | puc18 |
| L2412 | NN0136 | | nervous_normal | | | puc18 |
| L2439 | NN1022 | | nervous_normal | | | puc18 |
| L2482 | HT0497 | | head_neck | | | puc18 |
| L2486 | HT0527 | | head_neck | | | puc18 |
| L2487 | HT0542 | | head_neck | | | puc18 |
| L2491 | HT0559 | | head_neck | | | puc18 |
| L2497 | HT0618 | | head_neck | | | puc18 |
| L2499 | HT0622 | | head_neck | | | puc18 |
| L2504 | HT0636 | | head_neck | | | puc18 |
| L2519 | HT0698 | | head_neck | | | puc18 |
| L2528 | HT0713 | | head_neck | | | puc18 |
| L2543 | HT0734 | | head_neck | | | puc18 |
| L2551 | HT0744 | | head_neck | | | puc18 |
| L2630 | HT0865 | | head_neck | | | puc18 |
| L2635 | HT0875 | | head_neck | | | puc18 |
| L2647 | HT0894 | | head_neck | | | puc18 |
| L2652 | NIH_MGC_57 | glioblastoma | brain | | | pDNR-LIB |
| | | | | | | (Clontech) |
| L2653 | NIH_MGC_58 | hypernephroma | kidney | | | pDNR-LIB |
| | | | | | | (Clontech) |
| L2654 | NIH_MGC_9 | adenocarcinoma cell line | ovary | | | pOTB7 |
| L2655 | NIH_MGC_55 | from acute myelogenous | bone marrow | | | pDNR-LIB |
| | | leukemia | | | | (Clontech) |
| L2657 | NIH_MGC_54 | from chronic myelogenous | bone marrow | | | pDNR-LIB |
| | | leukemia | | | | (Clontech) |
| L2669 | NT0022 | | nervous_tumor | | | puc18 |
| L2670 | NT0023 | | nervous_tumor | | | puc18 |
| L2673 | NT0028 | | nervous_tumor | | | puc18 |
| L2675 | NT0033 | | nervous_tumor | | | puc18 |
| L2706 | NT0102 | | nervous_tumor | | | puc18 |
| L2744 | FT0004 | | prostate_tumor | | | puc18 |
| L2758 | FT0027 | | prostate_tumor | | | puc18 |
| L2759 | FT0028 | | prostate_tumor | | | puc18 |
| L2767 | FT0044 | | prostate_tumor | | | puc18 |
| L2771 | FT0050 | | prostate_tumor | | | puc18 |
| L2777 | FT0056 | | prostate_tumor | | | puc18 |
| L2791 | FT0077 | | prostate_tumor | | | puc18 |
| L2800 | FT0097 | | prostate_tumor | | | puc18 |
| L2842 | UM0009 | | uterus | | | puc18 |
| L2877 | AN0027 | | amnion_normal | | | puc18 |
| L2879 | AN0032 | | amnion_normal | | | puc18 |
| L2903 | BN0039 | | breast_normal | | | puc18 |
| L2904 | BN0042 | | breast_normal | | | puc18 |
| L2906 | BN0047 | | breast_normal | | | puc18 |
| L2909 | BN0067 | | breast_normal | | | puc18 |
| L2910 | BN0070 | | breast_normal | | | puc18 |
| L2915 | BN0098 | | breast_normal | | | puc18 |
| L2985 | BN0257 | | breast_normal | | | puc18 |
| L2991 | BN0264 | | breast_normal | | | puc18 |
| L2999 | BN0273 | | breast_normal | | | puc18 |
| L3001 | BN0275 | | breast_normal | | | puc18 |
| L3012 | BN0296 | | breast_normal | | | puc18 |
| L3019 | BN0303 | | breast_normal | | | puc18 |
| L3092 | ET0023 | | lung_tumor | | | puc18 |
| L3109 | ET0046 | | lung_tumor | | | puc18 |
| L3117 | ET0068 | | lung_tumor | | | puc18 |
| L3119 | ET0072 | | lung_tumor | | | puc18 |
| L3180 | MT0101 | | marrow | | | puc18 |
| L3181 | MT0107 | | marrow | | | puc18 |
| L3210 | OT0067 | | ovary | | | puc18 |
| L3215 | OT0083 | | ovary | | | puc18 |
| L3271 | FN0094 | | prostate_normal | | | puc18 |
| L3278 | FN0104 | | prostate_normal | | | puc18 |
| L3280 | FN0106 | | prostate_normal | | | puc18 |
| L3311 | FN0180 | | prostate_normal | | | puc18 |
| L3327 | SN0024 | | stomach_normal | | | puc18 |
| L3357 | TN0034 | | testis_normal | | | puc18 |
| L3372 | TN0068 | | testis_normal | | | puc18 |
| L3378 | TN0080 | | testis_normal | | | puc18 |
| L3385 | Homo sapiens HeLa | | | HeLa | | |
| L3387 | GKB | hepatocellular carcinoma | | | | pBluescript sk(−) |
| L3388 | GKC | hepatocellular carcinoma | | | | pBluescript sk(−) |
| L3391 | NIH_MGC_53 | carcinoma, cell line | bladder | | | pDNR-LIB |
| | | | | | | (Clontech) |
| L3450 | CT0508 | | colon | | | puc18 |
| L3485 | GN0070 | | placenta_normal | | | puc18 |
| L3499 | HT0617 | | head_neck | | | puc18 |
| L3503 | HT0870 | | head_neck | | | puc18 |
| L3516 | HT0913 | | head_neck | | | puc18 |
| L3560 | TN0023 | | testis_normal | | | puc18 |
| L3563 | TN0037 | | testis_normal | | | puc18 |
| L3566 | TN0046 | | testis_normal | | | puc18 |
| L3576 | TN0086 | | testis_normal | | | puc18 |
| L3585 | TN0119 | | testis_normal | | | puc18 |
| L3592 | TN0129 | | testis_normal | | | puc18 |
| L3630 | UT0071 | | uterus_tumor | | | puc18 |
| L3632 | UT0074 | | uterus_tumor | | | puc18 |
| L3642 | ADA | Adrenal gland | | | | pBluescript sk(−) |
| L3643 | ADB | Adrenal gland | | | | pBluescript sk(−) |
| L3644 | ADC | Adrenal gland | | | | pBluescript sk(−) |
| L3645 | Cu | adrenal cortico adenoma for | | | | pBluescript sk(−) |
| | | Cushing″s syndrome | | | | |
| L3646 | DCA | | | | | pTriplEx2 |
| L3647 | Human HO-1 melanoma cells | | | | | |
| L3649 | DCB | | | | | pTriplEx2 |
| L3651 | FHTA | hypothalamus | | | | pTriplEx2 |
| L3652 | FHTB | hypothalamus | | | | pTriplEx2 |
| L3653 | HTB | Hypothalamus | | | | pBluescript sk(−) |
| L3655 | HTC | Hypothalamus | | | | pBluescript sk(−) |
| L3657 | HTF | Hypothalamus | | | | pBluescript sk(−) |
| L3658 | cdA | pheochromocytoma | | | | pTriplEx2 |
| L3659 | CB | cord blood | | | | pBluescript |
| L3660 | NP1 | pituitary | | | | pBluescript sk(−) |
| L3661 | NPA | pituitary | | | | pBluescript sk(−) |
| L3663 | NIH_MGC_60 | adenocarcinoma | prostate | | | pDNR-LIB |
| | | | | | | (Clontech) |
| L3665 | NIH_MGC_75 | | kidney | | | pDNR-LIB |
| | | | | | | (Clontech) |
| L3709 | CT0515 | | colon | | | puc18 |
| L3726 | GN0038 | | placenta_normal | | | puc18 |
| L3729 | GN0079 | | placenta_normal | | | puc18 |
| L3750 | HT0945 | | head_neck | | | puc18 |
| L3783 | TN0136 | | testis_normal | | | puc18 |
| L3796 | UT0042 | | uterus_tumor | | | puc18 |
| L3807 | UT0077 | | uterus_tumor | | | puc18 |
| L3811 | NPC | pituitary | | | | pBluescript sk(−) |
| L3812 | NPD | pituitary | | | | pBluescript sk(−) |
| L3813 | TP | pituitary tumor | | | | pTriplEx2 |
| L3814 | BM | Bone marrow | | | | pTriplEx2 |
| L3815 | MDS | Bone marrow | | | | pTriplEx2 |
| L3816 | HEMBA1 | whole embryo, mainly head | | | | pME18SFL3 |
| L3817 | HEMBB1 | whole embryo, mainly body | | | | pME18SFL3 |
| L3818 | MAMMA1 | mammary gland | | | | pME18SFL3 |
| L3820 | NIH_MGC_46 | leiomyosarcoma cell line | uterus | | | pOTB7 |
| L3821 | NIH_MGC_48 | primary B-cells from tonsils | B-cells | | | pOTB7 |
| | | (cell line) | | | | |
| L3822 | NIH_MGC_59 | mucoepidermoid carcinoma | lung | | | pDNR-LIB |
| | | | | | | (Clontech) |
| L3823 | NT2RM1 | | | NT2 | | pUC19FL3 |
| L3824 | NT2RM2 | | | NT2 | | pME18SFL3 |
| L3825 | NT2RM4 | | | NT2 | | pME18SFL3 |
| L3826 | NT2RP1 | | | NT2 | | pUC19FL3 |
| L3827 | NT2RP2 | | | NT2 | | pME18SFL3 |
| L3828 | NT2RP3 | | | NT2 | | pME18SFL3 |
| L3829 | NT2RP4 | | | NT2 | | pME18SFL3 |
| L3831 | OVARC1 | ovary, tumor tissue | | | | pME18SFL3 |
| L3832 | PLACE1 | placenta | | | | pME18SFL3 |
| L3833 | PLACE2 | placenta | | | | pME18SFL3 |
| L3834 | PLACE3 | placenta | | | | pME18SFL3 |
| L3837 | THYRO1 | thyroid gland | | | | pME18SFL3 |
| L3872 | NCI_CGAP_Skn1 | | skin, normal, 4 | | | pCMV-SPORT6 |
| | | | pooled sa | | | |
| L3904 | NCI_CGAP_Brn64 | glioblastoma with EGFR | brain | | | pCMV-SPORT6 |
| | | amplification | | | | |
| L3905 | NCI_CGAP_Brn67 | anaplastic oligodendroglioma | brain | | | pCMV-SPORT6 |
| | | with 1p/19q loss | | | | |
| L4497 | NCI_CGAP_Br22 | invasive ductal carcinoma, 3 | breast | | | pCMV-SPORT6 |
| | | pooled samples | | | | |
| L4500 | NCI_CGAP_HN16 | moderate to poorly differentiated | mouth | | | pAMP10 |
| | | invasive carcino | | | | |
| L4501 | NCI_CGAP_Sub8 | | | | | pT7T3D-Pac |
| | | | | | | (Pharmacia) |
| | | | | | | with a modified |
| | | | | | | polylinker |
| L4507 | NCI_CGAP_Thy6 | normal epithelium | thyroid | | | pAMP10 |
| L4508 | NCI_CGAP_Thy8 | normal epithelium | thyroid | | | pAMP10 |
| L4537 | NCI_CGAP_Thy7 | follicular adenoma (benign | thyroid | | | pAMP10 |
| | | lesion) | | | | |
| L4556 | NCI_CGAP_HN13 | squamous cell carcinoma | tongue | | | pCMV-SPORT6 |
| L4557 | NCI_CGAP_Adr1 | neuroblastoma | adrenal gland | | | pCMV-SPORT6 |
| L4558 | NCI_CGAP_Pan3 | | pancreas | | | pCMV-SPORT6 |
| L4559 | NCI_CGAP_Thy3 | follicular carcinoma | thyroid | | | pCMV-SPORT6 |
| L4560 | NCI_CGAP_Ut7 | tumor | uterus | | | pCMV-SPORT6 |
| L4669 | NCI_CGAP_Ov41 | serous papillary tumor | ovary | | | pCMV-SPORT6 |
| L4747 | NCI_CGAP_Brn41 | oligodendroglioma | brain | | | pT7T3D-Pac |
| | | | | | | (Pharmacia) |
| | | | | | | with a modified |
| | | | | | | polylinker |
| L4753 | NCI_CGAP_HN15 | leukoplakia of the | mouth | | | pAMP10 |
| | | buccal mucosa | | | | |
| L4775 | NCI_CGAP_Thy12 | papillary carcinoma | thyroid | | | pAMP10 |
| L5286 | NCI_CGAP_Thy10 | medullary carcinoma | thyroid | | | pAMP10 |
| L5564 | NCI_CGAP_HN20 | | normal head/neck | | | pAMP1 |
| | | | tissue | | | |
| L5565 | NCI_CGAP_Brn66 | glioblastoma with | brain | | | pCMV-SPORT6 |
| | | probably TP53 | | | | |
| | | mutation and witho | | | | |
| L5566 | NCI_CGAP_Brn70 | anaplastic oligodendroglioma | brain | | | pCMV- |
| | | | | | | SPORT6.ccdb |
| L5568 | NCI_CGAP_HN21 | nasopharyngeal carcinoma | head/neck | | | pAMP1 |
| L5569 | NCI_CGAP_HN17 | normal epithelium | nasopharynx | | | pAMP10 |
| L5572 | NCI_CGAP_Co27 | adenocarcinoma (mucinous | colon | | | pAMP1 |
| | | component) | | | | |
| L5574 | NCI_CGAP_HN19 | normal epithelium | nasopharynx | | | pAMP10 |
| L5575 | NCI_CGAP_Brn65 | glioblastoma without EGFR | brain | | | pCMV-SPORT6 |
| | | amplification | | | | |
| L5622 | NCI_CGAP_Skn3 | | skin | | | pCMV-SPORT6 |
| L5623 | NCI_CGAP_Skn4 | squamous cell carcinoma | skin | | | pCMV-SPORT6 |

Description of Table 5

[0226] Table 5 provides a key to the OMIM reference identification numbers disclosed in Table 1B.1, column 9. OMIM reference identification numbers (Column 1) were derived from Online Mendelian Inheritance in Man (Online Mendelian Inheritance in Man, OMIM. McKusick-Nathans Institute for Genetic Medicine, Johns Hopkins University (Baltimore, Md.) and National Center for Biotechnology Information, National Library of Medicine, (Bethesda, Md.) 2000. World Wide Web URL: http://www.ncbi.nlm.nih.gov/omim/). Column 2 provides diseases associated with the cytologic band disclosed in Table 1B.1, column 8, as determined using the Morbid Map database.

TABLE 5

| OMIM Reference | Description |
|---|---|
| 100678 | ACAT2 deficiency |
| 100690 | Myasthenic syndrome, slow-channel congenital, 601462 |
| 100710 | Myasthenic syndrome, slow-channel congenital, 601462 |
| 100730 | Myasthenia gravis, neonatal transient |
| 101000 | Meningioma, NF2-related, sporadic Schwannoma, sporadic |
| 101000 | Neurofibromatosis, type 2 |
| 101000 | Neurolemmomatosis |
| 101000 | Malignant mesothelioma, sporadic |
| 102200 | Somatotrophinoma |
| 102540 | Cardiomyopathy, idiopathic dilated |
| 102578 | Leukemia, acute promyelocytic, PML/RARA type |
| 102700 | Severe combined immunodeficiency due to ADA deficiency |
| 102700 | Hemolytic anemia due to ADA excess |
| 102770 | Myoadenylate deaminase deficiency |
| 102772 | [AMP deaminase deficiency, erythrocytic] |
| 103000 | Hemolytic anemia due to adenylate kinase deficiency |
| 103050 | Autism, succinylpurinemic |
| 103050 | Adenylosuccinase deficiency |
| 103581 | Albright hereditary osteodystrophy-2 |
| 103600 | [Dysalbuminemic hyperthyroxinemia] |
| 103600 | [Dysalbuminemic hyperzincemia], 194470 |
| 103600 | Analbuminemia |
| 103720 | Alcoholism, susceptibility to |
| 103850 | Aldolase A deficiency |
| 103950 | Emphysema due to alpha-2-macroglobulin deficiency |
| 104150 | [AFP deficiency, congenital] |
| 104150 | [Hereditary persistence of alpha-fetoprotein] |
| 104311 | Alzheimer disease-3 |
| 104500 | Amelogenesis imperfecta-2, hypoplastic local type |
| 104770 | Amyloidosis, secondary, susceptibility to |
| 105580 | Anal canal carcinoma |
| 105600 | Dyserythropoietic anemia, congenital, type III |
| 106100 | Angioedema, hereditary |
| 106150 | Hypertension, essential, susceptibility to |
| 106150 | Preeclampsia, susceptibility to |
| 106165 | Hypertension, essential, 145500 |
| 106180 | Myocardial infarction, susceptibility to |
| 106210 | Peters anomaly |
| 106210 | Cataract, congenital, with late-onset corneal dystrophy |
| 106210 | Foveal hypoplasia, isolated, 136520 |
| 106210 | Aniridia |
| 106300 | Ankylosing spondylitis |
| 107250 | Anterior segment mesenchymal dysgenesis |
| 107271 | CD59 deficiency |
| 107300 | Antithrombin III deficiency |
| 107470 | Atypical mycobacterial infection, familial disseminated, 209950 |
| 107470 | BCG infection, generalized familial |
| 107470 | Tuberculosis, susceptibility to |
| 107670 | Apolipoprotein A-II deficiency |
| 107680 | ApoA-I and apoC-III deficiency, combined |
| 107680 | Corneal clouding, autosomal recessive |
| 107680 | Amyloidosis, 3 or more types |
| 107680 | Hypertriglyceridemia, one form |
| 107680 | Hypoalphalipoproteinemia |
| 107720 | Hypertriglyceridemia |
| 107741 | Hyperlipoproteinemia, type III |
| 107777 | Diabetes insipidus, nephrogenic, autosomal recessive, 222000 |
| 107970 | Arrhythmogenic right ventricular dysplasia-1 |
| 108120 | Distal arthrogryposis-1 |
| 108725 | Atherosclerosis, susceptibility to |
| 108730 | Brody myopathy, 601003 |
| 108800 | Atrial septal defect, secundum type |
| 108962 | Hypertension, salt-resistant |
| 108985 | Atrophia areata |
| 109150 | Machado-Joseph disease |
| 109270 | Renal tubular acidosis, distal, 179800 |
| 109270 | Spherocytosis, hereditary |
| 109270 | [Acanthocytosis, one form] |
| 109270 | [Elliptocytosis, Malaysian-Melanesian type] |
| 109270 | Hemolytic anemia due to band 3 defect |
| 109565 | Lymphoma, B-cell |
| 109565 | Lymphoma, diffuse large cell |
| 109690 | Asthma, nocturnal, susceptibility to |
| 109690 | Obesity, susceptibility to |
| 109700 | Hemodialysis-related amyloidosis |
| 110100 | Blepharophimosis, epicanthus inversus, and ptosis, type 1 |
| 110700 | Vivax malaria, susceptibility to |
| 112250 | Bone dysplasia with medullary fibrosarcoma |
| 112262 | Fibrodysplasia ossificans progressiva, 135100 |
| 112410 | Hypertension with brachydactyly |
| 113721 | Breast cancer |
| 113811 | Epidermolysis bullosa, generalized atrophic benign, 226650 |
| 113900 | Heart block, progressive familial, type I |
| 114130 | Osteoporosis |
| 114208 | Malignant hyperthermia susceptibility 5, 601887 |
| 114208 | Hypokalemic periodic paralysis, 170400 |
| 114240 | Muscular dystrophy, limb-girdle, type 2A, 253600 |
| 114290 | Campomelic dysplasia with autosomal sex reversal |
| 114350 | Leukemia, acute myeloid |
| 114400 | Lynch cancer family syndrome II |
| 114550 | Hepatocellular carcinoma |
| 114835 | Monocyte carboxyesterase deficiency |
| 115200 | Cardiomyopathy, dilated, 1A |
| 115500 | Acatalasemia |
| 115650 | Cataract, anterior polar-1 |
| 115660 | Cataract, cerulean, type 1 |
| 115665 | Cataract, congenital, Volkmann type |
| 116800 | Cataract, Marner type |
| 116806 | Colorectal cancer |
| 116860 | Cavernous angiomatous malformations |
| 117700 | [Hypoceruloplasminemia, hereditary] |
| 117700 | Hemosiderosis, systemic, due to aceruloplasminemia |
| 118210 | Charcot-Marie-Tooth neuropathy-2A |
| 118425 | Myotonia congenita, dominant, 160800 |
| 118425 | Myotonia congenita, recessive, 255700 |
| 118425 | Myotonia levior, recessive |
| 118485 | Polycystic ovary syndrome with hyperandrogenemia |
| 118504 | Epilepsy, benign neonatal, type 1, 121200 |
| 118504 | Epilepsy, nocturnal frontal lobe, 600513 |
| 118511 | Schizophrenia, neurophysiologic defect in |
| 118800 | Choreoathetosis, familial paroxysmal |
| 119300 | van der Woude syndrome |
| 120070 | Alport syndrome, autosomal recessive, 203780 |
| 120110 | Metaphyseal chondrodysplasia, Schmid type |
| 120120 | Epidermolysis bullosa dystrophica, dominant, 131750 |
| 120120 | Epidermolysis bullosa dystrophica, recessive, 226600 |
| 120120 | Epidermolysis bullosa, pretibial, 131850 |
| 120131 | Alport syndrome, autosomal recessive, 203780 |
| 120131 | Hematuria, familial benign |
| 120140 | Osteoarthrosis, precocious |
| 120140 | SED congenita |
| 120140 | SMED Strudwick type |
| 120140 | Stickler syndrome, type I |
| 120140 | Wagner syndrome, type II |
| 120140 | Achondrogenesis-hypochondrogenesis, type II |
| 120140 | Kniest dysplasia |
| 120150 | Osteogenesis imperfecta, 4 clinical forms, 166200, 166210, 259420, 166220 |
| 120150 | Osteoporosis, idiopathic, 166710 |
| 120150 | Ehlers-Danlos syndrome, type VIIA1, 130060 |
| 120160 | Osteogenesis imperfecta, 4 clinical forms, 166200, 166210, 259420, 166220 |
| 120160 | Osteoporosis, idiopathic, 166710 |
| 120160 | Ehlers-Danlos syndrome, type VIIA2, 130060 |
| 120160 | Marfan syndrome, atypical |
| 120180 | Ehlers-Danlos syndrome, type III |
| 120180 | Ehlers-Danlos syndrome, type IV, 130050 |
| 120180 | Fibromuscular dysplasia of arteries, 135580 |
| 120180 | Aneurysm, familial, 100070 |
| 120190 | Ehlers-Danlos syndrome, type I, 130000 |
| 120215 | Ehlers-Danlos syndrome, type I, 130000 |
| 120215 | Ehlers-Danlos syndrome, type II, 130010 |
| 120220 | Bethlem myopathy, 158810 |
| 120240 | Bethlem myopathy, 158810 |
| 120260 | Epiphyseal dysplasia, multiple, type 2, 600204 |
| 120280 | Stickler syndrome, type III |
| 120280 | Marshall syndrome, 154780 |
| 120290 | OSMED syndrome, 215150 |
| 120290 | Stickler syndrome, type II, 184840 |
| 120435 | Muir-Torre syndrome, 158320 |
| 120435 | Colorectal cancer, hereditary, nonpolyposis, type 1 Ovarian cancer |
| 120436 | Muir-Torre family cancer syndrome, 158320 |
| 120436 | Turcot syndrome with glioblastoma, 276300 |
| 120436 | Colorectal cancer, hereditary nonpolyposis, type 2 |
| 120550 | C1q deficiency, type A |
| 120570 | C1q deficiency, type B |
| 120575 | C1q deficiency, type C |
| 120580 | C1r/C1s deficiency, combined |
| 120620 | SLE susceptibility |
| 120620 | CR1 deficiency |
| 120700 | C3 deficiency |
| 120810 | C4 deficiency |
| 120820 | C4 deficiency |
| 120900 | C5 deficiency |
| 120920 | Measles, susceptibility to |
| 120940 | C9 deficiency |
| 120950 | C8 deficiency, type I |
| 120960 | C8 deficiency, type II |
| 121014 | Heterotaxia, visceroatrial, autosomal recessive |
| 121050 | Contractural arachnodactyly, congenital |
| 121360 | Myeloid leukemia, acute, M4Eo subtype |
| 121800 | Corneal dystrophy, crystalline, Schnyder |
| 122720 | Nicotine addiction, protection from |
| 122720 | Coumarin resistance, 122700 |
| 123000 | Craniometaphyseal dysplasia |
| 123100 | Craniosynostosis, type 1 |
| 123101 | Craniosynostosis, type 2 |
| 123270 | [Creatine kinase, brain type, ectopic expression of] |
| 123580 | Cataract, congenital, autosomal dominant |
| 123620 | Cataract, cerulean, type 2, 601547 |
| 123660 | Cataract, Coppock-like |
| 123829 | Melanoma |
| 123940 | White sponge nevus, 193900 |
| 124020 | Mephenytoin poor metabolizer |
| 124030 | Parkinsonism, susceptibility to |
| 124030 | Debrisoquine sensitivity |
| 124200 | Darier disease (keratosis follicularis) |
| 125264 | Leukemia, acute nonlymphocytic |
| 125270 | Porphyria, acute hepatic |
| 125270 | Lead poisoning, susceptibility to |
| 125370 | Dentatorubro-pallidoluysian atrophy |
| 125490 | Dentinogenesis imperfecta-1 |
| 125660 | Myopathy, desminopathic |
| 125660 | Cardiomyopathy |
| 125852 | Insulin-dependent diabetes mellitus-2 |
| 126060 | Anemia, megaloblastic, due to DHFR deficiency |
| 126337 | Myxoid liposarcoma |
| 126340 | Xeroderma pigmentosum, group D, 278730 |
| 126391 | DNA ligase I deficiency |
| 126451 | Schizophrenia, susceptibility to |
| 126452 | Autonomic nervous system dysfunction |
| 126452 | [Novelty seeking personality] |
| 126600 | Drusen, radial, autosomal dominant |
| 126650 | Chloride diarrhea, congenital, Finnish type, 214700 |
| 126650 | Colon cancer |
| 128100 | Dystonia-1, torsion |
| 129010 | Neuropathy, congenital hypomyelinating, 1 |
| 129490 | Ectodermal dysplasia-3, anhidrotic |
| 129900 | EEC syndrome-1 |
| 130410 | Glutaricaciduria, type IIB |
| 130500 | Elliptocytosis-1 |
| 130650 | Beckwith-Wiedemann syndrome |
| 131100 | Multiple endocrine neoplasia I |
| 131100 | Prolactinoma, hyperparathyroidism, carcinoid syndrome |
| 131100 | Carcinoid tumor of lung |
| 131195 | Hereditary hemorrhagic telangiectasia-1, 187300 |
| 131210 | Atherosclerosis, susceptibility to |
| 131242 | Shah-Waardenburg syndrome, 277580 |
| 131400 | Eosinophilia, familial |
| 131440 | Eosinophilic myeloproliferative disorder |
| 132700 | Cylindromatosis |
| 132810 | Diphenylhydantoin toxicity |
| 132810 | Fetal hydantoin syndrome |
| 133170 | Erythremia |
| 133171 | [Erythrocytosis, familial], 133100 |
| 133200 | Erythrokeratodermia variabilis |
| 133430 | Breast cancer |
| 133430 | Estrogen resistance |
| 133450 | Neuroepithelioma |
| 133450 | Ewing sarcoma |
| 133510 | Trichothiodystrophy |
| 133510 | Xeroderma pigmentosum, group B |
| 133550 | Dicarboxylicaminoaciduria, 222730 |
| 133700 | Chondrosarcoma, 215300 |
| 133700 | Exostoses, multiple, type 1 |
| 133701 | Exostoses, multiple, type 2 |
| 133780 | Vitreoretinopathy, exudative, familial |
| 134370 | Membroproliferative glomerulonephritis |
| 134370 | Factor H deficiency |
| 134370 | Hemolytic-uremic syndrome, 235400 |
| 134570 | Factor XIIIA deficiency |
| 134580 | Factor XIIIB deficiency |
| 134637 | Autoimmune lymphoproliferative syndrome |
| 134790 | Hyperferritinemia-cataract syndrome, 600886 |
| 134820 | Dysfibrinogenemia, alpha type, causing bleeding diathesis |
| 134820 | Dysfibrinogenemia, alpha type, causing recurrent thrombosis |
| 134820 | Amyloidosis, hereditary renal, 105200 |
| 134830 | Dysfibrinogenemia, beta type |
| 134850 | Dysfibrinogenemia, gamma type |
| 134850 | Hypofibrinogenemia, gamma type |
| 134934 | Thanatophoric dysplasia, types I and II, 187600 |
| 134934 | Achondroplasia, 100800 |
| 134934 | Craniosynostosis, nonsyndromic |
| 134934 | Crouzon syndrome with acanthosis nigricans |
| 134934 | Hypochondroplasia, 146000 |
| 135300 | Fibromatosis, gingival |
| 135600 | Ehlers-Danlos syndrome, type X |
| 135700 | Fibrosis of extraocular muscles, congenital, 1 |
| 135940 | Ichthyosis vulgaris, 146700 |
| 136132 | [Fish-odor syndrome], 602079 |
| 136350 | Pfeiffer syndrome, 101600 |
| 136435 | Ovarian dysgenesis, hypergonadotropic, with normal karyotype, 233300 |
| 136530 | Male infertility, familial |
| 136836 | Fucosyltransferase-6 deficiency |
| 137350 | Amyloidosis, Finnish type, 105120 |
| 138030 | [Hyperproglucagonemia] |
| 138033 | Diabetes mellitus, type II |
| 138040 | Cortisol resistance |
| 138079 | Hyperinsulinism, familial, 602485 |
| 138079 | MODY, type 2, 125851 |
| 138130 | Hyperinsulinism-hyperammonemia syndrome |
| 138140 | Glucose transport defect, blood-brain barrier |
| 138160 | Diabetes mellitus, noninsulin-dependent |
| 138160 | Fanconi-Bickel syndrome, 227810 |
| 138190 | Diabetes mellitus, noninsulin-dependent |
| 138250 | P5CS deficiency |
| 138300 | Hemolytic anemia due to glutathione reductase deficiency |
| 138320 | Hemolytic anemia due to glutathione peroxidase deficiency |
| 138491 | Startle disease, autosomal recessive |
| 138491 | Startle disease/hyperekplexia, autosomal dominant, 149400 |
| 138491 | Hyperekplexia and spastic paraparesis |
| 138570 | Non-insulin dependent diabetes mellitus, susceptibility to |
| 138571 | Glycogen synthase, liver, deficiency of, 240600 |
| 138700 | [Apolipoprotein H deficiency] |
| 138720 | Bernard-Soulier syndrome, type B |
| 138971 | Kostmann neutropenia, 202700 |
| 138981 | Pulmonary alveolar proteinosis, 265120 |
| 139130 | Hypertension, essential, susceptibility to, 145500 |
| 139150 | Basal cell carcinoma |
| 139190 | Gigantism due to GHRF hypersecretion |
| 139190 | Isolated growth hormone deficiency due to defect in GHRF |
| 139191 | Growth hormone deficient dwarfism |
| 139250 | Isolated growth hormone deficiency, Illig type with absent GH and Kowarski type |
| | with bioinactive GH |
| 139320 | Pituitary ACTH secreting adenoma |
| 139320 | Pseudohypoparathyroidism, type Ia, 103580 |
| 139320 | Somatotrophinoma |
| 139320 | McCune-Albright polyostotic fibrous dysplasia, 174800 |
| 139330 | Night blindness, congenital stationary |
| 139350 | Epidermolytic hyperkeratosis, 113800 |
| 139350 | Keratoderma, palmoplantar, nonepidermolytic |
| 139360 | Pituitary ACTH-secreting adenoma |
| 140100 | [Anhaptoglobinemia] |
| 140100 | [Hypohaptogloginemia] |
| 141750 | Alpha-thalassemia/mental retardation syndrome, type 1 |
| 141800 | Methemoglobinemias, alpha- |
| 141800 | Thalassemias, alpha- |
| 141800 | Erythremias, alpha- |
| 141800 | Heinz body anemias, alpha- |
| 141850 | Thalassemia, alpha- |
| 141850 | Erythrocytosis |
| 141850 | Heinz body anemia |
| 141850 | Hemoglobin H disease |
| 141850 | Hypochromic microcytic anemia |
| 141900 | Methemoglobinemias, beta- |
| 141900 | Sickle cell anemia |
| 141900 | Thalassemias, beta- |
| 141900 | Erythremias, beta- |
| 141900 | HPFH, deletion type |
| 141900 | Heinz body anemias, beta- |
| 142000 | Thalassemia due to Hb Lepore |
| 142000 | Thalassemia, delta- |
| 142200 | HPFH, nondeletion type A |
| 142250 | HPFH, nondeletion type G |
| 142270 | Hereditary persistence of fetal hemoglobin |
| 142335 | Hereditary persistence of fetal hemoglobin, heterocellular, Indian type |
| 142470 | [Hereditary persistence of fetal hemoglobin, heterocellular] |
| 142640 | Thrombophilia due to elevated HRG |
| 142680 | Periodic fever, familial |
| 142857 | Pemphigoid, susceptibility to |
| 142858 | Beryllium disease, chronic, susceptibility to |
| 142946 | Holoprosencephaly-4 |
| 142959 | Hand-foot-uterus syndrome, 140000 |
| 142989 | Synpolydactyly, type II, 186000 |
| 143100 | Huntington disease |
| 143200 | Wagner syndrome |
| 143200 | Erosive vitreoretinopathy |
| 143890 | Hypercholesterolemia, familial |
| 144200 | Epidermolytic palmoplantar keratoderma |
| 145001 | Hyperparathyroidism-jaw tumor syndrome |
| 145260 | Pseudohypoaldosteronism, type II |
| 145410 | Opitz G syndrome, type II |
| 145505 | Hypertension, essential |
| 145981 | Hypocalciuric hypercalcemia, type II |
| 146150 | Hypomelanosis of Ito |
| 146150 | Hypomelanosis of Ito |
| 146760 | [IgG receptor I, phagocytic, familial deficiency of] |
| 146790 | Lupus nephritis, susceptibility to |
| 147050 | Atopy |
| 147141 | Leukemia, acute lymphoblastic |
| 147200 | [Kappa light chain deficiency] |
| 147280 | Hepatocellular carcinoma |
| 147440 | Growth retardation with deafness and mental retardation |
| 147450 | Amytrophic lateral sclerosis, due to SOD1 deficiency, 105400 |
| 147545 | Diabetes mellitus, noninsulin-dependent |
| 147570 | Interferon, immune, deficiency |
| 147660 | Interferon, alpha, deficiency |
| 147670 | Rabson-Mendenhall syndrome |
| 147670 | Diabetes mellitus, insulin-resistant, with acanthosis nigricans |
| 147670 | Leprechaunism |
| 147730 | Interleukin-2 receptor, alpha chain, deficiency of |
| 147781 | Atopy, susceptibility to |
| 147790 | Leukemia, acute lymphocytic, with 4/11 translocation |
| 147791 | Jacobsen syndrome |
| 148040 | Epidermolysis bullosa simplex, Koebner, Dowling-Meara, and Weber-Cockayne |
| | types, 131900, 131760, 131800 |
| 148041 | Pachyonychia congenita, Jadassohn-Lewandowsky type, 167200 |
| 148043 | Meesmann corneal dystrophy, 122100 |
| 148065 | White sponge nevus, 193900 |
| 148066 | Epidermolysis bullosa simplex, Koebner, Dowling-Meara, and Weber-Cockayne |
| | types, 131900, 131760, 131800 |
| 148066 | Epidermolysis bullosa simplex, recessive, 601001 |
| 148067 | Nonepidermolytic palmoplantar keratoderma, 600962 |
| 148067 | Pachyonychia congenita, Jadassohn-Lewandowsky type, 167200 |
| 148069 | Pachyonychia congenita, Jackson-Lawler type, 167210 |
| 148070 | Liver disease, susceptibility to, from hepatotoxins or viruses |
| 148080 | Epidermolytic hyperkeratosis, 113800 |
| 148370 | Keratolytic winter erythema |
| 148500 | Tylosis with esophageal cancer |
| 150000 | Exertional myoglobinuria due to deficiency of LDH-A |
| 150100 | Lactate dehydrogenase-B deficiency |
| 150200 | [Placental lactogen deficiency] |
| 150210 | Lactoferrin-deficient neutrophils, 245480 |
| 150230 | Langer-Giedion syndrome |
| 150240 | Cutis laxa, marfanoid neonatal type |
| 150250 | Larsen syndrome, autosomal dominant |
| 150270 | Laryngeal adductor paralysis |
| 150292 | Epidermolysis bullosa, Herlitz junctional type, 226700 |
| 150310 | Epidermolysis bullosa, Herlitz junctional type, 226700 |
| 150310 | Epidermolysis bullosa, generalized atrophic benign, 226650 |
| 151385 | Leukemia, acute myeloid |
| 151390 | Leukemia, acute T-cell |
| 151400 | Leukemia/lymphoma, B-cell, 1 |
| 151410 | Leukemia, chronic myeloid |
| 151440 | Leukemia, T-cell acute lymphoblastoid |
| 151670 | Hepatic lipase deficiency |
| 152200 | Coronary artery disease, susceptibility to |
| 152427 | Long QT syndrome-2 |
| 152445 | Vohwinkel syndrome, 124500 |
| 152445 | Erythrokeratoderma, progressive symmetric, 602036 |
| 152760 | Hypogonadotropic hypogonadism due to GNRH deficiency, 227200 |
| 152790 | Precocious puberty, male, 176410 |
| 152790 | Leydig cell hypoplasia |
| 153454 | Ehlers-Danlos syndrome, type VI, 225400 |
| 153455 | Cutis laxa, recessive, type I, 219100 |
| 153700 | Macular dystrophy, vitelliform type |
| 153880 | Macular dystrophy, dominant cystoid |
| 153900 | Stargardt disease-2 |
| 154275 | Malignant hyperthermia susceptibility 2 |
| 154276 | Malignant hyperthermia susceptibility 3 |
| 154400 | Acrofacial dysostosis, Nager type |
| 154500 | Treacher Collins mandibulofacial dysostosis |
| 154550 | Carbohydrate-deficient glycoprotein syndrome, type Ib, 602579 |
| 154705 | Marfan syndrome, type II |
| 155555 | [Red hair/fair skin] |
| 155555 | UV-induced skin damage, vulnerability to |
| 155600 | Malignant melanoma, cutaneous |
| 156225 | Muscular dystrophy, congenital merosin-deficient |
| 156232 | Mesomelic dysplasia, Kantaputra type |
| 156570 | Methylcobalamin deficiency, cb1 G type |
| 156600 | Microcoria, congenital |
| 156845 | Tietz syndrome, 103500 |
| 156845 | Waardenburg syndrome, type IIA, 193510 |
| 156845 | Waardenburg syndrome/ocular albinism, digenic, 103470 |
| 156850 | Cataract, congenital, with microphthalmia |
| 157147 | Abetalipoproteinemia, 200100 |
| 157170 | Holoprosencephaly-2 |
| 157640 | PEO with mitochondrial DNA deletions, type 1 |
| 157655 | Lactic acidosis due to defect in iron-sulfur cluster of complex I |
| 157900 | Moebius syndrome |
| 159000 | Muscular dystrophy, limb-girdle, type 1A |
| 159001 | Muscular dystrophy, limb-girdle, type 1B |
| 159440 | Charcot-Marie-Tooth neuropathy-1B, 118200 |
| 159440 | Dejerine-Sottas disease, myelin P-related, 145900 |
| 159440 | Hypomyelination, congenital |
| 159555 | Leukemia, myeloid/lymphoid or mixed-lineage |
| 160777 | Griscelli disease, 214450 |
| 160781 | Cardiomyopathy, hypertrophic, mid-left ventricular chamber type |
| 160900 | Myotonic dystrophy |
| 161015 | Mitochondrial complex I deficiency, 252010 |
| 162100 | Neuralgic amyotrophy with predilection for brachial plexus |
| 162200 | Neurofibromatosis, type 1 |
| 162200 | Watson syndrome, 193520 |
| 162400 | Neuropathy, hereditary sensory and autonomic, type 1 |
| 163729 | Hypertension, pregnancy-induced |
| 163890 | Parkinson disease, type 1, 601508 |
| 164009 | Leukemia, acute promyelocytic, NUMA/RARA type |
| 164040 | Leukemia, acute promyelocytic, NPM/RARA type |
| 164160 | Obesity, severe, due to leptin deficiency |
| 164200 | Oculodentodigital dysplasia |
| 164200 | Syndactyly, type III, 186100 |
| 164500 | Spinocerebellar ataxia-7 |
| 164731 | Ovarian carcinoma, 167000 |
| 164759 | Ovarian carcinoma |
| 164790 | Colorectal cancer |
| 164860 | Renal cell carcinoma, papillary, familial and sporadic |
| 164920 | Piebaldism |
| 164920 | Mast cell leukemia |
| 164920 | Mastocytosis with associated hematologic disorder |
| 164953 | Liposarcoma |
| 165240 | Pallister-Hall syndrome, 146510 |
| 165240 | Postaxial polydactyly type A1, 174200 |
| 165240 | Greig cephalopolysyndactyly syndrome, 175700 |
| 165320 | Hepatocellular carcinoma |
| 165500 | Optic atrophy 1 |
| 166600 | Osteopetrosis, AD, type II |
| 167000 | Ovarian cancer, serous |
| 167250 | Paget disease of bone |
| 167409 | Optic nerve coloboma with renal disease, 120330 |
| 167410 | Rhabdomyosarcoma, alveolar, 268220 |
| 167415 | Hypothyroidism, congenital, due to thyroid dysgenesis or hypoplasia |
| 168000 | Paraganglioma, familial nonchromaffin, 1 |
| 168360 | Paraneoplastic sensory neuropathy |
| 168450 | Hypoparathyroidism, autosomal dominant |
| 168450 | Hypoparathyroidism, autosomal recessive |
| 168461 | Multiple myeloma, 254250 |
| 168461 | Parathyroid adenomatosis 1 |
| 168461 | Centrocytic lymphoma |
| 168468 | Metaphyseal chondrodysplasia, Murk Jansen type, 156400 |
| 168470 | Humoral hypercalcemia of malignancy |
| 168500 | Parietal foramina |
| 169600 | Hailey-Hailey disease |
| 170261 | Bare lymphocyte syndrome, type I, due to TAP2 deficiency |
| 170500 | Myotonia congenita, atypical acetazolamide-responsive |
| 170500 | Paramyotonia congenita, 168300 |
| 170500 | Hyperkalemic periodic paralysis |
| 170650 | Periodontitis, juvenile |
| 170995 | Zellweger syndrome-2 |
| 171050 | Colchicine resistance |
| 171060 | Cholestasis, progressive familial intrahepatic, type III, 602347 |
| 171190 | Hypertension, essential, 145500 |
| 171650 | Lysosomal acid phosphatase deficiency |
| 171760 | Hypophosphatasia, adult, 146300 |
| 171760 | Hypophosphatasia, infantile, 241500 |
| 171860 | Hemolytic anemia due to phosphofructokinase deficiency |
| 172400 | Hemolytic anemia due to glucosephosphate isomerase deficiency |
| 172400 | Hydrops fetalis, one form |
| 172411 | Colorectal cancer, resistance to |
| 172430 | Enolase deficiency |
| 172471 | Glycogenosis, hepatic, autosomal |
| 172490 | Phosphorylase kinase deficiency of liver and muscle, 261750 |
| 173350 | Plasminogen Tochigi disease |
| 173350 | Plasminogen deficiency, types I and II |
| 173350 | Thrombophilia, dysplasminogenemic |
| 173360 | Thrombophilia due to excessive plasminogen activator inhibitor |
| 173360 | Hemorrhagic diathesis due to PAI1 deficiency |
| 173370 | Plasminogen activator deficiency |
| 173470 | Glanzmann thrombasthenia, type B |
| 173610 | Platelet alpha/delta storage pool deficiency |
| 173850 | Polio, susceptibility to |
| 173870 | Xeroderma pigmentosum |
| 173870 | Fanconi anemia |
| 173910 | Polycystic kidney disease, adult, type II |
| 174000 | Medullary cystic kidney disease, AD |
| 174810 | Osteolysis, familial expansile |
| 174900 | Polyposis, juvenile intestinal |
| 175100 | Turcot syndrome, 276300 |
| 175100 | Adenomatous polyposis coli |
| 175100 | Adenomatous polyposis coli, attenuated |
| 175100 | Colorectal cancer |
| 175100 | Desmoid disease, hereditary, 135290 |
| 175100 | Gardner syndrome |
| 176000 | Porphyria, acute intermittent |
| 176100 | Porphyria cutanea tarda |
| 176100 | Porphyria, hepatoerythropoietic |
| 176260 | Episodic ataxia/myokymia syndrome, 160120 |
| 176261 | Jervell and Lange-Nielsen syndrome, 220400 |
| 176270 | Prader-Willi syndrome |
| 176300 | [Dystransthyretinemic hyperthyroxinemia] |
| 176300 | Carpal tunnel syndrome, familial |
| 176300 | Amyloid neuropathy, familial, several allelic types |
| 176300 | Amyloidosis, senile systemic |
| 176450 | Sacral agenesis-1 |
| 176730 | Diabetes mellitus, rare form |
| 176730 | Hyperproinsulinemia, familial |
| 176730 | MODY, one form |
| 176801 | Metachromatic leukodystrophy due to deficiency of SAP-1 |
| 176801 | Gaucher disease, variant form |
| 176830 | Obesity, adrenal insufficiency, and red hair |
| 176830 | ACTH deficiency |
| 176860 | Purpura fulminans, neonatal |
| 176860 | Thrombophilia due to protein C deficiency |
| 176880 | Protein S deficiency |
| 176930 | Dysprothrombinemia |
| 176930 | Hypoprothrombinemia |
| 176943 | Apert syndrome, 101200 |
| 176943 | Pfeiffer syndrome, 101600 |
| 176943 | Beare-Stevenson cutis gyrata syndrome, 123790 |
| 176943 | Crouzon craniofacial dysostosis, 123500 |
| 176943 | Jackson-Weiss syndrome, 123150 |
| 176947 | Selective T-cell defect |
| 176960 | Pituitary tumor, invasive |
| 177070 | Spherocytosis, hereditary, Japanese type |
| 177070 | Hermansky-Pudlak syndrome, 203300 |
| 177400 | Apnea, postanesthetic |
| 177900 | Psoriasis susceptibility-1 |
| 178300 | Ptosis, hereditary congenital, 1 |
| 178600 | Pulmonary hypertension, familial primary |
| 178640 | Pulmonary alveolar proteinosis, congenital, 265120 |
| 179095 | Male infertility |
| 179450 | Ragweed sensitivity |
| 179605 | Retinitis pigmentosa, digenic |
| 179605 | Retinitis pigmentosa-7, peripherin-related |
| 179605 | Retinitis punctata albescens |
| 179605 | Butterfly dystrophy, retinal |
| 179605 | Macular dystrophy |
| 179615 | Reticulosis, familial histiocytic, 267700 |
| 179615 | Severe combined immunodeficiency, B cell-negative, 601457 |
| 179616 | Severe combined immunodeficiency, B cell-negative, 601457 |
| 179755 | Renal cell carcinoma, papillary, 1 |
| 179820 | [Hyperproreninemia] |
| 180020 | Retinal cone dystrophy-1 |
| 180069 | Retinal dystrophy, autosomal recessive, childhood-onset |
| 180069 | Retinitis pigmentosa-20 |
| 180069 | Leber congenital amaurosis-2, 204100 |
| 180071 | Retinitis pigmentosa, autosomal recessive |
| 180072 | Night blindness, congenital stationary, type 3, 163500 |
| 180072 | Retinitis pigmentosa, autosomal recessive |
| 180100 | Retinitis pigmentosa-1 |
| 180104 | Retinitis pigmentosa-9 |
| 180105 | Retinitis pigmentosa-10 |
| 180200 | Osteosarcoma, 259500 |
| 180200 | Pinealoma with bilateral retinoblastoma |
| 180200 | Retinoblastoma |
| 180200 | Bladder cancer, 109800 |
| 180240 | Leukemia, acute promyelocytic |
| 180250 | Retinol binding protein, deficiency of |
| 180297 | Anemia, hemolytic, Rh-null, suppressor type, 268150 |
| 180380 | Night blindness, congenital stationery, rhodopsin-related |
| 180380 | Retinitis pigmentosa, autosomal recessive |
| 180380 | Retinitis pigmentosa-4, autosomal dominant |
| 180381 | Oguchi disease-2, 258100 |
| 180385 | Leukemia, acute T-cell |
| 180721 | Retinitis pigmentosa, digenic |
| 180840 | Susceptibility to IDDM |
| 180860 | Russell-Silver syndrome |
| 180901 | Malignant hyperthermia susceptibility 1, 145600 |
| 180901 | Central core disease, 117000 |
| 181030 | Salivary gland pleomorphic adenoma |
| 181031 | Oguchi disease-1, 258100 |
| 181405 | Scapuloperoneal spinal muscular atrophy, New England type |
| 181430 | Scapuloperoneal syndrome, myopathic type |
| 181460 | Schistosoma mansoni, susceptibility/resistance to |
| 181510 | Schizophrenia |
| 181600 | Sclerotylosis |
| 182138 | Anxiety-related personality traits |
| 182279 | Prader-Willi syndrome |
| 182280 | Small-cell cancer of lung |
| 182380 | Glucose/galactose malabsorption |
| 182381 | Renal glucosuria, 253100 |
| 182452 | Lung cancer, small cell |
| 182500 | Cataract, congenital |
| 182600 | Spastic paraplegia-3A |
| 182601 | Spastic paraplegia-4 |
| 182860 | Pyropoikilocytosis |
| 182860 | Spherocytosis, recessive |
| 182860 | Elliptocytosis-2 |
| 182870 | Spherocytosis-1 |
| 182870 | Elliptocytosis-3 |
| 182870 | Anemia, neonatal hemolytic, fatal and near-fatal |
| 182900 | Spherocytosis-2 |
| 183600 | Split hand/foot malformation, type 1 |
| 185000 | Stomatocytosis I |
| 185430 | Atherosclerosis, susceptibility to |
| 185470 | Myopathy due to succinate dehydrogenase deficiency |
| 185800 | Symphalangism, proximal |
| 186580 | Arthrocutaneouveal granulomatosis |
| 186740 | Immunodeficiency due to defect in CD3-gamma |
| 186770 | Leukemia, T-cell acute lymphocytic |
| 186780 | CD3, zeta chain, deficiency |
| 186830 | Immunodeficiency, T-cell receptor/CD3 complex |
| 186860 | Leukemia/lymphoma, T-cell |
| 186880 | Leukemia/lymphoma, T-cell |
| 186921 | Leukemia, T-cell acute lymphoblastic |
| 187040 | Leukemia-1, T-cell acute lymphoblastic |
| 187680 | 6-mercaptopurine sensitivity |
| 188025 | Thrombocytopenia, Paris-Trousseau type |
| 188070 | Bleeding disorder due to defective thromboxane A2 receptor |
| 188450 | Goiter, adolescent multinodular |
| 188450 | Goiter, nonendemic, simple |
| 188450 | Hypothyroidism, hereditary congenital |
| 188540 | Hypothyroidism, nongoitrous |
| 188826 | Sorsby fundus dystrophy, 136900 |
| 189800 | Preeclampsia/eclampsia |
| 189980 | Leukemia, chronic myeloid |
| 190000 | Atransferrinemia |
| 190020 | Bladder cancer, 109800 |
| 190040 | Meningioma, SIS-related |
| 190040 | Dermatofibrosarcoma protuberans |
| 190040 | Giant-cell fibroblastoma |
| 190100 | Geniospasm |
| 190160 | Thyroid hormone resistance, 274300, 188570 |
| 190182 | Colon cancer |
| 190182 | Colorectal cancer, familial nonpolyposis, type 6 |
| 190195 | Ichthyosiform erythroderma, congenital, 242100 |
| 190195 | Ichthyosis, lamellar, autosomal recessive, 242300 |
| 190198 | Leukemia, T-cell acute lymphoblastic |
| 190450 | Hemolytic anemia due to triosephosphate isomerase deficiency |
| 190605 | Triphalangeal thumb-polysyndactyly syndrome |
| 190685 | Down syndrome |
| 190900 | Colorblindness, tritan |
| 191010 | Cardiomyopathy, familial hypertrophic, 3, 115196 |
| 191030 | Nemaline myopathy-1, 161800 |
| 191044 | Cardiomyopathy, familial hypertrophic |
| 191045 | Cardiomyopathy, familial hypertrophic, 2, 115195 |
| 191092 | Tuberous sclerosis-2 |
| 191100 | Tuberous sclerosis-1 |
| 191170 | Colorectal cancer, 114500 |
| 191170 | Li-Fraumeni syndrome |
| 191181 | Cervical carcinoma |
| 191290 | Segawa syndrome, recessive |
| 191315 | Insensitivity to pain, congenital, with anhidrosis, 256800 |
| 191540 | [Urate oxidase deficiency] |
| 192090 | Ovarian carcinoma |
| 192090 | Breast cancer, lobular |
| 192090 | Endometrial carcinoma |
| 192090 | Gastric cancer, familial, 137215 |
| 192340 | Diabetes insipidus, neurohypophyseal, 125700 |
| 192500 | Jervell and Lange-Nielsen syndrome, 220400 |
| 192500 | Long QT syndrome-1 |
| 192974 | Neonatal alloimmune thrombocytopenia |
| 192974 | Glycoprotein Ia deficiency |
| 193100 | Hypophosphatemic rickets, autosomal dominant |
| 193235 | Vitreoretinopathy, neovascular inflammatory |
| 193300 | Renal cell carcinoma |
| 193300 | von Hippel-Lindau syndrome |
| 193400 | von Willebrand disease |
| 193500 | Rhabdomyosarcoma, alveolar, 268220 |
| 193500 | Waardenburg syndrome, type I |
| 193500 | Waardenburg syndrome, type III, 148820 |
| 193500 | Craniofacial-deafness-hand syndrome, 122880 |
| 194070 | Wilms tumor, type 1 |
| 194070 | Denys-Drash syndrome |
| 194070 | Frasier syndrome, 136680 |
| 194071 | Wilms tumor, type 2 |
| 194071 | Adrenocortical carcinoma, hereditary, 202300 |
| 194190 | Wolf-Hirschhorn syndrome |
| 200150 | Choreoacanthocytosis |
| 200990 | Acrocallosal syndrome |
| 201450 | Acyl-CoA dehydrogenase, medium chain, deficiency of |
| 201460 | Acyl-CoA dehydrogenase, long chain, deficiency of |
| 201470 | Acyl-CoA dehydrogenase, short-chain, deficiency of |
| 201910 | Adrenal hyperplasia, congenital, due to 21-hydroxylase deficiency |
| 202110 | Adrenal hyperplasia, congenital, due to 17-alpha-hydroxylase deficiency |
| 203100 | Waardenburg syndrome/ocular albinism, digenic, 103470 |
| 203100 | Albinism, oculocutaneous, type IA |
| 203200 | Albinism, ocular, autosomal recessive |
| 203200 | Albinism, oculocutaneous, type II |
| 203300 | Hermansky-Pudlak syndrome |
| 203310 | Ocular albinism, autosomal recessive |
| 203500 | Alkaptonuria |
| 203740 | Alpha-ketoglutarate dehydrogenase deficiency |
| 203750 | 3-ketothiolase deficiency |
| 203800 | Alstrom syndrome |
| 204500 | Ceroid-lipofuscinosis, neuronal 2, classic late infantile |
| 205100 | Amyotrophic lateral sclerosis, juvenile |
| 207750 | Hyperlipoproteinemia, type Ib |
| 207800 | Argininemia |
| 208100 | Arthrogryposis multiplex congenita, neurogenic |
| 208250 | Jacobs syndrome |
| 208400 | Aspartylglucosaminuria |
| 209901 | Bardet-Biedl syndrome 1 |
| 211420 | Breast cancer, ductal |
| 212138 | Carnitine-acylcarnitine translocase deficiency |
| 214300 | Klippel-Feil syndrome |
| 214400 | Charcot-Marie-Tooth neuropathy-4A |
| 214500 | Chediak-Higashi syndrome |
| 215700 | Citrullinemia |
| 216550 | Cohen syndrome |
| 216900 | Achromatopsia |
| 216950 | C1r/C1s deficiency, combined |
| 217000 | C2 deficiency |
| 217050 | C6 deficiency |
| 217050 | Combined C6/C7 deficiency |
| 217070 | C7 deficiency |
| 217800 | Macular corneal dystrophy |
| 218000 | Andermann syndrome |
| 218030 | Apparent mineralocorticoid excess, hypertension due to |
| 219800 | Cystinosis, nephropathic |
| 221770 | Polycystic lipomembranous osteodysplasia with sclerosing leukencephalopathy |
| 221820 | Gliosis, familial progressive subcortical |
| 222100 | Diabetes mellitus, insulin-dependent-1 |
| 222600 | Atelosteogenesis II, 256050 |
| 222600 | Achondrogenesis Ib, 600972 |
| 222600 | Diastrophic dysplasia |
| 222700 | Lysinuric protein intolerance |
| 222800 | Hemolytic anemia due to bisphosphoglycerate mutase deficiency |
| 222900 | Sucrose intolerance |
| 223000 | Lactase deficiency, adult, 223100 |
| 223000 | Lactase deficiency, congenital |
| 223360 | Dopamine-beta-hydroxylase deficiency |
| 223900 | Dysautonomia, familial |
| 224100 | Congenital dyserythropoietic anemia II |
| 224120 | Dyserythropoietic anemia, contenital, type I |
| 225500 | Ellis-van Creveld syndrome |
| 227220 | [Eye color, brown] |
| 227500 | Factor VII deficiency |
| 227600 | Factor X deficiency |
| 227646 | Fanconi anemia, type D |
| 227650 | Fanconi anemia, type A |
| 228960 | [Kininogen deficiency] |
| 229300 | Friedreich ataxia |
| 229300 | Friedreich ataxia with retained reflexes |
| 229600 | Fructose intolerance |
| 229700 | Fructose-bisphosphatase deficiency |
| 229800 | [Fructosuria] |
| 230000 | Fucosidosis |
| 230200 | Galactokinase deficiency with cataracts |
| 230350 | Galactose epimerase deficiency |
| 230400 | Galactosemia |
| 230450 | Hemolytic anemia due to gamma-glutamylcysteine synthetase deficiency |
| 230800 | Gaucher disease |
| 230800 | Gaucher disease with cardiovascular calcification |
| 231550 | Achalasia-addisonianism-alacrimia syndrome |
| 231670 | Glutaricaciduria, type I |
| 231680 | Glutaricaciduria, type IIA |
| 231950 | Glutathioninuria |
| 232000 | Propionicacidemia, type I or pccA type |
| 232050 | Propionicacidemia, type II or pccB type |
| 232300 | Glycogen storage disease II |
| 232400 | Glycogen storage disease IIIa |
| 232400 | Glycogen storage disease IIIb |
| 232500 | Glycogen storage disease IV |
| 232600 | McArdle disease |
| 232700 | Glycogen storage disease VI |
| 232800 | Glycogen storage disease VII |
| 233100 | [Renal glucosuria] |
| 233700 | Chronic granulomatous disease due to deficiency of NCF-1 |
| 233710 | Chronic granulomatous disease due to deficiency of NCF-2 |
| 234000 | Factor XII deficiency |
| 234200 | Neurodegeneration with brain iron accumulation |
| 235200 | Hemochromatosis |
| 235800 | [Histidinemia] |
| 236100 | Holoprosencephaly-1 |
| 236200 | Homocystinuria, B6-responsive and nonresponsive types |
| 236730 | Urofacial syndrome |
| 237300 | Carbamoylphosphate synthetase I deficiency |
| 238300 | Hyperglycinemia, nonketotic, type I |
| 238310 | Hyperglycinemia, nonketotic, type II |
| 238600 | Chylomicronemia syndrome, familial |
| 238600 | Combined hyperlipemia, familial |
| 238600 | Hyperlipoproteinemia I |
| 238600 | Lipoprotein lipase deficiency |
| 238970 | HHH syndrome |
| 239100 | Van Buchem disease |
| 239500 | Hyperprolinemia, type I |
| 240300 | Autoimmune polyglandular disease, type I |
| 240400 | Scurvy |
| 243500 | Isovalericacidemia |
| 245000 | Papillon-Lefevre syndrome |
| 245050 | Ketoacidosis due to SCOT deficiency |
| 245200 | Krabbe disease |
| 245349 | Lacticacidemia due to PDX1 deficiency |
| 245900 | Norum disease |
| 245900 | Fish-eye disease |
| 246450 | HMG-CoA lyase deficiency |
| 246530 | Leukotriene C4 synthase deficiency |
| 246600 | Pancreatic lipase deficiency |
| 246900 | Lipoamide dehydrogenase deficiency |
| 247200 | Miller-Dieker lissencephaly syndrome |
| 247640 | Leukemia, acute lymphoblastic |
| 248510 | Mannosidosis, beta- |
| 248600 | Maple syrup urine disease, type Ia |
| 248610 | Maple syrup urine disease, type II |
| 248611 | Maple syrup urine disease, type Ib |
| 249000 | Meckel syndrome |
| 249270 | Thiamine-responsive megaloblastic anemia |
| 250100 | Metachromatic leukodystrophy |
| 250250 | Cartilage-hair hypoplasia |
| 250790 | Methemoglobinemia due to cytochrome b5 deficiency |
| 250800 | Methemoglobinemia, type I |
| 250800 | Methemoglobinemia, type II |
| 251000 | Methylmalonicaciduria, mutase deficiency type |
| 251600 | Microphthalmia, autosomal recessive |
| 252500 | Mucolipidosis II |
| 252500 | Mucolipidosis III |
| 252800 | Mucopolysaccharidosis Ih |
| 252800 | Mucopolysaccharidosis Ih/s |
| 252800 | Mucopolysaccharidosis Is |
| 252900 | Sanfilippo syndrome, type A |
| 252940 | Sanfilippo syndrome, type D |
| 253000 | Mucopolysaccharidosis IVA |
| 253200 | Maroteaux-Lamy syndrome, several forms |
| 253250 | Mulibrey nanism |
| 253270 | Multiple carboxylase deficiency, biotin-responsive |
| 253601 | Miyoshi myopathy, 254130 |
| 253601 | Muscular dystrophy, limb-girdle, type 2B |
| 253800 | Walker-Warburg syndrome, 236670 |
| 253800 | Fukuyama type congenital muscular dystrophy |
| 254210 | Myasthenia gravis, familial infantile |
| 254770 | Epilepsy, juvenile myoclonic |
| 254780 | Myoclonus epilepsy, Lafora type |
| 255800 | Schwartz-Jampel syndrome |
| 256030 | Nemaline myopathy-2 |
| 256100 | Nephronophthisis, juvenile |
| 256540 | Galactosialidosis |
| 256550 | Sialidosis, type I |
| 256550 | Sialidosis, type II |
| 256700 | Neuroblastoma |
| 256731 | Ceroid-lipofuscinosis, neuronal-5, variant late infantile |
| 256850 | Giant axonal neuropathy-1 |
| 257200 | Niemann-Pick disease, type A |
| 257200 | Niemann-Pick disease, type B |
| 257220 | Niemann-Pick disease, type C |
| 257220 | Niemann-Pick disease, type D, 257250 |
| 258501 | 3-methylglutaconicaciduria, type III |
| 258870 | Gyrate atrophy of choroid and retina with ornithinemia, B6 responsive or |
| | unresponsive |
| 259700 | Osteopetrosis, recessive |
| 259730 | Renal tubular acidosis-osteopetrosis syndrome |
| 259770 | Osteoporosis-pseudoglioma syndrome |
| 259900 | Hyperoxaluria, primary, type 1 |
| 261510 | Pseudo-Zellweger syndrome |
| 261515 | Peroxisomal bifunctional enzyme deficiency |
| 261600 | Phenylketonuria |
| 261600 | [Hyperphenylalaninemia, mild] |
| 261640 | Phenylketonuria due to PTS deficiency |
| 261670 | Myopathy due to phosphoglycerate mutase deficiency |
| 262000 | Bjornstad syndrome |
| 263200 | Polycystic kidney disease, autosomal recessive |
| 263700 | Porphyria, congenital erythropoietic |
| 264300 | Pseudohermaphroditism, male, with gynecomastia |
| 264470 | Adrenoleukodystrophy, pseudoneonatal |
| 264700 | Pseudo-vitamin D dependency rickets 1 |
| 266100 | Pyridoxine dependency with seizures |
| 266150 | Pyruvate carboxylase deficiency |
| 266200 | Anemia, hemolytic, due to PK deficiency |
| 266300 | [Hair color, red] |
| 266600 | Inflammatory bowel disease-1 |
| 267750 | Knobloch syndrome |
| 268900 | [Sarcosinemia] |
| 270100 | Situs inversus viscerum |
| 270800 | Spastic paraplegia-5A |
| 271245 | Spinocerebellar ataxia-8, infantile, with sensory neuropathy |
| 271900 | Canavan disease |
| 272750 | GM2-gangliosidosis, AB variant |
| 272800 | Tay-Sachs disease |
| 272800 | [Hex A pseudodeficiency] |
| 272800 | GM2-gangliosidosis, juvenile, adult |
| 273300 | Male germ cell tumor |
| 273800 | Thrombocytopenia, neonatal alloimmune |
| 273800 | Glanzmann thrombasthenia, type A |
| 274180 | Thromboxane synthase deficiency |
| 274270 | Thymine-uraciluria |
| 274270 | Fluorouracil toxicity, sensitivity to |
| 274600 | Pendred syndrome |
| 274600 | Deafness, autosomal recessive 4 |
| 275350 | Transcobalamin II deficiency |
| 276000 | Pancreatitis, hereditary, 167800 |
| 276000 | Trypsinogen deficiency |
| 276600 | Tyrosinemia, type II |
| 276700 | Tyrosinemia, type I |
| 276900 | Usher syndrome, type 1A |
| 276901 | Usher syndrome, type 2 |
| 276902 | Usher syndrome, type 3 |
| 276903 | Usher syndrome, type 1B |
| 276903 | Deafness, autosomal dominant 11, neurosensory, 601317 |
| 276903 | Deafness, autosomal recessive 2, neurosensory, 600060 |
| 276904 | Usher syndrome, type 1C |
| 277700 | Werner syndrome |
| 277730 | Wernicke-Korsakoff syndrome, susceptibility to |
| 278000 | Wolman disease |
| 278000 | Cholesteryl ester storage disease |
| 278250 | Wrinkly skin syndrome |
| 278300 | Xanthinuria, type I |
| 278700 | Xeroderma pigmentosum, group A |
| 278760 | Xeroderma pigmentosum, group F |
| 300008 | Nephrolithiasis, type I, 310468 |
| 300008 | Proteinuria, low molecular weight, with hypercalciuric nephrocalcinosis |
| 300008 | Dent disease, 300009 |
| 300008 | Hypophosphatemia, type III |
| 300011 | Menkes disease, 309400 |
| 300011 | Occipital horn syndrome, 304150 |
| 300011 | Cutis laxa, neonatal |
| 300031 | Mental retardation, X-linked, FRAXF type |
| 300032 | Alpha-thalassemia/mental retardation syndrome, type 2, 301040 |
| 300032 | Juberg-Marsidi syndrome, 309590 |
| 300037 | Simpson dysmorphia syndrome, 312870 |
| 300039 | Deafness, X-linked 3, conductive, with stapes fixation, 304400 |
| 300044 | Wernicke-Korsakoff syndrome, susceptibility to |
| 300046 | Mental retardation, X-linked 23, nonspecific |
| 300047 | Mental retardation, X-linked 20 |
| 300048 | Intestinal pseudoobstruction, neuronal, X-linked |
| 300049 | Nodular heterotopia, bilateral periventricular |
| 300049 | BPNH/MR syndrome |
| 300055 | Mental retardation with psychosis, pyramidal signs, and macroorchidism |
| 300062 | Mental retardation, X-linked 14 |
| 300071 | Night blindness, congenital stationary, type 2 |
| 300076 | Wood neuroimmunologic syndrome |
| 300077 | Mental retardation, X-linked 29 |
| 300088 | Epilepsy, female restricted, with mental retardation |
| 300100 | Adrenoleukodystrophy |
| 300100 | Adrenomyeloneuropathy |
| 300104 | Mental retardation, X-linked nonspecific, 309541 |
| 300110 | Night blindness, congenital stationary, X-linked incomplete, 300071 |
| 300123 | Mental retardation with isolated growth hormone deficiency |
| 300126 | Dyskeratosis congenita-1, 305000 |
| 300136 | Diabetes mellitus, insulin-dependent, X-linked, susceptibility to |
| 300300 | XLA and isolated growth hormone deficiency, 307200 |
| 300300 | Agammaglobulinemia, type 1, X-linked |
| 300600 | Ocular albinism, Forsius-Eriksson type |
| 301000 | Thrombocytopenia, X-linked, 313900 |
| 301000 | Wiskott-Aldrich syndrome |
| 301200 | Amelogenesis imperfecta |
| 301201 | Amelogenesis imperfecta-3, hypoplastic type |
| 301300 | Anemia, sideroblastic/hypochromic |
| 301310 | Anemia, sideroblastic, with spinocerebellar ataxia |
| 301500 | Fabry disease |
| 301590 | Anophthalmos-1 |
| 301830 | Arthrogryposis, X-linked (spinal muscular atrophy, infantile, X-linked) |
| 301835 | Arts syndrome |
| 301845 | Bazex syndrome |
| 301900 | Borjeson-Forssman-Lehmann syndrome |
| 302060 | Noncompaction of left ventricular myocardium, isolated |
| 302060 | Barth syndrome |
| 302060 | Cardiomyopathy, X-linked dilated, 300069 |
| 302060 | Endocardial fibroelastosis-2 |
| 302350 | Nance-Horan syndrome |
| 302960 | Chondrodysplasia punctata, X-linked dominant |
| 303400 | Cleft palate, X-linked |
| 303630 | Alport syndrome, 301050 |
| 303630 | Leiomyomatosis-nephropathy syndrome, 308940 |
| 303631 | Leiomyomatosis, diffuse, with Alport syndrome |
| 303700 | Colorblindness, blue monochromatic |
| 303800 | Colorblindness, deutan |
| 303900 | Colorblindness, protan |
| 304020 | Cone dystrophy, progressive X-linked, 1 |
| 304040 | Charcot-Marie-Tooth neuropathy, X-linked-1, dominant, 302800 |
| 304340 | Mental retardation, X-linked, syndromic-5, with Dandy-Walker malformation, basal |
| | ganglia disease, and seizures |
| 304500 | Deafness, X-linked 2, perceptive congenital |
| 304700 | Mohr-Tranebjaerg syndrome |
| 304700 | Deafness, X-linked 1, progressive |
| 304700 | Jensen syndrome, 311150 |
| 304800 | Diabetes insipidus, nephrogenic |
| 305100 | Anhidrotic ectodermal dysplasia |
| 305400 | Aarskog-Scott syndrome |
| 305450 | FG syndrome |
| 305900 | Favism |
| 305900 | G6PD deficiency |
| 305900 | Hemolytic anemia due to G6PD deficiency |
| 306700 | Hemophilia A |
| 306900 | Hemophilia B |
| 306995 | [Homosexuality, male] |
| 307150 | Hypertrichosis, congenital generalized |
| 307700 | Hypoparathyroidism, X-linked |
| 308000 | HPRT-related gout |
| 308000 | Lesch-Nyhan syndrome |
| 308230 | Immunodeficiency, X-linked, with hyper-IgM |
| 308240 | Lymphoproliferative syndrome, X-linked |
| 308300 | Incontinentia pigmenti, sporadic type |
| 308310 | Incontinentia pigmenti, familial |
| 308380 | Severe combined immunodeficiency, X-linked, 300400 |
| 308380 | Combined immunodeficiency, X-linked, moderate, 312863 |
| 308840 | Spastic paraplegia, 312900 |
| 308840 | Hydrocephalus due to aqueductal stenosis, 307000 |
| 308840 | MASA syndrome, 303350 |
| 309000 | Lowe syndrome |
| 309200 | Manic-depressive illness, X-linked |
| 309300 | Megalocornea, X-linked |
| 309470 | Mental retardation, X-linked, syndromic-3, with spastic diplegia |
| 309500 | Renpenning syndrome-1 |
| 309545 | Mental retardation, X-linked nonspecific, with aphasia |
| 309548 | Mental retardation, X-linked, FRAXE type |
| 309555 | Gustavson syndrome |
| 309605 | Mental retardation, X-linked, syndromic-4, with congenital contractures and low |
| | fingertip arches |
| 309610 | Mental retardation, X-linked, syndromic-2, with dysmorphism and cerebral atrophy |
| 309620 | Mental retardation-skeletal dysplasia |
| 309850 | Brunner syndrome |
| 309900 | Mucopolysaccharidosis II |
| 310300 | Emery-Dreifuss muscular dystrophy |
| 310400 | Myotubular myopathy, X-linked |
| 310460 | Myopia-1 |
| 310460 | Bornholm eye disease |
| 310490 | Cowchock syndrome |
| 310500 | Night blindness, congenital stationary, type 1 |
| 311050 | Optic atrophy, X-linked |
| 311200 | Oral-facial-digital syndrome 1 |
| 311300 | Otopalatodigital syndrome, type I |
| 311510 | Waisman parkinsonism-mental retardation syndrome |
| 311800 | Myoglobinuria/hemolysis due to PGK deficiency |
| 311800 | Hemolytic anemia due to PGK deficiency |
| 311850 | Phosphoribosyl pyrophosphate synthetase-related gout |
| 311870 | Muscle glycogenosis |
| 312000 | Panhypopituitarism, X-linked |
| 312040 | N syndrome, 310465 |
| 312060 | Properdin deficiency, X-linked |
| 312080 | Pelizaeus-Merzbacher disease |
| 312080 | Spastic paraplegia-2, 312920 |
| 312600 | Retinitis pigmentosa-2 |
| 312760 | Turner syndrome |
| 313350 | Split hand/foot malformation, type 2 |
| 313850 | Thoracoabdominal syndrome |
| 314200 | [Euthyroidal hyper- and hypothyroxinemia] |
| 314250 | Dystonia-3, torsion, with parkinsonism, Filipino type |
| 314300 | Goeminne TKCR syndrome |
| 314400 | Cardiac valvular dysplasia-1 |
| 314580 | Wieacker-Wolff syndrome |
| 600020 | Prostate cancer, 176807 |
| 600035 | Schizencephaly |
| 600040 | Colorectal cancer |
| 600044 | Thrombocythemia, essential, 187950 |
| 600045 | Xeroderma pigmentosum, group E, subtype 2 |
| 600048 | Breast cancer-3 |
| 600059 | Retinitis pigmentosa-13 |
| 600065 | Leukocyte adhesion deficiency, 116920 |
| 600079 | Colon cancer |
| 600095 | Split hand/foot malformation, type 3 |
| 600101 | Deafness, autosomal dominant 2 |
| 600105 | Retinitis pigmentosa-12, autosomal recessive |
| 600119 | Muscular dystrophy, Duchenne-like, type 2 |
| 600119 | Adhalinopathy, primary |
| 600138 | Retinitis pigmentosa-11 |
| 600140 | Rubenstein-Taybi syndrome, 180849 |
| 600143 | Epilepsy, progressive, with mental retardation |
| 600151 | Bardet-Biedl syndrome 3 |
| 600160 | Melanoma, 155601 |
| 600163 | Long QT syndrome-3 |
| 600173 | SCID, autosomal recessive, T-negative/B-positive type |
| 600175 | Spinal muscular atrophy, congenital nonprogressive, of lower limbs |
| 600179 | Leber congenital amaurosis, type I, 204000 |
| 600184 | Carnitine acetyltransferase deficiency |
| 600185 | Pancreatic cancer |
| 600185 | Breast cancer 2, early onset |
| 600194 | Ichthyosis bullosa of Siemens, 146800 |
| 600202 | Dyslexia, specific, 2 |
| 600211 | Cleidocranial dysplasia, 119600 |
| 600221 | Venous malformations, multiple cutaneous and mucosal, 600195 |
| 600223 | Spinocerebellar ataxia-4 |
| 600225 | Phenylketonuria, atypical, due to GCH1 deficiency, 233910 |
| 600225 | Dystonia, DOPA-responsive, 128230 |
| 600228 | Pseudohypoaldosteronism, type I, 264350 |
| 600231 | Palmoplantar keratoderma, Bothnia type |
| 600234 | HMG-CoA synthease-2 deficiency |
| 600243 | Temperature-sensitive apoptosis |
| 600258 | Colorectal cancer, hereditary nonpolyposis, type 3 |
| 600259 | Turcot syndrome with glioblastoma, 276300 |
| 600259 | Colorectal cancer, hereditary nonpolyposis, type 4 |
| 600261 | Ehlers-Danlos-like syndrome |
| 600266 | Resistance/susceptibility to TB, etc. |
| 600273 | Polycystic kidney disease, infantile severe, with tuberous sclerosis |
| 600276 | Cerebral arteriopathy with subcortical infarcts and leukoencephalopathy, 125310 |
| 600281 | Non-insulin-dependent diabetes mellitus, 125853 |
| 600281 | MODY, type 1, 125850 |
| 600309 | Atrioventricular canal defect-1 |
| 600310 | Pseudoachondroplasia, 177170 |
| 600310 | Epiphyseal dysplasia, multiple 1, 132400 |
| 600319 | Diabetes mellitus, insulin-dependent, 4 |
| 600320 | Insulin-dependent diabetes mellitus-5 |
| 600321 | Diabetes mellitus, insulin-dependent, 7 |
| 600332 | Rippling muscle disease-1 |
| 600354 | Spinal muscular atrophy-1, 253300 |
| 600354 | Spinal muscular atrophy-2, 253550 |
| 600354 | Spinal muscular atrophy-3, 253400 |
| 600364 | Cone dystrophy-3, 602093 |
| 600374 | Bardet-Biedl syndrome 4 |
| 600414 | Adrenoleukodystrophy, neonatal, 202370 |
| 600415 | Ataxia with isolated vitamin E deficiency, 277460 |
| 600429 | [Ii blood group, 110800] |
| 600509 | Persistent hyperinsulinemic hypoglycemia of infancy, 256450 |
| 600510 | Pigment dispersion syndrome |
| 600511 | Schizophrenia-3 |
| 600512 | Epilepsy, partial |
| 600525 | Trichodontoosseous syndrome, 190320 |
| 600528 | CPT deficiency, hepatic, type I, 255120 |
| 600536 | Myopathy, congenital |
| 600542 | Chondrosarcoma, extraskeletal myxoid |
| 600584 | Atrial septal defect with atrioventricular conduction defects, 108900 |
| 600593 | Craniosynostosis, Adelaide type |
| 600617 | Lipoid adrenal hyperplasia, 201710 |
| 600618 | Leukemia, acute lymphoblastic |
| 600623 | Prostate cancer, 176807 |
| 600624 | Cone-rod retinal dystrophy-1 |
| 600631 | Enuresis, nocturnal, 1 |
| 600650 | Myopathy due to CPT II deficiency, 255110 |
| 600650 | CPT deficiency, hepatic, type II, 600649 |
| 600698 | Salivary adenoma |
| 600698 | Uterine leiomyoma |
| 600698 | Lipoma |
| 600698 | Lipomatosis, mutiple, 151900 |
| 600700 | Lipoma |
| 600701 | Lipoma |
| 600722 | Ceroid lipofuscinosis, neuronal, variant juvenile type, with granular osmiophilic |
| | deposits |
| 600722 | Ceroid lipofuscinosis, neuronal-1, infantile, 256730 |
| 600725 | Holoprosencephaly-3, 142945 |
| 600759 | Alzheimer disease-4 |
| 600760 | Pseudohypoaldosteronism, type I, 264350 |
| 600760 | Liddle syndrome, 177200 |
| 600761 | Pseudohypoaldosteronism, type I, 264350 |
| 600761 | Liddle syndrome, 177200 |
| 600795 | Dementia, familial, nonspecific |
| 600807 | Bronchial asthma |
| 600808 | Enuresis, nocturnal, 2 |
| 600811 | Xeroderma pigmentosum, group E, DDB-negative subtype, 278740 |
| 600837 | Hirschsprung disease, 142623 |
| 600839 | Bartter syndrome, 241200 |
| 600850 | Schizophrenia disorder-4 |
| 600852 | Retinitis pigmentosa-17 |
| 600856 | Beckwith-Wiedemann syndrome, 130650 |
| 600881 | Cataract, congenital, zonular, with sutural opacities |
| 600882 | Charcot-Marie-Tooth neuropathy-2B |
| 600883 | Diabetes mellitus, insulin-dependent, 8 |
| 600887 | Endometrial carcinoma |
| 600897 | Cataract, zonular pulverulent-1, 116200 |
| 600900 | Muscular dystrophy, limb-girdle, type 2E |
| 600918 | Cystinuria, type III |
| 600923 | Porphyria variegata, 176200 |
| 600937 | Persistent hyperinsulinemic hypoglycemia of infancy, 256450 |
| 600946 | Short stature, autosomal dominant, with normal serum growth hormone binding |
| | protein |
| 600946 | Short stature, idiopathic |
| 600946 | Laron dwarfism, 262500 |
| 600956 | Persistent Mullerian duct syndrome, type II, 261550 |
| 600957 | Persistent Mullerian duct syndrome, type I, 261550 |
| 600958 | Cardiomyopathy, familial hypertrophic, 4, 115197 |
| 600965 | Deafness, autosomal dominant 6 |
| 600968 | Gitelman syndrome, 263800 |
| 600971 | Deafness, autosomal recessive 6 |
| 600974 | Deafness, autosomal recessive 7 |
| 600975 | Glaucoma 3, primary infantile, B |
| 600977 | Cone dystrophy, progressive |
| 600983 | Pseudohypoaldosteronism type I, autosomal dominant, 177735 |
| 600993 | Pancreatic cancer |
| 600995 | Nephrotic syndrome, idiopathic, steroid-resistant |
| 600996 | Arrhythmogenic right ventricular dysplasia-2 |
| 600998 | Bleeding diathesis due to GNAQ deficiency |
| 601002 | 5-oxoprolinuria, 266130 |
| 601002 | Hemolytic anemia due to glutathione synthetase deficiency, 231900 |
| 601011 | Spinocerebellar ataxia-6, 183086 |
| 601011 | Cerebellar ataxia, pure |
| 601011 | Episodic ataxia, type 2, 108500 |
| 601011 | Hemiplegic migraine, familial, 141500 |
| 601071 | Deafness, autosomal recessive 9 |
| 601072 | Deafness, autosomal recessive 8 |
| 601090 | Iridogoniodysgenesis, 601631 |
| 601105 | Pycnodysostosis, 265800 |
| 601107 | Dubin-Johnson syndrome, 237500 |
| 601130 | Tolbutamide poor metabolizer |
| 601145 | Epilepsy, progressive myoclonic 1, 254800 |
| 601146 | Brachydactyly, type C, 113100 |
| 601146 | Acromesomelic dysplasia, Hunter-Thompson type, 201250 |
| 601146 | Chondrodysplasia, Grebe type, 200700 |
| 601154 | Cardiomyopathy, dilated, 1E |
| 601199 | Neonatal hyperparathyroidism, 239200 |
| 601199 | Hypocalcemia, autosomal dominant, 601198 |
| 601199 | Hypocalciuric hypercalcemia, type I, 145980 |
| 601202 | Cataract, anterior polar-2 |
| 601208 | Insulin-dependent diabetes mellitus-11 |
| 601226 | Progressive external ophthalmoplegia, type 2 |
| 601238 | Cerebellar ataxia, Cayman type |
| 601267 | HIV infection, susceptibility/resistence to |
| 601277 | Ichthyosis, lamellar, type 2 |
| 601284 | Hereditary hemorrhagic telangiectasia-2, 600376 |
| 601313 | Polycystic kidney disease, adult type I, 173900 |
| 601316 | Deafness, autosomal dominant 10 |
| 601318 | Diabetes mellitus, insulin-dependent, 13 |
| 601362 | DiGeorge syndrome/velocardiofacial syndrome complex-2 |
| 601363 | Wilms tumor, type 4 |
| 601373 | HIV infection, susceptibility/resistance to |
| 601382 | Charcot-Marie-Tooth neuropathy-4B |
| 601385 | Prostate cancer |
| 601387 | Breast cancer |
| 601399 | Platelet disorder, familial, with associated myeloid malignancy |
| 601402 | Leukemia, myeloid, acute |
| 601406 | B-cell non-Hodgkin lymphoma, high-grade |
| 601410 | Diabetes mellitus, transient neonatal |
| 601411 | Muscular dystrophy, limb-girdle, type 2F, 601287 |
| 601412 | Deafness, autosomal dominant 7 |
| 601414 | Retinitis pigmentosa-18 |
| 601458 | Inflammatory bowel disease-2 |
| 601471 | Moebius syndrome-2 |
| 601493 | Cardiomyopathy, dilated 1C |
| 601494 | Cardiomyopathy, familial, dilated-2 |
| 601498 | Peroxisomal biogenesis disorder, complementation group 4 |
| 601518 | Prostate cancer, hereditary, 1, 176807 |
| 601545 | Lissencephaly-1 |
| 601556 | Spinocerebellar ataxia-1, 164400 |
| 601567 | Combined factor V and VIII deficiency, 227300 |
| 601596 | Charcot-Marie-Tooth neuropathy, demyelinating |
| 601604 | Mycobacterial and salmonella infections, susceptibility to |
| 601606 | Trichoepithelioma, multiple familial |
| 601620 | Holt-Oram syndrome, 142900 |
| 601621 | Ulnar-mammary syndrome, 181450 |
| 601622 | Saethre-Chotzen syndrome, 101400 |
| 601623 | Angelman syndrome |
| 601649 | Blepharophimosis, epicanthus inversus, and ptosis, type 2 |
| 601650 | Paraganglioma, familial nonchromaffin, 2 |
| 601652 | Glaucoma 1A, primary open angle, juvenile-onset, 137750 |
| 601653 | Branchiootic syndrome |
| 601653 | Branchiootorenal syndrome, 113650 |
| 601666 | Insulin-dependent diabetes mellitus-15 |
| 601669 | Hirschsprung disease, one form |
| 601676 | Acute insulin response |
| 601680 | Distal arthrogryposis, type 2B |
| 601682 | Glaucoma 1C, primary open angle |
| 601687 | Meesmann corneal dystrophy, 122100 |
| 601690 | Platelet-activating factor acetylhydrolase deficiency |
| 601691 | Retinitis pigmentosa-19, 601718 |
| 601691 | Stargardt disease-1, 248200 |
| 601691 | Cone-rod dystrophy 3 |
| 601691 | Fundus flavimaculatus with macular dystrophy, 248200 |
| 601692 | Reis-Bucklers corneal dystrophy |
| 601692 | Corneal dystrophy, Avellino type |
| 601692 | Corneal dystrophy, Groenouw type I, 121900 |
| 601692 | Corneal dystrophy, lattice type I, 122200 |
| 601718 | Retinitis pigmentosa-19 |
| 601728 | Bannayan-Zonana syndrome, 153480 |
| 601728 | Cowden disease, 158350 |
| 601728 | Endometrial carcinoma |
| 601728 | Lhermitte-Duclos syndrome |
| 601744 | Systemic lupus erythematosus, susceptibility to, 1 |
| 601757 | Rhizomelic chondrodysplasia punctata, type 1, 215100 |
| 601768 | Leukemia, acute myeloid |
| 601769 | Osteoporosis, involutional |
| 601769 | Rickets, vitamin D-resistant, 277440 |
| 601771 | Glaucoma 3A, primary infantile, 231300 |
| 601777 | Cone dystrophy, progressive |
| 601780 | Ceroid-lipofuscinosis, neuronal-6, variant late infantile |
| 601785 | Carbohydrate-deficient glycoprotein syndrome, type I, 212065 |
| 601800 | [Hair color, brown] |
| 601843 | Hypothyroidism, congenital, 274400 |
| 601844 | Pseudohypoaldosteronism type II |
| 601846 | Muscular dystrophy with rimmed vacuoles |
| 601847 | Progressive intrahepatic cholestasis-2 |
| 601850 | Retinitis pigmentosa-deafness syndrome |
| 601863 | Bare lymphocyte syndrome, complementation group C |
| 601868 | Deafness, autosomal dominant 13 |
| 601884 | [High bone mass] |
| 601889 | Lymphoma, diffuse large cell |
| 601916 | Pancreatic cancer |
| 601928 | Monilethrix, 158000 |
| 601941 | Insulin-dependent diabetes mellitus-6 |
| 601954 | Muscular dystrophy, limb-girdle, type 2G |
| 601969 | Medulloblastoma, 155255 |
| 601969 | Glioblastoma multiforme, 137800 |
| 601975 | Ectodermal dysplasia/skin fragility syndrome |
| 601990 | Neuroblastoma |
| 602014 | Hypomagnesemia with secondary hypocalcemia |
| 602023 | Bartter syndrome, type 3 |
| 602025 | Obesity/hyperinsulinism, susceptibility to |
| 602028 | Multiple myeloma |
| 602066 | Convulsions, infantile and paroxysmal choreoathetosis |
| 602067 | Cardiomyopathy, dilated, 1F |
| 602078 | Fibrosis of extraocular muscles, congenital, 2 |
| 602080 | Paget disease of bone-2 |
| 602081 | Speech-language disorder-1 |
| 602082 | Corneal dystrophy, Thiel-Behnke type |
| 602084 | Endometrial carcinoma |
| 602085 | Postaxial polydactyly, type A2 |
| 602086 | Arrhythmogenic right ventricular dysplasia-3 |
| 602087 | Arrhythmogenic right ventricular dysplasia-4 |
| 602088 | Nephronophthisis, infantile |
| 602089 | Hemangioma, capillary, hereditary |
| 602091 | Marfan syndrome, atypical |
| 602092 | Deafness, autosomal recessive 18 |
| 602094 | Lipodystrophy, familial partial |
| 602096 | Alzheimer disease-5 |
| 602099 | Amytrophic lateral sclerosis-5 |
| 602116 | Glioma |
| 602117 | Prader-Willi syndrome |
| 602121 | Deafness, autosomal dominant nonsyndromic sensorineural, 1, 124900 |
| 602134 | Tremor, familial essential, 2 |
| 602136 | Refsum disease, infantile, 266510 |
| 602136 | Zellweger syndrome-1, 214100 |
| 602136 | Adrenoleukodystrophy, neonatal, 202370 |
| 602153 | Monilethrix, 158000 |
| 602216 | Peutz-Jeghers syndrome, 175200 |
| 602225 | Cone-rod retinal dystrophy-2, 120970 |
| 602225 | Leber congenital amaurosis, type III |
| 602235 | Epilepsy, benign, neonatal, type 1, 121200 |
| 602279 | Oculopharyngeal muscular dystorphy, 164300 |
| 602279 | Oculopharyngeal muscular dystrophy, autosomal recessive, 257950 |
| 602280 | Retinitis pigmentosa-14, 600132 |
| 602363 | Ellis-van Creveld-like syndrome |
| 602397 | Cholestasis, benign recurrent intrahepatic, 243300 |
| 602397 | Cholestasis, progressive familial intrahepatic-1, 211600 |
| 602403 | Alzheimer disease, susceptibility to |
| 602404 | Parkinson disease, type 3 |
| 602447 | Coronary artery disease, susceptibility to |
| 602460 | Deafness, autosomal dominant 15, 602459 |
| 602475 | Ossification of posterior longitudinal ligament of spine |
| 602476 | Febrile convulsions, familial, 1 |
| 602477 | Febrile convulsions, familial, 2 |
| 602491 | Hyperlipidemia, familial combined, 1 |
| 602522 | Bartter syndrome, infantile, with sensorineural deafness |
| 602544 | Parkinson disease, juvenile, type 2, 600116 |
| 602568 | Homocystinuria-megaloblastic anemia, cbl E type, 236270 |
| 602574 | Deafness, autosomal dominant 12, 601842 |
| 602574 | Deafness, autosomal dominant 8, 601543 |
| 602575 | Nail-patella syndrome with open-angle glaucoma, 137750 |
| 602575 | Nail-patella syndrome, 161200 |
| 602616 | Carbohydrate-deficient glycoprotein syndrome, type II, 212066 |
| 602629 | Dystonia-6, torsion |
| 602631 | Rhabdomyosarcoma, 268210 |
| 602631 | Breast Cancer |
| 602669 | Anterior segment mesenchymal dysgenesis and cataract, 107250 |
| 602669 | Cataract, congenital |
| 602685 | Mental retardation, severe, with spasticity and tapetoretinal degeneration |
| 602716 | Nephrosis-1, congenital, Finnish type, 256300 |
| 602759 | Prostate cancer, hereditary, 2, 176807 |
| 602771 | Muscular dystrophy, congenital, with early spine rigidity |
| 602772 | Retinitis pitmentosa-24 |
| 602782 | Faisalabad histiocytosis |
| 602783 | Spastic paraplegia-7 |

Mature Polypeptides

[0227] The present invention also encompasses mature forms of a polypeptide having the amino acid sequence of SEQ ID NO:Y and/or the amino acid sequence encoded by the cDNA in a deposited clone. Polynucleotides encoding the mature forms (such as, for example, the polynucleotide sequence in SEQ ID NO:X and/or the polynucleotide sequence contained in the cDNA of a deposited clone) are also encompassed by the invention. Moreover, fragments or variants of these polypeptides (such as, fragments as described herein, polypeptides at least 80%, 85%, 90%, 95%, 96%, 97%, 98%, 99%, or 100% identical to these polypeptides, or polypeptides encoded by a polynucleotide that hybridizes under stringent conditions to the complementary strand of the polynucleotide encoding these polypeptides) are also encompassed by the invention. In preferred embodiments, these fragments or variants retain one or more functional activities of the full-length or mature form of the polypeptide (e.g., biological activity (such as, for example, activity in detecting, preventing, treating and/or indicated disorders), antigenicity (ability to bind, or compete with a polypeptide of the invention for binding, to an anti-polypeptide of the invention antibody), immunogenicity (ability to generate antibody which binds to a specific polypeptide of the invention), ability to form multimers with polypeptides of the invention, and ability to bind to a receptor or ligand for a polypeptide of the invention). Antibodies that bind the polypeptides of the invention, and polynucleotides encoding these polypeptides are also encompassed by the invention.

[0228] According to the signal hypothesis, proteins secreted by mammalian cells have a signal or secretary leader sequence which is cleaved from the mature protein once export of the growing protein chain across the rough endoplasmic reticulum has been initiated. Most mammalian cells and even insect cells cleave secreted proteins with the same specificity. However, in some cases, cleavage of a secreted protein is not entirely uniform, which results in two or more mature species of the protein. Further, it has long been known that cleavage specificity of a secreted protein is ultimately determined by the primary structure of the complete protein, that is, it is inherent in the amino acid sequence of the polypeptide.

[0229] Methods for predicting whether a protein has a signal sequence, as well as the cleavage point for that sequence, are available. For instance, the method of McGeoch, Virus Res. 3:271-286 (1985), uses the information from a short N-terminal charged region and a subsequent uncharged region of the complete (uncleaved) protein. The method of von Heinje, Nucleic Acids Res. 14:4683-4690 (1986) uses the information from the residues surrounding the cleavage site, typically residues −13 to +2, where +1 indicates the amino terminus of the secreted protein. The accuracy of predicting the cleavage points of known mammalian secretory proteins for each of these methods is in the range of 75-80%. (von Heinje, supra.) However, the two methods do not always produce the same predicted cleavage point(s) for a given protein.

[0230] In the present case, the deduced amino acid sequence of the secreted polypeptide was analyzed by a computer program called SignalP (Henrik Nielsen et al., Protein Engineering 10: 1-6 (1997)), which predicts the cellular location of a protein based on the amino acid sequence. As part of this computational prediction of localization, the methods of McGeoch and von Heinje are incorporated. The analysis of the amino acid sequences of the secreted proteins described herein by this program provided the results shown in Table 1A.

[0231] In specific embodiments, polypeptides of the invention comprise, or alternatively consist of, the predicted mature form of the polypeptide as delineated in columns 14 and 15 of Table 1A. Moreover, fragments or variants of these polypeptides (such as, fragments as described herein, polypeptides at least 80%, 85%, 90%, 95%, 96%, 97%, 98%, 99%, or 100% identical to these polypeptides, or polypeptides encoded by a polynucleotide that hybridizes under stringent conditions to the complementary strand of the polynucleotide encoding these polypeptides) are also encompassed by the invention. In preferred embodiments, these fragments or variants retain one or more functional activities of the full-length or mature form of the polypeptide (e.g., biological activity, antigenicity [ability to bind (or compete with a polypeptide of the invention for binding) to an anti-polypeptide of the invention antibody], immunogenicity (ability to generate antibody which binds to a specific polypeptide of the invention), ability to form multimers with polypeptides of the invention, and ability to bind to a receptor or ligand for a polypeptide of the invention). Antibodies that bind the polypeptides of the invention, and polynucleotides encoding these polypeptides are also encompassed by the invention.

[0232] Polynucleotides encoding proteins comprising, or consisting of, the predicted mature form of polypeptides of the invention (e.g., polynucleotides having the sequence of SEQ ID NO: X (Table 1A, column 4), the sequence delineated in columns 7 and 8 of Table 1A, and a sequence encoding the mature polypeptide delineated in columns 14 and 15 of Table 1A (e.g., the sequence of SEQ ID NO:X encoding the mature polypeptide delineated in columns 14 and 15 of Table 1)) are also encompassed by the invention, as are fragments or variants of these polynucleotides (such as, fragments as described herein, polynucleotides at least 80%, 85%, 90%, 95%, 96%, 97%, 98%, 99%, or 100% identical to these polynucleotides, and nucleic acids which hybridizes under stringent conditions to the complementary strand of the polynucleotide).

[0233] As one of ordinary skill would appreciate, however, cleavage sites sometimes vary from organism to organism and cannot be predicted with absolute certainty. Accordingly, the present invention provides secreted polypeptides having a sequence shown in SEQ ID NO:Y which have an N-terminus beginning within 15 residues of the predicted cleavage point (i.e., having 1, 2, 3, 4, 5, 6, 7, 8, 9, 10, 11, 12, 13, 14, or 15 more or less contiguous residues of SEQ ID NO:Y at the N-terminus when compared to the predicted mature form of the polypeptide (e.g., the mature polypeptide delineated in columns 14 and 15 of Table 1). Similarly, it is also recognized that in some cases, cleavage of the signal sequence from a secreted protein is not entirely uniform, resulting in more than one secreted species. These polypeptides, and the polynucleotides encoding such polypeptides, are contemplated by the present invention.

[0234] Moreover, the signal sequence identified by the above analysis may not necessarily predict the naturally occurring signal sequence. For example, the naturally occurring signal sequence may be further upstream from the predicted signal sequence. However, it is likely that the predicted signal sequence will be capable of directing the secreted protein to the ER. Nonetheless, the present invention provides the mature protein produced by expression of the polynucleotide sequence of SEQ ID NO:X and/or the polynucleotide sequence contained in the cDNA of a deposited clone, in a mammalian cell (e.g., COS cells, as described below). These polypeptides, and the polynucleotides encoding such polypeptides, are contemplated by the present invention.

Polynucleotide and Polypeptide Variants

[0235] The present invention is also directed to variants of the polynucleotide sequence disclosed in SEQ ID NO:X or the complementary strand thereto, nucleotide sequences encoding the polypeptide of SEQ ID NO:Y, the nucleotide sequence of SEQ ID NO:X that encodes the polypeptide sequence as defined in columns 13 and 14 of Table 1A, nucleotide sequences encoding the polypeptide sequence as defined in columns 13 and 14 of Table 1A, the nucleotide sequence of SEQ ID NO:X encoding the polypeptide sequence as defined in column 5 of Table 1B.1, nucleotide sequences encoding the polypeptide as defined in column 6 and column 7 of Table 1B.1, the nucleotide sequence as defined in columns 8 and 9 of Table 2, nucleotide sequences encoding the polypeptide encoded by the nucleotide sequence as defined in columns 8 and 9 of Table 2, the nucleotide sequence as defined in column 6 of Table 1C, nucleotide sequences encoding the polypeptide encoded by the nucleotide sequence as defined in column 6 of Table 1C, the cDNA sequence contained in ATCC Deposit NO:Z, nucleotide sequences encoding the polypeptide encoded by the cDNA sequence contained in ATCC Deposit NO:Z, and/or nucleotide sequences encoding a mature (secreted) polypeptide encoded by the cDNA sequence contained in ATCC Deposit NO:Z.

[0236] The present invention also encompasses variants of the polypeptide sequence disclosed in SEQ ID NO:Y, the polypeptide as defined in columns 13 and 14 of Table 1A, the polypeptide sequence as defined in columns 6 and 7 of Table 1B.1, a polypeptide sequence encoded by the nucleotide sequence as defined in columns 8 and 9 of Table 2, a polypeptide sequence encoded by the nucleotide sequence as defined in column 6 of Table 1C, a polypeptide sequence encoded by the complement of the polynucleotide sequence in SEQ ID NO:X, the polypeptide sequence encoded by the cDNA sequence contained in ATCC Deposit NO:Z, and/or a mature (secreted) polypeptide encoded by the cDNA sequence contained in ATCC Deposit NO:Z.

[0237] “Variant” refers to a polynucleotide or polypeptide differing from the polynucleotide or polypeptide of the present invention, but retaining essential properties thereof. Generally, variants are overall closely similar, and, in many regions, identical to the polynucleotide or polypeptide of the present invention.

[0238] Thus, one aspect of the invention provides an isolated nucleic acid molecule comprising, or alternatively consisting of, a polynucleotide having a nucleotide sequence selected from the group consisting of: (a) a nucleotide sequence described in SEQ ID NO:X or contained in the cDNA sequence of ATCC Deposit No:Z; (b) a nucleotide sequence in SEQ ID NO:X or the cDNA in ATCC Deposit No:Z which encodes the complete amino acid sequence of SEQ ID NO:Y or the complete amino acid sequence encoded by the cDNA in ATCC Deposit No:Z; (c) a nucleotide sequence in SEQ ID NO:X or the cDNA in ATCC Deposit No:Z which encodes a mature polypeptide (i.e., a secreted polypeptide (e.g., as delineated in columns 14 and 15 of Table 1A)); (d) a nucleotide sequence in SEQ ID NO:X or the cDNA sequence of ATCC Deposit No:Z, which encodes a biologically active fragment of a polypeptide; (e) a nucleotide sequence in SEQ ID NO:X or the cDNA sequence of ATCC Deposit No:Z, which encodes an antigenic fragment of a polypeptide; (f) a nucleotide sequence encoding a polypeptide comprising the complete amino acid sequence of SEQ ID NO:Y or the complete amino acid sequence encoded by the cDNA in ATCC Deposit No:Z; (g) a nucleotide sequence encoding a mature polypeptide of the amino acid sequence of SEQ ID NO:Y (i.e., a secreted polypeptide (e.g., as delineated in columns 14 and 15 of Table 1A)) or a mature polypeptide of the amino acid sequence encoded by the cDNA in ATCC Deposit No:Z; (h) a nucleotide sequence encoding a biologically active fragment of a polypeptide having the complete amino acid sequence of SEQ ID NO:Y or the complete amino acid sequence encoded by the cDNA in ATCC Deposit No:Z; (i) a nucleotide sequence encoding an antigenic fragment of a polypeptide having the complete amino acid sequence of SEQ ID NO:Y or the complete amino acid sequence encoded by the cDNA in ATCC Deposit No:Z; and (j) a nucleotide sequence complementary to any of the nucleotide sequences in (a), (b), (c), (d), (e), (f), (g), (h), or (i) above.

[0239] The present invention is also directed to nucleic acid molecules which comprise, or alternatively consist of, a nucleotide sequence which is at least 80%, 85%, 90%, 95%, 96%, 97%, 98%, 99% or 100%, identical to, for example, any of the nucleotide sequences in (a), (b), (c), (d), (e), (f), (g), (h), (i), or (j) above, the nucleotide coding sequence in SEQ ID NO:X or the complementary strand thereto, the nucleotide coding sequence of the cDNA contained in ATCC Deposit No:Z or the complementary strand thereto, a nucleotide sequence encoding the polypeptide of SEQ ID NO:Y, a nucleotide sequence encoding a polypeptide sequence encoded by the nucleotide sequence in SEQ ID NO:X, a polypeptide sequence encoded by the complement of the polynucleotide sequence in SEQ ID NO:X, a nucleotide sequence encoding the polypeptide encoded by the cDNA contained in ATCC Deposit No:Z, the nucleotide coding sequence in SEQ ID NO:X as defined in columns 8 and 9 of Table 2 or the complementary strand thereto, a nucleotide sequence encoding the polypeptide encoded by the nucleotide sequence in SEQ ID NO:X as defined in columns 8 and 9 of Table 2 or the complementary strand thereto, the nucleotide coding sequence in SEQ ID NO:B as defined in column 6 of Table 1C or the complementary strand thereto, a nucleotide sequence encoding the polypeptide encoded by the nucleotide sequence in SEQ ID NO:B as defined in column 6 of Table 1C or the complementary strand thereto, the nucleotide sequence in SEQ ID NO:X encoding the polypeptide sequence as defined in columns 6 and 7 of Table 1B.1 or the complementary strand thereto, nucleotide sequences encoding the polypeptide as defined in column 6 and 7 of Table 1B.1 or the complementary strand thereto, and/or polynucleotide fragments of any of these nucleic acid molecules (e.g., those fragments described herein). Polynucleotides which hybridize to the complement of these nucleic acid molecules under stringent hybridization conditions or alternatively, under lower stringency conditions, are also encompassed by the invention, as are polypeptides encoded by these polynucleotides and nucleic acids.

[0240] In a preferred embodiment, the invention encompasses nucleic acid molecules which comprise, or alternatively, consist of a polynucleotide which hybridizes under stringent hybridization conditions, or alternatively, under lower stringency conditions, to a polynucleotide in (a), (b), (c), (d), (e), (f), (g), (h), or (i), above, as are polypeptides encoded by these polynucleotides. In another preferred embodiment, polynucleotides which hybridize to the complement of these nucleic acid molecules under stringent hybridization conditions, or alternatively, under lower stringency conditions, are also encompassed by the invention, as are polypeptides encoded by these polynucleotides.

[0241] In another embodiment, the invention provides a purified protein comprising, or alternatively consisting of, a polypeptide having an amino acid sequence selected from the group consisting of: (a) the complete amino acid sequence of SEQ ID NO:Y or the complete amino acid sequence encoded by the cDNA in ATCC Deposit No:Z; (b) the amino acid sequence of a mature (secreted) form of a polypeptide having the amino acid sequence of SEQ ID NO:Y (e.g., as delineated in columns 14 and 15 of Table 1A) or a mature form of the amino acid sequence encoded by the cDNA in ATCC Deposit No:Z mature; (c) the amino acid sequence of a biologically active fragment of a polypeptide having the complete amino acid sequence of SEQ ID NO:Y or the complete amino acid sequence encoded by the cDNA in ATCC Deposit No:Z; and (d) the amino acid sequence of an antigenic fragment of a polypeptide having the complete amino acid sequence of SEQ ID NO:Y or the complete amino acid sequence encoded by the cDNA in ATCC Deposit No:Z.

[0242] The present invention is also directed to proteins which comprise, or alternatively consist of, an amino acid sequence which is at least 80%, 85%, 90%, 95%, 96%, 97%, 98%, 99% or 100%, identical to, for example, any of the amino acid sequences in (a), (b), (c), or (d), above, the amino acid sequence shown in SEQ ID NO:Y, the amino acid sequence encoded by the cDNA contained in ATCC Deposit No:Z, the amino acid sequence of the polypeptide encoded by the nucleotide sequence in SEQ ID NO:X as defined in columns 8 and 9 of Table 2, the amino acid sequence of the polypeptide encoded by the nucleotide sequence in SEQ ID NO:B as defined in column 6 of Table 1C, the amino acid sequence as defined in column 6 and 7 of Table 1B.1, an amino acid sequence encoded by the nucleotide sequence in SEQ ID NO:X, and an amino acid sequence encoded by the complement of the polynucleotide sequence in SEQ ID NO:X. Fragments of these polypeptides are also provided (e.g., those fragments described herein). Further proteins encoded by polynucleotides which hybridize to the complement of the nucleic acid molecules encoding these amino acid sequences under stringent hybridization conditions or alternatively, under lower stringency conditions, are also encompassed by the invention, as are the polynucleotides encoding these proteins.

[0243] By a nucleic acid having a nucleotide sequence at least, for example, 95% “identical” to a reference nucleotide sequence of the present invention, it is intended that the nucleotide sequence of the nucleic acid is identical to the reference sequence except that the nucleotide sequence may include up to five point mutations per each 100 nucleotides of the reference nucleotide sequence encoding the polypeptide. In other words, to obtain a nucleic acid having a nucleotide sequence at least 95% identical to a reference nucleotide sequence, up to 5% of the nucleotides in the reference sequence may be deleted or substituted with another nucleotide, or a number of nucleotides up to 5% of the total nucleotides in the reference sequence may be inserted into the reference sequence. The query sequence may be an entire sequence referred to in Table 1B or 2 as the ORF (open reading frame), or any fragment specified as described herein.

[0244] As a practical matter, whether any particular nucleic acid molecule or polypeptide is at least 80%, 85%, 90%, 95%, 96%, 97%, 98% or 99% identical to a nucleotide sequence of the present invention can be determined conventionally using known computer programs. A preferred method for determining the best overall match between a query sequence (a sequence of the present invention) and a subject sequence, also referred to as a global sequence alignment, can be determined using the FASTDB computer program based on the algorithm of Brutlag et al. (Comp. App. Biosci. 6:237-245 (1990)). In a sequence alignment the query and subject sequences are both DNA sequences. An RNA sequence can be compared by converting U's to T's. The result of said global sequence alignment is expressed as percent identity. Preferred parameters used in a FASTDB alignment of DNA sequences to calculate percent identity are: Matrix=Unitary, k-tuple=4, Mismatch Penalty=1, Joining Penalty=30, Randomization Group Length=0, Cutoff Score=1, Gap Penalty=5, Gap Size Penalty 0.05, Window Size=500 or the length of the subject nucleotide sequence, whichever is shorter.

[0245] If the subject sequence is shorter than the query sequence because of 5′ or 3′ deletions, not because of internal deletions, a manual correction must be made to the results. This is because the FASTDB program does not account for 5′ and 3′ truncations of the subject sequence when calculating percent identity. For subject sequences truncated at the 5′ or 3′ ends, relative to the query sequence, the percent identity is corrected by calculating the number of bases of the query sequence that are 5′ and 3′ of the subject sequence, which are not matched/aligned, as a percent of the total bases of the query sequence. Whether a nucleotide is matched/aligned is determined by results of the FASTDB sequence alignment. This percentage is then subtracted from the percent identity, calculated by the above FASTDB program using the specified parameters, to arrive at a final percent identity score. This corrected score is what is used for the purposes of the present invention. Only bases outside the 5′ and 3′ bases of the subject sequence, as displayed by the FASTDB alignment, which are not matched/aligned with the query sequence, are calculated for the purposes of manually adjusting the percent identity score.

[0246] For example, a 90 base subject sequence is aligned to a 100 base query sequence to determine percent identity. The deletions occur at the 5′ end of the subject sequence and therefore, the FASTDB alignment does not show a matched/alignment of the first 10 bases at 5′ end. The 10 unpaired bases represent 10% of the sequence (number of bases at the 5′ and 3′ ends not matched/total number of bases in the query sequence) so 10% is subtracted from the percent identity score calculated by the FASTDB program. If the remaining 90 bases were perfectly matched the final percent identity would be 90%. In another example, a 90 base subject sequence is compared with a 100 base query sequence. This time the deletions are internal deletions so that there are no bases on the 5′ or 3′ of the subject sequence which are not matched/aligned with the query. In this case the percent identity calculated by FASTDB is not manually corrected. Once again, only bases 5′ and 3′ of the subject sequence which are not matched/aligned with the query sequence are manually corrected for. No other manual corrections are to be made for the purposes of the present invention.

[0247] By a polypeptide having an amino acid sequence at least, for example, 95% “identical” to a query amino acid sequence of the present invention, it is intended that the amino acid sequence of the subject polypeptide is identical to the query sequence except that the subject polypeptide sequence may include up to five amino acid alterations per each 100 amino acids of the query amino acid sequence. In other words, to obtain a polypeptide having an amino acid sequence at least 95% identical to a query amino acid sequence, up to 5% of the amino acid residues in the subject sequence may be inserted, deleted, (indels) or substituted with another amino acid. These alterations of the reference sequence may occur at the amino or carboxy terminal positions of the reference amino acid sequence or anywhere between those terminal positions, interspersed either individually among residues in the reference sequence or in one or more contiguous groups within the reference sequence.

[0248] As a practical matter, whether any particular polypeptide is at least 80%, 85%, 90%, 95%, 96%, 97%, 98% or 99% identical to, for instance, the amino acid sequence of a polypeptide referred to in Table 1A (e.g., the amino acid sequence delineated in columns 14 and 15) or a fragment thereof, Table 1B.1 (e.g., the amino acid sequence identified in column 6) or a fragment thereof, Table 2 (e.g., the amino acid sequence of the polypeptide encoded by the polynucleotide sequence defined in columns 8 and 9 of Table 2) or a fragment thereof, the amino acid sequence of the polypeptide encoded by the polynucleotide sequence in SEQ ID NO:B as defined in column 6 of Table 1C or a fragment thereof, the amino acid sequence of the polypeptide encoded by the nucleotide sequence in SEQ ID NO:X or a fragment thereof, or the amino acid sequence of the polypeptide encoded by cDNA contained in ATCC Deposit No:Z, or a fragment thereof, the amino acid sequence of a mature (secreted) polypeptide encoded by cDNA contained in ATCC Deposit No:Z, or a fragment thereof, can be determined conventionally using known computer programs. A preferred method for determining the best overall match between a query sequence (a sequence of the present invention) and a subject sequence, also referred to as a global sequence alignment, can be determined using the FASTDB computer program based on the algorithm of Brutlag et al. (Comp. App. Biosci. 6:237-245 (1990)). In a sequence alignment the query and subject sequences are either both nucleotide sequences or both amino acid sequences. The result of said global sequence alignment is expressed as percent identity. Preferred parameters used in a FASTDB amino acid alignment are: Matrix=PAM 0, k-tuple=2, Mismatch Penalty=1, Joining Penalty=20, Randomization Group Length=0, Cutoff Score=1, Window Size=sequence length, Gap Penalty=5, Gap Size Penalty=0.05, Window Size=500 or the length of the subject amino acid sequence, whichever is shorter.

[0249] If the subject sequence is shorter than the query sequence due to N- or C-terminal deletions, not because of internal deletions, a manual correction must be made to the results. This is because the FASTDB program does not account for N- and C-terminal truncations of the subject sequence when calculating global percent identity. For subject sequences truncated at the N- and C-termini, relative to the query sequence, the percent identity is corrected by calculating the number of residues of the query sequence that are N- and C-terminal of the subject sequence, which are not matched/aligned with a corresponding subject residue, as a percent of the total bases of the query sequence. Whether a residue is matched/aligned is determined by results of the FASTDB sequence alignment. This percentage is then subtracted from the percent identity, calculated by the above FASTDB program using the specified parameters, to arrive at a final percent identity score. This final percent identity score is what is used for the purposes of the present invention. Only residues to the N- and C-termini of the subject sequence, which are not matched/aligned with the query sequence, are considered for the purposes of manually adjusting the percent identity score. That is, only query residue positions outside the farthest N- and C-terminal residues of the subject sequence.

[0250] For example, a 90 amino acid residue subject sequence is aligned with a 100 residue query sequence to determine percent identity. The deletion occurs at the N-terminus of the subject sequence and therefore, the FASTDB alignment does not show a matching/alignment of the first 10 residues at the N-terminus. The 10 unpaired residues represent 10% of the sequence (number of residues at the N- and C-termini not matched/total number of residues in the query sequence) so 10% is subtracted from the percent identity score calculated by the FASTDB program. If the remaining 90 residues were perfectly matched the final percent identity would be 90%. In another example, a 90 residue subject sequence is compared with a 100 residue query sequence. This time the deletions are internal deletions so there are no residues at the N- or C-termini of the subject sequence which are not matched/aligned with the query. In this case the percent identity calculated by FASTDB is not manually corrected. Once again, only residue positions outside the N- and C-terminal ends of the subject sequence, as displayed in the FASTDB alignment, which are not matched/aligned with the query sequence are manually corrected for. No other manual corrections are to made for the purposes of the present invention.

[0251] The polynucleotide variants of the invention may contain alterations in the coding regions, non-coding regions, or both. Especially preferred are polynucleotide variants containing alterations which produce silent substitutions, additions, or deletions, but do not alter the properties or activities of the encoded polypeptide. Nucleotide variants produced by silent substitutions due to the degeneracy of the genetic code are preferred. Moreover, polypeptide variants in which less than 50, less than 40, less than 30, less than 20, less than 10, or 5-50, 5-25, 5-10, 1-5, or 1-2 amino acids are substituted, deleted, or added in any combination are also preferred. Polynucleotide variants can be produced for a variety of reasons, e.g., to optimize codon expression for a particular host (change codons in the human mRNA to those preferred by a bacterial host such as E. coli).

[0252] Naturally occurring variants are called “allelic variants,” and refer to one of several alternate forms of a gene occupying a given locus on a chromosome of an organism. (Genes II, Lewin, B., ed., John Wiley & Sons, New York (1985)). These allelic variants can vary at either the polynucleotide and/or polypeptide level and are included in the present invention. Alternatively, non-naturally occurring variants may be produced by mutagenesis techniques or by direct synthesis.

[0253] Using known methods of protein engineering and recombinant DNA technology, variants may be generated to improve or alter the characteristics of the polypeptides of the present invention. For instance, one or more amino acids can be deleted from the N-terminus or C-terminus of the polypeptide of the present invention without substantial loss of biological function. As an example, Ron et al. (J. Biol. Chem. 268: 2984-2988 (1993)) reported variant KGF proteins having heparin binding activity even after deleting 3, 8, or 27 amino-terminal amino acid residues. Similarly, Interferon gamma exhibited up to ten times higher activity after deleting 8-10 amino acid residues from the carboxy terminus of this protein. (Dobeli et al., J. Biotechnology 7:199-216 (1988).)

[0254] Moreover, ample evidence demonstrates that variants often retain a biological activity similar to that of the naturally occurring protein. For example, Gayle and coworkers (J. Biol. Chem. 268:22105-22111 (1993)) conducted extensive mutational analysis of human cytokine IL-1a. They used random mutagenesis to generate over 3,500 individual IL-1a mutants that averaged 2.5 amino acid changes per variant over the entire length of the molecule. Multiple mutations were examined at every possible amino acid position. The investigators found that “[m]ost of the molecule could be altered with little effect on either [binding or biological activity].” In fact, only 23 unique amino acid sequences, out of more than 3,500 nucleotide sequences examined, produced a protein that significantly differed in activity from wild-type.

[0255] Furthermore, even if deleting one or more amino acids from the N-terminus or C-terminus of a polypeptide results in modification or loss of one or more biological functions, other biological activities may still be retained. For example, the ability of a deletion variant to induce and/or to bind antibodies which recognize the secreted form will likely be retained when less than the majority of the residues of the secreted form are removed from the N-terminus or C-terminus. Whether a particular polypeptide lacking N- or C-terminal residues of a protein retains such immunogenic activities can readily be determined by routine methods described herein and otherwise known in the art.

[0256] Thus, the invention further includes polypeptide variants which show a functional activity (e.g., biological activity) of the polypeptides of the invention. Such variants include deletions, insertions, inversions, repeats, and substitutions selected according to general rules known in the art so as have little effect on activity.

[0257] The present application is directed to nucleic acid molecules at least 80%, 85%, 90%, 95%, 96%, 97%, 98%, 99% or 100% identical to the nucleic acid sequences disclosed herein, (e.g., encoding a polypeptide having the amino acid sequence of an N and/or C terminal deletion), irrespective of whether they encode a polypeptide having functional activity. This is because even where a particular nucleic acid molecule does not encode a polypeptide having functional activity, one of skill in the art would still know how to use the nucleic acid molecule, for instance, as a hybridization probe or a polymerase chain reaction (PCR) primer. Uses of the nucleic acid molecules of the present invention that do not encode a polypeptide having functional activity include, inter alia, (1) isolating a gene or allelic or splice variants thereof in a cDNA library; (2) in situ hybridization (e.g., “FISH”) to metaphase chromosomal spreads to provide precise chromosomal location of the gene, as described in Verma et al., Human Chromosomes: A Manual of Basic Techniques, Pergamon Press, New York (1988); (3) Northern Blot analysis for detecting mRNA expression in specific tissues (e.g., normal or diseased tissues); and (4) in situ hybridization (e.g., histochemistry) for detecting mRNA expression in specific tissues (e.g., normal or diseased tissues).

[0258] Preferred, however, are nucleic acid molecules having sequences at least 80%, 85%, 90%, 95%, 96%, 97%, 98%, 99% or 100% identical to the nucleic acid sequences disclosed herein, which do, in fact, encode a polypeptide having functional activity. By a polypeptide having “functional activity” is meant, a polypeptide capable of displaying one or more known functional activities associated with a full-length (complete) protein and/or a mature (secreted) protein of the invention. Such functional activities include, but are not limited to, biological activity, antigenicity [ability to bind (or compete with a polypeptide of the invention for binding) to an anti-polypeptide of the invention antibody], immunogenicity (ability to generate antibody which binds to a specific polypeptide of the invention), ability to form multimers with polypeptides of the invention, and ability to bind to a receptor or ligand for a polypeptide of the invention.

[0259] The functional activity of the polypeptides, and fragments, variants and derivatives of the invention, can be assayed by various methods.

[0260] For example, in one embodiment where one is assaying for the ability to bind or compete with a full-length polypeptide of the present invention for binding to an anti-polypeptide antibody, various immunoassays known in the art can be used, including but not limited to, competitive and non-competitive assay systems using techniques such as radioimmunoassays, ELISA (enzyme linked immunosorbent assay), “sandwich” immunoassays, immunoradiometric assays, gel diffusion precipitation reactions, immunodiffusion assays, in situ immunoassays (using colloidal gold, enzyme or radioisotope labels, for example), western blots, precipitation reactions, agglutination assays (e.g., gel agglutination assays, hemagglutination assays), complement fixation assays, immunofluorescence assays, protein A assays, and immunoelectrophoresis assays, etc. In one embodiment, antibody binding is detected by detecting a label on the primary antibody. In another embodiment, the primary antibody is detected by detecting binding of a secondary antibody or reagent to the primary antibody. In a further embodiment, the secondary antibody is labeled. Many means are known in the art for detecting binding in an immunoassay and are within the scope of the present invention.

[0261] In another embodiment, where a ligand is identified, or the ability of a polypeptide fragment, variant or derivative of the invention to multimerize is being evaluated, binding can be assayed, e.g., by means well-known in the art, such as, for example, reducing and non-reducing gel chromatography, protein affinity chromatography, and affinity blotting. See generally, Phizicky et al., Microbiol. Rev. 59:94-123 (1995). In another embodiment, the ability of physiological correlates of a polypeptide of the present invention to bind to a substrate(s) of the polypeptide of the invention can be routinely assayed using techniques known in the art.

[0262] In addition, assays described herein (see Examples) and otherwise known in the art may routinely be applied to measure the ability of the polypeptides of the present invention and fragments, variants and derivatives thereof to elicit polypeptide related biological activity (either in vitro or in vivo). Other methods will be known to the skilled artisan and are within the scope of the invention.

[0263] Of course, due to the degeneracy of the genetic code, one of ordinary skill in the art will immediately recognize that a large number of the nucleic acid molecules having a sequence at least 80%, 85%, 90%, 95%, 96%, 97%, 98%, 99%, or 100% identical to, for example, the nucleic acid sequence of the cDNA contained in ATCC Deposit No:Z, the nucleic acid sequence referred to in Table 1B (SEQ ID NO:X), the nucleic acid sequence disclosed in Table 1A (e.g., the nucleic acid sequence delineated in columns 7 and 8), the nucleic acid sequence disclosed in Table 2 (e.g., the nucleic acid sequence delineated in columns 8 and 9) or fragments thereof, will encode polypeptides “having functional activity.” In fact, since degenerate variants of any of these nucleotide sequences all encode the same polypeptide, in many instances, this will be clear to the skilled artisan even without performing the above described comparison assay. It will be further recognized in the art that, for such nucleic acid molecules that are not degenerate variants, a reasonable number will also encode a polypeptide having functional activity. This is because the skilled artisan is fully aware of amino acid substitutions that are either less likely or not likely to significantly effect protein function (e.g., replacing one aliphatic amino acid with a second aliphatic amino acid), as further described below.

[0264] For example, guidance concerning how to make phenotypically silent amino acid substitutions is provided in Bowie et al., “Deciphering the Message in Protein Sequences: Tolerance to Amino Acid Substitutions,” Science 247:1306-1310 (1990), wherein the authors indicate that there are two main strategies for studying the tolerance of an amino acid sequence to change.

[0265] The first strategy exploits the tolerance of amino acid substitutions by natural selection during the process of evolution. By comparing amino acid sequences in different species, conserved amino acids can be identified. These conserved amino acids are likely important for protein function. In contrast, the amino acid positions where substitutions have been tolerated by natural selection indicates that these positions are not critical for protein function. Thus, positions tolerating amino acid substitution could be modified while still maintaining biological activity of the protein.

[0266] The second strategy uses genetic engineering to introduce amino acid changes at specific positions of a cloned gene to identify regions critical for protein function. For example, site directed mutagenesis or alanine-scanning mutagenesis (introduction of single alanine mutations at every residue in the molecule) can be used. See Cunningham and Wells, Science 244:1081-1085 (1989). The resulting mutant molecules can then be tested for biological activity.

[0267] As the authors state, these two strategies have revealed that proteins are surprisingly tolerant of amino acid substitutions. The authors further indicate which amino acid changes are likely to be permissive at certain amino acid positions in the protein. For example, most buried (within the tertiary structure of the protein) amino acid residues require nonpolar side chains, whereas few features of surface side chains are generally conserved. Moreover, tolerated conservative amino acid substitutions involve replacement of the aliphatic or hydrophobic amino acids Ala, Val, Leu and Ile; replacement of the hydroxyl residues Ser and Thr; replacement of the acidic residues Asp and Glu; replacement of the amide residues Asn and Gln, replacement of the basic residues Lys, Arg, and His; replacement of the aromatic residues Phe, Tyr, and Trp, and replacement of the small-sized amino acids Ala, Ser, Thr, Met, and Gly.

[0268] Besides conservative amino acid substitution, variants of the present invention include (i) substitutions with one or more of the non-conserved amino acid residues, where the substituted amino acid residues may or may not be one encoded by the genetic code, or (ii) substitutions with one or more of the amino acid residues having a substituent group, or (iii) fusion of the mature polypeptide with another compound, such as a compound to increase the stability and/or solubility of the polypeptide (for example, polyethylene glycol), (iv) fusion of the polypeptide with additional amino acids, such as, for example, an IgG Fc fusion region peptide, serum albumin (preferably human serum albumin) or a fragment thereof, or leader or secretory sequence, or a sequence facilitating purification, or (v) fusion of the polypeptide with another compound, such as albumin (including but not limited to recombinant albumin (see, e.g., U.S. Pat. No. 5,876,969, issued Mar. 2, 1999, EP Patent 0 413 622, and U.S. Pat. No. 5,766,883, issued Jun. 16, 1998, herein incorporated by reference in their entirety)). Such variant polypeptides are deemed to be within the scope of those skilled in the art from the teachings herein.

[0269] For example, polypeptide variants containing amino acid substitutions of charged amino acids with other charged or neutral amino acids may produce proteins with improved characteristics, such as less aggregation. Aggregation of pharmaceutical formulations both reduces activity and increases clearance due to the aggregate's immunogenic activity. See Pinckard et al., Clin. Exp. Immunol. 2:331-340 (1967); Robbins et al., Diabetes 36: 838-845 (1987); Cleland et al., Crit. Rev. Therapeutic Drug Carrier Systems 10:307-377 (1993).

[0270] A further embodiment of the invention relates to polypeptides which comprise the amino acid sequence of a polypeptide having an amino acid sequence which contains at least one amino acid substitution, but not more than 50 amino acid substitutions, even more preferably, not more than 40 amino acid substitutions, still more preferably, not more than 30 amino acid substitutions, and still even more preferably, not more than 20 amino acid substitutions from a polypeptide sequence disclosed herein. Of course it is highly preferable for a polypeptide to have an amino acid sequence which, for example, comprises the amino acid sequence of a polypeptide of SEQ ID NO:Y, the amino acid sequence of the mature (e.g., secreted) polypeptide of SEQ ID NO:Y, an amino acid sequence encoded by SEQ ID NO:X, an amino acid sequence encoded by the portion of SEQ ID NO:X as defined in columns 8 and 9 of Table 2, an amino acid sequence encoded by the complement of SEQ ID NO:X, an amino acid sequence encoded by cDNA contained in ATCC Deposit No:Z, and/or the amino acid sequence of a mature (secreted) polypeptide encoded by cDNA contained in ATCC Deposit No:Z, or a fragment thereof, which contains, in order of ever-increasing preference, at least one, but not more than 10, 9, 8, 7, 6, 5, 4, 3, 2 or 1 amino acid substitutions.

[0271] In specific embodiments, the polypeptides of the invention comprise, or alternatively, consist of, fragments or variants of a reference amino acid sequence selected from: (a) the amino acid sequence of SEQ ID NO:Y or fragments thereof (e.g., the mature form and/or other fragments described herein); (b) the amino acid sequence encoded by SEQ ID NO:X or fragments thereof; (c) the amino acid sequence encoded by the complement of SEQ ID NO:X or fragments thereof; (d) the amino acid sequence encoded by the portion of SEQ ID NO:X as defined in columns 8 and 9 of Table 2 or fragments thereof; and (e) the amino acid sequence encoded by cDNA contained in ATCC Deposit No:Z or fragments thereof; wherein the fragments or variants have 1-5, 5-10, 5-25, 5-50, 10-50 or 50-150, amino acid residue additions, substitutions, and/or deletions when compared to the reference amino acid sequence. In preferred embodiments, the amino acid substitutions are conservative. Polynucleotides encoding these polypeptides are also encompassed by the invention.

Polynucleotide and Polypeptide Fragments

[0272] The present invention is also directed to polynucleotide fragments of the polynucleotides (nucleic acids) of the invention. In the present invention, a “polynucleotide fragment” refers to a polynucleotide having a nucleic acid sequence which, for example: is a portion of the cDNA contained in ATCC Deposit No:Z or the complementary strand thereto; is a portion of the polynucleotide sequence encoding the polypeptide encoded by the cDNA contained in ATCC Deposit No:Z or the complementary strand thereto; is a portion of the polynucleotide sequence encoding the mature (secreted) polypeptide encoded by the cDNA contained in ATCC Deposit No:Z or the complementary strand thereto; is a portion of a polynucleotide sequence encoding the mature amino acid sequence as defined in columns 14 and 15 of Table 1A or the complementary strand thereto; is a portion of a polynucleotide sequence encoding the amino acid sequence encoded by the region of SEQ ID NO:X as defined in columns 8 and 9 of Table 2 or the complementary strand thereto; is a portion of the polynucleotide sequence of SEQ ID NO:X as defined in columns 8 and 9 of Table 2 or the complementary strand thereto; is a portion of the polynucleotide sequence in SEQ ID NO:X or the complementary strand thereto; is a polynucleotide sequence encoding a portion of the polypeptide of SEQ ID NO:Y; is a polynucleotide sequence encoding a portion of a polypeptide encoded by SEQ ID NO:X; is a polynucleotide sequence encoding a portion of a polypeptide encoded by the complement of the polynucleotide sequence in SEQ ID NO:X; is a portion of a polynucleotide sequence encoding the amino acid sequence encoded by the region of SEQ ID NO:B as defined in column 6 of Table 1C or the complementary strand thereto; or is a portion of the polynucleotide sequence of SEQ ID NO:B as defined in column 6 of Table 1C or the complementary strand thereto.

[0273] The polynucleotide fragments of the invention are preferably at least about 15 nt, and more preferably at least about 20 nt, still more preferably at least about 30 nt, and even more preferably, at least about 40 nt, at least about 50 nt, at least about 75 nt, or at least about 150 nt in length. A fragment “at least 20 nt in length,” for example, is intended to include 20 or more contiguous bases from the cDNA sequence contained in ATCC Deposit No:Z, or the nucleotide sequence shown in SEQ ID NO:X or the complementary stand thereto. In this context “about” includes the particularly recited value or a value larger or smaller by several (5, 4, 3, 2, or 1) nucleotides, at either terminus or at both termini. These nucleotide fragments have uses that include, but are not limited to, as diagnostic probes and primers as discussed herein. Of course, larger fragments (e.g., at least 160, 170, 180, 190, 200, 250, 500, 600, 1000, or 2000 nucleotides in length) are also encompassed by the invention.

[0274] Moreover, representative examples of polynucleotide fragments of the invention comprise, or alternatively consist of, a sequence from about nucleotide number 1-50, 51-100, 101-150, 151-200, 201-250, 251-300, 301-350, 351-400, 401-450, 451-500, 501-550, 551-600, 601-650, 651-700, 701-750, 751-800, 801-850, 851-900, 901-950, 951-1000, 1001-1050, 1051-1100, 1101-1150, 1151-1200, 1201-1250, 1251-1300, 1301-1350, 1351-1400, 1401-1450, 1451-1500, 1501-1550, 1551-1600, 1601-1650, 1651-1700, 1701-1750, 1751-1800, 1801-1850, 1851-1900, 1901-1950, 1951-2000, 2001-2050, 2051-2100, 2101-2150, 2151-2200, 2201-2250, 2251-2300, 2301-2350, 2351-2400, 2401-2450, 2451-2500, 2501-2550, 2551-2600, 2601-2650, 2651-2700, 2701-2750, 2751-2800, 2801-2850, 2851-2900, 2901-2950, 2951-3000, 3001-3050, 3051-3100, 3101-3150, 3151-3200, 3201-3250, 3251-3300, 3301-3350, 3351-3400, 3401-3450, 3451-3500, 3501-3550, 3551-3600, 3601-3650, 3651-3700, 3701-3750, 3751-3800, 3801-3850, 3851-3900, 3901-3950, 3951-4000, 4001-4050, 4051-4100, 4101-4150, 4151-4200, 4201-4250, 4251-4300, 4301-4350, 4351-4400, 4401-4450, 4451-4500, 4501-4550, 4551-4600, 4601-4650, 4651-4700, 4701-4750, 4751-4800, 4801-4850, 4851-4900, 4901-4950, 4951-5000, 5001-5050, 5051-5100, 5101-5150, 5151-5200, 5201-5250, 5251-5300, 5301-5350, 5351-5400, 5401-5450, 5451-5500, 5501-5550, 5551-5600, 5601-5650, 5651-5700, 5701-5750, 5751-5800, 5801-5850, 5851-5900, 5901-5950, 5951-6000, 6001-6050, 6051-6100, 6101-6150, 6151-6200, 6201-6250, 6251-6300, 6301-6350, 6351-6400, 6401-6450, 6451-6500, 6501-6550, 6551-6600, 6601-6650, 6651-6700, 6701-6750, 6751-6800, 6801-6850, 6851-6900, 6901-6950, 6951-7000, 7001-7050, 7051-7100, 7101-7150, 7151-7200, 7201-7250, 7251-7300 or 7301 to the end of SEQ ID NO:X, or the complementary strand thereto. In this context “about” includes the particularly recited range or a range larger or smaller by several (5, 4, 3, 2, or 1) nucleotides, at either terminus or at both termini. Preferably, these fragments encode a polypeptide which has a functional activity (e.g., biological activity). More preferably, these polynucleotides can be used as probes or primers as discussed herein. Polynucleotides which hybridize to one or more of these polynucleotides under stringent hybridization conditions or alternatively, under lower stringency conditions are also encompassed by the invention, as are polypeptides encoded by these polynucleotides.

[0275] Further representative examples of polynucleotide fragments of the invention comprise, or alternatively consist of, a sequence from about nucleotide number 1-50, 51-100, 101-150, 151-200, 201-250, 251-300, 301-350, 351-400, 401-450, 451-500, 501-550, 551-600, 601-650, 651-700, 701-750, 751-800, 801-850, 851-900, 901-950, 951-1000, 1001-1050, 1051-1100, 1101-1150, 1151-1200, 1201-1250, 1251-1300, 1301-1350, 1351-1400, 1401-1450, 1451-1500, 1501-1550, 1551-1600, 1601-1650, 1651-1700, 1701-1750, 1751-1800, 1801-1850, 1851-1900, 1901-1950, 1951-2000, 2001-2050, 2051-2100, 2101-2150, 2151-2200, 2201-2250, 2251-2300, 2301-2350, 2351-2400, 2401-2450, 2451-2500, 2501-2550, 2551-2600, 2601-2650, 2651-2700, 2701-2750, 2751-2800, 2801-2850, 2851-2900, 2901-2950, 2951-3000, 3001-3050, 3051-3100, 3101-3150, 3151-3200, 3201-3250, 3251-3300, 3301-3350, 3351-3400, 3401-3450, 3451-3500, 3501-3550, 3551-3600, 3601-3650, 3651-3700, 3701-3750, 3751-3800, 3801-3850, 3851-3900, 3901-3950, 3951-4000, 4001-4050, 4051-4100, 4101-4150, 4151-4200, 4201-4250, 4251-4300, 4301-4350, 4351-4400, 4401-4450, 4451-4500, 4501-4550, 4551-4600, 4601-4650, 4651-4700, 4701-4750, 4751-4800, 4801-4850, 4851-4900, 4901-4950, 4951-5000, 5001-5050, 5051-5100, 5101-5150, 5151-5200, 5201-5250, 5251-5300, 5301-5350, 5351-5400, 5401-5450, 5451-5500, 5501-5550, 5551-5600, 5601-5650, 5651-5700, 5701-5750, 5751-5800, 5801-5850, 5851-5900, 5901-5950, 5951-6000, 6001-6050, 6051-6100, 6101-6150, 6151-6200, 6201-6250, 6251-6300, 6301-6350, 6351-6400, 6401-6450, 6451-6500, 6501-6550, 6551-6600, 6601-6650, 6651-6700, 6701-6750, 6751-6800, 6801-6850, 6851-6900, 6901-6950, 6951-7000, 7001-7050, 7051-7100, 7101-7150, 7151-7200, 7201-7250, 7251-7300 or 7301 to the end of the cDNA sequence contained in ATCC Deposit No:Z, or the complementary strand thereto. In this context “about” includes the particularly recited range or a range larger or smaller by several (5, 4, 3, 2, or 1) nucleotides, at either terminus or at both termini. Preferably, these fragments encode a polypeptide which has a functional activity (e.g., biological activity). More preferably, these polynucleotides can be used as probes or primers as discussed herein. Polynucleotides which hybridize to one or more of these polynucleotides under stringent hybridization conditions or alternatively, under lower stringency conditions are also encompassed by the invention, as are polypeptides encoded by these polynucleotides.

[0276] Moreover, representative examples of polynucleotide fragments of the invention comprise, or alternatively consist of, a nucleic acid sequence comprising one, two, three, four, five, six, seven, eight, nine, ten, or more of the above described polynucleotide fragments of the invention in combination with a polynucleotide sequence delineated in Table 1C column 6. Additional, representative examples of polynucleotide fragments of the invention comprise, or alternatively consist of, a nucleic acid sequence comprising one, two, three, four, five, six, seven, eight, nine, ten, or more of the above described polynucleotide fragments of the invention in combination with a polynucleotide sequence that is the complementary strand of a sequence delineated in column 6 of Table 1C. In further embodiments, the above-described polynucleotide fragments of the invention comprise, or alternatively consist of, sequences delineated in Table 1C, column 6, and have a nucleic acid sequence which is different from that of the BAC fragment having the sequence disclosed in SEQ ID NO:B (see Table 1C, column 5). In additional embodiments, the above-described polynucleotide fragments of the invention comprise, or alternatively consist of, sequences delineated in Table 1C, column 6, and have a nucleic acid sequence which is different from that published for the BAC clone identified as BAC ID NO:A (see Table 1C, column 4). In additional embodiments, the above-described polynucleotides of the invention comprise, or alternatively consist of, sequences delineated Table 1C, column 6, and have a nucleic acid sequence which is different from that contained in the BAC clone identified as BAC ID NO:A (see Table 1C, column 4). Polypeptides encoded by these polynucleotides, other polynucleotides that encode these polypeptides, and antibodies that bind these polypeptides are also encompassed by the invention. Additionally, fragments and variants of the above-described polynucleotides and polypeptides are also encompassed by the invention.

[0277] In additional specific embodiments, polynucleotides of the invention comprise, or alternatively consist of, one, two, three, four, five, six, seven, eight, nine, ten, or more fragments of the sequences delineated in column 6 of Table 1C, and the polynucleotide sequence of SEQ ID NO:X (e.g., as defined in Table 1C, column 2) or fragments or variants thereof. Polypeptides encoded by these polynucleotides, other polynucleotides that encode these polypeptides, and antibodies that bind these polypeptides are also encompassed by the invention.

[0278] In additional specific embodiments, polynucleotides of the invention comprise, or alternatively consist of, one, two, three, four, five, six, seven, eight, nine, ten, or more fragments of the sequences delineated in column 6 of Table 1C which correspond to the same ATCC Deposit No:Z (see Table 1C, column 1), and the polynucleotide sequence of SEQ ID NO:X (e.g., as defined in Table 1A, 1B, or 1C) or fragments or variants thereof. Polypeptides encoded by these polynucleotides, other polynucleotides that encode these polypeptides, and antibodies that bind these polypeptides are also encompassed by the invention.

[0279] In further specific embodiments, polynucleotides of the invention comprise, or alternatively consist of, one, two, three, four, five, six, seven, eight, nine, ten, or more fragments of the sequences delineated in the same row of column 6 of Table 1C, and the polynucleotide sequence of SEQ ID NO:X (e.g., as defined in Table 1A, 1B, or 1C) or fragments or variants thereof. Polypeptides encoded by these polynucleotides, other polynucleotides that encode these polypeptides, and antibodies that bind these polypeptides are also encompassed by the invention.

[0280] In additional specific embodiments, polynucleotides of the invention comprise, or alternatively consist of a polynucleotide sequence in which the 3′ 10 polynucleotides of one of the sequences delineated in column 6 of Table 1C and the 5′ 10 polynucleotides of the sequence of SEQ ID NO:X are directly contiguous. Nucleic acids which hybridize to the complement of these 20 contiguous polynucleotides under stringent hybridization conditions or alternatively, under lower stringency conditions, are also encompassed by the invention. Polypeptides encoded by these polynucleotides and/or nucleic acids, other polynucleotides and/or nucleic acids that encode these polypeptides, and antibodies that bind these polypeptides are also encompassed by the invention. Additionally, fragments and variants of the above-described polynucleotides, nucleic acids, and polypeptides are also encompassed by the invention.

[0281] In additional specific embodiments, polynucleotides of the invention comprise, or alternatively consist of a polynucleotide sequence in which the 3′ 10 polynucleotides of one of the sequences delineated in column 6 of Table 1C and the 5′ 10 polynucleotides of a fragment or variant of the sequence of SEQ ID NO:X (e.g., as described herein) are directly contiguous Nucleic acids which hybridize to the complement of these 20 contiguous polynucleotides under stringent hybridization conditions or alternatively, under lower stringency conditions, are also encompassed by the invention. Polypeptides encoded by these polynucleotides and/or nucleic acids, other polynucleotides and/or nucleic acids encoding these polypeptides, and antibodies that bind these polypeptides are also encompassed by the invention. Additionally, fragments and variants of the above-described polynucleotides, nucleic acids, and polypeptides are also encompassed by the invention.

[0282] In further specific embodiments, polynucleotides of the invention comprise, or alternatively consist of a polynucleotide sequence in which the 3′ 10 polynucleotides of a fragment or variant of the sequence of SEQ ID NO:X and the 5′ 10 polynucleotides of the sequence of one of the sequences delineated in column 6 of Table 1C are directly contiguous. Nucleic acids which hybridize to the complement of these 20 contiguous polynucleotides under stringent hybridization conditions or alternatively, under lower stringency conditions, are also encompassed by the invention. Polypeptides encoded by these polynucleotides and/or nucleic acids, other polynucleotides and/or nucleic acids encoding these polypeptides, and antibodies that bind these polypeptides are also encompassed by the invention. Additionally, fragments and variants of the above-described polynucleotides, nucleic acids, and polypeptides are also encompassed by the invention.

[0283] In specific embodiments, polynucleotides of the invention comprise, or alternatively consist of a polynucleotide sequence in which the 3′ 10 polynucleotides of one of the sequences delineated in column 6 of Table 1C and the 5′ 10 polynucleotides of another sequence in column 6 are directly contiguous. In preferred embodiments, the 3′ 10 polynucleotides of one of the sequences delineated in column 6 of Table 1C is directly contiguous with the 5′ 10 polynucleotides of the next sequential exon delineated in Table 1C, column 6. Nucleic acids which hybridize to the complement of these 20 contiguous polynucleotides under stringent hybridization conditions or alternatively, under lower stringency conditions, are also encompassed by the invention. Polypeptides encoded by these polynucleotides and/or nucleic acids, other polynucleotides and/or nucleic acids encoding these polypeptides, and antibodies that bind these polypeptides are also encompassed by the invention. Additionally, fragments and variants of the above-described polynucleotides, nucleic acids, and polypeptides are also encompassed by the invention.

[0284] In the present invention, a “polypeptide fragment” refers to an amino acid sequence which is a portion of the amino acid sequence contained in SEQ ID NO:Y, is a portion of the mature form of SEQ ID NO:Y as defined in columns 14 and 15 of Table 1A, a portion of an amino acid sequence encoded by the portion of SEQ ID NO:X as defined in columns 8 and 9 of Table 2, is a portion of an amino acid sequence encoded by the polynucleotide sequence of SEQ ID NO:X, is a portion of an amino acid sequence encoded by the complement of the polynucleotide sequence in SEQ ID NO:X, is a portion of the amino acid sequence of a mature (secreted) polypeptide encoded by the cDNA contained in ATCC Deposit No:Z, and/or is a portion of an amino acid sequence encoded by the cDNA contained in ATCC Deposit No:Z. Protein (polypeptide) fragments may be “free-standing,” or comprised within a larger polypeptide of which the fragment forms a part or region, most preferably as a single continuous region. Representative examples of polypeptide fragments of the invention, include, for example, fragments comprising, or alternatively consisting of, from about amino acid number 1-20, 21-40, 41-60, 61-80, 81-100, 101-120, 121-140, 141-160, 161-180, 181-200, 201-220, 221-240, 241-260, 261-280, 281-300, 301-320, 321-340, 341-360, 361-380, 381-400, 401-420, 421-440, 441-460, 461-480, 481-500, 501-520, 521-540, 541-560, 561-580, 581-600, 601-620, 621-640, 641-660, 661-680, 681-700, 701-720, 721-740, 741-760, 761-780, 781-800, 801-820, 821-840, 841-860, 861-880, 881-900, 901-920, 921-940, 941-960, 961-980, 981-1000, 1001-1020, 1021-1040, 1041-1060, 1061-1080, 1081-1100, 1101-1120, 1121-1140, 1141-1160, 1161-1180, 1181-1200, 1201-1220, 1221-1240, 1241-1260, 1261-1280, 1281-1300, 1301-1320, 1321-1340, 1341-1360, 1361-1380, 1381-1400, 1401-1420, 1421-1440, or 1441 to the end of the coding region of cDNA and SEQ ID NO: Y. In a preferred embodiment, polypeptide fragments of the invention include, for example, fragments comprising, or alternatively consisting of, from about amino acid number 1-20, 21-40, 41-60, 61-80, 81-100, 101-120, 121-140, 141-160, 161-180, 181-200, 201-220, 221-240, 241-260, 261-280, 281-300, 301-320, 321-340, 341-360, 361-380, 381-400, 401-420, 421-440, 441-460, 461-480, 481-500, 501-520, 521-540, 541-560, 561-580, 581-600, 601-620, 621-640, 641-660, 661-680, 681-700, 701-720, 721-740, 741-760, 761-780, 781-800, 801-820, 821-840, 841-860, 861-880, 881-900, 901-920, 921-940, 941-960, 961-980, 981-1000, 1001-1020, 1021-1040, 1041-1060, 1061-1080, 1081-1100, 1101-1120, 1121-1140, 1141-1160, 1161-1180, 1181-1200, 1201-1220, 1221-1240, 1241-1260, 1261-1280, 1281-1300, 1301-1320, 1321-1340, 1341-1360, 1361-1380, 1381-1400, 1401-1420, 1421-1440, or 1441 to the end of the coding region of SEQ ID NO:Y. Moreover, polypeptide fragments of the invention may be at least about 10, 15, 20, 25, 30, 35, 40, 45, 50, 55, 60, 65, 70, 75, 80, 85, 90, 100, 110, 120, 130, 140, or 150 amino acids in length. In this context “about” includes the particularly recited ranges or values, or ranges or values larger or smaller by several (5, 4, 3, 2, or 1) amino acids, at either extreme or at both extremes. Polynucleotides encoding these polypeptide fragments are also encompassed by the invention.

[0285] Even if deletion of one or more amino acids from the N-terminus of a protein results in modification of loss of one or more biological functions of the protein, other functional activities (e.g., biological activities, ability to multimerize, ability to bind a ligand) may still be retained. For example, the ability of shortened muteins to induce and/or bind to antibodies which recognize the complete or mature forms of the polypeptides generally will be retained when less than the majority of the residues of the complete or mature polypeptide are removed from the N-terminus. Whether a particular polypeptide lacking N-terminal residues of a complete polypeptide retains such immunologic activities can readily be determined by routine methods described herein and otherwise known in the art. It is not unlikely that a mutein with a large number of deleted N-terminal amino acid residues may retain some biological or immunogenic activities. In fact, peptides composed of as few as six amino acid residues may often evoke an immune response.

[0286] Accordingly, polypeptide fragments include the secreted protein as well as the mature form. Further preferred polypeptide fragments include the secreted protein or the mature form having a continuous series of deleted residues from the amino or the carboxy terminus, or both. For example, any number of amino acids, ranging from 1-60, can be deleted from the amino terminus of either the secreted polypeptide or the mature form. Similarly, any number of amino acids, ranging from 1-30, can be deleted from the carboxy terminus of the secreted protein or mature form. Furthermore, any combination of the above amino and carboxy terminus deletions are preferred. Similarly, polynucleotides encoding these polypeptide fragments are also preferred.

[0287] The present invention further provides polypeptides having one or more residues deleted from the amino terminus of the amino acid sequence of a polypeptide disclosed herein (e.g., a polypeptide of SEQ ID NO:Y, a polypeptide as defined in columns 14 and 15 of Table 1A, a polypeptide encoded by the polynucleotide sequence contained in SEQ ID NO:X or the complement thereof, a polypeptide encoded by the portion of SEQ ID NO:X as defined in columns 8 and 9 of Table 2, a polypeptide encoded by the portion of SEQ ID NO:B as defined in column 6 of Table 1C, a polypeptide encoded by the cDNA contained in ATCC Deposit No:Z, and/or a mature polypeptide encoded by the cDNA contained in ATCC Deposit No:Z). In particular, N-terminal deletions may be described by the general formula m-q, where q is a whole integer representing the total number of amino acid residues in a polypeptide of the invention (e.g., the polypeptide disclosed in SEQ ID NO:Y, the mature (secreted) portion of SEQ ID NO:Y as defined in columns 14 and 15 of Table 1A, or the polypeptide encoded by the portion of SEQ ID NO:X as defined in columns 8 and 9 of Table 2), and m is defined as any integer ranging from 2 to q−6. Polynucleotides encoding these polypeptides are also encompassed by the invention.

[0288] The present invention further provides polypeptides having one or more residues from the carboxy terminus of the amino acid sequence of a polypeptide disclosed herein (e.g., a polypeptide of SEQ ID NO:Y, the mature (secreted) portion of SEQ ID NO:Y as defined in columns 14 and 15 of Table 1A, a polypeptide encoded by the polynucleotide sequence contained in SEQ ID NO:X, a polypeptide encoded by the portion of SEQ ID NO:X as defined in columns 8 and 9 of Table 2, a polypeptide encoded by the portion of SEQ ID NO:B as defined in column 6 of Table 1C, a polypeptide encoded by the cDNA contained in ATCC Deposit No:Z, and/or a mature polypeptide encoded by the cDNA contained in ATCC Deposit No:Z). In particular, C-terminal deletions may be described by the general formula 1-n, where n is any whole integer ranging from 6 to q−1, and where n corresponds to the position of amino acid residue in a polypeptide of the invention. Polynucleotides encoding these polypeptides are also encompassed by the invention.

[0289] In addition, any of the above described N- or C-terminal deletions can be combined to produce a N- and C-terminal deleted polypeptide. The invention also provides polypeptides having one or more amino acids deleted from both the amino and the carboxyl termini, which may be described generally as having residues m-n of a polypeptide encoded by SEQ ID NO:X (e.g., including, but not limited to, the preferred polypeptide disclosed as SEQ ID NO:Y, the mature (secreted) portion of SEQ ID NO:Y as defined in columns 14 and 15 of Table 1A, and the polypeptide encoded by the portion of SEQ ID NO:X as defined in columns 8 and 9 of Table 2), the cDNA contained in ATCC Deposit No:Z, and/or the complement thereof, where n and m are integers as described above. Polynucleotides encoding these polypeptides are also encompassed by the invention.

[0290] Also as mentioned above, even if deletion of one or more amino acids from the C-terminus of a protein results in modification of loss of one or more biological functions of the protein, other functional activities (e.g., biological activities, ability to multimerize, ability to bind a ligand) may still be retained. For example the ability of the shortened mutein to induce and/or bind to antibodies which recognize the complete or mature forms of the polypeptide generally will be retained when less than the majority of the residues of the complete or mature polypeptide are removed from the C-terminus. Whether a particular polypeptide lacking C-terminal residues of a complete polypeptide retains such immunologic activities can readily be determined by routine methods described herein and otherwise known in the art. It is not unlikely that a mutein with a large number of deleted C-terminal amino acid residues may retain some biological or immunogenic activities. In fact, peptides composed of as few as six amino acid residues may often evoke an immune response.

[0291] The present application is also directed to proteins containing polypeptides at least 80%, 85%, 90%, 95%, 96%, 97%, 98% or 99% identical to a polypeptide sequence set forth herein. In preferred embodiments, the application is directed to proteins containing polypeptides at least 80%, 85%, 90%, 95%, 96%, 97%, 98% or 99% identical to polypeptides having the amino acid sequence of the specific N- and C-terminal deletions. Polynucleotides encoding these polypeptides are also encompassed by the invention.

[0292] Any polypeptide sequence encoded by, for example, the polynucleotide sequences set forth as SEQ ID NO:X or the complement thereof, (presented, for example, in Tables 1A and 2), the cDNA contained in ATCC Deposit No:Z, or the polynucleotide sequence as defined in column 6 of Table 1C, may be analyzed to determine certain preferred regions of the polypeptide. For example, the amino acid sequence of a polypeptide encoded by a polynucleotide sequence of SEQ ID NO:X (e.g., the polypeptide of SEQ ID NO:Y and the polypeptide encoded by the portion of SEQ ID NO:X as defined in columns 8 and 9 of Table 2) or the cDNA contained in ATCC Deposit No:Z may be analyzed using the default parameters of the DNASTAR computer algorithm (DNASTAR, Inc., 1228 S. Park St., Madison, Wis. 53715 USA; http://www.dnastar.com/).

[0293] Polypeptide regions that may be routinely obtained using the DNASTAR computer algorithm include, but are not limited to, Garnier-Robson alpha-regions, beta-regions, turn-regions, and coil-regions; Chou-Fasman alpha-regions, beta-regions, and turn-regions; Kyte-Doolittle hydrophilic regions and hydrophobic regions; Eisenberg alpha- and beta-amphipathic regions; Karplus-Schulz flexible regions; Emini surface-forming regions; and Jameson-Wolf regions of high antigenic index. Among highly preferred polynucleotides of the invention in this regard are those that encode polypeptides comprising regions that combine several structural features, such as several (e.g., 1, 2, 3 or 4) of the features set out above.

[0294] Additionally, Kyte-Doolittle hydrophilic regions and hydrophobic regions, Emini surface-forming regions, and Jameson-Wolf regions of high antigenic index (i.e., containing four or more contiguous amino acids having an antigenic index of greater than or equal to 1.5, as identified using the default parameters of the Jameson-Wolf program) can routinely be used to determine polypeptide regions that exhibit a high degree of potential for antigenicity. Regions of high antigenicity are determined from data by DNASTAR analysis by choosing values which represent regions of the polypeptide which are likely to be exposed on the surface of the polypeptide in an environment in which antigen recognition may occur in the process of initiation of an immune response.

[0295] Preferred polypeptide fragments of the invention are fragments comprising, or alternatively, consisting of, an amino acid sequence that displays a functional activity (e.g. biological activity) of the polypeptide sequence of which the amino acid sequence is a fragment. By a polypeptide displaying a “functional activity” is meant a polypeptide capable of one or more known functional activities associated with a full-length protein, such as, for example, biological activity, antigenicity, immunogenicity, and/or multimerization, as described herein.

[0296] Other preferred polypeptide fragments are biologically active fragments. Biologically active fragments are those exhibiting activity similar, but not necessarily identical, to an activity of the polypeptide of the present invention. The biological activity of the fragments may include an improved desired activity, or a decreased undesirable activity.

[0297] In preferred embodiments, polypeptides of the invention comprise, or alternatively consist of, one, two, three, four, five or more of the antigenic fragments of the polypeptide of SEQ ID NO:Y, or portions thereof. Polynucleotides encoding these polypeptides are also encompassed by the invention.

Epitopes and Antibodies

[0298] The present invention encompasses polypeptides comprising, or alternatively consisting of, an epitope of: the polypeptide sequence shown in SEQ ID NO:Y; a polypeptide sequence encoded by SEQ ID NO:X or the complementary strand thereto; the polypeptide sequence encoded by the portion of SEQ ID NO:X as defined in columns 8 and 9 of Table 2; the polypeptide sequence encoded by the portion of SEQ ID NO:B as defined in column 6 of Table 1C or the complement thereto; the polypeptide sequence encoded by the cDNA contained in ATCC Deposit No:Z; or the polypeptide sequence encoded by a polynucleotide that hybridizes to the sequence of SEQ ID NO:X, the complement of the sequence of SEQ ID NO:X, the complement of a portion of SEQ ID NO:X as defined in columns 8 and 9 of Table 2, or the cDNA sequence contained in ATCC Deposit No:Z under stringent hybridization conditions or alternatively, under lower stringency hybridization as defined supra. The present invention further encompasses polynucleotide sequences encoding an epitope of a polypeptide sequence of the invention (such as, for example, the sequence disclosed in SEQ ID NO:X, or a fragment thereof), polynucleotide sequences of the complementary strand of a polynucleotide sequence encoding an epitope of the invention, and polynucleotide sequences which hybridize to the complementary strand under stringent hybridization conditions or alternatively, under lower stringency hybridization conditions defined supra.

[0299] The term “epitopes,” as used herein, refers to portions of a polypeptide having antigenic or immunogenic activity in an animal, preferably a mammal, and most preferably in a human. In a preferred embodiment, the present invention encompasses a polypeptide comprising an epitope, as well as the polynucleotide encoding this polypeptide. An “immunogenic epitope,” as used herein, is defined as a portion of a protein that elicits an antibody response in an animal, as determined by any method known in the art, for example, by the methods for generating antibodies described infra. (See, for example, Geysen et al., Proc. Natl. Acad. Sci. USA 81:3998-4002 (1983)). The term “antigenic epitope,” as used herein, is defined as a portion of a protein to which an antibody can immunospecifically bind its antigen as determined by any method well known in the art, for example, by the immunoassays described herein. Immunospecific binding excludes non-specific binding but does not necessarily exclude cross-reactivity with other antigens. Antigenic epitopes need not necessarily be immunogenic.

[0300] Fragments which function as epitopes may be produced by any conventional means. (See, e.g., Houghten, R. A., Proc. Natl. Acad. Sci. USA 82:5131-5135 (1985) further described in U.S. Pat. No. 4,631,211.)

[0301] In the present invention, antigenic epitopes preferably contain a sequence of at least 4, at least 5, at least 6, at least 7, more preferably at least 8, at least 9, at least 10, at least 11, at least 12, at least 13, at least 14, at least 15, at least 20, at least 25, at least 30, at least 40, at least 50, and, most preferably, between about 15 to about 30 amino acids. Preferred polypeptides comprising immunogenic or antigenic epitopes are at least 10, 15, 20, 25, 30, 35, 40, 45, 50, 55, 60, 65, 70, 75, 80, 85, 90, 95, or 100 amino acid residues in length. Additional non-exclusive preferred antigenic epitopes include the antigenic epitopes disclosed herein, as well as portions thereof. Antigenic epitopes are useful, for example, to raise antibodies, including monoclonal antibodies, that specifically bind the epitope. Preferred antigenic epitopes include the antigenic epitopes disclosed herein, as well as any combination of two, three, four, five or more of these antigenic epitopes. Antigenic epitopes can be used as the target molecules in immunoassays. (See, for instance, Wilson et al., Cell 37:767-778 (1984); Sutcliffe et al., Science 219:660-666 (1983)).

[0302] Non-limiting examples of epitopes of polypeptides that can be used to generate antibodies of the invention include a polypeptide comprising, or alternatively consisting of, at least one, two, three, four, five, six or more of the portion(s) of SEQ ID NO:Y specified in column 6 of Table 1B.1. These polypeptide fragments have been determined to bear antigenic epitopes of the proteins of the invention by the analysis of the Jameson-Wolf antigenic index which is included in the DNAStar suite of computer programs. By “comprise” it is intended that a polypeptide contains at least one, two, three, four, five, six or more of the portion(s) of SEQ ID NO:Y shown in column 6 of Table 1B.1, but it may contain additional flanking residues on either the amino or carboxyl termini of the recited portion. Such additional flanking sequences are preferably sequences naturally found adjacent to the portion; i.e., contiguous sequence shown in SEQ ID NO:Y. The flanking sequence may, however, be sequences from a heterolgous polypeptide, such as from another protein described herein or from a heterologous polypeptide not described herein. In particular embodiments, epitope portions of a polypeptide of the invention comprise one, two, three, or more of the portions of SEQ ID NO:Y shown in column 6 of Table 1B.1.

[0303] Similarly, immunogenic epitopes can be used, for example, to induce antibodies according to methods well known in the art. See, for instance, Sutcliffe et al., supra; Wilson et al., supra; Chow et al., Proc. Natl. Acad. Sci. USA 82:910-914; and Bittle et al., J. Gen. Virol. 66:2347-2354 (1985). Preferred immunogenic epitopes include the immunogenic epitopes disclosed herein, as well as any combination of two, three, four, five or more of these immunogenic epitopes. The polypeptides comprising one or more immunogenic epitopes may be presented for eliciting an antibody response together with a carrier protein, such as an albumin, to an animal system (such as rabbit or mouse), or, if the polypeptide is of sufficient length (at least about 25 amino acids), the polypeptide may be presented without a carrier. However, immunogenic epitopes comprising as few as 8 to 10 amino acids have been shown to be sufficient to raise antibodies capable of binding to, at the very least, linear epitopes in a denatured polypeptide (e.g., in Western blotting).

[0304] Epitope-bearing polypeptides of the present invention may be used to induce antibodies according to methods well known in the art including, but not limited to, in vivo immunization, in vitro immunization, and phage display methods. See, e.g., Sutcliffe et al., supra; Wilson et al., supra, and Bitle et al., J. Gen. Virol., 66:2347-2354 (1985). If in vivo immunization is used, animals may be immunized with free peptide; however, anti-peptide antibody titer may be boosted by coupling the peptide to a macromolecular carrier, such as keyhole limpet hemacyanin (KLH) or tetanus toxoid. For instance, peptides containing cysteine residues may be coupled to a carrier using a linker such as maleimidobenzoyl-N-hydroxysuccinimide ester (MBS), while other peptides may be coupled to carriers using a more general linking agent such as glutaraldehyde. Animals such as rabbits, rats and mice are immunized with either free or carrier-coupled peptides, for instance, by intraperitoneal and/or intradermal injection of emulsions containing about 100 μg of peptide or carrier protein and Freund's adjuvant or any other adjuvant known for stimulating an immune response. Several booster injections may be needed, for instance, at intervals of about two weeks, to provide a useful titer of anti-peptide antibody which can be detected, for example, by ELISA assay using free peptide adsorbed to a solid surface. The titer of anti-peptide antibodies in serum from an immunized animal may be increased by selection of anti-peptide antibodies, for instance, by adsorption to the peptide on a solid support and elution of the selected antibodies according to methods well known in the art.

[0305] As one of skill in the art will appreciate, and as discussed above, the polypeptides of the present invention (e.g., those comprising an immunogenic or antigenic epitope) can be fused to heterologous polypeptide sequences. For example, polypeptides of the present invention (including fragments or variants thereof), may be fused with the constant domain of immunoglobulins (IgA, IgE, IgG, IgM), or portions thereof (CH1, CH2, CH3, or any combination thereof and portions thereof, resulting in chimeric polypeptides. By way of another non-limiting example, polypeptides and/or antibodies of the present invention (including fragments or variants thereof) may be fused with albumin (including but not limited to recombinant human serum albumin or fragments or variants thereof (see, e.g., U.S. Pat. No. 5,876,969, issued Mar. 2, 1999, EP Patent 0 413 622, and U.S. Pat. No. 5,766,883, issued Jun. 16, 1998, herein incorporated by reference in their entirety)). In a preferred embodiment, polypeptides and/or antibodies of the present invention (including fragments or variants thereof) are fused with the mature form of human serum albumin (i.e., amino acids 1585 of human serum albumin as shown in FIGS. 1 and 2 of EP Patent 0 322 094) which is herein incorporated by reference in its entirety. In another preferred embodiment, polypeptides and/or antibodies of the present invention (including fragments or variants thereof) are fused with polypeptide fragments comprising, or alternatively consisting of, amino acid residues 1-z of human serum albumin, where z is an integer from 369 to 419, as described in U.S. Pat. No. 5,766,883 herein incorporated by reference in its entirety. Polypeptides and/or antibodies of the present invention (including fragments or variants thereof) may be fused to either the N- or C-terminal end of the heterologous protein (e.g., immunoglobulin Fc polypeptide or human serum albumin polypeptide). Polynucleotides encoding fusion proteins of the invention are also encompassed by the invention.

[0306] Such fusion proteins as those described above may facilitate purification and may increase half-life in vivo. This has been shown for chimeric proteins consisting of the first two domains of the human CD4-polypeptide and various domains of the constant regions of the heavy or light chains of mammalian immunoglobulins. See, e.g., EP 394,827; Traunecker et al., Nature, 331:84-86 (1988). Enhanced delivery of an antigen across the epithelial barrier to the immune system has been demonstrated for antigens (e.g., insulin) conjugated to an FcRn binding partner such as IgG or Fc fragments (see, e.g., PCT Publications WO 96/22024 and WO 99/04813). IgG fusion proteins that have a disulfide-linked dimeric structure due to the IgG portion desulfide bonds have also been found to be more efficient in binding and neutralizing other molecules than monomeric polypeptides or fragments thereof alone. See, e.g., Fountoulakis et al., J. Biochem., 270:3958-3964 (1995). Nucleic acids encoding the above epitopes can also be recombined with a gene of interest as an epitope tag (e.g., the hemagglutinin (HA) tag or flag tag) to aid in detection and purification of the expressed polypeptide. For example, a system described by Janknecht et al. allows for the ready purification of non-denatured fusion proteins expressed in human cell lines (Janknecht et al., 1991, Proc. Natl. Acad. Sci. USA 88:8972-897). In this system, the gene of interest is subcloned into a vaccinia recombination plasmid such that the open reading frame of the gene is translationally fused to an amino-terminal tag consisting of six histidine residues. The tag serves as a matrix binding domain for the fusion protein. Extracts from cells infected with the recombinant vaccinia virus are loaded onto Ni2+ nitriloacetic acid-agarose column and histidine-tagged proteins can be selectively eluted with imidazole-containing buffers.

Fusion Proteins

[0307] Any polypeptide of the present invention can be used to generate fusion proteins. For example, the polypeptide of the present invention, when fused to a second protein, can be used as an antigenic tag. Antibodies raised against the polypeptide of the present invention can be used to indirectly detect the second protein by binding to the polypeptide. Moreover, because secreted proteins target cellular locations based on trafficking signals, polypeptides of the present invention which are shown to be secreted can be used as targeting molecules once fused to other proteins.

[0308] Examples of domains that can be fused to polypeptides of the present invention include not only heterologous signal sequences, but also other heterologous functional regions. The fusion does not necessarily need to be direct, but may occur through linker sequences.

[0309] In certain preferred embodiments, proteins of the invention are fusion proteins comprising an amino acid sequence that is an N and/or C-terminal deletion of a polypeptide of the invention. In preferred embodiments, the invention is directed to a fusion protein comprising an amino acid sequence that is at least 90%, 95%, 96%, 97%, 98% or 99% identical to a polypeptide sequence of the invention. Polynucleotides encoding these proteins are also encompassed by the invention.

[0310] Moreover, fusion proteins may also be engineered to improve characteristics of the polypeptide of the present invention. For instance, a region of additional amino acids, particularly charged amino acids, may be added to the N-terminus of the polypeptide to improve stability and persistence during purification from the host cell or subsequent handling and storage. Also, peptide moieties may be added to the polypeptide to facilitate purification. Such regions may be removed prior to final preparation of the polypeptide. The addition of peptide moieties to facilitate handling of polypeptides are familiar and routine techniques in the art.

[0311] As one of skill in the art will appreciate that, as discussed above, polypeptides of the present invention, and epitope-bearing fragments thereof, can be combined with heterologous polypeptide sequences. For example, the polypeptides of the present invention may be fused with heterologous polypeptide sequences, for example, the polypeptides of the present invention may be fused with the constant domain of immunoglobulins (IgA, IgE, IgG, IgM) or portions thereof (CH1, CH2, CH3, and any combination thereof, including both entire domains and portions thereof), or albumin (including, but not limited to, native or recombinant human albumin or fragments or variants thereof (see, e.g., U.S. Pat. No. 5,876,969, issued Mar. 2, 1999, EP Patent 0 413 622, and U.S. Pat. No. 5,766,883, issued Jun. 16, 1998, herein incorporated by reference in their entirety)), resulting in chimeric polypeptides. For example, EP-A-O 464 533 (Canadian counterpart 2045869) discloses fusion proteins comprising various portions of constant region of immunoglobulin molecules together with another human protein or part thereof. In many cases, the Fc part in a fusion protein is beneficial in therapy and diagnosis, and thus can result in, for example, improved pharmacokinetic properties (EP-A 0232 262). Alternatively, deleting the Fc part after the fusion protein has been expressed, detected, and purified, would be desired. For example, the Fc portion may hinder therapy and diagnosis if the fusion protein is used as an antigen for immunizations. In drug discovery, for example, human proteins, such as hIL-5, have been fused with Fc portions for the purpose of high-throughput screening assays to identify antagonists of hIL-5. See, D. Bennett et al., J. Molecular Recognition 8:52-58 (1995); K. Johanson et al., J. Biol. Chem. 270:9459-9471 (1995).

[0312] Moreover, the polypeptides of the present invention can be fused to marker sequences, such as a polypeptide which facilitates purification of the fused polypeptide. In preferred embodiments, the marker amino acid sequence is a hexa-histidine peptide, such as the tag provided in a pQE vector (QIAGEN, Inc., 9259 Eton Avenue, Chatsworth, Calif., 91311), among others, many of which are commercially available. As described in Gentz et al., Proc. Natl. Acad. Sci. USA 86:821-824 (1989), for instance, hexa-histidine provides for convenient purification of the fusion protein. Another peptide tag useful for purification, the “HA” tag, corresponds to an epitope derived from the influenza hemagglutinin protein (Wilson et al., Cell 37:767 (1984)).

[0313] Additional fusion proteins of the invention may be generated through the techniques of gene-shuffling, motif-shuffling, exon-shuffling, and/or codon-shuffling (collectively referred to as “DNA shuffling”). DNA shuffling may be employed to modulate the activities of polypeptides of the invention, such methods can be used to generate polypeptides with altered activity, as well as agonists and antagonists of the polypeptides. See, generally, U.S. Pat. Nos. 5,605,793; 5,811,238; 5,830,721; 5,834,252; and 5,837,458, and Patten et al., Curr. Opinion Biotechnol. 8:724-33 (1997); Harayama, Trends Biotechnol. 16(2):76-82 (1998); Hansson, et al., J. Mol. Biol. 287:265-76 (1999); and Lorenzo and Blasco, Biotechniques 24(2):308-13 (1998) (each of these patents and publications are hereby incorporated by reference in its entirety). In one embodiment, alteration of polynucleotides corresponding to SEQ ID NO:X and the polypeptides encoded by these polynucleotides may be achieved by DNA shuffling. DNA shuffling involves the assembly of two or more DNA segments by homologous or site-specific recombination to generate variation in the polynucleotide sequence. In another embodiment, polynucleotides of the invention, or the encoded polypeptides, may be altered by being subjected to random mutagenesis by error-prone PCR, random nucleotide insertion or other methods prior to recombination. In another embodiment, one or more components, motifs, sections, parts, domains, fragments, etc., of a polynucleotide encoding a polypeptide of the invention may be recombined with one or more components, motifs, sections, parts, domains, fragments, etc. of one or more heterologous molecules.

[0314] Thus, any of these above fusions can be engineered using the polynucleotides or the polypeptides of the present invention.

Recombinant and Synthetic Production of Polypeptides of the Invention

[0315] The present invention also relates to vectors containing the polynucleotide of the present invention, host cells, and the production of polypeptides by synthetic and recombinant techniques. The vector may be, for example, a phage, plasmid, viral, or retroviral vector. Retroviral vectors may be replication competent or replication defective. In the latter case, viral propagation generally will occur only in complementing host cells.

[0316] The polynucleotides of the invention may be joined to a vector containing a selectable marker for propagation in a host. Generally, a plasmid vector is introduced in a precipitate, such as a calcium phosphate precipitate, or in a complex with a charged lipid. If the vector is a virus, it may be packaged in vitro using an appropriate packaging cell line and then transduced into host cells.

[0317] The polynucleotide insert should be operatively linked to an appropriate promoter, such as the phage lambda PL promoter, the E. coli lac, trp, phoA and tac promoters, the SV40 early and late promoters and promoters of retroviral LTRs, to name a few. Other suitable promoters will be known to the skilled artisan. The expression constructs will further contain sites for transcription initiation, termination, and, in the transcribed region, a ribosome binding site for translation. The coding portion of the transcripts expressed by the constructs will preferably include a translation initiating codon at the beginning and a termination codon (UAA, UGA or UAG) appropriately positioned at the end of the polypeptide to be translated.

[0318] As indicated, the expression vectors will preferably include at least one selectable marker. Such markers include dihydrofolate reductase, G418, glutamine synthase, or neomycin resistance for eukaryotic cell culture, and tetracycline, kanamycin or ampicillin resistance genes for culturing in E. coli and other bacteria. Representative examples of appropriate hosts include, but are not limited to, bacterial cells, such as E. coli, Streptomyces and Salmonella typhimurium cells; fungal cells, such as yeast cells (e.g., Saccharomyces cerevisiae or Pichia pastoris (ATCC Accession No. 201178)); insect cells such as Drosophila S2 and Spodoptera Sf9 cells; animal cells such as CHO, COS, 293, and Bowes melanoma cells; and plant cells. Appropriate culture mediums and conditions for the above-described host cells are known in the art.

[0319] Among vectors preferred for use in bacteria include pQE70, pQE60 and pQE-9, available from QIAGEN, Inc.; pBluescript vectors, Phagescript vectors, pNH8A, pNH16a, pNH18A, pNH46A, available from Stratagene Cloning Systems, Inc.; and ptrc99a, pKK223-3, pKK233-3, pDR540, pRIT5 available from Pharmacia Biotech, Inc. Among preferred eukaryotic vectors are pWLNEO, pSV2CAT, pOG44, pXT1 and pSG available from Stratagene; and pSVK3, pBPV, pMSG and pSVL available from Pharmacia. Preferred expression vectors for use in yeast systems include, but are not limited to pYES2, pYD1, pTEF1/Zeo, pYES2/GS, pPICZ, pGAPZ, pGAPZalph, pPIC9, pPIC3.5, pHIL-D2, pHIL-S1, pPIC3.5K, pPIC9K, and PAO815 (all available from Invitrogen, Carlbad, Calif.). Other suitable vectors will be readily apparent to the skilled artisan.

[0320] Vectors which use glutamine synthase (GS) or DHFR as the selectable markers can be amplified in the presence of the drugs methionine sulphoximine or methotrexate, respectively. An advantage of glutamine synthase based vectors are the availability of cell lines (e.g., the murine myeloma cell line, NS0) which are glutamine synthase negative. Glutamine synthase expression systems can also function in glutamine synthase expressing cells (e.g., Chinese Hamster Ovary (CHO) cells) by providing additional inhibitor to prevent the functioning of the endogenous gene. A glutamine synthase expression system and components thereof are detailed in PCT publications: WO87/04462; WO86/05807; WO89/01036; WO89/10404; and WO91/06657, which are hereby incorporated in their entireties by reference herein. Additionally, glutamine synthase expression vectors can be obtained from Lonza Biologics, Inc. (Portsmouth, N.H.). Expression and production of monoclonal antibodies using a GS expression system in murine myeloma cells is described in Bebbington et al., Bio/technology 10:169(1992) and in Biblia and Robinson Biotechnol. Prog. 11:1 (1995) which are herein incorporated by reference.

[0321] The present invention also relates to host cells containing the above-described vector constructs described herein, and additionally encompasses host cells containing nucleotide sequences of the invention that are operably associated with one or more heterologous control regions (e.g., promoter and/or enhancer) using techniques known of in the art. The host cell can be a higher eukaryotic cell, such as a mammalian cell (e.g., a human derived cell), or a lower eukaryotic cell, such as a yeast cell, or the host cell can be a prokaryotic cell, such as a bacterial cell. A host strain may be chosen which modulates the expression of the inserted gene sequences, or modifies and processes the gene product in the specific fashion desired. Expression from certain promoters can be elevated in the presence of certain inducers; thus expression of the genetically engineered polypeptide may be controlled. Furthermore, different host cells have characteristics and specific mechanisms for the translational and post-translational processing and modification (e.g., phosphorylation, cleavage) of proteins. Appropriate cell lines can be chosen to ensure the desired modifications and processing of the foreign protein expressed.

[0322] Introduction of the nucleic acids and nucleic acid constructs of the invention into the host cell can be effected by calcium phosphate transfection, DEAE-dextran mediated transfection, cationic lipid-mediated transfection, electroporation, transduction, infection, or other methods. Such methods are described in many standard laboratory manuals, such as Davis et al., Basic Methods In Molecular Biology (1986). It is specifically contemplated that the polypeptides of the present invention may in fact be expressed by a host cell lacking a recombinant vector.

[0323] In addition to encompassing host cells containing the vector constructs discussed herein, the invention also encompasses primary, secondary, and immortalized host cells of vertebrate origin, particularly mammalian origin, that have been engineered to delete or replace endogenous genetic material (e.g., the coding sequence), and/or to include genetic material (e.g., heterologous polynucleotide sequences) that is operably associated with polynucleotides of the invention, and which activates, alters, and/or amplifies endogenous polynucleotides. For example, techniques known in the art may be used to operably associate heterologous control regions (e.g., promoter and/or enhancer) and endogenous polynucleotide sequences via homologous recombination (see, e.g., U.S. Pat. No. 5,641,670, issued Jun. 24, 1997; International Publication Number WO 96/29411; International Publication Number WO 94/12650; Koller et al., Proc. Natl. Acad. Sci. USA 86:8932-8935 (1989); and Zijlstra et al, Nature 342:435-438 (1989), the disclosures of each of which are incorporated by reference in their entireties).

[0324] Polypeptides of the invention can be recovered and purified from recombinant cell cultures by well-known methods including ammonium sulfate or ethanol precipitation, acid extraction, anion or cation exchange chromatography, phosphocellulos chromatography, hydrophobic interaction chromatography, affinity chromatography, hydroxylapatite chromatography and lectin chromatography. Most preferably, high performance liquid chromatography (“HPLC”) is employed for purification.

[0325] Polypeptides of the present invention can also be recovered from: products purified from natural sources, including bodily fluids, tissues and cells, whether directly isolated or cultured; products of chemical synthetic procedures; and products produced by recombinant techniques from a prokaryotic or eukaryotic host, including, for example, bacterial, yeast, higher plant, insect, and mammalian cells. Depending upon the host employed in a recombinant production procedure, the polypeptides of the present invention may be glycosylated or may be non-glycosylated. In addition, polypeptides of the invention may also include an initial modified methionine residue, in some cases as a result of host-mediated processes. Thus, it is well known in the art that the N-terminal methionine encoded by the translation initiation codon generally is removed with high efficiency from any protein after translation in all eukaryotic cells. While the N-terminal methionine on most proteins also is efficiently removed in most prokaryotes, for some proteins, this prokaryotic removal process is inefficient, depending on the nature of the amino acid to which the N-terminal methionine is covalently linked.

[0326] In one embodiment, the yeast Pichia pastoris is used to express polypeptides of the invention in a eukaryotic system. Pichia pastoris is a methylotrophic yeast which can metabolize methanol as its sole carbon source. A main step in the methanol metabolization pathway is the oxidation of methanol to formaldehyde using O₂. This reaction is catalyzed by the enzyme alcohol oxidase. In order to metabolize methanol as its sole carbon source, Pichia pastoris must generate high levels of alcohol oxidase due, in part, to the relatively low affinity of alcohol oxidase for O₂. Consequently, in a growth medium depending on methanol as a main carbon source, the promoter region of one of the two alcohol oxidase genes (AOX1) is highly active. In the presence of methanol, alcohol oxidase produced from the AOX1 gene comprises up to approximately 300% of the total soluble protein in Pichia pastoris. See Ellis, S. B., et al., Mol. Cell. Biol. 5:1111-21(1985); Koutz, P. J, et al., Yeast 5:167-77(1989); Tschopp, J. F., et al., Nucl Acids Res. 15:3859-76 (1987). Thus, a heterologous coding sequence, such as, for example, a polynucleotide of the present invention, under the transcriptional regulation of all or part of the AOX1 regulatory sequence is expressed at exceptionally high levels in Pichia yeast grown in the presence of methanol.

[0327] In one example, the plasmid vector pPIC9K is used to express DNA encoding a polypeptide of the invention, as set forth herein, in a Pichea yeast system essentially as described in “Pichia Protocols: Methods in Molecular Biology,” D. R. Higgins and J. Cregg, eds. The Humana Press, Totowa, N.J., 1998. This expression vector allows expression and secretion of a polypeptide of the invention by virtue of the strong AOX1 promoter linked to the Pichia pastoris alkaline phosphatase (PHO) secretory signal peptide (i.e., leader) located upstream of a multiple cloning site.

[0328] Many other yeast vectors could be used in place of pPIC9K, such as, pYES2, pYD1, pTEF1/Zeo, pYES2/GS, pPICZ, pGAPZ, pGAPZalpha, pPIC9, pPIC3.5, pHIL-D2, pHIL-S1, pPIC3.5K, and PAO815, as one skilled in the art would readily appreciate, as long as the proposed expression construct provides appropriately located signals for transcription, translation, secretion (if desired), and the like, including an in-frame AUG as required.

[0329] In another embodiment, high-level expression of a heterologous coding sequence, such as, for example, a polynucleotide of the present invention, may be achieved by cloning the heterologous polynucleotide of the invention into an expression vector such as, for example, pGAPZ or pGAPZalpha, and growing the yeast culture in the absence of methanol.

[0330] In addition to encompassing host cells containing the vector constructs discussed herein, the invention also encompasses primary, secondary, and immortalized host cells of vertebrate origin, particularly mammalian origin, that have been engineered to delete or replace endogenous genetic material (e.g., coding sequence), and/or to include genetic material (e.g., heterologous polynucleotide sequences) that is operably associated with polynucleotides of the invention, and which activates, alters, and/or amplifies endogenous polynucleotides. For example, techniques known in the art may be used to operably associate heterologous control regions (e.g., promoter and/or enhancer) and endogenous polynucleotide sequences via homologous recombination (see, e.g., U.S. Pat. No. 5,641,670, issued Jun. 24, 1997; International Publication No. WO 96/29411, published Sep. 26, 1996; International Publication No. WO 94/12650, published Aug. 4, 1994; Koller et al., Proc. Natl. Acad. Sci. USA 86:8932-8935 (1989); and Zijlstra et al., Nature 342:435-438 (1989), the disclosures of each of which are incorporated by reference in their entireties).

[0331] In addition, polypeptides of the invention can be chemically synthesized using techniques known in the art (e.g., see Creighton, 1983, Proteins: Structures and Molecular Principles, W.H. Freeman & Co., N.Y., and Hunkapiller et al., Nature, 310:105-111 (1984)). For example, a polypeptide corresponding to a fragment of a polypeptide can be synthesized by use of a peptide synthesizer. Furthermore, if desired, nonclassical amino acids or chemical amino acid analogs can be introduced as a substitution or addition into the polypeptide sequence. Non-classical amino acids include, but are not limited to, to the D-isomers of the common amino acids, 2,4-diaminobutyric acid, a-amino isobutyric acid, 4-aminobutyric acid, Abu, 2-amino butyric acid, g-Abu, e-Ahx, 6-amino hexanoic acid, Aib, 2-amino isobutyric acid, 3-amino propionic acid, ornithine, norleucine, norvaline, hydroxyproline, sarcosine, citrulline, homocitrulline, cysteic acid, t-butylglycine, t-butylalanine, phenylglycine, cyclohexylalanine, b-alanine, fluoro-amino acids, designer amino acids such as b-methyl amino acids, Ca-methyl amino acids, Na-methyl amino acids, and amino acid analogs in general. Furthermore, the amino acid can be D (dextrorotary) or L (levorotary).

[0332] The invention encompasses polypeptides of the present invention which are differentially modified during or after translation, e.g., by glycosylation, acetylation, phosphorylation, amidation, derivatization by known protecting/blocking groups, proteolytic cleavage, linkage to an antibody molecule or other cellular ligand, etc. Any of numerous chemical modifications may be carried out by known techniques, including but not limited, to specific chemical cleavage by cyanogen bromide, trypsin, chymotrypsin, papain, V8 protease, NaBH₄; acetylation, formylation, oxidation, reduction; metabolic synthesis in the presence of tunicamycin; etc.

[0333] Additional post-translational modifications encompassed by the invention include, for example, e.g., N-linked or O-linked carbohydrate chains, processing of N-terminal or C-terminal ends), attachment of chemical moieties to the amino acid backbone, chemical modifications of N-linked or O-linked carbohydrate chains, and addition or deletion of an N-terminal methionine residue as a result of procaryotic host cell expression. The polypeptides may also be modified with a detectable label, such as an enzymatic, fluorescent, isotopic or affinity label to allow for detection and isolation of the protein.

[0334] Examples of suitable enzymes include horseradish peroxidase, alkaline phosphatase, beta-galactosidase, or acetylcholinesterase; examples of suitable prosthetic group complexes include streptavidin/biotin and avidin/biotin; examples of suitable fluorescent materials include umbelliferone, fluorescein, fluorescein isothiocyanate, rhodamine, dichlorotriazinylamine fluorescein, dansyl chloride or phycoerythrin; an example of a luminescent material includes luminol; examples of bioluminescent materials include luciferase, luciferin, and aequorin; and examples of suitable radioactive material include iodine (¹²¹I, ¹²³I, ¹²⁵I, ¹³¹I), carbon (¹⁴C), sulfur (³⁵S), tritium (³H), indium (¹¹¹In, ¹¹²In, ^{113m}In, ^{115m}In), technetium (⁹⁹Tc, ^{99m}Tc), thallium (²⁰¹Ti), gallium (⁶⁸Ga, ⁶⁷Ga), palladium (¹⁰³Pd), molybdenum (⁹⁹Mo), xenon (¹³³Xe), fluorine (¹⁸F), ¹⁵³Sm, ¹⁷⁷Lu, ¹⁵⁹Gd, ¹⁴⁹Pm, ¹⁴⁰La, ¹⁷⁵Yb, ¹⁶⁶Ho, ⁹⁰Y, ⁴⁷Sc, ¹⁸⁶Re, ¹⁸⁸Re, ¹⁴²Pr, ¹⁰⁵Rh, and ⁹⁷Ru.

[0335] In specific embodiments, a polypeptide of the present invention or fragment or variant thereof is attached to macrocyclic chelators that associate with radiometal ions, including but not limited to, ¹⁷⁷Lu, ⁹⁰Y, ¹⁶⁶ Ho, and ¹⁵³Sm, to polypeptides. In a preferred embodiment, the radiometal ion associated with the macrocyclic chelators is ¹¹¹In. In another preferred embodiment, the radiometal ion associated with the macrocyclic chelator is ⁹⁰Y. In specific embodiments, the macrocyclic chelator is 1,4,7,10-tetraazacyclododecane-N,N′,N″,N′″-tetraacetic acid (DOTA). In other specific embodiments, DOTA is attached to an antibody of the invention or fragment thereof via a linker molecule. Examples of linker molecules useful for conjugating DOTA to a polypeptide are commonly known in the art—see, for example, DeNardo et al., Clin Cancer Res. 4(10):2483-90 (1998); Peterson et al., Bioconjug. Chem. 10(4):553-7 (1999); and Zimmerman et al., Nucl. Med. Biol. 26(8):943-50 (1999); which are hereby incorporated by reference in their entirety.

[0336] As mentioned, the proteins of the invention may be modified by either natural processes, such as posttranslational processing, or by chemical modification techniques which are well known in the art. It will be appreciated that the same type of modification may be present in the same or varying degrees at several sites in a given polypeptide. Polypeptides of the invention may be branched, for example, as a result of ubiquitination, and they may be cyclic, with or without branching. Cyclic, branched, and branched cyclic polypeptides may result from posttranslation natural processes or may be made by synthetic methods. Modifications include acetylation, acylation, ADP-ribosylation, amidation, covalent attachment of flavin, covalent attachment of a heme moiety, covalent attachment of a nucleotide or nucleotide derivative, covalent attachment of a lipid or lipid derivative, covalent attachment of phosphotidylinositol, cross-linking, cyclization, disulfide bond formation, demethylation, formation of covalent cross-links, formation of cysteine, formation of pyroglutamate, formylation, gamma-carboxylation, glycosylation, GPI anchor formation, hydroxylation, iodination, methylation, myristoylation, oxidation, pegylation, proteolytic processing, phosphorylation, prenylation, racemization, selenoylation, sulfation, transfer-RNA mediated addition of amino acids to proteins such as arginylation, and ubiquitination. (See, for instance, PROTEINS—STRUCTURE AND MOLECULAR PROPERTIES, 2nd Ed., T. E. Creighton, W. H. Freeman and Company, New York (1993); POSTTRANSLATIONAL COVALENT MODIFICATION OF PROTEINS, B. C. Johnson, Ed., Academic Press, New York, pgs. 1-12 (1983); Seifter et al., Meth. Enzymol. 182:626-646 (1990); Rattan et al., Ann. N.Y. Acad. Sci. 663:48-62 (1992)).

[0337] Also provided by the invention are chemically modified derivatives of the polypeptides of the invention which may provide additional advantages such as increased solubility, stability and circulating time of the polypeptide, or decreased immunogenicity (see U.S. Pat. No. 4,179,337). The chemical moieties for derivitization may be selected from water soluble polymers such as polyethylene glycol, ethylene glycol/propylene glycol copolymers, carboxymethylcellulose, dextran, polyvinyl alcohol and the like. The polypeptides may be modified at random positions within the molecule, or at predetermined positions within the molecule and may include one, two, three or more attached chemical moieties.

[0338] The polymer may be of any molecular weight, and may be branched or unbranched. For polyethylene glycol, the preferred molecular weight is between about 1 kDa and about 100 kDa (the term “about” indicating that in preparations of polyethylene glycol, some molecules will weigh more, some less, than the stated molecular weight) for ease in handling and manufacturing. Other sizes may be used, depending on the desired therapeutic profile (e.g., the duration of sustained release desired, the effects, if any on biological activity, the ease in handling, the degree or lack of antigenicity and other known effects of the polyethylene glycol to a therapeutic protein or analog). For example, the polyethylene glycol may have an average molecular weight of about 200, 500, 1000, 1500, 2000, 2500, 3000, 3500, 4000, 4500, 5000, 5500, 6000, 6500, 7000, 7500, 8000, 8500, 9000, 9500, 10,000, 10,500, 11,000, 11,500, 12,000, 12,500, 13,000, 13,500, 14,000, 14,500, 15,000, 15,500, 16,000, 16,500, 17,000, 17,500, 18,000, 18,500, 19,000, 19,500, 20,000, 25,000, 30,000, 35,000, 40,000, 45,000, 50,000, 55,000, 60,000, 65,000, 70,000, 75,000, 80,000, 85,000, 90,000, 95,000, or 100,000 kDa.

[0339] As noted above, the polyethylene glycol may have a branched structure. Branched polyethylene glycols are described, for example, in U.S. Pat. No. 5,643,575; Morpurgo et al., Appl Biochem. Biotechnol 56:59-72 (1996); Vorobjev et al., Nucleosides Nucleotides 18:2745-2750 (1999); and Caliceti et al., Bioconjug. Chem. 10:638-646 (1999), the disclosures of each of which are incorporated herein by reference.

[0340] The polyethylene glycol molecules (or other chemical moieties) should be attached to the protein with consideration of effects on functional or antigenic domains of the protein. There are a number of attachment methods available to those skilled in the art, such as, for example, the method disclosed in EP 0 401 384 (coupling PEG to G-CSF), herein incorporated by reference; see also Malik et al., Exp. Hematol. 20:1028-1035 (1992), reporting pegylation of GM-CSF using tresyl chloride. For example, polyethylene glycol may be covalently bound through amino acid residues via a reactive group, such as a free amino or carboxyl group. Reactive groups are those to which an activated polyethylene glycol molecule may be bound. The amino acid residues having a free amino group may include lysine residues and the N-terminal amino acid residues; those having a free carboxyl group may include aspartic acid residues glutamic acid residues and the C-terminal amino acid residue. Sulfhydryl groups may also be used as a reactive group for attaching the polyethylene glycol molecules. Preferred for therapeutic purposes is attachment at an amino group, such as attachment at the N-terminus or lysine group.

[0341] As suggested above, polyethylene glycol may be attached to proteins via linkage to any of a number of amino acid residues. For example, polyethylene glycol can be linked to proteins via covalent bonds to lysine, histidine, aspartic acid, glutamic acid, or cysteine residues. One or more reaction chemistries may be employed to attach polyethylene glycol to specific amino acid residues (e.g., lysine, histidine, aspartic acid, glutamic acid, or cysteine) of the protein or to more than one type of amino acid residue (e.g., lysine, histidine, aspartic acid, glutamic acid, cysteine and combinations thereof) of the protein.

[0342] One may specifically desire proteins chemically modified at the N-terminus. Using polyethylene glycol as an illustration of the present composition, one may select from a variety of polyethylene glycol molecules (by molecular weight, branching, etc.), the proportion of polyethylene glycol molecules to protein (polypeptide) molecules in the reaction mix, the type of pegylation reaction to be performed, and the method of obtaining the selected N-terminally pegylated protein. The method of obtaining the N-terminally pegylated preparation (i.e., separating this moiety from other monopegylated moieties if necessary) may be by purification of the N-terminally pegylated material from a population of pegylated protein molecules. Selective proteins chemically modified at the N-terminus modification may be accomplished by reductive alkylation which exploits differential reactivity of different types of primary amino groups (lysine versus the N-terminal) available for derivatization in a particular protein. Under the appropriate reaction conditions, substantially selective derivatization of the protein at the N-terminus with a carbonyl group containing polymer is achieved.

[0343] As indicated above, pegylation of the proteins of the invention may be accomplished by any number of means. For example, polyethylene glycol may be attached to the protein either directly or by an intervening linker. Linkerless systems for attaching polyethylene glycol to proteins are described in Delgado et al., Crit. Rev. Thera. Drug Carrier Sys. 9:249-304 (1992); Francis et al., Intern. J. of Hematol. 68:1-18 (1998); U.S. Pat. No. 4,002,531; U.S. Pat. No. 5,349,052; WO 95/06058; and WO 98/32466, the disclosures of each of which are incorporated herein by reference.

[0344] One system for attaching polyethylene glycol directly to amino acid residues of proteins without an intervening linker employs tresylated MPEG, which is produced by the modification of monmethoxy polyethylene glycol (MPEG) using tresylchloride (ClSO₂CH₂CF₃). Upon reaction of protein with tresylated MPEG, polyethylene glycol is directly attached to amine groups of the protein. Thus, the invention includes protein-polyethylene glycol conjugates produced by reacting proteins of the invention with a polyethylene glycol molecule having a 2,2,2-trifluoreothane sulphonyl group.

[0345] Polyethylene glycol can also be attached to proteins using a number of different intervening linkers. For example, U.S. Pat. No. 5,612,460, the entire disclosure of which is incorporated herein by reference, discloses urethane linkers for connecting polyethylene glycol to proteins. Protein-polyethylene glycol conjugates wherein the polyethylene glycol is attached to the protein by a linker can also be produced by reaction of proteins with compounds such as MPEG-succinimidylsuccinate, MPEG activated with 1,1′-carbonyldiimidazole, MPEG-2,4,5-trichloropenylcarbonate, MPEG-p-nitrophenolcarbonate, and various MPEG-succinate derivatives. A number of additional polyethylene glycol derivatives and reaction chemistries for attaching polyethylene glycol to proteins are described in International Publication No. WO 98/32466, the entire disclosure of which is incorporated herein by reference. Pegylated protein products produced using the reaction chemistries set out herein are included within the scope of the invention.

[0346] The number of polyethylene glycol moieties attached to each protein of the invention (i.e., the degree of substitution) may also vary. For example, the pegylated proteins of the invention may be linked, on average, to 1, 2, 3, 4, 5, 6, 7, 8, 9, 10, 12, 15, 17, 20, or more polyethylene glycol molecules. Similarly, the average degree of substitution within ranges such as 1-3, 2-4, 3-5, 4-6, 5-7, 6-8, 7-9, 8-10, 9-11, 10-12, 11-13, 12-14, 13-15, 14-16, 15-17, 16-18, 17-19, or 18-20 polyethylene glycol moieties per protein molecule. Methods for determining the degree of substitution are discussed, for example, in Delgado et al., Crit. Rev. Thera. Drug Carrier Sys. 9:249-304 (1992).

[0347] The polypeptides of the invention can be recovered and purified from chemical synthesis and recombinant cell cultures by standard methods which include, but are not limited to, ammonium sulfate or ethanol precipitation, acid extraction, anion or cation exchange chromatography, phosphocellulose chromatography, hydrophobic interaction chromatography, affinity chromatography, hydroxylapatite chromatography and lectin chromatography. Most preferably, high performance liquid chromatography (“HPLC”) is employed for purification. Well known techniques for refolding protein may be employed to regenerate active conformation when the polypeptide is denatured during isolation and/or purification.

[0348] The polypeptides of the invention may be in monomers or multimers (i.e., dimers, trimers, tetramers and higher multimers). Accordingly, the present invention relates to monomers and multimers of the polypeptides of the invention, their preparation, and compositions (preferably, Therapeutics) containing them. In specific embodiments, the polypeptides of the invention are monomers, dimers, trimers or tetramers. In additional embodiments, the multimers of the invention are at least dimers, at least trimers, or at least tetramers.

[0349] Multimers encompassed by the invention may be homomers or heteromers. As used herein, the term homomer refers to a multimer containing only polypeptides corresponding to a protein of the invention (e.g., the amino acid sequence of SEQ ID NO:Y, an amino acid sequence encoded by SEQ ID NO:X or the complement of SEQ ID NO:X, the amino acid sequence encoded by the portion of SEQ ID NO:X as defined in columns 8 and 9 of Table 2, and/or an amino acid sequence encoded by cDNA contained in ATCC Deposit No:Z (including fragments, variants, splice variants, and fusion proteins, corresponding to these as described herein)). These homomers may contain polypeptides having identical or different amino acid sequences. In a specific embodiment, a homomer of the invention is a multimer containing only polypeptides having an identical amino acid sequence. In another specific embodiment, a homomer of the invention is a multimer containing polypeptides having different amino acid sequences. In specific embodiments, the multimer of the invention is a homodimer (e.g., containing two polypeptides having identical or different amino acid sequences) or a homotrimer (e.g., containing three polypeptides having identical and/or different amino acid sequences). In additional embodiments, the homomeric multimer of the invention is at least a homodimer, at least a homotrimer, or at least a homotetramer.

[0350] As used herein, the term heteromer refers to a multimer containing one or more heterologous polypeptides (i.e., polypeptides of different proteins) in addition to the polypeptides of the invention. In a specific embodiment, the multimer of the invention is a heterodimer, a heterotrimer, or a heterotetramer. In additional embodiments, the heteromeric multimer of the invention is at least a heterodimer, at least a heterotrimer, or at least a heterotetramer.

[0351] Multimers of the invention may be the result of hydrophobic, hydrophilic, ionic and/or covalent associations and/or may be indirectly linked by, for example, liposome formation. Thus, in one embodiment, multimers of the invention, such as, for example, homodimers or homotrimers, are formed when polypeptides of the invention contact one another in solution. In another embodiment, heteromultimers of the invention, such as, for example, heterotrimers or heterotetramers, are formed when polypeptides of the invention contact antibodies to the polypeptides of the invention (including antibodies to the heterologous polypeptide sequence in a fusion protein of the invention) in solution. In other embodiments, multimers of the invention are formed by covalent associations with and/or between the polypeptides of the invention. Such covalent associations may involve one or more amino acid residues contained in the polypeptide sequence (e.g., that recited in SEQ ID NO:Y, encoded by the portion of SEQ ID NO:X as defined in columns 8 and 9 of Table 2, and/or encoded by the cDNA contained in ATCC Deposit No:Z). In one instance, the covalent associations are cross-linking between cysteine residues located within the polypeptide sequences which interact in the native (i.e., naturally occurring) polypeptide. In another instance, the covalent associations are the consequence of chemical or recombinant manipulation. Alternatively, such covalent associations may involve one or more amino acid residues contained in the heterologous polypeptide sequence in a fusion protein. In one example, covalent associations are between the heterologous sequence contained in a fusion protein of the invention (see, e.g., U.S. Pat. No. 5,478,925). In a specific example, the covalent associations are between the heterologous sequence contained in a Fc fusion protein of the invention (as described herein). In another specific example, covalent associations of fusion proteins of the invention are between heterologous polypeptide sequence from another protein that is capable of forming covalently associated multimers, such as for example, osteoprotegerin (see, e.g., International Publication NO: WO 98/49305, the contents of which are herein incorporated by reference in its entirety). In another embodiment, two or more polypeptides of the invention are joined through peptide linkers. Examples include those peptide linkers described in U.S. Pat. No. 5,073,627 (hereby incorporated by reference). Proteins comprising multiple polypeptides of the invention separated by peptide linkers may be produced using conventional recombinant DNA technology.

[0352] Another method for preparing multimer polypeptides of the invention involves use of polypeptides of the invention fused to a leucine zipper or isoleucine zipper polypeptide sequence. Leucine zipper and isoleucine zipper domains are polypeptides that promote multimerization of the proteins in which they are found. Leucine zippers were originally identified in several DNA-binding proteins (Landschulz et al., Science 240:1759, (1988)), and have since been found in a variety of different proteins. Among the known leucine zippers are naturally occurring peptides and derivatives thereof that dimerize or trimerize. Examples of leucine zipper domains suitable for producing soluble multimeric proteins of the invention are those described in PCT application WO 94/10308, hereby incorporated by reference. Recombinant fusion proteins comprising a polypeptide of the invention fused to a polypeptide sequence that dimerizes or trimerizes in solution are expressed in suitable host cells, and the resulting soluble multimeric fusion protein is recovered from the culture supernatant using techniques known in the art.

[0353] Trimeric polypeptides of the invention may offer the advantage of enhanced biological activity. Preferred leucine zipper moieties and isoleucine moieties are those that preferentially form trimers. One example is a leucine zipper derived from lung surfactant protein D (SPD), as described in Hoppe et al. (FEBS Letters 344:191, (1994)) and in U.S. patent application Ser. No. 08/446,922, hereby incorporated by reference. Other peptides derived from naturally occurring trimeric proteins may be employed in preparing trimeric polypeptides of the invention.

[0354] In another example, proteins of the invention are associated by interactions between Flag® polypeptide sequence contained in fusion proteins of the invention containing Flag® polypeptide sequence. In a further embodiment, proteins of the invention are associated by interactions between heterologous polypeptide sequence contained in Flag® fusion proteins of the invention and anti-Flag® antibody.

[0355] The multimers of the invention may be generated using chemical techniques known in the art. For example, polypeptides desired to be contained in the multimers of the invention may be chemically cross-linked using linker molecules and linker molecule length optimization techniques known in the art (see, e.g., U.S. Pat. No. 5,478,925, which is herein incorporated by reference in its entirety). Additionally, multimers of the invention may be generated using techniques known in the art to form one or more inter-molecule cross-links between the cysteine residues located within the sequence of the polypeptides desired to be contained in the multimer (see, e.g., U.S. Pat. No. 5,478,925, which is herein incorporated by reference in its entirety). Further, polypeptides of the invention may be routinely modified by the addition of cysteine or biotin to the C-terminus or N-terminus of the polypeptide and techniques known in the art may be applied to generate multimers containing one or more of these modified polypeptides (see, e.g., U.S. Pat. No. 5,478,925, which is herein incorporated by reference in its entirety). Additionally, techniques known in the art may be applied to generate liposomes containing the polypeptide components desired to be contained in the multimer of the invention (see, e.g., U.S. Pat. No. 5,478,925, which is herein incorporated by reference in its entirety).

[0356] Alternatively, multimers of the invention may be generated using genetic engineering techniques known in the art. In one embodiment, polypeptides contained in multimers of the invention are produced recombinantly using fusion protein technology described herein or otherwise known in the art (see, e.g., U.S. Pat. No. 5,478,925, which is herein incorporated by reference in its entirety). In a specific embodiment, polynucleotides coding for a homodimer of the invention are generated by ligating a polynucleotide sequence encoding a polypeptide of the invention to a sequence encoding a linker polypeptide and then further to a synthetic polynucleotide encoding the translated product of the polypeptide in the reverse orientation from the original C-terminus to the N-terminus (lacking the leader sequence) (see, e.g., U.S. Pat. No. 5,478,925, which is herein incorporated by reference in its entirety). In another embodiment, recombinant techniques described herein or otherwise known in the art are applied to generate recombinant polypeptides of the invention which contain a transmembrane domain (or hydrophobic or signal peptide) and which can be incorporated by membrane reconstitution techniques into liposomes (see, e.g., U.S. Pat. No. 5,478,925, which is herein incorporated by reference in its entirety).

Antibodies

[0357] Further polypeptides of the invention relate to antibodies and T-cell antigen receptors (TCR) which immunospecifically bind a polypeptide, polypeptide fragment, or variant of the invention (e.g., a polypeptide or fragment or variant of the amino acid sequence of SEQ ID NO:Y or a polypeptide encoded by the cDNA contained in ATCC Deposit No:Z, and/or an epitope, of the present invention) as determined by immunoassays well known in the art for assaying specific antibody-antigen binding. Antibodies of the invention include, but are not limited to, polyclonal, monoclonal, multispecific, human, humanized or chimeric antibodies, single chain antibodies, Fab fragments, F(ab′) fragments, fragments produced by a Fab expression library, anti-idiotypic (anti-Id) antibodies (including, e.g., anti-Id antibodies to antibodies of the invention), intracellularly-made antibodies (i.e., intrabodies), and epitope-binding fragments of any of the above. The term “antibody,” as used herein, refers to immunoglobulin molecules and immunologically active portions of immunoglobulin molecules, i.e., molecules that contain an antigen binding site that immunospecifically binds an antigen. The immunoglobulin molecules of the invention can be of any type (e.g., IgG, IgE, IgM, IgD, IgA and IgY), class (e.g., IgG1, IgG2, IgG3, IgG4, IgA1 and IgA2) or subclass of immunoglobulin molecule. In preferred embodiments, the immunoglobulin molecules of the invention are IgG1. In other preferred embodiments, the immunoglobulin molecules of the invention are IgG4.

[0358] Most preferably the antibodies are human antigen-binding antibody fragments of the present invention and include, but are not limited to, Fab, Fab′ and F(ab′)2, Fd, single-chain Fvs (scFv), single-chain antibodies, disulfide-linked Fvs (sdFv) and fragments comprising either a VL or VH domain. Antigen-binding antibody fragments, including single-chain antibodies, may comprise the variable region(s) alone or in combination with the entirety or a portion of the following: hinge region, CH1, CH2, and CH3 domains. Also included in the invention are antigen-binding fragments also comprising any combination of variable region(s) with a hinge region, CH1, CH2, and CH3 domains. The antibodies of the invention may be from any animal origin including birds and mammals. Preferably, the antibodies are human, murine (e.g., mouse and rat), donkey, ship rabbit, goat, guinea pig, camel, horse, or chicken. As used herein, “human” antibodies include antibodies having the amino acid sequence of a human immunoglobulin and include antibodies isolated from human immunoglobulin libraries or from animals transgenic for one or more human immunoglobulin and that do not express endogenous immunoglobulins, as described infra and, for example in, U.S. Pat. No. 5,939,598 by Kucherlapati et al.

[0359] The antibodies of the present invention may be monospecific, bispecific, trispecific or of greater multispecificity. Multispecific antibodies may be specific for different epitopes of a polypeptide of the present invention or may be specific for both a polypeptide of the present invention as well as for a heterologous epitope, such as a heterologous polypeptide or solid support material. See, e.g., PCT publications WO 93/17715; WO 92/08802; WO 91/00360; WO 92/05793; Tutt, et al., J. Immunol. 147:60-69 (1991); U.S. Pat. Nos. 4,474,893; 4,714,681; 4,925,648; 5,573,920; 5,601,819; Kostelny et al., J. Immunol. 148:1547-1553 (1992).

[0360] Antibodies of the present invention may be described or specified in terms of the epitope(s) or portion(s) of a polypeptide of the present invention which they recognize or specifically bind. The epitope(s) or polypeptide portion(s) may be specified as described herein, e.g., by N-terminal and C-terminal positions, or by size in contiguous amino acid residues, or listed in the Tables and Figures. Preferred epitopes of the invention include the predicted epitopes shown in column 6 of Table 1B.1, as well as polynucleotides that encode these epitopes. Antibodies which specifically bind any epitope or polypeptide of the present invention may also be excluded. Therefore, the present invention includes antibodies that specifically bind polypeptides of the present invention, and allows for the exclusion of the same.

[0361] Antibodies of the present invention may also be described or specified in terms of their cross-reactivity. Antibodies that do not bind any other analog, ortholog, or homolog of a polypeptide of the present invention are included. Antibodies that bind polypeptides with at least 95%, at least 90%, at least 85%, at least 80%, at least 75%, at least 70%, at least 65%, at least 60%, at least 55%, and at least 50% identity (as calculated using methods known in the art and described herein) to a polypeptide of the present invention are also included in the present invention. In specific embodiments, antibodies of the present invention cross-react with murine, rat and/or rabbit homologs of human proteins and the corresponding epitopes thereof. Antibodies that do not bind polypeptides with less than 95%, less than 90%, less than 85%, less than 80%, less than 75%, less than 70%, less than 65%, less than 60%, less than 55%, and less than 50% identity (as calculated using methods known in the art and described herein) to a polypeptide of the present invention are also included in the present invention. In a specific embodiment, the above-described cross-reactivity is with respect to any single specific antigenic or immunogenic polypeptide, or combination(s) of 2, 3, 4, 5, or more of the specific antigenic and/or immunogenic polypeptides disclosed herein. Further included in the present invention are antibodies which bind polypeptides encoded by polynucleotides which hybridize to a polynucleotide of the present invention under stringent hybridization conditions (as described herein). Antibodies of the present invention may also be described or specified in terms of their binding affinity to a polypeptide of the invention. Preferred binding affinities include those with a dissociation constant or Kd less than 5×10⁻² M, 10⁻² M, 5×10⁻³ M, 10⁻³ M, 5×10⁻⁴ M, 10⁻⁴ M, 5×10⁻⁵ M, 10⁻⁵ M, 5×10⁻⁶ M, 10⁻⁶M, 5×10⁻⁷ M, 10⁷ M, 5×10⁻⁸ M, 10⁻⁸ M, 5×10⁻⁹ M, 10⁻⁹ M, 5×10⁻¹⁰ M, 10⁻¹⁰ M, 5×10⁻¹¹ M, 10⁻¹¹ M, 5×10⁻¹² M, 10⁻¹² M, 5×10⁻¹³ M, 10⁻¹³ M, 5×10⁻¹⁴ M, 10⁻¹⁴ M, 5×10⁻¹⁵ M, or 10⁻¹⁵ M.

[0362] The invention also provides antibodies that competitively inhibit binding of an antibody to an epitope of the invention as determined by any method known in the art for determining competitive binding, for example, the immunoassays described herein. In preferred embodiments, the antibody competitively inhibits binding to the epitope by at least 95%, at least 90%, at least 85%, at least 80%, at least 75%, at least 70%, at least 60%, or at least 50%.

[0363] Antibodies of the present invention may act as agonists or antagonists of the polypeptides of the present invention. For example, the present invention includes antibodies which disrupt the receptor/ligand interactions with the polypeptides of the invention either partially or fully. Preferably, antibodies of the present invention bind an antigenic epitope disclosed herein, or a portion thereof. The invention features both receptor-specific antibodies and ligand-specific antibodies. The invention also features receptor-specific antibodies which do not prevent ligand binding but prevent receptor activation. Receptor activation (i.e., signaling) may be determined by techniques described herein or otherwise known in the art. For example, receptor activation can be determined by detecting the phosphorylation (e.g., tyrosine or serine/threonine) of the receptor or its substrate by immunoprecipitation followed by western blot analysis (for example, as described supra). In specific embodiments, antibodies are provided that inhibit ligand activity or receptor activity by at least 95%, at least 90%, at least 85%, at least 80%, at least 75%, at least 70%, at least 60%, or at least 50% of the activity in absence of the antibody.

[0364] The invention also features receptor-specific antibodies which both prevent ligand binding and receptor activation as well as antibodies that recognize the receptor-ligand complex, and, preferably, do not specifically recognize the unbound receptor or the unbound ligand. Likewise, included in the invention are neutralizing antibodies which bind the ligand and prevent binding of the ligand to the receptor, as well as antibodies which bind the ligand, thereby preventing receptor activation, but do not prevent the ligand from binding the receptor. Further included in the invention are antibodies which activate the receptor. These antibodies may act as receptor agonists, i.e., potentiate or activate either all or a subset of the biological activities of the ligand-mediated receptor activation, for example, by inducing dimerization of the receptor. The antibodies may be specified as agonists, antagonists or inverse agonists for biological activities comprising the specific biological activities of the peptides of the invention disclosed herein. The above antibody agonists can be made using methods known in the art. See, e.g., PCT publication WO 96/40281; U.S. Pat. No. 5,811,097; Deng et al., Blood 92(6):1981-1988 (1998); Chen et al., Cancer Res. 58(16):3668-3678 (1998); Harrop et al., J. Immunol. 161(4):1786-1794 (1998); Zhu et al., Cancer Res. 58(15):3209-3214 (1998); Yoon et al., J. Immunol. 160(7):3170-3179 (1998); Prat et al., J. Cell. Sci. 111(Pt2):237-247 (1998); Pitard et al., J. Immunol. Methods 205(2):177-190 (1997); Liautard et al., Cytokine 9(4):233-241 (1997); Carlson et al., J. Biol. Chem. 272(17):11295-11301 (1997); Taryman et al., Neuron 14(4):755-762 (1995); Muller et al., Structure 6(9):1153-1167 (1998); Bartunek et al., Cytokine 8(1):14-20 (1996) (which are all incorporated by reference herein in their entireties).

[0365] Antibodies of the present invention may be used, for example, to purify, detect, and target the polypeptides of the present invention, including both in vitro and in vivo diagnostic and therapeutic methods. For example, the antibodies have utility in immunoassays for qualitatively and quantitatively measuring levels of the polypeptides of the present invention in biological samples. See, e.g., Harlow et al., Antibodies: A Laboratory Manual, (Cold Spring Harbor Laboratory Press, 2nd ed. 1988); incorporated by reference herein in its entirety.

[0366] As discussed in more detail below, the antibodies of the present invention may be used either alone or in combination with other compositions. The antibodies may further be recombinantly fused to a heterologous polypeptide at the N- or C-terminus or chemically conjugated (including covalent and non-covalent conjugations) to polypeptides or other compositions. For example, antibodies of the present invention may be recombinantly fused or conjugated to molecules useful as labels in detection assays and effector molecules such as heterologous polypeptides, drugs, radionuclides, or toxins. See, e.g., PCT publications WO 92/08495; WO 91/14438; WO 89/12624; U.S. Pat. No. 5,314,995; and EP 396,387; the disclosures of which are incorporated herein by reference in their entireties.

[0367] The antibodies of the invention include derivatives that are modified, i.e., by the covalent attachment of any type of molecule to the antibody such that covalent attachment does not prevent the antibody from generating an anti-idiotypic response. For example, but not by way of limitation, the antibody derivatives include antibodies that have been modified, e.g., by glycosylation, acetylation, pegylation, phosphylation, amidation, derivatization by known protecting/blocking groups, proteolytic cleavage, linkage to a cellular ligand or other protein, etc. Any of numerous chemical modifications may be carried out by known techniques, including, but not limited to specific chemical cleavage, acetylation, formylation, metabolic synthesis of tunicamycin, etc. Additionally, the derivative may contain one or more non-classical amino acids.

[0368] The antibodies of the present invention may be generated by any suitable method known in the art. Polyclonal antibodies to an antigen-of-interest can be produced by various procedures well known in the art. For example, a polypeptide of the invention can be administered to various host animals including, but not limited to, rabbits, mice, rats, etc. to induce the production of sera containing polyclonal antibodies specific for the antigen. Various adjuvants may be used to increase the immunological response, depending on the host species, and include but are not limited to, Freund's (complete and incomplete), mineral gels such as aluminum hydroxide, surface active substances such as lysolecithin, pluronic polyols, polyanions, peptides, oil emulsions, keyhole limpet hemocyanins, dinitrophenol, and potentially useful human adjuvants such as BCG (bacille Calmette-Guerin) and corynebacterium parvum. Such adjuvants are also well known in the art.

[0369] Monoclonal antibodies can be prepared using a wide variety of techniques known in the art including the use of hybridoma, recombinant, and phage display technologies, or a combination thereof. For example, monoclonal antibodies can be produced using hybridoma techniques including those known in the art and taught, for example, in Harlow et al., Antibodies: A Laboratory Manual, (Cold Spring Harbor Laboratory Press, 2nd ed. 1988); Hammerling, et al., in: Monoclonal Antibodies and T-Cell Hybridomas 563-681 (Elsevier, N.Y., 1981) (said references incorporated by reference in their entireties). The term “monoclonal antibody” as used herein is not limited to antibodies produced through hybridoma technology. The term “monoclonal antibody” refers to an antibody that is derived from a single clone, including any eukaryotic, prokaryotic, or phage clone, and not the method by which it is produced.

[0370] Methods for producing and screening for specific antibodies using hybridoma technology are routine and well known in the art and are discussed in detail in the Examples. In a non-limiting example, mice can be immunized with a polypeptide of the invention or a cell expressing such peptide. Once an immune response is detected, e.g., antibodies specific for the antigen are detected in the mouse serum, the mouse spleen is harvested and splenocytes isolated. The splenocytes are then fused by well known techniques to any suitable myeloma cells, for example cells from cell line SP20 available from the ATCC. Hybridomas are selected and cloned by limited dilution. The hybridoma clones are then assayed by methods known in the art for cells that secrete antibodies capable of binding a polypeptide of the invention. Ascites fluid, which generally contains high levels of antibodies, can be generated by immunizing mice with positive hybridoma clones.

[0371] Accordingly, the present invention provides methods of generating monoclonal antibodies as well as antibodies produced by the method comprising culturing a hybridoma cell secreting an antibody of the invention wherein, preferably, the hybridoma is generated by fusing splenocytes isolated from a mouse immunized with an antigen of the invention with myeloma cells and then screening the hybridomas resulting from the fusion for hybridoma clones that secrete an antibody able to bind a polypeptide of the invention.

[0372] Another well known method for producing both polyclonal and monoclonal human B cell lines is transformation using Epstein Barr Virus (EBV). Protocols for generating EBV-transformed B cell lines are commonly known in the art, such as, for example, the protocol outlined in Chapter 7.22 of Current Protocols in Immunology, Coligan et al., Eds., 1994, John Wiley & Sons, NY, which is hereby incorporated in its entirety by reference. The source of B cells for transformation is commonly human peripheral blood, but B cells for transformation may also be derived from other sources including, but not limited to, lymph nodes, tonsil, spleen, tumor tissue, and infected tissues. Tissues are generally made into single cell suspensions prior to EBV transformation. Additionally, steps may be taken to either physically remove or inactivate T cells (e.g., by treatment with cyclosporin A) in B cell-containing samples, because T cells from individuals seropositive for anti-EBV antibodies can suppress B cell immortalization by EBV.

[0373] In general, the sample containing human B cells is innoculated with EBV, and cultured for 3-4 weeks. A typical source of EBV is the culture supernatant of the B95-8 cell line (ATCC #VR-1492). Physical signs of EBV transformation can generally be seen towards the end of the 3-4 week culture period. By phase-contrast microscopy, transformed cells may appear large, clear, hairy and tend to aggregate in tight clusters of cells. Initially, EBV lines are generally polyclonal. However, over prolonged periods of cell cultures, EBV lines may become monoclonal or polyclonal as a result of the selective outgrowth of particular B cell clones. Alternatively, polyclonal EBV transformed lines may be subcloned (e.g., by limiting dilution culture) or fused with a suitable fusion partner and plated at limiting dilution to obtain monoclonal B cell lines. Suitable fusion partners for EBV transformed cell lines include mouse myeloma cell lines (e.g., SP2/0, X63-Ag8.653), heteromyeloma cell lines (human x mouse; e.g., SPAM-8, SBC-H20, and CB-F7), and human cell lines (e.g., GM 1500, SKO-007, RPMI 8226, and KR-4). Thus, the present invention also provides a method of generating polyclonal or monoclonal human antibodies against polypeptides of the invention or fragments thereof, comprising EBV-transformation of human B cells.

[0374] Antibody fragments which recognize specific epitopes may be generated by known techniques. For example, Fab and F(ab′)2 fragments of the invention may be produced by proteolytic cleavage of immunoglobulin molecules, using enzymes such as papain (to produce Fab fragments) or pepsin (to produce F(ab′)2 fragments). F(ab′)2 fragments contain the variable region, the light chain constant region and the CH1 domain of the heavy chain.

[0375] For example, the antibodies of the present invention can also be generated using various phage display methods known in the art. In phage display methods, functional antibody domains are displayed on the surface of phage particles which carry the polynucleotide sequences encoding them. In a particular embodiment, such phage can be utilized to display antigen binding domains expressed from a repertoire or combinatorial antibody library (e.g., human or murine). Phage expressing an antigen binding domain that binds the antigen of interest can be selected or identified with antigen, e.g., using labeled antigen or antigen bound or captured to a solid surface or bead. Phage used in these methods are typically filamentous phage including fd and M13 binding domains expressed from phage with Fab, Fv or disulfide stabilized Fv antibody domains recombinantly fused to either the phage gene III or gene VIII protein. Examples of phage display methods that can be used to make the antibodies of the present invention include those disclosed in Brinkman et al., J. Immunol. Methods 182:41-50 (1995); Ames et al., J. Immunol. Methods 184:177-186 (1995); Keleborough et al., Eur. J. Immunol. 24:952-958 (1994); Persic et al., Gene 187 9-18 (1997); Burton et al., Advances in Immunology 57:191-280 (1994); PCT application No. PCT/GB91/01134; PCT publications WO 90/02809; WO 91/10737; WO 92/01047; WO 92/18619; WO 93/11236; WO 95/15982; WO 95/20401; and U.S. Pat. Nos. 5,698,426; 5,223,409; 5,403,484; 5,580,717; 5,427,908; 5,750,753; 5,821,047; 5,571,698; 5,427,908; 5,516,637; 5,780,225; 5,658,727; 5,733,743 and 5,969,108; each of which is incorporated herein by reference in its entirety.

[0376] As described in the above references, after phage selection, the antibody coding regions from the phage can be isolated and used to generate whole antibodies, including human antibodies, or any other desired antigen binding fragment, and expressed in any desired host, including mammalian cells, insect cells, plant cells, yeast, and bacteria, e.g., as described in detail below. For example, techniques to recombinantly produce Fab, Fab′ and F(ab′)2 fragments can also be employed using methods known in the art such as those disclosed in PCT publication WO 92/22324; Mullinax et al., BioTechniques 12(6):864-869 (1992); and Sawai et al., AJRI 34:26-34 (1995); and Better et al., Science 240:1041-1043 (1988) (said references incorporated by reference in their entireties).

[0377] Examples of techniques which can be used to produce single-chain Fvs and antibodies include those described in U.S. Pat. Nos. 4,946,778 and 5,258,498; Huston et al., Methods in Enzymology 203:46-88 (1991); Shu et al., PNAS 90:7995-7999 (1993); and Skerra et al., Science 240:1038-1040 (1988). For some uses, including in vivo use of antibodies in humans and in vitro detection assays, it may be preferable to use chimeric, humanized, or human antibodies. A chimeric antibody is a molecule in which different portions of the antibody are derived from different animal species, such as antibodies having a variable region derived from a murine monoclonal antibody and a human immunoglobulin constant region. Methods for producing chimeric antibodies are known in the art. See e.g., Morrison, Science 229:1202 (1985); Oi et al., BioTechniques 4:214 (1986); Gillies et al., (1989) J. Immunol. Methods 125:191-202; U.S. Pat. Nos. 5,807,715; 4,816,567; and 4,816,397, which are incorporated herein by reference in their entirety. Humanized antibodies are antibody molecules from non-human species antibody that binds the desired antigen having one or more complementarity determining regions (CDRs) from the non-human species and a framework regions from a human immunoglobulin molecule. Often, framework residues in the human framework regions will be substituted with the corresponding residue from the CDR donor antibody to alter, preferably improve, antigen binding. These framework substitutions are identified by methods well known in the art, e.g., by modeling of the interactions of the CDR and framework residues to identify framework residues important for antigen binding and sequence comparison to identify unusual framework residues at particular positions. (See, e.g., Queen et al., U.S. Pat. No. 5,585,089; Riechmann et al., Nature 332:323 (1988), which are incorporated herein by reference in their entireties.) Antibodies can be humanized using a variety of techniques known in the art including, for example, CDR-grafting (EP 239,400; PCT publication WO 91/09967; U.S. Pat. Nos. 5,225,539; 5,530,101; and 5,585,089), veneering or resurfacing (EP 592,106; EP 519,596; Padlan, Molecular Immunology 28(4/5):489-498 (1991); Studnicka et al., Protein Engineering 7(6):805-814 (1994); Roguska. et al., PNAS 91:969-973 (1994)), and chain shuffling (U.S. Pat. No. 5,565,332).

[0378] Completely human antibodies are particularly desirable for therapeutic treatment of human patients. Human antibodies can be made by a variety of methods known in the art including phage display methods described above using antibody libraries derived from human immunoglobulin sequences. See also, U.S. Pat. Nos. 4,444,887 and 4,716,111; and PCT publications WO 98/46645, WO 98/50433, WO 98/24893, WO 98/16654, WO 96/34096, WO 96/33735, and WO 91/10741; each of which is incorporated herein by reference in its entirety.

[0379] Human antibodies can also be produced using transgenic mice which are incapable of expressing functional endogenous immunoglobulins, but which can express human immunoglobulin genes. For example, the human heavy and light chain immunoglobulin gene complexes may be introduced randomly or by homologous recombination into mouse embryonic stem cells. Alternatively, the human variable region, constant region, and diversity region may be introduced into mouse embryonic stem cells in addition to the human heavy and light chain genes. The mouse heavy and light chain immunoglobulin genes may be rendered non-functional separately or simultaneously with the introduction of human immunoglobulin loci by homologous recombination. In particular, homozygous deletion of the JH region prevents endogenous antibody production. The modified embryonic stem cells are expanded and microinjected into blastocysts to produce chimeric mice. The chimeric mice are then bred to produce homozygous offspring which express human antibodies. The transgenic mice are immunized in the normal fashion with a selected antigen, e.g., all or a portion of a polypeptide of the invention. Monoclonal antibodies directed against the antigen can be obtained from the immunized, transgenic mice using conventional hybridoma technology. The human immunoglobulin transgenes harbored by the transgenic mice rearrange during B cell differentiation, and subsequently undergo class switching and somatic mutation. Thus, using such a technique, it is possible to produce therapeutically useful IgG, IgA, IgM and IgE antibodies. For an overview of this technology for producing human antibodies, see Lonberg and Huszar, Int. Rev. Immunol. 13:65-93 (1995). For a detailed discussion of this technology for producing human antibodies and human monoclonal antibodies and protocols for producing such antibodies, see, e.g., PCT publications WO 98/24893; WO 92/01047; WO 96/34096; WO 96/33735; European Patent No. 0 598 877; U.S. Pat. Nos. 5,413,923; 5,625,126; 5,633,425; 5,569,825; 5,661,016; 5,545,806; 5,814,318; 5,885,793; 5,916,771; 5,939,598; 6,075,181; and 6,114,598, which are incorporated by reference herein in their entirety. In addition, companies such as Abgenix, Inc. (Freemont, Calif.) and Genpharm (San Jose, Calif.) can be engaged to provide human antibodies directed against a selected antigen using technology similar to that described above.

[0380] Completely human antibodies which recognize a selected epitope can be generated using a technique referred to as “guided selection.” In this approach a selected non-human monoclonal antibody, e.g., a mouse antibody, is used to guide the selection of a completely human antibody recognizing the same epitope. (Jespers et al., Bio/technology 12:899-903 (1988)).

[0381] Further, antibodies to the polypeptides of the invention can, in turn, be utilized to generate anti-idiotype antibodies that “mimic” polypeptides of the invention using techniques well known to those skilled in the art. (See, e.g., Greenspan & Bona, FASEB J. 7(5):437-444; (1989) and Nissinoff, J. Immunol. 147(8):2429-2438 (1991)). For example, antibodies which bind to and competitively inhibit polypeptide multimerization and/or binding of a polypeptide of the invention to a ligand can be used to generate anti-idiotypes that “mimic” the polypeptide multimerization and/or binding domain and, as a consequence, bind to and neutralize polypeptide and/or its ligand. Such neutralizing anti-idiotypes or Fab fragments of such anti-idiotypes can be used in therapeutic regimens to neutralize polypeptide ligand(s)/receptor(s). For example, such anti-idiotypic antibodies can be used to bind a polypeptide of the invention and/or to bind its ligand(s)/receptor(s), and thereby block its biological activity. Alternatively, antibodies which bind to and enhance polypeptide multimerization and/or binding, and/or receptor/ligand multimerization, binding and/or signaling can be used to generate anti-idiotypes that function as agonists of a polypeptide of the invention and/or its ligand/receptor. Such agonistic anti-idiotypes or Fab fragments of such anti-idiotypes can be used in therapeutic regimens as agonists of the polypeptides of the invention or its ligand(s)/receptor(s). For example, such anti-idiotypic antibodies can be used to bind a polypeptide of the invention and/or to bind its ligand(s)/receptor(s), and thereby promote or enhance its biological activity.

[0382] Intrabodies of the invention can be produced using methods known in the art, such as those disclosed and reviewed in Chen et al., Hum. Gene Ther. 5:595-601 (1994); Marasco, W. A., Gene Ther. 4:11-15 (1997); Rondon and Marasco, Annu. Rev. Microbiol. 51:257-283 (1997); Proba et al., J. Mol. Biol. 275:245-253 (1998); Cohen et al., Oncogene 17:2445-2456 (1998); Ohage and Steipe, J. Mol. Biol. 291:1119-1128 (1999); Ohage et al., J. Mol. Biol. 291:1129-1134 (1999); Wirtz and Steipe, Protein Sci. 8:2245-2250 (1999); Zhu et al., J. Immunol. Methods 231:207-222 (1999); and references cited therein.

Polynucleotides Encoding Antibodies

[0383] The invention further provides polynucleotides comprising a nucleotide sequence encoding an antibody of the invention and fragments thereof. The invention also encompasses polynucleotides that hybridize under stringent or alternatively, under lower stringency hybridization conditions, e.g., as defined supra, to polynucleotides that encode an antibody, preferably, that specifically binds to a polypeptide of the invention, preferably, an antibody that binds to a polypeptide having the amino acid sequence of SEQ ID NO:Y, to a polypeptide encoded by a portion of SEQ ID NO:X as defined in columns 8 and 9 of Table 2, and/or to a polypeptide encoded by the cDNA contained in ATCC Deposit No:Z.

[0384] The polynucleotides may be obtained, and the nucleotide sequence of the polynucleotides determined, by any method known in the art. For example, if the nucleotide sequence of the antibody is known, a polynucleotide encoding the antibody may be assembled from chemically synthesized oligonucleotides (e.g., as described in Kutmeier et al., BioTechniques 17:242 (1994)), which, briefly, involves the synthesis of overlapping oligonucleotides containing portions of the sequence encoding the antibody, annealing and ligating of those oligonucleotides, and then amplification of the ligated oligonucleotides by PCR.

[0385] Alternatively, a polynucleotide encoding an antibody may be generated from nucleic acid from a suitable source. If a clone containing a nucleic acid encoding a particular antibody is not available, but the sequence of the antibody molecule is known, a nucleic acid encoding the immunoglobulin may be chemically synthesized or obtained from a suitable source (e.g., an antibody cDNA library, or a cDNA library generated from, or nucleic acid, preferably poly A+ RNA, isolated from, any tissue or cells expressing the antibody, such as hybridoma cells selected to express an antibody of the invention) by PCR amplification using synthetic primers hybridizable to the 3 and 5′ ends of the sequence or by cloning using an oligonucleotide probe specific for the particular gene sequence to identify, e.g., a cDNA clone from a cDNA library that encodes the antibody. Amplified nucleic acids generated by PCR may then be cloned into replicable cloning vectors using any method well known in the art.

[0386] Once the nucleotide sequence and corresponding amino acid sequence of the antibody is determined, the nucleotide sequence of the antibody may be manipulated using methods well known in the art for the manipulation of nucleotide sequences, e.g., recombinant DNA techniques, site directed mutagenesis, PCR, etc. (see, for example, the techniques described in Sambrook et al., 1990, Molecular Cloning, A Laboratory Manual, 2d Ed., Cold Spring Harbor Laboratory, Cold Spring Harbor, N.Y. and Ausubel et al., eds., 1998, Current Protocols in Molecular Biology, John Wiley & Sons, NY, which are both incorporated by reference herein in their entireties), to generate antibodies having a different amino acid sequence, for example to create amino acid substitutions, deletions, and/or insertions.

[0387] In a specific embodiment, the amino acid sequence of the heavy and/or light chain variable domains may be inspected to identify the sequences of the complementarity determining regions (CDRs) by methods that are well know in the art, e.g., by comparison to known amino acid sequences of other heavy and light chain variable regions to determine the regions of sequence hypervariability. Using routine recombinant DNA techniques, one or more of the CDRs may be inserted within framework regions, e.g., into human framework regions to humanize a non-human antibody, as described supra. The framework regions may be naturally occurring or consensus framework regions, and preferably human framework regions (see, e.g., Chothia et al., J. Mol. Biol. 278: 457-479 (1998) for a listing of human framework regions). Preferably, the polynucleotide generated by the combination of the framework regions and CDRs encodes an antibody that specifically binds a polypeptide of the invention. Preferably, as discussed supra, one or more amino acid substitutions may be made within the framework regions, and, preferably, the amino acid substitutions improve binding of the antibody to its antigen. Additionally, such methods may be used to make amino acid substitutions or deletions of one or more variable region cysteine residues participating in an intrachain disulfide bond to generate antibody molecules lacking one or more intrachain disulfide bonds. Other alterations to the polynucleotide are encompassed by the present invention and within the skill of the art.

[0388] In addition, techniques developed for the production of “chimeric antibodies” (Morrison et al., Proc. Natl. Acad. Sci. 81:851-855 (1984); Neuberger et al., Nature 312:604-608 (1984); Takeda et al., Nature 314:452-454 (1985)) by splicing genes from a mouse antibody molecule of appropriate antigen specificity together with genes from a human antibody molecule of appropriate biological activity can be used. As described supra, a chimeric antibody is a molecule in which different portions are derived from different animal species, such as those having a variable region derived from a murine mAb and a human immunoglobulin constant region, e.g., humanized antibodies.

[0389] Alternatively, techniques described for the production of single chain antibodies (U.S. Pat. No. 4,946,778; Bird, Science 242:423-42 (1988); Huston et al., Proc. Natl. Acad. Sci. USA 85:5879-5883 (1988); and Ward et al., Nature 334:544-54 (1989)) can be adapted to produce single chain antibodies. Single chain antibodies are formed by linking the heavy and light chain fragments of the Fv region via an amino acid bridge, resulting in a single chain polypeptide. Techniques for the assembly of functional Fv fragments in E. coli may also be used (Skerra et al., Science 242:1038-1041 (1988)).

Methods of Producing Antibodies

[0390] The antibodies of the invention can be produced by any method known in the art for the synthesis of antibodies, in particular, by chemical synthesis or preferably, by recombinant expression techniques. Methods of producing antibodies include, but are not limited to, hybridoma technology, EBV transformation, and other methods discussed herein as well as through the use recombinant DNA technology, as discussed below.

[0391] Recombinant expression of an antibody of the invention, or fragment, derivative or analog thereof, (e.g., a heavy or light chain of an antibody of the invention or a single chain antibody of the invention), requires construction of an expression vector containing a polynucleotide that encodes the antibody. Once a polynucleotide encoding an antibody molecule or a heavy or light chain of an antibody, or portion thereof (preferably containing the heavy or light chain variable domain), of the invention has been obtained, the vector for the production of the antibody molecule may be produced by recombinant DNA technology using techniques well known in the art. Thus, methods for preparing a protein by expressing a polynucleotide containing an antibody encoding nucleotide sequence are described herein. Methods which are well known to those skilled in the art can be used to construct expression vectors containing antibody coding sequences and appropriate transcriptional and translational control signals. These methods include, for example, in vitro recombinant DNA techniques, synthetic techniques, and in vivo genetic recombination. The invention, thus, provides replicable vectors comprising a nucleotide sequence encoding an antibody molecule of the invention, or a heavy or light chain thereof, or a heavy or light chain variable domain, operably linked to a promoter. Such vectors may include the nucleotide sequence encoding the constant region of the antibody molecule (see, e.g., PCT Publication WO 86/05807; PCT Publication WO 89/01036; and U.S. Pat. No. 5,122,464) and the variable domain of the antibody may be cloned into such a vector for expression of the entire heavy or light chain.

[0392] The expression vector is transferred to a host cell by conventional techniques and the transfected cells are then cultured by conventional techniques to produce an antibody of the invention. Thus, the invention includes host cells containing a polynucleotide encoding an antibody of the invention, or a heavy or light chain thereof, or a single chain antibody of the invention, operably linked to a heterologous promoter. In preferred embodiments for the expression of double-chained antibodies, vectors encoding both the heavy and light chains may be co-expressed in the host cell for expression of the entire immunoglobulin molecule, as detailed below.

[0393] A variety of host-expression vector systems may be utilized to express the antibody molecules of the invention. Such host-expression systems represent vehicles by which the coding sequences of interest may be produced and subsequently purified, but also represent cells which may, when transformed or transfected with the appropriate nucleotide coding sequences, express an antibody molecule of the invention in situ. These include but are not limited to microorganisms such as bacteria (e.g., E. coli, B. subtilis) transformed with recombinant bacteriophage DNA, plasmid DNA or cosmid DNA expression vectors containing antibody coding sequences; yeast (e.g., Saccharomyces, Pichia) transformed with recombinant yeast expression vectors containing antibody coding sequences; insect cell systems infected with recombinant virus expression vectors (e.g., baculovirus) containing antibody coding sequences; plant cell systems infected with recombinant virus expression vectors (e.g., cauliflower mosaic virus, CaMV; tobacco mosaic virus, TMV) or transformed with recombinant plasmid expression vectors (e.g., Ti plasmid) containing antibody coding sequences; or mammalian cell systems (e.g., COS, CHO, BHK, 293, 3T3 cells) harboring recombinant expression constructs containing promoters derived from the genome of mammalian cells (e.g., metallothionein promoter) or from mammalian viruses (e.g., the adenovirus late promoter; the vaccinia virus 7.5K promoter). Preferably, bacterial cells such as Escherichia coli, and more preferably, eukaryotic cells, especially for the expression of whole recombinant antibody molecule, are used for the expression of a recombinant antibody molecule. For example, mammalian cells such as Chinese hamster ovary cells (CHO), in conjunction with a vector such as the major intermediate early gene promoter element from human cytomegalovirus is an effective expression system for antibodies (Foecking et al., Gene 45:101 (1986); Cockett et al., Bio/Technology 8:2 (1990)).

[0394] In bacterial systems, a number of expression vectors may be advantageously selected depending upon the use intended for the antibody molecule being expressed. For example, when a large quantity of such a protein is to be produced, for the generation of pharmaceutical compositions of an antibody molecule, vectors which direct the expression of high levels of fusion protein products that are readily purified may be desirable. Such vectors include, but are not limited, to the E. coli expression vector pUR278 (Ruther et al., EMBO J. 2:1791 (1983)), in which the antibody coding sequence may be ligated individually into the vector in frame with the lac Z coding region so that a fusion protein is produced; pIN vectors (Inouye & Inouye, Nucleic Acids Res. 13:3101-3109 (1985); Van Heeke & Schuster, J. Biol. Chem. 24:5503-5509 (1989)); and the like. pGEX vectors may also be used to express foreign polypeptides as fusion proteins with glutathione S-transferase (GST). In general, such fusion proteins are soluble and can easily be purified from lysed cells by adsorption and binding to matrix glutathione-agarose beads followed by elution in the presence of free glutathione. The pGEX vectors are designed to include thrombin or factor Xa protease cleavage sites so that the cloned target gene product can be released from the GST moiety.

[0395] In an insect system, Autographa californica nuclear polyhedrosis virus (AcNPV) is used as a vector to express foreign genes. The virus grows in Spodoptera frugiperda cells. The antibody coding sequence may be cloned individually into non-essential regions (for example the polyhedrin gene) of the virus and placed under control of an AcNPV promoter (for example the polyhedrin promoter).

[0396] In mammalian host cells, a number of viral-based expression systems may be utilized. In cases where an adenovirus is used as an expression vector, the antibody coding sequence of interest may be ligated to an adenovirus transcription/translation control complex, e.g., the late promoter and tripartite leader sequence. This chimeric gene may then be inserted in the adenovirus genome by in vitro or in vivo recombination. Insertion in a non-essential region of the viral genome (e.g., region E1 or E3) will result in a recombinant virus that is viable and capable of expressing the antibody molecule in infected hosts. (e.g., see Logan & Shenk, Proc. Natl. Acad. Sci. USA 81:355-359 (1984)). Specific initiation signals may also be required for efficient translation of inserted antibody coding sequences. These signals include the ATG initiation codon and adjacent sequences. Furthermore, the initiation codon must be in phase with the reading frame of the desired coding sequence to ensure translation of the entire insert. These exogenous translational control signals and initiation codons can be of a variety of origins, both natural and synthetic. The efficiency of expression may be enhanced by the inclusion of appropriate transcription enhancer elements, transcription terminators, etc. (see Bittner et al., Methods in Enzymol. 153:51-544 (1987)).

[0397] In addition, a host cell strain may be chosen which modulates the expression of the inserted sequences, or modifies and processes the gene product in the specific fashion desired. Such modifications (e.g., glycosylation) and processing (e.g., cleavage) of protein products may be important for the function of the protein. Different host cells have characteristic and specific mechanisms for the post-translational processing and modification of proteins and gene products. Appropriate cell lines or host systems can be chosen to ensure the correct modification and processing of the foreign protein expressed. To this end, eukaryotic host cells which possess the cellular machinery for proper processing of the primary transcript, glycosylation, and phosphorylation of the gene product may be used. Such mammalian host cells include but are not limited to CHO, VERY, BHK, Hela, COS, MDCK, 293, 3T3, WI38, and in particular, breast cancer cell lines such as, for example, BT483, Hs578T, HTB2, BT20 and T47D, and normal mammary gland cell line such as, for example, CRL7030 and Hs578Bst.

[0398] For long-term, high-yield production of recombinant proteins, stable expression is preferred. For example, cell lines which stably express the antibody molecule may be engineered. Rather than using expression vectors which contain viral origins of replication, host cells can be transformed with DNA controlled by appropriate expression control elements (e.g., promoter, enhancer, sequences, transcription terminators, polyadenylation sites, etc.), and a selectable marker. Following the introduction of the foreign DNA, engineered cells may be allowed to grow for 1-2 days in an enriched media, and then are switched to a selective media. The selectable marker in the recombinant plasmid confers resistance to the selection and allows cells to stably integrate the plasmid into their chromosomes and grow to form foci which in turn can be cloned and expanded into cell lines. This method may advantageously be used to engineer cell lines which express the antibody molecule. Such engineered cell lines may be particularly useful in screening and evaluation of compounds that interact directly or indirectly with the antibody molecule.

[0399] A number of selection systems may be used, including but not limited to the herpes simplex virus thymidine kinase (Wigler et al., Cell 11:223 (1977)), hypoxanthine-guanine phosphoribosyltransferase (Szybalska & Szybalski, Proc. Natl. Acad. Sci. USA 48:202 (1992)), and adenine phosphoribosyltransferase (Lowy et al., Cell 22:817 (1980)) genes can be employed in tk−, hgprt− or aprt− cells, respectively. Also, antimetabolite resistance can be used as the basis of selection for the following genes: dhfr, which confers resistance to methotrexate (Wigler et al., Natl. Acad. Sci. USA 77:357 (1980); O'Hare et al., Proc. Natl. Acad. Sci. USA 78:1527 (1981)); gpt, which confers resistance to mycophenolic acid (Mulligan & Berg, Proc. Natl. Acad. Sci. USA 78:2072 (1981)); neo, which confers resistance to the aminoglycoside G-418 Clinical Pharmacy 12:488-505; Wu and Wu, Biotherapy 3:87-95 (1991); Tolstoshev, Ann. Rev. Pharmacol. Toxicol. 32:573-596 (1993); Mulligan, Science 260:926-932 (1993); and Morgan and Anderson, Ann. Rev. Biochem. 62:191-217 (1993); May, 1993, TIB TECH 11(5):155-215 (1993)); and hygro, which confers resistance to hygromycin (Santerre et al., Gene 30:147 (1984)). Methods commonly known in the art of recombinant DNA technology may be routinely applied to select the desired recombinant clone, and such methods are described, for example, in Ausubel et al. (eds.), Current Protocols in Molecular Biology, John Wiley & Sons, NY (1993); Kriegler, Gene Transfer and Expression, A Laboratory Manual, Stockton Press, NY (1990); and in Chapters 12 and 13, Dracopoli et al. (eds), Current Protocols in Human Genetics, John Wiley & Sons, NY (1994); Colberre-Garapin et al., J. Mol. Biol. 150:1 (1981), which are incorporated by reference herein in their entireties.

[0400] The expression levels of an antibody molecule can be increased by vector amplification (for a review, see Bebbington and Hentschel, The use of vectors based on gene amplification for the expression of cloned genes in mammalian cells in DNA cloning, Vol. 3. (Academic Press, New York, 1987)). When a marker in the vector system expressing antibody is amplifiable, increase in the level of inhibitor present in culture of host cell will increase the number of copies of the marker gene. Since the amplified region is associated with the antibody gene, production of the antibody will also increase (Crouse et al., Mol. Cell. Biol. 3:257 (1983)).

[0401] Vectors which use glutamine synthase (GS) or DHFR as the selectable markers can be amplified in the presence of the drugs methionine sulphoximine or methotrexate, respectively. An advantage of glutamine synthase based vectors are the availability of cell lines (e.g., the murine myeloma cell line, NS0) which are glutamine synthase negative. Glutamine synthase expression systems can also function in glutamine synthase expressing cells (e.g. Chinese Hamster Ovary (CHO) cells) by providing additional inhibitor to prevent the functioning of the endogenous gene. A glutamine synthase expression system and components thereof are detailed in PCT publications: WO87/04462; WO86/05807; WO89/01036; WO89/10404; and WO91/06657 which are incorporated in their entireties by reference herein. Additionally, glutamine synthase expression vectors that may be used according to the present invention are commercially available from suppliers, including, for example Lonza Biologics, Inc. (Portsmouth, N.H.). Expression and production of monoclonal antibodies using a GS expression system in murine myeloma cells is described in Bebbington et al., Bio/technology 10:169(1992) and in Biblia and Robinson Biotechnol. Prog. 11:1 (1995) which are incorporated in their entirities by reference herein.

[0402] The host cell may be co-transfected with two expression vectors of the invention, the first vector encoding a heavy chain derived polypeptide and the second vector encoding a light chain derived polypeptide. The two vectors may contain identical selectable markers which enable equal expression of heavy and light chain polypeptides. Alternatively, a single vector may be used which encodes, and is capable of expressing, both heavy and light chain polypeptides. In such situations, the light chain should be placed before the heavy chain to avoid an excess of toxic free heavy chain (Proudfoot, Nature 322:52 (1986); Kohler, Proc. Natl. Acad. Sci. USA 77:2197 (1980)). The coding sequences for the heavy and light chains may comprise cDNA or genomic DNA.

[0403] Once an antibody molecule of the invention has been produced by an animal, chemically synthesized, or recombinantly expressed, it may be purified by any method known in the art for purification of an immunoglobulin molecule, for example, by chromatography (e.g., ion exchange, affinity, particularly by affinity for the specific antigen after Protein A, and sizing column chromatography), centrifugation, differential solubility, or by any other standard technique for the purification of proteins. In addition, the antibodies of the present invention or fragments thereof can be fused to heterologous polypeptide sequences described herein or otherwise known in the art, to facilitate purification.

[0404] The present invention encompasses antibodies recombinantly fused or chemically conjugated (including both covalently and non-covalently conjugations) to a polypeptide (or portion thereof, preferably at least 10, 20, 30, 40, 50, 60, 70, 80, 90 or 100 amino acids of the polypeptide) of the present invention to generate fusion proteins. The fusion does not necessarily need to be direct, but may occur through linker sequences. The antibodies may be specific for antigens other than polypeptides (or portion thereof, preferably at least 10, 20, 30, 40, 50, 60, 70, 80, 90 or 100 amino acids of the polypeptide) of the present invention. For example, antibodies may be used to target the polypeptides of the present invention to particular cell types, either in vitro or in vivo, by fusing or conjugating the polypeptides of the present invention to antibodies specific for particular cell surface receptors. Antibodies fused or conjugated to the polypeptides of the present invention may also be used in in vitro immunoassays and purification methods using methods known in the art. See e.g., Harbor et al., supra, and PCT publication WO 93/21232; EP 439,095; Naramura et al., Immunol. Lett. 39:91-99 (1994); U.S. Pat. No. 5,474,981; Gillies et al., PNAS 89:1428-1432 (1992); Fell et al., J. Immunol. 146:2446-2452 (1991), which are incorporated by reference in their entireties.

[0405] The present invention further includes compositions comprising the polypeptides of the present invention fused or conjugated to antibody domains other than the variable regions. For example, the polypeptides of the present invention may be fused or conjugated to an antibody Fc region, or portion thereof. The antibody portion fused to a polypeptide of the present invention may comprise the constant region, hinge region, CH1 domain, CH2 domain, and CH3 domain or any combination of whole domains or portions thereof. The polypeptides may also be fused or conjugated to the above antibody portions to form multimers. For example, Fc portions fused to the polypeptides of the present invention can form dimers through disulfide bonding between the Fc portions. Higher multimeric forms can be made by fusing the polypeptides to portions of IgA and IgM. Methods for fusing or conjugating the polypeptides of the present invention to antibody portions are known in the art. See, e.g., U.S. Pat. Nos. 5,336,603; 5,622,929; 5,359,046; 5,349,053; 5,447,851; 5,112,946; EP 307,434; EP 367,166; PCT publications WO 96/04388; WO 91/06570; Ashkenazi et al., Proc. Natl. Acad. Sci. USA 88:10535-10539 (1991); Zheng et al., J. Immunol. 154:5590-5600 (1995); and Vil et al., Proc. Natl. Acad. Sci. USA 89:11337-11341 (1992) (said references incorporated by reference in their entireties).

[0406] As discussed, supra, the polypeptides corresponding to a polypeptide, polypeptide fragment, or a variant of SEQ ID NO:Y may be fused or conjugated to the above antibody portions to increase the in vivo half life of the polypeptides or for use in immunoassays using methods known in the art. Further, the polypeptides corresponding to SEQ ID NO:Y may be fused or conjugated to the above antibody portions to facilitate purification. One reported example describes chimeric proteins consisting of the first two domains of the human CD4-polypeptide and various domains of the constant regions of the heavy or light chains of mammalian immunoglobulins. See EP 394,827; and Traunecker et al., Nature 331:84-86 (1988). The polypeptides of the present invention fused or conjugated to an antibody having disulfide-linked dimeric structures (due to the IgG) may also be more efficient in binding and neutralizing other molecules, than the monomeric secreted protein or protein fragment alone. See, for example, Fountoulakis et al., J. Biochem. 270:3958-3964 (1995). In many cases, the Fc part in a fusion protein is beneficial in therapy and diagnosis, and thus can result in, for example, improved pharmacokinetic properties. See, for example, EP A 232,262. Alternatively, deleting the Fc part after the fusion protein has been expressed, detected, and purified, would be desired. For example, the Fc portion may hinder therapy and diagnosis if the fusion protein is used as an antigen for immunizations. In drug discovery, for example, human proteins, such as hIL-5, have been fused with Fc portions for the purpose of high-throughput screening assays to identify antagonists of hIL-5. (See, Bennett et al., J. Molecular Recognition 8:52-58 (1995); Johanson et al., J. Biol. Chem. 270:9459-9471 (1995)).

[0407] Moreover, the antibodies or fragments thereof of the present invention can be fused to marker sequences, such as a peptide to facilitate purification. In preferred embodiments, the marker amino acid sequence is a hexa-histidine peptide, such as the tag provided in a pQE vector (QIAGEN, Inc., 9259 Eton Avenue, Chatsworth, Calif., 91311), among others, many of which are commercially available. As described in Gentz et al., Proc. Natl. Acad. Sci. USA 86:821-824 (1989), for instance, hexa-histidine provides for convenient purification of the fusion protein. Other peptide tags useful for purification include, but are not limited to, the “HA” tag, which corresponds to an epitope derived from the influenza hemagglutinin protein (Wilson et al., Cell 37:767 (1984)) and the “flag” tag.

[0408] The present invention further encompasses antibodies or fragments thereof conjugated to a diagnostic or therapeutic agent. The antibodies can be used diagnostically to, for example, monitor the development or progression of a tumor as part of a clinical testing procedure to, e.g., determine the efficacy of a given treatment regimen. Detection can be facilitated by coupling the antibody to a detectable substance. Examples of detectable substances include various enzymes, prosthetic groups, fluorescent materials, luminescent materials, bioluminescent materials, radioactive materials, positron emitting metals using various positron emission tomographies, and nonradioactive paramagnetic metal ions. The detectable substance may be coupled or conjugated either directly to the antibody (or fragment thereof) or indirectly, through an intermediate (such as, for example, a linker known in the art) using techniques known in the art. See, for example, U.S. Pat. No. 4,741,900 for metal ions which can be conjugated to antibodies for use as diagnostics according to the present invention. Examples of suitable enzymes include horseradish peroxidase, alkaline phosphatase, beta-galactosidase, or acetylcholinesterase; examples of suitable prosthetic group complexes include streptavidin/biotin and avidin/biotin; examples of suitable fluorescent materials include umbelliferone, fluorescein, fluorescein isothiocyanate, rhodamine, dichlorotriazinylamine fluorescein, dansyl chloride or phycoerythrin; an example of a luminescent material includes luminol; examples of bioluminescent materials include luciferase, luciferin, and aequorin; and examples of suitable radioactive material include 125I, 131I, 111In or 99Tc.

[0409] Further, an antibody or fragment thereof may be conjugated to a therapeutic moiety such as a cytotoxin, e.g., a cytostatic or cytocidal agent, a therapeutic agent or a radioactive metal ion, e.g., alpha-emitters such as, for example, 213Bi. A cytotoxin or cytotoxic agent includes any agent that is detrimental to cells. Examples include paclitaxol, cytochalasin B, gramicidin D, ethidium bromide, emetine, mitomycin, etoposide, tenoposide, vincristine, vinblastine, colchicin, doxorubicin, daunorubicin, dihydroxy anthracin dione, mitoxantrone, mithramycin, actinomycin D, 1-dehydrotestosterone, glucocorticoids, procaine, tetracaine, lidocaine, propranolol, and puromycin and analogs or homologs thereof. Therapeutic agents include, but are not limited to, antimetabolites (e.g., methotrexate, 6-mercaptopurine, 6-thioguanine, cytarabine, 5-fluorouracil decarbazine), alkylating agents (e.g., mechlorethamine, thioepa chlorambucil, melphalan, carmustine (BSNU) and lomustine (CCNU), cyclothosphamide, busulfan, dibromomannitol, streptozotocin, mitomycin C, and cis-dichlorodiamine platinum (II) (DDP) cisplatin), anthracyclines (e.g., daunorubicin (formerly daunomycin) and doxorubicin), antibiotics (e.g., dactinomycin (formerly actinomycin), bleomycin, mithramycin, and anthramycin (AMC)), and anti-mitotic agents (e.g., vincristine and vinblastine).

[0410] The conjugates of the invention can be used for modifying a given biological response, the therapeutic agent or drug moiety is not to be construed as limited to classical chemical therapeutic agents. For example, the drug moiety may be a protein or polypeptide possessing a desired biological activity. Such proteins may include, for example, a toxin such as abrin, ricin A, pseudomonas exotoxin, or diphtheria toxin; a protein such as tumor necrosis factor, a-interferon, β-interferon, nerve growth factor, platelet derived growth factor, tissue plasminogen activator, an apoptotic agent, e.g., TNF-alpha, TNF-beta, AIM I (See, International Publication No. WO 97/33899), AIM II (See, International Publication No. WO 97/34911), Fas Ligand (Takahashi et al., Int. Immunol., 6:1567-1574 (1994)), VEGI (See, International Publication No. WO 99/23105), a thrombotic agent or an anti-angiogenic agent, e.g., angiostatin or endostatin; or, biological response modifiers such as, for example, lymphokines, interleukin-1 (“IL-1”), interleukin-2 (“IL-2”), interleukin-6 (“IL-6”), granulocyte macrophage colony stimulating factor (“GM-CSF”), granulocyte colony stimulating factor (“G-CSF”), or other growth factors.

[0411] Antibodies may also be attached to solid supports, which are particularly useful for immunoassays or purification of the target antigen. Such solid supports include, but are not limited to, glass, cellulose, polyacrylamide, nylon, polystyrene, polyvinyl chloride or polypropylene.

[0412] Techniques for conjugating such therapeutic moiety to antibodies are well known. See, for example, Arnon et al., “Monoclonal Antibodies For Immunotargeting Of Drugs In Cancer Therapy”, in Monoclonal Antibodies And Cancer Therapy, Reisfeld et al. (eds.), pp. 243-56 (Alan R. Liss, Inc. 1985); Hellstrom et al., “Antibodies For Drug Delivery”, in Controlled Drug Delivery (2nd Ed.), Robinson et al. (eds.), pp. 623-53 (Marcel Dekker, Inc. 1987); Thorpe, “Antibody Carriers Of Cytotoxic Agents In Cancer Therapy: A Review”, in Monoclonal Antibodies '84: Biological And Clinical Applications, Pinchera et al. (eds.), pp. 475-506 (1985); “Analysis, Results, And Future Prospective Of The Therapeutic Use Of Radiolabeled Antibody In Cancer Therapy”, in Monoclonal Antibodies For Cancer Detection And Therapy, Baldwin et al. (eds.), pp. 303-16 (Academic Press 1985), and Thorpe et al., “The Preparation And Cytotoxic Properties Of Antibody-Toxin Conjugates”, Immunol. Rev. 62:119-58 (1982).

[0413] Alternatively, an antibody can be conjugated to a second antibody to form an antibody heteroconjugate as described by Segal in U.S. Pat. No. 4,676,980, which is incorporated herein by reference in its entirety.

[0414] An antibody, with or without a therapeutic moiety conjugated to it, administered alone or in combination with cytotoxic factor(s) and/or cytokine(s) can be used as a therapeutic.

Immunophenotyping

[0415] The antibodies of the invention may be utilized for immunophenotyping of cell lines and biological samples. Translation products of the gene of the present invention may be useful as cell-specific markers, or more specifically as cellular markers that are differentially expressed at various stages of differentiation and/or maturation of particular cell types. Monoclonal antibodies directed against a specific epitope, or combination of epitopes, will allow for the screening of cellular populations expressing the marker. Various techniques can be utilized using monoclonal antibodies to screen for cellular populations expressing the marker(s), and include magnetic separation using antibody-coated magnetic beads, “panning” with antibody attached to a solid matrix (i.e., plate), and flow cytometry (See, e.g., U.S. Pat. No. 5,985,660; and Morrison et al., Cell, 96:737-49 (1999)).

[0416] These techniques allow for the screening of particular populations of cells, such as might be found with hematological malignancies (i.e. minimal residual disease (MRD) in acute leukemic patients) and “non-self” cells in transplantations to prevent Graft-versus-Host Disease (GVHD). Alternatively, these techniques allow for the screening of hematopoietic stem and progenitor cells capable of undergoing proliferation and/or differentiation, as might be found in human umbilical cord blood.

Assays for Antibody Binding

[0417] The antibodies of the invention may be assayed for immunospecific binding by any method known in the art. The immunoassays which can be used include but are not limited to competitive and non-competitive assay systems using techniques such as western blots, radioimmunoassays, ELISA (enzyme linked immunosorbent assay), “sandwich” immunoassays, immunoprecipitation assays, precipitin reactions, gel diffusion precipitin reactions, immunodiffusion assays, agglutination assays, complement-fixation assays, immunoradiometric assays, fluorescent immunoassays, and protein A immunoassays, to name but a few. Such assays are routine and well known in the art (see, e.g., Ausubel et al., eds, 1994, Current Protocols in Molecular Biology, Vol. 1, John Wiley & Sons, Inc., New York, which is incorporated by reference herein in its entirety). Exemplary immunoassays are described briefly below (but are not intended by way of limitation).

[0418] Immunoprecipitation protocols generally comprise lysing a population of cells in a lysis buffer such as RIPA buffer (1% NP-40 or Triton X-100, 1% sodium deoxycholate, 0.1% SDS, 0.15 M NaCl, 0.01 M sodium phosphate at pH 7.2, 1% Trasylol) supplemented with protein phosphatase and/or protease inhibitors (e.g., EDTA, PMSF, aprotinin, sodium vanadate), adding the antibody of interest to the cell lysate, incubating for a period of time (e.g., 1-4 hours) at 4° C., adding protein A and/or protein G sepharose beads to the cell lysate, incubating for about an hour or more at 4° C., washing the beads in lysis buffer and resuspending the beads in SDS/sample buffer. The ability of the antibody of interest to immunoprecipitate a particular antigen can be assessed by, e.g., western blot analysis. One of skill in the art would be knowledgeable as to the parameters that can be modified to increase the binding of the antibody to an antigen and decrease the background (e.g., pre-clearing the cell lysate with sepharose beads). For further discussion regarding immunoprecipitation protocols see, e.g., Ausubel et al., eds., (1994), Current Protocols in Molecular Biology, Vol. 1, John Wiley & Sons, Inc., New York, section 10.16.1.

[0419] Western blot analysis generally comprises preparing protein samples, electrophoresis of the protein samples in a polyacrylamide gel (e.g., 8%-20% SDS-PAGE depending on the molecular weight of the antigen), transferring the protein sample from the polyacrylamide gel to a membrane such as nitrocellulose, PVDF or nylon, blocking the membrane in blocking solution (e.g., PBS with 3% BSA or non-fat milk), washing the membrane in washing buffer (e.g., PBS-Tween 20), blocking the membrane with primary antibody (the antibody of interest) diluted in blocking buffer, washing the membrane in washing buffer, blocking the membrane with a secondary antibody (which recognizes the primary antibody, e.g., an anti-human antibody) conjugated to an enzymatic substrate (e.g., horseradish peroxidase or alkaline phosphatase) or radioactive molecule (e.g., 32P or 125I) diluted in blocking buffer, washing the membrane in wash buffer, and detecting the presence of the antigen. One of skill in the art would be knowledgeable as to the parameters that can be modified to increase the signal detected and to reduce the background noise. For further discussion regarding western blot protocols see, e.g., Ausubel et al., eds, (1994), Current Protocols in Molecular Biology, Vol. 1, John Wiley & Sons, Inc., New York, section 10.8.1.

[0420] ELISAs comprise preparing antigen, coating the well of a 96 well microtiter plate with the antigen, adding the antibody of interest conjugated to a detectable compound such as an enzymatic substrate (e.g., horseradish peroxidase or alkaline phosphatase) to the well and incubating for a period of time, and detecting the presence of the antigen. In ELISAs the antibody of interest does not have to be conjugated to a detectable compound; instead, a second antibody (which recognizes the antibody of interest) conjugated to a detectable compound may be added to the well. Further, instead of coating the well with the antigen, the antibody may be coated to the well. In this case, a second antibody conjugated to a detectable compound may be added following the addition of the antigen of interest to the coated well. One of skill in the art would be knowledgeable as to the parameters that can be modified to increase the signal detected as well as other variations of ELISAs known in the art. For further discussion regarding ELISAs see, e.g., Ausubel et al., eds, (1994), Current Protocols in Molecular Biology, Vol. 1, John Wiley & Sons, Inc., New York, section 11.2.1.

[0421] The binding affinity of an antibody to an antigen and the off-rate of an antibody-antigen interaction can be determined by competitive binding assays. One example of a competitive binding assay is a radioimmunoassay comprising the incubation of labeled antigen (e.g., 3H or 125I) with the antibody of interest in the presence of increasing amounts of unlabeled antigen, and the detection of the antibody bound to the labeled antigen. The affinity of the antibody of interest for a particular antigen and the binding off-rates can be determined from the data by scatchard plot analysis. Competition with a second antibody can also be determined using radioimmunoassays. In this case, the antigen is incubated with antibody of interest conjugated to a labeled compound (e.g., 3H or 125I) in the presence of increasing amounts of an unlabeled second antibody.

[0422] Antibodies of the invention may be characterized using immunocytochemisty methods on cells (e.g., mammalian cells, such as CHO cells) transfected with a vector enabling the expression of an antigen or with vector alone using techniques commonly known in the art. Antibodies that bind antigen transfected cells, but not vector-only transfected cells, are antigen specific.

Therapeutic Uses

[0423] Table 1D: In preferred embodiments, the present invention encompasses a method of treating a disease or disorder listed in the “Preferred Indications” column of Table 1D; comprising administering to a patient in which such treatment, prevention, or amelioration is desired a protein, nucleic acid, or antibody of the invention (or fragment or variant thereof) represented by Table 1A and Table 1D (in the same row as the disease or disorder to be treated is listed in the “Preferred Indications” column of Table 1D) in an amount effective to treat, prevent, or ameliorate the disease or disorder.

[0424] As indicated in Table 1D, the polynucleotides, polypeptides, agonists, or antagonists of the present invention (including antibodies) can be used in assays to test for one or more biological activities. If these polynucleotides and polypeptides do exhibit activity in a particular assay, it is likely that these molecules may be involved in the diseases associated with the biological activity. Thus, the polynucleotides or polypeptides, or agonists or antagonists thereof (including antibodies) could be used to treat the associated disease.

[0425] The present invention encompasses methods of preventing, treating, diagnosing, or ameliorating a disease or disorder. In preferred embodiments, the present invention encompasses a method of treating a disease or disorder listed in the “Preferred Indications” column of Table 1D; comprising administering to a patient in which such treatment, prevention, or amelioration is desired a protein, nucleic acid, or antibody of the invention (or fragment or variant thereof) in an amount effective to treat, prevent, diagnose, or ameliorate the disease or disorder. The first and second columns of Table 1D show the “Gene No.” and “cDNA Clone ID No.”, respectively, indicating certain nucleic acids and proteins (or antibodies against the same) of the invention (including polynucleotide, polypeptide, and antibody fragments or variants thereof) that may be used in preventing, treating, diagnosing, or ameliorating the disease(s) or disorder(s) indicated in the corresponding row in Column 3 of Table 1D.

[0426] In another embodiment, the present invention also encompasses methods of preventing, treating, diagnosing, or ameliorating a disease or disorder listed in the “Preferred Indications” column of Table 1D; comprising administering to a patient combinations of the proteins, nucleic acids, or antibodies of the invention (or fragments or variants thereof), sharing similar indications as shown in the corresponding rows in Column 3 of Table 1D.

[0427] The “Preferred Indication” column describes diseases, disorders, and/or conditions that may be treated, prevented, diagnosed, or ameliorated by a protein, nucleic acid, or antibody of the invention (or fragment or variant thereof).

[0428] The recitation of “Cancer” in the “Preferred Indication” column indicates that the corresponding nucleic acid and protein, or antibody against the same, of the invention (or fragment or variant thereof) may be used for example, to diagnose, treat, prevent, and/or ameliorate diseases and/or disorders relating to neoplastic diseases (e.g., leukemias, cancers, and/or as described below under “Hyperproliferative Disorders”).

[0429] In specific embodiments, a protein, nucleic acid, or antibody of the invention (or fragment or variant thereof) having a “Cancer” recitation in the “Preferred Indication” column of Table 1D may be used for example, to diagnose, treat, prevent, and/or ameliorate a neoplasm located in a tissue selected from the group consisting of: colon, abdomen, bone, breast, digestive system, liver, pancreas, prostate, peritoneum, lung, blood (e.g., leukemia), endocrine glands (adrenal, parathyroid, pituitary, testicles, ovary, thymus, thyroid), uterus, eye, head and neck, nervous (central and peripheral), lymphatic system, pelvic, skin, soft tissue, spleen, thoracic, and urogenital.

[0430] In specific embodiments, a protein, nucleic acid, or antibody of the invention (or fragment or variant thereof) having a “Cancer” recitation in the “Preferred Indication” column of Table 1D, may be used for example, to diagnose, treat, prevent, and/or ameliorate a pre-neoplastic condition, selected from the group consisting of: hyperplasia (e.g., endometrial hyperplasia and/or as described in the section entitled “Hyperproliferative Disorders”), metaplasia (e.g., connective tissue metaplasia, atypical metaplasia, and/or as described in the section entitled “Hyperproliferative Disorders”), and/or dysplasia (e.g., cervical dysplasia, and bronchopulmonary dysplasia).

[0431] In another specific embodiment, a protein, nucleic acid, or antibody of the invention (or fragment or variant thereof) having a “Cancer” recitation in the “Preferred Indication” column of Table 1D, may be used for example, to diagnose, treat, prevent, and/or ameliorate a benign dysproliferative disorder selected from the group consisting of: benign tumors, fibrocystic conditions, tissue hypertrophy, and/or as described in the section entitled “Hyperproliferative Disorders”.

[0432] The recitation of “Immune/Hematopoietic” in the “Preferred Indication” column indicates that the corresponding nucleic acid and protein, or antibody against the same, of the invention (or fragment or variant thereof), may be used for example, to diagnose, treat, prevent, and/or ameliorate diseases and/or disorders relating to neoplastic diseases (e.g., as described below under “Hyperproliferative Disorders”), blood disorders (e.g., as described below under “Immune Activity” “Cardiovascular Disorders” and/or “Blood-Related Disorders”), and infections (e.g., as described below under “Infectious Disease”).

[0433] In specific embodiments, a protein, nucleic acid, or antibody of the invention (or fragment or variant thereof) having the “Immune/Hematopoietic” recitation in the “Preferred Indication” column of Table 1D, may be used for example, to diagnose, treat, prevent, and/or ameliorate a disease or disorder selected from the group consisting of: anemia, pancytopenia, leukopenia, thrombocytopenia, leukemias, Hodgkin's disease, non-Hodgkin's lymphoma, acute lymphocytic anemia (ALL), plasmacytomas, multiple myeloma, Burkitt's lymphoma, arthritis, asthma, AIDS, autoimmune disease, rheumatoid arthritis, granulomatous disease, immune deficiency, inflammatory bowel disease, sepsis, neutropenia, neutrophilia, psoriasis, immune reactions to transplanted organs and tissues, systemic lupus erythematosis, hemophilia, hypercoagulation, diabetes mellitus, endocarditis, meningitis, Lyme Disease, and allergies.

[0434] The recitation of “Reproductive” in the “Preferred Indication” column indicates that the corresponding nucleic acid and protein, or antibody against the same, of the invention (or fragment or variant thereof), may be used for example, to diagnose, treat, prevent, and/or ameliorate diseases and/or disorders relating to neoplastic diseases (e.g., as described below under “Hyperproliferative Disorders”), and disorders of the reproductive system (e.g., as described below under “Reproductive System Disorders”).

[0435] In specific embodiments, a protein, nucleic acid, or antibody of the invention (or fragment or variant thereof) having a “Reproductive” recitation in the “Preferred Indication” column of Table 1D, may be used for example, to diagnose, treat, prevent, and/or ameliorate a disease or disorder selected from the group consisting of: cryptorchism, prostatitis, inguinal hernia, varicocele, leydig cell tumors, verrucous carcinoma, prostatitis, malacoplakia, Peyronie's disease, penile carcinoma, squamous cell hyperplasia, dysmenorrhea, ovarian adenocarcinoma, Turner's syndrome, mucop lent cervicitis, Sertoli-leydig tumors, ovarian cancer, uterine cancer, pelvic inflammatory disease, testicular cancer, prostate cancer, Klinefelter's syndrome, Young's syndrome, premature ejaculation, diabetes mellitus, cystic fibrosis, Kartagener's syndrome, testicular atrophy, testicular feminization, anorchia, ectopic testis, epididymitis, orchitis, gonorrhea, syphilis, testicular torsion, vasitis nodosa, germ cell tumors, stromal tumors, dysmenorrhea, retroverted uterus, endometriosis, fibroids, adenomyosis, anovulatory bleeding, amenorrhea, Cushing's syndrome, hydatidiform moles, Asherman's syndrome, premature menopause, precocious puberty, uterine polyps, dysfunctional uterine bleeding, cervicitis, chronic cervicitis, mucopurulent cervicitis, cervical dysplasia, cervical polyps, Nabothian cysts, cervical erosion, cervical incompetence, cervical neoplasms, pseudohermaphroditism, and premenstrual syndrome.

[0436] The recitation of “Musculoskeletal” in the “Preferred Indication” column indicates that the corresponding nucleic acid and protein, or antibody against the same, of the invention (or fragment or variant thereof), may be used for example, to diagnose, treat, prevent, and/or ameliorate diseases and/or disorders relating to neoplastic diseases (e.g., as described below under “Hyperproliferative Disorders”), and disorders of the immune system (e.g., as described below under “Immune Activity”).

[0437] In specific embodiments, a protein, nucleic acid, or antibody of the invention (or fragment or variant thereof) having a “Musculoskeletal” recitation in the “Preferred Indication” column of Table 1D, may be used for example, to diagnose, treat, prevent, and/or ameliorate a disease or disorder selected from the group consisting of: bone cancers (e.g., osteochondromas, benign chondromas, chondroblastoma, chondromyxoid fibromas, osteoid osteomas, giant cell tumors, multiple myeloma, osteosarcomas), Paget's Disease, rheumatoid arthritis, systemic lupus erythematosus, osteomyelitis, Lyme Disease, gout, bursitis, tendonitis, osteoporosis, osteoarthritis, muscular dystrophy, mitochondrial myopathy, cachexia, and multiple sclerosis.

[0438] The recitation of “Cardiovascular” in the “Preferred Indication” column indicates that the corresponding nucleic acid and protein, or antibody against the same, of the invention (or fragment or variant thereof), may be used for example, to diagnose, treat, prevent, and/or ameliorate diseases and/or disorders relating to neoplastic diseases (e.g., as described below under “Hyperproliferative Disorders”), and disorders of the cardiovascular system (e.g., as described below under “Cardiovascular Disorders”).

[0439] In specific embodiments, a protein, nucleic acid, or antibody of the invention (or fragment or variant thereof) having a “Cardiovascular” recitation in the “Preferred Indication” column of Table 1D, may be used for example, to diagnose, treat, prevent, and/or ameliorate a disease or disorder selected from the group consisting of: myxomas, fibromas, rhabdomyomas, cardiovascular abnormalities (e.g., congenital heart defects, cerebral arteriovenous malformations, septal defects), heart disease (e.g., heart failure, congestive heart disease, arrhythmia, tachycardia, fibrillation, pericardial Disease, endocarditis), cardiac arrest, heart valve disease (e.g., stenosis, regurgitation, prolapse), vascular disease (e.g., hypertension, coronary artery disease, angina, aneurysm, arteriosclerosis, peripheral vascular disease), hyponatremia, hypematremia, hypokalemia, and hyperkalemia.

[0440] The recitation of “Mixed Fetal” in the “Preferred Indication” column indicates that the corresponding nucleic acid and protein, or antibody against the same, of the invention (or fragment or variant thereof), may be used for example, to diagnose, treat, prevent, and/or ameliorate diseases and/or disorders relating to neoplastic diseases (e.g., as described below under “Hyperproliferative Disorders”).

[0441] In specific embodiments, a protein, nucleic acid, or antibody of the invention (or fragment or variant thereof) having a “Mixed Fetal” recitation in the “Preferred Indication” column of Table 1D, may be used for example, to diagnose, treat, prevent, and/or ameliorate a disease or disorder selected from the group consisting of: spina bifida, hydranencephaly, neurofibromatosis, fetal alcohol syndrome, diabetes mellitus, PKU, Down's syndrome, Patau syndrome, Edwards syndrome, Turner syndrome, Apert syndrome, Carpenter syndrome, Conradi syndrome, Crouzon syndrome, cutis laxa, Cornelia de Lange syndrome, Ellis-van Creveld syndrome, Holt-Oram syndrome, Kartagener syndrome, Meckel-Gruber syndrome, Noonan syndrome, Pallister-Hall syndrome, Rubinstein-Taybi syndrome, Scimitar syndrome, Smith-Lemli-Opitz syndrome, thromocytopenia-absent radius (TAR) syndrome, Treacher Collins syndrome, Williams syndrome, Hirschsprung's disease, Meckel's diverticulum, polycystic kidney disease, Turner's syndrome, and gonadal dysgenesis, Klippel-Feil syndrome, Ostogenesis imperfecta, muscular dystrophy, Tay-Sachs disease, Wilm's tumor, neuroblastoma, and retinoblastoma.

[0442] The recitation of “Excretory” in the “Preferred Indication” column indicates that the corresponding nucleic acid and protein, or antibody against the same, of the invention (or fragment or variant thereof), may be used for example, to diagnose, treat, prevent, and/or ameliorate diseases and/or disorders relating to neoplastic diseases (e.g., as described below under “Hyperproliferative Disorders”) and renal disorders (e.g., as described below under “Renal Disorders”).

[0443] In specific embodiments, a protein, nucleic acid, or antibody of the invention (or fragment or variant thereof) having a “Excretory” recitation in the “Preferred Indication” column of Table 1D, may be used for example, to diagnose, treat, prevent, and/or ameliorate a disease or disorder selected from the group consisting of: bladder cancer, prostate cancer, benign prostatic hyperplasia, bladder disorders (e.g., urinary incontinence, urinary retention, urinary obstruction, urinary tract Infections, interstitial cystitis, prostatitis, neurogenic bladder, hematuria), renal disorders (e.g., hydronephrosis, proteinuria, renal failure, pyelonephritis, urolithiasis, reflux nephropathy, and unilateral obstructive uropathy).

[0444] The recitation of “Neural/Sensory” in the “Preferred Indication” column indicates that the corresponding nucleic acid and protein, or antibody against the same, of the invention (or fragment or variant thereof), may be used for example, to diagnose, treat, prevent, and/or ameliorate diseases and/or disorders relating to neoplastic diseases (e.g., as described below under “Hyperproliferative Disorders”) and diseases or disorders of the nervous system (e.g., as described below under “Neural Activity and Neurological Diseases”).

[0445] In specific embodiments, a protein, nucleic acid, or antibody of the invention (or fragment or variant thereof) having a “Neural/Sensory” recitation in the “Preferred Indication” column of Table 1D, may be used for example, to diagnose, treat, prevent, and/or ameliorate a disease or disorder selected from the group consisting of: brain cancer (e.g., brain stem glioma, brain tumors, central nervous system (Primary) lymphoma, central nervous system lymphoma, cerebellar astrocytoma, and cerebral astrocytoma, neurodegenerative disorders (e.g., Alzheimer's Disease, Creutzfeldt-Jakob Disease, Parkinson's Disease, and Idiopathic Presenile Dementia), encephalomyelitis, cerebral malaria, meningitis, metabolic brain diseases (e.g., phenylketonuria and pyruvate carboxylase deficiency), cerebellar ataxia, ataxia telangiectasia, and AIDS Dementia Complex, schizophrenia, attention deficit disorder, hyperactive attention deficit disorder, autism, and obsessive compulsive disorders.

[0446] The recitation of “Respiratory” in the “Preferred Indication” column indicates that the corresponding nucleic acid and protein, or antibody against the same, of the invention (or fragment or variant thereof), may be used for example, to diagnose, treat, prevent, and/or ameliorate diseases and/or disorders relating to neoplastic diseases (e.g., as described below under “Hyperproliferative Disorders”) and diseases or disorders of the respiratory system (e.g., as described below under “Respiratory Disorders”).

[0447] In specific embodiments, a protein, nucleic acid, or antibody of the invention (or fragment or variant thereof) having a “Respiratory” recitation in the “Preferred Indication” column of Table 1D, may be used for example, to diagnose, treat, prevent, and/or ameliorate a disease or disorder selected from the group consisting of: cancers of the respiratory system such as larynx cancer, pharynx cancer, trachea cancer, epiglottis cancer, lung cancer, squamous cell carcinomas, small cell (oat cell) carcinomas, large cell carcinomas, and adenocarcinomas. Allergic reactions, cystic fibrosis, sarcoidosis, histiocytosis X, infiltrative lung diseases (e.g., pulmonary fibrosis and lymphoid interstitial pneumonia), obstructive airway diseases (e.g., asthma, emphysema, chronic or acute bronchitis), occupational lung diseases (e.g., silicosis and asbestosis), pneumonia, and pleurisy.

[0448] The recitation of “Endocrine” in the “Preferred Indication” column indicates that the corresponding nucleic acid and protein, or antibody against the same, of the invention (or fragment or variant thereof), may be used for example, to diagnose, treat, prevent, and/or ameliorate diseases and/or disorders relating to neoplastic diseases (e.g., as described below under “Hyperproliferative Disorders”) and diseases or disorders of the respiratory system (e.g., as described below under “Respiratory Disorders”), renal disorders (e.g., as described below under “Renal Disorders”), and disorders of the endocrine system (e.g., as described below under “Endocrine Disorders”.

[0449] In specific embodiments, a protein, nucleic acid, or antibody of the invention (or fragment or variant thereof) having an “Endocrine” recitation in the “Preferred Indication” column of Table 1D, may be used for example, to diagnose, treat, prevent, and/or ameliorate a disease or disorder selected from the group consisting of: cancers of endocrine tissues and organs (e.g., cancers of the hypothalamus, pituitary gland, thyroid gland, parathyroid glands, pancreas, adrenal glands, ovaries, and testes), diabetes (e.g., diabetes insipidus, type I and type II diabetes mellitus), obesity, disorders related to pituitary glands (e.g., hyperpituitarism, hypopituitarism, and pituitary dwarfism), hypothyroidism, hyperthyroidism, goiter, reproductive disorders (e.g. male and female infertility), disorders related to adrenal glands (e.g., Addison's Disease, corticosteroid deficiency, and Cushing's Syndrome), kidney cancer (e.g., hypemephroma, transitional cell cancer, and Wilm's tumor), diabetic nephropathy, interstitial nephritis, polycystic kidney disease, glomerulonephritis (e.g., IgM mesangial proliferative glomerulonephritis and glomerulonephritis caused by autoimmune disorders; such as Goodpasture's syndrome), and nephrocalcinosis.

[0450] The recitation of “Digestive” in the “Preferred Indication” column indicates that the corresponding nucleic acid and protein, or antibody against the same, of the invention (or fragment or variant thereof), may be used for example, to diagnose, treat, prevent, and/or ameliorate diseases and/or disorders relating to neoplastic diseases (e.g., as described below under “Hyperproliferative Disorders”) and diseases or disorders of the gastrointestinal system (e.g., as described below under “Gastrointestinal Disorders”.

[0451] In specific embodiments, a protein, nucleic acid, or antibody of the invention (or fragment or variant thereof) having a “Digestive” recitation in the “Preferred Indication” column of Table 1D, may be used for example, to diagnose, treat, prevent, and/or ameliorate a disease or disorder selected from the group consisting of: ulcerative colitis, appendicitis, Crohn's disease, hepatitis, hepatic encephalopathy, portal hypertension, cholelithiasis, cancer of the digestive system (e.g., biliary tract cancer, stomach cancer, colon cancer, gastric cancer, pancreatic cancer, cancer of the bile duct, tumors of the colon (e.g., polyps or cancers), and cirrhosis), pancreatitis, ulcerative disease, pyloric stenosis, gastroenteritis, gastritis, gastric atropy, benign tumors of the duodenum, distension, irritable bowel syndrome, malabsorption, congenital disorders of the small intestine, bacterial and parasitic infection, megacolon, Hirschsprung's disease, aganglionic megacolon, acquired megacolon, colitis, anorectal disorders (e.g., anal fistulas, hemorrhoids), congenital disorders of the liver (e.g., Wilson's disease, hemochromatosis, cystic fibrosis, biliary atresia, and alpha1-antitrypsin deficiency), portal hypertension, cholelithiasis, and jaundice.

[0452] The recitation of “Connective/Epithelial” in the “Preferred Indication” column indicates that the corresponding nucleic acid and protein, or antibody against the same, of the invention (or fragment or variant thereof), may be used for example, to diagnose, treat, prevent, and/or ameliorate diseases and/or disorders relating to neoplastic diseases (e.g., as described below under “Hyperproliferative Disorders”), cellular and genetic abnormalities (e.g., as described below under “Diseases at the Cellular Level”), angiogenesis (e.g., as described below under “Anti-Angiogenesis Activity”), and or to promote or inhibit regeneration (e.g., as described below under “Regeneration”), and wound healing (e.g., as described below under “Wound Healing and Epithelial Cell Proliferation”).

[0453] In specific embodiments, a protein, nucleic acid, or antibody of the invention (or fragment or variant thereof) having a “Connective/Epithelial” recitation in the “Preferred Indication” column of Table 1D, may be used for example, to diagnose, treat, prevent, and/or ameliorate a disease or disorder selected from the group consisting of: connective tissue metaplasia, mixed connective tissue disease, focal epithelial hyperplasia, epithelial metaplasia, mucoepithelial dysplasia, graft v. host disease, polymyositis, cystic hyperplasia, cerebral dysplasia, tissue hypertrophy, Alzheimer's disease, lymphoproliferative disorder, Waldenstron's macroglobulinemia, Crohn's disease, pernicious anemia, idiopathic Addison's disease, glomerulonephritis, bullous pemphigoid, Sjogren's syndrome, diabetes mellitus, cystic fibrosis, osteoblastoma, osteoclastoma, osteosarcoma, chondrosarcoma, osteoporosis, osteocarthritis, periodontal disease, wound healing, relapsing polychondritis, vasculitis, polyarteritis nodosa, Wegener's granulomatosis, cellulitis, rheumatoid arthritis, psoriatic arthritis, discoid lupus erythematosus, systemic lupus erythematosus, scleroderma, CREST syndrome, Sjogren's syndrome, polymyositis, dermatomyositis, mixed connective tissue disease, relapsing polychondritis, vasculitis, Henoch-Schonlein syndrome, erythema nodosum, polyarteritis nodosa, temporal (giant cell) arteritis, Takayasu's arteritis, Wegener's granulomatosis, Reiter's syndrome, Behcet's syndrome, ankylosing spondylitis, cellulitis, keloids, Ehler Danlos syndrome, Marfan syndrome, pseudoxantoma elasticum, osteogenese imperfecta, chondrodysplasias, epidermolysis bullosa, Alport syndrome, and cutis laxa.

[0454] Table 1E also provides information regarding biological activities and preferred therapeutic uses (i.e. see, “Preferred Indications” column) for polynucleotides and polypeptides of the invention (including antibodies, agonists, and/or antagonists thereof). Table 1E also provides information regarding assays which may be used to test polynucleotides and polypeptides of the invention (including antibodies, agonists, and/or antagonists thereof) for the corresponding biological activities. The first column (“Gene No.”) provides the gene number in the application for each clone identifier. The second column (“cDNA ATCC Deposit No:Z”) provides the unique clone identifier for each clone as previously described and indicated in Tables 1A, 1B, 1C, and 1D. The third column (“AA SEQ ID NO:Y”) indicates the Sequence Listing SEQ ID Number for polypeptide sequences encoded by the corresponding cDNA clones (also as indicated in Tables 1A, 1B, and 2). The fourth column (“Biological Activity”) indicates a biological activity corresponding to the indicated polypeptides (or polynucleotides encoding said polypeptides). The fifth column (“Exemplary Activity Assay”) further describes the corresponding biological activity and also provides information pertaining to the various types of assays which may be performed to test, demonstrate, or quantify the corresponding biological activity. The sixth column (“Preferred Indications”) describes particular embodiments of the invention as well as indications (e.g. pathologies, diseases, disorders, abnormalities, etc.) for which polynucleotides and polypeptides of the invention (including antibodies, agonists, and/or antagonists thereof) may be used in detecting, diagnosing, preventing, and/or treating.

[0455] The present invention is further directed to antibody-based therapies which involve administering antibodies of the invention to an animal, preferably a mammal, and most preferably a human, patient for treating one or more of the disclosed diseases, disorders, or conditions. Therapeutic compounds of the invention include, but are not limited to, antibodies of the invention (including fragments, analogs and derivatives thereof as described herein) and nucleic acids encoding antibodies of the invention (including fragments, analogs and derivatives thereof and anti-idiotypic antibodies as described herein). The antibodies of the invention can be used to treat, inhibit or prevent diseases, disorders or conditions associated with aberrant expression and/or activity of a polypeptide of the invention, including, but not limited to, any one or more of the diseases, disorders, or conditions described herein. The treatment and/or prevention of diseases, disorders, or conditions associated with aberrant expression and/or activity of a polypeptide of the invention includes, but is not limited to, alleviating symptoms associated with those diseases, disorders or conditions. Antibodies of the invention may be provided in pharmaceutically acceptable compositions as known in the art or as described herein.

[0456] In a specific and preferred embodiment, the present invention is directed to antibody-based therapies which involve administering antibodies of the invention to an animal, preferably a mammal, and most preferably a human, patient for treating one or more diseases, disorders, or conditions, including but not limited to: neural disorders, immune system disorders, muscular disorders, reproductive disorders, gastrointestinal disorders, pulmonary disorders, cardiovascular disorders, renal disorders, proliferative disorders, and/or cancerous diseases and conditions., and/or as described elsewhere herein. Therapeutic compounds of the invention include, but are not limited to, antibodies of the invention (e.g., antibodies directed to the full length protein expressed on the cell surface of a mammalian cell; antibodies directed to an epitope of a polypeptide of the invention (such as, for example, a predicted linear epitope shown in column 7 of Table 1B.1; or a conformational epitope, including fragments, analogs and derivatives thereof as described herein) and nucleic acids encoding antibodies of the invention (including fragments, analogs and derivatives thereof and anti-idiotypic antibodies as described herein). The antibodies of the invention can be used to treat, inhibit or prevent diseases, disorders or conditions associated with aberrant expression and/or activity of a polypeptide of the invention, including, but not limited to, any one or more of the diseases, disorders, or conditions described herein. The treatment and/or prevention of diseases, disorders, or conditions associated with aberrant expression and/or activity of a polypeptide of the invention includes, but is not limited to, alleviating symptoms associated with those diseases, disorders or conditions. Antibodies of the invention may be provided in pharmaceutically acceptable compositions as known in the art or as described herein.

[0457] A summary of the ways in which the antibodies of the present invention may be used therapeutically includes binding polynucleotides or polypeptides of the present invention locally or systemically in the body or by direct cytotoxicity of the antibody, e.g. as mediated by complement (CDC) or by effector cells (ADCC). Some of these approaches are described in more detail below. Armed with the teachings provided herein, one of ordinary skill in the art will know how to use the antibodies of the present invention for diagnostic, monitoring or therapeutic purposes without undue experimentation.

[0458] The antibodies of this invention may be advantageously utilized in combination with other monoclonal or chimeric antibodies, or with lymphokines or hematopoietic growth factors (such as, e.g., IL-2, IL-3 and IL-7), for example, which serve to increase the number or activity of effector cells which interact with the antibodies.

[0459] The antibodies of the invention may be administered alone or in combination with other types of treatments (e.g., radiation therapy, chemotherapy, hormonal therapy, immunotherapy and anti-tumor agents). Generally, administration of products of a species origin or species reactivity (in the case of antibodies) that is the same species as that of the patient is preferred. Thus, in a preferred embodiment, human antibodies, fragments derivatives, analogs, or nucleic acids, are administered to a human patient for therapy or prophylaxis.

[0460] It is preferred to use high affinity and/or potent in vivo inhibiting and/or neutralizing antibodies against polypeptides or polynucleotides of the present invention, fragments or regions thereof, for both immunoassays directed to and therapy of disorders related to polynucleotides or polypeptides, including fragments thereof, of the present invention. Such antibodies, fragments, or regions, will preferably have an affinity for polynucleotides or polypeptides of the invention, including fragments thereof. Preferred binding affinities include those with a dissociation constant or Kd less than 5×10⁻² M, 10⁻² M, 5×10⁻³ M, 10⁻³ M, 5×10⁻⁴ M, 10⁻⁴ M, 5×10⁻⁵ M, 10⁻⁵ M, 5×10⁻⁶ M, 10⁻⁶ M, 5×10⁻⁷ M, 10⁻⁷ M, 5×10⁻⁸ M, 10⁻⁸ M, 5×10⁻⁹ M, 10⁻⁹ M, 5×10⁻¹⁰ M, 10⁻¹⁰ M, 5×10⁻¹¹ M, 10⁻¹¹ M, 5×10⁻¹² M, 10⁻¹² M, 5×10⁻¹³ M, 10⁻¹³ M, 5×10⁻¹⁴ M, 10⁻¹⁴ M, 5×10⁻¹⁵ M, and 10⁻¹⁵ M.

Gene Therapy

[0461] In a specific embodiment, nucleic acids comprising sequences encoding antibodies or functional derivatives thereof, are administered to treat, inhibit or prevent a disease or disorder associated with aberrant expression and/or activity of a polypeptide of the invention, by way of gene therapy. Gene therapy refers to therapy performed by the administration to a subject of an expressed or expressible nucleic acid. In this embodiment of the invention, the nucleic acids produce their encoded protein that mediates a therapeutic effect.

[0462] Any of the methods for gene therapy available in the art can be used according to the present invention. Exemplary methods are described below.

[0463] For general reviews of the methods of gene therapy, see Goldspiel et al., Clinical Pharmacy 12:488-505 (1993); Wu and Wu, Biotherapy 3:87-95 (1991); Tolstoshev, Ann. Rev. Pharmacol. Toxicol. 32:573-596 (1993); Mulligan, Science 260:926-932 (1993); and Morgan and Anderson, Ann. Rev. Biochem. 62:191-217 (1993); May, TIBTECH 11(5):155-215 (1993). Methods commonly known in the art of recombinant DNA technology which can be used are described in Ausubel et al. (eds.), Current Protocols in Molecular Biology, John Wiley & Sons, NY (1993); and Kriegler, Gene Transfer and Expression, A Laboratory Manual, Stockton Press, NY (1990).

[0464] In a preferred embodiment, the compound comprises nucleic acid sequences encoding an antibody, said nucleic acid sequences being part of expression vectors that express the antibody or fragments or chimeric proteins or heavy or light chains thereof in a suitable host. In particular, such nucleic acid sequences have promoters operably linked to the antibody coding region, said promoter being inducible or constitutive, and, optionally, tissue-specific. In another particular embodiment, nucleic acid molecules are used in which the antibody coding sequences and any other desired sequences are flanked by regions that promote homologous recombination at a desired site in the genome, thus providing for intrachromosomal expression of the antibody encoding nucleic acids (Koller and Smithies, Proc. Natl. Acad. Sci. USA 86:8932-8935 (1989); Zijlstra et al., Nature 342:435-438 (1989). In specific embodiments, the expressed antibody molecule is a single chain antibody; alternatively, the nucleic acid sequences include sequences encoding both the heavy and light chains, or fragments thereof, of the antibody.

[0465] Delivery of the nucleic acids into a patient may be either direct, in which case the patient is directly exposed to the nucleic acid or nucleic acid-carrying vectors, or indirect, in which case, cells are first transformed with the nucleic acids in vitro, then transplanted into the patient. These two approaches are known, respectively, as in vivo or ex vivo gene therapy.

[0466] In a specific embodiment, the nucleic acid sequences are directly administered in vivo, where it is expressed to produce the encoded product. This can be accomplished by any of numerous methods known in the art, e.g., by constructing them as part of an appropriate nucleic acid expression vector and administering it so that they become intracellular, e.g., by infection using defective or attenuated retrovirals or other viral vectors (see U.S. Pat. No. 4,980,286), or by direct injection of naked DNA, or by use of microparticle bombardment (e.g., a gene gun; Biolistic, Dupont), or coating with lipids or cell-surface receptors or transfecting agents, encapsulation in liposomes, microparticles, or microcapsules, or by administering them in linkage to a peptide which is known to enter the nucleus, by administering it in linkage to a ligand subject to receptor-mediated endocytosis (see, e.g., Wu and Wu, J. Biol. Chem. 262:4429-4432 (1987)) (which can be used to target cell types specifically expressing the receptors), etc. In another embodiment, nucleic acid-ligand complexes can be formed in which the ligand comprises a fusogenic viral peptide to disrupt endosomes, allowing the nucleic acid to avoid lysosomal degradation. In yet another embodiment, the nucleic acid can be targeted in vivo for cell specific uptake and expression, by targeting a specific receptor (see, e.g., PCT Publications WO 92/06180; WO 92/22635; WO92/20316; WO93/14188, WO 93/20221). Alternatively, the nucleic acid can be introduced intracellularly and incorporated within host cell DNA for expression, by homologous recombination (Koller and Smithies, Proc. Natl. Acad. Sci. USA 86:8932-8935 (1989); Zijlstra et al., Nature 342:435-438 (1989)).

[0467] In a specific embodiment, viral vectors that contains nucleic acid sequences encoding an antibody of the invention are used. For example, a retroviral vector can be used (see Miller et al., Meth. Enzymol. 217:581-599 (1993)). These retroviral vectors contain the components necessary for the correct packaging of the viral genome and integration into the host cell DNA. The nucleic acid sequences encoding the antibody to be used in gene therapy are cloned into one or more vectors, which facilitates delivery of the gene into a patient. More detail about retroviral vectors can be found in Boesen et al., Biotherapy 6:291-302 (1994), which describes the use of a retroviral vector to deliver the mdr1 gene to hematopoietic stem cells in order to make the stem cells more resistant to chemotherapy. Other references illustrating the use of retroviral vectors in gene therapy are: Clowes et al., J. Clin. Invest. 93:644-651 (1994); Kiem et al., Blood 83:1467-1473 (1994); Salmons and Gunzberg, Human Gene Therapy 4:129-141 (1993); and Grossman and Wilson, Curr. Opin. in Genetics and Devel. 3:110-114 (1993).

[0468] Adenoviruses are other viral vectors that can be used in gene therapy. Adenoviruses are especially attractive vehicles for delivering genes to respiratory epithelia. Adenoviruses naturally infect respiratory epithelia where they cause a mild disease. Other targets for adenovirus-based delivery systems are liver, the central nervous system, endothelial cells, and muscle. Adenoviruses have the advantage of being capable of infecting non-dividing cells. Kozarsky and Wilson, Current Opinion in Genetics and Development 3:499-503 (1993) present a review of adenovirus-based gene therapy. Bout et al., Human Gene Therapy 5:3-10 (1994) demonstrated the use of adenovirus vectors to transfer genes to the respiratory epithelia of rhesus monkeys. Other instances of the use of adenoviruses in gene therapy can be found in Rosenfeld et al., Science 252:431-434 (1991); Rosenfeld et al., Cell 68:143-155 (1992); Mastrangeli et al., J. Clin. Invest. 91:225-234 (1993); PCT Publication WO94/12649; and Wang, et al., Gene Therapy 2:775-783 (1995). In a preferred embodiment, adenovirus vectors are used.

[0469] Adeno-associated virus (AAV) has also been proposed for use in gene therapy (Walsh et al., Proc. Soc. Exp. Biol. Med. 204:289-300 (1993); U.S. Pat. No. 5,436,146).

[0470] Another approach to gene therapy involves transferring a gene to cells in tissue culture by such methods as electroporation, lipofection, calcium phosphate mediated transfection, or viral infection. Usually, the method of transfer includes the transfer of a selectable marker to the cells. The cells are then placed under selection to isolate those cells that have taken up and are expressing the transferred gene. Those cells are then delivered to a patient.

[0471] In this embodiment, the nucleic acid is introduced into a cell prior to administration in vivo of the resulting recombinant cell. Such introduction can be carried out by any method known in the art, including but not limited to transfection, electroporation, microinjection, infection with a viral or bacteriophage vector containing the nucleic acid sequences, cell fusion, chromosome-mediated gene transfer, microcell-mediated gene transfer, spheroplast fusion, etc. Numerous techniques are known in the art for the introduction of foreign genes into cells (see, e.g., Loeffler and Behr, Meth. Enzymol. 217:599-618 (1993); Cohen et al., Meth. Enzymol. 217:618-644 (1993); Cline, Pharmac. Ther. 29:69-92m (1985) and may be used in accordance with the present invention, provided that the necessary developmental and physiological functions of the recipient cells are not disrupted. The technique should provide for the stable transfer of the nucleic acid to the cell, so that the nucleic acid is expressible by the cell and preferably heritable and expressible by its cell progeny.

[0472] The resulting recombinant cells can be delivered to a patient by various methods known in the art. Recombinant blood cells (e.g., hematopoietic stem or progenitor cells) are preferably administered intravenously. The amount of cells envisioned for use depends on the desired effect, patient state, etc., and can be determined by one skilled in the art.

[0473] Cells into which a nucleic acid can be introduced for purposes of gene therapy encompass any desired, available cell type, and include but are not limited to epithelial cells, endothelial cells, keratinocytes, fibroblasts, muscle cells, hepatocytes; blood cells such as T lymphocytes, B lymphocytes, monocytes, macrophages, neutrophils, eosinophils, megakaryocytes, granulocytes; various stem or progenitor cells, in particular hematopoietic stem or progenitor cells, e.g., as obtained from bone marrow, umbilical cord blood, peripheral blood, fetal liver, etc.

[0474] In a preferred embodiment, the cell used for gene therapy is autologous to the patient.

[0475] In an embodiment in which recombinant cells are used in gene therapy, nucleic acid sequences encoding an antibody are introduced into the cells such that they are expressible by the cells or their progeny, and the recombinant cells are then administered in vivo for therapeutic effect. In a specific embodiment, stem or progenitor cells are used. Any stem and/or progenitor cells which can be isolated and maintained in vitro can potentially be used in accordance with this embodiment of the present invention (see e.g. PCT Publication WO 94/08598; Stemple and Anderson, Cell 71:973-985 (1992); Rheinwald, Meth. Cell Bio. 21A:229 (1980); and Pittelkow and Scott, Mayo Clinic Proc. 61:771 (1986)).

[0476] In a specific embodiment, the nucleic acid to be introduced for purposes of gene therapy comprises an inducible promoter operably linked to the coding region, such that expression of the nucleic acid is controllable by the presence or absence of an appropriate inducer of transcription.

Demonstration of Therapeutic or Prophylactic Activity

[0477] The compounds or pharmaceutical compositions of the invention are preferably tested in vitro, and then in vivo for the desired therapeutic or prophylactic activity, prior to use in humans. For example, in vitro assays to demonstrate the therapeutic or prophylactic utility of a compound or pharmaceutical composition include, the effect of a compound on a cell line or a patient tissue sample. The effect of the compound or composition on the cell line and/or tissue sample can be determined utilizing techniques known to those of skill in the art including, but not limited to, rosette formation assays and cell lysis assays. In accordance with the invention, in vitro assays which can be used to determine whether administration of a specific compound is indicated, include in vitro cell culture assays in which a patient tissue sample is grown in culture, and exposed to or otherwise administered a compound, and the effect of such compound upon the tissue sample is observed.

Therapeutic/Prophylactic Administration and Composition

[0478] The invention provides methods of treatment, inhibition and prophylaxis by administration to a subject of an effective amount of a compound or pharmaceutical composition of the invention, preferably a polypeptide or antibody of the invention. In a preferred embodiment, the compound is substantially purified (e.g., substantially free from substances that limit its effect or produce undesired side-effects). The subject is preferably an animal, including but not limited to animals such as cows, pigs, horses, chickens, cats, dogs, etc., and is preferably a mammal, and most preferably human.

[0479] Formulations and methods of administration that can be employed when the compound comprises a nucleic acid or an immunoglobulin are described above; additional appropriate formulations and routes of administration can be selected from among those described herein below.

[0480] Various delivery systems are known and can be used to administer a compound of the invention, e.g., encapsulation in liposomes, microparticles, microcapsules, recombinant cells capable of expressing the compound, receptor-mediated endocytosis (see, e.g., Wu and Wu, J. Biol. Chem. 262:4429-4432 (1987)), construction of a nucleic acid as part of a retroviral or other vector, etc. Methods of introduction include but are not limited to intradermal, intramuscular, intraperitoneal, intravenous, subcutaneous, intranasal, epidural, and oral routes. The compounds or compositions may be administered by any convenient route, for example by infusion or bolus injection, by absorption through epithelial or mucocutaneous linings (e.g., oral mucosa, rectal and intestinal mucosa, etc.) and may be administered together with other biologically active agents. Administration can be systemic or local. In addition, it may be desirable to introduce the pharmaceutical compounds or compositions of the invention into the central nervous system by any suitable route, including intraventricular and intrathecal injection; intraventricular injection may be facilitated by an intraventricular catheter, for example, attached to a reservoir, such as an Ommaya reservoir. Pulmonary administration can also be employed, e.g., by use of an inhaler or nebulizer, and formulation with an aerosolizing agent.

[0481] In a specific embodiment, it may be desirable to administer the pharmaceutical compounds or compositions of the invention locally to the area in need of treatment; this may be achieved by, for example, and not by way of limitation, local infusion during surgery, topical application, e.g., in conjunction with a wound dressing after surgery, by injection, by means of a catheter, by means of a suppository, or by means of an implant, said implant being of a porous, non-porous, or gelatinous material, including membranes, such as sialastic membranes, or fibers. Preferably, when administering a protein, including an antibody, of the invention, care must be taken to use materials to which the protein does not absorb.

[0482] In another embodiment, the compound or composition can be delivered in a vesicle, in particular a liposome (see Langer, Science 249:1527-1533 (1990); Treat et al., in Liposomes in the Therapy of Infectious Disease and Cancer, Lopez-Berestein and Fidler (eds.), Liss, New York, pp. 353-365 (1989); Lopez-Berestein, ibid., pp. 317-327; see generally ibid.)

[0483] In yet another embodiment, the compound or composition can be delivered in a controlled release system. In one embodiment, a pump may be used (see Langer, supra; Sefton, CRC Crit. Ref. Biomed. Eng. 14:201 (1987); Buchwald et al., Surgery 88:507 (1980); Saudek et al., N. Engl. J. Med. 321:574 (1989)). In another embodiment, polymeric materials can be used (see Medical Applications of Controlled Release, Langer and Wise (eds.), CRC Pres., Boca Raton, Fla. (1974); Controlled Drug Bioavailability, Drug Product Design and Performance, Smolen and Ball (eds.), Wiley, New York (1984); Ranger and Peppas, J., Macromol. Sci. Rev. Macromol. Chem. 23:61 (1983); see also Levy et al., Science 228:190 (1985); During et al., Ann. Neurol. 25:351 (1989); Howard et al., J. Neurosurg. 71:105 (1989)). In yet another embodiment, a controlled release system can be placed in proximity of the therapeutic target, e.g., the brain, thus requiring only a fraction of the systemic dose (see, e.g., Goodson, in Medical Applications of Controlled Release, supra, vol. 2, pp. 115-138 (1984)).

[0484] Other controlled release systems are discussed in the review by Langer (Science 249:1527-1533 (1990)).

[0485] In a specific embodiment where the compound of the invention is a nucleic acid encoding a protein, the nucleic acid can be administered in vivo to promote expression of its encoded protein, by constructing it as part of an appropriate nucleic acid expression vector and administering it so that it becomes intracellular, e.g., by use of a retroviral vector (see U.S. Pat. No. 4,980,286), or by direct injection, or by use of microparticle bombardment (e.g., a gene gun; Biolistic, Dupont), or coating with lipids or cell-surface receptors or transfecting agents, or by administering it in linkage to a homeobox-like peptide which is known to enter the nucleus (see e.g., Joliot et al., Proc. Natl. Acad. Sci. USA 88:1864-1868 (1991)), etc. Alternatively, a nucleic acid can be introduced intracellularly and incorporated within host cell DNA for expression, by homologous recombination.

[0486] The present invention also provides pharmaceutical compositions. Such compositions comprise a therapeutically effective amount of a compound, and a pharmaceutically acceptable carrier. In a specific embodiment, the term “pharmaceutically acceptable” means approved by a regulatory agency of the Federal or a state government or listed in the U.S. Pharmacopeia or other generally recognized pharmacopeia for use in animals, and more particularly in humans. The term “carrier” refers to a diluent, adjuvant, excipient, or vehicle with which the therapeutic is administered. Such pharmaceutical carriers can be sterile liquids, such as water and oils, including those of petroleum, animal, vegetable or synthetic origin, such as peanut oil, soybean oil, mineral oil, sesame oil and the like. Water is a preferred carrier when the pharmaceutical composition is administered intravenously. Saline solutions and aqueous dextrose and glycerol solutions can also be employed as liquid carriers, particularly for injectable solutions. Suitable pharmaceutical excipients include starch, glucose, lactose, sucrose, gelatin, malt, rice, flour, chalk, silica gel, sodium stearate, glycerol monostearate, talc, sodium chloride, dried skim milk, glycerol, propylene, glycol, water, ethanol and the like. The composition, if desired, can also contain minor amounts of wetting or emulsifying agents, or pH buffering agents. These compositions can take the form of solutions, suspensions, emulsion, tablets, pills, capsules, powders, sustained-release formulations and the like. The composition can be formulated as a suppository, with traditional binders and carriers such as triglycerides. Oral formulation can include standard carriers such as pharmaceutical grades of mannitol, lactose, starch, magnesium stearate, sodium saccharine, cellulose, magnesium carbonate, etc. Examples of suitable pharmaceutical carriers are described in “Remington's Pharmaceutical Sciences” by E. W. Martin. Such compositions will contain a therapeutically effective amount of the compound, preferably in purified form, together with a suitable amount of carrier so as to provide the form for proper administration to the patient. The formulation should suit the mode of administration.

[0487] In a preferred embodiment, the composition is formulated in accordance with routine procedures as a pharmaceutical composition adapted for intravenous administration to human beings. Typically, compositions for intravenous administration are solutions in sterile isotonic aqueous buffer. Where necessary, the composition may also include a solubilizing agent and a local anesthetic such as lignocaine to ease pain at the site of the injection. Generally, the ingredients are supplied either separately or mixed together in unit dosage form, for example, as a dry lyophilized powder or water free concentrate in a hermetically sealed container such as an ampoule or sachette indicating the quantity of active agent. Where the composition is to be administered by infusion, it can be dispensed with an infusion bottle containing sterile pharmaceutical grade water or saline. Where the composition is administered by injection, an ampoule of sterile water for injection or saline can be provided so that the ingredients may be mixed prior to administration.

[0488] The compounds of the invention can be formulated as neutral or salt forms. Pharmaceutically acceptable salts include those formed with anions such as those derived from hydrochloric, phosphoric, acetic, oxalic, tartaric acids, etc., and those formed with cations such as those derived from sodium, potassium, ammonium, calcium, ferric hydroxides, isopropylamine, triethylamine, 2-ethylamino ethanol, histidine, procaine, etc.

[0489] The amount of the compound of the invention which will be effective in the treatment, inhibition and prevention of a disease or disorder associated with aberrant expression and/or activity of a polypeptide of the invention can be determined by standard clinical techniques. In addition, in vitro assays may optionally be employed to help identify optimal dosage ranges. The precise dose to be employed in the formulation will also depend on the route of administration, and the seriousness of the disease or disorder, and should be decided according to the judgment of the practitioner and each patient's circumstances. Effective doses may be extrapolated from dose-response curves derived from in vitro or animal model test systems.

[0490] For antibodies, the dosage administered to a patient is typically 0.1 mg/kg to 100 mg/kg of the patient's body weight. Preferably, the dosage administered to a patient is between 0.1 mg/kg and 20 mg/kg of the patient's body weight, more preferably 1 mg/kg to 10 mg/kg of the patient's body weight. Generally, human antibodies have a longer half-life within the human body than antibodies from other species due to the immune response to the foreign polypeptides. Thus, lower dosages of human antibodies and less frequent administration is often possible. Further, the dosage and frequency of administration of antibodies of the invention may be reduced by enhancing uptake and tissue penetration (e.g., into the brain) of the antibodies by modifications such as, for example, lipidation.

[0491] The invention also provides a pharmaceutical pack or kit comprising one or more containers filled with one or more of the ingredients of the pharmaceutical compositions of the invention. Optionally associated with such container(s) can be a notice in the form prescribed by a governmental agency regulating the manufacture, use or sale of pharmaceuticals or biological products, which notice reflects approval by the agency of manufacture, use or sale for human administration.

Diagnosis and Imaging

[0492] Labeled antibodies, and derivatives and analogs thereof, which specifically bind to a polypeptide of interest can be used for diagnostic purposes to detect, diagnose, or monitor diseases, disorders, and/or conditions associated with the aberrant expression and/or activity of a polypeptide of the invention. The invention provides for the detection of aberrant expression of a polypeptide of interest, comprising (a) assaying the expression of the polypeptide of interest in cells or body fluid of an individual using one or more antibodies specific to the polypeptide interest and (b) comparing the level of gene expression with a standard gene expression level, whereby an increase or decrease in the assayed polypeptide gene expression level compared to the standard expression level is indicative of aberrant expression.

[0493] The invention provides a diagnostic assay for diagnosing a disorder, comprising (a) assaying the expression of the polypeptide of interest in cells or body fluid of an individual using one or more antibodies specific to the polypeptide interest and (b) comparing the level of gene expression with a standard gene expression level, whereby an increase or decrease in the assayed polypeptide gene expression level compared to the standard expression level is indicative of a particular disorder. With respect to cancer, the presence of a relatively high amount of transcript in biopsied tissue from an individual may indicate a predisposition for the development of the disease, or may provide a means for detecting the disease prior to the appearance of actual clinical symptoms. A more definitive diagnosis of this type may allow health professionals to employ preventative measures or aggressive treatment earlier thereby preventing the development or further progression of the cancer.

[0494] Antibodies of the invention can be used to assay protein levels in a biological sample using classical immunohistological methods known to those of skill in the art (e.g., see Jalkanen et al., J. Cell. Biol. 101:976-985 (1985); Jalkanen et al., J. Cell. Biol. 105:3087-3096 (1987)). Other antibody-based methods useful for detecting protein gene expression include immunoassays, such as the enzyme linked immunosorbent assay (ELISA) and the radioimmunoassay (RIA). Suitable antibody assay labels are known in the art and include enzyme labels, such as, glucose oxidase; radioisotopes, such as iodine (125I, 121I), carbon (14C), sulfur (35S), tritium (3H), indium (112In), and technetium (99Tc); luminescent labels, such as luminol; and fluorescent labels, such as fluorescein and rhodamine, and biotin.

[0495] One facet of the invention is the detection and diagnosis of a disease or disorder associated with aberrant expression of a polypeptide of interest in an animal, preferably a mammal and most preferably a human. In one embodiment, diagnosis comprises: a) administering (for example, parenterally, subcutaneously, or intraperitoneally) to a subject an effective amount of a labeled molecule which specifically binds to the polypeptide of interest; b) waiting for a time interval following the administering for permitting the labeled molecule to preferentially concentrate at sites in the subject where the polypeptide is expressed (and for unbound labeled molecule to be cleared to background level); c) determining background level; and d) detecting the labeled molecule in the subject, such that detection of labeled molecule above the background level indicates that the subject has a particular disease or disorder associated with aberrant expression of the polypeptide of interest. Background level can be determined by various methods including, comparing the amount of labeled molecule detected to a standard value previously determined for a particular system.

[0496] It will be understood in the art that the size of the subject and the imaging system used will determine the quantity of imaging moiety needed to produce diagnostic images. In the case of a radioisotope moiety, for a human subject, the quantity of radioactivity injected will normally range from about 5 to 20 millicuries of 99mTc. The labeled antibody or antibody fragment will then preferentially accumulate at the location of cells which contain the specific protein. In vivo tumor imaging is described in S. W. Burchiel et al., “Immunopharmacokinetics of Radiolabeled Antibodies and Their Fragments.” (Chapter 13 in Tumor Imaging: The Radiochemical Detection of Cancer, S. W. Burchiel and B. A. Rhodes, eds., Masson Publishing Inc. (1982)).

[0497] Depending on several variables, including the type of label used and the mode of administration, the time interval following the administration for permitting the labeled molecule to preferentially concentrate at sites in the subject and for unbound labeled molecule to be cleared to background level is 6 to 48 hours or 6 to 24 hours or 6 to 12 hours. In another embodiment the time interval following administration is 5 to 20 days or 5 to 10 days.

[0498] In an embodiment, monitoring of the disease or disorder is carried out by repeating the method for diagnosing the disease or disease, for example, one month after initial diagnosis, six months after initial diagnosis, one year after initial diagnosis, etc.

[0499] Presence of the labeled molecule can be detected in the patient using methods known in the art for in vivo scanning. These methods depend upon the type of label used. Skilled artisans will be able to determine the appropriate method for detecting a particular label. Methods and devices that may be used in the diagnostic methods of the invention include, but are not limited to, computed tomography (CT), whole body scan such as position emission tomography (PET), magnetic resonance imaging (MRI), and sonography.

[0500] In a specific embodiment, the molecule is labeled with a radioisotope and is detected in the patient using a radiation responsive surgical instrument (Thurston et al., U.S. Pat. No. 5,441,050). In another embodiment, the molecule is labeled with a fluorescent compound and is detected in the patient using a fluorescence responsive scanning instrument. In another embodiment, the molecule is labeled with a positron emitting metal and is detected in the patent using positron emission-tomography. In yet another embodiment, the molecule is labeled with a paramagnetic label and is detected in a patient using magnetic resonance imaging (MRI).

Kits

[0501] The present invention provides kits that can be used in the above methods. In one embodiment, a kit comprises an antibody of the invention, preferably a purified antibody, in one or more containers. In a specific embodiment, the kits of the present invention contain a substantially isolated polypeptide comprising an epitope which is specifically immunoreactive with an antibody included in the kit. Preferably, the kits of the present invention further comprise a control antibody which does not react with the polypeptide of interest. In another specific embodiment, the kits of the present invention contain a means for detecting the binding of an antibody to a polypeptide of interest (e.g., the antibody may be conjugated to a detectable substrate such as a fluorescent compound, an enzymatic substrate, a radioactive compound or a luminescent compound, or a second antibody which recognizes the first antibody may be conjugated to a detectable substrate).

[0502] In another specific embodiment of the present invention, the kit is a diagnostic kit for use in screening serum containing antibodies specific against proliferative and/or cancerous polynucleotides and polypeptides. Such a kit may include a control antibody that does not react with the polypeptide of interest. Such a kit may include a substantially isolated polypeptide antigen comprising an epitope which is specifically immunoreactive with at least one anti-polypeptide antigen antibody. Further, such a kit includes means for detecting the binding of said antibody to the antigen (e.g., the antibody may be conjugated to a fluorescent compound such as fluorescein or rhodamine which can be detected by flow cytometry). In specific embodiments, the kit may include a recombinantly produced or chemically synthesized polypeptide antigen. The polypeptide antigen of the kit may also be attached to a solid support.

[0503] In a more specific embodiment the detecting means of the above-described kit includes a solid support to which said polypeptide antigen is attached. Such a kit may also include a non-attached reporter-labeled anti-human antibody. In this embodiment, binding of the antibody to the polypeptide antigen can be detected by binding of the said reporter-labeled antibody.

[0504] In an additional embodiment, the invention includes a diagnostic kit for use in screening serum containing antigens of the polypeptide of the invention. The diagnostic kit includes a substantially isolated antibody specifically immunoreactive with polypeptide or polynucleotide antigens, and means for detecting the binding of the polynucleotide or polypeptide antigen to the antibody. In one embodiment, the antibody is attached to a solid support. In a specific embodiment, the antibody may be a monoclonal antibody. The detecting means of the kit may include a second, labeled monoclonal antibody. Alternatively, or in addition, the detecting means may include a labeled, competing antigen.

[0505] In one diagnostic configuration, test serum is reacted with a solid phase reagent having a surface-bound antigen obtained by the methods of the present invention. After binding with specific antigen antibody to the reagent and removing unbound serum components by washing, the reagent is reacted with reporter-labeled anti-human antibody to bind reporter to the reagent in proportion to the amount of bound anti-antigen antibody on the solid support. The reagent is again washed to remove unbound labeled antibody, and the amount of reporter associated with the reagent is determined. Typically, the reporter is an enzyme which is detected by incubating the solid phase in the presence of a suitable fluorometric, luminescent or calorimetric substrate (Sigma, St. Louis, Mo.).

[0506] The solid surface reagent in the above assay is prepared by known techniques for attaching protein material to solid support material, such as polymeric beads, dip sticks, 96-well plate or filter material. These attachment methods generally include non-specific adsorption of the protein to the support or covalent attachment of the protein, typically through a free amine group, to a chemically reactive group on the solid support, such as an activated carboxyl, hydroxyl, or aldehyde group. Alternatively, streptavidin coated plates can be used in conjunction with biotinylated antigen(s).

[0507] Thus, the invention provides an assay system or kit for carrying out this diagnostic method. The kit generally includes a support with surface-bound recombinant antigens, and a reporter-labeled anti-human antibody for detecting surface-bound anti-antigen antibody.

Uses of the Polynucleotides

[0508] Each of the polynucleotides identified herein can be used in numerous ways as reagents. The following description should be considered exemplary and utilizes known techniques.

[0509] The polynucleotides of the present invention are useful for chromosome identification. There exists an ongoing need to identify new chromosome markers, since few chromosome marking reagents, based on actual sequence data (repeat polymorphisms), are presently available. Each sequence is specifically targeted to and can hybridize with a particular location on an individual human chromosome, thus each polynucleotide of the present invention can routinely be used as a chromosome marker using techniques known in the art. Table 1B.1, column 8 provides the chromosome location of some of the polynucleotides of the invention.

[0510] Briefly, sequences can be mapped to chromosomes by preparing PCR primers (preferably at least 15 bp (e.g., 15-25 bp) from the sequences shown in SEQ ID NO:X. Primers can optionally be selected using computer analysis so that primers do not span more than one predicted exon in the genomic DNA. These primers are then used for PCR screening of somatic cell hybrids containing individual human chromosomes. Only those hybrids containing the human gene corresponding to SEQ ID NO:X will yield an amplified fragment.

[0511] Similarly, somatic hybrids provide a rapid method of PCR mapping the polynucleotides to particular chromosomes. Three or more clones can be assigned per day using a single thermal cycler. Moreover, sublocalization of the polynucleotides can be achieved with panels of specific chromosome fragments. Other gene mapping strategies that can be used include in situ hybridization, prescreening with labeled flow-sorted chromosomes, preselection by hybridization to construct chromosome specific-cDNA libraries, and computer mapping techniques (See, e.g., Shuler, Trends Biotechnol 16:456-459 (1998) which is hereby incorporated by reference in its entirety).

[0512] Precise chromosomal location of the polynucleotides can also be achieved using fluorescence in situ hybridization (FISH) of a metaphase chromosomal spread. This technique uses polynucleotides as short as 500 or 600 bases; however, polynucleotides 2,000-4,000 bp are preferred. For a review of this technique, see Verma et al., “Human Chromosomes: a Manual of Basic Techniques,” Pergamon Press, New York (1988).

[0513] For chromosome mapping, the polynucleotides can be used individually (to mark a single chromosome or a single site on that chromosome) or in panels (for marking multiple sites and/or multiple chromosomes).

[0514] Thus, the present invention also provides a method for chromosomal localization which involves (a) preparing PCR primers from the polynucleotide sequences in Table 1B and/or Table 2 and SEQ ID NO:X and (b) screening somatic cell hybrids containing individual chromosomes.

[0515] The polynucleotides of the present invention would likewise be useful for radiation hybrid mapping, HAPPY mapping, and long range restriction mapping. For a review of these techniques and others known in the art, see, e.g. Dear, “Genome Mapping: A Practical Approach,” IRL Press at Oxford University Press, London (1997); Aydin, J. Mol. Med. 77:691-694 (1999); Hacia et al., Mol. Psychiatry. 3:483-492 (1998); Herrick et al., Chromosome Res. 7:409-423 (1999); Hamilton et al., Methods Cell Biol. 62:265-280 (2000); and/or Ott, J. Hered. 90:68-70 (1999) each of which is hereby incorporated by reference in its entirety.

[0516] Once a polynucleotide has been mapped to a precise chromosomal location, the physical position of the polynucleotide can be used in linkage analysis. Linkage analysis establishes coinheritance between a chromosomal location and presentation of a particular disease. (Disease mapping data are found, for example, in V. McKusick, Mendelian Inheritance in Man (available on line through Johns Hopkins University Welch Medical Library)). Column 9 of Table 1B.1 provides an OMIM reference identification number of diseases associated with the cytologic band disclosed in column 8 of Table 1B.1, as determined using techniques described herein and by reference to Table 5. Assuming 1 megabase mapping resolution and one gene per 20 kb, a cDNA precisely localized to a chromosomal region associated with the disease could be one of 50-500 potential causative genes.

[0517] Thus, once coinheritance is established, differences in a polynucleotide of the invention and the corresponding gene between affected and unaffected individuals can be examined. First, visible structural alterations in the chromosomes, such as deletions or translocations, are examined in chromosome spreads or by PCR. If no structural alterations exist, the presence of point mutations are ascertained. Mutations observed in some or all affected individuals, but not in normal individuals, indicates that the mutation may cause the disease. However, complete sequencing of the polypeptide and the corresponding gene from several normal individuals is required to distinguish the mutation from a polymorphism. If a new polymorphism is identified, this polymorphic polypeptide can be used for further linkage analysis.

[0518] Furthermore, increased or decreased expression of the gene in affected individuals as compared to unaffected individuals can be assessed using the polynucleotides of the invention. Any of these alterations (altered expression, chromosomal rearrangement, or mutation) can be used as a diagnostic or prognostic marker. Diagnostic and prognostic methods, kits and reagents encompassed by the present invention are briefly described below and more thoroughly elsewhere herein (see e.g., the sections labeled “Antibodies”, “Diagnostic Assays”, and “Methods for Detecting Diseases”).

[0519] Thus, the invention also provides a diagnostic method useful during diagnosis of a disorder, involving measuring the expression level of polynucleotides of the present invention in cells or body fluid from an individual and comparing the measured gene expression level with a standard level of polynucleotide expression level, whereby an increase or decrease in the gene expression level compared to the standard is indicative of a disorder. Additional non-limiting examples of diagnostic methods encompassed by the present invention are more thoroughly described elsewhere herein (see, e.g., Example 12).

[0520] In still another embodiment, the invention includes a kit for analyzing samples for the presence of proliferative and/or cancerous polynucleotides derived from a test subject. In a general embodiment, the kit includes at least one polynucleotide probe containing a nucleotide sequence that will specifically hybridize with a polynucleotide of the invention and a suitable container. In a specific embodiment, the kit includes two polynucleotide probes defining an internal region of the polynucleotide of the invention, where each probe has one strand containing a 31′mer-end internal to the region. In a further embodiment, the probes may be useful as primers for polymerase chain reaction amplification.

[0521] Where a diagnosis of a related disorder, including, for example, diagnosis of a tumor, has already been made according to conventional methods, the present invention is useful as a prognostic indicator, whereby patients exhibiting enhanced or depressed polynucleotide of the invention expression will experience a worse clinical outcome relative to patients expressing the gene at a level nearer the standard level.

[0522] By “measuring the expression level of polynucleotides of the invention” is intended qualitatively or quantitatively measuring or estimating the level of the polypeptide of the invention or the level of the mRNA encoding the polypeptide of the invention in a first biological sample either directly (e.g., by determining or estimating absolute protein level or mRNA level) or relatively (e.g., by comparing to the polypeptide level or mRNA level in a second biological sample). Preferably, the polypeptide level or mRNA level in the first biological sample is measured or estimated and compared to a standard polypeptide level or mRNA level, the standard being taken from a second biological sample obtained from an individual not having the related disorder or being determined by averaging levels from a population of individuals not having a related disorder. As will be appreciated in the art, once a standard polypeptide level or mRNA level is known, it can be used repeatedly as a standard for comparison.

[0523] By “biological sample” is intended any biological sample obtained from an individual, body fluid, cell line, tissue culture, or other source which contains polypeptide of the present invention or the corresponding mRNA. As indicated, biological samples include body fluids (such as semen, lymph, vaginal pool, sera, plasma, urine, synovial fluid and spinal fluid) which contain the polypeptide of the present invention, and tissue sources found to express the polypeptide of the present invention. Methods for obtaining tissue biopsies and body fluids from mammals are well known in the art. Where the biological sample is to include mRNA, a tissue biopsy is the preferred source.

[0524] The method(s) provided above may preferably be applied in a diagnostic method and/or kits in which polynucleotides and/or polypeptides of the invention are attached to a solid support. In one exemplary method, the support may be a “gene chip” or a “biological chip” as described in U.S. Pat. Nos. 5,837,832, 5,874,219, and 5,856,174. Further, such a gene chip with polynucleotides of the invention attached may be used to identify polymorphisms between the isolated polynucleotide sequences of the invention, with polynucleotides isolated from a test subject. The knowledge of such polymorphisms (i.e. their location, as well as, their existence) would be beneficial in identifying disease loci for many disorders, such as for example, in neural disorders, immune system disorders, muscular disorders, reproductive disorders, gastrointestinal disorders, pulmonary disorders, digestive disorders, metabolic disorders, cardiovascular disorders, renal disorders, proliferative disorders, and/or cancerous diseases and conditions. Such a method is described in U.S. Pat. Nos. 5,858,659 and 5,856,104. The US Patents referenced supra are hereby incorporated by reference in their entirety herein.

[0525] The present invention encompasses polynucleotides of the present invention that are chemically synthesized, or reproduced as peptide nucleic acids (PNA), or according to other methods known in the art. The use of PNAs would serve as the preferred form if the polynucleotides of the invention are incorporated onto a solid support, or gene chip. For the purposes of the present invention, a peptide nucleic acid (PNA) is a polyamide type of DNA analog and the monomeric units for adenine, guanine, thymine and cytosine are available commercially (Perceptive Biosystems). Certain components of DNA, such as phosphorus, phosphorus oxides, or deoxyribose derivatives, are not present in PNAs. As disclosed by Nielsen et al., Science 254, 1497 (1991); and Egholm et al., Nature 365, 666 (1993), PNAs bind specifically and tightly to complementary DNA strands and are not degraded by nucleases. In fact, PNA binds more strongly to DNA than DNA itself does. This is probably because there is no electrostatic repulsion between the two strands, and also the polyamide backbone is more flexible. Because of this, PNA/DNA duplexes bind under a wider range of stringency conditions than DNA/DNA duplexes, making it easier to perform multiplex hybridization. Smaller probes can be used than with DNA due to the strong binding. In addition, it is more likely that single base mismatches can be determined with PNA/DNA hybridization because a single mismatch in a PNA/DNA 15-mer lowers the melting point (T.sub.m) by 8°-20° C., vs. 4°-16° C. for the DNA/DNA 15-mer duplex. Also, the absence of charge groups in PNA means that hybridization can be done at low ionic strengths and reduce possible interference by salt during the analysis.

[0526] The compounds of the present invention have uses which include, but are not limited to, detecting cancer in mammals. In particular the invention is useful during diagnosis of pathological cell proliferative neoplasias which include, but are not limited to: acute myelogenous leukemias including acute monocytic leukemia, acute myeloblastic leukemia, acute promyelocytic leukemia, acute myelomonocytic leukemia, acute erythroleukemia, acute megakaryocytic leukemia, and acute undifferentiated leukemia, etc.; and chronic myelogenous leukemias including chronic myelomonocytic leukemia, chronic granulocytic leukemia, etc. Preferred mammals include monkeys, apes, cats, dogs, cows, pigs, horses, rabbits and humans. Particularly preferred are humans.

[0527] Pathological cell proliferative disorders are often associated with inappropriate activation of proto-oncogenes. (Gelmann, E. P. et al., “The Etiology of Acute Leukemia: Molecular Genetics and Viral Oncology,” in Neoplastic Diseases of the Blood, Vol 1., Wiernik, P. H. et al. eds., 161-182 (1985)). Neoplasias are now believed to result from the qualitative alteration of a normal cellular gene product, or from the quantitative modification of gene expression by insertion into the chromosome of a viral sequence, by chromosomal translocation of a gene to a more actively transcribed region, or by some other mechanism. (Gelmann et al., supra) It is likely that mutated or altered expression of specific genes is involved in the pathogenesis of some leukemias, among other tissues and cell types. (Gelmann et al., supra) Indeed, the human counterparts of the oncogenes involved in some animal neoplasias have been amplified or translocated in some cases of human leukemia and carcinoma. (Gelmann et al., supra)

[0528] For example, c-myc expression is highly amplified in the non-lymphocytic leukemia cell line HL-60. When HL-60 cells are chemically induced to stop proliferation, the level of c-myc is found to be down-regulated. (International Publication Number WO 91/15580). However, it has been shown that exposure of HL-60 cells to a DNA construct that is complementary to the 5′ end of c-myc or c-myb blocks translation of the corresponding mRNAs which downregulates expression of the c-myc or c-myb proteins and causes arrest of cell proliferation and differentiation of the treated cells. (International Publication Number WO 91/15580; Wickstrom et al., Proc. Natl. Acad. Sci. 85:1028 (1988); Anfossi et al., Proc. Natl. Acad. Sci. 86:3379 (1989)). However, the skilled artisan would appreciate the present invention's usefulness is not be limited to treatment, prevention, and/or prognosis of proliferative disorders of cells and tissues of hematopoietic origin, in light of the numerous cells and cell types of varying origins which are known to exhibit proliferative phenotypes.

[0529] In addition to the foregoing, a polynucleotide of the present invention can be used to control gene expression through triple helix formation or through antisense DNA or RNA. Antisense techniques are discussed, for example, in Okano, J. Neurochem. 56: 560 (1991); “Oligodeoxynucleotides as Antisense Inhibitors of Gene Expression, CRC Press, Boca Raton, Fla. (1988). Triple helix formation is discussed in, for instance Lee et al., Nucleic Acids Research 6: 3073 (1979); Cooney et al., Science 241: 456 (1988); and Dervan et al., Science 251: 1360 (1991). Both methods rely on binding of the polynucleotide to a complementary DNA or RNA. For these techniques, preferred polynucleotides are usually oligonucleotides 20 to 40 bases in length and complementary to either the region of the gene involved in transcription (triple helix—see Lee et al., Nucl. Acids Res. 6:3073 (1979); Cooney et al., Science 241:456 (1988); and Dervan et al., Science 251:1360 (1991)) or to the mRNA itself (antisense—Okano, J. Neurochem. 56:560 (1991); Oligodeoxy-nucleotides as Antisense Inhibitors of Gene Expression, CRC Press, Boca Raton, Fla. (1988)). Triple helix formation optimally results in a shut-off of RNA transcription from DNA, while antisense RNA hybridization blocks translation of an mRNA molecule into polypeptide. The oligonucleotide described above can also be delivered to cells such that the antisense RNA or DNA may be expressed in vivo to inhibit production of polypeptide of the present invention antigens. Both techniques are effective in model systems, and the information disclosed herein can be used to design antisense or triple helix polynucleotides in an effort to treat disease, and in particular, for the treatment of proliferative diseases and/or conditions. Non-limiting antisense and triple helix methods encompassed by the present invention are more thoroughly described elsewhere herein (see, e.g., the section labeled “Antisense and Ribozyme (Antagonists)”).

[0530] Polynucleotides of the present invention are also useful in gene therapy. One goal of gene therapy is to insert a normal gene into an organism having a defective gene, in an effort to correct the genetic defect. The polynucleotides disclosed in the present invention offer a means of targeting such genetic defects in a highly accurate manner. Another goal is to insert a new gene that was not present in the host genome, thereby producing a new trait in the host cell. Additional non-limiting examples of gene therapy methods encompassed by the present invention are more thoroughly described elsewhere herein (see, e.g., the sections labeled “Gene Therapy Methods”, and Examples 16, 17 and 18).

[0531] The polynucleotides are also useful for identifying individuals from minute biological samples. The United States military, for example, is considering the use of restriction fragment length polymorphism (RFLP) for identification of its personnel. In this technique, an individual's genomic DNA is digested with one or more restriction enzymes, and probed on a Southern blot to yield unique bands for identifying personnel. This method does not suffer from the current limits of “Dog Tags” which can be lost, switched, or stolen, making positive identification difficult. The polynucleotides of the present invention can be used as additional DNA markers for RFLP.

[0532] The polynucleotides of the present invention can also be used as an alternative to RFLP, by determining the actual base-by-base DNA sequence of selected portions of an individual's genome. These sequences can be used to prepare PCR primers for amplifying and isolating such selected DNA, which can then be sequenced. Using this technique, individuals can be identified because each individual will have a unique set of DNA sequences. Once an unique ID database is established for an individual, positive identification of that individual, living or dead, can be made from extremely small tissue samples.

[0533] Forensic biology also benefits from using DNA-based identification techniques as disclosed herein. DNA sequences taken from very small biological samples such as tissues, e.g., hair or skin, or body fluids, e.g., blood, saliva, semen, synovial fluid, amniotic fluid, breast milk, lymph, pulmonary sputum or surfactant, urine, fecal matter, etc., can be amplified using PCR. In one prior art technique, gene sequences amplified from polymorphic loci, such as DQa class II HLA gene, are used in forensic biology to identify individuals. (Erlich, H., PCR Technology, Freeman and Co. (1992)). Once these specific polymorphic loci are amplified, they are digested with one or more restriction enzymes, yielding an identifying set of bands on a Southern blot probed with DNA corresponding to the DQa class II HLA gene. Similarly, polynucleotides of the present invention can be used as polymorphic markers for forensic purposes.

[0534] There is also a need for reagents capable of identifying the source of a particular tissue. Such need arises, for example, in forensics when presented with tissue of unknown origin. Appropriate reagents can comprise, for example, DNA probes or primers prepared from the sequences of the present invention, specific to tissues, including but not limited to those shown in Table 1B. Panels of such reagents can identify tissue by species and/or by organ type. In a similar fashion, these reagents can be used to screen tissue cultures for contamination. Additional non-limiting examples of such uses are further described herein.

[0535] The polynucleotides of the present invention are also useful as hybridization probes for differential identification of the tissue(s) or cell type(s) present in a biological sample. Similarly, polypeptides and antibodies directed to polypeptides of the present invention are useful to provide immunological probes for differential identification of the tissue(s) (e.g., immunohistochemistry assays) or cell type(s) (e.g., immunocytochemistry assays). In addition, for a number of disorders of the above tissues or cells, significantly higher or lower levels of gene expression of the polynucleotides/polypeptides of the present invention may be detected in certain tissues (e.g., tissues expressing polypeptides and/or polynucleotides of the present invention, for example, those disclosed in column 5 of Table 1B.2, and/or cancerous and/or wounded tissues) or bodily fluids (e.g., semen, lymph, vaginal pool, serum, plasma, urine, synovial fluid or spinal fluid) taken from an individual having such a disorder, relative to a “standard” gene expression level, i.e., the expression level in healthy tissue from an individual not having the disorder.

[0536] Thus, the invention provides a diagnostic method of a disorder, which involves: (a) assaying gene expression level in cells or body fluid of an individual; (b) comparing the gene expression level with a standard gene expression level, whereby an increase or decrease in the assayed gene expression level compared to the standard expression level is indicative of a disorder.

[0537] In the very least, the polynucleotides of the present invention can be used as molecular weight markers on Southern gels, as diagnostic probes for the presence of a specific mRNA in a particular cell type, as a probe to “subtract-out” known sequences in the process of discovering novel polynucleotides, for selecting and making oligomers for attachment to a “gene chip” or other support, to raise anti-DNA antibodies using DNA immunization techniques, and as an antigen to elicit an immune response.

Uses of the Polypeptides

[0538] Each of the polypeptides identified herein can be used in numerous ways. The following description should be considered exemplary and utilizes known techniques.

[0539] Polypeptides and antibodies directed to polypeptides of the present invention are useful to provide immunological probes for differential identification of the tissue(s) (e.g., immunohistochemistry assays such as, for example, ABC immunoperoxidase (Hsu et al., J. Histochem. Cytochem. 29:577-580 (1981)) or cell type(s) (e.g., immunocytochemistry assays).

[0540] Antibodies can be used to assay levels of polypeptides encoded by polynucleotides of the invention in a biological sample using classical immunohistological methods known to those of skill in the art (e.g., see Jalkanen, et al., J. Cell. Biol. 101:976-985 (1985); Jalkanen, et al., J. Cell. Biol. 105:3087-3096 (1987)). Other antibody-based methods useful for detecting protein gene expression include immunoassays, such as the enzyme linked immunosorbent assay (ELISA) and the radioimmunoassay (RIA). Suitable antibody assay labels are known in the art and include enzyme labels, such as, glucose oxidase; radioisotopes, such as iodine (¹³¹I, ¹²⁵I, ¹²³I, ¹²¹I), carbon (¹⁴C), sulfur (³⁵S), tritium (³H), indium (^{115m}In, ^{113m}In, ¹¹²In, ¹¹¹In), and technetium (⁹⁹Tc, ^{99m}Tc), thallium (²⁰¹Ti), gallium (⁶⁸Ga, ⁶⁷Ga), palladium (¹⁰³Pd), molybdenum (⁹⁹Mo), xenon (¹³³Xe), fluorine (¹⁸F), ¹⁵³Sm, ¹⁷⁷Lu, ¹⁵⁹Gd, ¹⁴⁹Pm, ¹⁴⁰La, ¹⁷⁵Yb, ¹⁶⁶Ho, ⁹⁰Y, ⁴⁷Sc, ¹⁸⁶Re, ¹⁸⁸Re, ¹⁴²Pr, ¹⁰⁵Rh, ⁹⁷Ru; luminescent labels, such as luminol; and fluorescent labels, such as fluorescein and rhodamine, and biotin.

[0541] In addition to assaying levels of polypeptide of the present invention in a biological sample, proteins can also be detected in vivo by imaging. Antibody labels or markers for in vivo imaging of protein include those detectable by X-radiography, NMR or ESR. For X-radiography, suitable labels include radioisotopes such as barium or cesium, which emit detectable radiation but are not overtly harmful to the subject. Suitable markers for NMR and ESR include those with a detectable characteristic spin, such as deuterium, which may be incorporated into the antibody by labeling of nutrients for the relevant hybridoma.

[0542] A protein-specific antibody or antibody fragment which has been labeled with an appropriate detectable imaging moiety, such as a radioisotope (for example, ¹³¹I, ¹¹²In, ^{99m}Tc, (¹³¹I, ¹²⁵I, ¹²³I, ¹²¹I), carbon (¹⁴C), sulfur (³⁵S), tritium (³H), indium (^{115m}In, ^{113m}In, ¹¹²In, ¹¹¹In), and technetium (⁹⁹Tc, ^{99m}Tc), thallium (²⁰¹Ti), gallium (⁶⁸Ga, ⁶⁷Ga), palladium (¹⁰³Pd), molybdenum (⁹⁹Mo), xenon (¹³³Xe), fluorine (¹⁸F), ¹⁵³Sm, ¹⁷⁷Lu, ¹⁵⁹Gd, ¹⁴⁹Pm, ¹⁴⁰La, ¹⁷⁵Yb, ¹⁶⁶Ho, ⁹⁰Y, ⁴⁷Sc, ¹⁸⁶Re, ¹⁸⁸Re, ¹⁴²Pr, ¹⁰⁵Rh, ⁹⁷Ru), a radio-opaque substance, or a material detectable by nuclear magnetic resonance, is introduced (for example, parenterally, subcutaneously or intraperitoneally) into the mammal to be examined for immune system disorder. It will be understood in the art that the size of the subject and the imaging system used will determine the quantity of imaging moiety needed to produce diagnostic images. In the case of a radioisotope moiety, for a human subject, the quantity of radioactivity injected will normally range from about 5 to 20 millicuries of ^{99m}Tc. The labeled antibody or antibody fragment will then preferentially accumulate at the location of cells which express the polypeptide encoded by a polynucleotide of the invention. In vivo tumor imaging is described in S. W. Burchiel et al., “Immunopharmacokinetics of Radiolabeled Antibodies and Their Fragments” (Chapter 13 in Tumor Imaging: The Radiochemical Detection of Cancer, S. W. Burchiel and B. A. Rhodes, eds., Masson Publishing Inc. (1982)).

[0543] In one embodiment, the invention provides a method for the specific delivery of compositions of the invention to cells by administering polypeptides of the invention (e.g., polypeptides encoded by polynucleotides of the invention and/or antibodies) that are associated with heterologous polypeptides or nucleic acids. In one example, the invention provides a method for delivering a therapeutic protein into the targeted cell. In another example, the invention provides a method for delivering a single stranded nucleic acid (e.g., antisense or ribozymes) or double stranded nucleic acid (e.g., DNA that can integrate into the cell's genome or replicate episomally and that can be transcribed) into the targeted cell.

[0544] In another embodiment, the invention provides a method for the specific destruction of cells (e.g., the destruction of tumor cells) by administering polypeptides of the invention in association with toxins or cytotoxic prodrugs.

[0545] By “toxin” is meant one or more compounds that bind and activate endogenous cytotoxic effector systems, radioisotopes, holotoxins, modified toxins, catalytic subunits of toxins, or any molecules or enzymes not normally present in or on the surface of a cell that under defined conditions cause the cell's death. Toxins that may be used according to the methods of the invention include, but are not limited to, radioisotopes known in the art, compounds such as, for example, antibodies (or complement fixing containing portions thereof) that bind an inherent or induced endogenous cytotoxic effector system, thymidine kinase, endonuclease, RNAse, alpha toxin, ricin, abrin, Pseudomonas exotoxin A, diphtheria toxin, saporin, momordin, gelonin, pokeweed antiviral protein, alpha-sarcin and cholera toxin. “Toxin” also includes a cytostatic or cytocidal agent, a therapeutic agent or a radioactive metal ion, e.g., alpha-emitters such as, for example, ²¹³Bi, or other radioisotopes such as, for example, ¹⁰³Pd, ¹³³Xe, ¹³¹I, ⁶⁸Ge, ⁵⁷Co, ⁶⁵Zn, ⁸⁵Sr, ³²P, ³⁵S, ⁹⁰Y, ¹⁵³Sm, ¹⁵³Gd, ¹⁶⁹Yb, ⁵¹Cr, ⁵⁴Mn, ⁷⁵Se, ¹¹³Sn, ⁹⁰Yttrium, ¹¹⁷Tin, ¹⁸⁶Rhenium, ¹⁶⁶Holmium, and ¹⁸⁸Rhenium; luminescent labels, such as luminol; and fluorescent labels, such as fluorescein and rhodamine, and biotin. In a specific embodiment, the invention provides a method for the specific destruction of cells (e.g., the destruction of tumor cells) by administering polypeptides of the invention or antibodies of the invention in association with the radioisotope ⁹⁰Y. In another specific embodiment, the invention provides a method for the specific destruction of cells (e.g., the destruction of tumor cells) by administering polypeptides of the invention or antibodies of the invention in association with the radioisotope ¹¹¹In. In a further specific embodiment, the invention provides a method for the specific destruction of cells (e.g., the destruction of tumor cells) by administering polypeptides of the invention or antibodies of the invention in association with the radioisotope ¹³¹I.

[0546] Techniques known in the art may be applied to label polypeptides of the invention (including antibodies). Such techniques include, but are not limited to, the use of bifunctional conjugating agents (see e.g., U.S. Pat. Nos. 5,756,065; 5,714,631; 5,696,239; 5,652,361; 5,505,931; 5,489,425; 5,435,990; 5,428,139; 5,342,604; 5,274,119; 4,994,560; and 5,808,003; the contents of each of which are hereby incorporated by reference in its entirety).

[0547] Thus, the invention provides a diagnostic method of a disorder, which involves (a) assaying the expression level of a polypeptide of the present invention in cells or body fluid of an individual; and (b) comparing the assayed polypeptide expression level with a standard polypeptide expression level, whereby an increase or decrease in the assayed polypeptide expression level compared to the standard expression level is indicative of a disorder. With respect to cancer, the presence of a relatively high amount of transcript in biopsied tissue from an individual may indicate a predisposition for the development of the disease, or may provide a means for detecting the disease prior to the appearance of actual clinical symptoms. A more definitive diagnosis of this type may allow health professionals to employ preventative measures or aggressive treatment earlier thereby preventing the development or further progression of the cancer.

[0548] Moreover, polypeptides of the present invention can be used to treat or prevent diseases or conditions such as, for example, neural disorders, immune system disorders, muscular disorders, reproductive disorders, gastrointestinal disorders, pulmonary disorders, cardiovascular disorders, renal disorders, proliferative disorders, and/or cancerous diseases and conditions. For example, patients can be administered a polypeptide of the present invention in an effort to replace absent or decreased levels of the polypeptide (e.g., insulin), to supplement absent or decreased levels of a different polypeptide (e.g., hemoglobin S for hemoglobin B, SOD, catalase, DNA repair proteins), to inhibit the activity of a polypeptide (e.g., an oncogene or tumor supressor), to activate the activity of a polypeptide (e.g., by binding to a receptor), to reduce the activity of a membrane bound receptor by competing with it for free ligand (e.g., soluble TNF receptors used in reducing inflammation), or to bring about a desired response (e.g., blood vessel growth inhibition, enhancement of the immune response to proliferative cells or tissues).

[0549] Similarly, antibodies directed to a polypeptide of the present invention can also be used to treat disease (as described supra, and elsewhere herein). For example, administration of an antibody directed to a polypeptide of the present invention can bind, and/or neutralize the polypeptide, and/or reduce overproduction of the polypeptide. Similarly, administration of an antibody can activate the polypeptide, such as by binding to a polypeptide bound to a membrane (receptor).

[0550] At the very least, the polypeptides of the present invention can be used as molecular weight markers on SDS-PAGE gels or on molecular sieve gel filtration columns using methods well known to those of skill in the art. Polypeptides can also be used to raise antibodies, which in turn are used to measure protein expression from a recombinant cell, as a way of assessing transformation of the host cell. Moreover, the polypeptides of the present invention can be used to test the biological activities described herein.

Diagnostic Assays

[0551] The compounds of the present invention are useful for diagnosis, treatment, prevention and/or prognosis of various disorders in mammals, preferably humans. Such disorders include, but are not limited to, those described in the legends for Tables 1D and 1E and as indicated in the “Preferred Indications” columns in Table 1D and Table 1E; and, also as described herein under the section heading “Biological Activities”.

[0552] For a number of disorders, substantially altered (increased or decreased) levels of gene expression can be detected in tissues, cells or bodily fluids (e.g., sera, plasma, urine, semen, synovial fluid or spinal fluid) taken from an individual having such a disorder, relative to a “standard” gene expression level, that is, the expression level in tissues or bodily fluids from an individual not having the disorder. Thus, the invention provides a diagnostic method useful during diagnosis of a disorder, which involves measuring the expression level of the gene encoding the polypeptide in tissues, cells or body fluid from an individual and comparing the measured gene expression level with a standard gene expression level, whereby an increase or decrease in the gene expression level(s) compared to the standard is indicative of a disorder. These diagnostic assays may be performed in vivo or in vitro, such as, for example, on blood samples, biopsy tissue or autopsy tissue.

[0553] The present invention is also useful as a prognostic indicator, whereby patients exhibiting enhanced or depressed gene expression will experience a worse clinical outcome relative to patients expressing the gene at a level nearer the standard level.

[0554] In certain embodiments, a polypeptide of the invention, or polynucleotides, antibodies, agonists, or antagonists corresponding to that polypeptide, may be used to diagnose and/or prognose diseases and/or disorders associated with the tissue(s) in which the polypeptide of the invention is expressed, including one, two, three, four, five, or more tissues disclosed in Table 1B.2, column 5 (Tissue Distribution Library Code).

[0555] By “assaying the expression level of the gene encoding the polypeptide” is intended qualitatively or quantitatively measuring or estimating the level of the polypeptide of the invention or the level of the mRNA encoding the polypeptide of the invention in a first biological sample either directly (e.g., by determining or estimating absolute protein level or mRNA level) or relatively (e.g., by comparing to the polypeptide level or mRNA level in a second biological sample). Preferably, the polypeptide expression level or mRNA level in the first biological sample is measured or estimated and compared to a standard polypeptide level or mRNA level, the standard being taken from a second biological sample obtained from an individual not having the disorder or being determined by averaging levels from a population of individuals not having the disorder. As will be appreciated in the art, once a standard polypeptide level or mRNA level is known, it can be used repeatedly as a standard for comparison.

[0556] By “biological sample” is intended any biological sample obtained from an individual, cell line, tissue culture, or other source containing polypeptides of the invention (including portions thereof) or mRNA. As indicated, biological samples include body fluids (such as sera, plasma, urine, synovial fluid and spinal fluid) and tissue sources found to express the full length or fragments thereof of a polypeptide or mRNA. Methods for obtaining tissue biopsies and body fluids from mammals are well known in the art. Where the biological sample is to include mRNA, a tissue biopsy is the preferred source.

[0557] Total cellular RNA can be isolated from a biological sample using any suitable technique such as the single-step guanidinium-thiocyanate-phenol-chloroform method described in Chomczynski and Sacchi, Anal. Biochem. 162:156-159 (1987). Levels of mRNA encoding the polypeptides of the invention are then assayed using any appropriate method. These include Northern blot analysis, S1 nuclease mapping, the polymerase chain reaction (PCR), reverse transcription in combination with the polymerase chain reaction (RT-PCR), and reverse transcription in combination with the ligase chain reaction (RT-LCR).

[0558] The present invention also relates to diagnostic assays such as quantitative and diagnostic assays for detecting levels of polypeptides of the invention, in a biological sample (e.g., cells and tissues), including determination of normal and abnormal levels of polypeptides. Thus, for instance, a diagnostic assay in accordance with the invention for detecting over-expression of polypeptides of the invention compared to normal control tissue samples may be used to detect the presence of tumors. Assay techniques that can be used to determine levels of a polypeptide, such as a polypeptide of the present invention in a sample derived from a host are well-known to those of skill in the art. Such assay methods include radioimmunoassays, competitive-binding assays, Western Blot analysis and ELISA assays. Assaying polypeptide levels in a biological sample can occur using any art-known method.

[0559] Assaying polypeptide levels in a biological sample can occur using antibody-based techniques. For example, polypeptide expression in tissues can be studied with classical immunohistological methods (Jalkanen et al., J. Cell. Biol. 101:976-985 (1985); Jalkanen, M., et al., J. Cell. Biol. 105:3087-3096 (1987)). Other antibody-based methods useful for detecting polypeptide gene expression include immunoassays, such as the enzyme linked immunosorbent assay (ELISA) and the radioimmunoassay (RIA). Suitable antibody assay labels are known in the art and include enzyme labels, such as, glucose oxidase, and radioisotopes, such as iodine (¹²⁵I, ¹²¹I), carbon (¹⁴C), sulfur (³⁵S), tritium (³H), indium (¹¹²In), and technetium (^{99m}Tc), and fluorescent labels, such as fluorescein and rhodamine, and biotin.

[0560] The tissue or cell type to be analyzed will generally include those which are known, or suspected, to express the gene of interest (such as, for example, cancer). The protein isolation methods employed herein may, for example, be such as those described in Harlow and Lane (Harlow, E. and Lane, D., 1988, “Antibodies: A Laboratory Manual”, Cold Spring Harbor Laboratory Press, Cold Spring Harbor, N.Y.), which is incorporated herein by reference in its entirety. The isolated cells can be derived from cell culture or from a patient. The analysis of cells taken from culture may be a necessary step in the assessment of cells that could be used as part of a cell-based gene therapy technique or, alternatively, to test the effect of compounds on the expression of the gene.

[0561] For example, antibodies, or fragments of antibodies, such as those described herein, may be used to quantitatively or qualitatively detect the presence of gene products or conserved variants or peptide fragments thereof. This can be accomplished, for example, by immunofluorescence techniques employing a fluorescently labeled antibody coupled with light microscopic, flow cytometric, or fluorimetric detection.

[0562] In a preferred embodiment, antibodies, or fragments of antibodies directed to any one or all of the predicted epitope domains of the polypeptides of the invention (shown in column 7 of Table 1B.1) may be used to quantitatively or qualitatively detect the presence of gene products or conserved variants or peptide fragments thereof. This can be accomplished, for example, by immunofluorescence techniques employing a fluorescently labeled antibody coupled with light microscopic, flow cytometric, or fluorimetric detection.

[0563] In an additional preferred embodiment, antibodies, or fragments of antibodies directed to a conformational epitope of a polypeptide of the invention may be used to quantitatively or qualitatively detect the presence of gene products or conserved variants or peptide fragments thereof. This can be accomplished, for example, by immunofluorescence techniques employing a fluorescently labeled antibody coupled with light microscopic, flow cytometric, or fluorimetric detection.

[0564] The antibodies (or fragments thereof), and/or polypeptides of the present invention may, additionally, be employed histologically, as in immunofluorescence, immunoelectron microscopy or non-immunological assays, for in situ detection of gene products or conserved variants or peptide fragments thereof. In situ detection may be accomplished by removing a histological specimen from a patient, and applying thereto a labeled antibody or polypeptide of the present invention. The antibody (or fragment thereof) or polypeptide is preferably applied by overlaying the labeled antibody (or fragment) onto a biological sample. Through the use of such a procedure, it is possible to determine not only the presence of the gene product, or conserved variants or peptide fragments, or polypeptide binding, but also its distribution in the examined tissue. Using the present invention, those of ordinary skill will readily perceive that any of a wide variety of histological methods (such as staining procedures) can be modified in order to achieve such in situ detection.

[0565] Immunoassays and non-immunoassays for gene products or conserved variants or peptide fragments thereof will typically comprise incubating a sample, such as a biological fluid, a tissue extract, freshly harvested cells, or lysates of cells which have been incubated in cell culture, in the presence of a detectably labeled antibody capable of binding gene products or conserved variants or peptide fragments thereof, and detecting the bound antibody by any of a number of techniques well-known in the art.

[0566] The biological sample may be brought in contact with and immobilized onto a solid phase support or carrier such as nitrocellulose, or other solid support which is capable of immobilizing cells, cell particles or soluble proteins. The support may then be washed with suitable buffers followed by treatment with the detectably labeled antibody or detectable polypeptide of the invention. The solid phase support may then be washed with the buffer a second time to remove unbound antibody or polypeptide. Optionally the antibody is subsequently labeled. The amount of bound label on solid support may then be detected by conventional means.

[0567] By “solid phase support or carrier” is intended any support capable of binding an antigen or an antibody. Well-known supports or carriers include glass, polystyrene, polypropylene, polyethylene, dextran, nylon, amylases, natural and modified celluloses, polyacrylamides, gabbros, and magnetite. The nature of the carrier can be either soluble to some extent or insoluble for the purposes of the present invention. The support material may have virtually any possible structural configuration so long as the coupled molecule is capable of binding to an antigen or antibody. Thus, the support configuration may be spherical, as in a bead, or cylindrical, as in the inside surface of a test tube, or the external surface of a rod. Alternatively, the surface may be flat such as a sheet, test strip, etc. Preferred supports include polystyrene beads. Those skilled in the art will know many other suitable carriers for binding antibody or antigen, or will be able to ascertain the same by use of routine experimentation.

[0568] The binding activity of a given lot of antibody or antigen polypeptide may be determined according to well known methods. Those skilled in the art will be able to determine operative and optimal assay conditions for each determination by employing routine experimentation.

[0569] In addition to assaying polypeptide levels or polynucleotide levels in a biological sample obtained from an individual, polypeptide or polynucleotide can also be detected in vivo by imaging. For example, in one embodiment of the invention, polypeptides and/or antibodies of the invention are used to image diseased cells, such as neoplasms. In another embodiment, polynucleotides of the invention (e.g., polynucleotides complementary to all or a portion of an mRNA) and/or antibodies (e.g., antibodies directed to any one or a combination of the epitopes of a polypeptide of the invention, antibodies directed to a conformantional epitope of a polypeptide of the invention, or antibodies directed to the full length polypeptide expressed on the cell surface of a mammalian cell) are used to image diseased or neoplastic cells.

[0570] Antibody labels or markers for in vivo imaging of polypeptides of the invention include those detectable by X-radiography, NMR, MRI, CAT-scans or ESR. For X-radiography, suitable labels include radioisotopes such as barium or cesium, which emit detectable radiation but are not overtly harmful to the subject. Suitable markers for NMR and ESR include those with a detectable characteristic spin, such as deuterium, which may be incorporated into the antibody by labeling of nutrients for the relevant hybridoma. Where in vivo imaging is used to detect enhanced levels of polypeptides for diagnosis in humans, it may be preferable to use human antibodies or “humanized” chimeric monoclonal antibodies. Such antibodies can be produced using techniques described herein or otherwise known in the art. For example methods for producing chimeric antibodies are known in the art. See, for review, Morrison, Science 229:1202 (1985); Oi et al., BioTechniques 4:214 (1986); Cabilly et al., U.S. Pat. No. 4,816,567; Taniguchi et al., EP 171496; Morrison et al., EP 173494; Neuberger et al., WO 8601533; Robinson et al., WO 8702671; Boulianne et al., Nature 312:643 (1984); Neuberger et al., Nature 314:268 (1985).

[0571] Additionally, any polypeptides of the invention whose presence can be detected, can be administered. For example, polypeptides of the invention labeled with a radio-opaque or other appropriate compound can be administered and visualized in vivo, as discussed, above for labeled antibodies. Further, such polypeptides can be utilized for in vitro diagnostic procedures.

[0572] A polypeptide-specific antibody or antibody fragment which has been labeled with an appropriate detectable imaging moiety, such as a radioisotope (for example, ¹³¹I, ¹¹²In, ^{99m}Tc), a radio-opaque substance, or a material detectable by nuclear magnetic resonance, is introduced (for example, parenterally, subcutaneously or intraperitoneally) into the mammal to be examined for a disorder. It will be understood in the art that the size of the subject and the imaging system used will determine the quantity of imaging moiety needed to produce diagnostic images. In the case of a radioisotope moiety, for a human subject, the quantity of radioactivity injected will normally range from about 5 to 20 millicuries of ^{99m}Tc. The labeled antibody or antibody fragment will then preferentially accumulate at the location of cells which contain the antigenic protein. In vivo tumor imaging is described in S. W. Burchiel et al., “Immunopharmacokinetics of Radiolabeled Antibodies and Their Fragments” (Chapter 13 in Tumor Imaging: The Radiochemical Detection of Cancer, S. W. Burchiel and B. A. Rhodes, eds., Masson Publishing Inc. (1982)).

[0573] With respect to antibodies, one of the ways in which an antibody of the present invention can be detectably labeled is by linking the same to a reporter enzyme and using the linked product in an enzyme immunoassay (EIA) (Voller, A., “The Enzyme Linked Immunosorbent Assay (ELISA)”, 1978, Diagnostic Horizons 2:1-7, Microbiological Associates Quarterly Publication, Walkersville, Md.); Voller et al., J. Clin. Pathol. 31:507-520 (1978); Butler, J. E., Meth. Enzymol 73:482-523 (1981); Maggio, E. (ed.), 1980, Enzyme Immunoassay, CRC Press, Boca Raton, Fla.; Ishikawa, E. et al., (eds.), 1981, Enzyme Immunoassay, Kgaku Shoin, Tokyo). The reporter enzyme which is bound to the antibody will react with an appropriate substrate, preferably a chromogenic substrate, in such a manner as to produce a chemical moiety which can be detected, for example, by spectrophotometric, fluorimetric or by visual means. Reporter enzymes which can be used to detectably label the antibody include, but are not limited to, malate dehydrogenase, staphylococcal nuclease, delta-5-steroid isomerase, yeast alcohol dehydrogenase, alpha-glycerophosphate, dehydrogenase, triose phosphate isomerase, horseradish peroxidase, alkaline phosphatase, asparaginase, glucose oxidase, beta-galactosidase, ribonuclease, urease, catalase, glucose-6-phosphate dehydrogenase, glucoamylase and acetylcholinesterase. Additionally, the detection can be accomplished by calorimetric methods which employ a chromogenic substrate for the reporter enzyme. Detection may also be accomplished by visual comparison of the extent of enzymatic reaction of a substrate in comparison with similarly prepared standards.

[0574] Detection may also be accomplished using any of a variety of other immunoassays. For example, by radioactively labeling the antibodies or antibody fragments, it is possible to detect polypeptides through the use of a radioimmunoassay (RIA) (see, for example, Weintraub, B., Principles of Radioimmunoassays, Seventh Training Course on Radioligand Assay Techniques, The Endocrine Society, March, 1986, which is incorporated by reference herein). The radioactive isotope can be detected by means including, but not limited to, a gamma counter, a scintillation counter, or autoradiography.

[0575] It is also possible to label the antibody with a fluorescent compound. When the fluorescently labeled antibody is exposed to light of the proper wave length, its presence can then be detected due to fluorescence. Among the most commonly used fluorescent labeling compounds are fluorescein isothiocyanate, rhodamine, phycoerythrin, phycocyanin, allophycocyanin, ophthaldehyde and fluorescamine.

[0576] The antibody can also be detectably labeled using fluorescence emitting metals such as ¹⁵²Eu, or others of the lanthanide series. These metals can be attached to the antibody using such metal chelating groups as diethylenetriaminepentacetic acid (DTPA) or ethylenediaminetetraacetic acid (EDTA).

[0577] The antibody also can be detectably labeled by coupling it to a chemiluminescent compound. The presence of the chemiluminescent-tagged antibody is then determined by detecting the presence of luminescence that arises during the course of a chemical reaction. Examples of particularly useful chemiluminescent labeling compounds are luminol, isoluminol, theromatic acridinium ester, imidazole, acridinium salt and oxalate ester.

[0578] Likewise, a bioluminescent compound may be used to label the antibody of the present invention. Bioluminescence is a type of chemiluminescence found in biological systems in, which a catalytic protein increases the efficiency of the chemiluminescent reaction. The presence of a bioluminescent protein is determined by detecting the presence of luminescence. Important bioluminescent compounds for purposes of labeling are luciferin, luciferase and aequorin.

Methods for Detecting Diseases

[0579] In general, a disease may be detected in a patient based on the presence of one or more proteins of the invention and/or polynucleotides encoding such proteins in a biological sample (for example, blood, sera, urine, and/or tumor biopsies) obtained from the patient. In other words, such proteins may be used as markers to indicate the presence or absence of a disease or disorder, including cancer and/or as described elsewhere herein. In addition, such proteins may be useful for the detection of other diseases and cancers. The binding agents provided herein generally permit detection of the level of antigen that binds to the agent in the biological sample. Polynucleotide primers and probes may be used to detect the level of mRNA encoding polypeptides of the invention, which is also indicative of the presence or absence of a disease or disorder, including cancer. In general, polypeptides of the invention should be present at a level that is at least three fold higher in diseased tissue than in normal tissue.

[0580] There are a variety of assay formats known to those of ordinary skill in the art for using a binding agent to detect polypeptide markers in a sample. See, e.g., Harlow and Lane, supra. In general, the presence or absence of a disease in a patient may be determined by (a) contacting a biological sample obtained from a patient with a binding agent; (b) detecting in the sample a level of polypeptide that binds to the binding agent; and (c) comparing the level of polypeptide with a predetermined cut-off value.

[0581] In a preferred embodiment, the assay involves the use of a binding agent(s) immobilized on a solid support to bind to and remove the polypeptide of the invention from the remainder of the sample. The bound polypeptide may then be detected using a detection reagent that contains a reporter group and specifically binds to the binding agent/polypeptide complex. Such detection reagents may comprise, for example, a binding agent that specifically binds to the polypeptide or an antibody or other agent that specifically binds to the binding agent, such as an anti-immunoglobulin, protein G, protein A or a lectin. Alternatively, a competitive assay may be utilized, in which a polypeptide is labeled with a reporter group and allowed to bind to the immobilized binding agent after incubation of the binding agent with the sample. The extent to which components of the sample inhibit the binding of the labeled polypeptide to the binding agent is indicative of the reactivity of the sample with the immobilized binding agent. Suitable polypeptides for use within such assays include polypeptides of the invention and portions thereof, or antibodies, to which the binding agent binds, as described above.

[0582] The solid support may be any material known to those of skill in the art to which polypeptides of the invention may be attached. For example, the solid support may be a test well in a microtiter plate or a nitrocellulose or other suitable membrane. Alternatively, the support may be a bead or disc, such as glass fiberglass, latex or a plastic material such as polystyrene or polyvinylchloride. The support may also be a magnetic particle or a fiber optic sensor, such as those disclosed, for example, in U.S. Pat. No. 5,359,681. The binding agent may be immobilized on the solid support using a variety of techniques known to those of skill in the art, which are amply described in the patent and scientific literature. In the context of the present invention, the term “immobilization” refers to both noncovalent association, such as adsorption, and covalent attachment (which may be a direct linkage between the agent and functional groups on the support or may be a linkage by way of a cross-linking agent). Immobilization by adsorption to a well in a microtiter plate or to a membrane is preferred. In such cases, adsorption may be achieved by contacting the binding agent, in a suitable buffer, with the solid support for the suitable amount of time. The contact time varies with temperature, but is typically between about 1 hour and about 1 day. In general, contacting a well of plastic microtiter plate (such as polystyrene or polyvinylchloride) with an amount of binding agent ranging from about 10 ng to about 10 ug, and preferably about 100 ng to about 1 ug, is sufficient to immobilize an adequate amount of binding agent.

[0583] Covalent attachment of binding agent to a solid support may generally be achieved by first reacting the support with a bifunctional reagent that will react with both the support and a functional group, such as a hydroxyl or amino group, on the binding agent. For example, the binding agent may be covalently attached to supports having an appropriate polymer coating using benzoquinone or by condensation of an aldehyde group on the support with an amine and an active hydrogen on the binding partner (see, e.g., Pierce Immunotechnology Catalog and Handbook, 1991, at A12-A13).

Gene Therapy Methods

[0584] Also encompassed by the invention are gene therapy methods for treating or preventing disorders, diseases and conditions. The gene therapy methods relate to the introduction of nucleic acid (DNA, RNA and antisense DNA or RNA) sequences into an animal to achieve expression of the polypeptide of the present invention. This method requires a polynucleotide which codes for a polypeptide of the present invention operatively linked to a promoter and any other genetic elements necessary for the expression of the polypeptide by the target tissue. Such gene therapy and delivery techniques are known in the art, see, for example, WO90/11092, which is herein incorporated by reference.

[0585] Thus, for example, cells from a patient may be engineered with a polynucleotide (DNA or RNA) comprising a promoter operably linked to a polynucleotide of the present invention ex vivo, with the engineered cells then being provided to a patient to be treated with the polypeptide of the present invention. Such methods are well-known in the art. For example, see Belldegrun, A., et al., J. Natl. Cancer Inst. 85: 207-216 (1993); Ferrantini, M. et al., Cancer Research 53: 1107-1112 (1993); Ferrantini, M. et al., J. Immunology 153: 4604-4615 (1994); Kaido, T., et al., Int. J. Cancer 60: 221-229 (1995); Ogura, H., et al., Cancer Research 50: 5102-5106 (1990); Santodonato, L., et al., Human Gene Therapy 7:1-10 (1996); Santodonato, L., et al., Gene Therapy 4:1246-1255 (1997); and Zhang, J.-F. et al., Cancer Gene Therapy 3: 31-38 (1996)), which are herein incorporated by reference. In one embodiment, the cells which are engineered are arterial cells. The arterial cells may be reintroduced into the patient through direct injection to the artery, the tissues surrounding the artery, or through catheter injection.

[0586] As discussed in more detail below, the polynucleotide constructs can be delivered by any method that delivers injectable materials to the cells of an animal, such as, injection into the interstitial space of tissues (heart, muscle, skin, lung, liver, and the like). The polynucleotide constructs may be delivered in a pharmaceutically acceptable liquid or aqueous carrier.

[0587] In one embodiment, the polynucleotide of the present invention is delivered as a naked polynucleotide. The term “naked” polynucleotide, DNA or RNA refers to sequences that are free from any delivery vehicle that acts to assist, promote or facilitate entry into the cell, including viral sequences, viral particles, liposome formulations, lipofectin or precipitating agents and the like. However, the polynucleotide of the present invention can also be delivered in liposome formulations and lipofectin formulations and the like can be prepared by methods well known to those skilled in the art. Such methods are described, for example, in U.S. Pat. Nos. 5,593,972, 5,589,466, and 5,580,859, which are herein incorporated by reference.

[0588] The polynucleotide vector constructs used in the gene therapy method are preferably constructs that will not integrate into the host genome nor will they contain sequences that allow for replication. Appropriate vectors include pWLNEO, pSV2CAT, pOG44, pXT1 and pSG available from Stratagene; pSVK3, pBPV, pMSG and pSVL available from Pharmacia; and pEF1/V5, pcDNA3.1, and pRc/CMV2 available from Invitrogen. Other suitable vectors will be readily apparent to the skilled artisan.

[0589] Any strong promoter known to those skilled in the art can be used for driving the expression of the polynucleotide sequence. Suitable promoters include adenoviral promoters, such as the adenoviral major late promoter; or heterologous promoters, such as the cytomegalovirus (CMV) promoter; the respiratory syncytial virus (RSV) promoter; inducible promoters, such as the MMT promoter, the metallothionein promoter; heat shock promoters; the albumin promoter; the ApoAI promoter; human globin promoters; viral thymidine kinase promoters, such as the Herpes Simplex thymidine kinase promoter; retroviral LTRs; the b-actin promoter; and human growth hormone promoters. The promoter also may be the native promoter for the polynucleotide of the present invention.

[0590] Unlike other gene therapy techniques, one major advantage of introducing naked nucleic acid sequences into target cells is the transitory nature of the polynucleotide synthesis in the cells. Studies have shown that non-replicating DNA sequences can be introduced into cells to provide production of the desired polypeptide for periods of up to six months.

[0591] The polynucleotide construct can be delivered to the interstitial space of tissues within the an animal, including of muscle, skin, brain, lung, liver, spleen, bone marrow, thymus, heart, lymph, blood, bone, cartilage, pancreas, kidney, gall bladder, stomach, intestine, testis, ovary, uterus, rectum, nervous system, eye, gland, and connective tissue. Interstitial space of the tissues comprises the intercellular, fluid, mucopolysaccharide matrix among the reticular fibers of organ tissues, elastic fibers in the walls of vessels or chambers, collagen fibers of fibrous tissues, or that same matrix within connective tissue ensheathing muscle cells or in the lacunae of bone. It is similarly the space occupied by the plasma of the circulation and the lymph fluid of the lymphatic channels. Delivery to the interstitial space of muscle tissue is preferred for the reasons discussed below. They may be conveniently delivered by injection into the tissues comprising these cells. They are preferably delivered to and expressed in persistent, non-dividing cells which are differentiated, although delivery and expression may be achieved in non-differentiated or less completely differentiated cells, such as, for example, stem cells of blood or skin fibroblasts. In vivo muscle cells are particularly competent in their ability to take up and express polynucleotides.

[0592] For the naked nucleic acid sequence injection, an effective dosage amount of DNA or RNA will be in the range of from about 0.05 mg/kg body weight to about 50 mg/kg body weight. Preferably the dosage will be from about 0.005 mg/kg to about 20 mg/kg and more preferably from about 0.05 mg/kg to about 5 mg/kg. Of course, as the artisan of ordinary skill will appreciate, this dosage will vary according to the tissue site of injection. The appropriate and effective dosage of nucleic acid sequence can readily be determined by those of ordinary skill in the art and may depend on the condition being treated and the route of administration.

[0593] The preferred route of administration is by the parenteral route of injection into the interstitial space of tissues. However, other parenteral routes may also be used, such as, inhalation of an aerosol formulation particularly for delivery to lungs or bronchial tissues, throat or mucous membranes of the nose. In addition, naked DNA constructs can be delivered to arteries during angioplasty by the catheter used in the procedure.

[0594] The naked polynucleotides are delivered by any method known in the art, including, but not limited to, direct needle injection at the delivery site, intravenous injection, topical administration, catheter infusion, and so-called “gene guns”. These delivery methods are known in the art.

[0595] The constructs may also be delivered with delivery vehicles such as viral sequences, viral particles, liposome formulations, lipofectin, precipitating agents, etc. Such methods of delivery are known in the art.

[0596] In certain embodiments, the polynucleotide constructs are complexed in a liposome preparation. Liposomal preparations for use in the instant invention include cationic (positively charged), anionic (negatively charged) and neutral preparations. However, cationic liposomes are particularly preferred because a tight charge complex can be formed between the cationic liposome and the polyanionic nucleic acid. Cationic liposomes have been shown to mediate intracellular delivery of plasmid DNA (Felgner et al., Proc. Natl. Acad. Sci. USA (1987) 84:7413-7416, which is herein incorporated by reference); mRNA (Malone et al., Proc. Natl. Acad. Sci. USA (1989) 86:6077-6081, which is herein incorporated by reference); and purified transcription factors (Debs et al., J. Biol. Chem. (1990) 265:10189-10192, which is herein incorporated by reference), in functional form.

[0597] Cationic liposomes are readily available. For example, N[1-2,3-dioleyloxy)propyl]-N,N,N-triethylammonium (DOTMA) liposomes are particularly useful and are available under the trademark Lipofectin, from GIBCO BRL, Grand Island, N.Y. (See, also, Felgner et al., Proc. Natl. Acad. Sci. USA (1987) 84:7413-7416, which is herein incorporated by reference). Other commercially available liposomes include transfectace (DDAB/DOPE) and DOTAP/DOPE (Boehringer).

[0598] Other cationic liposomes can be prepared from readily available materials using techniques well known in the art. See, e.g. PCT Publication No. WO 90/11092 (which is herein incorporated by reference) for a description of the synthesis of DOTAP (1,2-bis(oleoyloxy)-3-(trimethylammonio)propane) liposomes. Preparation of DOTMA liposomes is explained in the literature, see, e.g., P. Felgner et al., Proc. Natl. Acad. Sci. USA 84:7413-7417, which is herein incorporated by reference. Similar methods can be used to prepare liposomes from other cationic lipid materials.

[0599] Similarly, anionic and neutral liposomes are readily available, such as from Avanti Polar Lipids (Birmingham, Ala.), or can be easily prepared using readily available materials. Such materials include phosphatidyl, choline, cholesterol, phosphatidyl ethanolamine, dioleoylphosphatidyl choline (DOPC), dioleoylphosphatidyl glycerol (DOPG), dioleoylphoshatidyl ethanolamine (DOPE), among others. These materials can also be mixed with the DOTMA and DOTAP starting materials in appropriate ratios. Methods for making liposomes using these materials are well known in the art.

[0600] For example, commercially dioleoylphosphatidyl choline (DOPC), dioleoylphosphatidyl glycerol (DOPG), and dioleoylphosphatidyl ethanolamine (DOPE) can be used in various combinations to make conventional liposomes, with or without the addition of cholesterol. Thus, for example, DOPG/DOPC vesicles can be prepared by drying 50 mg each of DOPG and DOPC under a stream of nitrogen gas into a sonication vial. The sample is placed under a vacuum pump overnight and is hydrated the following day with deionized water. The sample is then sonicated for 2 hours in a capped vial, using a Heat Systems model 350 sonicator equipped with an inverted cup (bath type) probe at the maximum setting while the bath is circulated at 15EC. Alternatively, negatively charged vesicles can be prepared without sonication to produce multilamellar vesicles or by extrusion through nucleopore membranes to produce unilamellar vesicles of discrete size. Other methods are known and available to those of skill in the art.

[0601] The liposomes can comprise multilamellar vesicles (MLVs), small unilamellar vesicles (SUVs), or large unilamellar vesicles (LUVs), with SUVs being preferred. The various liposome-nucleic acid complexes are prepared using methods well known in the art. See, e.g., Straubinger et al., Methods of Immunology (1983), 101:512-527, which is herein incorporated by reference. For example, MLVs containing nucleic acid can be prepared by depositing a thin film of phospholipid on the walls of a glass tube and subsequently hydrating with a solution of the material to be encapsulated. SUVs are prepared by extended sonication of MLVs to produce a homogeneous population of unilamellar liposomes. The material to be entrapped is added to a suspension of preformed MLVs and then sonicated. When using liposomes containing cationic lipids, the dried lipid film is resuspended in an appropriate solution such as sterile water or an isotonic buffer solution such as 10 mM Tris/NaCl, sonicated, and then the preformed liposomes are mixed directly with the DNA. The liposome and DNA form a very stable complex due to binding of the positively charged liposomes to the cationic DNA. SUVs find use with small nucleic acid fragments. LUVs are prepared by a number of methods, well known in the art. Commonly used methods include Ca²⁺-EDTA chelation (Papahadjopoulos et al., Biochim. Biophys. Acta (1975) 394:483; Wilson et al., Cell 17:77 (1979)); ether injection (Deamer, D. and Bangham, A., Biochim. Biophys. Acta 443:629 (1976); Ostro et al., Biochem. Biophys. Res. Commun. 76:836 (1977); Fraley et al., Proc. Natl. Acad. Sci. USA 76:3348 (1979)); detergent dialysis (Enoch, H. and Strittmatter, P., Proc. Natl. Acad. Sci. USA 76:145 (1979)); and reverse-phase evaporation (REV) (Fraley et al., J. Biol. Chem. 255:10431 (1980); Szoka, F. and Papahadjopoulos, D., Proc. Natl. Acad. Sci. USA 75:145 (1978); Schaefer-Ridder et al., Science 215:166 (1982)), which are herein incorporated by reference.

[0602] Generally, the ratio of DNA to liposomes will be from about 10:1 to about 1:10. Preferably, the ration will be from about 5:1 to about 1:5. More preferably, the ration will be about 3:1 to about 1:3. Still more preferably, the ratio will be about 1:1.

[0603] U.S. Pat. No. 5,676,954 (which is herein incorporated by reference) reports on the injection of genetic material, complexed with cationic liposomes carriers, into mice. U.S. Pat. Nos. 4,897,355, 4,946,787, 5,049,386, 5,459,127, 5,589,466, 5,693,622, 5,580,859, 5,703,055, and international publication no. WO 94/9469 (which are herein incorporated by reference) provide cationic lipids for use in transfecting DNA into cells and mammals. U.S. Pat. Nos. 5,589,466, 5,693,622, 5,580,859, 5,703,055, and international publication no. WO 94/9469 provide methods for delivering DNA-cationic lipid complexes to mammals.

[0604] In certain embodiments, cells are engineered, ex vivo or in vivo, using a retroviral particle containing RNA which comprises a sequence encoding a polypeptide of the present invention. Retroviruses from which the retroviral plasmid vectors may be derived include, but are not limited to, Moloney Murine Leukemia Virus, spleen necrosis virus, Rous sarcoma Virus, Harvey Sarcoma Virus, avian leukosis virus, gibbon ape leukemia virus, human immunodeficiency virus, Myeloproliferative Sarcoma Virus, and mammary tumor virus.

[0605] The retroviral plasmid vector is employed to transduce packaging cell lines to form producer cell lines. Examples of packaging cells which may be transfected include, but are not limited to, the PE501, PA317, R-2, R-AM, PA12, T19-14X, VT-19-17-H2, RCRE, RCRIP, GP+E-86, GP+envAm12, and DAN cell lines as described in Miller, Human Gene Therapy 1:5-14 (1990), which is incorporated herein by reference in its entirety. The vector may transduce the packaging cells through any means known in the art. Such means include, but are not limited to, electroporation, the use of liposomes, and CaPO₄ precipitation. In one alternative, the retroviral plasmid vector may be encapsulated into a liposome, or coupled to a lipid, and then administered to a host.

[0606] The producer cell line generates infectious retroviral vector particles which include polynucleotide encoding a polypeptide of the present invention. Such retroviral vector particles then may be employed, to transduce eukaryotic cells, either in vitro or in vivo. The transduced eukaryotic cells will express a polypeptide of the present invention.

[0607] In certain other embodiments, cells are engineered, ex vivo or in vivo, with polynucleotide contained in an adenovirus vector. Adenovirus can be manipulated such that it encodes and expresses a polypeptide of the present invention, and at the same time is inactivated in terms of its ability to replicate in a normal lytic viral life cycle. Adenovirus expression is achieved without integration of the viral DNA into the host cell chromosome, thereby alleviating concerns about insertional mutagenesis. Furthermore, adenoviruses have been used as live enteric vaccines for many years with an excellent safety profile (Schwartz et al. Am. Rev. Respir. Dis. 109:233-238 (1974)). Finally, adenovirus mediated gene transfer has been demonstrated in a number of instances including transfer of alpha-1-antitrypsin and CFTR to the lungs of cotton rats (Rosenfeld, M. A. et al. (1991) Science 252:431-434; Rosenfeld et al., (1992) Cell 68:143-155). Furthermore, extensive studies to attempt to establish adenovirus as a causative agent in human cancer were uniformly negative (Green, M. et al. (1979) Proc. Natl. Acad. Sci. USA 76:6606).

[0608] Suitable adenoviral vectors useful in the present invention are described, for example, in Kozarsky and Wilson, Curr. Opin. Genet. Devel. 3:499-503 (1993); Rosenfeld et al., Cell 68:143-155 (1992); Engelhardt et al., Human Genet. Ther. 4:759-769 (1993); Yang et al., Nature Genet. 7:362-369 (1994); Wilson et al., Nature 365:691-692 (1993); and U.S. Pat. No. 5,652,224, which are herein incorporated by reference. For example, the adenovirus vector Ad2 is useful and can be grown in human 293 cells. These cells contain the E1 region of adenovirus and constitutively express E1a and E1b, which complement the defective adenoviruses by providing the products of the genes deleted from the vector. In addition to Ad2, other varieties of adenovirus (e.g., Ad3, Ad5, and Ad7) are also useful in the present invention.

[0609] Preferably, the adenoviruses used in the present invention are replication deficient. Replication deficient adenoviruses require the aid of a helper virus and/or packaging cell line to form infectious particles. The resulting virus is capable of infecting cells and can express a polynucleotide of interest which is operably linked to a promoter, but cannot replicate in most cells. Replication deficient adenoviruses may be deleted in one or more of all or a portion of the following genes: E1a, E1b, E3, E4, E2a, or L1 through L5.

[0610] In certain other embodiments, the cells are engineered, ex vivo or in vivo, using an adeno-associated virus (AAV). AAVs are naturally occurring defective viruses that require helper viruses to produce infectious particles (Muzyczka, N., Curr. Topics in Microbiol. Immunol. 158:97 (1992)). It is also one of the few viruses that may integrate its DNA into non-dividing cells. Vectors containing as little as 300 base pairs of AAV can be packaged and can integrate, but space for exogenous DNA is limited to about 4.5 kb. Methods for producing and using such AAVs are known in the art. See, for example, U.S. Pat. Nos. 5,139,941, 5,173,414, 5,354,678, 5,436,146, 5,474,935, 5,478,745, and 5,589,377.

[0611] For example, an appropriate AAV vector for use in the present invention will include all the sequences necessary for DNA replication, encapsidation, and host-cell integration. The polynucleotide construct is inserted into the AAV vector using standard cloning methods, such as those found in Sambrook et al., Molecular Cloning: A Laboratory Manual, Cold Spring Harbor Press (1989). The recombinant AAV vector is then transfected into packaging cells which are infected with a helper virus, using any standard technique, including lipofection, electroporation, calcium phosphate precipitation, etc. Appropriate helper viruses include adenoviruses, cytomegaloviruses, vaccinia viruses, or herpes viruses. Once the packaging cells are transfected and infected, they will produce infectious AAV viral particles which contain the polynucleotide construct. These viral particles are then used to transduce eukaryotic cells, either ex vivo or in vivo. The transduced cells will contain the polynucleotide construct integrated into its genome, and will express a polypeptide of the invention.

[0612] Another method of gene therapy involves operably associating heterologous control regions and endogenous polynucleotide sequences (e.g. encoding a polypeptide of the present invention) via homologous recombination (see, e.g., U.S. Pat. No. 5,641,670, issued Jun. 24, 1997; International Publication No. WO 96/29411, published Sep. 26, 1996; International Publication No. WO 94/12650, published Aug. 4, 1994; Koller et al., Proc. Natl. Acad. Sci. USA 86:8932-8935 (1989); and Zijlstra et al., Nature 342:435-438 (1989), which are herein encorporated by reference. This method involves the activation of a gene which is present in the target cells, but which is not normally expressed in the cells, or is expressed at a lower level than desired.

[0613] Polynucleotide constructs are made, using standard techniques known in the art, which contain the promoter with targeting sequences flanking the promoter. Suitable promoters are described herein. The targeting sequence is sufficiently complementary to an endogenous sequence to permit homologous recombination of the promoter-targeting sequence with the endogenous sequence. The targeting sequence will be sufficiently near the 5′ end of the desired endogenous polynucleotide sequence so the promoter will be operably linked to the endogenous sequence upon homologous recombination.

[0614] The promoter and the targeting sequences can be amplified using PCR. Preferably, the amplified promoter contains distinct restriction enzyme sites on the 5′ and 3′ ends. Preferably, the 3′ end of the first targeting sequence contains the same restriction enzyme site as the 5′ end of the amplified promoter and the 5′ end of the second targeting sequence contains the same restriction site as the 3′ end of the amplified promoter. The amplified promoter and targeting sequences are digested and ligated together.

[0615] The promoter-targeting sequence construct is delivered to the cells, either as naked polynucleotide, or in conjunction with transfection-facilitating agents, such as liposomes, viral sequences, viral particles, whole viruses, lipofection, precipitating agents, etc., described in more detail above. The P promoter-targeting sequence can be delivered by any method, included direct needle injection, intravenous injection, topical administration, catheter infusion, particle accelerators, etc. The methods are described in more detail below.

[0616] The promoter-targeting sequence construct is taken up by cells. Homologous recombination between the construct and the endogenous sequence takes place, such that an endogenous sequence is placed under the control of the promoter. The promoter then drives the expression of the endogenous sequence.

[0617] The polynucleotide encoding a polypeptide of the present invention may contain a secretory signal sequence that facilitates secretion of the protein. Typically, the signal sequence is positioned in the coding region of the polynucleotide to be expressed towards or at the 5′ end of the coding region. The signal sequence may be homologous or heterologous to the polynucleotide of interest and may be homologous or heterologous to the cells to be transfected. Additionally, the signal sequence may be chemically synthesized using methods known in the art.

[0618] Any mode of administration of any of the above-described polynucleotides constructs can be used so long as the mode results in the expression of one or more molecules in an amount sufficient to provide a therapeutic effect. This includes direct needle injection, systemic injection, catheter infusion, biolistic injectors, particle accelerators (i.e., “gene guns”), gelfoam sponge depots, other commercially available depot materials, osmotic pumps (e.g., Alza minipumps), oral or suppositorial solid (tablet or pill) pharmaceutical formulations, and decanting or topical applications during surgery. For example, direct injection of naked calcium phosphate-precipitated plasmid into rat liver and rat spleen or a protein-coated plasmid into the portal vein has resulted in gene expression of the foreign gene in the rat livers (Kaneda et al., Science 243:375 (1989)).

[0619] A preferred method of local administration is by direct injection. Preferably, a recombinant molecule of the present invention complexed with a delivery vehicle is administered by direct injection into or locally within the area of arteries. Administration of a composition locally within the area of arteries refers to injecting the composition centimeters and preferably, millimeters within arteries.

[0620] Another method of local administration is to contact a polynucleotide construct of the present invention in or around a surgical wound. For example, a patient can undergo surgery and the polynucleotide construct can be coated on the surface of tissue inside the wound or the construct can be injected into areas of tissue inside the wound.

[0621] Therapeutic compositions useful in systemic administration, include recombinant molecules of the present invention complexed to a targeted delivery vehicle of the present invention. Suitable delivery vehicles for use with systemic administration comprise liposomes comprising ligands for targeting the vehicle to a particular site. In specific embodiments, suitable delivery vehicles for use with systemic administration comprise liposomes comprising polypeptides of the invention for targeting the vehicle to a particular site.

[0622] Preferred methods of systemic administration, include intravenous injection, aerosol, oral and percutaneous (topical) delivery. Intravenous injections can be performed using methods standard in the art. Aerosol delivery can also be performed using methods standard in the art (see, for example, Stribling et al., Proc. Natl. Acad. Sci. USA 189:11277-11281, 1992, which is incorporated herein by reference). Oral delivery can be performed by complexing a polynucleotide construct of the present invention to a carrier capable of withstanding degradation by digestive enzymes in the gut of an animal. Examples of such carriers, include plastic capsules or tablets, such as those known in the art. Topical delivery can be performed by mixing a polynucleotide construct of the present invention with a lipophilic reagent (e.g., DMSO) that is capable of passing into the skin.

[0623] Determining an effective amount of substance to be delivered can depend upon a number of factors including, for example, the chemical structure and biological activity of the substance, the age and weight of the animal, the precise condition requiring treatment and its severity, and the route of administration. The frequency of treatments depends upon a number of factors, such as the amount of polynucleotide constructs administered per dose, as well as the health and history of the subject. The precise amount, number of doses, and timing of doses will be determined by the attending physician or veterinarian.

[0624] Therapeutic compositions of the present invention can be administered to any animal, preferably to mammals and birds. Preferred mammals include humans, dogs, cats, mice, rats, rabbits sheep, cattle, horses and pigs, with humans being particularly preferred.

Biological Activities

[0625] Polynucleotides or polypeptides, or agonists or antagonists of the present invention, can be used in assays to test for one or more biological activities. If these polynucleotides or polypeptides, or agonists or antagonists of the present invention, do exhibit activity in a particular assay, it is likely that these molecules may be involved in the diseases associated with the biological activity. Thus, the polynucleotides and polypeptides, and agonists or antagonists could be used to treat the associated disease.

[0626] Members of the secreted family of proteins are believed to be involved in biological activities associated with, for example, cellular signaling. Accordingly, compositions of the invention (including polynucleotides, polypeptides and antibodies of the invention, and fragments and variants thereof) may be used in diagnosis, prognosis, prevention and/or treatment of diseases and/or disorders associated with aberrant activity of secreted polypeptides.

[0627] In preferred embodiments, compositions of the invention (including polynucleotides, polypeptides and antibodies of the invention, and fragments and variants thereof) may be used in the diagnosis, prognosis, prevention and/or treatment of diseases and/or disorders relating to diseases and disorders of the endocrine system, the nervous system (See, for example, “Neurological Disorders” section below), and the immune system (See, for example, “Immune Activity” section below).

[0628] In certain embodiments, a polypeptide of the invention, or polynucleotides, antibodies, agonists, or antagonists corresponding to that polypeptide, may be used to diagnose and/or prognose diseases and/or disorders associated with the tissue(s) in which the polypeptide of the invention is expressed including one, two, three, four, five, or more tissues disclosed in Table 1B.2, column 5 (Tissue Distribution Library Code).

[0629] Thus, polynucleotides, translation products and antibodies of the invention are useful in the diagnosis, detection and/or treatment of diseases and/or disorders associated with activities that include, but are not limited to, prohormone activation, neurotransmitter activity, cellular signaling, cellular proliferation, cellular differentiation, and cell migration.

[0630] More generally, polynucleotides, translation products and antibodies corresponding to this gene may be useful for the diagnosis, prognosis, prevention and/or treatment of diseases and/or disorders associated with the following systems.

Immune Activity

[0631] Polynucleotides, polypeptides, antibodies, and/or agonists or antagonists of the present invention may be useful in treating, preventing, diagnosing and/or prognosing diseases, disorders, and/or conditions of the immune system, by, for example, activating or inhibiting the proliferation, differentiation, or mobilization (chemotaxis) of immune cells. Immune cells develop through a process called hematopoiesis, producing myeloid (platelets, red blood cells, neutrophils, and macrophages) and lymphoid (B and T lymphocytes) cells from pluripotent stem cells. The etiology of these immune diseases, disorders, and/or conditions may be genetic, somatic, such as cancer and some autoimmune diseases, acquired (e.g., by chemotherapy or toxins), or infectious. Moreover, polynucleotides, polypeptides, antibodies, and/or agonists or antagonists of the present invention can be used as a marker or detector of a particular immune system disease or disorder.

[0632] In another embodiment, a polypeptide of the invention, or polynucleotides, antibodies, agonists, or antagonists corresponding to that polypeptide, may be used to treat diseases and disorders of the immune system and/or to inhibit or enhance an immune response generated by cells associated with the tissue(s) in which the polypeptide of the invention is expressed, including one, two, three, four, five, or more tissues disclosed in Table 1B.2, column 5 (Tissue Distribution Library Code).

[0633] Polynucleotides, polypeptides, antibodies, and/or agonists or antagonists of the present invention may be useful in treating, preventing, diagnosing, and/or prognosing immunodeficiencies, including both congenital and acquired immunodeficiencies. Examples of B cell immunodeficiencies in which immunoglobulin levels B cell function and/or B cell numbers are decreased include: X-linked agammaglobulinemia (Bruton's disease), X-linked infantile agammaglobulinemia, X-linked immunodeficiency with hyper IgM, non X-linked immunodeficiency with hyper IgM, X-linked lymphoproliferative syndrome (XLP), agammaglobulinemia including congenital and acquired agammaglobulinemia, adult onset agammaglobulinemia, late-onset agammaglobulinemia, dysgammaglobulinemia, hypogammaglobulinemia, unspecified hypogammaglobulinemia, recessive agammaglobulinemia (Swiss type), Selective IgM deficiency, selective IgA deficiency, selective IgG subclass deficiencies, IgG subclass deficiency (with or without IgA deficiency), Ig deficiency with increased IgM, IgG and IgA deficiency with increased IgM, antibody deficiency with normal or elevated Igs, Ig heavy chain deletions, kappa chain deficiency, B cell lymphoproliferative disorder (BLPD), common variable immunodeficiency (CVID), common variable immunodeficiency (CVI) (acquired), and transient hypogammaglobulinemia of infancy.

[0634] In specific embodiments, ataxia-telangiectasia or conditions associated with ataxia-telangiectasia are treated, prevented, diagnosed, and/or prognosing using the polypeptides or polynucleotides of the invention, and/or agonists or antagonists thereof.

[0635] Examples of congenital immunodeficiencies in which T cell and/or B cell function and/or number is decreased include, but are not limited to: DiGeorge anomaly, severe combined immunodeficiencies (SCID) (including, but not limited to, X-linked SCID, autosomal recessive SCID, adenosine deaminase deficiency, purine nucleoside phosphorylase (PNP) deficiency, Class II MHC deficiency (Bare lymphocyte syndrome), Wiskott-Aldrich syndrome, and ataxia telangiectasia), thymic hypoplasia, third and fourth pharyngeal pouch syndrome, 22q11.2 deletion, chronic mucocutaneous candidiasis, natural killer cell deficiency (NK), idiopathic CD4+ T-lymphocytopenia, immunodeficiency with predominant T cell defect (unspecified), and unspecified immunodeficiency of cell mediated immunity.

[0636] In specific embodiments, DiGeorge anomaly or conditions associated with DiGeorge anomaly are treated, prevented, diagnosed, and/or prognosed using polypeptides or polynucleotides of the invention, or antagonists or agonists thereof.

[0637] Other immunodeficiencies that may be treated, prevented, diagnosed, and/or prognosed using polypeptides or polynucleotides of the invention, and/or agonists or antagonists thereof, include, but are not limited to, chronic granulomatous disease, Chediak-Higashi syndrome, myeloperoxidase deficiency, leukocyte glucose-6-phosphate dehydrogenase deficiency, X-linked lymphoproliferative syndrome (XLP), leukocyte adhesion deficiency, complement component deficiencies (including C1, C2, C3, C4, C5, C6, C7, C8 and/or C9 deficiencies), reticular dysgenesis, thymic alymphoplasia-aplasia, immunodeficiency with thymoma, severe congenital leukopenia, dysplasia with immunodeficiency, neonatal neutropenia, short limbed dwarfism, and Nezelof syndrome-combined immunodeficiency with Igs.

[0638] In a preferred embodiment, the immunodeficiencies and/or conditions associated with the immunodeficiencies recited above are treated, prevented, diagnosed and/or prognosed using polynucleotides, polypeptides, antibodies, and/or agonists or antagonists of the present invention.

[0639] In a preferred embodiment polynucleotides, polypeptides, antibodies, and/or agonists or antagonists of the present invention could be used as an agent to boost immunoresponsiveness among immunodeficient individuals. In specific embodiments, polynucleotides, polypeptides, antibodies, and/or agonists or antagonists of the present invention could be used as an agent to boost immunoresponsiveness among B cell and/or T cell immunodeficient individuals.

[0640] The polynucleotides, polypeptides, antibodies, and/or agonists or antagonists of the present invention may be useful in treating, preventing, diagnosing and/or prognosing autoimmune disorders. Many autoimmune disorders result from inappropriate recognition of self as foreign material by immune cells. This inappropriate recognition results in an immune response leading to the destruction of the host tissue. Therefore, the administration of polynucleotides and polypeptides of the invention that can inhibit an immune response, particularly the proliferation, differentiation, or chemotaxis of T-cells, may be an effective therapy in preventing autoimmune disorders.

[0641] Autoimmune diseases or disorders that may be treated, prevented, diagnosed and/or prognosed by polynucleotides, polypeptides, antibodies, and/or agonists or antagonists of the present invention include, but are not limited to, one or more of the following: systemic lupus erythematosus, rheumatoid arthritis, ankylosing spondylitis, multiple sclerosis, autoimmune thyroiditis, Hashimoto's thyroiditis, autoimmune hemolytic anemia, hemolytic anemia, thrombocytopenia, autoimmune thrombocytopenia purpura, autoimmune neonatal thrombocytopenia, idiopathic thrombocytopenia purpura, purpura (e.g., Henloch-Scoenlein purpura), autoimmunocytopenia, Goodpasture's syndrome, Pemphigus vulgaris, myasthenia gravis, Grave's disease (hyperthyroidism), and insulin-resistant diabetes mellitus.

[0642] Additional disorders that are likely to have an autoimmune component that may be treated, prevented, and/or diagnosed with the compositions of the invention include, but are not limited to, type II collagen-induced arthritis, antiphospholipid syndrome, dermatitis, allergic encephalomyelitis, myocarditis, relapsing polychondritis, rheumatic heart disease, neuritis, uveitis ophthalmia, polyendocrinopathies, Reiter's Disease, Stiff-Man Syndrome, autoimmune pulmonary inflammation, autism, Guillain-Barre Syndrome, insulin dependent diabetes mellitus, and autoimmune inflammatory eye disorders.

[0643] Additional disorders that are likely to have an autoimmune component that may be treated, prevented, diagnosed and/or prognosed with the compositions of the invention include, but are not limited to, scleroderma with anti-collagen antibodies (often characterized, e.g., by nucleolar and other nuclear antibodies), mixed connective tissue disease (often characterized, e.g., by antibodies to extractable nuclear antigens (e.g., ribonucleoprotein)), polymyositis (often characterized, e.g., by nonhistone ANA), pernicious anemia (often characterized, e.g., by antiparietal cell, microsomes, and intrinsic factor antibodies), idiopathic Addison's disease (often characterized, e.g., by humoral and cell-mediated adrenal cytotoxicity, infertility (often characterized, e.g., by antispermatozoal antibodies), glomerulonephritis (often characterized, e.g., by glomerular basement membrane antibodies or immune complexes), bullous pemphigoid (often characterized, e.g., by IgG and complement in basement membrane), Sjogren's syndrome (often characterized, e.g., by multiple tissue antibodies, and/or a specific nonhistone ANA (SS-B)), diabetes mellitus (often characterized, e.g., by cell-mediated and humoral islet cell antibodies), and adrenergic drug resistance (including adrenergic drug resistance with asthma or cystic fibrosis) (often characterized, e.g., by beta-adrenergic receptor antibodies).

[0644] Additional disorders that may have an autoimmune component that may be treated, prevented, diagnosed and/or prognosed with the compositions of the invention include, but are not limited to, chronic active hepatitis (often characterized, e.g., by smooth muscle antibodies), primary biliary cirrhosis (often characterized, e.g., by mitochondria antibodies), other endocrine gland failure (often characterized, e.g., by specific tissue antibodies in some cases), vitiligo (often characterized, e.g., by melanocyte antibodies), vasculitis (often characterized, e.g., by Ig and complement in vessel walls and/or low serum complement), post-MI (often characterized, e.g., by myocardial antibodies), cardiotomy syndrome (often characterized, e.g., by myocardial antibodies), urticaria (often characterized, e.g., by IgG and IgM antibodies to IgE), atopic dermatitis (often characterized, e.g., by IgG and IgM antibodies to IgE), asthma (often characterized, e.g., by IgG and IgM antibodies to IgE), and many other inflammatory, granulomatous, degenerative, and atrophic disorders.

[0645] In a preferred embodiment, the autoimmune diseases and disorders and/or conditions associated with the diseases and disorders recited above are treated, prevented, diagnosed and/or prognosed using for example, antagonists or agonists, polypeptides or polynucleotides, or antibodies of the present invention. In a specific preferred embodiment, rheumatoid arthritis is treated, prevented, and/or diagnosed using polynucleotides, polypeptides, antibodies, and/or agonists or antagonists of the present invention.

[0646] In another specific preferred embodiment, systemic lupus erythematosus is treated, prevented, and/or diagnosed using polynucleotides, polypeptides, antibodies, and/or agonists or antagonists of the present invention. In another specific preferred embodiment, idiopathic thrombocytopenia purpura is treated, prevented, and/or diagnosed using polynucleotides, polypeptides, antibodies, and/or agonists or antagonists of the present invention.

[0647] In another specific preferred embodiment IgA nephropathy is treated, prevented, and/or diagnosed using polynucleotides, polypeptides, antibodies, and/or agonists or antagonists of the present invention.

[0648] In a preferred embodiment, the autoimmune diseases and disorders and/or conditions associated with the diseases and disorders recited above are treated, prevented, diagnosed and/or prognosed using polynucleotides, polypeptides, antibodies, and/or agonists or antagonists of the present invention

[0649] In preferred embodiments, polypeptides, antibodies, polynucleotides and/or agonists or antagonists of the present invention are used as a immunosuppressive agent(s).

[0650] Polynucleotides, polypeptides, antibodies, and/or agonists or antagonists of the present invention may be useful in treating, preventing, prognosing, and/or diagnosing diseases, disorders, and/or conditions of hematopoietic cells. Polynucleotides, polypeptides, antibodies, and/or agonists or antagonists of the present invention could be used to increase differentiation and proliferation of hematopoietic cells, including the pluripotent stem cells, in an effort to treat or prevent those diseases, disorders, and/or conditions associated with a decrease in certain (or many) types hematopoietic cells, including but not limited to, leukopenia, neutropenia, anemia, and thrombocytopenia. Alternatively, Polynucleotides, polypeptides, antibodies, and/or agonists or antagonists of the present invention could be used to increase differentiation and proliferation of hematopoietic cells, including the pluripotent stem cells, in an effort to treat or prevent those diseases, disorders, and/or conditions associated with an increase in certain (or many) types of hematopoietic cells, including but not limited to, histiocytosis.

[0651] Allergic reactions and conditions, such as asthma (particularly allergic asthma) or other respiratory problems, may also be treated, prevented, diagnosed and/or prognosed using polypeptides, antibodies, or polynucleotides of the invention, and/or agonists or antagonists thereof. Moreover, these molecules can be used to treat, prevent, prognose, and/or diagnose anaphylaxis, hypersensitivity to an antigenic molecule, or blood group incompatibility.

[0652] Additionally, polypeptides or polynucleotides of the invention, and/or agonists or antagonists thereof, may be used to treat, prevent, diagnose and/or prognose IgE-mediated allergic reactions. Such allergic reactions include, but are not limited to, asthma, rhinitis, and eczema. In specific embodiments, polynucleotides, polypeptides, antibodies, and/or agonists or antagonists of the present invention may be used to modulate IgE concentrations in vitro or in vivo.

[0653] Moreover, polynucleotides, polypeptides, antibodies, and/or agonists or antagonists of the present invention have uses in the diagnosis, prognosis, prevention, and/or treatment of inflammatory conditions. For example, since polypeptides, antibodies, or polynucleotides of the invention, and/or agonists or antagonists of the invention may inhibit the activation, proliferation and/or differentiation of cells involved in an inflammatory response, these molecules can be used to prevent and/or treat chronic and acute inflammatory conditions. Such inflammatory conditions include, but are not limited to, for example, inflammation associated with infection (e.g., septic shock, sepsis, or systemic inflammatory response syndrome), ischemia-reperfusion injury, endotoxin lethality, complement-mediated hyperacute rejection, nephritis, cytokine or chemokine induced lung injury, inflammatory bowel disease, Crohn's disease, over production of cytokines (e.g., TNF or IL-1.), respiratory disorders (e.g., asthma and allergy); gastrointestinal disorders (e.g., inflammatory bowel disease); cancers (e.g., gastric, ovarian, lung, bladder, liver, and breast); CNS disorders (e.g., multiple sclerosis; ischemic brain injury and/or stroke, traumatic brain injury, neurodegenerative disorders (e.g., Parkinson's disease and Alzheimer's disease); AIDS-related dementia; and prion disease); cardiovascular disorders (e.g., atherosclerosis, myocarditis, cardiovascular disease, and cardiopulmonary bypass complications); as well as many additional diseases, conditions, and disorders that are characterized by inflammation (e.g., hepatitis, rheumatoid arthritis, gout, trauma, pancreatitis, sarcoidosis, dermatitis, renal ischemia-reperfusion injury, Grave's disease, systemic lupus erythematosus, diabetes mellitus, and allogenic transplant rejection).

[0654] Because inflammation is a fundamental defense mechanism, inflammatory disorders can effect virtually any tissue of the body. Accordingly, polynucleotides, polypeptides, and antibodies of the invention, as well as agonists or antagonists thereof, have uses in the treatment of tissue-specific inflammatory disorders, including, but not limited to, adrenalitis, alveolitis, angiocholecystitis, appendicitis, balanitis, blepharitis, bronchitis, bursitis, carditis, cellulitis, cervicitis, cholecystitis, chorditis, cochlitis, colitis, conjunctivitis, cystitis, dermatitis, diverticulitis, encephalitis, endocarditis, esophagitis, eustachitis, fibrositis, folliculitis, gastritis, gastroenteritis, gingivitis, glossitis, hepatosplenitis, keratitis, labyrinthitis, laryngitis, lymphangitis, mastitis, media otitis, meningitis, metritis, mucitis, myocarditis, myosititis, myringitis, nephritis, neuritis, orchitis, osteochondritis, otitis, pericarditis, peritendonitis, peritonitis, pharyngitis, phlebitis, poliomyelitis, prostatitis, pulpitis, retinitis, rhinitis, salpingitis, scleritis, sclerochoroiditis, scrotitis, sinusitis, spondylitis, steatitis, stomatitis, synovitis, syringitis, tendonitis, tonsillitis, urethritis, and vaginitis.

[0655] In specific embodiments, polypeptides, antibodies, or polynucleotides of the invention, and/or agonists or antagonists thereof, are useful to diagnose, prognose, prevent, and/or treat organ transplant rejections and graft-versus-host disease. Organ rejection occurs by host immune cell destruction of the transplanted tissue through an immune response. Similarly, an immune response is also involved in GVHD, but, in this case, the foreign transplanted immune cells destroy the host tissues. Polypeptides, antibodies, or polynucleotides of the invention, and/or agonists or antagonists thereof, that inhibit an immune response, particularly the activation, proliferation, differentiation, or chemotaxis of T-cells, may be an effective therapy in preventing organ rejection or GVHD. In specific embodiments, polypeptides, antibodies, or polynucleotides of the invention, and/or agonists or antagonists thereof, that inhibit an immune response, particularly the activation, proliferation, differentiation, or chemotaxis of T-cells, may be an effective therapy in preventing experimental allergic and hyperacute xenograft rejection.

[0656] In other embodiments, polypeptides, antibodies, or polynucleotides of the invention, and/or agonists or antagonists thereof, are useful to diagnose, prognose, prevent, and/or treat immune complex diseases, including, but not limited to, serum sickness, post streptococcal glomerulonephritis, polyarteritis nodosa, and immune complex-induced vasculitis.

[0657] Polypeptides, antibodies, polynucleotides and/or agonists or antagonists of the invention can be used to treat, detect, and/or prevent infectious agents. For example, by increasing the immune response, particularly increasing the proliferation activation and/or differentiation of B and/or T cells, infectious diseases may be treated, detected, and/or prevented. The immune response may be increased by either enhancing an existing immune response, or by initiating a new immune response. Alternatively, polynucleotides, polypeptides, antibodies, and/or agonists or antagonists of the present invention may also directly inhibit the infectious agent (refer to section of application listing infectious agents, etc), without necessarily eliciting an immune response.

[0658] In another embodiment, polypeptides, antibodies, polynucleotides and/or agonists or antagonists of the present invention are used as a vaccine adjuvant that enhances immune responsiveness to an antigen. In a specific embodiment, polypeptides, antibodies, polynucleotides and/or agonists or antagonists of the present invention are used as an adjuvant to enhance tumor-specific immune responses.

[0659] In another specific embodiment, polypeptides, antibodies, polynucleotides and/or agonists or antagonists of the present invention are used as an adjuvant to enhance anti-viral immune responses. Anti-viral immune responses that may be enhanced using the compositions of the invention as an adjuvant, include virus and virus associated diseases or symptoms described herein or otherwise known in the art. In specific embodiments, the compositions of the invention are used as an adjuvant to enhance an immune response to a virus, disease, or symptom selected from the group consisting of: AIDS, meningitis, Dengue, EBV, and hepatitis (e.g., hepatitis B). In another specific embodiment, the compositions of the invention are used as an adjuvant to enhance an immune response to a virus, disease, or symptom selected from the group consisting of: HIV/AIDS, respiratory syncytial virus, Dengue, rotavirus, Japanese B encephalitis, influenza A and B, parainfluenza, measles, cytomegalovirus, rabies, Junin, Chikungunya, Rift Valley Fever, herpes simplex, and yellow fever.

[0660] In another specific embodiment, polypeptides, antibodies, polynucleotides and/or agonists or antagonists of the present invention are used as an adjuvant to enhance anti-bacterial or anti-fungal immune responses. Anti-bacterial or anti-fungal immune responses that may be enhanced using the compositions of the invention as an adjuvant, include bacteria or fungus and bacteria or fungus associated diseases or symptoms described herein or otherwise known in the art. In specific embodiments, the compositions of the invention are used as an adjuvant to enhance an immune response to a bacteria or fungus, disease, or symptom selected from the group consisting of: tetanus, Diphtheria, botulism, and meningitis type B.

[0661] In another specific embodiment, the compositions of the invention are used as an adjuvant to enhance an immune response to a bacteria or fungus, disease, or symptom selected from the group consisting of: Vibrio cholerae, Mycobacterium leprae, Salmonella typhi, Salmonella paratyphi, Meisseria meningitidis, Streptococcus pneumoniae, Group B streptococcus, Shigella spp., Enterotoxigenic Escherichia coli, Enterohemorrhagic E. coli, and Borrelia burgdorferi.

[0662] In another specific embodiment, polypeptides, antibodies, polynucleotides and/or agonists or antagonists of the present invention are used as an adjuvant to enhance anti-parasitic immune responses. Anti-parasitic immune responses that may be enhanced using the compositions of the invention as an adjuvant, include parasite and parasite associated diseases or symptoms described herein or otherwise known in the art. In specific embodiments, the compositions of the invention are used as an adjuvant to enhance an immune response to a parasite. In another specific embodiment, the compositions of the invention are used as an adjuvant to enhance an immune response to Plasmodium (malaria) or Leishmania.

[0663] In another specific embodiment, polypeptides, antibodies, polynucleotides and/or agonists or antagonists of the present invention may also be employed to treat infectious diseases including silicosis, sarcoidosis, and idiopathic pulmonary fibrosis; for example, by preventing the recruitment and activation of mononuclear phagocytes.

[0664] In another specific embodiment, polypeptides, antibodies, polynucleotides and/or agonists or antagonists of the present invention are used as an antigen for the generation of antibodies to inhibit or enhance immune mediated responses against polypeptides of the invention.

[0665] In one embodiment, polypeptides, antibodies, polynucleotides and/or agonists or antagonists of the present invention are administered to an animal (e.g., mouse, rat, rabbit, hamster, guinea pig, pigs, micro-pig, chicken, camel, goat, horse, cow, sheep, dog, cat, non-human primate, and human, most preferably human) to boost the immune system to produce increased quantities of one or more antibodies (e.g., IgG, IgA, IgM, and IgE), to induce higher affinity antibody production and immunoglobulin class switching (e.g., IgG, IgA, IgM, and IgE), and/or to increase an immune response.

[0666] In another specific embodiment, polypeptides, antibodies, polynucleotides and/or agonists or antagonists of the present invention are used as a stimulator of B cell responsiveness to pathogens.

[0667] In another specific embodiment, polypeptides, antibodies, polynucleotides and/or agonists or antagonists of the present invention are used as an activator of T cells.

[0668] In another specific embodiment, polypeptides, antibodies, polynucleotides and/or agonists or antagonists of the present invention are used as an agent that elevates the immune status of an individual prior to their receipt of immunosuppressive therapies.

[0669] In another specific embodiment, polypeptides, antibodies, polynucleotides and/or agonists or antagonists of the present invention are used as an agent to induce higher affinity antibodies.

[0670] In another specific embodiment, polypeptides, antibodies, polynucleotides and/or agonists or antagonists of the present invention are used as an agent to increase serum immunoglobulin concentrations.

[0671] In another specific embodiment, polypeptides, antibodies, polynucleotides and/or agonists or antagonists of the present invention are used as an agent to accelerate recovery of immunocompromised individuals.

[0672] In another specific embodiment, polypeptides, antibodies, polynucleotides and/or agonists or antagonists of the present invention are used as an agent to boost immunoresponsiveness among aged populations and/or neonates.

[0673] In another specific embodiment, polypeptides, antibodies, polynucleotides and/or agonists or antagonists of the present invention are used as an immune system enhancer prior to, during, or after bone marrow transplant and/or other transplants (e.g., allogeneic or xenogeneic organ transplantation). With respect to transplantation, compositions of the invention may be administered prior to, concomitant with, and/or after transplantation. In a specific embodiment, compositions of the invention are administered after transplantation, prior to the beginning of recovery of T-cell populations. In another specific embodiment, compositions of the invention are first administered after transplantation after the beginning of recovery of T cell populations, but prior to full recovery of B cell populations.

[0674] In another specific embodiment, polypeptides, antibodies, polynucleotides and/or agonists or antagonists of the present invention are used as an agent to boost immunoresponsiveness among individuals having an acquired loss of B cell function. Conditions resulting in an acquired loss of B cell function that may be ameliorated or treated by administering the polypeptides, antibodies, polynucleotides and/or agonists or antagonists thereof, include, but are not limited to, HIV Infection, AIDS, bone marrow transplant, and B cell chronic lymphocytic leukemia (CLL).

[0675] In another specific embodiment, polypeptides, antibodies, polynucleotides and/or agonists or antagonists of the present invention are used as an agent to boost immunoresponsiveness among individuals having a temporary immune deficiency. Conditions resulting in a temporary immune deficiency that may be ameliorated or treated by administering the polypeptides, antibodies, polynucleotides and/or agonists or antagonists thereof, include, but are not limited to, recovery from viral infections (e.g., influenza), conditions associated with malnutrition, recovery from infectious mononucleosis, or conditions associated with stress, recovery from measles, recovery from blood transfusion, and recovery from surgery.

[0676] In another specific embodiment, polypeptides, antibodies, polynucleotides and/or agonists or antagonists of the present invention are used as a regulator of antigen presentation by monocytes, dendritic cells, and/or B-cells. In one embodiment, polynucleotides, polypeptides, antibodies, and/or agonists or antagonists of the present invention enhance antigen presentation or antagonizes antigen presentation in vitro or in vivo. Moreover, in related embodiments, said enhancement or antagonism of antigen presentation may be useful as an anti-tumor treatment or to modulate the immune system.

[0677] In another specific embodiment, polypeptides, antibodies, polynucleotides and/or agonists or antagonists of the present invention are used as an agent to direct an individual's immune system towards development of a humoral response (i.e. TH2) as opposed to a TH1 cellular response.

[0678] In another specific embodiment, polypeptides, antibodies, polynucleotides and/or agonists or antagonists of the present invention are used as a means to induce tumor proliferation and thus make it more susceptible to anti-neoplastic agents. For example, multiple myeloma is a slowly dividing disease and is thus refractory to virtually all anti-neoplastic regimens. If these cells were forced to proliferate more rapidly their susceptibility profile would likely change.

[0679] In another specific embodiment, polypeptides, antibodies, polynucleotides and/or agonists or antagonists of the present invention are used as a stimulator of B cell production in pathologies such as AIDS, chronic lymphocyte disorder and/or Common Variable Immunodeficiency.

[0680] In another specific embodiment, polypeptides, antibodies, polynucleotides and/or agonists or antagonists of the present invention are used as a therapy for generation and/or regeneration of lymphoid tissues following surgery, trauma or genetic defect. In another specific embodiment, polypeptides, antibodies, polynucleotides and/or agonists or antagonists of the present invention are used in the pretreatment of bone marrow samples prior to transplant.

[0681] In another specific embodiment, polypeptides, antibodies, polynucleotides and/or agonists or antagonists of the present invention are used as a gene-based therapy for genetically inherited disorders resulting in immuno-incompetence/immunodeficiency such as observed among SCID patients.

[0682] In another specific embodiment, polypeptides, antibodies, polynucleotides and/or agonists or antagonists of the present invention are used as a means of activating monocytes/macrophages to defend against parasitic diseases that effect monocytes such as Leishmania.

[0683] In another specific embodiment, polypeptides, antibodies, polynucleotides and/or agonists or antagonists of the present invention are used as a means of regulating secreted cytokines that are elicited by polypeptides of the invention.

[0684] In another embodiment, polypeptides, antibodies, polynucleotides and/or agonists or antagonists of the present invention are used in one or more of the applications described herein, as they may apply to veterinary medicine.

[0685] In another specific embodiment, polypeptides, antibodies, polynucleotides and/or agonists or antagonists of the present invention are used as a means of blocking various aspects of immune responses to foreign agents or self. Examples of diseases or conditions in which blocking of certain aspects of immune responses may be desired include autoimmune disorders such as lupus, and arthritis, as well as immunoresponsiveness to skin allergies, inflammation, bowel disease, injury and diseases/disorders associated with pathogens.

[0686] In another specific embodiment, polypeptides, antibodies, polynucleotides and/or agonists or antagonists of the present invention are used as a therapy for preventing the B cell proliferation and Ig secretion associated with autoimmune diseases such as idiopathic thrombocytopenic purpura, systemic lupus erythematosus and multiple sclerosis.

[0687] In another specific embodiment, polypeptides, antibodies, polynucleotides and/or agonists or antagonists of the present invention are used as a inhibitor of B and/or T cell migration in endothelial cells. This activity disrupts tissue architecture or cognate responses and is useful, for example in disrupting immune responses, and blocking sepsis.

[0688] In another specific embodiment, polypeptides, antibodies, polynucleotides and/or agonists or antagonists of the present invention are used as a therapy for chronic hypergammaglobulinemia evident in such diseases as monoclonal gammopathy of undetermined significance (MGUS), Waldenstrom's disease, related idiopathic monoclonal gammopathies, and plasmacytomas.

[0689] In another specific embodiment, polypeptides, antibodies, polynucleotides and/or agonists or antagonists of the present invention may be employed for instance to inhibit polypeptide chemotaxis and activation of macrophages and their precursors, and of neutrophils, basophils, B lymphocytes and some T-cell subsets, e.g., activated and CD8 cytotoxic T cells and natural killer cells, in certain autoimmune and chronic inflammatory and infective diseases. Examples of autoimmune diseases are described herein and include multiple sclerosis, and insulin-dependent diabetes.

[0690] The polypeptides, antibodies, polynucleotides and/or agonists or antagonists of the present invention may also be employed to treat idiopathic hyper-eosinophilic syndrome by, for example, preventing eosinophil production and migration.

[0691] In another specific embodiment, polypeptides, antibodies, polynucleotides and/or agonists or antagonists of the present invention are used to enhance or inhibit complement mediated cell lysis.

[0692] In another specific embodiment, polypeptides, antibodies, polynucleotides and/or agonists or antagonists of the present invention are used to enhance or inhibit antibody dependent cellular cytotoxicity.

[0693] In another specific embodiment, polypeptides, antibodies, polynucleotides and/or agonists or antagonists of the present invention may also be employed for treating atherosclerosis, for example, by preventing monocyte infiltration in the artery wall.

[0694] In another specific embodiment, polypeptides, antibodies, polynucleotides and/or agonists or antagonists of the present invention may be employed to treat adult respiratory distress syndrome (ARDS).

[0695] In another specific embodiment, polypeptides, antibodies, polynucleotides and/or agonists or antagonists of the present invention may be useful for stimulating wound and tissue repair, stimulating angiogenesis, and/or stimulating the repair of vascular or lymphatic diseases or disorders. Additionally, agonists and antagonists of the invention may be used to stimulate the regeneration of mucosal surfaces.

[0696] In a specific embodiment, polynucleotides or polypeptides, and/or agonists thereof are used to diagnose, prognose, treat, and/or prevent a disorder characterized by primary or acquired immunodeficiency, deficient serum immunoglobulin production, recurrent infections, and/or immune system dysfunction. Moreover, polynucleotides or polypeptides, and/or agonists thereof may be used to treat or prevent infections of the joints, bones, skin, and/or parotid glands, blood-borne infections (e.g., sepsis, meningitis, septic arthritis, and/or osteomyelitis), autoimmune diseases (e.g., those disclosed herein), inflammatory disorders, and malignancies, and/or any disease or disorder or condition associated with these infections, diseases, disorders and/or malignancies) including, but not limited to, CVID, other primary immune deficiencies, HIV disease, CLL, recurrent bronchitis, sinusitis, otitis media, conjunctivitis, pneumonia, hepatitis, meningitis, herpes zoster (e.g., severe herpes zoster), and/or pneumocystis carnii. Other diseases and disorders that may be prevented, diagnosed, prognosed, and/or treated with polynucleotides or polypeptides, and/or agonists of the present invention include, but are not limited to, HIV infection, HTLV-BLV infection, lymphopenia, phagocyte bactericidal dysfunction anemia, thrombocytopenia, and hemoglobinuria.

[0697] In another embodiment, polynucleotides, polypeptides, antibodies, and/or agonists or antagonists of the present invention are used to treat, and/or diagnose an individual having common variable immunodeficiency disease (“CVID”; also known as “acquired agammaglobulinemia” and “acquired hypogammaglobulinemia”) or a subset of this disease.

[0698] In a specific embodiment, polynucleotides, polypeptides, antibodies, and/or agonists or antagonists of the present invention may be used to diagnose, prognose, prevent, and/or treat cancers or neoplasms including immune cell or immune tissue-related cancers or neoplasms. Examples of cancers or neoplasms that may be prevented, diagnosed, or treated by polynucleotides, polypeptides, antibodies, and/or agonists or antagonists of the present invention include, but are not limited to, acute myelogenous leukemia, chronic myelogenous leukemia, Hodgkin's disease, non-Hodgkin's lymphoma, acute lymphocytic anemia (ALL) Chronic lymphocyte leukemia, plasmacytomas, multiple myeloma, Burkitt's lymphoma, EBV-transformed diseases, and/or diseases and disorders described in the section entitled “Hyperproliferative Disorders” elsewhere herein.

[0699] In another specific embodiment, polypeptides, antibodies, polynucleotides and/or agonists or antagonists of the present invention are used as a therapy for decreasing cellular proliferation of Large B-cell Lymphomas.

[0700] In another specific embodiment, polypeptides, antibodies, polynucleotides and/or agonists or antagonists of the present invention are used as a means of decreasing the involvement of B cells and Ig associated with Chronic Myelogenous Leukemia.

[0701] In specific embodiments, the compositions of the invention are used as an agent to boost immunoresponsiveness among B cell immunodeficient individuals, such as, for example, an individual who has undergone a partial or complete splenectomy.

[0702] Antagonists of the invention include, for example, binding and/or inhibitory antibodies, antisense nucleic acids, ribozymes or soluble forms of the polypeptides of the present invention (e.g., Fc fusion protein; see, e.g., Example 9). Agonists of the invention include, for example, binding or stimulatory antibodies, and soluble forms of the polypeptides (e.g., Fc fusion proteins; see, e.g., Example 9). polypeptides, antibodies, polynucleotides and/or agonists or antagonists of the present invention may be employed in a composition with a pharmaceutically acceptable carrier, e.g., as described herein.

[0703] In another embodiment, polypeptides, antibodies, polynucleotides and/or agonists or antagonists of the present invention are administered to an animal (including, but not limited to, those listed above, and also including transgenic animals) incapable of producing functional endogenous antibody molecules or having an otherwise compromised endogenous immune system, but which is capable of producing human immunoglobulin molecules by means of a reconstituted or partially reconstituted immune system from another animal (see, e.g., published PCT Application Nos. WO98/24893, WO/9634096, WO/9633735, and WO/9110741). Administration of polypeptides, antibodies, polynucleotides and/or agonists or antagonists of the present invention to such animals is useful for the generation of monoclonal antibodies against the polypeptides, antibodies, polynucleotides and/or agonists or antagonists of the present invention.

Blood-Related Disorders

[0704] The polynucleotides, polypeptides, antibodies, and/or agonists or antagonists of the present invention may be used to modulate hemostatic (the stopping of bleeding) or thrombolytic (clot dissolving) activity. For example, by increasing hemostatic or thrombolytic activity, polynucleotides or polypeptides, and/or agonists or antagonists of the present invention could be used to treat or prevent blood coagulation diseases, disorders, and/or conditions (e.g., afibrinogenemia, factor deficiencies, hemophilia), blood platelet diseases, disorders, and/or conditions (e.g., thrombocytopenia), or wounds resulting from trauma, surgery, or other causes. Alternatively, polynucleotides, polypeptides, antibodies, and/or agonists or antagonists of the present invention that can decrease hemostatic or thrombolytic activity could be used to inhibit or dissolve clotting. These molecules could be important in the treatment or prevention of heart attacks (infarction), strokes, or scarring.

[0705] In specific embodiments, the polynucleotides, polypeptides, antibodies, and/or agonists or antagonists of the present invention may be used to prevent, diagnose, prognose, and/or treat thrombosis, arterial thrombosis, venous thrombosis, thromboembolism, pulmonary embolism, atherosclerosis, myocardial infarction, transient ischemic attack, unstable angina. In specific embodiments, the polynucleotides, polypeptides, antibodies, and/or agonists or antagonists of the present invention may be used for the prevention of occulsion of saphenous grafts, for reducing the risk of periprocedural thrombosis as might accompany angioplasty procedures, for reducing the risk of stroke in patients with atrial fibrillation including nonrheumatic atrial fibrillation, for reducing the risk of embolism associated with mechanical heart valves and or mitral valves disease. Other uses for the polynucleotides, polypeptides, antibodies, and/or agonists or antagonists of the present invention, include, but are not limited to, the prevention of occlusions in extrcorporeal devices (e.g., intravascular canulas, vascular access shunts in hemodialysis patients, hemodialysis machines, and cardiopulmonary bypass machines).

[0706] In another embodiment, a polypeptide of the invention, or polynucleotides, antibodies, agonists, or antagonists corresponding to that polypeptide, may be used to prevent, diagnose, prognose, and/or treat diseases and disorders of the blood and/or blood forming organs associated with the tissue(s) in which the polypeptide of the invention is expressed, including one, two, three, four, five, or more tissues disclosed in Table 1B.2, column 5 (Tissue Distribution Library Code).

[0707] The polynucleotides, polypeptides, antibodies, and/or agonists or antagonists of the present invention may be used to modulate hematopoietic activity (the formation of blood cells). For example, the polynucleotides, polypeptides, antibodies, and/or agonists or antagonists of the present invention may be used to increase the quantity of all or subsets of blood cells, such as, for example, erythrocytes, lymphocytes (B or T cells), myeloid cells (e.g., basophils, eosinophils, neutrophils, mast cells, macrophages) and platelets. The ability to decrease the quantity of blood cells or subsets of blood cells may be useful in the prevention, detection, diagnosis and/or treatment of anemias and leukopenias described below. Alternatively, the polynucleotides, polypeptides, antibodies, and/or agonists or antagonists of the present invention may be used to decrease the quantity of all or subsets of blood cells, such as, for example, erythrocytes, lymphocytes (B or T cells), myeloid cells (e.g., basophils, eosinophils, neutrophils, mast cells, macrophages) and platelets. The ability to decrease the quantity of blood cells or subsets of blood cells may be useful in the prevention, detection, diagnosis and/or treatment of leukocytoses, such as, for example eosinophilia.

[0708] The polynucleotides, polypeptides, antibodies, and/or agonists or antagonists of the present invention may be used to prevent, treat, or diagnose blood dyscrasia.

[0709] Anemias are conditions in which the number of red blood cells or amount of hemoglobin (the protein that carries oxygen) in them is below normal. Anemia may be caused by excessive bleeding, decreased red blood cell production, or increased red blood cell destruction (hemolysis). The polynucleotides, polypeptides, antibodies, and/or agonists or antagonists of the present invention may be useful in treating, preventing, and/or diagnosing anemias. Anemias that may be treated prevented or diagnosed by the polynucleotides, polypeptides, antibodies, and/or agonists or antagonists of the present invention include iron deficiency anemia, hypochromic anemia, microcytic anemia, chlorosis, hereditary siderob; astic anemia, idiopathic acquired sideroblastic anemia, red cell aplasia, megaloblastic anemia (e.g., pernicious anemia, (vitamin B12 deficiency) and folic acid deficiency anemia), aplastic anemia, hemolytic anemias (e.g., autoimmune helolytic anemia, microangiopathic hemolytic anemia, and paroxysmal nocturnal hemoglobinuria). The polynucleotides, polypeptides, antibodies, and/or agonists or antagonists of the present invention may be useful in treating, preventing, and/or diagnosing anemias associated with diseases including but not limited to, anemias associated with systemic lupus erythematosus, cancers, lymphomas, chronic renal disease, and enlarged spleens. The polynucleotides, polypeptides, antibodies, and/or agonists or antagonists of the present invention may be useful in treating, preventing, and/or diagnosing anemias arising from drug treatments such as anemias associated with methyldopa, dapsone, and/or sulfadrugs. Additionally, the polynucleotides, polypeptides, antibodies, and/or agonists or antagonists of the present invention may be useful in treating, preventing, and/or diagnosing anemias associated with abnormal red blood cell architecture including but not limited to, hereditary spherocytosis, hereditary elliptocytosis, glucose-6-phosphate dehydrogenase deficiency, and sickle cell anemia.

[0710] The polynucleotides, polypeptides, antibodies, and/or agonists or antagonists of the present invention may be useful in treating, preventing, and/or diagnosing hemoglobin abnormalities, (e.g., those associated with sickle cell anemia, hemoglobin C disease, hemoglobin S-C disease, and hemoglobin E disease). Additionally, the polynucleotides, polypeptides, antibodies, and/or agonists or antagonists of the present invention may be useful in diagnosing, prognosing, preventing, and/or treating thalassemias, including, but not limited to major and minor forms of alpha-thalassemia and beta-thalassemia.

[0711] In another embodiment, the polynucleotides, polypeptides, antibodies, and/or agonists or antagonists of the present invention may be useful in diagnosing, prognosing, preventing, and/or treating bleeding disorders including, but not limited to, thrombocytopenia (e.g., idiopathic thrombocytopenic purpura, and thrombotic thrombocytopenic purpura), Von Willebrand's disease, hereditary platelet disorders (e.g., storage pool disease such as Chediak-Higashi and Hermansky-Pudlak syndromes, thromboxane A2 dysfunction, thromboasthenia, and Bernard-Soulier syndrome), hemolytic-uremic syndrome, hemophelias such as hemophelia A or Factor VII deficiency and Christmas disease or Factor IX deficiency, Hereditary Hemorhhagic Telangiectsia, also known as Rendu-Osler-Weber syndrome, allergic purpura (Henoch Schonlein purpura) and disseminated intravascular coagulation.

[0712] The effect of the polynucleotides, polypeptides, antibodies, and/or agonists or antagonists of the present invention on the clotting time of blood may be monitored using any of the clotting tests known in the art including, but not limited to, whole blood partial thromboplastin time (PTT), the activated partial thromboplastin time (aPTT), the activated clotting time (ACT), the recalcified activated clotting time, or the Lee-White Clotting time.

[0713] Several diseases and a variety of drugs can cause platelet dysfunction. Thus, in a specific embodiment, the polynucleotides, polypeptides, antibodies, and/or agonists or antagonists of the present invention may be useful in diagnosing, prognosing, preventing, and/or treating acquired platelet dysfunction such as platelet dysfunction accompanying kidney failure, leukemia, multiple myeloma, cirrhosis of the liver, and systemic lupus erythematosus as well as platelet dysfunction associated with drug treatments, including treatment with aspirin, ticlopidine, nonsteroidal anti-inflammatory drugs (used for arthritis, pain, and sprains), and penicillin in high doses.

[0714] In another embodiment, the polynucleotides, polypeptides, antibodies, and/or agonists or antagonists of the present invention may be useful in diagnosing, prognosing, preventing, and/or treating diseases and disorders characterized by or associated with increased or decreased numbers of white blood cells. Leukopenia occurs when the number of white blood cells decreases below normal. Leukopenias include, but are not limited to, neutropenia and lymphocytopenia. An increase in the number of white blood cells compared to normal is known as leukocytosis. The body generates increased numbers of white blood cells during infection. Thus, leukocytosis may simply be a normal physiological parameter that reflects infection. Alternatively, leukocytosis may be an indicator of injury or other disease such as cancer. Leokocytoses, include but are not limited to, eosinophilia, and accumulations of macrophages. In specific embodiments, the polynucleotides, polypeptides, antibodies, and/or agonists or antagonists of the present invention may be useful in diagnosing, prognosing, preventing, and/or treating leukopenia. In other specific embodiments, the polynucleotides, polypeptides, antibodies, and/or agonists or antagonists of the present invention may be useful in diagnosing, prognosing, preventing, and/or treating leukocytosis.

[0715] Leukopenia may be a generalized decreased in all types of white blood cells, or may be a specific depletion of particular types of white blood cells. Thus, in specific embodiments, the polynucleotides, polypeptides, antibodies, and/or agonists or antagonists of the present invention may be useful in diagnosing, prognosing, preventing, and/or treating decreases in neutrophil numbers, known as neutropenia. Neutropenias that may be diagnosed, prognosed, prevented, and/or treated by the polynucleotides, polypeptides, antibodies, and/or agonists or antagonists of the present invention include, but are not limited to, infantile genetic agranulocytosis, familial neutropenia, cyclic neutropenia, neutropenias resulting from or associated with dietary deficiencies (e.g., vitamin B 12 deficiency or folic acid deficiency), neutropenias resulting from or associated with drug treatments (e.g., antibiotic regimens such as penicillin treatment, sulfonamide treatment, anticoagulant treatment, anticonvulsant drugs, anti-thyroid drugs, and cancer chemotherapy), and neutropenias resulting from increased neutrophil destruction that may occur in association with some bacterial or viral infections, allergic disorders, autoimmune diseases, conditions in which an individual has an enlarged spleen (e.g., Felty syndrome, malaria and sarcoidosis), and some drug treatment regimens.

[0716] The polynucleotides, polypeptides, antibodies, and/or agonists or antagonists of the present invention may be useful in diagnosing, prognosing, preventing, and/or treating lymphocytopenias (decreased numbers of B and/or T lymphocytes), including, but not limited lymphocytopenias resulting from or associated with stress, drug treatments (e.g., drug treatment with corticosteroids, cancer chemotherapies, and/or radiation therapies), AIDS infection and/or other diseases such as, for example, cancer, rheumatoid arthritis, systemic lupus erythematosus, chronic infections, some viral infections and/or hereditary disorders (e.g., DiGeorge syndrome, Wiskott-Aldrich Syndrome, severe combined immunodeficiency, ataxia telangiectsia).

[0717] The polynucleotides, polypeptides, antibodies, and/or agonists or antagonists of the present invention may be useful in diagnosing, prognosing, preventing, and/or treating diseases and disorders associated with macrophage numbers and/or macrophage function including, but not limited to, Gaucher's disease, Niemann-Pick disease, Letterer-Siwe disease and Hand-Schuller-Christian disease.

[0718] In another embodiment, the polynucleotides, polypeptides, antibodies, and/or agonists or antagonists of the present invention may be useful in diagnosing, prognosing, preventing, and/or treating diseases and disorders associated with eosinophil numbers and/or eosinophil function including, but not limited to, idiopathic hypereosinophilic syndrome, eosinophilia-myalgia syndrome, and Hand-Schuller-Christian disease.

[0719] In yet another embodiment, the polynucleotides, polypeptides, antibodies, and/or agonists or antagonists of the present invention may be useful in diagnosing, prognosing, preventing, and/or treating leukemias and lymphomas including, but not limited to, acute lymphocytic (lymphpblastic) leukemia (ALL), acute myeloid (myelocytic, myelogenous, myeloblastic, or myelomonocytic) leukemia, chronic lymphocytic leukemia (e.g., B cell leukemias, T cell leukemias, Sezary syndrome, and Hairy cell leukemia), chronic myelocytic (myeloid, myelogenous, or granulocytic) leukemia, Hodgkin's lymphoma, non-hodgkin's lymphoma, Burkitt's lymphoma, and mycosis fungoides.

[0720] In other embodiments, the polynucleotides, polypeptides, antibodies, and/or agonists or antagonists of the present invention may be useful in diagnosing, prognosing, preventing, and/or treating diseases and disorders of plasma cells including, but not limited to, plasma cell dyscrasias, monoclonal gammaopathies, monoclonal gammopathies of undetermined significance, multiple myeloma, macroglobulinemia, Waldenstrom's macroglobulinemia, cryoglobulinemia, and Raynaud's phenomenon.

[0721] In other embodiments, the polynucleotides, polypeptides, antibodies, and/or agonists or antagonists of the present invention may be useful in treating, preventing, and/or diagnosing myeloproliferative disorders, including but not limited to, polycythemia vera, relative polycythemia, secondary polycythemia, myelofibrosis, acute myelofibrosis, agnogenic myelod metaplasia, thrombocythemia, (including both primary and secondary thrombocythemia) and chronic myelocytic leukemia.

[0722] In other embodiments, the polynucleotides, polypeptides, antibodies, and/or agonists or antagonists of the present invention may be useful as a treatment prior to surgery, to increase blood cell production.

[0723] In other embodiments, the polynucleotides, polypeptides, antibodies, and/or agonists or antagonists of the present invention may be useful as an agent to enhance the migration, phagocytosis, superoxide production, antibody dependent cellular cytotoxicity of neutrophils, eosionophils and macrophages.

[0724] In other embodiments, the polynucleotides, polypeptides, antibodies, and/or agonists or antagonists of the present invention may be useful as an agent to increase the number of stem cells in circulation prior to stem cells pheresis. In another specific embodiment, the polynucleotides, polypeptides, antibodies, and/or agonists or antagonists of the present invention may be useful as an agent to increase the number of stem cells in circulation prior to platelet pheresis.

[0725] In other embodiments, the polynucleotides, polypeptides, antibodies, and/or agonists or antagonists of the present invention may be useful as an agent to increase cytokine production.

[0726] In other embodiments, the polynucleotides, polypeptides, antibodies, and/or agonists or antagonists of the present invention may be useful in preventing, diagnosing, and/or treating primary hematopoietic disorders.

Hyperproliferative Disorders

[0727] In certain embodiments, polynucleotides or polypeptides, or agonists or antagonists of the present invention can be used to treat or detect hyperproliferative disorders, including neoplasms. Polynucleotides or polypeptides, or agonists or antagonists of the present invention may inhibit the proliferation of the disorder through direct or indirect interactions. Alternatively, Polynucleotides or polypeptides, or agonists or antagonists of the present invention may proliferate other cells which can inhibit the hyperproliferative disorder.

[0728] For example, by increasing an immune response, particularly increasing antigenic qualities of the hyperproliferative disorder or by proliferating, differentiating, or mobilizing T-cells, hyperproliferative disorders can be treated. This immune response may be increased by either enhancing an existing immune response, or by initiating a new immune response. Alternatively, decreasing an immune response may also be a method of treating hyperproliferative disorders, such as a chemotherapeutic agent.

[0729] Examples of hyperproliferative disorders that can be treated or detected by polynucleotides or polypeptides, or agonists or antagonists of the present invention include, but are not limited to neoplasms located in the: colon, abdomen, bone, breast, digestive system, liver, pancreas, peritoneum, endocrine glands (adrenal, parathyroid, pituitary, testicles, ovary, thymus, thyroid), eye, head and neck, nervous (central and peripheral), lymphatic system, pelvis, skin, soft tissue, spleen, thorax, and urogenital tract.

[0730] Similarly, other hyperproliferative disorders can also be treated or detected by polynucleotides or polypeptides, or agonists or antagonists of the present invention. Examples of such hyperproliferative disorders include, but are not limited to: Acute Childhood Lymphoblastic Leukemia, Acute Lymphoblastic Leukemia, Acute Lymphocytic Leukemia, Acute Myeloid Leukemia, Adrenocortical Carcinoma, Adult (Primary) Hepatocellular Cancer, Adult (Primary) Liver Cancer, Adult Acute Lymphocytic Leukemia, Adult Acute Myeloid Leukemia, Adult Hodgkin's Disease, Adult Hodgkin's Lymphoma, Adult Lymphocytic Leukemia, Adult Non-Hodgkin's Lymphoma, Adult Primary Liver Cancer, Adult Soft Tissue Sarcoma, AIDS-Related Lymphoma, AIDS-Related Malignancies, Anal Cancer, Astrocytoma, Bile Duct Cancer, Bladder Cancer, Bone Cancer, Brain Stem Glioma, Brain Tumors, Breast Cancer, Cancer of the Renal Pelvis and Ureter, Central Nervous System (Primary) Lymphoma, Central Nervous System Lymphoma, Cerebellar Astrocytoma, Cerebral Astrocytoma, Cervical Cancer, Childhood (Primary) Hepatocellular Cancer, Childhood (Primary) Liver Cancer, Childhood Acute Lymphoblastic Leukemia, Childhood Acute Myeloid Leukemia, Childhood Brain Stem Glioma, Childhood Cerebellar Astrocytoma, Childhood Cerebral Astrocytoma, Childhood Extracranial Germ Cell Tumors, Childhood Hodgkin's Disease, Childhood Hodgkin's Lymphoma, Childhood Hypothalamic and Visual Pathway Glioma, Childhood Lymphoblastic Leukemia, Childhood Medulloblastoma, Childhood Non-Hodgkin's Lymphoma, Childhood Pineal and Supratentorial Primitive Neuroectodermal Tumors, Childhood Primary Liver Cancer, Childhood Rhabdomyosarcoma, Childhood Soft Tissue Sarcoma, Childhood Visual Pathway and Hypothalamic Glioma, Chronic Lymphocytic Leukemia, Chronic Myelogenous Leukemia, Colon Cancer, Cutaneous T-Cell Lymphoma, Endocrine Pancreas Islet Cell Carcinoma, Endometrial Cancer, Ependymoma, Epithelial Cancer, Esophageal Cancer, Ewing's Sarcoma and Related Tumors, Exocrine Pancreatic Cancer, Extracranial Germ Cell Tumor, Extragonadal Germ Cell Tumor, Extrahepatic Bile Duct Cancer, Eye Cancer, Female Breast Cancer, Gaucher's Disease, Gallbladder Cancer, Gastric Cancer, Gastrointestinal Carcinoid Tumor, Gastrointestinal Tumors, Germ Cell Tumors, Gestational Trophoblastic Tumor, Hairy Cell Leukemia, Head and Neck Cancer, Hepatocellular Cancer, Hodgkin's Disease, Hodgkin's Lymphoma, Hypergammaglobulinemia, Hypopharyngeal Cancer, Intestinal Cancers, Intraocular Melanoma, Islet Cell Carcinoma, Islet Cell Pancreatic Cancer, Kaposi's Sarcoma, Kidney Cancer, Laryngeal Cancer, Lip and Oral Cavity Cancer, Liver Cancer, Lung Cancer, Lymphoproliferative Disorders, Macroglobulinemia, Male Breast Cancer, Malignant Mesothelioma, Malignant Thymoma, Medulloblastoma, Melanoma, Mesothelioma, Metastatic Occult Primary Squamous Neck Cancer, Metastatic Primary Squamous Neck Cancer, Metastatic Squamous Neck Cancer, Multiple Myeloma, Multiple Myeloma/Plasma Cell Neoplasm, Myelodysplastic Syndrome, Myelogenous Leukemia, Myeloid Leukemia, Myeloproliferative Disorders, Nasal Cavity and Paranasal Sinus Cancer, Nasopharyngeal Cancer, Neuroblastoma, Non-Hodgkin's Lymphoma During Pregnancy, Nonmelanoma Skin Cancer, Non-Small Cell Lung Cancer, Occult Primary Metastatic Squamous Neck Cancer, Oropharyngeal Cancer, Osteo-/Malignant Fibrous Sarcoma, Osteosarcoma/Malignant Fibrous Histiocytoma, Osteosarcoma/Malignant Fibrous Histiocytoma of Bone, Ovarian Epithelial Cancer, Ovarian Germ Cell Tumor, Ovarian Low Malignant Potential Tumor, Pancreatic Cancer, Paraproteinemias, Purpura, Parathyroid Cancer, Penile Cancer, Pheochromocytoma, Pituitary Tumor, Plasma Cell Neoplasm/Multiple Myeloma, Primary Central Nervous System Lymphoma, Primary Liver Cancer, Prostate Cancer, Rectal Cancer, Renal Cell Cancer, Renal Pelvis and Ureter Cancer, Retinoblastoma, Rhabdomyosarcoma, Salivary Gland Cancer, Sarcoidosis Sarcomas, Sezary Syndrome, Skin Cancer, Small Cell Lung Cancer, Small Intestine Cancer, Soft Tissue Sarcoma, Squamous Neck Cancer, Stomach Cancer, Supratentorial Primitive Neuroectodermal and Pineal Tumors, T-Cell Lymphoma, Testicular Cancer, Thymoma, Thyroid Cancer, Transitional Cell Cancer of the Renal Pelvis and Ureter, Transitional Renal Pelvis and Ureter Cancer, Trophoblastic Tumors, Ureter and Renal Pelvis Cell Cancer, Urethral Cancer, Uterine Cancer, Uterine Sarcoma, Vaginal Cancer, Visual Pathway and Hypothalamic Glioma, Vulvar Cancer, Waldenstrom's Macroglobulinemia, Wilms' Tumor, and any other hyperproliferative disease, besides neoplasia, located in an organ system listed above.

[0731] In another preferred embodiment, polynucleotides or polypeptides, or agonists or antagonists of the present invention are used to diagnose, prognose, prevent, and/or treat premalignant conditions and to prevent progression to a neoplastic or malignant state, including but not limited to those disorders described above. Such uses are indicated in conditions known or suspected of preceding progression to neoplasia or cancer, in particular, where non-neoplastic cell growth consisting of hyperplasia, metaplasia, or most particularly, dysplasia has occurred (for review of such abnormal growth conditions, see Robbins and Angell, 1976, Basic Pathology, 2d Ed., W. B. Saunders Co., Philadelphia, pp. 68-79.)

[0732] Hyperplasia is a form of controlled cell proliferation, involving an increase in cell number in a tissue or organ, without significant alteration in structure or function. Hyperplastic disorders which can be diagnosed, prognosed, prevented, and/or treated with compositions of the invention (including polynucleotides, polypeptides, agonists or antagonists) include, but are not limited to, angiofollicular mediastinal lymph node hyperplasia, angiolymphoid hyperplasia with eosinophilia, atypical melanocytic hyperplasia, basal cell hyperplasia, benign giant lymph node hyperplasia, cementum hyperplasia, congenital adrenal hyperplasia, congenital sebaceous hyperplasia, cystic hyperplasia, cystic hyperplasia of the breast, denture hyperplasia, ductal hyperplasia, endometrial hyperplasia, fibromuscular hyperplasia, focal epithelial hyperplasia, gingival hyperplasia, inflammatory fibrous hyperplasia, inflammatory papillary hyperplasia, intravascular papillary endothelial hyperplasia, nodular hyperplasia of prostate, nodular regenerative hyperplasia, pseudoepitheliomatous hyperplasia, senile sebaceous hyperplasia, and verrucous hyperplasia.

[0733] Metaplasia is a form of controlled cell growth in which one type of adult or fully differentiated cell substitutes for another type of adult cell. Metaplastic disorders which can be diagnosed, prognosed, prevented, and/or treated with compositions of the invention (including polynucleotides, polypeptides, agonists or antagonists) include, but are not limited to, agnogenic myeloid metaplasia, apocrine metaplasia, atypical metaplasia, autoparenchymatous metaplasia, connective tissue metaplasia, epithelial metaplasia, intestinal metaplasia, metaplastic anemia, metaplastic ossification, metaplastic polyps, myeloid metaplasia, primary myeloid metaplasia, secondary myeloid metaplasia, squamous metaplasia, squamous metaplasia of amnion, and symptomatic myeloid metaplasia.

[0734] Dysplasia is frequently a forerunner of cancer, and is found mainly in the epithelia; it is the most disorderly form of non-neoplastic cell growth, involving a loss in individual cell uniformity and in the architectural orientation of cells. Dysplastic cells often have abnormally large, deeply stained nuclei, and exhibit pleomorphism. Dysplasia characteristically occurs where there exists chronic irritation or inflammation. Dysplastic disorders which can be diagnosed, prognosed, prevented, and/or treated with compositions of the invention (including polynucleotides, polypeptides, agonists or antagonists) include, but are not limited to, anhidrotic ectodermal dysplasia, anterofacial dysplasia, asphyxiating thoracic dysplasia, atriodigital dysplasia, bronchopulmonary dysplasia, cerebral dysplasia, cervical dysplasia, chondroectodermal dysplasia, cleidocranial dysplasia, congenital ectodermal dysplasia, craniodiaphysial dysplasia, craniocarpotarsal dysplasia, craniometaphysial dysplasia, dentin dysplasia, diaphysial dysplasia, ectodermal dysplasia, enamel dysplasia, encephalo-ophthalmic dysplasia, dysplasia epiphysialis hemimelia, dysplasia epiphysialis multiplex, dysplasia epiphysialis punctata, epithelial dysplasia, faciodigitogenital dysplasia, familial fibrous dysplasia of jaws, familial white folded dysplasia, fibromuscular dysplasia, fibrous dysplasia of bone, florid osseous dysplasia, hereditary renal-retinal dysplasia, hidrotic ectodermal dysplasia, hypohidrotic ectodermal dysplasia, lymphopenic thymic dysplasia, mammary dysplasia, mandibulofacial dysplasia, metaphysial dysplasia, Mondini dysplasia, monostotic fibrous dysplasia, mucoepithelial dysplasia, multiple epiphysial dysplasia, oculoauriculovertebral dysplasia, oculodentodigital dysplasia, oculovertebral dysplasia, odontogenic dysplasia, ophthalmomandibulomelic dysplasia, periapical cemental dysplasia, polyostotic fibrous dysplasia, pseudoachondroplastic spondyloepiphysial dysplasia, retinal dysplasia, septo-optic dysplasia, spondyloepiphysial dysplasia, and ventriculoradial dysplasia.

[0735] Additional pre-neoplastic disorders which can be diagnosed, prognosed, prevented, and/or treated with compositions of the invention (including polynucleotides, polypeptides, agonists or antagonists) include, but are not limited to, benign dysproliferative disorders (e.g., benign tumors, fibrocystic conditions, tissue hypertrophy, intestinal polyps, colon polyps, and esophageal dysplasia), leukoplakia, keratoses, Bowen's disease, Farmer's Skin, solar cheilitis, and solar keratosis.

[0736] In another embodiment, a polypeptide of the invention, or polynucleotides, antibodies, agonists, or antagonists corresponding to that polypeptide, may be used to diagnose and/or prognose disorders associated with the tissue(s) in which the polypeptide of the invention is expressed, including one, two, three, four, five, or more tissues disclosed in Table 1B.2, column 5 (Tissue Distribution Library Code).

[0737] In another embodiment, polynucleotides, polypeptides, antibodies, and/or agonists or antagonists of the present invention conjugated to a toxin or a radioactive isotope, as described herein, may be used to treat cancers and neoplasms, including, but not limited to those described herein. In a further preferred embodiment, polynucleotides, polypeptides, antibodies, and/or agonists or antagonists of the present invention conjugated to a toxin or a radioactive isotope, as described herein, may be used to treat acute myelogenous leukemia.

[0738] Additionally, polynucleotides, polypeptides, and/or agonists or antagonists of the invention may affect apoptosis, and therefore, would be useful in treating a number of diseases associated with increased cell survival or the inhibition of apoptosis. For example, diseases associated with increased cell survival or the inhibition of apoptosis that could be diagnosed, prognosed, prevented, and/or treated by polynucleotides, polypeptides, and/or agonists or antagonists of the invention, include cancers (such as follicular lymphomas, carcinomas with p53 mutations, and hormone-dependent tumors, including, but not limited to colon cancer, cardiac tumors, pancreatic cancer, melanoma, retinoblastoma, glioblastoma, lung cancer, intestinal cancer, testicular cancer, stomach cancer, neuroblastoma, myxoma, myoma, lymphoma, endothelioma, osteoblastoma, osteoclastoma, osteosarcoma, chondrosarcoma, adenoma, breast cancer, prostate cancer, Kaposi's sarcoma and ovarian cancer); autoimmune disorders such as, multiple sclerosis, Sjogren's syndrome, Hashimoto's thyroiditis, biliary cirrhosis, Behcet's disease, Crohn's disease, polymyositis, systemic lupus erythematosus and immune-related glomerulonephritis and rheumatoid arthritis) and viral infections (such as herpes viruses, pox viruses and adenoviruses), inflammation, graft v. host disease, acute graft rejection, and chronic graft rejection.

[0739] In preferred embodiments, polynucleotides, polypeptides, and/or agonists or antagonists of the invention are used to inhibit growth, progression, and/or metastasis of cancers, in particular those listed above.

[0740] Additional diseases or conditions associated with increased cell survival that could be diagnosed, prognosed, prevented, and/or treated by polynucleotides, polypeptides, and/or agonists or antagonists of the invention, include, but are not limited to, progression, and/or metastases of malignancies and related disorders such as leukemia (including acute leukemias (e.g., acute lymphocytic leukemia, acute myelocytic leukemia (including myeloblastic, promyelocytic, myelomonocytic, monocytic, and erythroleukemia)) and chronic leukemias (e.g., chronic myelocytic (granulocytic) leukemia and chronic lymphocytic leukemia)), polycythemia vera, lymphomas (e.g., Hodgkin's disease and non-Hodgkin's disease), multiple myeloma, Waldenstrom's macroglobulinemia, heavy chain disease, and solid tumors including, but not limited to, sarcomas and carcinomas such as fibrosarcoma, myxosarcoma, liposarcoma, chondrosarcoma, osteogenic sarcoma, chordoma, angiosarcoma, endotheliosarcoma, lymphangiosarcoma, lymphangioendotheliosarcoma, synovioma, mesothelioma, Ewing's tumor, leiomyosarcoma, rhabdomyosarcoma, colon carcinoma, pancreatic cancer, breast cancer, ovarian cancer, prostate cancer, squamous cell carcinoma, basal cell carcinoma, adenocarcinoma, sweat gland carcinoma, sebaceous gland carcinoma, papillary carcinoma, papillary adenocarcinomas, cystadenocarcinoma, medullary carcinoma, bronchogenic carcinoma, renal cell carcinoma, hepatoma, bile duct carcinoma, choriocarcinoma, seminoma, embryonal carcinoma, Wilm's tumor, cervical cancer, testicular tumor, lung carcinoma, small cell lung carcinoma, bladder carcinoma, epithelial carcinoma, glioma, astrocytoma, medulloblastoma, craniopharyngioma, ependymoma, pinealoma, emangioblastoma, acoustic neuroma, oligodendroglioma, menangioma, melanoma, neuroblastoma, and retinoblastoma.

[0741] Diseases associated with increased apoptosis that could be diagnosed, prognosed, prevented, and/or treated by polynucleotides, polypeptides, and/or agonists or antagonists of the invention, include AIDS; neurodegenerative disorders (such as Alzheimer's disease, Parkinson's disease, amyotrophic lateral sclerosis, retinitis pigmentosa, cerebellar degeneration and brain tumor or prior associated disease); autoimmune disorders (such as, multiple sclerosis, Sjogren's syndrome, Hashimoto's thyroiditis, biliary cirrhosis, Behcet's disease, Crohn's disease, polymyositis, systemic lupus erythematosus and immune-related glomerulonephritis and rheumatoid arthritis) myelodysplastic syndromes (such as aplastic anemia), graft v. host disease, ischemic injury (such as that caused by myocardial infarction, stroke and reperfusion injury), liver injury (e.g., hepatitis related liver injury, ischemia/reperfusion injury, cholestosis (bile duct injury) and liver cancer); toxin-induced liver disease (such as that caused by alcohol), septic shock, cachexia and anorexia.

[0742] Hyperproliferative diseases and/or disorders that could be diagnosed, prognosed, prevented, and/or treated by polynucleotides, polypeptides, and/or agonists or antagonists of the invention, include, but are not limited to, neoplasms located in the liver, abdomen, bone, breast, digestive system, pancreas, peritoneum, endocrine glands (adrenal, parathyroid, pituitary, testicles, ovary, thymus, thyroid), eye, head and neck, nervous system (central and peripheral), lymphatic system, pelvis, skin, soft tissue, spleen, thorax, and urogenital tract.

[0743] Similarly, other hyperproliferative disorders can also be diagnosed, prognosed, prevented, and/or treated by polynucleotides, polypeptides, and/or agonists or antagonists of the invention. Examples of such hyperproliferative disorders include, but are not limited to: hypergammaglobulinemia, lymphoproliferative disorders, paraproteinemias, purpura, sarcoidosis, Sezary Syndrome, Waldenstron's macroglobulinemia, Gaucher's Disease, histiocytosis, and any other hyperproliferative disease, besides neoplasia, located in an organ system listed above.

[0744] Another preferred embodiment utilizes polynucleotides of the present invention to inhibit aberrant cellular division, by gene therapy using the present invention, and/or protein fusions or fragments thereof.

[0745] Thus, the present invention provides a method for treating cell proliferative disorders by inserting into an abnormally proliferating cell a polynucleotide of the present invention, wherein said polynucleotide represses said expression.

[0746] Another embodiment of the present invention provides a method of treating cell-proliferative disorders in individuals comprising administration of one or more active gene copies of the present invention to an abnormally proliferating cell or cells. In a preferred embodiment, polynucleotides of the present invention is a DNA construct comprising a recombinant expression vector effective in expressing a DNA sequence encoding said polynucleotides. In another preferred embodiment of the present invention, the DNA construct encoding the polynucleotides of the present invention is inserted into cells to be treated utilizing a retrovirus, or more preferably an adenoviral vector (See G J. Nabel, et. al., PNAS 1999 96: 324-326, which is hereby incorporated by reference). In a most preferred embodiment, the viral vector is defective and will not transform non-proliferating cells, only proliferating cells. Moreover, in a preferred embodiment, the polynucleotides of the present invention inserted into proliferating cells either alone, or in combination with or fused to other polynucleotides, can then be modulated via an external stimulus (i.e. magnetic, specific small molecule, chemical, or drug administration, etc.), which acts upon the promoter upstream of said polynucleotides to induce expression of the encoded protein product. As such the beneficial therapeutic affect of the present invention may be expressly modulated (i.e. to increase, decrease, or inhibit expression of the present invention) based upon said external stimulus.

[0747] Polynucleotides of the present invention may be useful in repressing expression of oncogenic genes or antigens. By “repressing expression of the oncogenic genes” is intended the suppression of the transcription of the gene, the degradation of the gene transcript (pre-message RNA), the inhibition of splicing, the destruction of the messenger RNA, the prevention of the post-translational modifications of the protein, the destruction of the protein, or the inhibition of the normal function of the protein.

[0748] For local administration to abnormally proliferating cells, polynucleotides of the present invention may be administered by any method known to those of skill in the art including, but not limited to transfection, electroporation, microinjection of cells, or in vehicles such as liposomes, lipofectin, or as naked polynucleotides, or any other method described throughout the specification. The polynucleotide of the present invention may be delivered by known gene delivery systems such as, but not limited to, retroviral vectors (Gilboa, J. Virology 44:845 (1982); Hocke, Nature 320:275 (1986); Wilson, et al., Proc. Natl. Acad. Sci. U.S.A. 85:3014), vaccinia virus system (Chakrabarty et al., Mol. Cell. Biol. 5:3403 (1985) or other efficient DNA delivery systems (Yates et al., Nature 313:812 (1985)) known to those skilled in the art. These references are exemplary only and are hereby incorporated by reference. In order to specifically deliver or transfect cells which are abnormally proliferating and spare non-dividing cells, it is preferable to utilize a retrovirus, or adenoviral (as described in the art and elsewhere herein) delivery system known to those of skill in the art. Since host DNA replication is required for retroviral DNA to integrate and the retrovirus will be unable to self replicate due to the lack of the retrovirus genes needed for its life cycle. Utilizing such a retroviral delivery system for polynucleotides of the present invention will target said gene and constructs to abnormally proliferating cells and will spare the non-dividing normal cells.

[0749] The polynucleotides of the present invention may be delivered directly to cell proliferative disorder/disease sites in internal organs, body cavities and the like by use of imaging devices used to guide an injecting needle directly to the disease site. The polynucleotides of the present invention may also be administered to disease sites at the time of surgical intervention.

[0750] By “cell proliferative disease” is meant any human or animal disease or disorder, affecting any one or any combination of organs, cavities, or body parts, which is characterized by single or multiple local abnormal proliferations of cells, groups of cells, or tissues, whether benign or malignant.

[0751] Any amount of the polynucleotides of the present invention may be administered as long as it has a biologically inhibiting effect on the proliferation of the treated cells. Moreover, it is possible to administer more than one of the polynucleotide of the present invention simultaneously to the same site. By “biologically inhibiting” is meant partial or total growth inhibition as well as decreases in the rate of proliferation or growth of the cells. The biologically inhibitory dose may be determined by assessing the effects of the polynucleotides of the present invention on target malignant or abnormally proliferating cell growth in tissue culture, tumor growth in animals and cell cultures, or any other method known to one of ordinary skill in the art.

[0752] The present invention is further directed to antibody-based therapies which involve administering of anti-polypeptides and anti-polynucleotide antibodies to a mammalian, preferably human, patient for treating one or more of the described disorders. Methods for producing anti-polypeptides and anti-polynucleotide antibodies polyclonal and monoclonal antibodies are described in detail elsewhere herein. Such antibodies may be provided in pharmaceutically acceptable compositions as known in the art or as described herein.

[0753] A summary of the ways in which the antibodies of the present invention may be used therapeutically includes binding polynucleotides or polypeptides of the present invention locally or systemically in the body or by direct cytotoxicity of the antibody, e.g. as mediated by complement (CDC) or by effector cells (ADCC). Some of these approaches are described in more detail below. Armed with the teachings provided herein, one of ordinary skill in the art will know how to use the antibodies of the present invention for diagnostic, monitoring or therapeutic purposes without undue experimentation.

[0754] In particular, the antibodies, fragments and derivatives of the present invention are useful for treating a subject having or developing cell proliferative and/or differentiation disorders as described herein. Such treatment comprises administering a single or multiple doses of the antibody, or a fragment, derivative, or a conjugate thereof.

[0755] The antibodies of this invention may be advantageously utilized in combination with other monoclonal or chimeric antibodies, or with lymphokines or hematopoietic growth factors, for example., which serve to increase the number or activity of effector cells which interact with the antibodies.

[0756] It is preferred to use high affinity and/or potent in vivo inhibiting and/or neutralizing antibodies against polypeptides or polynucleotides of the present invention, fragments or regions thereof, for both immunoassays directed to and therapy of disorders related to polynucleotides or polypeptides, including fragments thereof, of the present invention. Such antibodies, fragments, or regions, will preferably have an affinity for polynucleotides or polypeptides, including fragments thereof. Preferred binding affinities include those with a dissociation constant or Kd less than 5×10⁻⁶M, 10⁻⁶M, 5×10⁻⁷M, 10⁻⁷M, 5×10⁻⁸M, 10⁻⁸M, 5×10⁻⁹M, 10⁻⁹M, 5×10⁻¹⁰M, 10⁻¹⁰M, 5×10⁻¹¹M, 10⁻¹¹M, 5×10⁻¹²M, 10⁻¹²M, 5×10⁻¹³M, 10⁻¹³M, 5×10⁻¹⁴M, 10⁻¹⁴M, 5×10⁻¹⁵M, and 10⁻¹⁵M.

[0757] Moreover, polypeptides of the present invention are useful in inhibiting the angiogenesis of proliferative cells or tissues, either alone, as a protein fusion, or in combination with other polypeptides directly or indirectly, as described elsewhere herein. In a most preferred embodiment, said anti-angiogenesis effect may be achieved indirectly, for example, through the inhibition of hematopoietic, tumor-specific cells, such as tumor-associated macrophages (See Joseph I B, et al. J Natl Cancer Inst, 90(21):1648-53 (1998), which is hereby incorporated by reference). Antibodies directed to polypeptides or polynucleotides of the present invention may also result in inhibition of angiogenesis directly, or indirectly (See Witte L, et al., Cancer Metastasis Rev. 17(2):155-61 (1998), which is hereby incorporated by reference)).

[0758] Polypeptides, including protein fusions, of the present invention, or fragments thereof may be useful in inhibiting proliferative cells or tissues through the induction of apoptosis. Said polypeptides may act either directly, or indirectly to induce apoptosis of proliferative cells and tissues, for example in the activation of a death-domain receptor, such as tumor necrosis factor (TNF) receptor-1, CD95 (Fas/APO-1), TNF-receptor-related apoptosis-mediated protein (TRAMP) and TNF-related apoptosis-inducing ligand (TRAIL) receptor-1 and -2 (See Schulze-Osthoff K, et. al., Eur J Biochem 254(3):439-59 (1998), which is hereby incorporated by reference). Moreover, in another preferred embodiment of the present invention, said polypeptides may induce apoptosis through other mechanisms, such as in the activation of other proteins which will activate apoptosis, or through stimulating the expression of said proteins, either alone or in combination with small molecule drugs or adjuvants, such as apoptonin, galectins, thioredoxins, anti-inflammatory proteins (See for example, Mutat Res 400(1-2):447-55 (1998), Med Hypotheses. 50(5):423-33 (1998), Chem Biol Interact. April 24; 111-112:23-34 (1998), J Mol Med. 76(6):402-12 (1998), Int J Tissue React; 20(1):3-15 (1998), which are all hereby incorporated by reference).

[0759] Polypeptides, including protein fusions to, or fragments thereof, of the present invention are useful in inhibiting the metastasis of proliferative cells or tissues. Inhibition may occur as a direct result of administering polypeptides, or antibodies directed to said polypeptides as described elsewhere herein, or indirectly, such as activating the expression of proteins known to inhibit metastasis, for example alpha 4 integrins, (See, e.g., Curr Top Microbiol Immunol 1998; 231:125-41, which is hereby incorporated by reference). Such therapeutic affects of the present invention may be achieved either alone, or in combination with small molecule drugs or adjuvants.

[0760] In another embodiment, the invention provides a method of delivering compositions containing the polypeptides of the invention (e.g., compositions containing polypeptides or polypeptide antibodies associated with heterologous polypeptides, heterologous nucleic acids, toxins, or prodrugs) to targeted cells expressing the polypeptide of the present invention. Polypeptides or polypeptide antibodies of the invention may be associated with with heterologous polypeptides, heterologous nucleic acids, toxins, or prodrugs via hydrophobic, hydrophilic, ionic and/or covalent interactions.

[0761] Polypeptides, protein fusions to, or fragments thereof, of the present invention are useful in enhancing the immunogenicity and/or antigenicity of proliferating cells or tissues, either directly, such as would occur if the polypeptides of the present invention ‘vaccinated’ the immune response to respond to proliferative antigens and immunogens, or indirectly, such as in activating the expression of proteins known to enhance the immune response (e.g. chemokines), to said antigens and immunogens.

Renal Disorders

[0762] Polynucleotides, polypeptides, antibodies, and/or agonists or antagonists of the present invention, may be used to treat, prevent, diagnose, and/or prognose disorders of the renal system. Renal disorders which can be diagnosed, prognosed, prevented, and/or treated with compositions of the invention include, but are not limited to, kidney failure, nephritis, blood vessel disorders of kidney, metabolic and congenital kidney disorders, urinary disorders of the kidney, autoimmune disorders, sclerosis and necrosis, electrolyte imbalance, and kidney cancers.

[0763] Kidney diseases which can be diagnosed, prognosed, prevented, and/or treated with compositions of the invention include, but are not limited to, acute kidney failure, chronic kidney failure, atheroembolic renal failure, end-stage renal disease, inflammatory diseases of the kidney (e.g., acute glomerulonephritis, postinfectious glomerulonephritis, rapidly progressive glomerulonephritis, nephrotic syndrome, membranous glomerulonephritis, familial nephrotic syndrome, membranoproliferative glomerulonephritis I and II, mesangial proliferative glomerulonephritis, chronic glomerulonephritis, acute tubulointerstitial nephritis, chronic tubulointerstitial nephritis, acute post-streptococcal glomerulonephritis (PSGN), pyelonephritis, lupus nephritis, chronic nephritis, interstitial nephritis, and post-streptococcal glomerulonephritis), blood vessel disorders of the kidneys (e.g., kidney infarction, atheroembolic kidney disease, cortical necrosis, malignant nephrosclerosis, renal vein thrombosis, renal underperfusion, renal retinopathy, renal ischemia-reperfusion, renal artery embolism, and renal artery stenosis), and kidney disorders resulting form urinary tract disease (e.g., pyelonephritis, hydronephrosis, urolithiasis (renal lithiasis, nephrolithiasis), reflux nephropathy, urinary tract infections, urinary retention, and acute or chronic unilateral obstructive uropathy.)

[0764] In addition, compositions of the invention can be used to diagnose, prognose, prevent, and/or treat metabolic and congenital disorders of the kidney (e.g., uremia, renal amyloidosis, renal osteodystrophy, renal tubular acidosis, renal glycosuria, nephrogenic diabetes insipidus, cystinuria, Fanconi's syndrome, renal fibrocystic osteosis (renal rickets), Hartnup disease, Bartter's syndrome, Liddle's syndrome, polycystic kidney disease, medullary cystic disease, medullary sponge kidney, Alport's syndrome, nail-patella syndrome, congenital nephrotic syndrome, CRUSH syndrome, horseshoe kidney, diabetic nephropathy, nephrogenic diabetes insipidus, analgesic nephropathy, kidney stones, and membranous nephropathy), and autoimmune disorders of the kidney (e.g., systemic lupus erythematosus (SLE), Goodpasture syndrome, IgA nephropathy, and IgM mesangial proliferative glomerulonephritis).

[0765] Compositions of the invention can also be used to diagnose, prognose, prevent, and/or treat sclerotic or necrotic disorders of the kidney (e.g., glomerulosclerosis, diabetic nephropathy, focal segmental glomerulosclerosis (FSGS), necrotizing glomerulonephritis, and renal papillary necrosis), cancers of the kidney (e.g., nephroma, hypemephroma, nephroblastoma, renal cell cancer, transitional cell cancer, renal adenocarcinoma, squamous cell cancer, and Wilm's tumor), and electrolyte imbalances (e.g., nephrocalcinosis, pyuria, edema, hydronephritis, proteinuria, hyponatremia, hypernatremia, hypokalemia, hyperkalemia, hypocalcemia, hypercalcemia, hypophosphatemia, and hyperphosphatemia).

[0766] Polypeptides may be administered using any method known in the art, including, but not limited to, direct needle injection at the delivery site, intravenous injection, topical administration, catheter infusion, biolistic injectors, particle accelerators, gelfoam sponge depots, other commercially available depot materials, osmotic pumps, oral or suppositorial solid pharmaceutical formulations, decanting or topical applications during surgery, aerosol delivery. Such methods are known in the art. Polypeptides may be administered as part of a Therapeutic, described in more detail below. Methods of delivering polynucleotides are described in more detail herein.

Cardiovascular Disorders

[0767] Polynucleotides or polypeptides, or agonists or antagonists of the present invention, may be used to treat, prevent, diagnose, and/or prognose cardiovascular disorders, including, but not limited to, peripheral artery disease, such as limb ischemia.

[0768] Cardiovascular disorders include, but are not limited to, cardiovascular abnormalities, such as arterio-arterial fistula, arteriovenous fistula, cerebral arteriovenous malformations, congenital heart defects, pulmonary atresia, and Scimitar Syndrome. Congenital heart defects include, but are not limited to, aortic coarctation, cor triatriatum, coronary vessel anomalies, crisscross heart, dextrocardia, patent ductus arteriosus, Ebstein's anomaly, Eisenmenger complex, hypoplastic left heart syndrome, levocardia, tetralogy of fallot, transposition of great vessels, double outlet right ventricle, tricuspid atresia, persistent truncus arteriosus, and heart septal defects, such as aortopulmonary septal defect, endocardial cushion defects, Lutembacher's Syndrome, trilogy of Fallot, ventricular heart septal defects.

[0769] Cardiovascular disorders also include, but are not limited to, heart disease, such as arrhythmias, carcinoid heart disease, high cardiac output, low cardiac output, cardiac tamponade, endocarditis (including bacterial), heart aneurysm, cardiac arrest, congestive heart failure, congestive cardiomyopathy, paroxysmal dyspnea, cardiac edema, heart hypertrophy, congestive cardiomyopathy, left ventricular hypertrophy, right ventricular hypertrophy, post-infarction heart rupture, ventricular septal rupture, heart valve diseases, myocardial diseases, myocardial ischemia, pericardial effusion, pericarditis (including constrictive and tuberculous), pneumopericardium, postpericardiotomy syndrome, pulmonary heart disease, rheumatic heart disease, ventricular dysfunction, hyperemia, cardiovascular pregnancy complications, Scimitar Syndrome, cardiovascular syphilis, and cardiovascular tuberculosis.

[0770] Arrhythmias include, but are not limited to, sinus arrhythmia, atrial fibrillation, atrial flutter, bradycardia, extrasystole, Adams-Stokes Syndrome, bundle-branch block, sinoatrial block, long QT syndrome, parasystole, Lown-Ganong-Levine Syndrome, Mahaim-type pre-excitation syndrome, Wolff-Parkinson-White syndrome, sick sinus syndrome, tachycardias, and ventricular fibrillation. Tachycardias include paroxysmal tachycardia, supraventricular tachycardia, accelerated idioventricular rhythm, atrioventricular nodal reentry tachycardia, ectopic atrial tachycardia, ectopic junctional tachycardia, sinoatrial nodal reentry tachycardia, sinus tachycardia, Torsades de Pointes, and ventricular tachycardia.

[0771] Heart valve diseases include, but are not limited to, aortic valve insufficiency, aortic valve stenosis, hear murmurs, aortic valve prolapse, mitral valve prolapse, tricuspid valve prolapse, mitral valve insufficiency, mitral valve stenosis, pulmonary atresia, pulmonary valve insufficiency, pulmonary valve stenosis, tricuspid atresia, tricuspid valve insufficiency, and tricuspid valve stenosis.

[0772] Myocardial diseases include, but are not limited to, alcoholic cardiomyopathy, congestive cardiomyopathy, hypertrophic cardiomyopathy, aortic subvalvular stenosis, pulmonary subvalvular stenosis, restrictive cardiomyopathy, Chagas cardiomyopathy, endocardial fibroelastosis, endomyocardial fibrosis, Kearns Syndrome, myocardial reperfusion injury, and myocarditis.

[0773] Myocardial ischemias include, but are not limited to, coronary disease, such as angina pectoris, coronary aneurysm, coronary arteriosclerosis, coronary thrombosis, coronary vasospasm, myocardial infarction and myocardial stunning.

[0774] Cardiovascular diseases also include vascular diseases such as aneurysms, angiodysplasia, angiomatosis, bacillary angiomatosis, Hippel-Lindau Disease, Klippel-Trenaunay-Weber Syndrome, Sturge-Weber Syndrome, angioneurotic edema, aortic diseases, Takayasu's Arteritis, aortitis, Leriche's Syndrome, arterial occlusive diseases, arteritis, enarteritis, polyarteritis nodosa, cerebrovascular disorders, diabetic angiopathies, diabetic retinopathy, embolisms, thrombosis, erythromelalgia, hemorrhoids, hepatic veno-occlusive disease, hypertension, hypotension, ischemia, peripheral vascular diseases, phlebitis, pulmonary veno-occlusive disease, Raynaud's disease, CREST syndrome, retinal vein occlusion, Scimitar syndrome, superior vena cava syndrome, telangiectasia, atacia telangiectasia, hereditary hemorrhagic telangiectasia, varicocele, varicose veins, varicose ulcer, vasculitis, and venous insufficiency.

[0775] Aneurysms include, but are not limited to, dissecting aneurysms, false aneurysms, infected aneurysms, ruptured aneurysms, aortic aneurysms, cerebral aneurysms, coronary aneurysms, heart aneurysms, and iliac aneurysms.

[0776] Arterial occlusive diseases include, but are not limited to, arteriosclerosis, intermittent claudication, carotid stenosis, fibromuscular dysplasias, mesenteric vascular occlusion, Moyamoya disease, renal artery obstruction, retinal artery occlusion, and thromboangiitis obliterans.

[0777] Cerebrovascular disorders include, but are not limited to, carotid artery diseases, cerebral amyloid angiopathy, cerebral aneurysm, cerebral anoxia, cerebral arteriosclerosis, cerebral arteriovenous malformation, cerebral artery diseases, cerebral embolism and thrombosis, carotid artery thrombosis, sinus thrombosis, Wallenberg's syndrome, cerebral hemorrhage, epidural hematoma, subdural hematoma, subaraxhnoid hemorrhage, cerebral infarction, cerebral ischemia (including transient), subclavian steal syndrome, periventricular leukomalacia, vascular headache, cluster headache, migraine, and vertebrobasilar insufficiency.

[0778] Embolisms include, but are not limited to, air embolisms, amniotic fluid embolisms, cholesterol embolisms, blue toe syndrome, fat embolisms, pulmonary embolisms, and thromoboembolisms. Thrombosis include, but are not limited to, coronary thrombosis, hepatic vein thrombosis, retinal vein occlusion, carotid artery thrombosis, sinus thrombosis, Wallenberg's syndrome, and thrombophlebitis.

[0779] Ischemic disorders include, but are not limited to, cerebral ischemia, ischemic colitis, compartment syndromes, anterior compartment syndrome, myocardial ischemia, reperfusion injuries, and peripheral limb ischemia. Vasculitis includes, but is not limited to, aortitis, arteritis, Behcet's Syndrome, Churg-Strauss Syndrome, mucocutaneous lymph node syndrome, thromboangiitis obliterans, hypersensitivity vasculitis, Schoenlein-Henoch purpura, allergic cutaneous vasculitis, and Wegener's granulomatosis.

[0780] Polypeptides may be administered using any method known in the art, including, but not limited to, direct needle injection at the delivery site, intravenous injection, topical administration, catheter infusion, biolistic injectors, particle accelerators, gelfoam sponge depots, other commercially available depot materials, osmotic pumps, oral or suppositorial solid pharmaceutical formulations, decanting or topical applications during surgery, aerosol delivery. Such methods are known in the art. Polypeptides may be administered as part of a Therapeutic, described in more detail below. Methods of delivering polynucleotides are described in more detail herein.

Respiratory Disorders

[0781] Polynucleotides or polypeptides, or agonists or antagonists of the present invention may be used to treat, prevent, diagnose, and/or prognose diseases and/or disorders of the respiratory system.

[0782] Diseases and disorders of the respiratory system include, but are not limited to, nasal vestibulitis, nonallergic rhinitis (e.g., acute rhinitis, chronic rhinitis, atrophic rhinitis, vasomotor rhinitis), nasal polyps, and sinusitis, juvenile angiofibromas, cancer of the nose and juvenile papillomas, vocal cord polyps, nodules (singer's nodules), contact ulcers, vocal cord paralysis, laryngoceles, pharyngitis (e.g., viral and bacterial), tonsillitis, tonsillar cellulitis, parapharyngeal abscess, laryngitis, laryngoceles, and throat cancers (e.g., cancer of the nasopharynx, tonsil cancer, larynx cancer), lung cancer (e.g., squamous cell carcinoma, small cell (oat cell) carcinoma, large cell carcinoma, and adenocarcinoma), allergic disorders (eosinophilic pneumonia, hypersensitivity pneumonitis (e.g., extrinsic allergic alveolitis, allergic interstitial pneumonitis, organic dust pneumoconiosis, allergic bronchopulmonary aspergillosis, asthma, Wegener's granulomatosis (granulomatous vasculitis), Goodpasture's syndrome)), pneumonia (e.g., bacterial pneumonia (e.g., Streptococcus pneumoniae (pneumoncoccal pneumonia), Staphylococcus aureus (staphylococcal pneumonia), Gram-negative bacterial pneumonia (caused by, e.g., Klebsiella and Pseudomas spp.), Mycoplasma pneumoniae pneumonia, Hemophilus influenzae pneumonia, Legionella pneumophila (Legionnaires' disease), and Chlamydia psittaci (Psittacosis)), and viral pneumonia (e.g., influenza, chickenpox (varicella).

[0783] Additional diseases and disorders of the respiratory system include, but are not limited to bronchiolitis, polio (poliomyelitis), croup, respiratory syncytial viral infection, mumps, erythema infectiosum (fifth disease), roseola infantum, progressive rubella panencephalitis, german measles, and subacute sclerosing panencephalitis), fungal pneumonia (e.g., Histoplasmosis, Coccidioidomycosis, Blastomycosis, fungal infections in people with severely suppressed immune systems (e.g., cryptococcosis, caused by Cryptococcus neoformans; aspergillosis, caused by Aspergillus spp.; candidiasis, caused by Candida; and mucormycosis)), Pneumocystis carinii (pneumocystis pneumonia), atypical pneumonias (e.g., Mycoplasma and Chlamydia spp.), opportunistic infection pneumonia, nosocomial pneumonia, chemical pneumonitis, and aspiration pneumonia, pleural disorders (e.g., pleurisy, pleural effusion, and pneumothorax (e.g., simple spontaneous pneumothorax, complicated spontaneous pneumothorax, tension pneumothorax)), obstructive airway diseases (e.g., asthma, chronic obstructive pulmonary disease (COPD), emphysema, chronic or acute bronchitis), occupational lung diseases (e.g., silicosis, black lung (coal workers' pneumoconiosis), asbestosis, berylliosis, occupational asthsma, byssinosis, and benign pneumoconioses), Infiltrative Lung Disease (e.g., pulmonary fibrosis (e.g., fibrosing alveolitis, usual interstitial pneumonia), idiopathic pulmonary fibrosis, desquamative interstitial pneumonia, lymphoid interstitial pneumonia, histiocytosis X (e.g., Letterer-Siwe disease, Hand-Schüller-Christian disease, eosinophilic granuloma), idiopathic pulmonary hemosiderosis, sarcoidosis and pulmonary alveolar proteinosis), Acute respiratory distress syndrome (also called, e.g., adult respiratory distress syndrome), edema, pulmonary embolism, bronchitis (e.g., viral, bacterial), bronchiectasis, atelectasis, lung abscess (caused by, e.g., Staphylococcus aureus or Legionella pneumophila), and cystic fibrosis.

Anti-Angiogenesis Activity

[0784] The naturally occurring balance between endogenous stimulators and inhibitors of angiogenesis is one in which inhibitory influences predominate. Rastinejad et al., Cell 56:345-355 (1989). In those rare instances in which neovascularization occurs under normal physiological conditions, such as wound healing, organ regeneration, embryonic development, and female reproductive processes, angiogenesis is stringently regulated and spatially and temporally delimited. Under conditions of pathological angiogenesis such as that characterizing solid tumor growth, these regulatory controls fail. Unregulated angiogenesis becomes pathologic and sustains progression of many neoplastic and non-neoplastic diseases. A number of serious diseases are dominated by abnormal neovascularization including solid tumor growth and metastases, arthritis, some types of eye disorders, and psoriasis. See, e.g., reviews by Moses et al., Biotech. 9:630-634 (1991); Folkman et al., N Engl. J. Med., 333:1757-1763 (1995); Auerbach et al., J. Microvasc. Res. 29:401-411 (1985); Folkman, Advances in Cancer Research, eds. Klein and Weinhouse, Academic Press, New York, pp. 175-203 (1985); Patz, Am. J. Opthalmol. 94:715-743 (1982); and Folkman et al., Science 221:719-725 (1983). In a number of pathological conditions, the process of angiogenesis contributes to the disease state. For example, significant data have accumulated which suggest that the growth of solid tumors is dependent on angiogenesis. Folkman and Klagsbrun, Science 235:442-447 (1987).

[0785] The present invention provides for treatment of diseases or disorders associated with neovascularization by administration of the polynucleotides and/or polypeptides of the invention, as well as agonists or antagonists of the present invention. Malignant and metastatic conditions which can be treated with the polynucleotides and polypeptides, or agonists or antagonists of the invention include, but are not limited to, malignancies, solid tumors, and cancers described herein and otherwise known in the art (for a review of such disorders, see Fishman et al., Medicine, 2d Ed., J. B. Lippincott Co., Philadelphia (1985)). Thus, the present invention provides a method of treating an angiogenesis-related disease and/or disorder, comprising administering to an individual in need thereof a therapeutically effective amount of a polynucleotide, polypeptide, antagonist and/or agonist of the invention. For example, polynucleotides, polypeptides, antagonists and/or agonists may be utilized in a variety of additional methods in order to therapeutically treat a cancer or tumor. Cancers which may be treated with polynucleotides, polypeptides, antagonists and/or agonists include, but are not limited to solid tumors, including prostate, lung, breast, ovarian, stomach, pancreas, larynx, esophagus, testes, liver, parotid, biliary tract, colon, rectum, cervix, uterus, endometrium, kidney, bladder, thyroid cancer; primary tumors and metastases; melanomas; glioblastoma; Kaposi's sarcoma; leiomyosarcoma; non-small cell lung cancer; colorectal cancer; advanced malignancies; and blood born tumors such as leukemias. For example, polynucleotides, polypeptides, antagonists and/or agonists may be delivered topically, in order to treat cancers such as skin cancer, head and neck tumors, breast tumors, and Kaposi's sarcoma.

[0786] Within yet other aspects, polynucleotides, polypeptides, antagonists and/or agonists may be utilized to treat superficial forms of bladder cancer by, for example, intravesical administration. Polynucleotides, polypeptides, antagonists and/or agonists may be delivered directly into the tumor, or near the tumor site, via injection or a catheter. Of course, as the artisan of ordinary skill will appreciate, the appropriate mode of administration will vary according to the cancer to be treated. Other modes of delivery are discussed herein.

[0787] Polynucleotides, polypeptides, antagonists and/or agonists may be useful in treating other disorders, besides cancers, which involve angiogenesis. These disorders include, but are not limited to: benign tumors, for example hemangiomas, acoustic neuromas, neurofibromas, trachomas, and pyogenic granulomas; artheroscleric plaques; ocular angiogenic diseases, for example, diabetic retinopathy, retinopathy of prematurity, macular degeneration, corneal graft rejection, neovascular glaucoma, retrolental fibroplasia, rubeosis, retinoblastoma, uvietis and Pterygia (abnormal blood vessel growth) of the eye; rheumatoid arthritis; psoriasis; delayed wound healing; endometriosis; vasculogenesis; granulations; hypertrophic scars (keloids); nonunion fractures; scleroderma; trachoma; vascular adhesions; myocardial angiogenesis; coronary collaterals; cerebral collaterals; arteriovenous malformations; ischemic limb angiogenesis; Osler-Webber Syndrome; plaque neovascularization; telangiectasia; hemophiliac joints; angiofibroma; fibromuscular dysplasia; wound granulation; Crohn's disease; and atherosclerosis.

[0788] For example, within one aspect of the present invention methods are provided for treating hypertrophic scars and keloids, comprising the step of administering a polynucleotide, polypeptide, antagonist and/or agonist of the invention to a hypertrophic scar or keloid.

[0789] Within one embodiment of the present invention polynucleotides, polypeptides, antagonists and/or agonists of the invention are directly injected into a hypertrophic scar or keloid, in order to prevent the progression of these lesions. This therapy is of particular value in the prophylactic treatment of conditions which are known to result in the development of hypertrophic scars and keloids (e.g., burns), and is preferably initiated after the proliferative phase has had time to progress (approximately 14 days after the initial injury), but before hypertrophic scar or keloid development. As noted above, the present invention also provides methods for treating neovascular diseases of the eye, including for example, corneal neovascularization, neovascular glaucoma, proliferative diabetic retinopathy, retrolental fibroplasia and macular degeneration.

[0790] Moreover, Ocular disorders associated with neovascularization which can be treated with the polynucleotides and polypeptides of the present invention (including agonists and/or antagonists) include, but are not limited to: neovascular glaucoma, diabetic retinopathy, retinoblastoma, retrolental fibroplasia, uveitis, retinopathy of prematurity macular degeneration, corneal graft neovascularization, as well as other eye inflammatory diseases, ocular tumors and diseases associated with choroidal or iris neovascularization. See, e.g., reviews by Waltman et al., Am. J. Ophthal 85:704-710 (1978) and Gartner et al., Surv. Ophthal 22:291-312 (1978).

[0791] Thus, within one aspect of the present invention methods are provided for treating neovascular diseases of the eye such as corneal neovascularization (including corneal graft neovascularization), comprising the step of administering to a patient a therapeutically effective amount of a compound (as described above) to the cornea, such that the formation of blood vessels is inhibited. Briefly, the cornea is a tissue which normally lacks blood vessels. In certain pathological conditions however, capillaries may extend into the cornea from the pericorneal vascular plexus of the limbus. When the cornea becomes vascularized, it also becomes clouded, resulting in a decline in the patient's visual acuity. Visual loss may become complete if the cornea completely opacitates. A wide variety of disorders can result in corneal neovascularization, including for example, corneal infections (e.g., trachoma, herpes simplex keratitis, leishmaniasis and onchocerciasis), immunological processes (e.g., graft rejection and Stevens-Johnson's syndrome), alkali burns, trauma, inflammation (of any cause), toxic and nutritional deficiency states, and as a complication of wearing contact lenses.

[0792] Within particularly preferred embodiments of the invention, may be prepared for topical administration in saline (combined with any of the preservatives and antimicrobial agents commonly used in ocular preparations), and administered in eyedrop form. The solution or suspension may be prepared in its pure form and administered several times daily. Alternatively, anti-angiogenic compositions, prepared as described above, may also be administered directly to the cornea. Within preferred embodiments, the anti-angiogenic composition is prepared with a muco-adhesive polymer which binds to cornea. Within further embodiments, the anti-angiogenic factors or anti-angiogenic compositions may be utilized as an adjunct to conventional steroid therapy. Topical therapy may also be useful prophylactically in corneal lesions which are known to have a high probability of inducing an angiogenic response (such as chemical burns). In these instances the treatment, likely in combination with steroids, may be instituted immediately to help prevent subsequent complications.

[0793] Within other embodiments, the compounds described above may be injected directly into the corneal stroma by an ophthalmologist under microscopic guidance. The preferred site of injection may vary with the morphology of the individual lesion, but the goal of the administration would be to place the composition at the advancing front of the vasculature (i.e., interspersed between the blood vessels and the normal cornea). In most cases this would involve perilimbic corneal injection to “protect” the cornea from the advancing blood vessels. This method may also be utilized shortly after a corneal insult in order to prophylactically prevent corneal neovascularization. In this situation the material could be injected in the perilimbic cornea interspersed between the corneal lesion and its undesired potential limbic blood supply. Such methods may also be utilized in a similar fashion to prevent capillary invasion of transplanted corneas. In a sustained-release form injections might only be required 2-3 times per year. A steroid could also be added to the injection solution to reduce inflammation resulting from the injection itself.

[0794] Within another aspect of the present invention, methods are provided for treating neovascular glaucoma, comprising the step of administering to a patient a therapeutically effective amount of a polynucleotide, polypeptide, antagonist and/or agonist to the eye, such that the formation of blood vessels is inhibited. In one embodiment, the compound may be administered topically to the eye in order to treat early forms of neovascular glaucoma. Within other embodiments, the compound may be implanted by injection into the region of the anterior chamber angle. Within other embodiments, the compound may also be placed in any location such that the compound is continuously released into the aqueous humor. Within another aspect of the present invention, methods are provided for treating proliferative diabetic retinopathy, comprising the step of administering to a patient a therapeutically effective amount of a polynucleotide, polypeptide, antagonist and/or agonist to the eyes, such that the formation of blood vessels is inhibited.

[0795] Within particularly preferred embodiments of the invention, proliferative diabetic retinopathy may be treated by injection into the aqueous humor or the vitreous, in order to increase the local concentration of the polynucleotide, polypeptide, antagonist and/or agonist in the retina. Preferably, this treatment should be initiated prior to the acquisition of severe disease requiring photocoagulation.

[0796] Within another aspect of the present invention, methods are provided for treating retrolental fibroplasia, comprising the step of administering to a patient a therapeutically effective amount of a polynucleotide, polypeptide, antagonist and/or agonist to the eye, such that the formation of blood vessels is inhibited. The compound may be administered topically, via intravitreous injection and/or via intraocular implants.

[0797] Additionally, disorders which can be treated with the polynucleotides, polypeptides, agonists and/or agonists include, but are not limited to, hemangioma, arthritis, psoriasis, angiofibroma, atherosclerotic plaques, delayed wound healing, granulations, hemophilic joints, hypertrophic scars, nonunion fractures, Osler-Weber syndrome, pyogenic granuloma, scleroderma, trachoma, and vascular adhesions.

[0798] Moreover, disorders and/or states, which can be treated, prevented, diagnosed, and/or prognosed with the polynucleotides, polypeptides, agonists and/or agonists of the invention include, but are not limited to, solid tumors, blood born tumors such as leukemias, tumor metastasis, Kaposi's sarcoma, benign tumors, for example hemangiomas, acoustic neuromas, neurofibromas, trachomas, and pyogenic granulomas, rheumatoid arthritis, psoriasis, ocular angiogenic diseases, for example, diabetic retinopathy, retinopathy of prematurity, macular degeneration, corneal graft rejection, neovascular glaucoma, retrolental fibroplasia, rubeosis, retinoblastoma, and uvietis, delayed wound healing, endometriosis, vascluogenesis, granulations, hypertrophic scars (keloids), nonunion fractures, scleroderma, trachoma, vascular adhesions, myocardial angiogenesis, coronary collaterals, cerebral collaterals, arteriovenous malformations, ischemic limb angiogenesis, Osler-Webber Syndrome, plaque neovascularization, telangiectasia, hemophiliac joints, angiofibroma fibromuscular dysplasia, wound granulation, Crohn's disease, atherosclerosis, birth control agent by preventing vascularization required for embryo implantation controlling menstruation, diseases that have angiogenesis as a pathologic consequence such as cat scratch disease (Rochele minalia quintosa), ulcers (Helicobacter pylori), Bartonellosis and bacillary angiomatosis.

[0799] In one aspect of the birth control method, an amount of the compound sufficient to block embryo implantation is administered before or after intercourse and fertilization have occurred, thus providing an effective method of birth control, possibly a “morning after” method. Polynucleotides, polypeptides, agonists and/or agonists may also be used in controlling menstruation or administered as either a peritoneal lavage fluid or for peritoneal implantation in the treatment of endometriosis.

[0800] Polynucleotides, polypeptides, agonists and/or agonists of the present invention may be incorporated into surgical sutures in order to prevent stitch granulomas.

[0801] Polynucleotides, polypeptides, agonists and/or agonists may be utilized in a wide variety of surgical procedures. For example, within one aspect of the present invention a compositions (in the form of, for example, a spray or film) may be utilized to coat or spray an area prior to removal of a tumor, in order to isolate normal surrounding tissues from malignant tissue, and/or to prevent the spread of disease to surrounding tissues. Within other aspects of the present invention, compositions (e.g., in the form of a spray) may be delivered via endoscopic procedures in order to coat tumors, or inhibit angiogenesis in a desired locale. Within yet other aspects of the present invention, surgical meshes which have been coated with anti-angiogenic compositions of the present invention may be utilized in any procedure wherein a surgical mesh might be utilized. For example, within one embodiment of the invention a surgical mesh laden with an anti-angiogenic composition may be utilized during abdominal cancer resection surgery (e.g., subsequent to colon resection) in order to provide support to the structure, and to release an amount of the anti-angiogenic factor.

[0802] Within further aspects of the present invention, methods are provided for treating tumor excision sites, comprising administering a polynucleotide, polypeptide, agonist and/or agonist to the resection margins of a tumor subsequent to excision, such that the local recurrence of cancer and the formation of new blood vessels at the site is inhibited. Within one embodiment of the invention, the anti-angiogenic compound is administered directly to the tumor excision site (e.g., applied by swabbing, brushing or otherwise coating the resection margins of the tumor with the anti-angiogenic compound). Alternatively, the anti-angiogenic compounds may be incorporated into known surgical pastes prior to administration. Within particularly preferred embodiments of the invention, the anti-angiogenic compounds are applied after hepatic resections for malignancy, and after neurosurgical operations.

[0803] Within one aspect of the present invention, polynucleotides, polypeptides, agonists and/or agonists may be administered to the resection margin of a wide variety of tumors, including for example, breast, colon, brain and hepatic tumors. For example, within one embodiment of the invention, anti-angiogenic compounds may be administered to the site of a neurological tumor subsequent to excision, such that the formation of new blood vessels at the site are inhibited.

[0804] The polynucleotides, polypeptides, agonists and/or agonists of the present invention may also be administered along with other anti-angiogenic factors. Representative examples of other anti-angiogenic factors include: Anti-Invasive Factor, retinoic acid and derivatives thereof, paclitaxel, Suramin, Tissue Inhibitor of Metalloproteinase-1, Tissue Inhibitor of Metalloproteinase-2, Plasminogen Activator Inhibitor-1, Plasminogen Activator Inhibitor-2, and various forms of the lighter “d group” transition metals.

[0805] Lighter “d group” transition metals include, for example, vanadium, molybdenum, tungsten, titanium, niobium, and tantalum species. Such transition metal species may form transition metal complexes. Suitable complexes of the above-mentioned transition metal species include oxo transition metal complexes.

[0806] Representative examples of vanadium complexes include oxo vanadium complexes such as vanadate and vanadyl complexes. Suitable vanadate complexes include metavanadate and orthovanadate complexes such as, for example, ammonium metavanadate, sodium metavanadate, and sodium orthovanadate. Suitable vanadyl complexes include, for example, vanadyl acetylacetonate and vanadyl sulfate including vanadyl sulfate hydrates such as vanadyl sulfate mono- and trihydrates.

[0807] Representative examples of tungsten and molybdenum complexes also include oxo complexes. Suitable oxo tungsten complexes include tungstate and tungsten oxide complexes. Suitable tungstate complexes include ammonium tungstate, calcium tungstate, sodium tungstate dihydrate, and tungstic acid. Suitable tungsten oxides include tungsten (IV) oxide and tungsten (VI) oxide. Suitable oxo molybdenum complexes include molybdate, molybdenum oxide, and molybdenyl complexes. Suitable molybdate complexes include ammonium molybdate and its hydrates, sodium molybdate and its hydrates, and potassium molybdate and its hydrates. Suitable molybdenum oxides include molybdenum (VI) oxide, molybdenum (VI) oxide, and molybdic acid. Suitable molybdenyl complexes include, for example, molybdenyl acetylacetonate. Other suitable tungsten and molybdenum complexes include hydroxo derivatives derived from, for example, glycerol, tartaric acid, and sugars.

[0808] A wide variety of other anti-angiogenic factors may also be utilized within the context of the present invention. Representative examples include platelet factor 4; protamine sulphate; sulphated chitin derivatives (prepared from queen crab shells), (Murata et al., Cancer Res. 51:22-26, 1991); Sulphated Polysaccharide Peptidoglycan Complex (SP-PG) (the function of this compound may be enhanced by the presence of steroids such as estrogen, and tamoxifen citrate); Staurosporine; modulators of matrix metabolism, including for example, proline analogs, cishydroxyproline, d,L-3,4-dehydroproline, Thiaproline, alpha,alpha-dipyridyl, aminopropionitrile fumarate; 4-propyl-5-(4-pyridinyl)-2(3H)-oxazolone; Methotrexate; Mitoxantrone; Heparin; Interferons; 2 Macroglobulin-serum; ChIMP-3 (Pavloff et al., J. Bio. Chem. 267:17321-17326, 1992); Chymostatin (Tomikinson et al., Biochem J. 286:475-480, 1992); Cyclodextrin Tetradecasulfate; Eponemycin; Camptothecin; Fumagillin (Ingber et al., Nature 348:555-557, 1990); Gold Sodium Thiomalate (“GST”; Matsubara and Ziff, J. Clin. Invest. 79:1440-1446, 1987); anticollagenase-serum; alpha2-antiplasmin (Holmes et al., J. Biol. Chem. 262(4):1659-1664, 1987); Bisantrene (National Cancer Institute); Lobenzarit disodium (N-(2)-carboxyphenyl-4-chloroanthronilic acid disodium or “CCA”; Takeuchi et al., Agents Actions 36:312-316, 1992); Thalidomide; Angostatic steroid; AGM-1470; carboxynaminolmidazole; and metalloproteinase inhibitors such as BB94.

Diseases at the Cellular Level

[0809] Diseases associated with increased cell survival or the inhibition of apoptosis that could be treated, prevented, diagnosed, and/or prognosed using polynucleotides or polypeptides, as well as antagonists or agonists of the present invention, include cancers (such as follicular lymphomas, carcinomas with p53 mutations, and hormone-dependent tumors, including, but not limited to colon cancer, cardiac tumors, pancreatic cancer, melanoma, retinoblastoma, glioblastoma, lung cancer, intestinal cancer, testicular cancer, stomach cancer, neuroblastoma, myxoma, myoma, lymphoma, endothelioma, osteoblastoma, osteoclastoma, osteosarcoma, chondrosarcoma, adenoma, breast cancer, prostate cancer, Kaposi's sarcoma and ovarian cancer); autoimmune disorders (such as, multiple sclerosis, Sjogren's syndrome, Hashimoto's thyroiditis, biliary cirrhosis, Behcet's disease, Crohn's disease, polymyositis, systemic lupus erythematosus and immune-related glomerulonephritis and rheumatoid arthritis) and viral infections (such as herpes viruses, pox viruses and adenoviruses), inflammation, graft v. host disease, acute graft rejection, and chronic graft rejection.

[0810] In preferred embodiments, polynucleotides, polypeptides, and/or antagonists of the invention are used to inhibit growth, progression, and/or metasis of cancers, in particular those listed above.

[0811] Additional diseases or conditions associated with increased cell survival that could be treated or detected by polynucleotides or polypeptides, or agonists or antagonists of the present invention include, but are not limited to, progression, and/or metastases of malignancies and related disorders such as leukemia (including acute leukemias (e.g., acute lymphocytic leukemia, acute myelocytic leukemia (including myeloblastic, promyelocytic, myelomonocytic, monocytic, and erythroleukemia)) and chronic leukemias (e.g., chronic myelocytic (granulocytic) leukemia and chronic lymphocytic leukemia)), polycythemia vera, lymphomas (e.g., Hodgkin's disease and non-Hodgkin's disease), multiple myeloma, Waldenstrom's macroglobulinemia, heavy chain disease, and solid tumors including, but not limited to, sarcomas and carcinomas such as fibrosarcoma, myxosarcoma, liposarcoma, chondrosarcoma, osteogenic sarcoma, chordoma, angiosarcoma, endotheliosarcoma, lymphangiosarcoma, lymphangioendotheliosarcoma, synovioma, mesothelioma, Ewing's tumor, leiomyosarcoma, rhabdomyosarcoma, colon carcinoma, pancreatic cancer, breast cancer, ovarian cancer, prostate cancer, squamous cell carcinoma, basal cell carcinoma, adenocarcinoma, sweat gland carcinoma, sebaceous gland carcinoma, papillary carcinoma, papillary adenocarcinomas, cystadenocarcinoma, medullary carcinoma, bronchogenic carcinoma, renal cell carcinoma, hepatoma, bile duct carcinoma, choriocarcinoma, seminoma, embryonal carcinoma, Wilm's tumor, cervical cancer, testicular tumor, lung carcinoma, small cell lung carcinoma, bladder carcinoma, epithelial carcinoma, glioma, astrocytoma, medulloblastoma, craniopharyngioma, ependymoma, pinealoma, hemangioblastoma, acoustic neuroma, oligodendroglioma, menangioma, melanoma, neuroblastoma, and retinoblastoma.

[0812] Diseases associated with increased apoptosis that could be treated, prevented, diagnosed, and/or prognesed using polynucleotides or polypeptides, as well as agonists or antagonists of the present invention, include, but are not limited to, AIDS; neurodegenerative disorders (such as Alzheimer's disease, Parkinson's disease, Amyotrophic lateral sclerosis, Retinitis pigmentosa, Cerebellar degeneration and brain tumor or prior associated disease); autoimmune disorders (such as, multiple sclerosis, Sjogren's syndrome, Hashimoto's thyroiditis, biliary cirrhosis, Behcet's disease, Crohn's disease, polymyositis, systemic lupus erythematosus and immune-related glomerulonephritis and rheumatoid arthritis) myelodysplastic syndromes (such as aplastic anemia), graft v. host disease, ischemic injury (such as that caused by myocardial infarction, stroke and reperfusion injury), liver injury (e.g., hepatitis related liver injury, ischemia/reperfusion injury, cholestosis (bile duct injury) and liver cancer); toxin-induced liver disease (such as that caused by alcohol), septic shock, cachexia and anorexia.

Wound Healing and Epithelial Cell Proliferation

[0813] In accordance with yet a further aspect of the present invention, there is provided a process for utilizing polynucleotides or polypeptides, as well as agonists or antagonists of the present invention, for therapeutic purposes, for example, to stimulate epithelial cell proliferation and basal keratinocytes for the purpose of wound healing, and to stimulate hair follicle production and healing of dermal wounds. Polynucleotides or polypeptides, as well as agonists or antagonists of the present invention, may be clinically useful in stimulating wound healing including surgical wounds, excisional wounds, deep wounds involving damage of the dermis and epidermis, eye tissue wounds, dental tissue wounds, oral cavity wounds, diabetic ulcers, dermal ulcers, cubitus ulcers, arterial ulcers, venous stasis ulcers, burns resulting from heat exposure or chemicals, and other abnormal wound healing conditions such as uremia, malnutrition, vitamin deficiencies and complications associated with systemic treatment with steroids, radiation therapy and antineoplastic drugs and antimetabolites. Polynucleotides or polypeptides, as well as agonists or antagonists of the present invention, could be used to promote dermal reestablishment subsequent to dermal loss

[0814] Polynucleotides or polypeptides, as well as agonists or antagonists of the present invention, could be used to increase the adherence of skin grafts to a wound bed and to stimulate re-epithelialization from the wound bed. The following are types of grafts that polynucleotides or polypeptides, agonists or antagonists of the present invention, could be used to increase adherence to a wound bed: autografts, artificial skin, allografts, autodermic graft, autoepdermic grafts, avacular grafts, Blair-Brown grafts, bone graft, brephoplastic grafts, cutis graft, delayed graft, dermic graft, epidermic graft, fascia graft, full thickness graft, heterologous graft, xenograft, homologous graft, hyperplastic graft, lamellar graft, mesh graft, mucosal graft, Ollier-Thiersch graft, omenpal graft, patch graft, pedicle graft, penetrating graft, split skin graft, thick split graft. Polynucleotides or polypeptides, as well as agonists or antagonists of the present invention, can be used to promote skin strength and to improve the appearance of aged skin.

[0815] It is believed that polynucleotides or polypeptides, as well as agonists or antagonists of the present invention, will also produce changes in hepatocyte proliferation, and epithelial cell proliferation in the lung, breast, pancreas, stomach, small intestine, and large intestine. Polynucleotides or polypeptides, as well as agonists or antagonists of the present invention, could promote proliferation of epithelial cells such as sebocytes, hair follicles, hepatocytes, type II pneumocytes, mucin-producing goblet cells, and other epithelial cells and their progenitors contained within the skin, lung, liver, and gastrointestinal tract. Polynucleotides or polypeptides, agonists or antagonists of the present invention, may promote proliferation of endothelial cells, keratinocytes, and basal keratinocytes.

[0816] Polynucleotides or polypeptides, as well as agonists or antagonists of the present invention, could also be used to reduce the side effects of gut toxicity that result from radiation, chemotherapy treatments or viral infections. Polynucleotides or polypeptides, as well as agonists or antagonists of the present invention, may have a cytoprotective effect on the small intestine mucosa. Polynucleotides or polypeptides, as well as agonists or antagonists of the present invention, may also stimulate healing of mucositis (mouth ulcers) that result from chemotherapy and viral infections.

[0817] Polynucleotides or polypeptides, as well as agonists or antagonists of the present invention, could further be used in full regeneration of skin in full and partial thickness skin defects, including burns, (i.e., repopulation of hair follicles, sweat glands, and sebaceous glands), treatment of other skin defects such as psoriasis. Polynucleotides or polypeptides, as well as agonists or antagonists of the present invention, could be used to treat epidermolysis bullosa, a defect in adherence of the epidermis to the underlying dermis which results in frequent, open and painful blisters by accelerating reepithelialization of these lesions. Polynucleotides or polypeptides, as well as agonists or antagonists of the present invention, could also be used to treat gastric and doudenal ulcers and help heal by scar formation of the mucosal lining and regeneration of glandular mucosa and duodenal mucosal lining more rapidly. Inflammatory bowel diseases, such as Crohn's disease and ulcerative colitis, are diseases which result in destruction of the mucosal surface of the small or large intestine, respectively. Thus, polynucleotides or polypeptides, as well as agonists or antagonists of the present invention, could be used to promote the resurfacing of the mucosal surface to aid more rapid healing and to prevent progression of inflammatory bowel disease. Treatment with polynucleotides or polypeptides, agonists or antagonists of the present invention, is expected to have a significant effect on the production of mucus throughout the gastrointestinal tract and could be used to protect the intestinal mucosa from injurious substances that are ingested or following surgery. Polynucleotides or polypeptides, as well as agonists or antagonists of the present invention, could be used to treat diseases associate with the under expression.

[0818] Moreover, polynucleotides or polypeptides, as well as agonists or antagonists of the present invention, could be used to prevent and heal damage to the lungs due to various pathological states. Polynucleotides or polypeptides, as well as agonists or antagonists of the present invention, which could stimulate proliferation and differentiation and promote the repair of alveoli and brochiolar epithelium to prevent or treat acute or chronic lung damage. For example, emphysema, which results in the progressive loss of aveoli, and inhalation injuries, i.e., resulting from smoke inhalation and burns, that cause necrosis of the bronchiolar epithelium and alveoli could be effectively treated using polynucleotides or polypeptides, agonists or antagonists of the present invention. Also, polynucleotides or polypeptides, as well as agonists or antagonists of the present invention, could be used to stimulate the proliferation of and differentiation of type II pneumocytes, which may help treat or prevent disease such as hyaline membrane diseases, such as infant respiratory distress syndrome and bronchopulmonary displasia, in premature infants.

[0819] Polynucleotides or polypeptides, as well as agonists or antagonists of the present invention, could stimulate the proliferation and differentiation of hepatocytes and, thus, could be used to alleviate or treat liver diseases and pathologies such as fulminant liver failure caused by cirrhosis, liver damage caused by viral hepatitis and toxic substances (i.e., acetaminophen, carbon tetraholoride and other hepatotoxins known in the art).

[0820] In addition, polynucleotides or polypeptides, as well as agonists or antagonists of the present invention, could be used treat or prevent the onset of diabetes mellitus. In patients with newly diagnosed Types I and II diabetes, where some islet cell function remains, polynucleotides or polypeptides, as well as agonists or antagonists of the present invention, could be used to maintain the islet function so as to alleviate, delay or prevent permanent manifestation of the disease. Also, polynucleotides or polypeptides, as well as agonists or antagonists of the present invention, could be used as an auxiliary in islet cell transplantation to improve or promote islet cell function.

Neural Activity and Neurological Diseases

[0821] The polynucleotides, polypeptides and agonists or antagonists of the invention may be used for the diagnosis and/or treatment of diseases, disorders, damage or injury of the brain and/or nervous system. Nervous system disorders that can be treated with the compositions of the invention (e.g., polypeptides, polynucleotides, and/or agonists or antagonists), include, but are not limited to, nervous system injuries, and diseases or disorders which result in either a disconnection of axons, a diminution or degeneration of neurons, or demyelination. Nervous system lesions which may be treated in a patient (including human and non-human mammalian patients) according to the methods of the invention, include but are not limited to, the following lesions of either the central (including spinal cord, brain) or peripheral nervous systems: (1) ischemic lesions, in which a lack of oxygen in a portion of the nervous system results in neuronal injury or death, including cerebral infarction or ischemia, or spinal cord infarction or ischemia; (2) traumatic lesions, including lesions caused by physical injury or associated with surgery, for example, lesions which sever a portion of the nervous system, or compression injuries; (3) malignant lesions, in which a portion of the nervous system is destroyed or injured by malignant tissue which is either a nervous system associated malignancy or a malignancy derived from non-nervous system tissue; (4) infectious lesions, in which a portion of the nervous system is destroyed or injured as a result of infection, for example, by an abscess or associated with infection by human immunodeficiency virus, herpes zoster, or herpes simplex virus or with Lyme disease, tuberculosis, or syphilis; (5) degenerative lesions, in which a portion of the nervous system is destroyed or injured as a result of a degenerative process including but not limited to, degeneration associated with Parkinson's disease, Alzheimer's disease, Huntington's chorea, or amyotrophic lateral sclerosis (ALS); (6) lesions associated with nutritional diseases or disorders, in which a portion of the nervous system is destroyed or injured by a nutritional disorder or disorder of metabolism including, but not limited to, vitamin B12 deficiency, folic acid deficiency, Wernicke disease, tobacco-alcohol amblyopia, Marchiafava-Bignami disease (primary degeneration of the corpus callosum), and alcoholic cerebellar degeneration; (7) neurological lesions associated with systemic diseases including, but not limited to, diabetes (diabetic neuropathy, Bell's palsy), systemic lupus erythematosus, carcinoma, or sarcoidosis; (8) lesions caused by toxic substances including alcohol, lead, or particular neurotoxins; and (9) demyelinated lesions in which a portion of the nervous system is destroyed or injured by a demyelinating disease including, but not limited to, multiple sclerosis, human immunodeficiency virus-associated myelopathy, transverse myelopathy or various etiologies, progressive multifocal leukoencephalopathy, and central pontine myelinolysis.

[0822] In one embodiment, the polypeptides, polynucleotides, or agonists or antagonists of the invention are used to protect neural cells from the damaging effects of hypoxia. In a further preferred embodiment, the polypeptides, polynucleotides, or agonists or antagonists of the invention are used to protect neural cells from the damaging effects of cerebral hypoxia. According to this embodiment, the compositions of the invention are used to treat or prevent neural cell injury associated with cerebral hypoxia. In one non-exclusive aspect of this embodiment, the polypeptides, polynucleotides, or agonists or antagonists of the invention, are used to treat or prevent neural cell injury associated with cerebral ischemia. In another non-exclusive aspect of this embodiment, the polypeptides, polynucleotides, or agonists or antagonists of the invention are used to treat or prevent neural cell injury associated with cerebral infarction.

[0823] In another preferred embodiment, the polypeptides, polynucleotides, or agonists or antagonists of the invention are used to treat or prevent neural cell injury associated with a stroke. In a specific embodiment, the polypeptides, polynucleotides, or agonists or antagonists of the invention are used to treat or prevent cerebral neural cell injury associated with a stroke.

[0824] In another preferred embodiment, the polypeptides, polynucleotides, or agonists or antagonists of the invention are used to treat or prevent neural cell injury associated with a heart attack. In a specific embodiment, the polypeptides, polynucleotides, or agonists or antagonists of the invention are used to treat or prevent cerebral neural cell injury associated with a heart attack.

[0825] The compositions of the invention which are useful for treating or preventing a nervous system disorder may be selected by testing for biological activity in promoting the survival or differentiation of neurons. For example, and not by way of limitation, compositions of the invention which elicit any of the following effects may be useful according to the invention: (1) increased survival time of neurons in culture either in the presence or absence of hypoxia or hypoxic conditions; (2) increased sprouting of neurons in culture or in vivo; (3) increased production of a neuron-associated molecule in culture or in vivo, e.g., choline acetyltransferase or acetylcholinesterase with respect to motor neurons; or (4) decreased symptoms of neuron dysfunction in vivo. Such effects may be measured by any method known in the art. In preferred, non-limiting embodiments, increased survival of neurons may routinely be measured using a method set forth herein or otherwise known in the art, such as, for example, in Zhang et al., Proc Natl Acad Sci USA 97:3637-42 (2000) or in Arakawa et al., J. Neurosci., 10:3507-15 (1990); increased sprouting of neurons may be detected by methods known in the art, such as, for example, the methods set forth in Pestronk et al., Exp. Neurol., 70:65-82 (1980), or Brown et al., Ann. Rev. Neurosci., 4:17-42 (1981); increased production of neuron-associated molecules may be measured by bioassay, enzymatic assay, antibody binding, Northern blot assay, etc., using techniques known in the art and depending on the molecule to be measured; and motor neuron dysfunction may be measured by assessing the physical manifestation of motor neuron disorder, e.g., weakness, motor neuron conduction velocity, or functional disability.

[0826] In specific embodiments, motor neuron disorders that may be treated according to the invention include, but are not limited to, disorders such as infarction, infection, exposure to toxin, trauma, surgical damage, degenerative disease or malignancy that may affect motor neurons as well as other components of the nervous system, as well as disorders that selectively affect neurons such as amyotrophic lateral sclerosis, and including, but not limited to, progressive spinal muscular atrophy, progressive bulbar palsy, primary lateral sclerosis, infantile and juvenile muscular atrophy, progressive bulbar paralysis of childhood (Fazio-Londe syndrome), poliomyelitis and the post polio syndrome, and Hereditary Motorsensory Neuropathy (Charcot-Marie-Tooth Disease).

[0827] Further, polypeptides or polynucleotides of the invention may play a role in neuronal survival; synapse formation; conductance; neural differentiation, etc. Thus, compositions of the invention (including polynucleotides, polypeptides, and agonists or antagonists) may be used to diagnose and/or treat or prevent diseases or disorders associated with these roles, including, but not limited to, learning and/or cognition disorders. The compositions of the invention may also be useful in the treatment or prevention of neurodegenerative disease states and/or behavioural disorders. Such neurodegenerative disease states and/or behavioral disorders include, but are not limited to, Alzheimer's Disease, Parkinson's Disease, Huntington's Disease, Tourette Syndrome, schizophrenia, mania, dementia, paranoia, obsessive compulsive disorder, panic disorder, learning disabilities, ALS, psychoses, autism, and altered behaviors, including disorders in feeding, sleep patterns, balance, and perception. In addition, compositions of the invention may also play a role in the treatment, prevention and/or detection of developmental disorders associated with the developing embryo, or sexually-linked disorders.

[0828] Additionally, polypeptides, polynucleotides and/or agonists or antagonists of the invention, may be useful in protecting neural cells from diseases, damage, disorders, or injury, associated with cerebrovascular disorders including, but not limited to, carotid artery diseases (e.g., carotid artery thrombosis, carotid stenosis, or Moyamoya Disease), cerebral amyloid angiopathy, cerebral aneurysm, cerebral anoxia, cerebral arteriosclerosis, cerebral arteriovenous malformations, cerebral artery diseases, cerebral embolism and thrombosis (e.g., carotid artery thrombosis, sinus thrombosis, or Wallenberg's Syndrome), cerebral hemorrhage (e.g., epidural or subdural hematoma, or subarachnoid hemorrhage), cerebral infarction, cerebral ischemia (e.g., transient cerebral ischemia, Subclavian Steal Syndrome, or vertebrobasilar insufficiency), vascular dementia (e.g., multi-infarct), leukomalacia, periventricular, and vascular headache (e.g., cluster headache or migraines).

[0829] In accordance with yet a further aspect of the present invention, there is provided a process for utilizing polynucleotides or polypeptides, as well as agonists or antagonists of the present invention, for therapeutic purposes, for example, to stimulate neurological cell proliferation and/or differentiation. Therefore, polynucleotides, polypeptides, agonists and/or antagonists of the invention may be used to treat and/or detect neurologic diseases. Moreover, polynucleotides or polypeptides, or agonists or antagonists of the invention, can be used as a marker or detector of a particular nervous system disease or disorder.

[0830] Examples of neurologic diseases which can be treated or detected with polynucleotides, polypeptides, agonists, and/or antagonists of the present invention include brain diseases, such as metabolic brain diseases which includes phenylketonuria such as maternal phenylketonuria, pyruvate carboxylase deficiency, pyruvate dehydrogenase complex deficiency, Wernicke's Encephalopathy, brain edema, brain neoplasms such as cerebellar neoplasms which include infratentorial neoplasms, cerebral ventricle neoplasms such as choroid plexus neoplasms, hypothalamic neoplasms, supratentorial neoplasms, canavan disease, cerebellar diseases such as cerebellar ataxia which include spinocerebellar degeneration such as ataxia telangiectasia, cerebellar dyssynergia, Friederich's Ataxia, Machado-Joseph Disease, olivopontocerebellar atrophy, cerebellar neoplasms such as infratentorial neoplasms, diffuse cerebral sclerosis such as encephalitis periaxialis, globoid cell leukodystrophy, metachromatic leukodystrophy and subacute sclerosing panencephalitis.

[0831] Additional neurologic diseases which can be treated or detected with polynucleotides, polypeptides, agonists, and/or antagonists of the present invention include cerebrovascular disorders (such as carotid artery diseases which include carotid artery thrombosis, carotid stenosis and Moyamoya Disease), cerebral amyloid angiopathy, cerebral aneurysm, cerebral anoxia, cerebral arteriosclerosis, cerebral arteriovenous malformations, cerebral artery diseases, cerebral embolism and thrombosis such as carotid artery thrombosis, sinus thrombosis and Wallenberg's Syndrome, cerebral hemorrhage such as epidural hematoma, subdural hematoma and subarachnoid hemorrhage, cerebral infarction, cerebral ischemia such as transient cerebral ischemia, Subclavian Steal Syndrome and vertebrobasilar insufficiency, vascular dementia such as multi-infarct dementia, periventricular leukomalacia, vascular headache such as cluster headache and migraine.

[0832] Additional neurologic diseases which can be treated or detected with polynucleotides, polypeptides, agonists, and/or antagonists of the present invention include dementia such as AIDS Dementia Complex, presenile dementia such as Alzheimer's Disease and Creutzfeldt-Jakob Syndrome, senile dementia such as Alzheimer's Disease and progressive supranuclear palsy, vascular dementia such as multi-infarct dementia, encephalitis which include encephalitis periaxialis, viral encephalitis such as epidemic encephalitis, Japanese Encephalitis, St. Louis Encephalitis, tick-borne encephalitis and West Nile Fever, acute disseminated encephalomyelitis, meningoencephalitis such as uveomeningoencephalitic syndrome, Postencephalitic Parkinson Disease and subacute sclerosing panencephalitis, encephalomalacia such as periventricular leukomalacia, epilepsy such as generalized epilepsy which includes infantile spasms, absence epilepsy, myoclonic epilepsy which includes MERRF Syndrome, tonic-clonic epilepsy, partial epilepsy such as complex partial epilepsy, frontal lobe epilepsy and temporal lobe epilepsy, post-traumatic epilepsy, status epilepticus such as Epilepsia Partialis Continua, and Hallervorden-Spatz Syndrome.

[0833] Additional neurologic diseases which can be treated or detected with polynucleotides, polypeptides, agonists, and/or antagonists of the present invention include hydrocephalus such as Dandy-Walker Syndrome and normal pressure hydrocephalus, hypothalamic diseases such as hypothalamic neoplasms, cerebral malaria, narcolepsy which includes cataplexy, bulbar poliomyelitis, cerebri pseudotumor, Rett Syndrome, Reye's Syndrome, thalamic diseases, cerebral toxoplasmosis, intracranial tuberculoma and Zellweger Syndrome, central nervous system infections such as AIDS Dementia Complex, Brain Abscess, subdural empyema, encephalomyelitis such as Equine Encephalomyelitis, Venezuelan Equine Encephalomyelitis, Necrotizing Hemorrhagic Encephalomyelitis, Visna, and cerebral malaria.

[0834] Additional neurologic diseases which can be treated or detected with polynucleotides, polypeptides, agonists, and/or antagonists of the present invention include meningitis such as arachnoiditis, aseptic meningtitis such as viral meningtitis which includes lymphocytic choriomeningitis, Bacterial meningtitis which includes Haemophilus Meningtitis, Listeria Meningtitis, Meningococcal Meningtitis such as Waterhouse-Friderichsen Syndrome, Pneumococcal Meningtitis and meningeal tuberculosis, fungal meningitis such as Cryptococcal Meningtitis, subdural effusion, meningoencephalitis such as uvemeningoencephalitic syndrome, myelitis such as transverse myelitis, neurosyphilis such as tabes dorsalis, poliomyelitis which includes bulbar poliomyelitis and postpoliomyelitis syndrome, prion diseases (such as Creutzfeldt-Jakob Syndrome, Bovine Spongiform Encephalopathy, Gerstmann-Straussler Syndrome, Kuru, Scrapie), and cerebral toxoplasmosis.

[0835] Additional neurologic diseases which can be treated or detected with polynucleotides, polypeptides, agonists, and/or antagonists of the present invention include central nervous system neoplasms such as brain neoplasms that include cerebellar neoplasms such as infratentorial neoplasms, cerebral ventricle neoplasms such as choroid plexus neoplasms, hypothalamic neoplasms and supratentorial neoplasms, meningeal neoplasms, spinal cord neoplasms which include epidural neoplasms, demyelinating diseases such as Canavan Diseases, diffuse cerebral sceloris which includes adrenoleukodystrophy, encephalitis periaxialis, globoid cell leukodystrophy, diffuse cerebral sclerosis such as metachromatic leukodystrophy, allergic encephalomyelitis, necrotizing hemorrhagic encephalomyelitis, progressive multifocal leukoencephalopathy, multiple sclerosis, central pontine myelinolysis, transverse myelitis, neuromyelitis optica, Scrapie, Swayback, Chronic Fatigue Syndrome, Visna, High Pressure Nervous Syndrome, Meningism, spinal cord diseases such as amyotonia congenita, amyotrophic lateral sclerosis, spinal muscular atrophy such as Werdnig-Hoffmann Disease, spinal cord compression, spinal cord neoplasms such as epidural neoplasms, syringomyelia, Tabes Dorsalis, Stiff-Man Syndrome, mental retardation such as Angelman Syndrome, Cri-du-Chat Syndrome, De Lange's Syndrome, Down Syndrome, Gangliosidoses such as gangliosidoses G(M1), Sandhoff Disease, Tay-Sachs Disease, Hartnup Disease, homocystinuria, Laurence-Moon-Biedl Syndrome, Lesch-Nyhan Syndrome, Maple Syrup Urine Disease, mucolipidosis such as fucosidosis, neuronal ceroid-lipofuscinosis, oculocerebrorenal syndrome, phenylketonuria such as maternal phenylketonuria, Prader-Willi Syndrome, Rett Syndrome, Rubinstein-Taybi Syndrome, Tuberous Sclerosis, WAGR Syndrome, nervous system abnormalities such as holoprosencephaly, neural tube defects such as anencephaly which includes hydrangencephaly, Arnold-Chairi Deformity, encephalocele, meningocele, meningomyelocele, spinal dysraphism such as spina bifida cystica and spina bifida occulta.

[0836] Additional neurologic diseases which can be treated or detected with polynucleotides, polypeptides, agonists, and/or antagonists of the present invention include hereditary motor and sensory neuropathies which include Charcot-Marie Disease, Hereditary optic atrophy, Refsum's Disease, hereditary spastic paraplegia, Werdnig-Hoffmann Disease, Hereditary Sensory and Autonomic Neuropathies such as Congenital Analgesia and Familial Dysautonomia, Neurologic manifestations (such as agnosia that include Gerstmann's Syndrome, Amnesia such as retrograde amnesia, apraxia, neurogenic bladder, cataplexy, communicative disorders such as hearing disorders that includes deafness, partial hearing loss, loudness recruitment and tinnitus, language disorders such as aphasia which include agraphia, anomia, broca aphasia, and Wernicke Aphasia, Dyslexia such as Acquired Dyslexia, language development disorders, speech disorders such as aphasia which includes anomia, broca aphasia and Wernicke Aphasia, articulation disorders, communicative disorders such as speech disorders which include dysarthria, echolalia, mutism and stuttering, voice disorders such as aphonia and hoarseness, decerebrate state, delirium, fasciculation, hallucinations, meningism, movement disorders such as angelman syndrome, ataxia, athetosis, chorea, dystonia, hypokinesia, muscle hypotonia, myoclonus, tic, torticollis and tremor, muscle hypertonia such as muscle rigidity such as stiff-man syndrome, muscle spasticity, paralysis such as facial paralysis which includes Herpes Zoster Oticus, Gastroparesis, Hemiplegia, ophthalmoplegia such as diplopia, Duane's Syndrome, Horner's Syndrome, Chronic progressive external ophthalmoplegia such as Kearns Syndrome, Bulbar Paralysis, Tropical Spastic Paraparesis, Paraplegia such as Brown-Sequard Syndrome, quadriplegia, respiratory paralysis and vocal cord paralysis, paresis, phantom limb, taste disorders such as ageusia and dysgeusia, vision disorders such as amblyopia, blindness, color vision defects, diplopia, hemianopsia, scotoma and subnormal vision, sleep disorders such as hypersomnia which includes Kleine-Levin Syndrome, insomnia, and somnambulism, spasm such as trismus, unconsciousness such as coma, persistent vegetative state and syncope and vertigo, neuromuscular diseases such as amyotonia congenita, amyotrophic lateral sclerosis, Lambert-Eaton Myasthenic Syndrome, motor neuron disease, muscular atrophy such as spinal muscular atrophy, Charcot-Marie Disease and Werdnig-Hoffmann Disease, Postpoliomyelitis Syndrome, Muscular Dystrophy, Myasthenia Gravis, Myotonia Atrophica, Myotonia Confenita, Nemaline Myopathy, Familial Periodic Paralysis, Multiplex Paramyloclonus, Tropical Spastic Paraparesis and Stiff-Man Syndrome, peripheral nervous system diseases such as acrodynia, amyloid neuropathies, autonomic nervous system diseases such as Adie's Syndrome, Barre-Lieou Syndrome, Familial Dysautonomia, Horner's Syndrome, Reflex Sympathetic Dystrophy and Shy-Drager Syndrome, Cranial Nerve Diseases such as Acoustic Nerve Diseases such as Acoustic Neuroma which includes Neurofibromatosis 2, Facial Nerve Diseases such as Facial Neuralgia, Melkersson-Rosenthal Syndrome, ocular motility disorders which includes amblyopia, nystagmus, oculomotor nerve paralysis, ophthalmoplegia such as Duane's Syndrome, Horner's Syndrome, Chronic Progressive External Ophthalmoplegia which includes Kearns Syndrome, Strabismus such as Esotropia and Exotropia, Oculomotor Nerve Paralysis, Optic Nerve Diseases such as Optic Atrophy which includes Hereditary Optic Atrophy, Optic Disk Drusen, Optic Neuritis such as Neuromyelitis Optica, Papilledema, Trigeminal Neuralgia, Vocal Cord Paralysis, Demyelinating Diseases such as Neuromyelitis Optica and Swayback, and Diabetic neuropathies such as diabetic foot.

[0837] Additional neurologic diseases which can be treated or detected with polynucleotides, polypeptides, agonists, and/or antagonists of the present invention include nerve compression syndromes such as carpal tunnel syndrome, tarsal tunnel syndrome, thoracic outlet syndrome such as cervical rib syndrome, ulnar nerve compression syndrome, neuralgia such as causalgia, cervico-brachial neuralgia, facial neuralgia and trigeminal neuralgia, neuritis such as experimental allergic neuritis, optic neuritis, polyneuritis, polyradiculoneuritis and radiculities such as polyradiculitis, hereditary motor and sensory neuropathies such as Charcot-Marie Disease, Hereditary Optic Atrophy, Refsum's Disease, Hereditary Spastic Paraplegia and Werdnig-Hoffmann Disease, Hereditary Sensory and Autonomic Neuropathies which include Congenital Analgesia and Familial Dysautonomia, POEMS Syndrome, Sciatica, Gustatory Sweating and Tetany).

Endocrine Disorders

[0838] Polynucleotides or polypeptides, or agonists or antagonists of the present invention, may be used to treat, prevent, diagnose, and/or prognose disorders and/or diseases related to hormone imbalance, and/or disorders or diseases of the endocrine system.

[0839] Hormones secreted by the glands of the endocrine system control physical growth, sexual function, metabolism, and other functions. Disorders may be classified in two ways: disturbances in the production of hormones, and the inability of tissues to respond to hormones. The etiology of these hormone imbalance or endocrine system diseases, disorders or conditions may be genetic, somatic, such as cancer and some autoimmune diseases, acquired (e.g., by chemotherapy, injury or toxins), or infectious. Moreover, polynucleotides, polypeptides, antibodies, and/or agonists or antagonists of the present invention can be used as a marker or detector of a particular disease or disorder related to the endocrine system and/or hormone imbalance.

[0840] Endocrine system and/or hormone imbalance and/or diseases encompass disorders of uterine motility including, but not limited to: complications with pregnancy and labor (e.g., pre-term labor, post-term pregnancy, spontaneous abortion, and slow or stopped labor); and disorders and/or diseases of the menstrual cycle (e.g., dysmenorrhea and endometriosis).

[0841] Endocrine system and/or hormone imbalance disorders and/or diseases include disorders and/or diseases of the pancreas, such as, for example, diabetes mellitus, diabetes insipidus, congenital pancreatic agenesis, pheochromocytoma—islet cell tumor syndrome; disorders and/or diseases of the adrenal glands such as, for example, Addison's Disease, corticosteroid deficiency, virilizing disease, hirsutism, Cushing's Syndrome, hyperaldosteronism, pheochromocytoma; disorders and/or diseases of the pituitary gland, such as, for example, hyperpituitarism, hypopituitarism, pituitary dwarfism, pituitary adenoma, panhypopituitarism, acromegaly, gigantism; disorders and/or diseases of the thyroid, including but not limited to, hyperthyroidism, hypothyroidism, Plummer's disease, Graves' disease (toxic diffuse goiter), toxic nodular goiter, thyroiditis (Hashimoto's thyroiditis, subacute granulomatous thyroiditis, and silent lymphocytic thyroiditis), Pendred's syndrome, myxedema, cretinism, thyrotoxicosis, thyroid hormone coupling defect, thymic aplasia, Hurthle cell tumours of the thyroid, thyroid cancer, thyroid carcinoma, Medullary thyroid carcinoma; disorders and/or diseases of the parathyroid, such as, for example, hyperparathyroidism, hypoparathyroidism; disorders and/or diseases of the hypothalamus.

[0842] In addition, endocrine system and/or hormone imbalance disorders and/or diseases may also include disorders and/or diseases of the testes or ovaries, including cancer. Other disorders and/or diseases of the testes or ovaries further include, for example, ovarian cancer, polycystic ovary syndrome, Klinefelter's syndrome, vanishing testes syndrome (bilateral anorchia), congenital absence of Leydig's cells, cryptorchidism, Noonan's syndrome, myotonic dystrophy, capillary haemangioma of the testis (benign), neoplasias of the testis and neo-testis.

[0843] Moreover, endocrine system and/or hormone imbalance disorders and/or diseases may also include disorders and/or diseases such as, for example, polyglandular deficiency syndromes, pheochromocytoma, neuroblastoma, multiple Endocrine neoplasia, and disorders and/or cancers of endocrine tissues.

[0844] In another embodiment, a polypeptide of the invention, or polynucleotides, antibodies, agonists, or antagonists corresponding to that polypeptide, may be used to diagnose, prognose, prevent, and/or treat endocrine diseases and/or disorders associated with the tissue(s) in which the polypeptide of the invention is expressed, including one, two, three, four, five, or more tissues disclosed in Table 1B.2, column 5 (Tissue Distribution Library Code).

Reproductive System Disorders

[0845] The polynucleotides or polypeptides, or agonists or antagonists of the invention may be used for the diagnosis, treatment, or prevention of diseases and/or disorders of the reproductive system. Reproductive system disorders that can be treated by the compositions of the invention, include, but are not limited to, reproductive system injuries, infections, neoplastic disorders, congenital defects, and diseases or disorders which result in infertility, complications with pregnancy, labor, or parturition, and postpartum difficulties.

[0846] Reproductive system disorders and/or diseases include diseases and/or disorders of the testes, including testicular atrophy, testicular feminization, cryptorchism (unilateral and bilateral), anorchia, ectopic testis, epididymitis and orchitis (typically resulting from infections such as, for example, gonorrhea, mumps, tuberculosis, and syphilis), testicular torsion, vasitis nodosa, germ cell tumors (e.g., seminomas, embryonal cell carcinomas, teratocarcinomas, choriocarcinomas, yolk sac tumors, and teratomas), stromal tumors (e.g., Leydig cell tumors), hydrocele, hematocele, varicocele, spermatocele, inguinal hernia, and disorders of sperm production (e.g., immotile cilia syndrome, aspermia, asthenozoospermia, azoospermia, oligospermia, and teratozoospermia).

[0847] Reproductive system disorders also include disorders of the prostate gland, such as acute non-bacterial prostatitis, chronic non-bacterial prostatitis, acute bacterial prostatitis, chronic bacterial prostatitis, prostatodystonia, prostatosis, granulomatous prostatitis, malacoplakia, benign prostatic hypertrophy or hyperplasia, and prostate neoplastic disorders, including adenocarcinomas, transitional cell carcinomas, ductal carcinomas, and squamous cell carcinomas.

[0848] Additionally, the compositions of the invention may be useful in the diagnosis, treatment, and/or prevention of disorders or diseases of the penis and urethra, including inflammatory disorders, such as balanoposthitis, balanitis xerotica obliterans, phimosis, paraphimosis, syphilis, herpes simplex virus, gonorrhea, non-gonococcal urethritis, chlamydia, mycoplasma, trichomonas, HIV, AIDS, Reiter's syndrome, condyloma acuminatum, condyloma latum, and pearly penile papules; urethral abnormalities, such as hypospadias, epispadias, and phimosis; premalignant lesions, including Erythroplasia of Queyrat, Bowen's disease, Bowenoid paplosis, giant condyloma of Buscke-Lowenstein, and varrucous carcinoma; penile cancers, including squamous cell carcinomas, carcinoma in situ, verrucous carcinoma, and disseminated penile carcinoma; urethral neoplastic disorders, including penile urethral carcinoma, bulbomembranous urethral carcinoma, and prostatic urethral carcinoma; and erectile disorders, such as priapism, Peyronie's disease, erectile dysfunction, and impotence.

[0849] Moreover, diseases and/or disorders of the vas deferens include vasculititis and CBAVD (congenital bilateral absence of the vas deferens); additionally, the polynucleotides, polypeptides, and agonists or antagonists of the present invention may be used in the diagnosis, treatment, and/or prevention of diseases and/or disorders of the seminal vesicles, including hydatid disease, congenital chloride diarrhea, and polycystic kidney disease.

[0850] Other disorders and/or diseases of the male reproductive system include, for example, Klinefelter's syndrome, Young's syndrome, premature ejaculation, diabetes mellitus, cystic fibrosis, Kartagener's syndrome, high fever, multiple sclerosis, and gynecomastia.

[0851] Further, the polynucleotides, polypeptides, and agonists or antagonists of the present invention may be used in the diagnosis, treatment, and/or prevention of diseases and/or disorders of the vagina and vulva, including bacterial vaginosis, candida vaginitis, herpes simplex virus, chancroid, granuloma inguinale, lymphogranuloma venereum, scabies, human papillomavirus, vaginal trauma, vulvar trauma, adenosis, chlamydia vaginitis, gonorrhea, trichomonas vaginitis, condyloma acuminatum, syphilis, molluscum contagiosum, atrophic vaginitis, Paget's disease, lichen sclerosus, lichen planus, vulvodynia, toxic shock syndrome, vaginismus, vulvovaginitis, vulvar vestibulitis, and neoplastic disorders, such as squamous cell hyperplasia, clear cell carcinoma, basal cell carcinoma, melanomas, cancer of Bartholin's gland, and vulvar intraepithelial neoplasia.

[0852] Disorders and/or diseases of the uterus include dysmenorrhea, retroverted uterus, endometriosis, fibroids, adenomyosis, anovulatory bleeding, amenorrhea, Cushing's syndrome, hydatidiform moles, Asherman's syndrome, premature menopause, precocious puberty, uterine polyps, dysfunctional uterine bleeding (e.g., due to aberrant hormonal signals), and neoplastic disorders, such as adenocarcinomas, keiomyosarcomas, and sarcomas. Additionally, the polypeptides, polynucleotides, or agonists or antagonists of the invention may be useful as a marker or detector of, as well as in the diagnosis, treatment, and/or prevention of congenital uterine abnormalities, such as bicornuate uterus, septate uterus, simple unicornuate uterus, unicornuate uterus with a noncavitary rudimentary horn, unicornuate uterus with a non-communicating cavitary rudimentary horn, unicornuate uterus with a communicating cavitary horn, arcuate uterus, uterine didelfus, and T-shaped uterus.

[0853] Ovarian diseases and/or disorders include anovulation, polycystic ovary syndrome (Stein-Leventhal syndrome), ovarian cysts, ovarian hypofunction, ovarian insensitivity to gonadotropins, ovarian overproduction of androgens, right ovarian vein syndrome, amenorrhea, hirutism, and ovarian cancer (including, but not limited to, primary and secondary cancerous growth, Sertoli-Leydig tumors, endometriod carcinoma of the ovary, ovarian papillary serous adenocarcinoma, ovarian mucinous adenocarcinoma, and Ovarian Krukenberg tumors).

[0854] Cervical diseases and/or disorders include cervicitis, chronic cervicitis, mucopurulent cervicitis, cervical dysplasia, cervical polyps, Nabothian cysts, cervical erosion, cervical incompetence, and cervical neoplasms (including, for example, cervical carcinoma, squamous metaplasia, squamous cell carcinoma, adenosquamous cell neoplasia, and columnar cell neoplasia).

[0855] Additionally, diseases and/or disorders of the reproductive system include disorders and/or diseases of pregnancy, including miscarriage and stillbirth, such as early abortion, late abortion, spontaneous abortion, induced abortion, therapeutic abortion, threatened abortion, missed abortion, incomplete abortion, complete abortion, habitual abortion, missed abortion, and septic abortion; ectopic pregnancy, anemia, Rh incompatibility, vaginal bleeding during pregnancy, gestational diabetes, intrauterine growth retardation, polyhydramnios, HELLP syndrome, abruptio placentae, placenta previa, hyperemesis, preeclampsia, eclampsia, herpes gestationis, and urticaria of pregnancy. Additionally, the polynucleotides, polypeptides, and agonists or antagonists of the present invention may be used in the diagnosis, treatment, and/or prevention of diseases that can complicate pregnancy, including heart disease, heart failure, rheumatic heart disease, congenital heart disease, mitral valve prolapse, high blood pressure, anemia, kidney disease, infectious disease (e.g., rubella, cytomegalovirus, toxoplasmosis, infectious hepatitis, chlamydia, HIV, AIDS, and genital herpes), diabetes mellitus, Graves' disease, thyroiditis, hypothyroidism, Hashimoto's thyroiditis, chronic active hepatitis, cirrhosis of the liver, primary biliary cirrhosis, asthma, systemic lupus eryematosis, rheumatoid arthritis, myasthenia gravis, idiopathic thrombocytopenic purpura, appendicitis, ovarian cysts, gallbladder disorders, and obstruction of the intestine.

[0856] Complications associated with labor and parturition include premature rupture of the membranes, pre-term labor, post-term pregnancy, postmaturity, labor that progresses too slowly, fetal distress (e.g., abnormal heart rate (fetal or maternal), breathing problems, and abnormal fetal position), shoulder dystocia, prolapsed umbilical cord, amniotic fluid embolism, and aberrant uterine bleeding.

[0857] Further, diseases and/or disorders of the postdelivery period, including endometritis, myometritis, parametritis, peritonitis, pelvic thrombophlebitis, pulmonary embolism, endotoxemia, pyelonephritis, saphenous thrombophlebitis, mastitis, cystitis, postpartum hemorrhage, and inverted uterus.

[0858] Other disorders and/or diseases of the female reproductive system that may be diagnosed, treated, and/or prevented by the polynucleotides, polypeptides, and agonists or antagonists of the present invention include, for example, Turner's syndrome, pseudohermaphroditism, premenstrual syndrome, pelvic inflammatory disease, pelvic congestion (vascular engorgement), frigidity, anorgasmia, dyspareunia, ruptured fallopian tube, and Mittelschmerz.

Infectious Disease

[0859] Polynucleotides or polypeptides, as well as agonists or antagonists of the present invention can be used to treat or detect infectious agents. For example, by increasing the immune response, particularly increasing the proliferation and differentiation of B and/or T cells, infectious diseases may be treated. The immune response may be increased by either enhancing an existing immune response, or by initiating a new immune response. Alternatively, polynucleotides or polypeptides, as well as agonists or antagonists of the present invention may also directly inhibit the infectious agent, without necessarily eliciting an immune response.

[0860] Viruses are one example of an infectious agent that can cause disease or symptoms that can be treated or detected by a polynucleotide or polypeptide and/or agonist or antagonist of the present invention. Examples of viruses, include, but are not limited to Examples of viruses, include, but are not limited to the following DNA and RNA viruses and viral families: Arbovirus, Adenoviridae, Arenaviridae, Arterivirus, Birnaviridae, Bunyaviridae, Caliciviridae, Circoviridae, Coronaviridae, Dengue, EBV, HIV, Flaviviridae, Hepadnaviridae (Hepatitis), Herpesviridae (such as, Cytomegalovirus, Herpes Simplex, Herpes Zoster), Mononegavirus (e.g., Paramyxoviridae, Morbillivirus, Rhabdoviridae), Orthomyxoviridae (e.g., Influenza A, Influenza B, and parainfluenza), Papiloma virus, Papovaviridae, Parvoviridae, Picornaviridae, Poxyiridae (such as Smallpox or Vaccinia), Reoviridae (e.g., Rotavirus), Retroviridae (HTLV-I, HTLV-II, Lentivirus), and Togaviridae (e.g., Rubivirus). Viruses falling within these families can cause a variety of diseases or symptoms, including, but not limited to: arthritis, bronchiollitis, respiratory syncytial virus, encephalitis, eye infections (e.g., conjunctivitis, keratitis), chronic fatigue syndrome, hepatitis (A, B, C, E, Chronic Active, Delta), Japanese B encephalitis, Junin, Chikungunya, Rift Valley fever, yellow fever, meningitis, opportunistic infections (e.g., AIDS), pneumonia, Burkitt's Lymphoma, chickenpox, hemorrhagic fever, Measles, Mumps, Parainfluenza, Rabies, the common cold, Polio, leukemia, Rubella, sexually transmitted diseases, skin diseases (e.g., Kaposi's, warts), and viremia. polynucleotides or polypeptides, or agonists or antagonists of the invention, can be used to treat or detect any of these symptoms or diseases. In specific embodiments, polynucleotides, polypeptides, or agonists or antagonists of the invention are used to treat: meningitis, Dengue, EBV, and/or hepatitis (e.g., hepatitis B). In an additional specific embodiment polynucleotides, polypeptides, or agonists or antagonists of the invention are used to treat patients nonresponsive to one or more other commercially available hepatitis vaccines. In a further specific embodiment polynucleotides, polypeptides, or agonists or antagonists of the invention are used to treat AIDS.

[0861] Similarly, bacterial and fungal agents that can cause disease or symptoms and that can be treated or detected by a polynucleotide or polypeptide and/or agonist or antagonist of the present invention include, but not limited to, the following Gram-Negative and Gram-positive bacteria, bacterial families, and fungi: Actinomyces (e.g., Norcardia), Acinetobacter, Cryptococcus neoformans, Aspergillus, Bacillaceae (e.g., Bacillus anthrasis), Bacteroides (e.g., Bacteroides fragilis), Blastomycosis, Bordetella, Borrelia (e.g., Borrelia burgdorferi), Brucella, Candidia, Campylobacter, Chlamydia, Clostridium (e.g., Clostridium botulinum, Clostridium dificile, Clostridium perfringens, Clostridium tetani), Coccidioides, Corynebacterium (e.g., Corynebacterium diptheriae), Cryptococcus, Dermatocycoses, E. coli (e.g., Enterotoxigenic E. coli and Enterohemorrhagic E. coli), Enterobacter (e.g. Enterobacter aerogenes), Enterobacteriaceae (Klebsiella, Salmonella (e.g., Salmonella typhi, Salmonella enteritidis, Salmonella typhi), Serratia, Yersinia, Shigella), Erysipelothrix, Haemophilus (e.g., Haemophilus influenza type B), Helicobacter, Legionella (e.g., Legionella pneumophila), Leptospira, Listeria (e.g., Listeria monocytogenes), Mycoplasma, Mycobacterium (e.g., Mycobacterium leprae and Mycobacterium tuberculosis), Vibrio (e.g., Vibrio cholerae), Neisseriaceae (e.g., Neisseria gonorrhea, Neisseria meningitidis), Pasteurellacea, Proteus, Pseudomonas (e.g., Pseudomonas aeruginosa), Rickettsiaceae, Spirochetes (e.g., Treponema spp., Leptospira spp., Borrelia spp.), Shigella spp., Staphylococcus (e.g., Staphylococcus aureus), Meningiococcus, Pneumococcus and Streptococcus (e.g., Streptococcus pneumoniae and Groups A, B, and C Streptococci), and Ureaplasmas. These bacterial, parasitic, and fungal families can cause diseases or symptoms, including, but not limited to: antibiotic-resistant infections, bacteremia, endocarditis, septicemia, eye infections (e.g., conjunctivitis), uveitis, tuberculosis, gingivitis, bacterial diarrhea, opportunistic infections (e.g., AIDS related infections), paronychia, prosthesis-related infections, dental caries, Reiter's Disease, respiratory tract infections, such as Whooping Cough or Empyema, sepsis, Lyme Disease, Cat-Scratch Disease, dysentery, paratyphoid fever, food poisoning, Legionella disease, chronic and acute inflammation, erythema, yeast infections, typhoid, pneumonia, gonorrhea, meningitis (e.g., mengitis types A and B), chlamydia, syphillis, diphtheria, leprosy, brucellosis, peptic ulcers, anthrax, spontaneous abortions, birth defects, pneumonia, lung infections, ear infections, deafness, blindness, lethargy, malaise, vomiting, chronic diarrhea, Crohn's disease, colitis, vaginosis, sterility, pelvic inflammatory diseases, candidiasis, paratuberculosis, tuberculosis, lupus, botulism, gangrene, tetanus, impetigo, Rheumatic Fever, Scarlet Fever, sexually transmitted diseases, skin diseases (e.g., cellulitis, dermatocycoses), toxemia, urinary tract infections, wound infections, noscomial infections. Polynucleotides or polypeptides, agonists or antagonists of the invention, can be used to treat or detect any of these symptoms or diseases. In specific embodiments, polynucleotides, polypeptides, agonists or antagonists of the invention are used to treat: tetanus, diptheria, botulism, and/or meningitis type B.

[0862] Moreover, parasitic agents causing disease or symptoms that can be treated, prevented, and/or diagnosed by a polynucleotide or polypeptide and/or agonist or antagonist of the present invention include, but not limited to, the following families or class: Amebiasis, Babesiosis, Coccidiosis, Cryptosporidiosis, Dientamoebiasis, Dourine, Ectoparasitic, Giardias, Helminthiasis, Leishmaniasis, Schistisoma, Theileriasis, Toxoplasmosis, Trypanosomiasis, and Trichomonas and Sporozoans (e.g., Plasmodium virax, Plasmodium falciparium, Plasmodium malariae and Plasmodium ovale). These parasites can cause a variety of diseases or symptoms, including, but not limited to: Scabies, Trombiculiasis, eye infections, intestinal disease (e.g., dysentery, giardiasis), liver disease, lung disease, opportunistic infections (e.g., AIDS related), malaria, pregnancy complications, and toxoplasmosis. polynucleotides or polypeptides, or agonists or antagonists of the invention, can be used to treat, prevent, and/or diagnose any of these symptoms or diseases. In specific embodiments, polynucleotides, polypeptides, or agonists or antagonists of the invention are used to treat, prevent, and/or diagnose malaria.

[0863] Polynucleotides or polypeptides, as well as agonists or antagonists of the present invention of the present invention could either be by administering an effective amount of a polypeptide to the patient, or by removing cells from the patient, supplying the cells with a polynucleotide of the present invention, and returning the engineered cells to the patient (ex vivo therapy). Moreover, the polypeptide or polynucleotide of the present invention can be used as an antigen in a vaccine to raise an immune response against infectious disease.

Regeneration

[0864] Polynucleotides or polypeptides, as well as agonists or antagonists of the present invention can be used to differentiate, proliferate, and attract cells, leading to the regeneration of tissues. (See, Science 276:59-87 (1997)). The regeneration of tissues could be used to repair, replace, or protect tissue damaged by congenital defects, trauma (wounds, burns, incisions, or ulcers), age, disease (e.g. osteoporosis, osteocarthritis, periodontal disease, liver failure), surgery, including cosmetic plastic surgery, fibrosis, reperfusion injury, or systemic cytokine damage.

[0865] Tissues that could be regenerated using the present invention include organs (e.g., pancreas, liver, intestine, kidney, skin, endothelium), muscle (smooth, skeletal or cardiac), vasculature (including vascular and lymphatics), nervous, hematopoietic, and skeletal (bone, cartilage, tendon, and ligament) tissue. Preferably, regeneration occurs without or decreased scarring. Regeneration also may include angiogenesis.

[0866] Moreover, polynucleotides or polypeptides, as well as agonists or antagonists of the present invention, may increase regeneration of tissues difficult to heal. For example, increased tendon/ligament regeneration would quicken recovery time after damage. Polynucleotides or polypeptides, as well as agonists or antagonists of the present invention could also be used prophylactically in an effort to avoid damage. Specific diseases that could be treated include of tendinitis, carpal tunnel syndrome, and other tendon or ligament defects. A further example of tissue regeneration of non-healing wounds includes pressure ulcers, ulcers associated with vascular insufficiency, surgical, and traumatic wounds.

[0867] Similarly, nerve and brain tissue could also be regenerated by using polynucleotides or polypeptides, as well as agonists or antagonists of the present invention, to proliferate and differentiate nerve cells. Diseases that could be treated using this method include central and peripheral nervous system diseases, neuropathies, or mechanical and traumatic disorders (e.g., spinal cord disorders, head trauma, cerebrovascular disease, and stoke). Specifically, diseases associated with peripheral nerve injuries, peripheral neuropathy (e.g., resulting from chemotherapy or other medical therapies), localized neuropathies, and central nervous system diseases (e.g., Alzheimer's disease, Parkinson's disease, Huntington's disease, amyotrophic lateral sclerosis, and Shy-Drager syndrome), could all be treated using the polynucleotides or polypeptides, as well as agonists or antagonists of the present invention.

Gastrointestinal Disorders

[0868] Polynucleotides or polypeptides, or agonists or antagonists of the present invention, may be used to treat, prevent, diagnose, and/or prognose gastrointestinal disorders, including inflammatory diseases and/or conditions, infections, cancers (e.g., intestinal neoplasms (carcinoid tumor of the small intestine, non-Hodgkin's lymphoma of the small intestine, small bowl lymphoma)), and ulcers, such as peptic ulcers.

[0869] Gastrointestinal disorders include dysphagia, odynophagia, inflammation of the esophagus, peptic esophagitis, gastric reflux, submucosal fibrosis and stricturing, Mallory-Weiss lesions, leiomyomas, lipomas, epidermal cancers, adeoncarcinomas, gastric retention disorders, gastroenteritis, gastric atrophy, gastric/stomach cancers, polyps of the stomach, autoimmune disorders such as pernicious anemia, pyloric stenosis, gastritis (bacterial, viral, eosinophilic, stress-induced, chronic erosive, atrophic, plasma cell, and Menetrier's), and peritoneal diseases (e.g., chyloperioneum, hemoperitoneum, mesenteric cyst, mesenteric lymphadenitis, mesenteric vascular occlusion, panniculitis, neoplasms, peritonitis, pneumoperitoneum, bubphrenic abscess).

[0870] Gastrointestinal disorders also include disorders associated with the small intestine, such as malabsorption syndromes, distension, irritable bowel syndrome, sugar intolerance, celiac disease, duodenal ulcers, duodenitis, tropical sprue, Whipple's disease, intestinal lymphangiectasia, Crohn's disease, appendicitis, obstructions of the ileum, Meckel's diverticulum, multiple diverticula, failure of complete rotation of the small and large intestine, lymphoma, and bacterial and parasitic diseases (such as Traveler's diarrhea, typhoid and paratyphoid, cholera, infection by Roundworms (Ascariasis lumbricoides), Hookworms (Ancylostoma duodenale), Threadworms (Enterobius vermicularis), Tapeworms (Taenia saginata, Echinococcus granulosus, Diphyllobothrium spp., and T. solium).

[0871] Liver diseases and/or disorders include intrahepatic cholestasis (alagille syndrome, biliary liver cirrhosis), fatty liver (alcoholic fatty liver, reye syndrome), hepatic vein thrombosis, hepatolentricular degeneration, hepatomegaly, hepatopulmonary syndrome, hepatorenal syndrome, portal hypertension (esophageal and gastric varices), liver abscess (amebic liver abscess), liver cirrhosis (alcoholic, biliary and experimental), alcoholic liver diseases (fatty liver, hepatitis, cirrhosis), parasitic (hepatic echinococcosis, fascioliasis, amebic liver abscess), jaundice (hemolytic, hepatocellular, and cholestatic), cholestasis, portal hypertension, liver enlargement, ascites, hepatitis (alcoholic hepatitis, animal hepatitis, chronic hepatitis (autoimmune, hepatitis B, hepatitis C, hepatitis D, drug induced), toxic hepatitis, viral human hepatitis (hepatitis A, hepatitis B, hepatitis C, hepatitis D, hepatitis E), Wilson's disease, granulomatous hepatitis, secondary biliary cirrhosis, hepatic encephalopathy, portal hypertension, varices, hepatic encephalopathy, primary biliary cirrhosis, primary sclerosing cholangitis, hepatocellular adenoma, hemangiomas, bile stones, liver failure (hepatic encephalopathy, acute liver failure), and liver neoplasms (angiomyolipoma, calcified liver metastases, cystic liver metastases, epithelial tumors, fibrolamellar hepatocarcinoma, focal nodular hyperplasia, hepatic adenoma, hepatobiliary cystadenoma, hepatoblastoma, hepatocellular carcinoma, hepatoma, liver cancer, liver hemangioendothelioma, mesenchymal hamartoma, mesenchymal tumors of liver, nodular regenerative hyperplasia, benign liver tumors (Hepatic cysts [Simple cysts, Polycystic liver disease, Hepatobiliary cystadenoma, Choledochal cyst], Mesenchymal tumors [Mesenchymal hamartoma, Infantile hemangioendothelioma, Hemangioma, Peliosis hepatis, Lipomas, Inflammatory pseudotumor, Miscellaneous], Epithelial tumors [Bile duct epithelium (Bile duct hamartoma, Bile duct adenoma), Hepatocyte (Adenoma, Focal nodular hyperplasia, Nodular regenerative hyperplasia)], malignant liver tumors [hepatocellular, hepatoblastoma, hepatocellular carcinoma, cholangiocellular, cholangiocarcinoma, cystadenocarcinoma, tumors of blood vessels, angiosarcoma, Karposi's sarcoma, hemangioendothelioma, other tumors, embryonal sarcoma, fibrosarcoma, leiomyosarcoma, rhabdomyosarcoma, carcinosarcoma, teratoma, carcinoid, squamous carcinoma, primary lymphoma]), peliosis hepatis, erythrohepatic porphyria, hepatic porphyria (acute intermittent porphyria, porphyria cutanea tarda), Zellweger syndrome).

[0872] Pancreatic diseases and/or disorders include acute pancreatitis, chronic pancreatitis (acute necrotizing pancreatitis, alcoholic pancreatitis), neoplasms (adenocarcinoma of the pancreas, cystadenocarcinoma, insulinoma, gastrinoma, and glucagonoma, cystic neoplasms, islet-cell tumors, pancreoblastoma), and other pancreatic diseases (e.g., cystic fibrosis, cyst (pancreatic pseudocyst, pancreatic fistula, insufficiency)).

[0873] Gallbladder diseases include gallstones (cholelithiasis and choledocholithiasis), postcholecystectomy syndrome, diverticulosis of the gallbladder, acute cholecystitis, chronic cholecystitis, bile duct tumors, and mucocele.

[0874] Diseases and/or disorders of the large intestine include antibiotic-associated colitis, diverticulitis, ulcerative colitis, acquired megacolon, abscesses, fungal and bacterial infections, anorectal disorders (e.g., fissures, hemorrhoids), colonic diseases (colitis, colonic neoplasms [colon cancer, adenomatous colon polyps (e.g., villous adenoma), colon carcinoma, colorectal cancer], colonic diverticulitis, colonic diverticulosis, megacolon [Hirschsprung disease, toxic megacolon]; sigmoid diseases [proctocolitis, sigmoin neoplasms]), constipation, Crohn's disease, diarrhea (infantile diarrhea, dysentery), duodenal diseases (duodenal neoplasms, duodenal obstruction, duodenal ulcer, duodenitis), enteritis (enterocolitis), HIV enteropathy, ileal diseases (ileal neoplasms, ileitis), immunoproliferative small intestinal disease, inflammatory bowel disease (ulcerative colitis, Crohn's disease), intestinal atresia, parasitic diseases (anisakiasis, balantidiasis, blastocystis infections, cryptosporidiosis, dientamoebiasis, amebic dysentery, giardiasis), intestinal fistula (rectal fistula), intestinal neoplasms (cecal neoplasms, colonic neoplasms, duodenal neoplasms, ileal neoplasms, intestinal polyps, jejunal neoplasms, rectal neoplasms), intestinal obstruction (afferent loop syndrome, duodenal obstruction, impacted feces, intestinal pseudo-obstruction [cecal volvulus], intussusception), intestinal perforation, intestinal polyps (colonic polyps, gardner syndrome, peutz-jeghers syndrome), jejunal diseases Oejunal neoplasms), malabsorption syndromes (blind loop syndrome, celiac disease, lactose intolerance, short bowl syndrome, tropical sprue, whipple's disease), mesenteric vascular occlusion, pneumatosis cystoides intestinalis, protein-losing enteropathies (intestinal lymphagiectasis), rectal diseases (anus diseases, fecal incontinence, hemorrhoids, proctitis, rectal fistula, rectal prolapse, rectocele), peptic ulcer (duodenal ulcer, peptic esophagitis, hemorrhage, perforation, stomach ulcer, Zollinger-Ellison syndrome), postgastrectomy syndromes (dumping syndrome), stomach diseases (e.g., achlorhydria, duodenogastric reflux (bile reflux), gastric antral vascular ectasia, gastric fistula, gastric outlet obstruction, gastritis (atrophic or hypertrophic), gastroparesis, stomach dilatation, stomach diverticulum, stomach neoplasms (gastric cancer, gastric polyps, gastric adenocarcinoma, hyperplastic gastric polyp), stomach rupture, stomach ulcer, stomach volvulus), tuberculosis, visceroptosis, vomiting (e.g., hematemesis, hyperemesis gravidarum, postoperative nausea and vomiting) and hemorrhagic colitis.

[0875] Further diseases and/or disorders of the gastrointestinal system include biliary tract diseases, such as, gastroschisis, fistula (e.g., biliary fistula, esophageal fistula, gastric fistula, intestinal fistula, pancreatic fistula), neoplasms (e.g., biliary tract neoplasms, esophageal neoplasms, such as adenocarcinoma of the esophagus, esophageal squamous cell carcinoma, gastrointestinal neoplasms, pancreatic neoplasms, such as adenocarcinoma of the pancreas, mucinous cystic neoplasm of the pancreas, pancreatic cystic neoplasms, pancreatoblastoma, and peritoneal neoplasms), esophageal disease (e.g., bullous diseases, candidiasis, glycogenic acanthosis, ulceration, barrett esophagus varices, atresia, cyst, diverticulum (e.g., Zenker's diverticulum), fistula (e.g., tracheoesophageal fistula), motility disorders (e.g., CREST syndrome, deglutition disorders, achalasia, spasm, gastroesophageal reflux), neoplasms, perforation (e.g., Boerhaave syndrome, Mallory-Weiss syndrome), stenosis, esophagitis, diaphragmatic hernia (e.g., hiatal hernia); gastrointestinal diseases, such as, gastroenteritis (e.g., cholera morbus, norwalk virus infection), hemorrhage (e.g., hematemesis, melena, peptic ulcer hemorrhage), stomach neoplasms (gastric cancer, gastric polyps, gastric adenocarcinoma, stomach cancer)), hernia (e.g., congenital diaphragmatic hernia, femoral hernia, inguinal hernia, obturator hernia, umbilical hernia, ventral hernia), and intestinal diseases (e.g., cecal diseases (appendicitis, cecal neoplasms)).

Chemotaxis

[0876] Polynucleotides or polypeptides, as well as agonists or antagonists of the present invention may have chemotaxis activity. A chemotaxic molecule attracts or mobilizes cells (e.g., monocytes, fibroblasts, neutrophils, T-cells, mast cells, eosinophils, epithelial and/or endothelial cells) to a particular site in the body, such as inflammation, infection, or site of hyperproliferation. The mobilized cells can then fight off and/or heal the particular trauma or abnormality.

[0877] Polynucleotides or polypeptides, as well as agonists or antagonists of the present invention may increase chemotaxic activity of particular cells. These chemotactic molecules can then be used to treat inflammation, infection, hyperproliferative disorders, or any immune system disorder by increasing the number of cells targeted to a particular location in the body. For example, chemotaxic molecules can be used to treat wounds and other trauma to tissues by attracting immune cells to the injured location. Chemotactic molecules of the present invention can also attract fibroblasts, which can be used to treat wounds.

[0878] It is also contemplated that polynucleotides or polypeptides, as well as agonists or antagonists of the present invention may inhibit chemotactic activity. These molecules could also be used to treat disorders. Thus, polynucleotides or polypeptides, as well as agonists or antagonists of the present invention could be used as an inhibitor of chemotaxis.

Binding Activity

[0879] A polypeptide of the present invention may be used to screen for molecules that bind to the polypeptide or for molecules to which the polypeptide binds. The binding of the polypeptide and the molecule may activate (agonist), increase, inhibit (antagonist), or decrease activity of the polypeptide or the molecule bound. Examples of such molecules include antibodies, oligonucleotides, proteins (e.g., receptors), or small molecules.

[0880] Preferably, the molecule is closely related to the natural ligand of the polypeptide, e.g., a fragment of the ligand, or a natural substrate, a ligand, a structural or functional mimetic. (See, Coligan et al., Current Protocols in Immunology 1(2):Chapter 5 (1991)). Similarly, the molecule can be closely related to the natural receptor to which the polypeptide binds, or at least, a fragment of the receptor capable of being bound by the polypeptide (e.g., active site). In either case, the molecule can be rationally designed using known techniques.

[0881] Preferably, the screening for these molecules involves producing appropriate cells which express the polypeptide. Preferred cells include cells from mammals, yeast, Drosophila, or E. coli. Cells expressing the polypeptide (or cell membrane containing the expressed polypeptide) are then preferably contacted with a test compound potentially containing the molecule to observe binding, stimulation, or inhibition of activity of either the polypeptide or the molecule.

[0882] The assay may simply test binding of a candidate compound to the polypeptide, wherein binding is detected by a label, or in an assay involving competition with a labeled competitor. Further, the assay may test whether the candidate compound results in a signal generated by binding to the polypeptide.

[0883] Alternatively, the assay can be carried out using cell-free preparations, polypeptide/molecule affixed to a solid support, chemical libraries, or natural product mixtures. The assay may also simply comprise the steps of mixing a candidate compound with a solution containing a polypeptide, measuring polypeptide/molecule activity or binding, and comparing the polypeptide/molecule activity or binding to a standard.

[0884] Preferably, an ELISA assay can measure polypeptide level or activity in a sample (e.g., biological sample) using a monoclonal or polyclonal antibody. The antibody can measure polypeptide level or activity by either binding, directly or indirectly, to the polypeptide or by competing with the polypeptide for a substrate.

[0885] Additionally, the receptor to which the polypeptide of the present invention binds can be identified by numerous methods known to those of skill in the art, for example, ligand panning and FACS sorting (Coligan, et al., Current Protocols in Immun., 1(2), Chapter 5, (1991)). For example, expression cloning is employed wherein polyadenylated RNA is prepared from a cell responsive to the polypeptides, for example, NIH3T3 cells which are known to contain multiple receptors for the FGF family proteins, and SC-3 cells, and a cDNA library created from this RNA is divided into pools and used to transfect COS cells or other cells that are not responsive to the polypeptides. Transfected cells which are grown on glass slides are exposed to the polypeptide of the present invention, after they have been labeled. The polypeptides can be labeled by a variety of means including iodination or inclusion of a recognition site for a site-specific protein kinase.

[0886] Following fixation and incubation, the slides are subjected to auto-radiographic analysis. Positive pools are identified and sub-pools are prepared and re-transfected using an iterative sub-pooling and re-screening process, eventually yielding a single clones that encodes the putative receptor.

[0887] As an alternative approach for receptor identification, the labeled polypeptides can be photoaffinity linked with cell membrane or extract preparations that express the receptor molecule. Cross-linked material is resolved by PAGE analysis and exposed to X-ray film. The labeled complex containing the receptors of the polypeptides can be excised, resolved into peptide fragments, and subjected to protein microsequencing. The amino acid sequence obtained from microsequencing would be used to design a set of degenerate oligonucleotide probes to screen a cDNA library to identify the genes encoding the putative receptors.

[0888] Moreover, the techniques of gene-shuffling, motif-shuffling, exon-shuffling, and/or codon-shuffling (collectively referred to as “DNA shuffling”) may be employed to modulate the activities of the polypeptide of the present invention thereby effectively generating agonists and antagonists of the polypeptide of the present invention. See generally, U.S. Pat. Nos. 5,605,793, 5,811,238, 5,830,721, 5,834,252, and 5,837,458, and Patten, P. A., et al., Curr. Opinion Biotechnol. 8:724-33 (1997); Harayama, S. Trends Biotechnol. 16(2):76-82 (1998); Hansson, L. O., et al., J. Mol. Biol. 287:265-76 (1999); and Lorenzo, M. M. and Blasco, R. Biotechniques 24(2):308-13 (1998); each of these patents and publications are hereby incorporated by reference). In one embodiment, alteration of polynucleotides and corresponding polypeptides may be achieved by DNA shuffling. DNA shuffling involves the assembly of two or more DNA segments into a desired molecule by homologous, or site-specific, recombination. In another embodiment, polynucleotides and corresponding polypeptides may be altered by being subjected to random mutagenesis by error-prone PCR, random nucleotide insertion or other methods prior to recombination. In another embodiment, one or more components, motifs, sections, parts, domains, fragments, etc., of the polypeptide of the present invention may be recombined with one or more components, motifs, sections, parts, domains, fragments, etc. of one or more heterologous molecules. In preferred embodiments, the heterologous molecules are family members. In further preferred embodiments, the heterologous molecule is a growth factor such as, for example, platelet-derived growth factor (PDGF), insulin-like growth factor (IGF-I), transforming growth factor (TGF)-alpha, epidermal growth factor (EGF), fibroblast growth factor (FGF), TGF-beta, bone morphogenetic protein (BMP)-2, BMP-4, BMP-5, BMP-6, BMP-7, activins A and B, decapentaplegic(dpp), 60A, OP-2, dorsalin, growth differentiation factors (GDFs), nodal, MIS, inhibin-alpha, TGF-beta1, TGF-beta2, TGF-beta3, TGF-beta5, and glial-derived neurotrophic factor (GDNF).

[0889] Other preferred fragments are biologically active fragments of the polypeptide of the present invention. Biologically active fragments are those exhibiting activity similar, but not necessarily identical, to an activity of the polypeptide of the present invention. The biological activity of the fragments may include an improved desired activity, or a decreased undesirable activity.

[0890] Additionally, this invention provides a method of screening compounds to identify those which modulate the action of the polypeptide of the present invention. An example of such an assay comprises combining a mammalian fibroblast cell, a the polypeptide of the present invention, the compound to be screened and ³[H] thymidine under cell culture conditions where the fibroblast cell would normally proliferate. A control assay may be performed in the absence of the compound to be screened and compared to the amount of fibroblast proliferation in the presence of the compound to determine if the compound stimulates proliferation by determining the uptake of ³[H] thymidine in each case. The amount of fibroblast cell proliferation is measured by liquid scintillation chromatography which measures the incorporation of ³[H] thymidine. Both agonist and antagonist compounds may be identified by this procedure.

[0891] In another method, a mammalian cell or membrane preparation expressing a receptor for a polypeptide of the present invention is incubated with a labeled polypeptide of the present invention in the presence of the compound. The ability of the compound to enhance or block this interaction could then be measured. Alternatively, the response of a known second messenger system following interaction of a compound to be screened and the receptor is measured and the ability of the compound to bind to the receptor and elicit a second messenger response is measured to determine if the compound is a potential agonist or antagonist. Such second messenger systems include but are not limited to, cAMP guanylate cyclase, ion channels or phosphoinositide hydrolysis.

[0892] All of these above assays can be used as diagnostic or prognostic markers. The molecules discovered using these assays can be used to treat disease or to bring about a particular result in a patient (e.g., blood vessel growth) by activating or inhibiting the polypeptide/molecule. Moreover, the assays can discover agents which may inhibit or enhance the production of the polypeptides of the invention from suitably manipulated cells or tissues.

[0893] Therefore, the invention includes a method of identifying compounds which bind to a polypeptide of the invention comprising the steps of: (a) incubating a candidate binding compound with a polypeptide of the present invention; and (b) determining if binding has occurred. Moreover, the invention includes a method of identifying agonists/antagonists comprising the steps of: (a) incubating a candidate compound with a polypeptide of the present invention, (b) assaying a biological activity, and (b) determining if a biological activity of the polypeptide has been altered.

Targeted Delivery

[0894] In another embodiment, the invention provides a method of delivering compositions to targeted cells expressing a receptor for a polypeptide of the invention, or cells expressing a cell bound form of a polypeptide of the invention.

[0895] As discussed herein, polypeptides or antibodies of the invention may be associated with heterologous polypeptides, heterologous nucleic acids, toxins, or prodrugs via hydrophobic, hydrophilic, ionic and/or covalent interactions. In one embodiment, the invention provides a method for the specific delivery of compositions of the invention to cells by administering polypeptides of the invention (including antibodies) that are associated with heterologous polypeptides or nucleic acids. In one example, the invention provides a method for delivering a therapeutic protein into the targeted cell. In another example, the invention provides a method for delivering a single stranded nucleic acid (e.g., antisense or ribozymes) or double stranded nucleic acid (e.g., DNA that can integrate into the cell's genome or replicate episomally and that can be transcribed) into the targeted cell.

[0896] In another embodiment, the invention provides a method for the specific destruction of cells (e.g., the destruction of tumor cells) by administering polypeptides of the invention (e.g., polypeptides of the invention or antibodies of the invention) in association with toxins or cytotoxic prodrugs.

[0897] By “toxin” is meant compounds that bind and activate endogenous cytotoxic effector systems, radioisotopes, holotoxins, modified toxins, catalytic subunits of toxins, or any molecules or enzymes not normally present in or on the surface of a cell that under defined conditions cause the cell's death. Toxins that may be used according to the methods of the invention include, but are not limited to, radioisotopes known in the art, compounds such as, for example, antibodies (or complement fixing containing portions thereof) that bind an inherent or induced endogenous cytotoxic effector system, thymidine kinase, endonuclease, RNAse, alpha toxin, ricin, abrin, Pseudomonas exotoxin A, diphtheria toxin, saporin, momordin, gelonin, pokeweed antiviral protein, alpha-sarcin and cholera toxin. By “cytotoxic prodrug” is meant a non-toxic compound that is converted by an enzyme, normally present in the cell, into a cytotoxic compound. Cytotoxic prodrugs that may be used according to the methods of the invention include, but are not limited to, glutamyl derivatives of benzoic acid mustard alkylating agent, phosphate derivatives of etoposide or mitomycin C, cytosine arabinoside, daunorubisin, and phenoxyacetamide derivatives of doxorubicin.

Drug Screening

[0898] Further contemplated is the use of the polypeptides of the present invention, or the polynucleotides encoding these polypeptides, to screen for molecules which modify the activities of the polypeptides of the present invention. Such a method would include contacting the polypeptide of the present invention with a selected compound(s) suspected of having antagonist or agonist activity, and assaying the activity of these polypeptides following binding.

[0899] This invention is particularly useful for screening therapeutic compounds by using the polypeptides of the present invention, or binding fragments thereof, in any of a variety of drug screening techniques. The polypeptide or fragment employed in such a test may be affixed to a solid support, expressed on a cell surface, free in solution, or located intracellularly. One method of drug screening utilizes eukaryotic or prokaryotic host cells which are stably transformed with recombinant nucleic acids expressing the polypeptide or fragment. Drugs are screened against such transformed cells in competitive binding assays. One may measure, for example, the formulation of complexes between the agent being tested and a polypeptide of the present invention.

[0900] Thus, the present invention provides methods of screening for drugs or any other agents which affect activities mediated by the polypeptides of the present invention. These methods comprise contacting such an agent with a polypeptide of the present invention or a fragment thereof and assaying for the presence of a complex between the agent and the polypeptide or a fragment thereof, by methods well known in the art. In such a competitive binding assay, the agents to screen are typically labeled. Following incubation, free agent is separated from that present in bound form, and the amount of free or uncomplexed label is a measure of the ability of a particular agent to bind to the polypeptides of the present invention.

[0901] Another technique for drug screening provides high throughput screening for compounds having suitable binding affinity to the polypeptides of the present invention, and is described in great detail in European Patent Application 84/03564, published on Sep. 13, 1984, which is incorporated herein by reference herein. Briefly stated, large numbers of different small peptide test compounds are synthesized on a solid substrate, such as plastic pins or some other surface. The peptide test compounds are reacted with polypeptides of the present invention and washed. Bound polypeptides are then detected by methods well known in the art. Purified polypeptides are coated directly onto plates for use in the aforementioned drug screening techniques. In addition, non-neutralizing antibodies may be used to capture the peptide and immobilize it on the solid support.

[0902] This invention also contemplates the use of competitive drug screening assays in which neutralizing antibodies capable of binding polypeptides of the present invention specifically compete with a test compound for binding to the polypeptides or fragments thereof. In this manner, the antibodies are used to detect the presence of any peptide which shares one or more antigenic epitopes with a polypeptide of the invention.

Antisense and Ribozyme (Antagonists)

[0903] In specific embodiments, antagonists according to the present invention are nucleic acids corresponding to the sequences contained in SEQ ID NO:X, or the complementary strand thereof, and/or to cDNA sequences contained in cDNA ATCC Deposit No:Z identified for example, in Table 1A and/or 1B. In one embodiment, antisense sequence is generated internally, by the organism, in another embodiment, the antisense sequence is separately administered (see, for example, O'Connor, J., Neurochem. 56:560 (1991). Oligodeoxynucleotides as Antisense Inhibitors of Gene Expression, CRC Press, Boca Raton, Fla. (1988). Antisense technology can be used to control gene expression through antisense DNA or RNA, or through triple-helix formation. Antisense techniques are discussed for example, in Okano, J., Neurochem. 56:560 (1991); Oligodeoxynucleotides as Antisense Inhibitors of Gene Expression, CRC Press, Boca Raton, Fla. (1988). Triple helix formation is discussed in, for instance, Lee et al., Nucleic Acids Research 6:3073 (1979); Cooney et al., Science 241:456 (1988); and Dervan et al., Science 251:1300 (1991). The methods are based on binding of a polynucleotide to a complementary DNA or RNA.

[0904] For example, the use of c-myc and c-myb antisense RNA constructs to inhibit the growth of the non-lymphocytic leukemia cell line HL-60 and other cell lines was previously described. (Wickstrom et al. (1988); Anfossi et al. (1989)). These experiments were performed in vitro by incubating cells with the oligoribonucleotide. A similar procedure for in vivo use is described in WO 91/15580. Briefly, a pair of oligonucleotides for a given antisense RNA is produced as follows: A sequence complimentary to the first 15 bases of the open reading frame is flanked by an EcoR1 site on the 5 end and a HindIII site on the 3 end. Next, the pair of oligonucleotides is heated at 90° C. for one minute and then annealed in 2× ligation buffer (20 mM TRIS HCl pH 7.5, 10 mM MgCl2, 10 MM dithiothreitol (DTT) and 0.2 mM ATP) and then ligated to the EcoR1/Hind III site of the retroviral vector PMV7 (WO 91/15580).

[0905] For example, the 5′ coding portion of a polynucleotide that encodes the polypeptide of the present invention may be used to design an antisense RNA oligonucleotide of from about 10 to 40 base pairs in length. A DNA oligonucleotide is designed to be complementary to a region of the gene involved in transcription thereby preventing transcription and the production of the receptor. The antisense RNA oligonucleotide hybridizes to the mRNA in vivo and blocks translation of the mRNA molecule into receptor polypeptide.

[0906] In one embodiment, the antisense nucleic acid of the invention is produced intracellularly by transcription from an exogenous sequence. For example, a vector or a portion thereof, is transcribed, producing an antisense nucleic acid (RNA) of the invention. Such a vector would contain a sequence encoding the antisense nucleic acid. Such a vector can remain episomal or become chromosomally integrated, as long as it can be transcribed to produce the desired antisense RNA. Such vectors can be constructed by recombinant DNA technology methods standard in the art. Vectors can be plasmid, viral, or others known in the art, used for replication and expression in vertebrate cells. Expression of the sequence encoding the polypeptide of the present invention or fragments thereof, can be by any promoter known in the art to act in vertebrate, preferably human cells. Such promoters can be inducible or constitutive. Such promoters include, but are not limited to, the SV40 early promoter region (Bernoist and Chambon, Nature 29:304-310 (1981), the promoter contained in the 3′ long terminal repeat of Rous sarcoma virus (Yamamoto et al., Cell 22:787-797 (1980), the herpes thymidine promoter (Wagner et al., Proc. Natl. Acad. Sci. U.S.A. 78:1441-1445 (1981), the regulatory sequences of the metallothionein gene (Brinster, et al., Nature 296:39-42 (1982)), etc.

[0907] The antisense nucleic acids of the invention comprise a sequence complementary to at least a portion of an RNA transcript of a gene of the present invention. However, absolute complementarity, although preferred, is not required. A sequence “complementary to at least a portion of an RNA,” referred to herein, means a sequence having sufficient complementarity to be able to hybridize with the RNA, forming a stable duplex; in the case of double stranded antisense nucleic acids, a single strand of the duplex DNA may thus be tested, or triplex formation may be assayed. The ability to hybridize will depend on both the degree of complementarity and the length of the antisense nucleic acid. Generally, the larger the hybridizing nucleic acid, the more base mismatches with a RNA it may contain and still form a stable duplex (or triplex as the case may be). One skilled in the art can ascertain a tolerable degree of mismatch by use of standard procedures to determine the melting point of the hybridized complex.

[0908] Oligonucleotides that are complementary to the 5′ end of the message, e.g., the 5′ untranslated sequence up to and including the AUG initiation codon, should work most efficiently at inhibiting translation. However, sequences complementary to the 3′ untranslated sequences of mRNAs have been shown to be effective at inhibiting translation of mRNAs as well. See generally, Wagner, R., 1994, Nature 372:333-335. Thus, oligonucleotides complementary to either the 5′- or 3′-non-translated, non-coding regions of polynucleotide sequences described herein could be used in an antisense approach to inhibit translation of endogenous mRNA. Oligonucleotides complementary to the 5′ untranslated region of the mRNA should include the complement of the AUG start codon. Antisense oligonucleotides complementary to mRNA coding regions are less efficient inhibitors of translation but could be used in accordance with the invention. Whether designed to hybridize to the 5′-, 3′- or coding region of mRNA of the present invention, antisense nucleic acids should be at least six nucleotides in length, and are preferably oligonucleotides ranging from 6 to about 50 nucleotides in length. In specific aspects the oligonucleotide is at least 10 nucleotides, at least 17 nucleotides, at least 25 nucleotides or at least 50 nucleotides.

[0909] The polynucleotides of the invention can be DNA or RNA or chimeric mixtures or derivatives or modified versions thereof, single-stranded or double-stranded. The oligonucleotide can be modified at the base moiety, sugar moiety, or phosphate backbone, for example, to improve stability of the molecule, hybridization, etc. The oligonucleotide may include other appended groups such as peptides (e.g., for targeting host cell receptors in vivo), or agents facilitating transport across the cell membrane (see, e.g., Letsinger et al., 1989, Proc. Natl. Acad. Sci. U.S.A. 86:6553-6556; Lemaitre et al., 1987, Proc. Natl. Acad. Sci. 84:648-652; PCT Publication No. WO88/09810, published Dec. 15, 1988) or the blood-brain barrier (see, e.g., PCT Publication No. WO89/10134, published Apr. 25, 1988), hybridization-triggered cleavage agents. (See, e.g., Krol et al., 1988, BioTechniques 6:958-976) or intercalating agents. (See, e.g., Zon, 1988, Pharm. Res. 5:539-549). To this end, the oligonucleotide may be conjugated to another molecule, e.g., a peptide, hybridization triggered cross-linking agent, transport agent, hybridization-triggered cleavage agent, etc.

[0910] The antisense oligonucleotide may comprise at least one modified base moiety which is selected from the group including, but not limited to, 5-fluorouracil, 5-bromouracil, 5-chlorouracil, 5-iodouracil, hypoxanthine, xantine, 4-acetylcytosine, 5-(carboxyhydroxylmethyl) uracil, 5-carboxymethylaminomethyl-2-thiouridine, 5-carboxymethylaminomethyluracil, dihydrouracil, beta-D-galactosylqueosine, inosine, N6-isopentenyladenine, 1-methylguanine, 1-methylinosine, 2,2-dimethylguanine, 2-methyladenine, 2-methylguanine, 3-methylcytosine, 5-methylcytosine, N6-adenine, 7-methylguanine, 5-methylaminomethyluracil, 5-methoxyaminomethyl-2-thiouracil, beta-D-mannosylqueosine, 5′-methoxycarboxymethyluracil, 5-methoxyuracil, 2-methylthio-N-6-isopentenyladenine, uracil-5-oxyacetic acid (v), wybutoxosine, pseudouracil, queosine, 2-thiocytosine, 5-methyl-2-thiouracil, 2-thiouracil, 4-thiouracil, 5-methyluracil, uracil-5-oxyacetic acid methylester, uracil-5-oxyacetic acid (v), 5-methyl-2-thiouracil, 3-(3-amino-3-N-2-carboxypropyl) uracil, (acp3)w, and 2,6-diaminopurine.

[0911] The antisense oligonucleotide may also comprise at least one modified sugar moiety selected from the group including, but not limited to, arabinose, 2-fluoroarabinose, xylulose, and hexose.

[0912] In yet another embodiment, the antisense oligonucleotide comprises at least one modified phosphate backbone selected from the group including, but not limited to, a phosphorothioate, a phosphorodithioate, a phosphoramidothioate, a phosphoramidate, a phosphordiamidate, a methylphosphonate, an alkyl phosphotriester, and a formacetal or analog thereof.

[0913] In yet another embodiment, the antisense oligonucleotide is an a-anomeric oligonucleotide. An a-anomeric oligonucleotide forms specific double-stranded hybrids with complementary RNA in which, contrary to the usual b-units, the strands run parallel to each other (Gautier et al., 1987, Nucl. Acids Res. 15:6625-6641). The oligonucleotide is a 2′-O-methylribonucleotide (Inoue et al., 1987, Nucl. Acids Res. 15:6131-6148), or a chimeric RNA-DNA analogue (Inoue et al., 1987, FEBS Lett. 215:327-330).

[0914] Polynucleotides of the invention may be synthesized by standard methods known in the art, e.g. by use of an automated DNA synthesizer (such as are commercially available from Biosearch, Applied Biosystems, etc.). As examples, phosphorothioate oligonucleotides may be synthesized by the method of Stein et al. (1988, Nucl. Acids Res. 16:3209), methylphosphonate oligonucleotides can be prepared by use of controlled pore glass polymer supports (Sarin et al., 1988, Proc. Natl. Acad. Sci. U.S.A. 85:7448-7451), etc.

[0915] While antisense nucleotides complementary to the coding region sequence could be used, those complementary to the transcribed untranslated region are most preferred.

[0916] Potential antagonists according to the invention also include catalytic RNA, or a ribozyme (See, e.g., PCT International Publication WO 90/11364, published Oct. 4, 1990; Sarver et al., Science 247:1222-1225 (1990). While ribozymes that cleave mRNA at site specific recognition sequences can be used to destroy mRNAs, the use of hammerhead ribozymes is preferred. Hammerhead ribozymes cleave mRNAs at locations dictated by flanking regions that form complementary base pairs with the target mRNA. The sole requirement is that the target mRNA have the following sequence of two bases: 5′-UG-3′. The construction and production of hammerhead ribozymes is well known in the art and is described more fully in Haseloff and Gerlach, Nature 334:585-591 (1988). There are numerous potential hammerhead ribozyme cleavage sites within the nucleotide sequence of SEQ ID NO:X. Preferably, the ribozyme is engineered so that the cleavage recognition site is located near the 5′ end of the mRNA; i.e., to increase efficiency and minimize the intracellular accumulation of non-functional mRNA transcripts.

[0917] As in the antisense approach, the ribozymes of the invention can be composed of modified oligonucleotides (e.g., for improved stability, targeting, etc.) and should be delivered to cells which express in vivo. DNA constructs encoding the ribozyme may be introduced into the cell in the same manner as described above for the introduction of antisense encoding DNA. A preferred method of delivery involves using a DNA construct “encoding” the ribozyme under the control of a strong constitutive promoter, such as, for example, pol III or pol II promoter, so that transfected cells will produce sufficient quantities of the ribozyme to destroy endogenous messages and inhibit translation. Since ribozymes unlike antisense molecules, are catalytic, a lower intracellular concentration is required for efficiency.

[0918] Antagonist/agonist compounds may be employed to inhibit the cell growth and proliferation effects of the polypeptides of the present invention on neoplastic cells and tissues, i.e. stimulation of angiogenesis of tumors, and, therefore, retard or prevent abnormal cellular growth and proliferation, for example, in tumor formation or growth.

[0919] The antagonist/agonist may also be employed to prevent hyper-vascular diseases, and prevent the proliferation of epithelial lens cells after extracapsular cataract surgery. Prevention of the mitogenic activity of the polypeptides of the present invention may also be desirous in cases such as restenosis after balloon angioplasty.

[0920] The antagonist/agonist may also be employed to prevent the growth of scar tissue during wound healing.

[0921] The antagonist/agonist may also be employed to treat the diseases described herein.

[0922] Thus, the invention provides a method of treating disorders or diseases, including but not limited to the disorders or diseases listed throughout this application, associated with overexpression of a polynucleotide of the present invention by administering to a patient (a) an antisense molecule directed to the polynucleotide of the present invention, and/or (b) a ribozyme directed to the polynucleotide of the present invention.

Binding Peptides and Other Molecules

[0923] The invention also encompasses screening methods for identifying polypeptides and nonpolypeptides that bind polypeptides of the invention, and the binding molecules identified thereby. These binding molecules are useful, for example, as agonists and antagonists of the polypeptides of the invention. Such agonists and antagonists can be used, in accordance with the invention, in the therapeutic embodiments described in detail, below.

[0924] This method comprises the steps of:
[0925] a. contacting polypeptides of the invention with a plurality of molecules; and
[0926] b. identifying a molecule that binds the polypeptides of the invention.

[0927] The step of contacting the polypeptides of the invention with the plurality of molecules may be effected in a number of ways. For example, one may contemplate immobilizing the polypeptides on a solid support and bringing a solution of the plurality of molecules in contact with the immobilized polypeptides. Such a procedure would be akin to an affinity chromatographic process, with the affinity matrix being comprised of the immobilized polypeptides of the invention. The molecules having a selective affinity for the polypeptides can then be purified by affinity selection. The nature of the solid support, process for attachment of the polypeptides to the solid support, solvent, and conditions of the affinity isolation or selection are largely conventional and well known to those of ordinary skill in the art.

[0928] Alternatively, one may also separate a plurality of polypeptides into substantially separate fractions comprising a subset of or individual polypeptides. For instance, one can separate the plurality of polypeptides by gel electrophoresis, column chromatography, or like method known to those of ordinary skill for the separation of polypeptides. The individual polypeptides can also be produced by a transformed host cell in such a way as to be expressed on or about its outer surface (e.g., a recombinant phage). Individual isolates can then be “probed” by the polypeptides of the invention, optionally in the presence of an inducer should one be required for expression, to determine if any selective affinity interaction takes place between the polypeptides and the individual clone. Prior to contacting the polypeptides with each fraction comprising individual polypeptides, the polypeptides could first be transferred to a solid support for additional convenience. Such a solid support may simply be a piece of filter membrane, such as one made of nitrocellulose or nylon. In this manner, positive clones could be identified from a collection of transformed host cells of an expression library, which harbor a DNA construct encoding a polypeptide having a selective affinity for polypeptides of the invention. Furthermore, the amino acid sequence of the polypeptide having a selective affinity for the polypeptides of the invention can be determined directly by conventional means or the coding sequence of the DNA encoding the polypeptide can frequently be determined more conveniently. The primary sequence can then be deduced from the corresponding DNA sequence. If the amino acid sequence is to be determined from the polypeptide itself, one may use microsequencing techniques. The sequencing technique may include mass spectroscopy.

[0929] In certain situations, it may be desirable to wash away any unbound polypeptides from a mixture of the polypeptides of the invention and the plurality of polypeptides prior to attempting to determine or to detect the presence of a selective affinity interaction. Such a wash step may be particularly desirable when the polypeptides of the invention or the plurality of polypeptides are bound to a solid support.

[0930] The plurality of molecules provided according to this method may be provided by way of diversity libraries, such as random or combinatorial peptide or nonpeptide libraries which can be screened for molecules that specifically bind polypeptides of the invention. Many libraries are known in the art that can be used, e.g., chemically synthesized libraries, recombinant (e.g., phage display libraries), and in vitro translation-based libraries. Examples of chemically synthesized libraries are described in Fodor et al., 1991, Science 251:767-773; Houghten et al., 1991, Nature 354:84-86; Lam et al., 1991, Nature 354:82-84; Medynski, 1994, Bio/Technology 12:709-710; Gallop et al., 1994, J. Medicinal Chemistry 37(9):1233-1251; Ohlmeyer et al., 1993, Proc. Natl. Acad. Sci. USA 90:10922-10926; Erb et al., 1994, Proc. Natl. Acad. Sci. USA 91:11422-11426; Houghten et al., 1992, Biotechniques 13:412; Jayawickreme et al., 1994, Proc. Natl. Acad. Sci. USA 91:1614-1618; Salmon et al., 1993, Proc. Natl. Acad. Sci. USA 90:11708-11712; PCT Publication No. WO 93/20242; and Brenner and Lerner, 1992, Proc. Natl. Acad. Sci. USA 89:5381-5383.

[0931] Examples of phage display libraries are described in Scott and Smith, 1990, Science 249:386-390; Devlin et al., 1990, Science, 249:404-406; Christian, R. B., et al., 1992, J. Mol. Biol. 227:711-718); Lenstra, 1992, J. Immunol. Meth. 152:149-157; Kay et al., 1993, Gene 128:59-65; and PCT Publication No. WO 94/18318 dated Aug. 18, 1994.

[0932] In vitro translation-based libraries include but are not limited to those described in PCT Publication No. WO 91/05058 dated Apr. 18, 1991; and Mattheakis et al., 1994, Proc. Natl. Acad. Sci. USA 91:9022-9026.

[0933] By way of examples of nonpeptide libraries, a benzodiazepine library (see e.g., Bunin et al., 1994, Proc. Natl. Acad. Sci. USA 91:4708-4712) can be adapted for use. Peptoid libraries (Simon et al., 1992, Proc. Natl. Acad. Sci. USA 89:9367-9371) can also be used. Another example of a library that can be used, in which the amide functionalities in peptides have been permethylated to generate a chemically transformed combinatorial library, is described by Ostresh et al. (1994, Proc. Natl. Acad. Sci. USA 91:11138-11142).

[0934] The variety of non-peptide libraries that are useful in the present invention is great. For example, Ecker and Crooke, 1995, Bio/Technology 13:351-360 list benzodiazepines, hydantoins, piperazinediones, biphenyls, sugar analogs, beta-mercaptoketones, arylacetic acids, acylpiperidines, benzopyrans, cubanes, xanthines, aminimides, and oxazolones as among the chemical species that form the basis of various libraries.

[0935] Non-peptide libraries can be classified broadly into two types: decorated monomers and oligomers. Decorated monomer libraries employ a relatively simple scaffold structure upon which a variety functional groups is added. Often the scaffold will be a molecule with a known useful pharmacological activity. For example, the scaffold might be the benzodiazepine structure.

[0936] Non-peptide oligomer libraries utilize a large number of monomers that are assembled together in ways that create new shapes that depend on the order of the monomers. Among the monomer units that have been used are carbamates, pyrrolinones, and morpholinos. Peptoids, peptide-like oligomers in which the side chain is attached to the alpha amino group rather than the alpha carbon, form the basis of another version of non-peptide oligomer libraries. The first non-peptide oligomer libraries utilized a single type of monomer and thus contained a repeating backbone. Recent libraries have utilized more than one monomer, giving the libraries added flexibility.

[0937] Screening the libraries can be accomplished by any of a variety of commonly known methods. See, e.g., the following references, which disclose screening of peptide libraries: Parmley and Smith, 1989, Adv. Exp. Med. Biol. 251:215-218; Scott and Smith, 1990, Science 249:386-390; Fowlkes et al., 1992; BioTechniques 13:422-427; Oldenburg et al., 1992, Proc. Natl. Acad. Sci. USA 89:5393-5397; Yu et al., 1994, Cell 76:933-945; Staudt et al., 1988, Science 241:577-580; Bock et al., 1992, Nature 355:564-566; Tuerk et al., 1992, Proc. Natl. Acad. Sci. USA 89:6988-6992; Ellington et al., 1992, Nature 355:850-852; U.S. Pat. No. 5,096,815, U.S. Pat. No. 5,223,409, and U.S. Pat. No. 5,198,346, all to Ladner et al.; Rebar and Pabo, 1993, Science 263:671-673; and CT Publication No. WO 94/18318.

[0938] In a specific embodiment, screening to identify a molecule that binds polypeptides of the invention can be carried out by contacting the library members with polypeptides of the invention immobilized on a solid phase and harvesting those library members that bind to the polypeptides of the invention. Examples of such screening methods, termed “panning” techniques are described by way of example in Parmley and Smith, 1988, Gene 73:305-318; Fowlkes et al., 1992, BioTechniques 13:422-427; PCT Publication No. WO 94/18318; and in references cited herein.

[0939] In another embodiment, the two-hybrid system for selecting interacting proteins in yeast (Fields and Song, 1989, Nature 340:245-246; Chien et al., 1991, Proc. Natl. Acad. Sci. USA 88:9578-9582) can be used to identify molecules that specifically bind to polypeptides of the invention.

[0940] Where the binding molecule is a polypeptide, the polypeptide can be conveniently selected from any peptide library, including random peptide libraries, combinatorial peptide libraries, or biased peptide libraries. The term “biased” is used herein to mean that the method of generating the library is manipulated so as to restrict one or more parameters that govern the diversity of the resulting collection of molecules, in this case peptides.

[0941] Thus, a truly random peptide library would generate a collection of peptides in which the probability of finding a particular amino acid at a given position of the peptide is the same for all 20 amino acids. A bias can be introduced into the library, however, by specifying, for example, that a lysine occur every fifth amino acid or that positions 4, 8, and 9 of a decapeptide library be fixed to include only arginine. Clearly, many types of biases can be contemplated, and the present invention is not restricted to any particular bias. Furthermore, the present invention contemplates specific types of peptide libraries, such as phage displayed peptide libraries and those that utilize a DNA construct comprising a lambda phage vector with a DNA insert.

[0942] As mentioned above, in the case of a binding molecule that is a polypeptide, the polypeptide may have about 6 to less than about 60 amino acid residues, preferably about 6 to about 10 amino acid residues, and most preferably, about 6 to about 22 amino acids. In another embodiment, a binding polypeptide has in the range of 15-100 amino acids, or 20-50 amino acids.

[0943] The selected binding polypeptide can be obtained by chemical synthesis or recombinant expression.

Other Activities

[0944] A polypeptide, polynucleotide, agonist, or antagonist of the present invention, as a result of the ability to stimulate vascular endothelial cell growth, may be employed in treatment for stimulating re-vascularization of ischemic tissues due to various disease conditions such as thrombosis, arteriosclerosis, and other cardiovascular conditions. The polypeptide, polynucleotide, agonist, or antagonist of the present invention may also be employed to stimulate angiogenesis and limb regeneration, as discussed above.

[0945] A polypeptide, polynucleotide, agonist, or antagonist of the present invention may also be employed for treating wounds due to injuries, burns, post-operative tissue repair, and ulcers since they are mitogenic to various cells of different origins, such as fibroblast cells and skeletal muscle cells, and therefore, facilitate the repair or replacement of damaged or diseased tissue.

[0946] A polypeptide, polynucleotide, agonist, or antagonist of the present invention may also be employed stimulate neuronal growth and to treat and prevent neuronal damage which occurs in certain neuronal disorders or neuro-degenerative conditions such as Alzheimer's disease, Parkinson's disease, and AIDS-related complex. A polypeptide, polynucleotide, agonist, or antagonist of the present invention may have the ability to stimulate chondrocyte growth, therefore, they may be employed to enhance bone and periodontal regeneration and aid in tissue transplants or bone grafts.

[0947] A polypeptide, polynucleotide, agonist, or antagonist of the present invention may be also be employed to prevent skin aging due to sunburn by stimulating keratinocyte growth.

[0948] A polypeptide, polynucleotide, agonist, or antagonist of the present invention may also be employed for preventing hair loss, since FGF family members activate hair-forming cells and promotes melanocyte growth. Along the same lines, a polypeptide, polynucleotide, agonist, or antagonist of the present invention may be employed to stimulate growth and differentiation of hematopoietic cells and bone marrow cells when used in combination with other cytokines.

[0949] A polypeptide, polynucleotide, agonist, or antagonist of the present invention may also be employed to maintain organs before transplantation or for supporting cell culture of primary tissues. A polypeptide, polynucleotide, agonist, or antagonist of the present invention may also be employed for inducing tissue of mesodermal origin to differentiate in early embryos.

[0950] A polypeptide, polynucleotide, agonist, or antagonist of the present invention may also increase or decrease the differentiation or proliferation of embryonic stem cells, besides, as discussed above, hematopoietic lineage.

[0951] A polypeptide, polynucleotide, agonist, or antagonist of the present invention may also be used to modulate mammalian characteristics, such as body height, weight, hair color, eye color, skin, percentage of adipose tissue, pigmentation, size, and shape (e.g., cosmetic surgery). Similarly, a polypeptide, polynucleotide, agonist, or antagonist of the present invention may be used to modulate mammalian metabolism affecting catabolism, anabolism, processing, utilization, and storage of energy.

[0952] A polypeptide, polynucleotide, agonist, or antagonist of the present invention may be used to change a mammal's mental state or physical state by influencing biorhythms, caricadic rhythms, depression (including depressive disorders), tendency for violence, tolerance for pain, reproductive capabilities (preferably by Activin or Inhibin-like activity), hormonal or endocrine levels, appetite, libido, memory, stress, or other cognitive qualities.

[0953] A polypeptide, polynucleotide, agonist, or antagonist of the present invention may also be used as a food additive or preservative, such as to increase or decrease storage capabilities, fat content, lipid, protein, carbohydrate, vitamins, minerals, cofactors or other nutritional components.

[0954] The above-recited applications have uses in a wide variety of hosts. Such hosts include, but are not limited to, human, murine, rabbit, goat, guinea pig, camel, horse, mouse, rat, hamster, pig, micro-pig, chicken, goat, cow, sheep, dog, cat, non-human primate, and human. In specific embodiments, the host is a mouse, rabbit, goat, guinea pig, chicken, rat, hamster, pig, sheep, dog or cat. In preferred embodiments, the host is a mammal. In most preferred embodiments, the host is a human.

### Other Preferred Embodiments

[0955] Other preferred embodiments of the claimed invention include an isolated nucleic acid molecule comprising a nucleotide sequence which is at least 95% identical to a sequence of at least about 50 contiguous nucleotides in the nucleotide sequence of SEQ ID NO:X or the complementary strand thereto, the nucleotide sequence as defined in column 5 of Table 1B.1 or columns 8 and 9 of Table 2 or the complementary strand thereto, and/or cDNA contained in ATCC Deposit No:Z.

[0956] Also preferred is a nucleic acid molecule wherein said sequence of contiguous nucleotides is included in the nucleotide sequence of the portion of SEQ ID NO:X as defined in column 5, “ORF (From-To)”, in Table 1B.1.

[0957] Also preferred is a nucleic acid molecule wherein said sequence of contiguous nucleotides is included in the nucleotide sequence of the portion of SEQ ID NO:X as defined in columns 8 and 9, “NT From” and “NT To” respectively, in Table 2.

[0958] Also preferred is an isolated nucleic acid molecule comprising a nucleotide sequence which is at least 95% identical to a sequence of at least about 150 contiguous nucleotides in the nucleotide sequence of SEQ ID NO:X or the complementary strand thereto, the nucleotide sequence as defined in column 5 of Table 1B.1 or columns 8 and 9 of Table 2 or the complementary strand thereto, and/or cDNA contained in ATCC Deposit No:Z.

[0959] Further preferred is an isolated nucleic acid molecule comprising a nucleotide sequence which is at least 95% identical to a sequence of at least about 500 contiguous nucleotides in the nucleotide sequence of SEQ ID NO:X or the complementary strand thereto, the nucleotide sequence as defined in column 5 of Table 1B.1 or columns 8 and 9 of Table 2 or the complementary strand thereto, and/or cDNA contained in ATCC Deposit No:Z.

[0960] A further preferred embodiment is a nucleic acid molecule comprising a nucleotide sequence which is at least 95% identical to the nucleotide sequence of the portion of SEQ ID NO:X defined in column 5, “ORF (From-To)”, in Table 1B.1.

[0961] A further preferred embodiment is a nucleic acid molecule comprising a nucleotide sequence which is at least 95% identical to the nucleotide sequence of the portion of SEQ ID NO:X defined in columns 8 and 9, “NT From” and “NT To”, respectively, in Table 2.

[0962] A further preferred embodiment is an isolated nucleic acid molecule comprising a nucleotide sequence which is at least 95% identical to the complete nucleotide sequence of SEQ ID NO:X or the complementary strand thereto, the nucleotide sequence as defined in column 5 of Table 1B.1 or columns 8 and 9 of Table 2 or the complementary strand thereto, and/or cDNA contained in ATCC Deposit No:Z.

[0963] Also preferred is an isolated nucleic acid molecule which hybridizes under stringent hybridization conditions to a nucleic acid molecule comprising a nucleotide sequence of SEQ ID NO:X or the complementary strand thereto, the nucleotide sequence as defined in column 5 of Table 1B.1 or columns 8 and 9 of Table 2 or the complementary strand thereto, and/or cDNA contained in ATCC Deposit No:Z, wherein said nucleic acid molecule which hybridizes does not hybridize under stringent hybridization conditions to a nucleic acid molecule having a nucleotide sequence consisting of only A residues or of only T residues.

[0964] Also preferred is a composition of matter comprising a DNA molecule which comprises the cDNA contained in ATCC Deposit No:Z.

[0965] Also preferred is an isolated nucleic acid molecule comprising a nucleotide sequence which is at least 95% identical to a sequence of at least 50 contiguous nucleotides of the cDNA sequence contained in ATCC Deposit No:Z.

[0966] Also preferred is an isolated nucleic acid molecule, wherein said sequence of at least 50 contiguous nucleotides is included in the nucleotide sequence of an open reading frame sequence encoded by cDNA contained in ATCC Deposit No:Z.

[0967] Also preferred is an isolated nucleic acid molecule comprising a nucleotide sequence which is at least 95% identical to sequence of at least 150 contiguous nucleotides in the nucleotide sequence encoded by cDNA contained in ATCC Deposit No:Z.

[0968] A further preferred embodiment is an isolated nucleic acid molecule comprising a nucleotide sequence which is at least 95% identical to sequence of at least 500 contiguous nucleotides in the nucleotide sequence encoded by cDNA contained in ATCC Deposit No:Z.

[0969] A further preferred embodiment is an isolated nucleic acid molecule comprising a nucleotide sequence which is at least 95% identical to the complete nucleotide sequence encoded by cDNA contained in ATCC Deposit No:Z.

[0970] A further preferred embodiment is a method for detecting in a biological sample a nucleic acid molecule comprising a nucleotide sequence which is at least 95% identical to a sequence of at least 50 contiguous nucleotides in a sequence selected from the group consisting of: a nucleotide sequence of SEQ ID NO:X or the complementary strand thereto; the nucleotide sequence as defined in column 5 of Table 1B.1 or columns 8 and 9 of Table 2 or the complementary strand thereto; and a nucleotide sequence encoded by cDNA contained in ATCC Deposit No:Z; which method comprises a step of comparing a nucleotide sequence of at least one nucleic acid molecule in said sample with a sequence selected from said group and determining whether the sequence of said nucleic acid molecule in said sample is at least 95% identical to said selected sequence.

[0971] Also preferred is the above method wherein said step of comparing sequences comprises determining the extent of nucleic acid hybridization between nucleic acid molecules in said sample and a nucleic acid molecule comprising said sequence selected from said group. Similarly, also preferred is the above method wherein said step of comparing sequences is performed by comparing the nucleotide sequence determined from a nucleic acid molecule in said sample with said sequence selected from said group. The nucleic acid molecules can comprise DNA molecules or RNA molecules.

[0972] A further preferred embodiment is a method for identifying the species, tissue or cell type of a biological sample which method comprises a step of detecting nucleic acid molecules in said sample, if any, comprising a nucleotide sequence that is at least 95% identical to a sequence of at least 50 contiguous nucleotides in a sequence selected from the group consisting of: a nucleotide sequence of SEQ ID NO:X or the complementary strand thereto; the nucleotide sequence as defined in column 5 of Table 1B.1 or columns 8 and 9 of Table 2 or the complementary strand thereto; and a nucleotide sequence of the cDNA contained in ATCC Deposit No:Z.

[0973] The method for identifying the species, tissue or cell type of a biological sample can comprise a step of detecting nucleic acid molecules comprising a nucleotide sequence in a panel of at least two nucleotide sequences, wherein at least one sequence in said panel is at least 95% identical to a sequence of at least 50 contiguous nucleotides in a sequence selected from said group.

[0974] Also preferred is a method for diagnosing in a subject a pathological condition associated with abnormal structure or expression of a nucleotide sequence of SEQ ID NO:X or the complementary strand thereto; the nucleotide sequence as defined in column 5 of Table 1B.1 or columns 8 and 9 of Table 2 or the complementary strand thereto; or the cDNA contained in ATCC Deposit No:Z which encodes a protein, wherein the method comprises a step of detecting in a biological sample obtained from said subject nucleic acid molecules, if any, comprising a nucleotide sequence that is at least 95% identical to a sequence of at least 50 contiguous nucleotides in a sequence selected from the group consisting of: a nucleotide sequence of SEQ ID NO:X or the complementary strand thereto; the nucleotide sequence as defined in column 5 of Table 1B.1 or columns 8 and 9 of Table 2 or the complementary strand thereto; and a nucleotide sequence of cDNA contained in ATCC Deposit No:Z.

[0975] The method for diagnosing a pathological condition can comprise a step of detecting nucleic acid molecules comprising a nucleotide sequence in a panel of at least two nucleotide sequences, wherein at least one sequence in said panel is at least 95% identical to a sequence of at least 50 contiguous nucleotides in a sequence selected from said group.

[0976] Also preferred is a composition of matter comprising isolated nucleic acid molecules wherein the nucleotide sequences of said nucleic acid molecules comprise a panel of at least two nucleotide sequences, wherein at least one sequence in said panel is at least 95% identical to a sequence of at least 50 contiguous nucleotides in a sequence selected from the group consisting of: a nucleotide sequence of SEQ ID NO:X or the complementary strand thereto; the nucleotide sequence as defined in column 5 of Table 1B.1 or columns 8 and 9 of Table 2 or the complementary strand thereto; and a nucleotide sequence encoded by cDNA contained in ATCC Deposit No:Z. The nucleic acid molecules can comprise DNA molecules or RNA molecules.

[0977] Also preferred is a composition of matter comprising isolated nucleic acid molecules wherein the nucleotide sequences of said nucleic acid molecules comprise a DNA microarray or “chip” of at least 1, 2, 3, 4, 5, 6, 7, 8, 9, 10, 15, 20, 25, 30, 40, 50, 100, 150, 200, 250, 300, 500, 1000, 2000, 3000, or 4000 nucleotide sequences, wherein at least one sequence in said DNA microarray or “chip” is at least 95% identical to a sequence of at least 50 contiguous nucleotides in a sequence selected from the group consisting of: a nucleotide sequence of SEQ ID NO:X wherein X is any integer as defined in Table 1A and/or 1B; and a nucleotide sequence encoded by a human cDNA clone identified by a cDNA “Clone ID” in Table 1A and/or 1B.

[0978] Also preferred is an isolated polypeptide comprising an amino acid sequence at least 90% identical to a sequence of at least about 10 contiguous amino acids in the polypeptide sequence of SEQ ID NO:Y; a polypeptide encoded by SEQ ID NO:X or the complementary strand thereto; the polypeptide encoded by the nucleotide sequence as defined in columns 8 and 9 of Table 2; and/or a polypeptide encoded by cDNA contained in ATCC Deposit No:Z.

[0979] Also preferred is an isolated polypeptide comprising an amino acid sequence at least 95% identical to a sequence of at least about 30 contiguous amino acids in the amino acid sequence of SEQ ID NO:Y; a polypeptide encoded by SEQ ID NO:X or the complementary strand thereto; the polypeptide encoded by the nucleotide sequence as defined in columns 8 and 9 of Table 2; and/or a polypeptide encoded by cDNA contained in ATCC Deposit No:Z.

[0980] Further preferred is an isolated polypeptide comprising an amino acid sequence at least 95% identical to a sequence of at least about 100 contiguous amino acids in the amino acid sequence of SEQ ID NO:Y; a polypeptide encoded by SEQ ID NO:X or the complementary strand thereto; the polypeptide encoded by the nucleotide sequence as defined in columns 8 and 9 of Table 2; and/or a polypeptide encoded by cDNA contained in ATCC Deposit No:Z.

[0981] Further preferred is an isolated polypeptide comprising an amino acid sequence at least 95% identical to the complete amino acid sequence of SEQ ID NO:Y; a polypeptide encoded by SEQ ID NO:X or the complementary strand thereto; the polypeptide encoded by the nucleotide sequence as defined in columns 8 and 9 of Table 2; and/or a polypeptide encoded by cDNA contained in ATCC Deposit No:Z.

[0982] Further preferred is an isolated polypeptide comprising an amino acid sequence at least 90% identical to a sequence of at least about 10 contiguous amino acids in the complete amino acid sequence of a polypeptide encoded by contained in ATCC Deposit No:Z

[0983] Also preferred is a polypeptide wherein said sequence of contiguous amino acids is included in the amino acid sequence of a portion of said polypeptide encoded by cDNA contained in ATCC Deposit No:Z; a polypeptide encoded by SEQ ID NO:X or the complementary strand thereto; the polypeptide encoded by the nucleotide sequence as defined in columns 8 and 9 of Table 2; and/or the polypeptide sequence of SEQ ID NO:Y.

[0984] Also preferred is an isolated polypeptide comprising an amino acid sequence at least 95% identical to a sequence of at least about 30 contiguous amino acids in the amino acid sequence of a polypeptide encoded by the cDNA contained in ATCC Deposit No:Z.

[0985] Also preferred is an isolated polypeptide comprising an amino acid sequence at least 95% identical to a sequence of at least about 100 contiguous amino acids in the amino acid sequence of a polypeptide encoded by cDNA contained in ATCC Deposit No:Z.

[0986] Also preferred is an isolated polypeptide comprising an amino acid sequence at least 95% identical to the amino acid sequence of a polypeptide encoded by the cDNA contained in ATCC Deposit No:Z.

[0987] Further preferred is an isolated antibody which binds specifically to a polypeptide comprising an amino acid sequence that is at least 90% identical to a sequence of at least 10 contiguous amino acids in a sequence selected from the group consisting of: a polypeptide sequence of SEQ ID NO:Y; a polypeptide encoded by SEQ ID NO:X or the complementary strand thereto; the polypeptide encoded by the nucleotide sequence as defined in columns 8 and 9 of Table 2; and a polypeptide encoded by the cDNA contained in ATCC Deposit No:Z.

[0988] Further preferred is a method for detecting in a biological sample a polypeptide comprising an amino acid sequence which is at least 90% identical to a sequence of at least 10 contiguous amino acids in a sequence selected from the group consisting of: a polypeptide sequence of SEQ ID NO:Y; a polypeptide encoded by SEQ ID NO:X or the complementary strand thereto; the polypeptide encoded by the nucleotide sequence as defined in columns 8 and 9 of Table 2; and a polypeptide encoded by the cDNA contained in ATCC Deposit No:Z; which method comprises a step of comparing an amino acid sequence of at least one polypeptide molecule in said sample with a sequence selected from said group and determining whether the sequence of said polypeptide molecule in said sample is at least 90% identical to said sequence of at least 10 contiguous amino acids.

[0989] Also preferred is the above method wherein said step of comparing an amino acid sequence of at least one polypeptide molecule in said sample with a sequence selected from said group comprises determining the extent of specific binding of polypeptides in said sample to an antibody which binds specifically to a polypeptide comprising an amino acid sequence that is at least 90% identical to a sequence of at least 10 contiguous amino acids in a sequence selected from the group consisting of: a polypeptide sequence of SEQ ID NO:Y; a polypeptide encoded by SEQ ID NO:X or the complementary strand thereto; the polypeptide encoded by the nucleotide sequence as defined in columns 8 and 9 of Table 2; and a polypeptide encoded by the cDNA contained in ATCC Deposit No:Z.

[0990] Also preferred is the above method wherein said step of comparing sequences is performed by comparing the amino acid sequence determined from a polypeptide molecule in said sample with said sequence selected from said group.

[0991] Also preferred is a method for identifying the species, tissue or cell type of a biological sample which method comprises a step of detecting polypeptide molecules in said sample, if any, comprising an amino acid sequence that is at least 90% identical to a sequence of at least 10 contiguous amino acids in a sequence selected from the group consisting of: polypeptide sequence of SEQ ID NO:Y; a polypeptide encoded by SEQ ID NO:X or the complementary strand thereto; the polypeptide encoded by the nucleotide sequence as defined in columns 8 and 9 of Table 2; and a polypeptide encoded by the cDNA contained in ATCC Deposit No:Z.

[0992] Also preferred is the above method for identifying the species, tissue or cell type of a biological sample, which method comprises a step of detecting polypeptide molecules comprising an amino acid sequence in a panel of at least two amino acid sequences, wherein at least one sequence in said panel is at least 90% identical to a sequence of at least 10 contiguous amino acids in a sequence selected from the above group.

[0993] Also preferred is a method for diagnosing in a subject a pathological condition associated with abnormal structure or expression of a nucleic acid sequence identified in Table 1A, 1B or Table 2 encoding a polypeptide, which method comprises a step of detecting in a biological sample obtained from said subject polypeptide molecules comprising an amino acid sequence in a panel of at least two amino acid sequences, wherein at least one sequence in said panel is at least 90% identical to a sequence of at least 10 contiguous amino acids in a sequence selected from the group consisting of: polypeptide sequence of SEQ ID NO:Y; a polypeptide encoded by SEQ ID NO:X or the complementary strand thereto; the polypeptide encoded by the nucleotide sequence as defined in columns 8 and 9 of Table 2; and a polypeptide encoded by the cDNA contained in ATCC Deposit No:Z.

[0994] In any of these methods, the step of detecting said polypeptide molecules includes using an antibody.

[0995] Also preferred is an isolated nucleic acid molecule comprising a nucleotide sequence which is at least 95% identical to a nucleotide sequence encoding a polypeptide wherein said polypeptide comprises an amino acid sequence that is at least 90% identical to a sequence of at least 10 contiguous amino acids in a sequence selected from the group consisting of: polypeptide sequence of SEQ ID NO:Y; a polypeptide encoded by SEQ ID NO:X or the complementary strand thereto; the polypeptide encoded by the nucleotide sequence as defined in columns 8 and 9 of Table 2; and a polypeptide encoded by the cDNA contained in ATCC Deposit No:Z.

[0996] Also preferred is an isolated nucleic acid molecule, wherein said nucleotide sequence encoding a polypeptide has been optimized for expression of said polypeptide in a prokaryotic host.

[0997] Also preferred is a polypeptide molecule, wherein said polypeptide comprises an amino acid sequence selected from the group consisting of: polypeptide sequence of SEQ ID NO:Y; a polypeptide encoded by SEQ ID NO:X or the complementary strand thereto; the polypeptide encoded by the nucleotide sequence as defined in columns 8 and 9 of Table 2; and a polypeptide encoded by the cDNA contained in ATCC Deposit No:Z.

[0998] Further preferred is a method of making a recombinant vector comprising inserting any of the above isolated nucleic acid molecule into a vector. Also preferred is the recombinant vector produced by this method. Also preferred is a method of making a recombinant host cell comprising introducing the vector into a host cell, as well as the recombinant host cell produced by this method.

[0999] Also preferred is a method of making an isolated polypeptide comprising culturing this recombinant host cell under conditions such that said polypeptide is expressed and recovering said polypeptide. Also preferred is this method of making an isolated polypeptide, wherein said recombinant host cell is a eukaryotic cell and said polypeptide is a human protein comprising an amino acid sequence selected from the group consisting of: polypeptide sequence of SEQ ID NO:Y; a polypeptide encoded by SEQ ID NO:X or the complementary strand thereto; the polypeptide encoded by the nucleotide sequence as defined in columns 8 and 9 of Table 2; and a polypeptide encoded by the cDNA contained in ATCC Deposit No:Z. The isolated polypeptide produced by this method is also preferred.

[1000] Also preferred is a method of treatment of an individual in need of an increased level of a protein activity, which method comprises administering to such an individual a Therapeutic comprising an amount of an isolated polypeptide, polynucleotide, immunogenic fragment or analogue thereof, binding agent, antibody, or antigen binding fragment of the claimed invention effective to increase the level of said protein activity in said individual.

[1001] Also preferred is a method of treatment of an individual in need of a decreased level of a protein activity, which method comprised administering to such an individual a Therapeutic comprising an amount of an isolated polypeptide, polynucleotide, immunogenic fragment or analogue thereof, binding agent, antibody, or antigen binding fragment of the claimed invention effective to decrease the level of said protein activity in said individual.

[1002] Also preferred is a method of treatment of an individual in need of a specific delivery of toxic compositions to diseased cells (e.g., tumors, leukemias or lymphomas), which method comprises administering to such an individual a Therapeutic comprising an amount of an isolated polypeptide of the invention, including, but not limited to a binding agent, or antibody of the claimed invention that are associated with toxin or cytotoxic prodrugs.

[1003] Having generally described the invention, the same will be more readily understood by reference to the following examples, which are provided by way of illustration and are not intended as limiting.

Description of Table 6

[1004] Table 6 summarizes some of the ATCC Deposits, Deposit dates, and ATCC designation numbers of deposits made with the ATCC in connection with the present application. These deposits were made in addition to those described in the Table 1A.

TABLE 6

| ATCC Deposits | Deposit Date | ATCC Designation Number |
|---|---|---|
| LP01, LP02, LP03, LP04, | May-20-97 | 209059, 209060, 209061, |
| LP05, LP06, LP07, LP08, | | 209062, 209063, 209064, |
| LP09, LP10, LP11, | | 209065, 209066, 209067, |
| | | 209068, 209069 |
| LP12 | Jan-12-98 | 209579 |
| LP13 | Jan-12-98 | 209578 |
| LP14 | Jul-16-98 | 203067 |
| LP15 | Jul-16-98 | 203068 |
| LP16 | Feb-1-99 | 203609 |
| LP17 | Feb-1-99 | 203610 |
| LP20 | Nov-17-98 | 203485 |
| LP21 | Jun-18-99 | PTA-252 |
| LP22 | Jun-18-99 | PTA-253 |
| LP23 | Dec-22-99 | PTA-1081 |

### EXAMPLES

### Example 1

### Isolation of a Selected cDNA Clone from the Deposited Sample

[1005] Each ATCC Deposit No:Z is contained in a plasmid vector. Table 7 identifies the vectors used to construct the cDNA library from which each clone was isolated. In many cases, the vector used to construct the library is a phage vector from which a plasmid has been excised. The following correlates the related plasmid for each phage vector used in constructing the cDNA library. For example, where a particular clone is identified in Table 7 as being isolated in the vector “Lambda Zap,” the corresponding deposited clone is in “pBluescript.”

| Vector Used to Construct Library | Corresponding Deposited Plasmid |
|---|---|
| Lambda Zap | pBluescript (pBS) |
| Uni-Zap XR | pBluescript (pBS) |
| Zap Express | pBK |
| lafmid BA | plafmid BA |
| pSport1 | pSport1 |
| pCMVSport 2.0 | pCMVSport 2.0 |
| pCMVSport 3.0 | pCMVSport 3.0 |
| pCR ® 2.1 | pCR ® 2.1 |

[1006] Vectors Lambda Zap (U.S. Pat. Nos. 5,128,256 and 5,286,636), Uni-Zap XR (U.S. Pat. Nos. 5,128,256 and 5,286,636), Zap Express (U.S. Pat. Nos. 5,128,256 and 5,286,636), pbluescript (pBS) (Short, J. M. et al., Nucleic Acids Res. 16:7583-7600 (1988); Alting-Mees, M. A. and Short, J. M., Nucleic Acids Res. 17:9494 (1989)) and pBK (Alting-Mees, M. A. et al., Strategies 5:58-61 (1992)) are commercially available from Stratagene Cloning Systems, Inc., 11011 N. Torrey Pines Road, La Jolla, Calif., 92037. pBS contains an ampicillin resistance gene and pBK contains a neomycin resistance gene. Both can be transformed into E. coli strain XL-1 Blue, also available from Stratagene. pBS comes in 4 forms SK+, SK−, KS+ and KS. The S and K refers to the orientation of the polylinker to the T7 and T3 primer sequences which flank the polylinker region (“S” is for SacI and “K” is for KpnI which are the first sites on each respective end of the linker). “+” or “−” refer to the orientation of the f1 origin of replication (“ori”), such that in one orientation, single stranded rescue initiated from the f1 ori generates sense strand DNA and in the other, antisense.

[1007] Vectors pSport1, pCMVSport 2.0 and pCMVSport 3.0, were obtained from Life Technologies, Inc., P.O. Box 6009, Gaithersburg, Md. 20897. All Sport vectors contain an ampicillin resistance gene and may be transformed into E. coli strain DH10B, also available from Life Technologies. (See, for instance, Gruber, C. E., et al., Focus 15:59 (1993)). Vector lafmid BA (Bento Soares, Columbia University, NY) contains an ampicillin resistance gene and can be transformed into E. coli strain XL-1 Blue. Vector pCR®2.1, which is available from Invitrogen, 1600 Faraday Avenue, Carlsbad, Calif. 92008, contains an ampicillin resistance gene and may be transformed into E. coli strain DH10B, available from Life Technologies. (See, for instance, Clark, J. M., Nuc. Acids Res. 16:9677-9686 (1988) and Mead, D. et al., Bio/Technology 9: (1991)). Preferably, a polynucleotide of the present invention does not comprise the phage vector sequences identified for the particular clone in Table 7, as well as the corresponding plasmid vector sequences designated above.

[1008] The deposited material in the sample assigned the ATCC Deposit Number cited by reference to Tables 1, 2, 6 and 7 for any given cDNA clone also may contain one or more additional plasmids, each comprising a cDNA clone different from that given clone. Thus, deposits sharing the same ATCC Deposit Number contain at least a plasmid for each ATCC Deposit No:Z.

TABLE 7

| | | | ATCC |
|---|---|---|---|
| Libraries owned by Catalog | Catalog Description | Vector | Deposit |
| HUKA HUKB HUKC HUKD | Human Uterine Cancer | Lambda ZAP II | LP01 |
| HUKE HUKF HUKG | | | |
| HCNA HCNB | Human Colon | Lambda Zap II | LP01 |
| HFFA | Human Fetal Brain, random primed | Lambda Zap II | LP01 |
| HTWA | Resting T-Cell | Lambda ZAP II | LP01 |
| HBQA | Early Stage Human Brain, random | Lambda ZAP II | LP01 |
| | primed | | |
| HLMB HLMF HLMG HLMH | breast lymph node CDNA library | Lambda ZAP II | LP01 |
| HLMI HLMJ HLMM HLMN | | | |
| HCQA HCQB | human colon cancer | Lamda ZAP II | LP01 |
| HMEA HMEC HMED HMEE | Human Microvascular Endothelial | Lambda ZAP II | LP01 |
| HMEF HMEG HMEI HMEJ | Cells, fract. A | | |
| HMEK HMEL | | | |
| HUSA HUSC | Human Umbilical Vein Endothelial | Lambda ZAP II | LP01 |
| | Cells, fract. A | | |
| HLQA HLQB | Hepatocellular Tumor | Lambda ZAP II | LP01 |
| HHGA HHGB HHGC HHGD | Hemangiopericytoma | Lambda ZAP II | LP01 |
| HSDM | Human Striatum Depression, re- | Lambda ZAP II | LP01 |
| | rescue | | |
| HUSH | H Umbilical Vein Endothelial Cells, | Lambda ZAP II | LP01 |
| | frac A, re-excision | | |
| HSGS | Salivary gland, subtracted | Lambda ZAP II | LP01 |
| HFXA HFXB HFXC HFXD HFXE | Brain frontal cortex | Lambda ZAP II | LP01 |
| HFXF HFXG HFXH | | | |
| HPQA HPQB HPQC | PERM TF274 | Lambda ZAP II | LP01 |
| HFXJ HFXK | Brain Frontal Cortex, re-excision | Lambda ZAP II | LP01 |
| HCWA HCWB HCWC HCWD | CD34 positive cells (Cord Blood) | ZAP Express | LP02 |
| HCWE HCWF HCWG HCWH | | | |
| HCWI HCWJ HCWK | | | |
| HCUA HCUB HCUC | CD34 depleted Buffy Coat (Cord | ZAP Express | LP02 |
| | Blood) | | |
| HRSM | A-14 cell line | ZAP Express | LP02 |
| HRSA | A1-CELL LINE | ZAP Express | LP02 |
| HCUD HCUE HCUF HCUG | CD34 depleted Buffy Coat (Cord | ZAP Express | LP02 |
| HCUH HCUI | Blood), re-excision | | |
| HBXE HBXF HBXG | H. Whole Brain #2, re-excision | ZAP Express | LP02 |
| HRLM | L8 cell line | ZAP Express | LP02 |
| HBXA HBXB HBXC HBXD | Human Whole Brain #2 - Oligo dT | ZAP Express | LP02 |
| | >1.5 Kb | | |
| HUDA HUDB HUDC | Testes | ZAP Express | LP02 |
| HHTM HHTN HHTO | H. hypothalamus, frac A; re-excision | ZAP Express | LP02 |
| HHTL | H. hypothalamus, frac A | ZAP Express | LP02 |
| HASA HASD | Human Adult Spleen | Uni-ZAP XR | LP03 |
| HFKC HFKD HFKE HFKF HFKG | Human Fetal Kidney | Uni-ZAP XR | LP03 |
| HE8A HE8B HE8C HE8D HE8E | Human 8 Week Whole Embryo | Uni-ZAP XR | LP03 |
| HE8F HE8M HE8N | | | |
| HGBA HGBD HGBE HGBF | Human Gall Bladder | Uni-ZAP XR | LP03 |
| HGBG HGBH HGBI | | | |
| HLHA HLHB HLHC HLHD HLHE | Human Fetal Lung III | Uni-ZAP XR | LP03 |
| HLHF HLHG HLHH HLHQ | | | |
| HPMA HPMB HPMC HPMD | Human Placenta | Uni-ZAP XR | LP03 |
| HPME HPMF HPMG HPMH | | | |
| HPRA HPRB HPRC HPRD | Human Prostate | Uni-ZAP XR | LP03 |
| HSIA HSIC HSID HSIE | Human Adult Small Intestine | Uni-ZAP XR | LP03 |
| HTEA HTEB HTEC HTED HTEE | Human Testes | Uni-ZAP XR | LP03 |
| HTEF HTEG HTEH HTEI HTEJ | | | |
| HTEK | | | |
| HTPA HTPB HTPC HTPD HTPE | Human Pancreas Tumor | Uni-ZAP XR | LP03 |
| HTTA HTTB HTTC HTTD HTTE | Human Testes Tumor | Uni-ZAP XR | LP03 |
| HTTF | | | |
| HAPA HAPB HAPC HAPM | Human Adult Pulmonary | Uni-ZAP XR | LP03 |
| HETA HETB HETC HETD HETE | Human Endometrial Tumor | Uni-ZAP XR | LP03 |
| HETF HETG HETH HETI | | | |
| HHFB HHFC HHFD HHFE HHFF | Human Fetal Heart | Uni-ZAP XR | LP03 |
| HHFG HHFH HHFI | | | |
| HHPB HHPC HHPD HHPE HHPF | Human Hippocampus | Uni-ZAP XR | LP03 |
| HHPG HHPH | | | |
| HCE1 HCE2 HCE3 HCE4 HCE5 | Human Cerebellum | Uni-ZAP XR | LP03 |
| HCEB HCEC HCED HCEE HCEF | | | |
| HCEG | | | |
| HUVB HUVC HUVD HUVE | Human Umbilical Vein, Endo. | Uni-ZAP XR | LP03 |
| | remake | | |
| HSTA HSTB HSTC HSTD | Human Skin Tumor | Uni-ZAP XR | LP03 |
| HTAA HTAB HTAC HTAD HTAE | Human Activated T-Cells | Uni-ZAP XR | LP03 |
| HFEA HFEB HFEC | Human Fetal Epithelium (Skin) | Uni-ZAP XR | LP03 |
| HJPA HJPB HJPC HJPD | HUMAN JURKAT MEMBRANE | Uni-ZAP XR | LP03 |
| | BOUND POLYSOMES | | |
| HESA | Human epithelioid sarcoma | Uni-Zap XR | LP03 |
| HLTA HLTB HLTC HLTD HLTE | Human T-Cell Lymphoma | Uni-ZAP XR | LP03 |
| HLTF | | | |
| HFTA HFTB HFTC HFTD | Human Fetal Dura Mater | Uni-ZAP XR | LP03 |
| HRDA HRDB HRDC HRDD | Human Rhabdomyosarcoma | Uni-ZAP XR | LP03 |
| HRDE HRDF | | | |
| HCAA HCAB HCAC | Cem cells cyclohexamide treated | Uni-ZAP XR | LP03 |
| HRGA HRGB HRGC HRGD | Raji Cells, cyclohexamide treated | Uni-ZAP XR | LP03 |
| HSUA HSUB HSUC HSUM | Supt Cells, cyclohexamide treated | Uni-ZAP XR | LP03 |
| HT4A HT4C HT4D | Activated T-Cells, 12 hrs. | Uni-ZAP XR | LP03 |
| HE9A HE9B HE9C HE9D HE9E | Nine Week Old Early Stage Human | Uni-ZAP XR | LP03 |
| HE9F HE9G HE9H HE9M HE9N | | | |
| HATA HATB HATC HATD HATE | Human Adrenal Gland Tumor | Uni-ZAP XR | LP03 |
| HT5A | Activated T-Cells, 24 hrs. | Uni-ZAP XR | LP03 |
| HFGA HFGM | Human Fetal Brain | Uni-ZAP XR | LP03 |
| HNEA HNEB HNEC HNED HNEE | Human Neutrophil | Uni-ZAP XR | LP03 |
| HBGB HBGD | Human Primary Breast Cancer | Uni-ZAP XR | LP03 |
| HBNA HBNB | Human Normal Breast | Uni-ZAP XR | LP03 |
| HCAS | Cem Cells, cyclohexamide treated, | Uni-ZAP XR | LP03 |
| | subtra | | |
| HHPS | Human Hippocampus, subtracted | pBS | LP03 |
| HKCS HKCU | Human Colon Cancer, subtracted | pBS | LP03 |
| HRGS | Raji cells, cyclohexamide treated, | pBS | LP03 |
| | subtracted | | |
| HSUT | Supt cells, cyclohexamide treated, | pBS | LP03 |
| | differentially expressed | | |
| HT4S | Activated T-Cells, 12 hrs, | Uni-ZAP XR | LP03 |
| | subtracted | | |
| HCDA HCDB HCDC HCDD | Human Chondrosarcoma | Uni-ZAP XR | LP03 |
| HCDE | | | |
| HOAA HOAB HOAC | Human Osteosarcoma | Uni-ZAP XR | LP03 |
| HTLA HTLB HTLC HTLD HTLE | Human adult testis, large inserts | Uni-ZAP XR | LP03 |
| HTLF | | | |
| HLMA HLMC HLMD | Breast Lymph node cDNA library | Uni-ZAP XR | LP03 |
| H6EA H6EB H6EC | HL-60, PMA 4H | Uni-ZAP XR | LP03 |
| HTXA HTXB HTXC HTXD HTXE | Activated T-Cell (12 hs)/Thiouridine | Uni-ZAP XR | LP03 |
| HTXF HTXG HTXH | labelledEco | | |
| HNFA HNFB HNFC HNFD HNFE | Human Neutrophil, Activated | Uni-ZAP XR | LP03 |
| HNFF HNFG HNFH HNFJ | | | |
| HTOB HTOC | HUMAN TONSILS, FRACTION 2 | Uni-ZAP XR | LP03 |
| HMGB | Human OB MG63 control fraction I | Uni-ZAP XR | LP03 |
| HOPB | Human OB HOS control fraction I | Uni-ZAP XR | LP03 |
| HORB | Human OB HOS treated (10 nM | Uni-ZAP XR | LP03 |
| | E2) fraction I | | |
| HSVA HSVB HSVC | Human Chronic Synovitis | Uni-ZAP XR | LP03 |
| HROA | HUMAN STOMACH | Uni-ZAP XR | LP03 |
| HBJA HBJB HBJC HBJD HBJE | HUMAN B CELL LYMPHOMA | Uni-ZAP XR | LP03 |
| HBJF HBJG HBJH HBJI HBJJ | | | |
| HBJK | | | |
| HCRA HCRB HCRC | human corpus colosum | Uni-ZAP XR | LP03 |
| HODA HODB HODC HODD | human ovarian cancer | Uni-ZAP XR | LP03 |
| HDSA | Dermatofibrosarcoma Protuberance | Uni-ZAP XR | LP03 |
| HMWA HMWB HMWC HMWD | Bone Marrow Cell Line (RS4; 11) | Uni-ZAP XR | LP03 |
| HMWE HMWF HMWG HMWH | | | |
| HMWI HMWJ | | | |
| HSOA | stomach cancer (human) | Uni-ZAP XR | LP03 |
| HERA | SKIN | Uni-ZAP XR | LP03 |
| HMDA | Brain-medulloblastoma | Uni-ZAP XR | LP03 |
| HGLA HGLB HGLD | Glioblastoma | Uni-ZAP XR | LP03 |
| HEAA | H. Atrophic Endometrium | Uni-ZAP XR | LP03 |
| HBCA HBCB | H. Lymph node breast Cancer | Uni-ZAP XR | LP03 |
| HPWT | Human Prostate BPH, re-excision | Uni-ZAP XR | LP03 |
| HFVG HFVH HFVI | Fetal Liver, subtraction II | pBS | LP03 |
| HNFI | Human Neutrophils, Activated, re- | pBS | LP03 |
| | excision | | |
| HBMB HBMC HBMD | Human Bone Marrow, re-excision | pBS | LP03 |
| HKML HKMM HKMN | H. Kidney Medulla, re-excision | pBS | LP03 |
| HKIX HKIY | H. Kidney Cortex, subtracted | pBS | LP03 |
| HADT | H. Amygdala Depression, | pBS | LP03 |
| | subtracted | | |
| H6AS | Hl-60, untreated, subtracted | Uni-ZAP XR | LP03 |
| H6ES | HL-60, PMA 4 H, subtracted | Uni-ZAP XR | LP03 |
| H6BS | HL-60, RA 4 h, Subtracted | Uni-ZAP XR | LP03 |
| H6CS | HL-60, PMA 1 d, subtracted | Uni-ZAP XR | LP03 |
| HTXJ HTXK | Activated T-cell(12 h)/Thiouridine- | Uni-ZAP XR | LP03 |
| | re-excision | | |
| HMSA HMSB HMSC HMSD | Monocyte activated | Uni-ZAP XR | LP03 |
| HMSE HMSF HMSG HMSH HMSI | | | |
| HMSJ HMSK | | | |
| HAGA HAGB HAGC HAGD | Human Amygdala | Uni-ZAP XR | LP03 |
| HAGE HAGF | | | |
| HSRA HSRB HSRE | STROMAL - OSTEOCLASTOMA | Uni-ZAP XR | LP03 |
| HSRD HSRF HSRG HSRH | Human Osteoclastoma Stromal | Uni-ZAP XR | LP03 |
| | Cells - unamplified | | |
| HSQA HSQB HSQC HSQD HSQE | Stromal cell TF274 | Uni-ZAP XR | LP03 |
| HSQF HSQG | | | |
| HSKA HSKB HSKC HSKD HSKE | Smooth muscle, serum treated | Uni-ZAP XR | LP03 |
| HSKF HSKZ | | | |
| HSLA HSLB HSLC HSLD HSLE | Smooth muscle, control | Uni-ZAP XR | LP03 |
| HSLF HSLG | | | |
| HSDA HSDD HSDE HSDF HSDG | Spinal cord | Uni-ZAP XR | LP03 |
| HSDH | | | |
| HPWS | Prostate-BPH subtracted II | pBS | LP03 |
| HSKW HSKX HSKY | Smooth Muscle- HASTE | pBS | LP03 |
| | normalized | | |
| HFPB HFPC HFPD | H. Frontal cortex, epileptic; re- | Uni-ZAP XR | LP03 |
| | excision | | |
| HSDI HSDJ HSDK | Spinal Cord, re-excision | Uni-ZAP XR | LP03 |
| HSKN HSKO | Smooth Muscle Serum Treated, | pBS | LP03 |
| | Norm | | |
| HSKG HSKH HSKI | Smooth muscle, serum induced, re- | pBS | LP03 |
| | exc | | |
| HFCA HFCB HFCC HFCD HFCE | Human Fetal Brain | Uni-ZAP XR | LP04 |
| HFCF | | | |
| HPTA HPTB HPTD | Human Pituitary | Uni-ZAP XR | LP04 |
| HTHB HTHC HTHD | Human Thymus | Uni-ZAP XR | LP04 |
| HE6B HE6C HE6D HE6E HE6F | Human Whole Six Week Old | Uni-ZAP XR | LP04 |
| HE6G HE6S | Embryo | | |
| HSSA HSSB HSSC HSSD HSSE | Human Synovial Sarcoma | Uni-ZAP XR | LP04 |
| HSSF HSSG HSSH HSSI HSSJ | | | |
| HSSK | | | |
| HE7T | 7 Week Old Early Stage Human, | Uni-ZAP XR | LP04 |
| | subtracted | | |
| HEPA HEPB HEPC | Human Epididymus | Uni-ZAP XR | LP04 |
| HSNA HSNB HSNC HSNM HSNN | Human Synovium | Uni-ZAP XR | LP04 |
| HPFB HPFC HPFD HPFE | Human Prostate Cancer, Stage C | Uni-ZAP XR | LP04 |
| | fraction | | |
| HE2A HE2D HE2E HE2H HE2I | 12 Week Old Early Stage Human | Uni-ZAP XR | LP04 |
| HE2M HE2N HE2O | | | |
| HE2B HE2C HE2F HE2G HE2P | 12 Week Old Early Stage Human, II | Uni-ZAP XR | LP04 |
| HE2Q | | | |
| HPTS HPTT HPTU | Human Pituitary, subtracted | Uni-ZAP XR | LP04 |
| HAUA HAUB HAUC | Amniotic Cells - TNF induced | Uni-ZAP XR | LP04 |
| HAQA HAQB HAQC HAQD | Amniotic Cells - Primary Culture | Uni-ZAP XR | LP04 |
| HWTA HWTB HWTC | wilm's tumor | Uni-ZAP XR | LP04 |
| HBSD | Bone Cancer, re-excision | Uni-ZAP XR | LP04 |
| HSGB | Salivary gland, re-excision | Uni-ZAP XR | LP04 |
| HSJA HSJB HSJC | Smooth muscle-ILb induced | Uni-ZAP XR | LP04 |
| HSXA HSXB HSXC HSXD | Human Substantia Nigra | Uni-ZAP XR | LP04 |
| HSHA HSHB HSHC | Smooth muscle, IL1b induced | Uni-ZAP XR | LP04 |
| HOUA HOUB HOUC HOUD | Adipocytes | Uni-ZAP XR | LP04 |
| HOUE | | | |
| HPWA HPWB HPWC HPWD | Prostate BPH | Uni-ZAP XR | LP04 |
| HPWE | | | |
| HELA HELB HELC HELD HELE | Endothelial cells-control | Uni-ZAP XR | LP04 |
| HELF HELG HELH | | | |
| HEMA HEMB HEMC HEMD | Endothelial-induced | Uni-ZAP XR | LP04 |
| HEME HEMF HEMG HEMH | | | |
| HBIA HBIB HBIC | Human Brain, Striatum | Uni-ZAP XR | LP04 |
| HHSA HHSB HHSC HHSD HHSE | Human Hypothalmus, Schizophrenia | Uni-ZAP XR | LP04 |
| HNGA HNGB HNGC HNGD | neutrophils control | Uni-ZAP XR | LP04 |
| HNGE HNGF HNGG HNGH HNGI | | | |
| HNGJ | | | |
| HNHA HNHB HNHC HNHD | Neutrophils IL-1 and LPS induced | Uni-ZAP XR | LP04 |
| HNHE HNHF HNHG HNHH HNHI | | | |
| HNHJ | | | |
| HSDB HSDC | STRIATUM DEPRESSION | Uni-ZAP XR | LP04 |
| HHPT | Hypothalamus | Uni-ZAP XR | LP04 |
| HSAT HSAU HSAV HSAW HSAX | Anergic T-cell | Uni-ZAP XR | LP04 |
| HSAY HSAZ | | | |
| HBMS HBMT HBMU HBMV | Bone marrow | Uni-ZAP XR | LP04 |
| HBMW HBMX | | | |
| HOEA HOEB HOEC HOED HOEE | Osteoblasts | Uni-ZAP XR | LP04 |
| HOEF HOEJ | | | |
| HAIA HAIB HAIC HAID HAIE | Epithelial-TNFa and INF induced | Uni-ZAP XR | LP04 |
| HAIF | | | |
| HTGA HTGB HTGC HTGD | Apoptotic T-cell | Uni-ZAP XR | LP04 |
| HMCA HMCB HMCC HMCD | Macrophage-oxLDL | Uni-ZAP XR | LP04 |
| HMCE | | | |
| HMAA HMAB HMAC HMAD | Macrophage (GM-CSF treated) | Uni-ZAP XR | LP04 |
| HMAE HMAF HMAG | | | |
| HPHA | Normal Prostate | Uni-ZAP XR | LP04 |
| HPIA HPIB HPIC | LNCAP prostate cell line | Uni-ZAP XR | LP04 |
| HPJA HPJB HPJC | PC3 Prostate cell line | Uni-ZAP XR | LP04 |
| HOSE HOSF HOSG | Human Osteoclastoma, re-excision | Uni-ZAP XR | LP04 |
| HTGE HTGF | Apoptotic T-cell, re-excision | Uni-ZAP XR | LP04 |
| HMAJ HMAK | H Macrophage (GM-CSF treated), | Uni-ZAP XR | LP04 |
| | re-excision | | |
| HACB HACC HACD | Human Adipose Tissue, re-excision | Uni-ZAP XR | LP04 |
| HFPA | H. Frontal Cortex, Epileptic | Uni-ZAP XR | LP04 |
| HFAA HFAB HFAC HFAD HFAE | Alzheimer's, spongy change | Uni-ZAP XR | LP04 |
| HFAM | Frontal Lobe, Dementia | Uni-ZAP XR | LP04 |
| HMIA HMIB HMIC | Human Manic Depression Tissue | Uni-ZAP XR | LP04 |
| HTSA HTSE HTSF HTSG HTSH | Human Thymus | pBS | LP05 |
| HPBA HPBB HPBC HPBD HPBE | Human Pineal Gland | pBS | LP05 |
| HSAA HSAB HSAC | HSA 172 Cells | pBS | LP05 |
| HSBA HSBB HSBC HSBM | HSC172 cells | pBS | LP05 |
| HJAA HJAB HJAC HJAD | Jurkat T-cell G1 phase | pBS | LP05 |
| HJBA HJBB HJBC HJBD | Jurkat T-Cell, S phase | pBS | LP05 |
| HAFA HAFB | Aorta endothelial cells + TNF-a | pBS | LP05 |
| HAWA HAWB HAWC | Human White Adipose | pBS | LP05 |
| HTNA HTNB | Human Thyroid | pBS | LP05 |
| HONA | Normal Ovary, Premenopausal | pBS | LP05 |
| HARA HARB | Human Adult Retina | pBS | LP05 |
| HLJA HLJB | Human Lung | pCMVSport 1 | LP06 |
| HOFM HOFN HOFO | H. Ovarian Tumor, II, OV5232 | pCMVSport 2.0 | LP07 |
| HOGA HOGB HOGC | OV 10-3-95 | pCMVSport 2.0 | LP07 |
| HCGL | CD34+cells, II | pCMVSport 2.0 | LP07 |
| HDLA | Hodgkin's Lymphoma I | pCMVSport 2.0 | LP07 |
| HDTA HDTB HDTC HDTD HDTE | Hodgkin's Lymphoma II | pCMVSport 2.0 | LP07 |
| HKAA HKAB HKAC HKAD | Keratinocyte | pCMVSport2.0 | LP07 |
| HKAE HKAF HKAG HKAH | | | |
| HCIM | CAPFINDER, Crohn's Disease, lib 2 | pCMVSport 2.0 | LP07 |
| HKAL | Keratinocyte, lib 2 | pCMVSport2.0 | LP07 |
| HKAT | Keratinocyte, lib 3 | pCMVSport2.0 | LP07 |
| HNDA | Nasal polyps | pCMVSport2.0 | LP07 |
| HDRA | H. Primary Dendritic Cells, lib 3 | pCMVSport2.0 | LP07 |
| HOHA HOHB HOHC | Human Osteoblasts II | pCMVSport2.0 | LP07 |
| HLDA HLDB HLDC | Liver, Hepatoma | pCMVSport3.0 | LP08 |
| HLDN HLDO HLDP | Human Liver, normal | pCMVSport3.0 | LP08 |
| HMTA | pBMC stimulated w/ poly I/C | pCMVSport3.0 | LP08 |
| HNTA | NTERA2, control | pCMVSport3.0 | LP08 |
| HDPA HDPB HDPC HDPD HDPF | Primary Dendritic Cells, lib 1 | pCMVSport3.0 | LP08 |
| HDPG HDPH HDPI HDPJ HDPK | | | |
| HDPM HDPN HDPO HDPP | Primary Dendritic cells, frac 2 | pCMVSport3.0 | LP08 |
| HMUA HMUB HMUC | Myoloid Progenitor Cell Line | pCMVSport3.0 | LP08 |
| HHEA HHEB HHEC HHED | T Cell helper I | pCMVSport3.0 | LP08 |
| HHEM HHEN HHEO HHEP | T cell helper II | pCMVSport3.0 | LP08 |
| HEQA HEQB HEQC | Human endometrial stromal cells | pCMVSport3.0 | LP08 |
| HJMA HJMB | Human endometrial stromal cells- | pCMVSport3.0 | LP08 |
| | treated with progesterone | | |
| HSWA HSWB HSWC | Human endometrial stromal cells- | pCMVSport3.0 | LP08 |
| | treated with estradiol | | |
| HSYA HSYB HSYC | Human Thymus Stromal Cells | pCMVSport3.0 | LP08 |
| HLWA HLWB HLWC | Human Placenta | pCMVSport3.0 | LP08 |
| HRAA HRAB HRAC | Rejected Kidney, lib 4 | pCMVSport3.0 | LP08 |
| HMTM | PCR, pBMC I/C treated | PCRII | LP09 |
| HMJA | H. Meniingima, M6 | pSport 1 | LP10 |
| HMKA HMKB HMKC HMKD | H. Meningima, M1 | pSport 1 | LP10 |
| HMKE | | | |
| HUSG HUSI | Human umbilical vein endothelial | pSport 1 | LP10 |
| | cells, IL-4 induced | | |
| HUSX HUSY | Human Umbilical Vein Endothelial | pSport 1 | LP10 |
| | Cells, uninduced | | |
| HOFA | Ovarian Tumor I, OV5232 | pSport 1 | LP10 |
| HCFA HCFB HCFC HCFD | T-Cell PHA 16 hrs | pSport 1 | LP10 |
| HCFL HCFM HCFN HCFO | T-Cell PHA 24 hrs | pSport 1 | LP10 |
| HADA HADC HADD HADE | Human Adipose | pSport 1 | LP10 |
| HADF HADG | | | |
| HOVA HOVB HOVC | Human Ovary | pSport 1 | LP10 |
| HTWB HTWC HTWD HTWE | Resting T-Cell Library, II | pSport 1 | LP10 |
| HTWF | | | |
| HMMA | Spleen metastic melanoma | pSport 1 | LP10 |
| HLYA HLYB HLYC HLYD HLYE | Spleen, Chronic lymphocytic | pSport 1 | LP10 |
| | leukemia | | |
| HCGA | CD34+ cell, I | pSport 1 | LP10 |
| HEOM HEON | Human Eosinophils | pSport 1 | LP10 |
| HTDA | Human Tonsil, Lib 3 | pSport 1 | LP10 |
| HSPA | Salivary Gland, Lib 2 | pSport 1 | LP10 |
| HCHA HCHB HCHC | Breast Cancer cell line, MDA 36 | pSport 1 | LP10 |
| HCHM HCHN | Breast Cancer Cell line, angiogenic | pSport 1 | LP10 |
| HCIA | Crohn's Disease | pSport 1 | LP10 |
| HDAA HDAB HDAC | HEL cell line | pSport 1 | LP10 |
| HABA | Human Astrocyte | pSport 1 | LP10 |
| HUFA HUFB HUFC | Ulcerative Colitis | pSport 1 | LP10 |
| HNTM | NTERA2 + retinoic acid, 14 days | pSport 1 | LP10 |
| HDQA | Primary Dendritic cells, CapFinder2, | pSport 1 | LP10 |
| | frac 1 | | |
| HDQM | Primary Dendritic Cells, CapFinder, | pSport 1 | LP10 |
| | frac 2 | | |
| HLDX | Human Liver, normal, CapFinder | pSport 1 | LP10 |
| HULA HULB HULC | Human Dermal Endothelial | pSport1 | LP10 |
| | Cells, untreated | | |
| HUMA | Human Dermal Endothelial | pSport1 | LP10 |
| | cells, treated | | |
| HCJA | Human Stromal Endometrial | pSport1 | LP10 |
| | fibroblasts, untreated | | |
| HCJM | Human Stromal endometrial | pSport1 | LP10 |
| | fibroblasts, treated w/ estradiol | | |
| HEDA | Human Stromal endometrial | pSport1 | LP10 |
| | fibroblasts, treated with | | |
| | progesterone | | |
| HFNA | Human ovary tumor cell OV350721 | pSport1 | LP10 |
| HKGA HKGB HKGC HKGD | Merkel Cells | pSport1 | LP10 |
| HISA HISB HISC | Pancreas Islet Cell Tumor | pSport1 | LP10 |
| HLSA | Skin, burned | pSport1 | LP10 |
| HBZA | Prostate, BPH, Lib 2 | pSport 1 | LP10 |
| HBZS | Prostate BPH, Lib 2, subtracted | pSport 1 | LP10 |
| HFIA HFIB HFIC | Synovial Fibroblasts (control) | pSport 1 | LP10 |
| HFIH HFII HFIJ | Synovial hypoxia | pSport 1 | LP10 |
| HFIT HFIU HFIV | Synovial IL-1/TNF stimulated | pSport 1 | LP10 |
| HGCA | Messangial cell, frac 1 | pSport1 | LP10 |
| HMVA HMVB HMVC | Bone Marrow Stromal Cell, | pSport1 | LP10 |
| | untreated | | |
| HFIX HFIY HFIZ | Synovial Fibroblasts (Il1/TNF), subt | pSport1 | LP10 |
| HFOX HFOY HFOZ | Synovial hypoxia-RSF subtracted | pSport1 | LP10 |
| HMQA HMQB HMQC HMQD | Human Activated Monocytes | Uni-ZAP XR | LP11 |
| HLIA HLIB HLIC | Human Liver | pCMVSport 1 | LP012 |
| HHBA HHBB HHBC HHBD | Human Heart | pCMVSport 1 | LP012 |
| HHBE | | | |
| HBBA HBBB | Human Brain | pCMVSport 1 | LP012 |
| HLJA HLJB HLJC HLJD HLJE | Human Lung | pCMVSport 1 | LP012 |
| HOGA HOGB HOGC | Ovarian Tumor | pCMVSport 2.0 | LP012 |
| HTJM | Human Tonsils, Lib 2 | pCMVSport 2.0 | LP012 |
| HAMF HAMG | KMH2 | pCMVSport 3.0 | LP012 |
| HAJA HAJB HAJC | L428 | pCMVSport 3.0 | LP012 |
| HWBA HWBB HWBC HWBD | Dendritic cells, pooled | pCMVSport 3.0 | LP012 |
| HWBE | | | |
| HWAA HWAB HWAC HWAD | Human Bone Marrow, treated | pCMVSport 3.0 | LP012 |
| HWAE | | | |
| HYAA HYAB HYAC | B Cell lymphoma | pCMVSport 3.0 | LP012 |
| HWHG HWHH HWHI | Healing groin wound, 6.5 hours post | pCMVSport 3.0 | LP012 |
| | incision | | |
| HWHP HWHQ HWHR | Healing groin wound; 7.5 hours | pCMVSport 3.0 | LP012 |
| | post incision | | |
| HARM | Healing groin wound - zero hr post- | pCMVSport 3.0 | LP012 |
| | incision (control) | | |
| HBIM | Olfactory epithelium; nasalcavity | pCMVSport 3.0 | LP012 |
| HWDA | Healing Abdomen wound; 70&90 min | pCMVSport 3.0 | LP012 |
| | post incision | | |
| HWEA | Healing Abdomen Wound; 15 days | pCMVSport 3.0 | LP012 |
| | post incision | | |
| HWJA | Healing Abdomen Wound; 21&29 | pCMVSport 3.0 | LP012 |
| | days | | |
| HNAL | Human Tongue, frac 2 | pSport1 | LP012 |
| HMJA | H. Meniingima, M6 | pSport1 | LP012 |
| HMKA HMKB HMKC HMKD | H. Meningima, M1 | pSport1 | LP012 |
| HMKE | | | |
| HOFA | Ovarian Tumor I, OV5232 | pSport1 | LP012 |
| HCFA HCFB HCFC HCFD | T-Cell PHA 16 hrs | pSport1 | LP012 |
| HCFL HCFM HCFN HCFO | T-Cell PHA 24 hrs | pSport1 | LP012 |
| HMMA HMMB HMMC | Spleen metastic melanoma | pSport1 | LP012 |
| HTDA | Human Tonsil, Lib 3 | pSport1 | LP012 |
| HDBA | Human Fetal Thymus | pSport1 | LP012 |
| HDUA | Pericardium | pSport1 | LP012 |
| HBZA | Prostate, BPH, Lib 2 | pSport1 | LP012 |
| HWCA | Larynx tumor | pSport1 | LP012 |
| HWKA | Normal lung | pSport1 | LP012 |
| HSMB | Bone marrow stroma, treated | pSport1 | LP012 |
| HBHM | Normal trachea | pSport1 | LP012 |
| HLFC | Human Larynx | pSport1 | LP012 |
| HLRB | Siebben Polyposis | pSport1 | LP012 |
| HNIA | Mammary Gland | pSport1 | LP012 |
| HNJB | Palate carcinoma | pSport1 | LP012 |
| HNKA | Palate normal | pSport1 | LP012 |
| HMZA | Pharynx carcinoma | pSport1 | LP012 |
| HABG | Cheek Carcinoma | pSport1 | LP012 |
| HMZM | Pharynx Carcinoma | pSport1 | LP012 |
| HDRM | Larynx Carcinoma | pSport1 | LP012 |
| HVAA | Pancreas normal PCA4 No | pSport1 | LP012 |
| HICA | Tongue carcinoma | pSport1 | LP012 |
| HUKA HUKB HUKC HUKD | Human Uterine Cancer | Lambda ZAP II | LP013 |
| HUKE | | | |
| HFFA | Human Fetal Brain, random primed | Lambda ZAP II | LP013 |
| HTUA | Activated T-cell labeled with 4- | Lambda ZAP II | LP013 |
| | thioluri | | |
| HBQA | Early Stage Human Brain, random | Lambda ZAP II | LP013 |
| | primed | | |
| HMEB | Human microvascular Endothelial | Lambda ZAP II | LP013 |
| | cells, fract. B | | |
| HUSH | Human Umbilical Vein Endothelial | Lambda ZAP II | LP013 |
| | cells, fract. A, re-excision | | |
| HLQC HLQD | Hepatocellular tumor, re-excision | Lambda ZAP II | LP013 |
| HTWJ HTWK HTWL | Resting T-cell, re-excision | Lambda ZAP II | LP013 |
| HF6S | Human Whole 6 week Old Embryo | pBluescript | LP013 |
| | (II), subt | | |
| HHPS | Human Hippocampus, subtracted | pBluescript | LP013 |
| HL1S | LNCAP, differential expression | pBluescript | LP013 |
| HLHS HLHT | Early Stage Human Lung, | pBluescript | LP013 |
| | Subtracted | | |
| HSUS | Supt cells, cyclohexamide treated, | pBluescript | LP013 |
| | subtracted | | |
| HSUT | Supt cells, cyclohexamide treated, | pBluescript | LP013 |
| | differentially expressed | | |
| HSDS | H. Striatum Depression, subtracted | pBluescript | LP013 |
| HPTZ | Human Pituitary, Subtracted VII | pBluescript | LP013 |
| HSDX | H. Striatum Depression, subt II | pBluescript | LP013 |
| HSDZ | H. Striatum Depression, subt | pBluescript | LP013 |
| HPBA HPBB HPBC HPBD HPBE | Human Pineal Gland | pBluescript SK− | LP013 |
| HRTA | Colorectal Tumor | pBluescript SK− | LP013 |
| HSBA HSBB HSBC HSBM | HSC172 cells | pBluescript SK− | LP013 |
| HJAA HJAB HJAC HJAD | Jurkat T-cell G1 phase | pBluescript SK− | LP013 |
| HJBA HJBB HJBC HJBD | Jurkat T-cell, S1 phase | pBluescript SK− | LP013 |
| HTNA HTNB | Human Thyroid | pBluescript SK− | LP013 |
| HAHA HAHB | Human Adult Heart | Uni-ZAP XR | LP013 |
| HE6A | Whole 6 week Old Embryo | Uni-ZAP XR | LP013 |
| HFCA HFCB HFCC HFCD HFCE | Human Fetal Brain | Uni-ZAP XR | LP013 |
| HFKC HFKD HFKE HFKF HFKG | Human Fetal Kidney | Uni-ZAP XR | LP013 |
| HGBA HGBD HGBE HGBF | Human Gall Bladder | Uni-ZAP XR | LP013 |
| HGBG | | | |
| HPRA HPRB HPRC HPRD | Human Prostate | Uni-ZAP XR | LP013 |
| HTEA HTEB HTEC HTED HTEE | Human Testes | Uni-ZAP XR | LP013 |
| HTTA HTTB HTTC HTTD HTTE | Human Testes Tumor | Uni-ZAP XR | LP013 |
| HYBA HYBB | Human Fetal Bone | Uni-ZAP XR | LP013 |
| HFLA | Human Fetal Liver | Uni-ZAP XR | LP013 |
| HHFB HHFC HHFD HHFE HHFF | Human Fetal Heart | Uni-ZAP XR | LP013 |
| HUVB HUVC HUVD HUVE | Human Umbilical Vein, End. | Uni-ZAP XR | LP013 |
| | remake | | |
| HTHB HTHC HTHD | Human Thymus | Uni-ZAP XR | LP013 |
| HSTA HSTB HSTC HSTD | Human Skin Tumor | Uni-ZAP XR | LP013 |
| HTAA HTAB HTAC HTAD HTAE | Human Activated T-cells | Uni-ZAP XR | LP013 |
| HFEA HFEB HFEC | Human Fetal Epithelium (skin) | Uni-ZAP XR | LP013 |
| HJPA HJPB HJPC HJPD | Human Jurkat Membrane Bound | Uni-ZAP XR | LP013 |
| | Polysomes | | |
| HESA | Human Epithelioid Sarcoma | Uni-ZAP XR | LP013 |
| HALS | Human Adult Liver, Subtracted | Uni-ZAP XR | LP013 |
| HFTA HFTB HFTC HFTD | Human Fetal Dura Mater | Uni-ZAP XR | LP013 |
| HCAA HCAB HCAC | Cem cells, cyclohexamide treated | Uni-ZAP XR | LP013 |
| HRGA HRGB HRGC HRGD | Raji Cells, cyclohexamide treated | Uni-ZAP XR | LP013 |
| HE9A HE9B HE9C HE9D HE9E | Nine Week Old Early Stage Human | Uni-ZAP XR | LP013 |
| HSFA | Human Fibrosarcoma | Uni-ZAP XR | LP013 |
| HATA HATB HATC HATD HATE | Human Adrenal Gland Tumor | Uni-ZAP XR | LP013 |
| HTRA | Human Trachea Tumor | Uni-ZAP XR | LP013 |
| HE2A HE2D HE2E HE2H HE2I | 12 Week Old Early Stage Human | Uni-ZAP XR | LP013 |
| HE2B HE2C HE2F HE2G HE2P | 12 Week Old Early Stage Human, II | Uni-ZAP XR | LP013 |
| HNEA HNEB HNEC HNED HNEE | Human Neutrophil | Uni-ZAP XR | LP013 |
| HBGA | Human Primary Breast Cancer | Uni-ZAP XR | LP013 |
| HPTS HPTT HPTU | Human Pituitary, subtracted | Uni-ZAP XR | LP013 |
| HMQA HMQB HMQC HMQD | Human Activated Monocytes | Uni-ZAP XR | LP013 |
| HOAA HOAB HOAC | Human Osteosarcoma | Uni-ZAP XR | LP013 |
| HTOA HTOD HTOE HTOF HTOG | human tonsils | Uni-ZAP XR | LP013 |
| HMGB | Human OB MG63 control fraction I | Uni-ZAP XR | LP013 |
| HOPB | Human OB HOS control fraction I | Uni-ZAP XR | LP013 |
| HOQB | Human OB HOS treated (1 nM E2) | Uni-ZAP XR | LP013 |
| | fraction I | | |
| HAUA HAUB HAUC | Amniotic Cells - TNF induced | Uni-ZAP XR | LP013 |
| HAQA HAQB HAQC HAQD | Amniotic Cells - Primary Culture | Uni-ZAP XR | LP013 |
| HROA HROC | HUMAN STOMACH | Uni-ZAP XR | LP013 |
| HBJA HBJB HBJC HBJD HBJE | HUMAN B CELL LYMPHOMA | Uni-ZAP XR | LP013 |
| HODA HODB HODC HODD | human ovarian cancer | Uni-ZAP XR | LP013 |
| HCPA | Corpus Callosum | Uni-ZAP XR | LP013 |
| HSOA | stomach cancer (human) | Uni-ZAP XR | LP013 |
| HERA | SKIN | Uni-ZAP XR | LP013 |
| HMDA | Brain-medulloblastoma | Uni-ZAP XR | LP013 |
| HGLA HGLB HGLD | Glioblastoma | Uni-ZAP XR | LP013 |
| HWTA HWTB HWTC | wilm's tumor | Uni-ZAP XR | LP013 |
| HEAA | H. Atrophic Endometrium | Uni-ZAP XR | LP013 |
| HAPN HAPO HAPP HAPQ HAPR | Human Adult Pulmonary; re- | Uni-ZAP XR | LP013 |
| | excision | | |
| HLTG HLTH | Human T-cell lymphoma; re- | Uni-ZAP XR | LP013 |
| | excision | | |
| HAHC HAHD HAHE | Human Adult Heart; re-excision | Uni-ZAP XR | LP013 |
| HAGA HAGB HAGC HAGD | Human Amygdala | Uni-ZAP XR | LP013 |
| HAGE | | | |
| HSJA HSJB HSJC | Smooth muscle-ILb induced | Uni-ZAP XR | LP013 |
| HSHA HSHB HSHC | Smooth muscle, IL1b induced | Uni-ZAP XR | LP013 |
| HPWA HPWB HPWC HPWD | Prostate BPH | Uni-ZAP XR | LP013 |
| HPWE | | | |
| HPIA HPIB HPIC | LNCAP prostate cell line | Uni-ZAP XR | LP013 |
| HPJA HPJB HPJC | PC3 Prostate cell line | Uni-ZAP XR | LP013 |
| HBTA | Bone Marrow Stroma, TNF&LPS | Uni-ZAP XR | LP013 |
| | ind | | |
| HMCF HMCG HMCH HMCI | Macrophage-oxLDL; re-excision | Uni-ZAP XR | LP013 |
| HMCJ | | | |
| HAGG HAGH HAGI | Human Amygdala; re-excision | Uni-ZAP XR | LP013 |
| HACA | H. Adipose Tissue | Uni-ZAP XR | LP013 |
| HKFB | K562 + PMA (36 hrs), re-excision | ZAP Express | LP013 |
| HCWT HCWU HCWV | CD34 positive cells (cord blood), re- | ZAP Express | LP013 |
| | ex | | |
| HBWA | Whole brain | ZAP Express | LP013 |
| HBXA HBXB HBXC HBXD | Human Whole Brain #2 - Oligo dT | ZAP Express | LP013 |
| | >1.5 Kb | | |
| HAVM | Temporal cortex-Alzheizmer | pT-Adv | LP014 |
| HAVT | Hippocampus, Alzheimer | pT-Adv | LP014 |
| | Subtracted | | |
| HHAS | CHME Cell Line | Uni-ZAP XR | LP014 |
| HAJR | Larynx normal | pSport 1 | LP014 |
| HWLE HWLF HWLG HWLH | Colon Normal | pSport 1 | LP014 |
| HCRM HCRN HCRO | Colon Carcinoma | pSport 1 | LP014 |
| HWLI HWLJ HWLK | Colon Normal | pSport 1 | LP014 |
| HWLQ HWLR HWLS HWLT | Colon Tumor | pSport 1 | LP014 |
| HBFM | Gastrocnemius Muscle | pSport 1 | LP014 |
| HBOD HBOE | Quadriceps Muscle | pSport 1 | LP014 |
| HBKD HBKE | Soleus Muscle | pSport 1 | LP014 |
| HCCM | Pancreatic Langerhans | pSport 1 | LP014 |
| HWGA | Larynx carcinoma | pSport 1 | LP014 |
| HWGM HWGN | Larynx carcinoma | pSport 1 | LP014 |
| HWLA HWLB HWLC | Normal colon | pSport 1 | LP014 |
| HWLM HWLN | Colon Tumor | pSport 1 | LP014 |
| HVAM HVAN HVAO | Pancreas Tumor | pSport 1 | LP014 |
| HWGQ | Larynx carcinoma | pSport 1 | LP014 |
| HAQM HAQN | Salivary Gland | pSport 1 | LP014 |
| HASM | Stomach; normal | pSport 1 | LP014 |
| HBCM | Uterus; normal | pSport 1 | LP014 |
| HCDM | Testis; normal | pSport 1 | LP014 |
| HDJM | Brain; normal | pSport 1 | LP014 |
| HEFM | Adrenal Gland, normal | pSport 1 | LP014 |
| HBAA | Rectum normal | pSport 1 | LP014 |
| HFDM | Rectum tumour | pSport 1 | LP014 |
| HGAM | Colon, normal | pSport 1 | LP014 |
| HHMM | Colon, tumour | pSport 1 | LP014 |
| HCLB HCLC | Human Lung Cancer | Lambda Zap II | LP015 |
| HRLA | L1 Cell line | ZAP Express | LP015 |
| HHAM | Hypothalamus, Alzheimer's | pCMVSport 3.0 | LP015 |
| HKBA | Ku 812F Basophils Line | pSport 1 | LP015 |
| HS2S | Saos2, Dexamethosome Treated | pSport 1 | LP016 |
| HA5A | Lung Carcinoma A549 TNFalpha | pSport 1 | LP016 |
| | activated | | |
| HTFM | TF-1 Cell Line GM-CSF Treated | pSport 1 | LP016 |
| HYAS | Thyroid Tumour | pSport 1 | LP016 |
| HUTS | Larynx Normal | pSport 1 | LP016 |
| HXOA | Larynx Tumor | pSport 1 | LP016 |
| HEAH | Ea.hy.926 cell line | pSport 1 | LP016 |
| HINA | Adenocarcinoma Human | pSport 1 | LP016 |
| HRMA | Lung Mesothelium | pSport 1 | LP016 |
| HLCL | Human Pre-Differentiated | Uni-Zap XR | LP017 |
| | Adipocytes | | |
| HS2A | Saos2 Cells | pSport 1 | LP020 |
| HS2I | Saos2 Cells; Vitamin D3 Treated | pSport 1 | LP020 |
| HUCM | CHME Cell Line, untreated | pSport 1 | LP020 |
| HEPN | Aryepiglottis Normal | pSport 1 | LP020 |
| HPSN | Sinus Piniformis Tumour | pSport 1 | LP020 |
| HNSA | Stomach Normal | pSport 1 | LP020 |
| HNSM | Stomach Tumour | pSport 1 | LP020 |
| HNLA | Liver Normal Met5No | pSport 1 | LP020 |
| HUTA | Liver Tumour Met 5 Tu | pSport 1 | LP020 |
| HOCN | Colon Normal | pSport 1 | LP020 |
| HOCT | Colon Tumor | pSport 1 | LP020 |
| HTNT | Tongue Tumour | pSport 1 | LP020 |
| HLXN | Larynx Normal | pSport 1 | LP020 |
| HLXT | Larynx Tumour | pSport 1 | LP020 |
| HTYN | Thymus | pSport 1 | LP020 |
| HPLN | Placenta | pSport 1 | LP020 |
| HTNG | Tongue Normal | pSport 1 | LP020 |
| HZAA | Thyroid Normal (SDCA2 No) | pSport 1 | LP020 |
| HWES | Thyroid Thyroiditis | pSport 1 | LP020 |
| HFHD | Ficolled Human Stromal Cells, 5Fu | pTrip1Ex2 | LP021 |
| | treated | | |
| HFHM, HFHN | Ficolled Human Stromal Cells, | pTrip1Ex2 | LP021 |
| | Untreated | | |
| HPCI | Hep G2 Cells, lambda library | lambda Zap-CMV XR | LP021 |
| HBCA, HBCB, HBCC | H. Lymph node breast Cancer | Uni-ZAP XR | LP021 |
| HCOK | Chondrocytes | pSPORT1 | LP022 |
| HDCA, HDCB, HDCC | Dendritic Cells From CD34 Cells | pSPORT1 | LP022 |
| HDMA, HDMB | CD40 activated monocyte dendritic | pSPORT1 | LP022 |
| | cells | | |
| HDDM, HDDN, HDDO | LPS activated derived dendritic | pSPORT1 | LP022 |
| | cells | | |
| HPCR | Hep G2 Cells, PCR library | lambda Zap-CMV XR | LP022 |
| HAAA, HAAB, HAAC | Lung, Cancer (4005313A3): | pSPORT1 | LP022 |
| | Invasive Poorly Differentiated Lung | | |
| | Adenocarcinoma | | |
| HIPA, HIPB, HIPC | Lung, Cancer (4005163 B7): | pSPORT1 | LP022 |
| | Invasive, Poorly Diff. | | |
| | Adenocarcinoma, Metastatic | | |
| HOOH, HOOI | Ovary, Cancer: (4004562 B6) | pSPORT1 | LP022 |
| | Papillary Serous Cystic Neoplasm, | | |
| | Low Malignant Pot | | |
| HIDA | Lung, Normal: (4005313 B1) | pSPORT1 | LP022 |
| HUJA, HUJB, HUJC, HUJD, HUJE | B-Cells | pCMVSport 3.0 | LP022 |
| HNOA, HNOB, HNOC, HNOD | Ovary, Normal: (9805C040R) | pSPORT1 | LP022 |
| HNLM | Lung, Normal: (4005313 B1) | pSPORT1 | LP022 |
| HSCL | Stromal Cells | pSPORT1 | LP022 |
| HAAX | Lung, Cancer: (4005313 A3) | pSPORT1 | LP022 |
| | Invasive Poorly-differentiated | | |
| | Metastatic lung adenocarcinoma | | |
| HUUA, HUUB, HUUC, HUUD | B-cells (unstimulated) | pTrip1Ex2 | LP022 |
| HWWA, HWWB, HWWC, HWWD, | B-cells (stimulated) | pSPORT1 | LP022 |
| HWWE, HWWF, HWWG | | | |
| HCCC | Colon, Cancer: (9808C064R) | pCMVSport 3.0 | LP023 |
| HPDO HPDP HPDQ HPDR HPD | Ovary, Cancer (9809C332): Poorly | pSport 1 | LP023 |
| | differentiated adenocarcinoma | | |
| HPCO HPCP HPCQ HPCT | Ovary, Cancer (15395A1F): Grade | pSport 1 | LP023 |
| | II Papillary Carcinoma | | |
| HOCM HOCO HOCP HOCQ | Ovary, Cancer: (15799A1F) Poorly | pSport 1 | LP023 |
| | differentiated carcinoma | | |
| HCBM HCBN HCBO | Breast, Cancer: (4004943 A5) | pSport 1 | LP023 |
| HNBT HNBU HNBV | Breast, Normal: (4005522B2) | pSport 1 | LP023 |
| HBCP HBCQ | Breast, Cancer: (4005522 A2) | pSport 1 | LP023 |
| HBCJ | Breast, Cancer: (9806C012R) | pSport 1 | LP023 |
| HSAM HSAN | Stromal cells 3.88 | pSport 1 | LP023 |
| HVCA HVCB HVCC HVCD | Ovary, Cancer: (4004332 A2) | pSport 1 | LP023 |
| HSCK HSEN HSEO | Stromal cells (HBM3.18) | pSport 1 | LP023 |
| HSCP HSCQ | stromal cell clone 2.5 | pSport 1 | LP023 |
| HUXA | Breast Cancer: (4005385 A2) | pSport 1 | LP023 |
| HCOM HCON HCOO HCOP | Ovary, Cancer (4004650 A3): Well- | pSport 1 | LP023 |
| HCOQ | Differentiated Micropapillary | | |
| | Serous Carcinoma | | |
| HBNM | Breast, Cancer: (9802C020E) | pSport 1 | LP023 |
| HVVA HVVB HVVC HVVD | Human Bone Marrow, treated | pSport 1 | LP023 |
| HVVE | | | |

[1009] Two nonlimiting examples are provided below for isolating a particular clone from the deposited sample of plasmid cDNAs cited for that clone in Table 7. First, a plasmid is directly isolated by screening the clones using a polynucleotide probe corresponding to the nucleotide sequence of SEQ ID NO:X.

[1010] Particularly, a specific polynucleotide with 30-40 nucleotides is synthesized using an Applied Biosystems DNA synthesizer according to the sequence reported. The oligonucleotide is labeled, for instance, with ³²P-γ-ATP using T4 polynucleotide kinase and purified according to routine methods. (E.g., Maniatis et al., Molecular Cloning: A Laboratory Manual, Cold Spring Harbor Press, Cold Spring, N.Y. (1982)). The plasmid mixture is transformed into a suitable host, as indicated above (such as XL-1 Blue (Stratagene)) using techniques known to those of skill in the art, such as those provided by the vector supplier or in related publications or patents cited above. The transformants are plated on 1.5% agar plates (containing the appropriate selection agent, e.g., ampicillin) to a density of about 150 transformants (colonies) per plate. These plates are screened using Nylon membranes according to routine methods for bacterial colony screening (e.g., Sambrook et al., Molecular Cloning: A Laboratory Manual, 2nd Edit., (1989), Cold Spring Harbor Laboratory Press, pages 1.93 to 1.104), or other techniques known to those of skill in the art.

[1011] Alternatively, two primers of 17-20 nucleotides derived from both ends of the nucleotide sequence of SEQ ID NO:X are synthesized and used to amplify the desired cDNA using the deposited cDNA plasmid as a template. The polymerase chain reaction is carried out under routine conditions, for instance, in 25 μl of reaction mixture with 0.5 ug of the above cDNA template. A convenient reaction mixture is 1.5-5 mM MgCl₂, 0.01% (w/v) gelatin, 20 μM each of dATP, dCTP, dGTP, dTTP, 25 pmol of each primer and 0.25 Unit of Taq polymerase. Thirty five cycles of PCR (denaturation at 94° C. for 1 min; annealing at 55° C. for 1 min; elongation at 72° C. for 1 min) are performed with a Perkin-Elmer Cetus automated thermal cycler. The amplified product is analyzed by agarose gel electrophoresis and the DNA band with expected molecular weight is excised and purified. The PCR product is verified to be the selected sequence by subcloning and sequencing the DNA product.

[1012] Several methods are available for the identification of the 5′ or 3′ non-coding portions of a gene which may not be present in the deposited clone. These methods include but are not limited to, filter probing, clone enrichment using specific probes, and protocols similar or identical to 5′ and 3 “RACE” protocols which are well known in the art. For instance, a method similar to 5′ RACE is available for generating the missing 5′ end of a desired full-length transcript. (Fromont-Racine et al., Nucleic Acids Res. 21(7):1683-1684 (1993)).

[1013] Briefly, a specific RNA oligonucleotide is ligated to the 5′ ends of a population of RNA presumably containing full-length gene RNA transcripts. A primer set containing a primer specific to the ligated RNA oligonucleotide and a primer specific to a known sequence of the gene of interest is used to PCR amplify the 5′ portion of the desired full-length gene. This amplified product may then be sequenced and used to generate the full length gene.

[1014] This above method starts with total RNA isolated from the desired source, although poly-A+ RNA can be used. The RNA preparation can then be treated with phosphatase if necessary to eliminate 5′ phosphate groups on degraded or damaged RNA which may interfere with the later RNA ligase step. The phosphatase should then be inactivated and the RNA treated with tobacco acid pyrophosphatase in order to remove the cap structure present at the 5′ ends of messenger RNAs. This reaction leaves a 5′ phosphate group at the 5′ end of the cap cleaved RNA which can then be ligated to an RNA oligonucleotide using T4 RNA ligase.

[1015] This modified RNA preparation is used as a template for first strand cDNA synthesis using a gene specific oligonucleotide. The first strand synthesis reaction is used as a template for PCR amplification of the desired 5′ end using a primer specific to the ligated RNA oligonucleotide and a primer specific to the known sequence of the gene of interest. The resultant product is then sequenced and analyzed to confirm that the 5′ end sequence belongs to the desired gene.

### Example 2

### Isolation of Genomic Clones Corresponding to a Polynucleotide

[1016] A human genomic P1 library (Genomic Systems, Inc.) is screened by PCR using primers selected for the sequence corresponding to SEQ ID NO:X according to the method described in Example 1. (See also, Sambrook.)

### Example 3

### Tissue Specific Expression Analysis

[1017] The Human Genome Sciences, Inc. (HGS) database is derived from sequencing tissue and/or disease specific cDNA libraries. Libraries generated from a particular tissue are selected and the specific tissue expression pattern of EST groups or assembled contigs within these libraries is determined by comparison of the expression patterns of those groups or contigs within the entire database. ESTs and assembled contigs which show tissue specific expression are selected.

[1018] The original clone from which the specific EST sequence was generated, or in the case of an assembled contig, the clone from which the 5′ most EST sequence was generated, is obtained from the catalogued library of clones and the insert amplified by PCR using methods known in the art. The PCR product is denatured and then transferred in 96 or 384 well format to a nylon membrane (Schleicher and Scheull) generating an array filter of tissue specific clones. Housekeeping genes, maize genes, and known tissue specific genes are included on the filters. These targets can be used in signal normalization and to validate assay sensitivity. Additional targets are included to monitor probe length and specificity of hybridization.

[1019] Radioactively labeled hybridization probes are generated by first strand cDNA synthesis per the manufacturer's instructions (Life Technologies) from mRNA/RNA samples prepared from the specific tissue being analyzed (e.g., prostate, prostate cancer, ovarian, ovarian cancer, etc.). The hybridization probes are purified by gel exclusion chromatography, quantitated, and hybridized with the array filters in hybridization bottles at 65° C. overnight. The filters are washed under stringent conditions and signals are captured using a Fuji phosphorimager.

[1020] Data is extracted using AIS software and following background subtraction, signal normalization is performed. This includes a normalization of filter-wide expression levels between different experimental runs. Genes that are differentially expressed in the tissue of interest are identified.

### Example 4

### Chromosomal Mapping of the Polynucleotides

[1021] An oligonucleotide primer set is designed according to the sequence at the 5′ end of SEQ ID NO:X. This primer preferably spans about 100 nucleotides. This primer set is then used in a polymerase chain reaction under the following set of conditions: 30 seconds, 95° C.; 1 minute, 56° C.; 1 minute, 70° C. This cycle is repeated 32 times followed by one 5 minute cycle at 70° C. Human, mouse, and hamster DNA is used as template in addition to a somatic cell hybrid panel containing individual chromosomes or chromosome fragments (Bios, Inc). The reactions are analyzed on either 8% polyacrylamide gels or 3.5% agarose gels. Chromosome mapping is determined by the presence of an approximately 100 bp PCR fragment in the particular somatic cell hybrid.

### Example 5

### Bacterial Expression of a Polypeptide

[1022] A polynucleotide encoding a polypeptide of the present invention is amplified using PCR oligonucleotide primers corresponding to the 5′ and 3′ ends of the DNA sequence, as outlined in Example 1, to synthesize insertion fragments. The primers used to amplify the cDNA insert should preferably contain restriction sites, such as BamHI and XbaI, at the 5′ end of the primers in order to clone the amplified product into the expression vector. For example, BamHI and XbaI correspond to the restriction enzyme sites on the bacterial expression vector pQE-9. (Qiagen, Inc., Chatsworth, Calif.). This plasmid vector encodes antibiotic resistance (Amp^{r}), a bacterial origin of replication (ori), an IPTG-regulatable promoter/operator (P/O), a ribosome binding site (RBS), a 6-histidine tag (6-His), and restriction enzyme cloning sites.

[1023] The pQE-9 vector is digested with BamHI and XbaI and the amplified fragment is ligated into the pQE-9 vector maintaining the reading frame initiated at the bacterial RBS. The ligation mixture is then used to transform the E. coli strain M15/rep4 (Qiagen, Inc.) which contains multiple copies of the plasmid pREP4, which expresses the lacI repressor and also confers kanamycin resistance (Kan^{r}). Transformants are identified by their ability to grow on LB plates and ampicillin/kanamycin resistant colonies are selected. Plasmid DNA is isolated and confirmed by restriction analysis.

[1024] Clones containing the desired constructs are grown overnight (O/N) in liquid culture in LB media supplemented with both Amp (100 ug/ml) and Kan (25 ug/ml). The O/N culture is used to inoculate a large culture at a ratio of 1:100 to 1:250. The cells are grown to an optical density 600 (O.D.⁶⁰⁰) of between 0.4 and 0.6. IPTG (Isopropyl-B-D-thiogalacto pyranoside) is then added to a final concentration of 1 mM. IPTG induces by inactivating the lacI repressor, clearing the P/O leading to increased gene expression.

[1025] Cells are grown for an extra 3 to 4 hours. Cells are then harvested by centrifugation (20 mins at 6000×g). The cell pellet is solubilized in the chaotropic agent 6 Molar Guanidine HCl by stirring for 3-4 hours at 4° C. The cell debris is removed by centrifugation, and the supernatant containing the polypeptide is loaded onto a nickel-nitrilo-tri-acetic acid (“Ni-NTA”) affinity resin column (available from QIAGEN, Inc., supra). Proteins with a 6×His tag bind to the Ni-NTA resin with high affinity and can be purified in a simple one-step procedure (for details see: The QIAexpressionist (1995) QIAGEN, Inc., supra).

[1026] Briefly, the supernatant is loaded onto the column in 6 M guanidine-HC, pH 8. The column is first washed with 10 volumes of 6 M guanidine-HCR, pH 8, then washed with 10 volumes of 6 M guanidine-HCR pH 6, and finally the polypeptide is eluted with 6 M guanidine-HCR, pH 5.

[1027] The purified protein is then renatured by dialyzing it against phosphate-buffered saline (PBS) or 50 mM Na-acetate, pH 6 buffer plus 200 mM NaCl. Alternatively, the protein can be successfully refolded while immobilized on the Ni-NTA column. The recommended conditions are as follows: renature using a linear 6M-1M urea gradient in 500 mM NaCl, 20% glycerol, 20 mM Tris/HCR pH 7.4, containing protease inhibitors. The renaturation should be performed over a period of 1.5 hours or more. After renaturation the proteins are eluted by the addition of 250 mM immidazole. Immidazole is removed by a final dialyzing step against PBS or 50 mM sodium acetate pH 6 buffer plus 200 mM NaCl. The purified protein is stored at 4° C. or frozen at −80° C.

[1028] In addition to the above expression vector, the present invention further includes an expression vector, called pHE4a (ATCC Accession Number 209645, deposited on Feb. 25, 1998) which contains phage operator and promoter elements operatively linked to a polynucleotide of the present invention, called pHE4a. (ATCC Accession Number 209645, deposited on Feb. 25, 1998.) This vector contains: 1) a neomycinphosphotransferase gene as a selection marker, 2) an E. coli origin of replication, 3) a T5 phage promoter sequence, 4) two lac operator sequences, 5) a Shine-Delgarno sequence, and 6) the lactose operon repressor gene (lacIq). The origin of replication (oriC) is derived from pUC19 (LTI, Gaithersburg, Md.). The promoter and operator sequences are made synthetically.

[1029] DNA can be inserted into the pHE4a by restricting the vector with NdeI and XbaI, BamHI, XhoI, or Asp718, running the restricted product on a gel, and isolating the larger fragment (the stuffer fragment should be about 310 base pairs). The DNA insert is generated according to the PCR protocol described in Example 1, using PCR primers having restriction sites for NdeI (5′ primer) and XbaI, BamHI, XhoI, or Asp718 (3′ primer). The PCR insert is gel purified and restricted with compatible enzymes. The insert and vector are ligated according to standard protocols.

[1030] The engineered vector could easily be substituted in the above protocol to express protein in a bacterial system.

### Example 6

### Purification of a Polypeptide from an Inclusion Body

[1031] The following alternative method can be used to purify a polypeptide expressed in E. coli when it is present in the form of inclusion bodies. Unless otherwise specified, all of the following steps are conducted at 4-10° C.

[1032] Upon completion of the production phase of the E. coli fermentation, the cell culture is cooled to 4-10° C. and the cells harvested by continuous centrifugation at 15,000 rpm (Heraeus Sepatech). On the basis of the expected yield of protein per unit weight of cell paste and the amount of purified protein required, an appropriate amount of cell paste, by weight, is suspended in a buffer solution containing 100 mM Tris, 50 mM EDTA, pH 7.4. The cells are dispersed to a homogeneous suspension using a high shear mixer.

[1033] The cells are then lysed by passing the solution through a microfluidizer (Microfuidics, Corp. or APV Gaulin, Inc.) twice at 4000-6000 psi. The homogenate is then mixed with NaCl solution to a final concentration of 0.5 M NaCl, followed by centrifugation at 7000×g for 15 min. The resultant pellet is washed again using 0.5M NaCl, 100 mM Tris, 50 mM EDTA, pH 7.4.

[1034] The resulting washed inclusion bodies are solubilized with 1.5 M guanidine hydrochloride (GuHCl) for 2-4 hours. After 7000×g centrifugation for 15 min., the pellet is discarded and the polypeptide containing supernatant is incubated at 4° C. overnight to allow further GuHCl extraction.

[1035] Following high speed centrifugation (30,000×g) to remove insoluble particles, the GuHCl solubilized protein is refolded by quickly mixing the GuHCl extract with 20 volumes of buffer containing 50 mM sodium, pH 4.5, 150 mM NaCl, 2 mM EDTA by vigorous stirring. The refolded diluted protein solution is kept at 4° C. without mixing for 12 hours prior to further purification steps.

[1036] To clarify the refolded polypeptide solution, a previously prepared tangential filtration unit equipped with 0.16 μm membrane filter with appropriate surface area (e.g., Filtron), equilibrated with 40 mM sodium acetate, pH 6.0 is employed. The filtered sample is loaded onto a cation exchange resin (e.g., Poros HS-50, Perseptive Biosystems). The column is washed with 40 mM sodium acetate, pH 6.0 and eluted with 250 mM, 500 mM, 1000 mM, and 1500 mM NaCl in the same buffer, in a stepwise manner. The absorbance at 280 nm of the effluent is continuously monitored. Fractions are collected and further analyzed by SDS-PAGE.

[1037] Fractions containing the polypeptide are then pooled and mixed with 4 volumes of water. The diluted sample is then loaded onto a previously prepared set of tandem columns of strong anion (Poros HQ-50, Perseptive Biosystems) and weak anion (Poros CM-20, Perseptive Biosystems) exchange resins. The columns are equilibrated with 40 mM sodium acetate, pH 6.0. Both columns are washed with 40 mM sodium acetate, pH 6.0, 200 mM NaCl. The CM-20 column is then eluted using a 10 column volume linear gradient ranging from 0.2 M NaCl, 50 mM sodium acetate, pH 6.0 to 1.0 M NaCl, 50 mM sodium acetate, pH 6.5. Fractions are collected under constant A₂₈₀ monitoring of the effluent. Fractions containing the polypeptide (determined, for instance, by 16% SDS-PAGE) are then pooled.

[1038] The resultant polypeptide should exhibit greater than 95% purity after the above refolding and purification steps. No major contaminant bands should be observed from Commassie blue stained 16% SDS-PAGE gel when 5 μg of purified protein is loaded. The purified protein can also be tested for endotoxin/LPS contamination, and typically the LPS content is less than 0.1 ng/ml according to LAL assays.

### Example 7

### Cloning and Expression of a Polypeptide in a Baculovirus Expression System

[1039] In this example, the plasmid shuttle vector pA2 is used to insert a polynucleotide into a baculovirus to express a polypeptide. This expression vector contains the strong polyhedrin promoter of the Autographa californica nuclear polyhedrosis virus (AcMNPV) followed by convenient restriction sites such as BamHI, Xba I and Asp718. The polyadenylation site of the simian virus 40 (“SV40”) is used for efficient polyadenylation. For easy selection of recombinant virus, the plasmid contains the beta-galactosidase gene from E. coli under control of a weak Drosophila promoter in the same orientation, followed by the polyadenylation signal of the polyhedrin gene. The inserted genes are flanked on both sides by viral sequences for cell-mediated homologous recombination with wild-type viral DNA to generate a viable virus that express the cloned polynucleotide.

[1040] Many other baculovirus vectors can be used in place of the vector above, such as pAc373, pVL941, and pAcIM1, as one skilled in the art would readily appreciate, as long as the construct provides appropriately located signals for transcription, translation, secretion and the like, including a signal peptide and an in-frame AUG as required. Such vectors are described, for instance, in Luckow et al., Virology 170:31-39 (1989).

[1041] Specifically, the cDNA sequence contained in the deposited clone, including the AUG initiation codon, is amplified using the PCR protocol described in Example 1. If a naturally occurring signal sequence is used to produce the polypeptide of the present invention, the pA2 vector does not need a second signal peptide. Alternatively, the vector can be modified (pA2 GP) to include a baculovirus leader sequence, using the standard methods described in Summers et al., “A Manual of Methods for Baculovirus Vectors and Insect Cell Culture Procedures,” Texas Agricultural Experimental Station Bulletin No. 1555 (1987).

[1042] The amplified fragment is isolated from a 1% agarose gel using a commercially available kit (“Geneclean,” BIO 101 Inc., La Jolla, Calif.). The fragment then is digested with appropriate restriction enzymes and again purified on a 1% agarose gel.

[1043] The plasmid is digested with the corresponding restriction enzymes and optionally, can be dephosphorylated using calf intestinal phosphatase, using routine procedures known in the art. The DNA is then isolated from a 1% agarose gel using a commercially available kit (“Geneclean” BIO 101 Inc., La Jolla, Calif.).

[1044] The fragment and the dephosphorylated plasmid are ligated together with T4 DNA ligase. E. coli HB101 or other suitable E. coli hosts such as XL-1 Blue (Stratagene Cloning Systems, La Jolla, Calif.) cells are transformed with the ligation mixture and spread on culture plates. Bacteria containing the plasmid are identified by digesting DNA from individual colonies and analyzing the digestion product by gel electrophoresis. The sequence of the cloned fragment is confirmed by DNA sequencing.

[1045] Five μg of a plasmid containing the polynucleotide is co-transfected with 1.0 μg of a commercially available linearized baculovirus DNA (“BaculoGod™ baculovirus DNA, Pharmingen, San Diego, Calif.), using the lipofection method described by Felgner et al., Proc. Natl. Acad. Sci. USA 84:7413-7417 (1987). One μg of BaculoGod™ virus DNA and 5 μg of the plasmid are mixed in a sterile well of a microtiter plate containing 50 μl of serum-free Grace's medium (Life Technologies Inc., Gaithersburg, Md.). Afterwards, 10 μl Lipofectin plus 90 μl Grace's medium are added, mixed and incubated for 15 minutes at room temperature. Then the transfection mixture is added drop-wise to Sf9 insect cells (ATCC CRL 1711) seeded in a 35 mm tissue culture plate with 1 ml Grace's medium without serum. The plate is then incubated for 5 hours at 27° C. The transfection solution is then removed from the plate and 1 ml of Grace's insect medium supplemented with 10% fetal calf serum is added. Cultivation is then continued at 27° C. for four days.

[1046] After four days the supernatant is collected and a plaque assay is performed, as described by Summers and Smith, supra. An agarose gel with “Blue Gal” (Life Technologies Inc., Gaithersburg) is used to allow easy identification and isolation of gal-expressing clones, which produce blue-stained plaques. (A detailed description of a “plaque assay” of this type can also be found in the user's guide for insect cell culture and baculovirology distributed by Life Technologies Inc., Gaithersburg, page 9-10.) After appropriate incubation, blue stained plaques are picked with the tip of a micropipettor (e.g., Eppendorf). The agar containing the recombinant viruses is then resuspended in a microcentrifuge tube containing 200 μl of Grace's medium and the suspension containing the recombinant baculovirus is used to infect Sf9 cells seeded in 35 mm dishes. Four days later the supernatants of these culture dishes are harvested and then they are stored at 4° C.

[1047] To verify the expression of the polypeptide, Sf9 cells are grown in Grace's medium supplemented with 10% heat-inactivated FBS. The cells are infected with the recombinant baculovirus containing the polynucleotide at a multiplicity of infection (“MOI”) of about 2. If radiolabeled proteins are desired, 6 hours later the medium is removed and is replaced with SF900 II medium minus methionine and cysteine (available from Life Technologies Inc., Rockville, Md.). After 42 hours, 5 μCi of ³⁵S-methionine and 5 μCi ³⁵S-cysteine (available from Amersham) are added. The cells are further incubated for 16 hours and then are harvested by centrifugation. The proteins in the supernatant as well as the intracellular proteins are analyzed by SDS-PAGE followed by autoradiography (if radiolabeled).

[1048] Microsequencing of the amino acid sequence of the amino terminus of purified protein may be used to determine the amino terminal sequence of the produced protein.

### Example 8

### Expression of a Polypeptide in Mammalian Cells

[1049] The polypeptide of the present invention can be expressed in a mammalian cell. A typical mammalian expression vector contains a promoter element, which mediates the initiation of transcription of mRNA, a protein coding sequence, and signals required for the termination of transcription and polyadenylation of the transcript. Additional elements include enhancers, Kozak sequences and intervening sequences flanked by donor and acceptor sites for RNA splicing. Highly efficient transcription is achieved with the early and late promoters from SV40, the long terminal repeats (LTRs) from Retroviruses, e.g., RSV, HTLVI, HIVI and the early promoter of the cytomegalovirus (CMV). However, cellular elements can also be used (e.g., the human actin promoter).

[1050] Suitable expression vectors for use in practicing the present invention include, for example, vectors such as pSVL and pMSG (Pharmacia, Uppsala, Sweden), pRSVcat (ATCC 37152), pSV2dhfr (ATCC 37146), pBC12MI (ATCC 67109), pCMVSport 2.0, and pCMVSport 3.0. Mammalian host cells that could be used include, human Hela, 293, H9 and Jurkat cells, mouse NIH3T3 and C127 cells, Cos 1, Cos 7 and CV1, quail QC1-3 cells, mouse L cells and Chinese hamster ovary (CHO) cells.

[1051] Alternatively, the polypeptide can be expressed in stable cell lines containing the polynucleotide integrated into a chromosome. The co-transfection with a selectable marker such as DHFR, gpt, neomycin, or hygromycin allows the identification and isolation of the transfected cells.

[1052] The transfected gene can also be amplified to express large amounts of the encoded protein. The DHFR (dihydrofolate reductase) marker is useful in developing cell lines that carry several hundred or even several thousand copies of the gene of interest. (See, e.g., Alt, F. W., et al., J. Biol. Chem. 253:1357-1370 (1978); Hamlin, J. L. and Ma, C., Biochem. et Biophys. Acta, 1097:107-143 (1990); Page, M. J. and Sydenham, M. A., Biotechnology 9:64-68 (1991)). Another useful selection marker is the enzyme glutamine synthase (GS) (Murphy et al., Biochem J. 227:277-279 (1991); Bebbington et al., Bio/Technology 10:169-175 (1992). Using these markers, the mammalian cells are grown in selective medium and the cells with the highest resistance are selected. These cell lines contain the amplified gene(s) integrated into a chromosome. Chinese hamster ovary (CHO) and NSO cells are often used for the production of proteins.

[1053] Derivatives of the plasmid pSV2-dhfr (ATCC Accession No. 37146), the expression vectors pC4 (ATCC Accession No. 209646) and pC6 (ATCC Accession No. 209647) contain the strong promoter (LTR) of the Rous Sarcoma Virus (Cullen et al., Molecular and Cellular Biology, 438-447 (March, 1985)) plus a fragment of the CMV-enhancer (Boshart et al., Cell 41:521-530 (1985)). Multiple cloning sites, e.g., with the restriction enzyme cleavage sites BamHI, XbaI and Asp718, facilitate the cloning of the gene of interest. The vectors also contain the 3′ intron, the polyadenylation and termination signal of the rat preproinsulin gene, and the mouse DHFR gene under control of the SV40 early promoter.

[1054] Specifically, the plasmid pC6, for example, is digested with appropriate restriction enzymes and then dephosphorylated using calf intestinal phosphates by procedures known in the art. The vector is then isolated from a 1% agarose gel.

[1055] A polynucleotide of the present invention is amplified according to the protocol outlined in Example 1. If a naturally occurring signal sequence is used to produce the polypeptide of the present invention, the vector does not need a second signal peptide. Alternatively, if a naturally occurring signal sequence is not used, the vector can be modified to include a heterologous signal sequence. (See, e.g., International Publication No. WO 96/34891.)

[1056] The amplified fragment is isolated from a 1% agarose gel using a commercially available kit (“Geneclean,” BIO 101 Inc., La Jolla, Calif.). The fragment then is digested with appropriate restriction enzymes and again purified on a 1% agarose gel.

[1057] The amplified fragment is then digested with the same restriction enzyme and purified on a 1% agarose gel. The isolated fragment and the dephosphorylated vector are then ligated with T4 DNA ligase. E. coli HB101 or XL-1 Blue cells are then transformed and bacteria are identified that contain the fragment inserted into plasmid pC6 using, for instance, restriction enzyme analysis.

[1058] Chinese hamster ovary cells lacking an active DHFR gene is used for transfection. Five μg of the expression plasmid pC6 or pC4 is cotransfected with 0.5 μg of the plasmid pSVneo using lipofectin (Felgner et al., supra). The plasmid pSV2-neo contains a dominant selectable marker, the neo gene from Tn5 encoding an enzyme that confers resistance to a group of antibiotics including G418. The cells are seeded in alpha minus MEM supplemented with 1 mg/ml G418. After 2 days, the cells are trypsinized and seeded in hybridoma cloning plates (Greiner, Germany) in alpha minus MEM supplemented with 10, 25, or 50 ng/ml of methotrexate plus 1 mg/ml G418. After about 10-14 days single clones are trypsinized and then seeded in 6-well petri dishes or 10 ml flasks using different concentrations of methotrexate (50 nM, 100 nM, 200 nM, 400 nM, 800 nM). Clones growing at the highest concentrations of methotrexate are then transferred to new 6-well plates containing even higher concentrations of methotrexate (1 μM, 2 μM, 5 μM, 10 mM, 20 mM). The same procedure is repeated until clones are obtained which grow at a concentration of 100-200 μM. Expression of the desired gene product is analyzed, for instance, by SDS-PAGE and Western blot or by reversed phase HPLC analysis.

### Example 9

### Protein Fusions

[1059] The polypeptides of the present invention are preferably fused to other proteins. These fusion proteins can be used for a variety of applications. For example, fusion of the present polypeptides to His-tag, HA-tag, protein A, IgG domains, and maltose binding protein facilitates purification. (See Example 5; see also EP A 394,827; Traunecker, et al., Nature 331:84-86 (1988)). Similarly, fusion to IgG-1, IgG-3, and albumin increases the halflife time in vivo. Nuclear localization signals fused to the polypeptides of the present invention can target the protein to a specific subcellular localization, while covalent heterodimer or homodimers can increase or decrease the activity of a fusion protein. Fusion proteins can also create chimeric molecules having more than one function. Finally, fusion proteins can increase solubility and/or stability of the fused protein compared to the non-fused protein. All of the types of fusion proteins described above can be made by modifying the following protocol, which outlines the fusion of a polypeptide to an IgG molecule, or the protocol described in Example 5.

[1060] Briefly, the human Fc portion of the IgG molecule can be PCR amplified, using primers that span the 5′ and 3′ ends of the sequence described below. These primers also should have convenient restriction enzyme sites that will facilitate cloning into an expression vector, preferably a mammalian expression vector.

[1061] For example, if pC4 (ATCC Accession No. 209646) is used, the human Fc portion can be ligated into the BamHI cloning site. Note that the 3′ BamHI site should be destroyed. Next, the vector containing the human Fc portion is re-restricted with BamHI, linearizing the vector, and a polynucleotide of the present invention, isolated by the PCR protocol described in Example 1, is ligated into this BamHI site. Note that the polynucleotide is cloned without a stop codon, otherwise a fusion protein will not be produced.

[1062] If the naturally occurring signal sequence is used to produce the polypeptide of the present invention, pC4 does not need a second signal peptide. Alternatively, if the naturally occurring signal sequence is not used, the vector can be modified to include a heterologous signal sequence. (See, e.g., International Publication No. WO 96/34891.)

Human IgG Fc region:

(SEQ ID NO: 1)

GGGATCCGGAGCCCAAATCTTCTGACAAAACTCACACATGCCCACCGTGC
CCAGCACCTGAATTCGAGGGTGCACCGTCAGTCTTCCTCTTCCCCCCAAA
ACCCAAGGACACCCTCATGATCTCCCGGACTCCTGAGGTCACATGCGTGG
TGGTGGACGTAAGCCACGAAGACCCTGAGGTCAAGTTCAACTGGTACGTG
GACGGCGTGGAGGTGCATAATGCCAAGACAAAGCCGCGGGAGGAGCAGTA
CAACAGCACGTACCGTGTGGTCAGCGTCCTCACCGTCCTGCACCAGGACT
GGCTGAATGGCAAGGAGTACAAGTGCAAGGTCTCCAACAAAGCCCTCCCA
ACCCCCATCGAGAAAACCATCTCCAAAGCCAAAGGGCAGCCCCGAGAACC
ACAGGTGTACACCCTGCCCCCATCCCGGGATGAGCTGACCAAGAACCAGG
TCAGCCTGACCTGCCTGGTCAAAGGCTTCTATCCAAGCGACATCGCCGTG
GAGTGGGAGAGCAATGGGCAGCCGGAGAACAACTACAAGACCACGCCTCC
CGTGCTGGACTCCGACGGCTCCTTCTTCCTCTACAGCAAGCTCACCGTGG
ACAAGAGCAGGTGGCAGCAGGGGAACGTCTTCTCATGCTCCGTGATGCAT
GAGGCTCTGCACAACCACTACACGCAGAAGAGCCTCTCCCTGTCTCCGGG
TAAATGAGTGCGACGGCCGCGACTCTAGAGGAT

### Example 10

### Production of an Antibody from a Polypeptide

a) Hybridoma Technology

[1063] The antibodies of the present invention can be prepared by a variety of methods. (See, Current Protocols, Chapter 2.) As one example of such methods, cells expressing a polypeptide of the present invention are administered to an animal to induce the production of sera containing polyclonal antibodies. In a preferred method, a preparation of a polypeptide of the present invention is prepared and purified to render it substantially free of natural contaminants. Such a preparation is then introduced into an animal in order to produce polyclonal antisera of greater specific activity.

[1064] Monoclonal antibodies specific for a polypeptide of the present invention are prepared using hybridoma technology (Kohler et al., Nature 256:495 (1975); Kohler et al., Eur. J. Immunol. 6:511 (1976); Kohler et al., Eur. J. Immunol. 6:292 (1976); Hammerling et al., in: Monoclonal Antibodies and T-Cell Hybridomas, Elsevier, N.Y., pp. 563-681 (1981)). In general, an animal (preferably a mouse) is immunized with a polypeptide of the present invention or, more preferably, with a secreted polypeptide-expressing cell. Such polypeptide-expressing cells are cultured in any suitable tissue culture medium, preferably in Earle's modified Eagle's medium supplemented with 10% fetal bovine serum (inactivated at about 56° C.), and supplemented with about 10 g/l of nonessential amino acids, about 1,000 U/ml of penicillin, and about 100 μg/ml of streptomycin.

[1065] The splenocytes of such mice are extracted and fused with a suitable myeloma cell line. Any suitable myeloma cell line may be employed in accordance with the present invention; however, it is preferable to employ the parent myeloma cell line (SP20), available from the ATCC. After fusion, the resulting hybridoma cells are selectively maintained in HAT medium, and then cloned by limiting dilution as described by Wands et al. (Gastroenterology 80:225-232 (1981)). The hybridoma cells obtained through such a selection are then assayed to identify clones which secrete antibodies capable of binding the polypeptide of the present invention.

[1066] Alternatively, additional antibodies capable of binding to a polypeptide of the present invention can be produced in a two-step procedure using anti-idiotypic antibodies. Such a method makes use of the fact that antibodies are themselves antigens, and therefore, it is possible to obtain an antibody which binds to a second antibody. In accordance with this method, protein specific antibodies are used to immunize an animal, preferably a mouse. The splenocytes of such an animal are then used to produce hybridoma cells, and the hybridoma cells are screened to identify clones which produce an antibody whose ability to bind to the polypeptide-specific antibody can be blocked by said polypeptide. Such antibodies comprise anti-idiotypic antibodies to the polypeptide-specific antibody and are used to immunize an animal to induce formation of further polypeptide-specific antibodies.

[1067] For in vivo use of antibodies in humans, an antibody is “humanized”. Such antibodies can be produced using genetic constructs derived from hybridoma cells producing the monoclonal antibodies described above. Methods for producing chimeric and humanized antibodies are known in the art and are discussed herein. (See, for review, Morrison, Science 229:1202 (1985); Oi et al., BioTechniques 4:214 (1986); Cabilly et al., U.S. Pat. No. 4,816,567; Taniguchi et al., EP 171496; Morrison et al., EP 173494; Neuberger et al., WO 8601533; Robinson et al., International Publication No. WO 8702671; Boulianne et al., Nature 312:643 (1984); Neuberger et al., Nature 314:268 (1985)).

b) Isolation of Antibody Fragments Directed Against a Polypeptide of the Present Invention from a Library of scFvs

[1068] Naturally occurring V-genes isolated from human PBLs are constructed into a library of antibody fragments which contain reactivities against a polypeptide of the present invention to which the donor may or may not have been exposed (see e.g., U.S. Pat. No. 5,885,793 incorporated herein by reference in its entirety).

[1069] Rescue of the Library. A library of scFvs is constructed from the RNA of human PBLs as described in International Publication No. WO 92/01047. To rescue phage displaying antibody fragments, approximately 10⁹ E. coli harboring the phagemid are used to inoculate 50 ml of 2×TY containing 1% glucose and 100 μg/ml of ampicillin (2×TY-AMP-GLU) and grown to an O.D. of 0.8 with shaking. Five ml of this culture is used to inoculate 50 ml of 2×TY-AMP-GLU, 2×108 TU of delta gene 3 helper (M13 delta gene III, see International Publication No. WO 92/01047) are added and the culture incubated at 37° C. for 45 minutes without shaking and then at 37° C. for 45 minutes with shaking. The culture is centrifuged at 4000 r.p.m. for 10 min. and the pellet resuspended in 2 liters of 2×TY containing 100 μg/ml ampicillin and 50 ug/ml kanamycin and grown overnight. Phage are prepared as described in International Publication No. WO 92/01047.

[1070] M13 delta gene III is prepared as follows: M13 delta gene III helper phage does not encode gene III protein, hence the phage(mid) displaying antibody fragments have a greater avidity of binding to antigen. Infectious M13 delta gene III particles are made by growing the helper phage in cells harboring a pUC19 derivative supplying the wild type gene III protein during phage morphogenesis. The culture is incubated for 1 hour at 37° C. without shaking and then for a further hour at 37° C. with shaking. Cells are spun down (IEC-Centra 8,400 r.p.m. for 10 min), resuspended in 300 ml 2×TY broth containing 100 μg ampicillin/ml and 25 μg kanamycin/ml (2×TY-AMP-KAN) and grown overnight, shaking at 37° C. Phage particles are purified and concentrated from the culture medium by two PEG-precipitations (Sambrook et al., 1990), resuspended in 2 ml PBS and passed through a 0.45 μm filter (Minisart NML; Sartorius) to give a final concentration of approximately 10¹³ transducing units/ml (ampicillin-resistant clones).

[1071] Panning of the Library. Immunotubes (Nunc) are coated overnight in PBS with 4 ml of either 100 μg/ml or 10 μg/ml of a polypeptide of the present invention. Tubes are blocked with 2% Marvel-PBS for 2 hours at 37° C. and then washed 3 times in PBS. Approximately 10¹³ TU of phage is applied to the tube and incubated for 30 minutes at room temperature tumbling on an over and under turntable and then left to stand for another 1.5 hours. Tubes are washed 10 times with PBS 0.1% Tween-20 and 10 times with PBS. Phage are eluted by adding 1 ml of 100 mM triethylamine and rotating 15 minutes on an under and over turntable after which the solution is immediately neutralized with 0.5 ml of 1.0M Tris-HCl, pH 7.4. Phage are then used to infect 10 ml of mid-log E. coli TG1 by incubating eluted phage with bacteria for 30 minutes at 37° C. The E. coli are then plated on TYE plates containing 1% glucose and 100 μg/ml ampicillin. The resulting bacterial library is then rescued with delta gene 3 helper phage as described above to prepare phage for a subsequent round of selection. This process is then repeated for a total of 4 rounds of affinity purification with tube-washing increased to 20 times with PBS, 0.1% Tween-20 and 20 times with PBS for rounds 3 and 4.

[1072] Characterization of Binders. Eluted phage from the 3rd and 4th rounds of selection are used to infect E. coli HB 2151 and soluble scFv is produced (Marks, et al., 1991) from single colonies for assay. ELISAs are performed with microtitre plates coated with either 10 pg/ml of the polypeptide of the present invention in 50 mM bicarbonate pH 9.6. Clones positive in ELISA are further characterized by PCR fingerprinting (see, e.g., International Publication No. WO 92/01047) and then by sequencing. These ELISA positive clones may also be further characterized by techniques known in the art, such as, for example, epitope mapping, binding affinity, receptor signal transduction, ability to block or competitively inhibit antibody/antigen binding, and competitive agonistic or antagonistic activity.

### Example 11

### Method of Determining Alterations in a Gene Corresponding to a Polynucleotide

[1073] RNA isolated from entire families or individual patients presenting with a phenotype of interest (such as a disease) is isolated. cDNA is then generated from these RNA samples using protocols known in the art. (See, Sambrook.) The cDNA is then used as a template for PCR, employing primers surrounding regions of interest in SEQ ID NO:X; and/or the nucleotide sequence of the cDNA contained in ATCC Deposit No:Z. Suggested PCR conditions consist of 35 cycles at 95 degrees C. for 30 seconds; 60-120 seconds at 52-58 degrees C.; and 60-120 seconds at 70 degrees C., using buffer solutions described in Sidransky et al., Science 252:706 (1991).

[1074] PCR products are then sequenced using primers labeled at their 5′ end with T4 polynucleotide kinase, employing SequiTherm Polymerase (Epicentre Technologies). The intron-exon boundaries of selected exons is also determined and genomic PCR products analyzed to confirm the results. PCR products harboring suspected mutations are then cloned and sequenced to validate the results of the direct sequencing.

[1075] PCR products are cloned into T-tailed vectors as described in Holton et al., Nucleic Acids Research, 19:1156 (1991) and sequenced with T7 polymerase (United States Biochemical). Affected individuals are identified by mutations not present in unaffected individuals.

[1076] Genomic rearrangements are also observed as a method of determining alterations in a gene corresponding to a polynucleotide. Genomic clones isolated according to Example 2 are nick-translated with digoxigenindeoxy-uridine 5′-triphosphate (Boehringer Manheim), and FISH performed as described in Johnson et al., Methods Cell Biol. 35:73-99 (1991). Hybridization with the labeled probe is carried out using a vast excess of human cot-1 DNA for specific hybridization to the corresponding genomic locus.

[1077] Chromosomes are counterstained with 4,6-diamino-2-phenylidole and propidium iodide, producing a combination of C- and R-bands. Aligned images for precise mapping are obtained using a triple-band filter set (Chroma Technology, Brattleboro, Vt.) in combination with a cooled charge-coupled device camera (Photometrics, Tucson, Ariz.) and variable excitation wavelength filters. (Johnson et al., Genet. Anal. Tech. Appl., 8:75 (1991)). Image collection, analysis and chromosomal fractional length measurements are performed using the ISee Graphical Program System. (Inovision Corporation, Durham, N.C.) Chromosome alterations of the genomic region hybridized by the probe are identified as insertions, deletions, and translocations. These alterations are used as a diagnostic marker for an associated disease.

### Example 12

### Method of Detecting Abnormal Levels of a Polypeptide in a Biological Sample

[1078] A polypeptide of the present invention can be detected in a biological sample, and if an increased or decreased level of the polypeptide is detected, this polypeptide is a marker for a particular phenotype. Methods of detection are numerous, and thus, it is understood that one skilled in the art can modify the following assay to fit their particular needs.

[1079] For example, antibody-sandwich ELISAs are used to detect polypeptides in a sample, preferably a biological sample. Wells of a microtiter plate are coated with specific antibodies, at a final concentration of 0.2 to 10 ug/ml. The antibodies are either monoclonal or polyclonal and are produced by the method described in Example 10. The wells are blocked so that non-specific binding of the polypeptide to the well is reduced.

[1080] The coated wells are then incubated for >2 hours at RT with a sample containing the polypeptide. Preferably, serial dilutions of the sample should be used to validate results. The plates are then washed three times with deionized or distilled water to remove unbound polypeptide.

[1081] Next, 50 ul of specific antibody-alkaline phosphatase conjugate, at a concentration of 25-400 ng, is added and incubated for 2 hours at room temperature. The plates are again washed three times with deionized or distilled water to remove unbound conjugate.

[1082] Add 75 ul of 4-methylumbelliferyl phosphate (MUP) or p-nitrophenyl phosphate (NPP) substrate solution to each well and incubate 1 hour at room temperature. Measure the reaction by a microtiter plate reader. Prepare a standard curve, using serial dilutions of a control sample, and plot polypeptide concentration on the X-axis (log scale) and fluorescence or absorbance of the Y-axis (linear scale). Interpolate the concentration of the polypeptide in the sample using the standard curve.

### Example 13

### Formulation

[1083] The invention also provides methods of treatment and/or prevention of diseases or disorders (such as, for example, any one or more of the diseases or disorders disclosed herein) by administration to a subject of an effective amount of a Therapeutic. By therapeutic is meant polynucleotides or polypeptides of the invention (including fragments and variants), agonists or antagonists thereof, and/or antibodies thereto, in combination with a pharmaceutically acceptable carrier type (e.g., a sterile carrier).

[1084] The Therapeutic will be formulated and dosed in a fashion consistent with good medical practice, taking into account the clinical condition of the individual patient (especially the side effects of treatment with the Therapeutic alone), the site of delivery, the method of administration, the scheduling of administration, and other factors known to practitioners. The “effective amount” for purposes herein is thus determined by such considerations.

[1085] As a general proposition, the total pharmaceutically effective amount of the Therapeutic administered parenterally per dose will be in the range of about 1 ug/kg/day to 10 mg/kg/day of patient body weight, although, as noted above, this will be subject to therapeutic discretion. More preferably, this dose is at least 0.01 mg/kg/day, and most preferably for humans between about 0.01 and 1 mg/kg/day for the hormone. If given continuously, the Therapeutic is typically administered at a dose rate of about 1 ug/kg/hour to about 50 ug/kg/hour, either by 1-4 injections per day or by continuous subcutaneous infusions, for example, using a mini-pump. An intravenous bag solution may also be employed. The length of treatment needed to observe changes and the interval following treatment for responses to occur appears to vary depending on the desired effect.

[1086] Therapeutics can be are administered orally, rectally, parenterally, intracistemally, intravaginally, intraperitoneally, topically (as by powders, ointments, gels, drops or transdermal patch), bucally, or as an oral or nasal spray. “Pharmaceutically acceptable carrier” refers to a non-toxic solid, semisolid or liquid filler, diluent, encapsulating material or formulation auxiliary of any. The term “parenteral” as used herein refers to modes of administration which include intravenous, intramuscular, intraperitoneal, intrasternal, subcutaneous and intraarticular injection and infusion.

[1087] Therapeutics of the invention are also suitably administered by sustained-release systems. Suitable examples of sustained-release Therapeutics are administered orally, rectally, parenterally, intracistemally, intravaginally, intraperitoneally, topically (as by powders, ointments, gels, drops or transdermal patch), bucally, or as an oral or nasal spray. “Pharmaceutically acceptable carrier” refers to a non-toxic solid, semisolid or liquid filler, diluent, encapsulating material or formulation auxiliary of any type. The term “parenteral” as used herein refers to modes of administration which include intravenous, intramuscular, intraperitoneal, intrasternal, subcutaneous and intraarticular injection and infusion.

[1088] Therapeutics of the invention are also suitably administered by sustained-release systems. Suitable examples of sustained-release Therapeutics include suitable polymeric materials (such as, for example, semi-permeable polymer matrices in the form of shaped articles, e.g., films, or microcapsules), suitable hydrophobic materials (for example as an emulsion in an acceptable oil) or ion exchange resins, and sparingly soluble derivatives (such as, for example, a sparingly soluble salt).

[1089] Sustained-release matrices include polylactides (U.S. Pat. No. 3,773,919, EP 58,481), copolymers of L-glutamic acid and gamma-ethyl-L-glutamate (Sidman et al., Biopolymers 22:547-556 (1983)), poly (2-hydroxyethyl methacrylate) (Langer et al., J. Biomed. Mater. Res. 15:167-277 (1981), and Langer, Chem. Tech. 12:98-105 (1982)), ethylene vinyl acetate (Langer et al., Id.) or poly-D-(−)-3-hydroxybutyric acid (EP 133,988).

[1090] In a preferred embodiment, polypeptide, polynucleotide, and antibody compositions of the invention are formulated in a biodegradable, polymeric drug delivery system, for example as described in U.S. Pat. Nos. 4,938,763; 5,278,201; 5,278,202; 5,324,519; 5,340,849; and 5,487,897 and in International Publication Numbers WO01/35929, WO00/24374, and WO00/06117 which are hereby incorporated by reference in their entirety. In specific preferred embodiments the polypeptide, polynucleotide, and antibody compositions of the invention are formulated using the ATRIGEL® Biodegradable System of Atrix Laboratories, Inc. (Fort Collins, Colo.).

[1091] Examples of biodegradable polymers which can be used in the formulation of polypeptide, polynucleotide, and antibody compositions, include but are not limited to, polylactides, polyglycolides, polycaprolactones, polyanhydrides, polyamides, polyurethanes, polyesteramides, polyorthoesters, polydioxanones, polyacetals, polyketals, polycarbonates, polyorthocarbonates, polyphosphazenes, polyhydroxybutyrates, polyhydroxyvalerates, polyalkylene oxalates, polyalkylene succinates, poly(malic acid), poly(amino acids), poly(methyl vinyl ether), poly(maleic anhydride), polyvinylpyrrolidone, polyethylene glycol, polyhydroxycellulose, chitin, chitosan, and copolymers, terpolymers, or combinations or mixtures of the above materials. The preferred polymers are those that have a lower degree of crystallization and are more hydrophobic. These polymers and copolymers are more soluble in the biocompatible solvents than the highly crystalline polymers such as polyglycolide and chitin which also have a high degree of hydrogen-bonding. Preferred materials with the desired solubility parameters are the polylactides, polycaprolactones, and copolymers of these with glycolide in which there are more amorphous regions to enhance solubility. In specific preferred embodiments, the biodegradable polymers which can be used in the formulation of polypeptide, polynucleotide, and antibody compositions are poly(lactide-co-glycolides). Polymer properties such as molecular weight, hydrophobicity, and lactide/glycolide ratio may be modified to obtain the desired polypeptide, polynucleotide, or antibody release profile (See, e.g., Ravivarapu et al., Journal of Pharmaceutical Sciences 89:732-741 (2000), which is hereby incorporated by reference in its entirety).

[1092] It is also preferred that the solvent for the biodegradable polymer be non-toxic, water miscible, and otherwise biocompatible. Examples of such solvents include, but are not limited to, N-methyl-2-pyrrolidone, 2-pyrrolidone, C2 to C6 alkanols, C1 to C15 alchohols, dils, triols, and tetraols such as ethanol, glycerine propylene glycol, butanol; C3 to C15 alkyl ketones such as acetone, diethyl ketone and methyl ethyl ketone; C3 to C15 esters such as methyl acetate, ethyl acetate, ethyl lactate; alkyl ketones such as methyl ethyl ketone, C1 to C15 amides such as dimethylformamide, dimethylacetamide and caprolactam; C3 to C20 ethers such as tetrahydrofuran, or solketal; tweens, triacetin, propylene carbonate, decylmethylsulfoxide, dimethyl sulfoxide, oleic acid, 1-dodecylazacycloheptan-2-one, Other preferred solvents are benzyl alchohol, benzyl benzoate, dipropylene glycol, tributyrin, ethyl oleate, glycerin, glycofural, isopropyl myristate, isopropyl palmitate, oleic acid, polyethylene glycol, propylene carbonate, and triethyl citrate. The most preferred solvents are N-methyl-2-pyrrolidone, 2-pyrrolidone, dimethyl sulfoxide, triacetin, and propylene carbonate because of the solvating ability and their compatibility.

[1093] Additionally, formulations comprising polypeptide, polynucleotide, and antibody compositions and a biodegradable polymer may also include release-rate modification agents and/or pore-forming agents. Examples of release-rate modification agents include, but are not limited to, fatty acids, triglycerides, other like hydrophobic compounds, organic solvents, plasticizing compounds and hydrophilic compounds. Suitable release rate modification agents include, for example, esters of mono-, di-, and tricarboxylic acids, such as 2-ethoxyethyl acetate, methyl acetate, ethyl acetate, diethyl phthalate, dimethyl phthalate, dibutyl phthalate, dimethyl adipate, dimethyl succinate, dimethyl oxalate, dimethyl citrate, triethyl citrate, acetyl tributyl citrate, acetyl triethyl citrate, glycerol triacetate, di(n-butyl) sebecate, and the like; polyhydroxy alcohols, such as propylene glycol, polyethylene glycol, glycerin, sorbitol, and the like; fatty acids; triesters of glycerol, such as triglycerides, epoxidized soybean oil, and other epoxidized vegetable oils; sterols, such as cholesterol; alcohols, such as C.sub.6-C.sub.12 alkanols, 2-ethoxyethanol. The release rate modification agent may be used singly or in combination with other such agents. Suitable combinations of release rate modification agents include, but are not limited to, glycerin/propylene glycol, sorbitol/glycerine, ethylene oxide/propylene oxide, butylene glycol/adipic acid, and the like. Preferred release rate modification agents include, but are not limited to, dimethyl citrate, triethyl citrate, ethyl heptanoate, glycerin, and hexanediol. Suitable pore-forming agents that may be used in the polymer composition include, but are not limited to, sugars such as sucrose and dextrose, salts such as sodium chloride and sodium carbonate, polymers such as hydroxylpropylcellulose, carboxymethylcellulose, polyethylene glycol, and polyvinylpyrrolidone. Solid crystals that will provide a defined pore size, such as salt or sugar, are preferred.

[1094] In specific preferred embodiments the polypeptide, polynucleotide, and antibody compositions of the invention are formulated using the BEMA™ BioErodible Mucoadhesive System, MCA™ MucoCutaneous Absorption System, SMP™ Solvent MicroParticle System, or BCP™ BioCompatible Polymer System of Atrix Laboratories, Inc. (Fort Collins, Colo.).

[1095] Sustained-release Therapeutics also include liposomally entrapped Therapeutics of the invention (see generally, Langer, Science 249:1527-1533 (1990); Treat et al., in Liposomes in the Therapy of infectious Disease and Cancer, Lopez-Berestein and Fidler (eds.), Liss, New York, pp. 317-327 and 353-365 (1989)). Liposomes containing the Therapeutic are prepared by methods known per se: DE 3,218,121; Epstein et al., Proc. Natl. Acad. Sci. (USA) 82:3688-3692 (1985); Hwang et al., Proc. Natl. Acad. Sci. (USA) 77:4030-4034 (1980); EP 52,322; EP 36,676; EP 88,046; EP 143,949; EP 142,641; Japanese Pat. Appl. 83-118008; U.S. Pat. Nos. 4,485,045 and 4,544,545; and EP 102,324. Ordinarily, the liposomes are of the small (about 200-800 Angstroms) unilamellar type in which the lipid content is greater than about 30 mol. percent cholesterol, the selected proportion being adjusted for the optimal Therapeutic.

[1096] In yet an additional embodiment, the Therapeutics of the invention are delivered by way of a pump (see Langer, supra; Sefton, CRC Crit. Ref. Biomed. Eng. 14:201 (1987); Buchwald et al., Surgery 88:507 (1980); Saudek et al., N. Engl. J. Med. 321:574 (1989)).

[1097] Other controlled release systems are discussed in the review by Langer (Science 249:1527-1533 (1990)).

[1098] For parenteral administration, in one embodiment, the Therapeutic is formulated generally by mixing it at the desired degree of purity, in a unit dosage injectable form (solution, suspension, or emulsion), with a pharmaceutically acceptable carrier, i.e., one that is non-toxic to recipients at the dosages and concentrations employed and is compatible with other ingredients of the formulation. For example, the formulation preferably does not include oxidizing agents and other compounds that are known to be deleterious to the Therapeutic.

[1099] Generally, the formulations are prepared by contacting the Therapeutic uniformly and intimately with liquid carriers or finely divided solid carriers or both. Then, if necessary, the product is shaped into the desired formulation. Preferably the carrier is a parenteral carrier, more preferably a solution that is isotonic with the blood of the recipient. Examples of such carrier vehicles include water, saline, Ringer's solution, and dextrose solution. Non-aqueous vehicles such as fixed oils and ethyl oleate are also useful herein, as well as liposomes.

[1100] The carrier suitably contains minor amounts of additives such as substances that enhance isotonicity and chemical stability. Such materials are non-toxic to recipients at the dosages and concentrations employed, and include buffers such as phosphate, citrate, succinate, acetic acid, and other organic acids or their salts; antioxidants such as ascorbic acid; low molecular weight (less than about ten residues) polypeptides, e.g., polyarginine or tripeptides; proteins, such as serum albumin, gelatin, or immunoglobulins; hydrophilic polymers such as polyvinylpyrrolidone; amino acids, such as glycine, glutamic acid, aspartic acid, or arginine; monosaccharides, disaccharides, and other carbohydrates including cellulose or its derivatives, glucose, manose, or dextrins; chelating agents such as EDTA; sugar alcohols such as mannitol or sorbitol; counterions such as sodium; and/or nonionic surfactants such as polysorbates, poloxamers, or PEG.

[1101] The Therapeutic is typically formulated in such vehicles at a concentration of about 0.1 mg/ml to 100 mg/ml, preferably 1-10 mg/ml, at a pH of about 3 to 8. It will be understood that the use of certain of the foregoing excipients, carriers, or stabilizers will result in the formation of polypeptide salts.

[1102] Any pharmaceutical used for therapeutic administration can be sterile. Sterility is readily accomplished by filtration through sterile filtration membranes (e.g., 0.2 micron membranes). Therapeutics generally are placed into a container having a sterile access port, for example, an intravenous solution bag or vial having a stopper pierceable by a hypodermic injection needle.

[1103] Therapeutics ordinarily will be stored in unit or multi-dose containers, for example, sealed ampoules or vials, as an aqueous solution or as a lyophilized formulation for reconstitution. As an example of a lyophilized formulation, 10-ml vials are filled with 5 ml of sterile-filtered 1% (w/v) aqueous Therapeutic solution, and the resulting mixture is lyophilized. The infusion solution is prepared by reconstituting the lyophilized Therapeutic using bacteriostatic Water-for-Injection.

[1104] The invention also provides a pharmaceutical pack or kit comprising one or more containers filled with one or more of the ingredients of the Therapeutics of the invention. Associated with such container(s) can be a notice in the form prescribed by a governmental agency regulating the manufacture, use or sale of pharmaceuticals or biological products, which notice reflects approval by the agency of manufacture, use or sale for human administration. In addition, the Therapeutics may be employed in conjunction with other therapeutic compounds.

[1105] The Therapeutics of the invention may be administered alone or in combination with adjuvants. Adjuvants that may be administered with the Therapeutics of the invention include, but are not limited to, alum, alum plus deoxycholate (ImmunoAg), MTP-PE (Biocine Corp.), QS21 (Genentech, Inc.), BCG (e.g., THERACYSR), MPL and nonviable prepartions of Corynebacterium parvum. In a specific embodiment, Therapeutics of the invention are administered in combination with alum. In another specific embodiment, Therapeutics of the invention are administered in combination with QS-21. Further adjuvants that may be administered with the Therapeutics of the invention include, but are not limited to, Monophosphoryl lipid immunomodulator, AdjuVax 100a, QS-21, QS-18, CRL1005, Aluminum salts, MF-59, and Virosomal adjuvant technology. Vaccines that may be administered with the Therapeutics of the invention include, but are not limited to, vaccines directed toward protection against MMR (measles, mumps, rubella), polio, varicella, tetanus/diptheria, hepatitis A, hepatitis B, haemophilus influenzae B, whooping cough, pneumonia, influenza, Lyme's Disease, rotavirus, cholera, yellow fever, Japanese encephalitis, poliomyelitis, rabies, typhoid fever, and pertussis. Combinations may be administered either concomitantly, e.g., as an admixture, separately but simultaneously or concurrently; or sequentially. This includes presentations in which the combined agents are administered together as a therapeutic mixture, and also procedures in which the combined agents are administered separately but simultaneously, e.g., as through separate intravenous lines into the same individual. Administration “in combination” further includes the separate administration of one of the compounds or agents given first, followed by the second.

[1106] The Therapeutics of the invention may be administered alone or in combination with other therapeutic agents. Therapeutic agents that may be administered in combination with the Therapeutics of the invention, include but not limited to, chemotherapeutic agents, antibiotics, steroidal and non-steroidal anti-inflammatories, conventional immunotherapeutic agents, and/or therapeutic treatments described below. Combinations may be administered either concomitantly, e.g., as an admixture, separately but simultaneously or concurrently; or sequentially. This includes presentations in which the combined agents are administered together as a therapeutic mixture, and also procedures in which the combined agents are administered separately but simultaneously, e.g., as through separate intravenous lines into the same individual. Administration “in combination” further includes the separate administration of one of the compounds or agents given first, followed by the second.

[1107] In one embodiment, the Therapeutics of the invention are administered in combination with an anticoagulant. Anticoagulants that may be administered with the compositions of the invention include, but are not limited to, heparin, low molecular weight heparin, warfarin sodium (e.g., COUMADIN®), dicumarol, 4-hydroxycoumarin, anisindione (e.g., MIRADON™), acenocoumarol (e.g., nicoumalone, SINTHROME™), indan-1,3-dione, phenprocoumon (e.g., MARCUMAR™), ethyl biscoumacetate (e.g., TROMEXAN™), and aspirin. In a specific embodiment, compositions of the invention are administered in combination with heparin and/or warfarin. In another specific embodiment, compositions of the invention are administered in combination with warfarin. In another specific embodiment, compositions of the invention are administered in combination with warfarin and aspirin. In another specific embodiment, compositions of the invention are administered in combination with heparin. In another specific embodiment, compositions of the invention are administered in combination with heparin and aspirin.

[1108] In another embodiment, the Therapeutics of the invention are administered in combination with thrombolytic drugs. Thrombolytic drugs that may be administered with the compositions of the invention include, but are not limited to, plasminogen, lys-plasminogen, alpha2-antiplasmin, streptokinae (e.g., KABIKINASE™), antiresplace (e.g., EMINASE™), tissue plasminogen activator (t-PA, altevase, ACTIVASE™), urokinase (e.g., ABBOKINASE™), sauruplase, (Prourokinase, single chain urokinase), and aminocaproic acid (e.g., AMICAR™). In a specific embodiment, compositions of the invention are administered in combination with tissue plasminogen activator and aspirin.

[1109] In another embodiment, the Therapeutics of the invention are administered in combination with antiplatelet drugs. Antiplatelet drugs that may be administered with the compositions of the invention include, but are not limited to, aspirin, dipyridamole (e.g., PERSANTINE™), and ticlopidine (e.g., TICLID™).

[1110] In specific embodiments, the use of anti-coagulants, thrombolytic and/or antiplatelet drugs in combination with Therapeutics of the invention is contemplated for the prevention, diagnosis, and/or treatment of thrombosis, arterial thrombosis, venous thrombosis, thromboembolism, pulmonary embolism, atherosclerosis, myocardial infarction, transient ischemic attack, unstable angina. In specific embodiments, the use of anticoagulants, thrombolytic drugs and/or antiplatelet drugs in combination with Therapeutics of the invention is contemplated for the prevention of occulsion of saphenous grafts, for reducing the risk of periprocedural thrombosis as might accompany angioplasty procedures, for reducing the risk of stroke in patients with atrial fibrillation including nonrheumatic atrial fibrillation, for reducing the risk of embolism associated with mechanical heart valves and or mitral valves disease. Other uses for the therapeutics of the invention, alone or in combination with antiplatelet, anticoagulant, and/or thrombolytic drugs, include, but are not limited to, the prevention of occlusions in extracorporeal devices (e.g., intravascular canulas, vascular access shunts in hemodialysis patients, hemodialysis machines, and cardiopulmonary bypass machines).

[1111] In certain embodiments, Therapeutics of the invention are administered in combination with antiretroviral agents, nucleoside/nucleotide reverse transcriptase inhibitors (NRTIs), non-nucleoside reverse transcriptase inhibitors (NNRTIs), and/or protease inhibitors (PIs). NRTIs that may be administered in combination with the Therapeutics of the invention, include, but are not limited to, RETROVIR™ (zidovudine/AZT), VIDEX™ (didanosine/ddI), HIVID™ (zalcitabine/ddC), ZERIT™ (stavudine/d4T), EPIVIR™ (lamivudine/3TC), and COMBIVIR™ (zidovudine/lamivudine). NNRTIs that may be administered in combination with the Therapeutics of the invention, include, but are not limited to, VIRAMUNE™ (nevirapine), RESCRIPTOR™ (delavirdine), and SUSTIVA™ (efavirenz). Protease inhibitors that may be administered in combination with the Therapeutics of the invention, include, but are not limited to, CRIXIVAN™ (indinavir), NORVIR™ (ritonavir), TNVIRASE™ (saquinavir), and VIRACEPT™ (nelfinavir). In a specific embodiment, antiretroviral agents, nucleoside reverse transcriptase inhibitors, non-nucleoside reverse transcriptase inhibitors, and/or protease inhibitors may be used in any combination with Therapeutics of the invention to treat AIDS and/or to prevent or treat HIV infection.

[1112] Additional NRTIs include LODENOSINE™ (F-ddA; an acid-stable adenosine NRTI; Triangle/Abbott; COVIRACIL™ (emtricitabine/FTC; structurally related to lamivudine (3TC) but with 3- to 10-fold greater activity in vitro; Triangle/Abbott); dOTC (BCH-10652, also structurally related to lamivudine but retains activity against a substantial proportion of lamivudine-resistant isolates; Biochem Pharma); Adefovir (refused approval for anti-HIV therapy by FDA; Gilead Sciences); PREVEON® (Adefovir Dipivoxil, the active prodrug of adefovir; its active form is PMEA-pp); TENOFOVIR™ (bis-POC PMPA, a PMPA prodrug; Gilead); DAPD/DXG (active metabolite of DAPD; Triangle/Abbott); D-D4FC (related to 3TC, with activity against AZT/3TC-resistant virus); GW420867X (Glaxo Wellcome); ZIAGEN™ (abacavir/159U89; Glaxo Wellcome Inc.); CS-87 (3′azido-2′,3′-dideoxyuridine; WO 99/66936); and S-acyl-2-thioethyl (SATE)-bearing prodrug forms of β-L-FD4C and β-L-FddC (WO 98/17281).

[1113] Additional NNRTIs include COACTINON™ (Emivirine/MKC-442, potent NNRTI of the HEPT class; Triangle/Abbott); CAPRAVIRINE™ (AG-1549/S-153, a next generation NNRTI with activity against viruses containing the K103N mutation; Agouron); PNU-142721 (has 20- to 50-fold greater activity than its predecessor delavirdine and is active against K103N mutants; Pharmacia & Upjohn); DPC-961 and DPC-963 (second-generation derivatives of efavirenz, designed to be active against viruses with the K103N mutation; DuPont); GW-420867X (has 25-fold greater activity than HBY097 and is active against K103N mutants; Glaxo Wellcome); CALANOLIDE A (naturally occurring agent from the latex tree; active against viruses containing either or both the Y181C and K103N mutations); and Propolis (WO 99/49830).

[1114] Additional protease inhibitors include LOPINAVIRT (ABT378/r; Abbott Laboratories); BMS-232632 (an azapeptide; Bristol-Myres Squibb); TIPRANAVIR™ (PNU-140690, a non-peptic dihydropyrone; Pharmacia & Upjohn); PD-178390 (a nonpeptidic dihydropyrone; Parke-Davis); BMS 232632 (an azapeptide; Bristol-Myers Squibb); L-756,423 (an indinavir analog; Merck); DMP-450 (a cyclic urea compound; Avid & DuPont); AG-1776 (a peptidomimetic with in vitro activity against protease inhibitor-resistant viruses; Agouron); VX-175/GW-433908 (phosphate prodrug of amprenavir; Vertex & Glaxo Welcome); CGP61755 (Ciba); and AGENERASE™ (amprenavir; Glaxo Wellcome Inc.).

[1115] Additional antiretroviral agents include fusion inhibitors/gp41 binders. Fusion inhibitors/gp41 binders include T-20 (a peptide from residues 643-678 of the HIV gp41 transmembrane protein ectodomain which binds to gp41 in its resting state and prevents transformation to the fusogenic state; Trimeris) and T-1249 (a second-generation fusion inhibitor; Trimeris).

[1116] Additional antiretroviral agents include fusion inhibitors/chemokine receptor antagonists. Fusion inhibitors/chemokine receptor antagonists include CXCR4 antagonists such as AMD 3100 (a bicyclam), SDF-1 and its analogs, and ALX40-4C (a cationic peptide), T22 (an 18 amino acid peptide; Trimeris) and the T22 analogs T134 and T140; CCR5 antagonists such as RANTES (9-68), AOP-RANTES, NNY-RANTES, and TAK-779; and CCR5/CXCR4 antagonists such as NSC 651016 (a distamycin analog). Also included are CCR2B, CCR3, and CCR6 antagonists. Chemokine receptor agonists such as RANTES, SDF-1, MIP-1α, MIP-1β, etc., may also inhibit fusion.

[1117] Additional antiretroviral agents include integrase inhibitors. Integrase inhibitors include dicaffeoylquinic (DFQA) acids; L-chicoric acid (a dicaffeoyltartaric (DCTA) acid); quinalizarin (QLC) and related anthraquinones; ZINTEVIR™ (AR 177, an oligonucleotide that probably acts at cell surface rather than being a true integrase inhibitor; Arondex); and naphthols such as those disclosed in WO 98/50347.

[1118] Additional antiretroviral agents include hydroxyurea-like compounds such as BCX-34 (a purine nucleoside phosphorylase inhibitor; Biocryst); ribonucleotide reductase inhibitors such as DIDOX™ (Molecules for Health); inosine monophosphate dehydrogenase (IMPDH) inhibitors such as VX-497 (Vertex); and mycopholic acids such as CellCept (mycophenolate mofetil; Roche).

[1119] Additional antiretroviral agents include inhibitors of viral integrase, inhibitors of viral genome nuclear translocation such as arylene bis(methylketone) compounds; inhibitors of HIV entry such as AOP-RANTES, NNY-RANTES, RANTES-IgG fusion protein, soluble complexes of RANTES and glycosaminoglycans (GAG), and AMD-3100; nucleocapsid zinc finger inhibitors such as dithiane compounds; targets of HIV Tat and Rev; and pharmacoenhancers such as ABT-378.

[1120] Other antiretroviral therapies and adjunct therapies include cytokines and lymphokines such as MIP-1α, MIP-1β, SDF-1α, IL-2, PROLEUKIN™ (aldesleukin/L2-7001; Chiron), IL-4, IL-10, IL-12, and IL-13; interferons such as IFN-α2a; antagonists of TNFs, NFκB, GM-CSF, M-CSF, and IL-10; agents that modulate immune activation such as cyclosporin and prednisone; vaccines such as Remune™ (HIV Immunogen), APL 400-003 (Apollon), recombinant gp120 and fragments, bivalent (B/E) recombinant envelope glycoprotein, rgp120CM235, MN rgp120, SF-2 rgp120, gp120/soluble CD4 complex, Delta JR-FL protein, branched synthetic peptide derived from discontinuous gp120 C3/C4 domain, fusion-competent immunogens, and Gag, Pol, Nef, and Tat vaccines; gene-based therapies such as genetic suppressor elements (GSEs; WO 98/54366), and intrakines (genetically modified CC chemokines targetted to the ER to block surface expression of newly synthesized CCR5 (Yang et al., PNAS 94:11567-72 (1997); Chen et al., Nat. Med. 3:1110-16 (1997)); antibodies such as the anti-CXCR4 antibody 12G5, the anti-CCR5 antibodies 2D7, 5C7, PA8, PA9, PA10, PA11, PA12, and PA14, the anti-CD4 antibodies Q4120 and RPA-T4, the anti-CCR3 antibody 7B11, the anti-gp120 antibodies 17b, 48d, 447-52D, 257-D, 268-D and 50.1, anti-Tat antibodies, anti-TNF-α antibodies, and monoclonal antibody 33A; aryl hydrocarbon (AH) receptor agonists and antagonists such as TCDD, 3,3′,4,4′,5-pentachlorobiphenyl, 3,3′,4,4′-tetrachlorobiphenyl, and α-naphthoflavone (WO 98/30213); and antioxidants such as γ-L-glutamyl-L-cysteine ethyl ester (γ-GCE; WO 99/56764).

[1121] In a further embodiment, the Therapeutics of the invention are administered in combination with an antiviral agent. Antiviral agents that may be administered with the Therapeutics of the invention include, but are not limited to, acyclovir, ribavirin, amantadine, and remantidine.

[1122] In other embodiments, Therapeutics of the invention may be administered in combination with anti-opportunistic infection agents. Anti-opportunistic agents that may be administered in combination with the Therapeutics of the invention, include, but are not limited to, TRIMETHOPRIM-SULFAMETHOXAZOLE™, DAPSONE™, PENTAMIDINE™, ATOVAQUONE™, ISONIAZID™, RIFAMPIN™, PYRAZINAMIDE™, ETHAMBUTOL™, RIFABUTIN™, CLARITHROMYCIN™, AZITHROMYCIN™, GANCICLOVIR™, FOSCARNET™, CIDOFOVIR™, FLUCONAZOLE™, ITRACONAZOLE™, KETOCONAZOLE™, ACYCLOVIR™, FAMCICOLVIR™, PYRIMETHAMINE™, LEUCOVORIN™, NEUPOGEN™ (filgrastim/G-CSF), and LEUKINE™ (sargramostim/GM-CSF). In a specific embodiment, Therapeutics of the invention are used in any combination with TRIMETHOPRIM-SULFAMETHOXAZOLE™, DAPSONE™, PENTAMIDINE™, and/or ATOVAQUONE™ to prophylactically treat or prevent an opportunistic Pneumocystis carinii pneumonia infection. In another specific embodiment, Therapeutics of the invention are used in any combination with ISONIAZID™, RIFAMPIN™, PYRAZINAMIDE™, and/or ETHAMBUTOL™ to prophylactically treat or prevent an opportunistic Mycobacterium avium complex infection. In another specific embodiment, Therapeutics of the invention are used in any combination with RIFABUTIN™, CLARITHROMYCIN™, and/or AZITHROMYCIN™ to prophylactically treat or prevent an opportunistic Mycobacterium tuberculosis infection. In another specific embodiment, Therapeutics of the invention are used in any combination with GANCICLOVIR™, FOSCARNET™, and/or CIDOFOVIR™ to prophylactically treat or prevent an opportunistic cytomegalovirus infection. In another specific embodiment, Therapeutics of the invention are used in any combination with FLUCONAZOLE™, ITRACONAZOLE™, and/or KETOCONAZOLE™ to prophylactically treat or prevent an opportunistic fungal infection. In another specific embodiment, Therapeutics of the invention are used in any combination with ACYCLOVIR™ and/or FAMCICOLVIR™ to prophylactically treat or prevent an opportunistic herpes simplex virus type I and/or type II infection. In another specific embodiment, Therapeutics of the invention are used in any combination with PYRIMETHAMINE™ and/or LEUCOVORIN™ to prophylactically treat or prevent an opportunistic Toxoplasma gondii infection. In another specific embodiment, Therapeutics of the invention are used in any combination with LEUCOVORIN™ and/or NEUPOGEN™ to prophylactically treat or prevent an opportunistic bacterial infection.

[1123] In a further embodiment, the Therapeutics of the invention are administered in combination with an antibiotic agent. Antibiotic agents that may be administered with the Therapeutics of the invention include, but are not limited to, amoxicillin, beta-lactamases, aminoglycosides, beta-lactam (glycopeptide), beta-lactamases, Clindamycin, chloramphenicol, cephalosporins, ciprofloxacin, erythromycin, fluoroquinolones, macrolides, metronidazole, penicillins, quinolones, rapamycin, rifampin, streptomycin, sulfonamide, tetracyclines, trimethoprim, trimethoprim-sulfamethoxazole, and vancomycin.

[1124] In other embodiments, the Therapeutics of the invention are administered in combination with immunestimulants. Immunostimulants that may be administered in combination with the Therapeutics of the invention include, but are not limited to, levamisole (e.g., ERGAMISOL™), isoprinosine (e.g. INOSIPLEX™), interferons (e.g. interferon alpha), and interleukins (e.g., IL-2).

[1125] In other embodiments, Therapeutics of the invention are administered in combination with immunosuppressive agents. Immunosuppressive agents that may be administered in combination with the Therapeutics of the invention include, but are not limited to, steroids, cyclosporine, cyclosporine analogs, cyclophosphamide methylprednisone, prednisone, azathioprine, FK-506, 15-deoxyspergualin, and other immunosuppressive agents that act by suppressing the function of responding T cells. Other immunosuppressive agents that may be administered in combination with the Therapeutics of the invention include, but are not limited to, prednisolone, methotrexate, thalidomide, methoxsalen, rapamycin, leflunomide, mizoribine (BREDINN™), brequinar, deoxyspergualin, and azaspirane (SKF 105685), ORTHOCLONE OKT® 3 (muromonab-CD3), SANDIMMUNE™, NEORAL™, SANGDYA™ (cyclosporine), PROGRAF® (FK506, tacrolimus), CELLCEPT® (mycophenolate motefil, of which the active metabolite is mycophenolic acid), IMURAN™ (azathioprine), glucocorticosteroids, adrenocortical steroids such as DELTASONE™ (prednisone) and HYDELTRASOL™ (prednisolone), FOLEX™ and MEXATE™ (methotrxate), OXSORALEN-ULTRA™ (methoxsalen) and RAPAMUNE™ (sirolimus). In a specific embodiment, immunosuppressants may be used to prevent rejection of organ or bone marrow transplantation.

[1126] In an additional embodiment, Therapeutics of the invention are administered alone or in combination with one or more intravenous immune globulin preparations. Intravenous immune globulin preparations that may be administered with the Therapeutics of the invention include, but not limited to, GAMMAR™, IVEEGAM™, SANDOGLOBULIN™, GAMMAGARD S/D™, ATGAM™ (antithymocyte glubulin), and GAMIMUNE™. In a specific embodiment, Therapeutics of the invention are administered in combination with intravenous immune globulin preparations in transplantation therapy (e.g., bone marrow transplant).

[1127] In certain embodiments, the Therapeutics of the invention are administered alone or in combination with an anti-inflammatory agent. Anti-inflammatory agents that may be administered with the Therapeutics of the invention include, but are not limited to, corticosteroids (e.g. betamethasone, budesonide, cortisone, dexamethasone, hydrocortisone, methylprednisolone, prednisolone, prednisone, and triamcinolone), nonsteroidal anti-inflammatory drugs (e.g., diclofenac, diflunisal, etodolac, fenoprofen, floctafenine, flurbiprofen, ibuprofen, indomethacin, ketoprofen, meclofenamate, mefenamic acid, meloxicam, nabumetone, naproxen, oxaprozin, phenylbutazone, piroxicam, sulindac, tenoxicam, tiaprofenic acid, and tolmetin.), as well as antihistamines, aminoarylcarboxylic acid derivatives, arylacetic acid derivatives, arylbutyric acid derivatives, arylcarboxylic acids, arylpropionic acid derivatives, pyrazoles, pyrazolones, salicylic acid derivatives, thiazinecarboxamides, e-acetamidocaproic acid, S-adenosylmethionine, 3-amino-4-hydroxybutyric acid, amixetrine, bendazac, benzydamine, bucolome, difenpiramide, ditazol, emorfazone, guaiazulene, nabumetone, nimesulide, orgotein, oxaceprol, paranyline, perisoxal, pifoxime, proquazone, proxazole, and tenidap.

[1128] In an additional embodiment, the compositions of the invention are administered alone or in combination with an anti-angiogenic agent. Anti-angiogenic agents that may be administered with the compositions of the invention include, but are not limited to, Angiostatin (Entremed, Rockville, Md.), Troponin-1 (Boston Life Sciences, Boston, Mass.), anti-Invasive Factor, retinoic acid and derivatives thereof, paclitaxel (Taxol), Suramin, Tissue Inhibitor of Metalloproteinase-1, Tissue Inhibitor of Metalloproteinase-2, VEGI, Plasminogen Activator Inhibitor-1, Plasminogen Activator Inhibitor-2, and various forms of the lighter “d group” transition metals.

[1129] Lighter “d group” transition metals include, for example, vanadium, molybdenum, tungsten, titanium, niobium, and tantalum species. Such transition metal species may form transition metal complexes. Suitable complexes of the above-mentioned transition metal species include oxo transition metal complexes.

[1130] Representative examples of vanadium complexes include oxo vanadium complexes such as vanadate and vanadyl complexes. Suitable vanadate complexes include metavanadate and orthovanadate complexes such as, for example, ammonium metavanadate, sodium metavanadate, and sodium orthovanadate. Suitable vanadyl complexes include, for example, vanadyl acetylacetonate and vanadyl sulfate including vanadyl sulfate hydrates such as vanadyl sulfate mono- and trihydrates.

[1131] Representative examples of tungsten and molybdenum complexes also include oxo complexes. Suitable oxo tungsten complexes include tungstate and tungsten oxide complexes. Suitable tungstate complexes include ammonium tungstate, calcium tungstate, sodium tungstate dihydrate, and tungstic acid. Suitable tungsten oxides include tungsten (IV) oxide and tungsten (VI) oxide. Suitable oxo molybdenum complexes include molybdate, molybdenum oxide, and molybdenyl complexes. Suitable molybdate complexes include ammonium molybdate and its hydrates, sodium molybdate and its hydrates, and potassium molybdate and its hydrates. Suitable molybdenum oxides include molybdenum (VI) oxide, molybdenum (VI) oxide, and molybdic acid. Suitable molybdenyl complexes include, for example, molybdenyl acetylacetonate. Other suitable tungsten and molybdenum complexes include hydroxo derivatives derived from, for example, glycerol, tartaric acid, and sugars.

[1132] A wide variety of other anti-angiogenic factors may also be utilized within the context of the present invention. Representative examples include, but are not limited to, platelet factor 4; protamine sulphate; sulphated chitin derivatives (prepared from queen crab shells), (Murata et al., Cancer Res. 51:22-26, (1991)); Sulphated Polysaccharide Peptidoglycan Complex (SP-PG) (the function of this compound may be enhanced by the presence of steroids such as estrogen, and tamoxifen citrate); Staurosporine; modulators of matrix metabolism, including for example, proline analogs, cishydroxyproline, d,L-3,4-dehydroproline, Thiaproline, alpha,alpha-dipyridyl, aminopropionitrile fumarate; 4-propyl-5-(4-pyridinyl)-2(3H)-oxazolone; Methotrexate; Mitoxantrone; Heparin; Interferons; 2 Macroglobulin-serum; ChIMP-3 (Pavloff et al., J. Bio. Chem. 267:17321-17326, (1992)); Chymostatin (Tomkinson et al., Biochem J. 286:475-480, (1992)); Cyclodextrin Tetradecasulfate; Eponemycin; Camptothecin; Fumagillin (Ingber et al., Nature 348:555-557, (1990)); Gold Sodium Thiomalate (“GST”; Matsubara and Ziff, J. Clin. Invest. 79:1440-1446, (1987)); anticollagenase-serum; alpha2-antiplasmin (Holmes et al., J. Biol. Chem. 262(4):1659-1664, (1987)); Bisantrene (National Cancer Institute); Lobenzarit disodium (N-(2)-carboxyphenyl-4-chloroanthronilic acid disodium or “CCA”; (Takeuchi et al., Agents Actions 36:312-316, (1992)); and metalloproteinase inhibitors such as BB94.

[1133] Additional anti-angiogenic factors that may also be utilized within the context of the present invention include Thalidomide, (Celgene, Warren, N.J.); Angiostatic steroid; AGM-1470 (H. Brem and J. Folkman J Pediatr. Surg. 28:445-51 (1993)); an integrin alpha v beta 3 antagonist (C. Storgard et al., J. Clin. Invest. 103:47-54 (1999)); carboxynaminolmidazole; Carboxyamidotriazole (CAI) (National Cancer Institute, Bethesda, Md.); Conbretastatin A-4 (CA4P) (OXiGENE, Boston, Mass.); Squalamine (Magainin Pharmaceuticals, Plymouth Meeting, Pa.); TNP-470, (Tap Pharmaceuticals, Deerfield, Ill.); ZD-0101 AstraZeneca (London, UK); APRA (CT2584); Benefin, Byrostatin-1 (SC339555); CGP-41251 (PKC 412); CM101; Dexrazoxane (ICRF187); DMXAA; Endostatin; Flavopridiol; Genestein; GTE; ImmTher; Iressa (ZD1839); Octreotide (Somatostatin); Panretin; Penacillamine; Photopoint; PI-88; Prinomastat (AG-3340) Purlytin; Suradista (FCE26644); Tamoxifen (Nolvadex); Tazarotene; Tetrathiomolybdate; Xeloda (Capecitabine); and 5-Fluorouracil.

[1134] Anti-angiogenic agents that may be administered in combination with the compounds of the invention may work through a variety of mechanisms including, but not limited to, inhibiting proteolysis of the extracellular matrix, blocking the function of endothelial cell-extracellular matrix adhesion molecules, by antagonizing the function of angiogenesis inducers such as growth factors, and inhibiting integrin receptors expressed on proliferating endothelial cells. Examples of anti-angiogenic inhibitors that interfere with extracellular matrix proteolysis and which may be administered in combination with the compositions of the invention include, but are not limited to, AG-3340 (Agouron, La Jolla, Calif.), BAY-12-9566 (Bayer, West Haven, Conn.), BMS-275291 (Bristol Myers Squibb, Princeton, N.J.), CGS-27032A (Novartis, East Hanover, N.J.), Marimastat (British Biotech, Oxford, UK), and Metastat (Aetema, St-Foy, Quebec). Examples of anti-angiogenic inhibitors that act by blocking the function of endothelial cell-extracellular matrix adhesion molecules and which may be administered in combination with the compositions of the invention include, but are not limited to, EMD-121974 (Merck KcgaA Darmstadt, Germany) and Vitaxin (Ixsys, La Jolla, Calif./Medimmune, Gaithersburg, Md.). Examples of anti-angiogenic agents that act by directly antagonizing or inhibiting angiogenesis inducers and which may be administered in combination with the compositions of the invention include, but are not limited to, Angiozyme (Ribozyme, Boulder, Colo.), Anti-VEGF antibody (Genentech, S. San Francisco, Calif.), PTK-787/ZK-225846 (Novartis, Basel, Switzerland), SU-101 (Sugen, S. San Francisco, Calif.), SU-5416 (Sugen/Pharmacia Upjohn, Bridgewater, N.J.), and SU-6668 (Sugen). Other anti-angiogenic agents act to indirectly inhibit angiogenesis. Examples of indirect inhibitors of angiogenesis which may be administered in combination with the compositions of the invention include, but are not limited to, IM-862 (Cytran, Kirkland, Wash.), Interferon-alpha, IL-12 (Roche, Nutley, N.J.), and Pentosan polysulfate (Georgetown University, Washington, D.C.).

[1135] In particular embodiments, the use of compositions of the invention in combination with anti-angiogenic agents is contemplated for the treatment, prevention, and/or amelioration of an autoimmune disease, such as for example, an autoimmune disease described herein.

[1136] In a particular embodiment, the use of compositions of the invention in combination with anti-angiogenic agents is contemplated for the treatment, prevention, and/or amelioration of arthritis. In a more particular embodiment, the use of compositions of the invention in combination with anti-angiogenic agents is contemplated for the treatment, prevention, and/or amelioration of rheumatoid arthritis.

[1137] In another embodiment, the polynucleotides encoding a polypeptide of the present invention are administered in combination with an angiogenic protein, or polynucleotides encoding an angiogenic protein. Examples of angiogenic proteins that may be administered with the compositions of the invention include, but are not limited to, acidic and basic fibroblast growth factors, VEGF-1, VEGF-2, VEGF-3, epidermal growth factor alpha and beta, platelet-derived endothelial cell growth factor, platelet-derived growth factor, tumor necrosis factor alpha, hepatocyte growth factor, insulin-like growth factor, colony stimulating factor, macrophage colony stimulating factor, granulocyte/macrophage colony stimulating factor, and nitric oxide synthase.

[1138] In additional embodiments, compositions of the invention are administered in combination with a chemotherapeutic agent. Chemotherapeutic agents that may be administered with the Therapeutics of the invention include, but are not limited to alkylating agents such as nitrogen mustards (for example, Mechlorethamine, cyclophosphamide, Cyclophosphamide Ifosfamide, Melphalan (L-sarcolysin), and Chlorambucil), ethylenimines and methylmelamines (for example, Hexamethylmelamine and Thiotepa), alkyl sulfonates (for example, Busulfan), nitrosoureas (for example, Carmustine (BCNU), Lomustine (CCNU), Semustine (methyl-CCNU), and Streptozocin (streptozotocin)), triazenes (for example, Dacarbazine (DTIC; dimethyltriazenoimidazolecarboxamide)), folic acid analogs (for example, Methotrexate (amethopterin)), pyrimidine analogs (for example, Fluorouacil (5-fluorouracil; 5-FU), Floxuridine (fluorodeoxyuridine; FudR), and Cytarabine (cytosine arabinoside)), purine analogs and related inhibitors (for example, Mercaptopurine (6-mercaptopurine; 6-MP), Thioguanine (6-thioguanine; TG), and Pentostatin (2′-deoxycoformycin)), vinca alkaloids (for example, Vinblastine (VLB, vinblastine sulfate)) and Vincristine (vincristine sulfate)), epipodophyllotoxins (for example, Etoposide and Teniposide), antibiotics (for example, Dactinomycin (actinomycin D), Daunorubicin (daunomycin; rubidomycin), Doxorubicin, Bleomycin, Plicamycin (mithramycin), and Mitomycin (mitomycin C), enzymes (for example, L-Asparaginase), biological response modifiers (for example, Interferon-alpha and interferon-alpha-2b), platinum coordination compounds (for example, Cisplatin (cis-DDP) and Carboplatin), anthracenedione (Mitoxantrone), substituted ureas (for example, Hydroxyurea), methylhydrazine derivatives (for example, Procarbazine (N-methylhydrazine; M1H), adrenocorticosteroids (for example, Prednisone), progestins (for example, Hydroxyprogesterone caproate, Medroxyprogesterone, Medroxyprogesterone acetate, and Megestrol acetate), estrogens (for example, Diethylstilbestrol (DES), Diethylstilbestrol diphosphate, Estradiol, and Ethinyl estradiol), antiestrogens (for example, Tamoxifen), androgens (Testosterone proprionate, and Fluoxymesterone), antiandrogens (for example, Flutamide), gonadotropin-releasing hormone analogs (for example, Leuprolide), other hormones and hormone analogs (for example, methyltestosterone, estramustine, estramustine phosphate sodium, chlorotrianisene, and testolactone), and others (for example, dicarbazine, glutamic acid, and mitotane).

[1139] In one embodiment, the compositions of the invention are administered in combination with one or more of the following drugs: infliximab (also known as Remicade™ Centocor, Inc.), Trocade (Roche, RO-32-3555), Leflunomide (also known as Arava™ from Hoechst Marion Roussel), Kineret™ (an IL-1 Receptor antagonist also known as Anakinra from Amgen, Inc.)

[1140] In a specific embodiment, compositions of the invention are administered in combination with CHOP (cyclophosphamide, doxorubicin, vincristine, and prednisone) or combination of one or more of the components of CHOP. In one embodiment, the compositions of the invention are administered in combination with anti-CD20 antibodies, human monoclonal anti-CD20 antibodies. In another embodiment, the compositions of the invention are administered in combination with anti-CD20 antibodies and CHOP, or anti-CD20 antibodies and any combination of one or more of the components of CHOP, particularly cyclophosphamide and/or prednisone. In a specific embodiment, compositions of the invention are administered in combination with Rituximab. In a further embodiment, compositions of the invention are administered with Rituximab and CHOP, or Rituximab and any combination of one or more of the components of CHOP, particularly cyclophosphamide and/or prednisone. In a specific embodiment, compositions of the invention are administered in combination with tositumomab. In a further embodiment, compositions of the invention are administered with tositumomab and CHOP, or tositumomab and any combination of one or more of the components of CHOP, particularly cyclophosphamide and/or prednisone. The anti-CD20 antibodies may optionally be associated with radioisotopes, toxins or cytotoxic prodrugs.

[1141] In another specific embodiment, the compositions of the invention are administered in combination Zevalin™. In a further embodiment, compositions of the invention are administered with Zevalin™ and CHOP, or Zevalin™ and any combination of one or more of the components of CHOP, particularly cyclophosphamide and/or prednisone. Zevalin™ may be associated with one or more radisotopes. Particularly preferred isotopes are ⁹⁰Y and ¹¹¹In.

[1142] In an additional embodiment, the Therapeutics of the invention are administered in combination with cytokines. Cytokines that may be administered with the Therapeutics of the invention include, but are not limited to, IL2, IL3, IL4, IL5, IL6, IL7, IL10, IL12, IL13, IL15, anti-CD40, CD40L, IFN-gamma and TNF-alpha. In another embodiment, Therapeutics of the invention may be administered with any interleukin, including, but not limited to, IL-1alpha, IL-1beta, IL-2, IL-3, IL-4, IL-5, IL-6, IL-7, IL-8, IL-9, IL-10, IL-11, IL-12, IL-13, IL-14, IL-15, IL-16, IL-17, IL-18, IL-19, IL-20, and IL-21.

[1143] In one embodiment, the Therapeutics of the invention are administered in combination with members of the TNF family. TNF, TNF-related or TNF-like molecules that may be administered with the Therapeutics of the invention include, but are not limited to, soluble forms of TNF-alpha, lymphotoxin-alpha (LT-alpha, also known as TNF-beta), LT-beta (found in complex heterotrimer LT-alpha2-beta), OPGL, FasL, CD27L, CD30L, CD40L, 4-1BBL, DcR3, OX40L, TNF-gamma (International Publication No. WO 96/14328), AIM-I (International Publication No. WO 97/33899), endokine-alpha (International Publication No. WO 98/07880), OPG, and neutrokine-alpha (International Publication No. WO 98/18921, OX40, and nerve growth factor (NGF), and soluble forms of Fas, CD30, CD27, CD40 and 4-IBB, TR2 (International Publication No. WO 96/34095), DR3 (International Publication No. WO 97/33904), DR4 (International Publication No. WO 98/32856), TR5 (International Publication No. WO 98/30693), TRANK, TR9 (International Publication No. WO 98/56892), TR10 (International Publication No. WO 98/54202), 312C2 (International Publication No. WO 98/06842), and TR12, and soluble forms CD154, CD70, and CD153.

[1144] In an additional embodiment, the Therapeutics of the invention are administered in combination with angiogenic proteins. Angiogenic proteins that may be administered with the Therapeutics of the invention include, but are not limited to, Glioma Derived Growth Factor (GDGF), as disclosed in European Patent Number EP-399816; Platelet Derived Growth Factor-A (PDGF-A), as disclosed in European Patent Number EP-682 110; Platelet Derived Growth Factor-B (PDGF-B), as disclosed in European Patent Number EP-282317; Placental Growth Factor (PIGF), as disclosed in International Publication Number WO 92/06194; Placental Growth Factor-2 (PIGF-2), as disclosed in Hauser et al., Growth Factors, 4:259-268 (1993); Vascular Endothelial Growth Factor (VEGF), as disclosed in International Publication Number WO 90/13649; Vascular Endothelial Growth Factor-A (VEGF-A), as disclosed in European Patent Number EP-506477; Vascular Endothelial Growth Factor-2 (VEGF-2), as disclosed in International Publication Number WO 96/39515; Vascular Endothelial Growth Factor B (VEGF-3); Vascular Endothelial Growth Factor B-186 (VEGF-B186), as disclosed in International Publication Number WO 96/26736; Vascular Endothelial Growth Factor-D (VEGF-D), as disclosed in International Publication Number WO 98/02543; Vascular Endothelial Growth Factor-D (VEGF-D), as disclosed in International Publication Number WO 98/07832; and Vascular Endothelial Growth Factor-E (VEGF-E), as disclosed in German Patent Number DE19639601. The above mentioned references are herein incorporated by reference in their entireties.

[1145] In an additional embodiment, the Therapeutics of the invention are administered in combination with Fibroblast Growth Factors. Fibroblast Growth Factors that may be administered with the Therapeutics of the invention include, but are not limited to, FGF-1, FGF-2, FGF-3, FGF-4, FGF-5, FGF-6, FGF-7, FGF-8, FGF-9, FGF-10, FGF-11, FGF-12, FGF-13, FGF-14, and FGF-15.

[1146] In an additional embodiment, the Therapeutics of the invention are administered in combination with hematopoietic growth factors. Hematopoietic growth factors that may be administered with the Therapeutics of the invention include, but are not limited to, granulocyte macrophage colony stimulating factor (GM-CSF) (sargramostim, LEUKINE™, PROKINE™), granulocyte colony stimulating factor (G-CSF) (filgrastim, NEUPOGEN™), macrophage colony stimulating factor (M-CSF, CSF-1) erythropoietin (epoetin alfa, EPOGEN™, PROCRIT™), stem cell factor (SCF, c-kit ligand, steel factor), megakaryocyte colony stimulating factor, PIXY321 (a GMCSF/IL-3 fusion protein), interleukins, especially any one or more of IL-1 through IL-12, interferon-gamma, or thrombopoietin.

[1147] In certain embodiments, Therapeutics of the present invention are administered in combination with adrenergic blockers, such as, for example, acebutolol, atenolol, betaxolol, bisoprolol, carteolol, labetalol, metoprolol, nadolol, oxprenolol, penbutolol, pindolol, propranolol, sotalol, and timolol.

[1148] In another embodiment, the Therapeutics of the invention are administered in combination with an antiarrhythmic drug (e.g., adenosine, amidoarone, bretylium, digitalis, digoxin, digitoxin, diliazem, disopyramide, esmolol, flecainide, lidocaine, mexiletine, moricizine, phenyloin, procainamide, N-acetyl procainamide, propafenone, propranolol, quinidine, sotalol, tocainide, and verapamil).

[1149] In another embodiment, the Therapeutics of the invention are administered in combination with diuretic agents, such as carbonic anhydrase-inhibiting agents (e.g., acetazolamide, dichlorphenamide, and methazolamide), osmotic diuretics (e.g., glycerin, isosorbide, mannitol, and urea), diuretics that inhibit Na⁺—K⁺-2Cl⁻ symport (e.g., furosemide, bumetanide, azosemide, piretanide, tripamide, ethacrynic acid, muzolimine, and torsemide), thiazide and thiazide-like diuretics (e.g., bendroflumethiazide, benzthiazide, chlorothiazide, hydrochlorothiazide, hydroflumethiazide, methyclothiazide, polythiazide, trichormethiazide, chlorthalidone, indapamide, metolazone, and quinethazone), potassium sparing diuretics (e.g., amiloride and triamterene), and mineralcorticoid receptor antagonists (e.g., spironolactone, canrenone, and potassium canrenoate).

[1150] In one embodiment, the Therapeutics of the invention are administered in combination with treatments for endocrine and/or hormone imbalance disorders. Treatments for endocrine and/or hormone imbalance disorders include, but are not limited to, ¹²⁷I, radioactive isotopes of iodine such as ¹³¹I and ¹²³I; recombinant growth hormone, such as HUMATROPE™ (recombinant somatropin); growth hormone analogs such as PROTROPIN™ (somatrem); dopamine agonists such as PARLODEL™ (bromocriptine); somatostatin analogs such as SANDOSTATIN™ (octreotide); gonadotropin preparations such as PREGNYL™, A.P.L.™ and PROFASI™ (chorionic gonadotropin (CG)), PERGONAL™ (menotropins), and METRODIN™ (urofollitropin (uFSH)); synthetic human gonadotropin releasing hormone preparations such as FACTREL™ and LUTREPULSE™ (gonadorelin hydrochloride); synthetic gonadotropin agonists such as LUPRON™ (leuprolide acetate), SUPPRELIN™ (histrelin acetate), SYNAREL™ (nafarelin acetate), and ZOLADEX™ (goserelin acetate); synthetic preparations of thyrotropin-releasing hormone such as RELEFACT TRH™ and THYPINONE™ (protirelin); recombinant human TSH such as THYROGEN™; synthetic preparations of the sodium salts of the natural isomers of thyroid hormones such as L-T₄™, SYNTHROID™ and LEVOTHROID™ (levothyroxine sodium), L-T₃™, CYTOMEL™ and TRIOSTAT™ (liothyroine sodium), and THYROLAR™ (liotrix); antithyroid compounds such as 6-n-propylthiouracil (propylthiouracil), 1-methyl-2-mercaptoimidazole and TAPAZOLE™ (methimazole), NEO-MERCAZOLE™ (carbimazole); beta-adrenergic receptor antagonists such as propranolol and esmolol; Ca²⁺ channel blockers; dexamethasone and iodinated radiological contrast agents such as TELEPAQUE™ (iopanoic acid) and ORAGRAFIN™ (sodium ipodate).

[1151] Additional treatments for endocrine and/or hormone imbalance disorders include, but are not limited to, estrogens or conjugated estrogens such as ESTRACE™ (estradiol), ESTINYL™ (ethinyl estradiol), PREMARIN™, ESTRATAB™, ORTHO-EST™, OGEN™ and estropipate (estrone), ESTROVIS™ (quinestrol), ESTRADERM™ (estradiol), DELESTROGEN™ and VALERGEN™ (estradiol valerate), DEPO-ESTRADIOL CYPIONATE™ and ESTROJECT LA™ (estradiol cypionate); antiestrogens such as NOLVADEX™ (tamoxifen), SEROPHENE™ and CLOMID™ (clomiphene); progestins such as DURALUTIN™ (hydroxyprogesterone caproate), MPA™ and DEPO-PROVERA™ (medroxyprogesterone acetate), PROVERA™ and CYCRIN™ (MPA), MEGACE™ (megestrol acetate), NORLUTIN™ (norethindrone), and NORLUTATE™ and AYGESTIN™ (norethindrone acetate); progesterone implants such as NORPLANT SYSTEM™ (subdermal implants of norgestrel); antiprogestins such as RU 486™ (mifepristone); hormonal contraceptives such as ENOVID™ (norethynodrel plus mestranol), PROGESTASERT™ (intrauterine device that releases progesterone), LOESTRIN™, BREVICON™, MODICON™, GENORA™, NELONA™, NORINYL™, OVACON-35™ and OVACON-50™ (ethinyl estradiol/norethindrone), LEVLEN™, NORDETTE™, TR1-LEVLEN™ and TRIPHASIL-21™ (ethinyl estradiol/levonorgestrel) LO/OVRAL™ and OVRAL™ (ethinyl estradiol/norgestrel), DEMULEN™ (ethinyl estradiol/ethynodiol diacetate), NORINYL™, ORTHO-NOVUM™, NORETHIN™, GENORA™, and NELOVA™ (norethindrone/mestranol), DESOGEN™ and ORTHO-CEPT™ (ethinyl estradiol/desogestrel), ORTHO-CYCLEN™ and ORTHO-TRICYCLEN™ (ethinyl estradiol/norgestimate), MICRONOR™ and NOR-QD™ (norethindrone), and OVRETTE™ (norgestrel).

[1152] Additional treatments for endocrine and/or hormone imbalance disorders include, but are not limited to, testosterone esters such as methenolone acetate and testosterone undecanoate; parenteral and oral androgens such as TESTOJECT-50™ (testosterone), TESTEX™ (testosterone propionate), DELATESTRYL™ (testosterone enanthate), DEPO-TESTOSTERONE™ (testosterone cypionate), DANOCRINE™ (danazol), HALOTESTIN™ (fluoxymesterone), ORETON METHYL™, TESTRED™ and VIRILON™ (methyltestosterone), and OXANDRIN™ (oxandrolone); testosterone transdermal systems such as TESTODERM™; androgen receptor antagonist and 5-alpha-reductase inhibitors such as ANDROCUR™ (cyproterone acetate), EULEXIN™ (flutamide), and PROSCAR™ (finasteride); adrenocorticotropic hormone preparations such as CORTROSYN™ (cosyntropin); adrenocortical steroids and their synthetic analogs such as ACLOVATE™ (alclometasone dipropionate), CYCLOCORT™ (amcinonide), BECLOVENT™ and VANCERIL™ (beclomethasone dipropionate), CELESTONE™ (betamethasone), BENISONE™ and UTICORT™ (betamethasone benzoate), DIPROSONE™ (betamethasone dipropionate), CELE STONE PHOSPHATE™ (betamethasone sodium phosphate), CELE STONE SOLUSPAN™ (betamethasone sodium phosphate and acetate), BETA-VAL™ and VALISONE™ (betamethasone valerate), TEMOVATE™ (clobetasol propionate), CLODERM™ (clocortolone pivalate), CORTEF™ and HYDROCORTONE™ (cortisol (hydrocortisone)), HYDROCORTONE ACETATE™ (cortisol (hydrocortisone) acetate), LOCOID™ (cortisol (hydrocortisone) butyrate), HYDROCORTONE PHOSPHATE™ (cortisol (hydrocortisone) sodium phosphate), A-HYDROCORT™ and SOLU CORTEF™ (cortisol (hydrocortisone) sodium succinate), WESTCORT™ (cortisol (hydrocortisone) valerate), CORTISONE ACETATE™ (cortisone acetate), DESOWEN™ and TRIDESILON™ (desonide), TOPICORT™ (desoximetasone), DECADRON™ (dexamethasone), DECADRON LA™ (dexamethasone acetate), DECADRON PHOSPHATE™ and HEXADROL PHOSPHATE™ (dexamethasone sodium phosphate), FLORONE™ and MAXIFLOR™ (diflorasone diacetate), FLORINEF ACETATE™ (fludrocortisone acetate), AEROBID™ and NASALIDE™ (flunisolide), FLUONID™ and SYNALAR™ (fluocinolone acetonide), LIDEX™ (fluocinonide), FLUOR-OP™ and FML™ (fluorometholone), CORDRAN™ (flurandrenolide), HALOG™ (halcinonide), HMS LIZUIFILM™ (medrysone), MEDROL™ (methylprednisolone), DEPO-MEDROL™ and MEDROL ACETATE™ (methylprednisone acetate), A-METHAPRED™ and SOLUMEDROL™ (methylprednisolone sodium succinate), ELOCON™ (mometasone furoate), HALDRONE™ (paramethasone acetate), DELTA-CORTEF™ (prednisolone), ECONOPRED™ (prednisolone acetate), HYDELTRASOL™ (prednisolone sodium phosphate), HYDELTRA-T.B.A™ (prednisolone tebutate), DELTASONE™ (prednisone), ARISTOCORT™ and KENACORT™ (triamcinolone), KENALOG™ (triamcinolone acetonide), ARISTOCORT™ and KENACORT DIACETATE™ (triamcinolone diacetate), and ARISTOSPAN™ (triamcinolone hexacetonide); inhibitors of biosynthesis and action of adrenocortical steroids such as CYTADREN™ (aminoglutethimide), NIZORAL™ (ketoconazole), MODRASTANE™ (trilostane), and METOPIRONE™ (metyrapone); bovine, porcine or human insulin or mixtures thereof; insulin analogs; recombinant human insulin such as HUMULIN™ and NOVOLIN™; oral hypoglycemic agents such as ORAMIDE™ and ORINASE™ (tolbutamide), DIABINESE™ (chlorpropamide), TOLAMIDE™ and TOLINASE™ (tolazamide), DYMELOR™ (acetohexamide), glibenclamide, MICRONASE™, DIBETA™ and GLYNASE™ (glyburide), GLUCOTROL™ (glipizide), and DIAMICRON™ (gliclazide), GLUCOPHAGE™ (metformin), ciglitazone, pioglitazone, and alpha-glucosidase inhibitors; bovine or porcine glucagon; somatostatins such as SANDOSTATIN™ (octreotide); and diazoxides such as PROGLYCEM™ (diazoxide).

[1153] In one embodiment, the Therapeutics of the invention are administered in combination with treatments for uterine motility disorders. Treatments for uterine motility disorders include, but are not limited to, estrogen drugs such as conjugated estrogens (e.g., PREMARIN® and ESTRATAB®), estradiols (e.g., CLIMARA® and ALORA®), estropipate, and chlorotrianisene; progestin drugs (e.g., AMEN® (medroxyprogesterone), MICRONOR® (norethidrone acetate), PROMETRIUM® progesterone, and megestrol acetate); and estrogen/progesterone combination therapies such as, for example, conjugated estrogens/medroxyprogesterone (e.g., PREMPRO™ and PREMPHASE®) and norethindrone acetate/ethinyl estsradiol (e.g., FEMHRT™).

[1154] In an additional embodiment, the Therapeutics of the invention are administered in combination with drugs effective in treating iron deficiency and hypochromic anemias, including but not limited to, ferrous sulfate (iron sulfate, FEOSOL™), ferrous fumarate (e.g., FEOSTAT™), ferrous gluconate (e.g., FERGON™), polysaccharide-iron complex (e.g., NIFEREX™), iron dextran injection (e.g., INFED™), cupric sulfate, pyroxidine, riboflavin, Vitamin B₁₂, cyancobalamin injection (e.g., REDISOL™, RUBRAMIN PC™), hydroxocobalamin, folic acid (e.g., FOLVITE™), leucovorin (folinic acid, 5-CHOH4PteGlu, citrovorum factor) or WELLCOVORIN (Calcium salt of leucovorin), transferrin or ferritin.

[1155] In certain embodiments, the Therapeutics of the invention are administered in combination with agents used to treat psychiatric disorders. Psychiatric drugs that may be administered with the Therapeutics of the invention include, but are not limited to, antipsychotic agents (e.g., chlorpromazine, chlorprothixene, clozapine, fluphenazine, haloperidol, loxapine, mesoridazine, molindone, olanzapine, perphenazine, pimozide, quetiapine, risperidone, thioridazine, thiothixene, trifluoperazine, and triflupromazine), antimanic agents (e.g., carbamazepine, divalproex sodium, lithium carbonate, and lithium citrate), antidepressants (e.g., amitriptyline, amoxapine, bupropion, citalopram, clomipramine, desipramine, doxepin, fluvoxamine, fluoxetine, imipramine, isocarboxazid, maprotiline, mirtazapine, nefazodone, nortriptyline, paroxetine, phenelzine, protriptyline, sertraline, tranylcypromine, trazodone, trimipramine, and venlafaxine), antianxiety agents (e.g., alprazolam, buspirone, chlordiazepoxide, clorazepate, diazepam, halazepam, lorazepam, oxazepam, and prazepam), and stimulants (e.g., d-amphetamine, methylphenidate, and pemoline).

[1156] In other embodiments, the Therapeutics of the invention are administered in combination with agents used to treat neurological disorders. Neurological agents that may be administered with the Therapeutics of the invention include, but are not limited to, antiepileptic agents (e.g., carbamazepine, clonazepam, ethosuximide, phenobarbital, phenyloin, primidone, valproic acid, divalproex sodium, felbamate, gabapentin, lamotrigine, levetiracetam, oxcarbazepine, tiagabine, topiramate, zonisamide, diazepam, lorazepam, and clonazepam), antiparkinsonian agents (e.g., levodopa/carbidopa, selegiline, amantidine, bromocriptine, pergolide, ropinirole, pramipexole, benztropine; biperiden; ethopropazine; procyclidine; trihexyphenidyl, tolcapone), and ALS therapeutics (e.g. riluzole).

[1157] In another embodiment, Therapeutics of the invention are administered in combination with vasodilating agents and/or calcium channel blocking agents. Vasodilating agents that may be administered with the Therapeutics of the invention include, but are not limited to, Angiotensin Converting Enzyme (ACE) inhibitors (e.g., papaverine, isoxsuprine, benazepril, captopril, cilazapril, enalapril, enalaprilat, fosinopril, lisinopril, moexipril, perindopril, quinapril, ramipril, spirapril, trandolapril, and nylidrin), and nitrates (e.g., isosorbide dinitrate, isosorbide mononitrate, and nitroglycerin). Examples of calcium channel blocking agents that may be administered in combination with the Therapeutics of the invention include, but are not limited to amlodipine, bepridil, diltiazem, felodipine, flunarizine, isradipine, nicardipine, nifedipine, nimodipine, and verapamil.

[1158] In certain embodiments, the Therapeutics of the invention are administered in combination with treatments for gastrointestinal disorders. Treatments for gastrointestinal disorders that may be administered with the Therapeutic of the invention include, but are not limited to, H2 histamine receptor antagonists (e.g., TAGAMET™ (cimetidine), ZANTAC™ (ranitidine), PEPCID™ (famotidine), and AXID™ (nizatidine)); inhibitors of H⁺, K⁺ ATPase (e.g., PREVACID™ (lansoprazole) and PRILOSEC™ (omeprazole)); Bismuth compounds (e.g., PEPTO-BISMOL™ (bismuth subsalicylate) and DE-NOL™ (bismuth subcitrate)); various antacids; sucralfate; prostaglandin analogs (e.g. CYTOTEC™ (misoprostol)); muscarinic cholinergic antagonists; laxatives (e.g., surfactant laxatives, stimulant laxatives, saline and osmotic laxatives); antidiarrheal agents (e.g., LOMOTIL™ (diphenoxylate), MOTOFEN™ (diphenoxin), and IMODIUM™ (loperamide hydrochloride)), synthetic analogs of somatostatin such as SANDOSTATIN™ (octreotide), antiemetic agents (e.g., ZOFRAN™ (ondansetron), KYTRIL™ (granisetron hydrochloride), tropisetron, dolasetron, metoclopramide, chlorpromazine, perphenazine, prochlorperazine, promethazine, thiethylperazine, triflupromazine, domperidone, haloperidol, droperidol, trimethobenzamide, dexamethasone, methylprednisolone, dronabinol, and nabilone); D2 antagonists (e.g., metoclopramide, trimethobenzamide and chlorpromazine); bile salts; chenodeoxycholic acid; ursodeoxycholic acid; and pancreatic enzyme preparations such as pancreatin and pancrelipase.

[1159] In additional embodiments, the Therapeutics of the invention are administered in combination with other therapeutic or prophylactic regimens, such as, for example, radiation therapy.

### Example 14

### Method of Treating Decreased Levels of the Polypeptide

[1160] The present invention relates to a method for treating an individual in need of an increased level of a polypeptide of the invention in the body comprising administering to such an individual a composition comprising a therapeutically effective amount of an agonist of the invention (including polypeptides of the invention). Moreover, it will be appreciated that conditions caused by a decrease in the standard or normal expression level of a polypeptide of the present invention in an individual can be treated by administering the agonist or antagonist of the present invention. Thus, the invention also provides a method of treatment of an individual in need of an increased level of the polypeptide comprising administering to such an individual a Therapeutic comprising an amount of the agonist or antagonist to increase the activity level of the polypeptide in such an individual.

[1161] For example, a patient with decreased levels of a polypeptide receives a daily dose 0.1-100 ug/kg of the agonist or antagonist for six consecutive days. The exact details of the dosing scheme, based on administration and formulation, are provided in Example 13.

### Example 15

### Method of Treating Increased Levels of the Polypeptide

[1162] The present invention also relates to a method of treating an individual in need of a decreased level of a polypeptide of the invention in the body comprising administering to such an individual a composition comprising a therapeutically effective amount of an antagonist of the invention (including polypeptides and antibodies of the invention).

[1163] In one example, antisense technology is used to inhibit production of a polypeptide of the present invention. This technology is one example of a method of decreasing levels of a polypeptide, due to a variety of etiologies, such as cancer.

[1164] For example, a patient diagnosed with abnormally increased levels of a polypeptide is administered intravenously antisense polynucleotides at 0.5, 1.0, 1.5, 2.0 and 3.0 mg/kg day for 21 days. This treatment is repeated after a 7-day rest period if the treatment was well tolerated. The antisense polynucleotides of the present invention can be formulated using techniques and formulations described herein (e.g. see Example 13), or otherwise known in the art.

### Example 16

### Method of Treatment Using Gene Therapy—Ex Vivo

[1165] One method of gene therapy transplants fibroblasts, which are capable of expressing a polypeptide, onto a patient. Generally, fibroblasts are obtained from a subject by skin biopsy. The resulting tissue is placed in tissue-culture medium and separated into small pieces. Small chunks of the tissue are placed on a wet surface of a tissue culture flask, approximately ten pieces are placed in each flask. The flask is turned upside down, closed tight and left at room temperature over night. After 24 hours at room temperature, the flask is inverted and the chunks of tissue remain fixed to the bottom of the flask and fresh media (e.g., Ham's F12 media, with 10% FBS, penicillin and streptomycin) is added. The flasks are then incubated at 37 degree C. for approximately one week.

[1166] At this time, fresh media is added and subsequently changed every several days. After an additional two weeks in culture, a monolayer of fibroblasts emerge. The monolayer is trypsinized and scaled into larger flasks.

[1167] pMV-7 (Kirschmeier, P. T. et al., DNA, 7:219-25 (1988)), flanked by the long terminal repeats of the Moloney murine sarcoma virus, is digested with EcoRI and HindIII and subsequently treated with calf intestinal phosphatase. The linear vector is fractionated on agarose gel and purified, using glass beads.

[1168] The cDNA encoding a polypeptide of the present invention can be amplified using PCR primers which correspond to the 5′ and 3′ end sequences respectively as set forth in Example 1 using primers and having appropriate restriction sites and initiation/stop codons, if necessary. Preferably, the 5′ primer contains an EcoRI site and the 3′ primer includes a HindIII site. Equal quantities of the Moloney murine sarcoma virus linear backbone and the amplified EcoRI and HindIII fragment are added together, in the presence of T4 DNA ligase. The resulting mixture is maintained under conditions appropriate for ligation of the two fragments. The ligation mixture is then used to transform bacteria HB101, which are then plated onto agar containing kanamycin for the purpose of confirming that the vector has the gene of interest properly inserted.

[1169] The amphotropic pA317 or GP+am12 packaging cells are grown in tissue culture to confluent density in Dulbecco's Modified Eagles Medium (DMEM) with 10% calf serum (CS), penicillin and streptomycin. The MSV vector containing the gene is then added to the media and the packaging cells transduced with the vector. The packaging cells now produce infectious viral particles containing the gene (the packaging cells are now referred to as producer cells).

[1170] Fresh media is added to the transduced producer cells, and subsequently, the media is harvested from a 10 cm plate of confluent producer cells. The spent media, containing the infectious viral particles, is filtered through a millipore filter to remove detached producer cells and this media is then used to infect fibroblast cells. Media is removed from a sub-confluent plate of fibroblasts and quickly replaced with the media from the producer cells. This media is removed and replaced with fresh media. If the titer of virus is high, then virtually all fibroblasts will be infected and no selection is required. If the titer is very low, then it is necessary to use a retroviral vector that has a selectable marker, such as neo or his. Once the fibroblasts have been efficiently infected, the fibroblasts are analyzed to determine whether protein is produced.

[1171] The engineered fibroblasts are then transplanted onto the host, either alone or after having been grown to confluence on cytodex 3 microcarrier beads.

### Example 17

### Gene Therapy Using Endogenous Genes Corresponding To Polynucleotides of the Invention

[1172] Another method of gene therapy according to the present invention involves operably associating the endogenous polynucleotide sequence of the invention with a promoter via homologous recombination as described, for example, in U.S. Pat. No. 5,641,670, issued Jun. 24, 1997; International Publication NO: WO 96/29411, published Sep. 26, 1996; International Publication NO: WO 94/12650, published Aug. 4, 1994; Koller et al., Proc. Natl. Acad. Sci. USA, 86:8932-8935 (1989); and Zijlstra et al., Nature, 342:435-438 (1989). This method involves the activation of a gene which is present in the target cells, but which is not expressed in the cells, or is expressed at a lower level than desired.

[1173] Polynucleotide constructs are made which contain a promoter and targeting sequences, which are homologous to the 5′ non-coding sequence of endogenous polynucleotide sequence, flanking the promoter. The targeting sequence will be sufficiently near the 5′ end of the polynucleotide sequence so the promoter will be operably linked to the endogenous sequence upon homologous recombination. The promoter and the targeting sequences can be amplified using PCR. Preferably, the amplified promoter contains distinct restriction enzyme sites on the 5′ and 3′ ends. Preferably, the 3′ end of the first targeting sequence contains the same restriction enzyme site as the 5′ end of the amplified promoter and the 5′ end of the second targeting sequence contains the same restriction site as the 3′ end of the amplified promoter.

[1174] The amplified promoter and the amplified targeting sequences are digested with the appropriate restriction enzymes and subsequently treated with calf intestinal phosphatase. The digested promoter and digested targeting sequences are added together in the presence of T4 DNA ligase. The resulting mixture is maintained under conditions appropriate for ligation of the two fragments. The construct is size fractionated on an agarose gel, then purified by phenol extraction and ethanol precipitation.

[1175] In this Example, the polynucleotide constructs are administered as naked polynucleotides via electroporation. However, the polynucleotide constructs may also be administered with transfection-facilitating agents, such as liposomes, viral sequences, viral particles, precipitating agents, etc. Such methods of delivery are known in the art.

[1176] Once the cells are transfected, homologous recombination will take place which results in the promoter being operably linked to the endogenous polynucleotide sequence. This results in the expression of polynucleotide corresponding to the polynucleotide in the cell. Expression may be detected by immunological staining, or any other method known in the art.

[1177] Fibroblasts are obtained from a subject by skin biopsy. The resulting tissue is placed in DMEM+10% fetal calf serum. Exponentially growing or early stationary phase fibroblasts are trypsinized and rinsed from the plastic surface with nutrient medium. An aliquot of the cell suspension is removed for counting, and the remaining cells are subjected to centrifugation. The supernatant is aspirated and the pellet is resuspended in 5 ml of electroporation buffer (20 mM HEPES pH 7.3, 137 mM NaCl, 5 mM KCG, 0.7 mM Na₂ HPO₄, 6 mM dextrose). The cells are recentrifuged, the supernatant aspirated, and the cells resuspended in electroporation buffer containing 1 mg/ml acetylated bovine serum albumin. The final cell suspension contains approximately 3×10⁶ cells/ml. Electroporation should be performed immediately following resuspension.

[1178] Plasmid DNA is prepared according to standard techniques. For example, to construct a plasmid for targeting to the locus corresponding to the polynucleotide of the invention, plasmid pUC18 (MBI Fermentas, Amherst, N.Y.) is digested with HindIII. The CMV promoter is amplified by PCR with an XbaI site on the 5′ end and a BamHI site on the 3′ end. Two non-coding sequences are amplified via PCR: one non-coding sequence (fragment 1) is amplified with a HindIII site at the 5′ end and an Xba site at the 3′end; the other non-coding sequence (fragment 2) is amplified with a BamHI site at the 5′end and a HindIII site at the 3′end. The CMV promoter and the fragments (1 and 2) are digested with the appropriate enzymes (CMV promoter—XbaI and BamHI; fragment 1—XbaI; fragment 2—BamHI) and ligated together. The resulting ligation product is digested with HindIII, and ligated with the HindIII-digested pUC18 plasmid.

[1179] Plasmid DNA is added to a sterile cuvette with a 0.4 cm electrode gap (Bio-Rad). The final DNA concentration is generally at least 120 μg/ml. 0.5 ml of the cell suspension (containing approximately 1.5×10⁶ cells) is then added to the cuvette, and the cell suspension and DNA solutions are gently mixed. Electroporation is performed with a Gene-Pulser apparatus (Bio-Rad). Capacitance and voltage are set at 960 μF and 250-300 V, respectively. As voltage increases, cell survival decreases, but the percentage of surviving cells that stably incorporate the introduced DNA into their genome increases dramatically. Given these parameters, a pulse time of approximately 14-20 mSec should be observed.

[1180] Electroporated cells are maintained at room temperature for approximately 5 min, and the contents of the cuvette are then gently removed with a sterile transfer pipette. The cells are added directly to 10 ml of prewarmed nutrient media (DMEM with 15% calf serum) in a 10 cm dish and incubated at 37 degree C. The following day, the media is aspirated and replaced with 10 ml of fresh media and incubated for a further 16-24 hours.

[1181] The engineered fibroblasts are then injected into the host, either alone or after having been grown to confluence on cytodex 3 microcarrier beads. The fibroblasts now produce the protein product. The fibroblasts can then be introduced into a patient as described above.

### Example 18

### Method of Treatment Using Gene Therapy—In Vivo

[1182] Another aspect of the present invention is using in vivo gene therapy methods to treat disorders, diseases and conditions. The gene therapy method relates to the introduction of naked nucleic acid (DNA, RNA, and antisense DNA or RNA) sequences into an animal to increase or decrease the expression of the polypeptide. The polynucleotide of the present invention may be operatively linked to (i.e., associated with) a promoter or any other genetic elements necessary for the expression of the polypeptide by the target tissue. Such gene therapy and delivery techniques and methods are known in the art, see, for example, WO90/11092, WO98/11779; U.S. Pat. Nos. 5,693,622, 5,705,151, 5,580,859; Tabata et al., Cardiovasc. Res. 35(3):470-479 (1997); Chao et al., Pharmacol. Res. 35(6):517-522 (1997); Wolff, Neuromuscul. Disord. 7(5):314-318 (1997); Schwartz et al., Gene Ther. 3(5):405-411 (1996); Tsurumi et al., Circulation 94(12):3281-3290 (1996) (incorporated herein by reference).

[1183] The polynucleotide constructs may be delivered by any method that delivers injectable materials to the cells of an animal, such as, injection into the interstitial space of tissues (heart, muscle, skin, lung, liver, intestine and the like). The polynucleotide constructs can be delivered in a pharmaceutically acceptable liquid or aqueous carrier.

[1184] The term “naked” polynucleotide, DNA or RNA, refers to sequences that are free from any delivery vehicle that acts to assist, promote, or facilitate entry into the cell, including viral sequences, viral particles, liposome formulations, lipofectin or precipitating agents and the like. However, the polynucleotides of the present invention may also be delivered in liposome formulations (such as those taught in Felgner P. L. et al. (1995) Ann. NY Acad. Sci. 772:126-139 and Abdallah B. et al. (1995) Biol. Cell 85(1):1-7) which can be prepared by methods well known to those skilled in the art.

[1185] The polynucleotide vector constructs used in the gene therapy method are preferably constructs that will not integrate into the host genome nor will they contain sequences that allow for replication. Any strong promoter known to those skilled in the art can be used for driving the expression of DNA. Unlike other gene therapy techniques, one major advantage of introducing naked nucleic acid sequences into target cells is the transitory nature of the polynucleotide synthesis in the cells. Studies have shown that non-replicating DNA sequences can be introduced into cells to provide production of the desired polypeptide for periods of up to six months.

[1186] The polynucleotide construct can be delivered to the interstitial space of tissues within an animal, including muscle, skin, brain, lung, liver, spleen, bone marrow, thymus, heart, lymph, blood, bone, cartilage, pancreas, kidney, gall bladder, stomach, intestine, testis, ovary, uterus, rectum, nervous system, eye, gland, and connective tissue. Interstitial space of the tissues comprises the intercellular fluid, mucopolysaccharide matrix among the reticular fibers of organ tissues, elastic fibers in the walls of vessels or chambers, collagen fibers of fibrous tissues, or that same matrix within connective tissue ensheathing muscle cells or in the lacunae of bone. It is similarly the space occupied by the plasma of the circulation and the lymph fluid of the lymphatic channels. Delivery to the interstitial space of muscle tissue is preferred for the reasons discussed below. They may be conveniently delivered by injection into the tissues comprising these cells. They are preferably delivered to and expressed in persistent, non-dividing cells which are differentiated, although delivery and expression may be achieved in non-differentiated or less completely differentiated cells, such as, for example, stem cells of blood or skin fibroblasts. In vivo muscle cells are particularly competent in their ability to take up and express polynucleotides.

[1187] For the naked polynucleotide injection, an effective dosage amount of DNA or RNA will be in the range of from about 0.05 g/kg body weight to about 50 mg/kg body weight. Preferably the dosage will be from about 0.005 mg/kg to about 20 mg/kg and more preferably from about 0.05 mg/kg to about 5 mg/kg. Of course, as the artisan of ordinary skill will appreciate, this dosage will vary according to the tissue site of injection. The appropriate and effective dosage of nucleic acid sequence can readily be determined by those of ordinary skill in the art and may depend on the condition being treated and the route of administration. The preferred route of administration is by the parenteral route of injection into the interstitial space of tissues. However, other parenteral routes may also be used, such as, inhalation of an aerosol formulation particularly for delivery to lungs or bronchial tissues, throat or mucous membranes of the nose. In addition, naked polynucleotide constructs can be delivered to arteries during angioplasty by the catheter used in the procedure.

[1188] The dose response effects of injected polynucleotide in muscle in vivo is determined as follows. Suitable template DNA for production of mRNA coding for polypeptide of the present invention is prepared in accordance with a standard recombinant DNA methodology. The template DNA, which may be either circular or linear, is either used as naked DNA or complexed with liposomes. The quadriceps muscles of mice are then injected with various amounts of the template DNA.

[1189] Five to six week old female and male Balb/C mice are anesthetized by intraperitoneal injection with 0.3 ml of 2.5% Avertin. A 1.5 cm incision is made on the anterior thigh, and the quadriceps muscle is directly visualized. The template DNA is injected in 0.1 ml of carrier in a 1 cc syringe through a 27 gauge needle over one minute, approximately 0.5 cm from the distal insertion site of the muscle into the knee and about 0.2 cm deep. A suture is placed over the injection site for future localization, and the skin is closed with stainless steel clips.

[1190] After an appropriate incubation time (e.g., 7 days) muscle extracts are prepared by excising the entire quadriceps. Every fifth 15 um cross-section of the individual quadriceps muscles is histochemically stained for protein expression. A time course for protein expression may be done in a similar fashion except that quadriceps from different mice are harvested at different times. Persistence of DNA in muscle following injection may be determined by Southern blot analysis after preparing total cellular DNA and HIRT supernatants from injected and control mice. The results of the above experimentation in mice can be used to extrapolate proper dosages and other treatment parameters in humans and other animals using naked DNA.

### Example 19

### Transgenic Animals

[1191] The polypeptides of the invention can also be expressed in transgenic animals. Animals of any species, including, but not limited to, mice, rats, rabbits, hamsters, guinea pigs, pigs, micro-pigs, goats, sheep, cows and non-human primates, e.g., baboons, monkeys, and chimpanzees may be used to generate transgenic animals. In a specific embodiment, techniques described herein or otherwise known in the art, are used to express polypeptides of the invention in humans, as part of a gene therapy protocol.

[1192] Any technique known in the art may be used to introduce the transgene (i.e., polynucleotides of the invention) into animals to produce the founder lines of transgenic animals. Such techniques include, but are not limited to, pronuclear microinjection (Paterson et al., Appl. Microbiol. Biotechnol. 40:691-698 (1994); Carver et al., Biotechnology (NY) 11: 1263-1270 (1993); Wright et al., Biotechnology (NY) 9:830-834 (1991); and Hoppe et al., U.S. Pat. No. 4,873,191 (1989)); retrovirus mediated gene transfer into germ lines (Van der Putten et al., Proc. Natl. Acad. Sci., USA 82:6148-6152 (1985)), blastocysts or embryos; gene targeting in embryonic stem cells (Thompson et al., Cell 56:313-321 (1989)); electroporation of cells or embryos (Lo, 1983, Mol Cell. Biol. 3:1803-1814 (1983)); introduction of the polynucleotides of the invention using a gene gun (see, e.g., Ulmer et al., Science 259:1745 (1993); introducing nucleic acid constructs into embryonic pleuripotent stem cells and transferring the stem cells back into the blastocyst; and sperm-mediated gene transfer (Lavitrano et al., Cell 57:717-723 (1989); etc. For a review of such techniques, see Gordon, “Transgenic Animals,” Intl. Rev. Cytol. 115:171-229 (1989), which is incorporated by reference herein in its entirety.

[1193] Any technique known in the art may be used to produce transgenic clones containing polynucleotides of the invention, for example, nuclear transfer into enucleated oocytes of nuclei from cultured embryonic, fetal, or adult cells induced to quiescence (Campell et al., Nature 380:64-66 (1996); Wilmut et al., Nature 385:810-813 (1997)).

[1194] The present invention provides for transgenic animals that carry the transgene in all their cells, as well as animals which carry the transgene in some, but not all their cells, i.e., mosaic animals or chimeric. The transgene may be integrated as a single transgene or as multiple copies such as in concatamers, e.g., head-to-head tandems or head-to-tail tandems. The transgene may also be selectively introduced into and activated in a particular cell type by following, for example, the teaching of Lasko et al. (Lasko et al., Proc. Natl. Acad. Sci. USA 89:6232-6236 (1992)). The regulatory sequences required for such a cell-type specific activation will depend upon the particular cell type of interest, and will be apparent to those of skill in the art. When it is desired that the polynucleotide transgene be integrated into the chromosomal site of the endogenous gene, gene targeting is preferred. Briefly, when such a technique is to be utilized, vectors containing some nucleotide sequences homologous to the endogenous gene are designed for the purpose of integrating, via homologous recombination with chromosomal sequences, into and disrupting the function of the nucleotide sequence of the endogenous gene. The transgene may also be selectively introduced into a particular cell type, thus inactivating the endogenous gene in only that cell type, by following, for example, the teaching of Gu et al. (Gu et al., Science 265:103-106 (1994)). The regulatory sequences required for such a cell-type specific inactivation will depend upon the particular cell type of interest, and will be apparent to those of skill in the art.

[1195] Once transgenic animals have been generated, the expression of the recombinant gene may be assayed utilizing standard techniques. Initial screening may be accomplished by Southern blot analysis or PCR techniques to analyze animal tissues to verify that integration of the transgene has taken place. The level of mRNA expression of the transgene in the tissues of the transgenic animals may also be assessed using techniques which include, but are not limited to, Northern blot analysis of tissue samples obtained from the animal, in situ hybridization analysis, and reverse transcriptase-PCR (rt-PCR). Samples of transgenic gene-expressing tissue may also be evaluated immunocytochemically or immunohistochemically using antibodies specific for the transgene product.

[1196] Once the founder animals are produced, they may be bred, inbred, outbred, or crossbred to produce colonies of the particular animal. Examples of such breeding strategies include, but are not limited to: outbreeding of founder animals with more than one integration site in order to establish separate lines; inbreeding of separate lines in order to produce compound transgenics that express the transgene at higher levels because of the effects of additive expression of each transgene; crossing of heterozygous transgenic animals to produce animals homozygous for a given integration site in order to both augment expression and eliminate the need for screening of animals by DNA analysis; crossing of separate homozygous lines to produce compound heterozygous or homozygous lines; and breeding to place the transgene on a distinct background that is appropriate for an experimental model of interest.

[1197] Transgenic animals of the invention have uses which include, but are not limited to, animal model systems useful in elaborating the biological function of polypeptides of the present invention, studying conditions and/or disorders associated with aberrant expression, and in screening for compounds effective in ameliorating such conditions and/or disorders.

### Example 20

### Knock-Out Animals

[1198] Endogenous gene expression can also be reduced by inactivating or “knocking out” the gene and/or its promoter using targeted homologous recombination. (e.g., see Smithies et al., Nature 317:230-234 (1985); Thomas & Capecchi, Cell 51:503-512 (1987); Thompson et al., Cell 5:313-321 (1989); each of which is incorporated by reference herein in its entirety). For example, a mutant, non-functional polynucleotide of the invention (or a completely unrelated DNA sequence) flanked by DNA homologous to the endogenous polynucleotide sequence (either the coding regions or regulatory regions of the gene) can be used, with or without a selectable marker and/or a negative selectable marker, to transfect cells that express polypeptides of the invention in vivo. In another embodiment, techniques known in the art are used to generate knockouts in cells that contain, but do not express the gene of interest. Insertion of the DNA construct, via targeted homologous recombination, results in inactivation of the targeted gene. Such approaches are particularly suited in research and agricultural fields where modifications to embryonic stem cells can be used to generate animal offspring with an inactive targeted gene (e.g., see Thomas & Capecchi 1987 and Thompson 1989, supra). However this approach can be routinely adapted for use in humans provided the recombinant DNA constructs are directly administered or targeted to the required site in vivo using appropriate viral vectors that will be apparent to those of skill in the art.

[1199] In further embodiments of the invention, cells that are genetically engineered to express the polypeptides of the invention, or alternatively, that are genetically engineered not to express the polypeptides of the invention (e.g., knockouts) are administered to a patient in vivo. Such cells may be obtained from the patient (i.e., animal, including human) or an MHC compatible donor and can include, but are not limited to fibroblasts, bone marrow cells, blood cells (e.g., lymphocytes), adipocytes, muscle cells, endothelial cells etc. The cells are genetically engineered in vitro using recombinant DNA techniques to introduce the coding sequence of polypeptides of the invention into the cells, or alternatively, to disrupt the coding sequence and/or endogenous regulatory sequence associated with the polypeptides of the invention, e.g., by transduction (using viral vectors, and preferably vectors that integrate the transgene into the cell genome) or transfection procedures, including, but not limited to, the use of plasmids, cosmids, YACs, naked DNA, electroporation, liposomes, etc. The coding sequence of the polypeptides of the invention can be placed under the control of a strong constitutive or inducible promoter or promoter/enhancer to achieve expression, and preferably secretion, of the polypeptides of the invention. The engineered cells which express and preferably secrete the polypeptides of the invention can be introduced into the patient systemically, e.g., in the circulation, or intraperitoneally.

[1200] Alternatively, the cells can be incorporated into a matrix and implanted in the body, e.g., genetically engineered fibroblasts can be implanted as part of a skin graft; genetically engineered endothelial cells can be implanted as part of a lymphatic or vascular graft. (See, for example, Anderson et al. U.S. Pat. No. 5,399,349; and Mulligan & Wilson, U.S. Pat. No. 5,460,959 each of which is incorporated by reference herein in its entirety).

[1201] When the cells to be administered are non-autologous or non-MHC compatible cells, they can be administered using well known techniques which prevent the development of a host immune response against the introduced cells. For example, the cells may be introduced in an encapsulated form which, while allowing for an exchange of components with the immediate extracellular environment, does not allow the introduced cells to be recognized by the host immune system.

[1202] Transgenic and “knock-out” animals of the invention have uses which include, but are not limited to, animal model systems useful in elaborating the biological function of polypeptides of the present invention, studying conditions and/or disorders associated with aberrant expression, and in screening for compounds effective in ameliorating such conditions and/or disorders.

### Example 21

### Assays Detecting Stimulation or Inhibition of B cell Proliferation and Differentiation

[1203] Generation of functional humoral immune responses requires both soluble and cognate signaling between B-lineage cells and their microenvironment. Signals may impart a positive stimulus that allows a B-lineage cell to continue its programmed development, or a negative stimulus that instructs the cell to arrest its current developmental pathway. To date, numerous stimulatory and inhibitory signals have been found to influence B cell responsiveness including IL-2, IL-4, IL-5, IL-6, IL-7, IL10, IL-13, IL-14 and IL-15. Interestingly, these signals are by themselves weak effectors but can, in combination with various co-stimulatory proteins, induce activation, proliferation, differentiation, homing, tolerance and death among B cell populations.

[1204] One of the best studied classes of B-cell co-stimulatory proteins is the TNF-superfamily. Within this family CD40, CD27, and CD30 along with their respective ligands CD154, CD70, and CD153 have been found to regulate a variety of immune responses. Assays which allow for the detection and/or observation of the proliferation and differentiation of these B-cell populations and their precursors are valuable tools in determining the effects various proteins may have on these B-cell populations in terms of proliferation and differentiation. Listed below are two assays designed to allow for the detection of the differentiation, proliferation, or inhibition of B-cell populations and their precursors.

[1205] In Vitro Assay—Agonists or antagonists of the invention can be assessed for its ability to induce activation, proliferation, differentiation or inhibition and/or death in B-cell populations and their precursors. The activity of the agonists or antagonists of the invention on purified human tonsillar B cells, measured qualitatively over the dose range from 0.1 to 10,000 ng/mL, is assessed in a standard B-lymphocyte co-stimulation assay in which purified tonsillar B cells are cultured in the presence of either formalin-fixed Staphylococcus aureus Cowan I (SAC) or immobilized anti-human IgM antibody as the priming agent. Second signals such as IL-2 and IL-15 synergize with SAC and IgM crosslinking to elicit B cell proliferation as measured by tritiated-thymidine incorporation. Novel synergizing agents can be readily identified using this assay. The assay involves isolating human tonsillar B cells by magnetic bead (MACS) depletion of CD3-positive cells. The resulting cell population is greater than 95% B cells as assessed by expression of CD45R(B220).

[1206] Various dilutions of each sample are placed into individual wells of a 96-well plate to which are added 10⁵ B-cells suspended in culture medium (RPMI 1640 containing 10% FBS, 5×10⁻⁵M 2ME, 100 U/ml penicillin, 10 ug/ml streptomycin, and 10⁻⁵ dilution of SAC) in a total volume of 150 ul. Proliferation or inhibition is quantitated by a 20 h pulse (1 uCi/well) with 3H-thymidine (6.7 Ci/mM) beginning 72 h post factor addition. The positive and negative controls are IL2 and medium respectively.

[1207] In vivo Assay—BALB/c mice are injected (i.p.) twice per day with buffer only, or 2 mg/Kg of agonists or antagonists of the invention, or truncated forms thereof. Mice receive this treatment for 4 consecutive days, at which time they are sacrificed and various tissues and serum collected for analyses. Comparison of H&E sections from normal spleens and spleens treated with agonists or antagonists of the invention identify the results of the activity of the agonists or antagonists on spleen cells, such as the diffusion of peri-arterial lymphatic sheaths, and/or significant increases in the nucleated cellularity of the red pulp regions, which may indicate the activation of the differentiation and proliferation of B-cell populations. Immunohistochemical studies using a B cell marker, anti-CD45R(B220), are used to determine whether any physiological changes to splenic cells, such as splenic disorganization, are due to increased B-cell representation within loosely defined B-cell zones that infiltrate established T-cell regions.

[1208] Flow cytometric analyses of the spleens from mice treated with agonist or antagonist is used to indicate whether the agonists or antagonists specifically increases the proportion of ThB+, CD45R(B220)dull B cells over that which is observed in control mice.

[1209] Likewise, a predicted consequence of increased mature B-cell representation in vivo is a relative increase in serum Ig titers. Accordingly, serum IgM and IgA levels are compared between buffer and agonists or antagonists-treated mice.

[1210] The studies described in this example tested activity of agonists or antagonists of the invention. However, one skilled in the art could easily modify the exemplified studies to test the activity of polynucleotides or polypeptides of the invention (e.g., gene therapy).

### Example 22

### T Cell Proliferation Assay

[1211] A CD3-induced proliferation assay is performed on PBMCs and is measured by the uptake of ³H-thymidine. The assay is performed as follows. Ninety-six well plates are coated with 100 μl/well of mAb to CD3 (HIT3a, Pharmingen) or isotype-matched control mAb (B33.1) overnight at 4 degrees C. (1 μg/ml in 0.05M bicarbonate buffer, pH 9.5), then washed three times with PBS. PBMC are isolated by F/H gradient centrifugation from human peripheral blood and added to quadruplicate wells (5×10⁴/well) of mAb coated plates in RPMI containing 10% FCS and P/S in the presence of varying concentrations of agonists or antagonists of the invention (total volume 200 ul). Relevant protein buffer and medium alone are controls. After 48 hr. culture at 37 degrees C., plates are spun for 2 min. at 1000 rpm and 100 μl of supernatant is removed and stored 20 degrees C. for measurement of IL-2 (or other cytokines) if effect on proliferation is observed. Wells are supplemented with 100 ul of medium containing 0.5 uCi of ³H-thymidine and cultured at 37 degrees C. for 18-24 hr. Wells are harvested and incorporation of ³H-thymidine used as a measure of proliferation. Anti-CD3 alone is the positive control for proliferation. IL-2 (100 U/ml) is also used as a control which enhances proliferation. Control antibody which does not induce proliferation of T cells is used as the negative control for the effects of agonists or antagonists of the invention.

[1212] The studies described in this example tested activity of agonists or antagonists of the invention. However, one skilled in the art could easily modify the exemplified studies to test the activity of polynucleotides or polypeptides of the invention (e.g., gene therapy).

### Example 23

### Effect of Agonists or Antagonists of the Invention on the Expression of MHC Class II, Costimulatory and Adhesion Molecules and Cell Differentiation of Monocytes and Monocyte-Derived Human Dendritic Cell

[1213] Dendritic cells are generated by the expansion of proliferating precursors found in the peripheral blood: adherent PBMC or elutriated monocytic fractions are cultured for 7-10 days with GM-CSF (50 ng/ml) and IL-4 (20 ng/ml). These dendritic cells have the characteristic phenotype of immature cells (expression of CD1, CD80, CD86, CD40 and MHC class II antigens). Treatment with activating factors, such as TNF-α, causes a rapid change in surface phenotype (increased expression of MHC class I and II, costimulatory and adhesion molecules, downregulation of FCγRII, upregulation of CD83). These changes correlate with increased antigen-presenting capacity and with functional maturation of the dendritic cells.

[1214] FACS analysis of surface antigens is performed as follows. Cells are treated 1-3 days with increasing concentrations of agonist or antagonist of the invention or LPS (positive control), washed with PBS containing 1% BSA and 0.02 mM sodium azide, and then incubated with 1:20 dilution of appropriate FITC- or PE-labeled monoclonal antibodies for 30 minutes at 4 degrees C. After an additional wash, the labeled cells are analyzed by flow cytometry on a FACScan (Becton Dickinson).

[1215] Effect on the production of cytokines. Cytokines generated by dendritic cells, in particular IL-12, are important in the initiation of T-cell dependent immune responses. IL-12 strongly influences the development of Th1 helper T-cell immune response, and induces cytotoxic T and NK cell function. An ELISA is used to measure the IL-12 release as follows. Dendritic cells (10⁶/ml) are treated with increasing concentrations of agonists or antagonists of the invention for 24 hours. LPS (100 ng/ml) is added to the cell culture as positive control. Supernatants from the cell cultures are then collected and analyzed for IL-12 content using commercial ELISA kit (e.g., R & D Systems (Minneapolis, Minn.)). The standard protocols provided with the kits are used.

[1216] Effect on the expression of MHC Class II costimulatory and adhesion molecules. Three major families of cell surface antigens can be identified on monocytes: adhesion molecules, molecules involved in antigen presentation, and Fc receptor. Modulation of the expression of MHC class II antigens and other costimulatory molecules, such as B7 and ICAM-1, may result in changes in the antigen presenting capacity of monocytes and ability to induce T cell activation. Increased expression of Fc receptors may correlate with improved monocyte cytotoxic activity, cytokine release and phagocytosis.

[1217] FACS analysis is used to examine the surface antigens as follows. Monocytes are treated 1-5 days with increasing concentrations of agonists or antagonists of the invention or LPS (positive control), washed with PBS containing 1% BSA and 0.02 mM sodium azide, and then incubated with 1:20 dilution of appropriate FITC- or PE-labeled monoclonal antibodies for 30 minutes at 4 degrees C. After an additional wash, the labeled cells are analyzed by flow cytometry on a FACScan (Becton Dickinson).

[1218] Monocyte activation and/or increased survival. Assays for molecules that activate (or alternatively, inactivate) monocytes and/or increase monocyte survival (or alternatively, decrease monocyte survival) are known in the art and may routinely be applied to determine whether a molecule of the invention functions as an inhibitor or activator of monocytes. Agonists or antagonists of the invention can be screened using the three assays described below. For each of these assays, Peripheral blood mononuclear cells (PBMC) are purified from single donor leukopacks (American Red Cross, Baltimore, Md.) by centrifugation through a Histopaque gradient (Sigma). Monocytes are isolated from PBMC by counterflow centrifugal elutriation.

[1219] Monocyte Survival Assay. Human peripheral blood monocytes progressively lose viability when cultured in absence of serum or other stimuli. Their death results from internally regulated processes (apoptosis). Addition to the culture of activating factors, such as TNF-alpha dramatically improves cell survival and prevents DNA fragmentation. Propidium iodide (PI) staining is used to measure apoptosis as follows. Monocytes are cultured for 48 hours in polypropylene tubes in serum-free medium (positive control), in the presence of 100 ng/ml TNF-alpha (negative control), and in the presence of varying concentrations of the compound to be tested. Cells are suspended at a concentration of 2×10⁶/ml in PBS containing PI at a final concentration of 5 μg/ml, and then incubated at room temperature for 5 minutes before FACScan analysis. PI uptake has been demonstrated to correlate with DNA fragmentation in this experimental paradigm.

[1220] Effect on cytokine release. An important function of monocytes/macrophages is their regulatory activity on other cellular populations of the immune system through the release of cytokines after stimulation. An ELISA to measure cytokine release is performed as follows. Human monocytes are incubated at a density of 5×10⁵ cells/ml with increasing concentrations of agonists or antagonists of the invention and under the same conditions, but in the absence of agonists or antagonists. For IL-12 production, the cells are primed overnight with IFN (100 U/ml) in the presence of agonist or antagonist of the invention. LPS (10 ng/ml) is then added. Conditioned media are collected after 24 h and kept frozen until use. Measurement of TNF-alpha, IL-10, MCP-1 and IL-8 is then performed using a commercially available ELISA kit (e.g., R & D Systems (Minneapolis, Minn.)) and applying the standard protocols provided with the kit.

[1221] Oxidative burst. Purified monocytes are plated in 96-w plate at 2-1×10⁵ cell/well. Increasing concentrations of agonists or antagonists of the invention are added to the wells in a total volume of 0.2 ml culture medium (RPMI 1640+10% FCS, glutamine and antibiotics). After 3 days incubation, the plates are centrifuged and the medium is removed from the wells. To the macrophage monolayers, 0.2 ml per well of phenol red solution (140 mM NaCl, 10 mM potassium phosphate buffer pH 7.0, 5.5 mM dextrose, 0.56 mM phenol red and 19 U/ml of HRPO) is added, together with the stimulant (200 nM PMA). The plates are incubated at 37° C. for 2 hours and the reaction is stopped by adding 20 μl 1N NaOH per well. The absorbance is read at 610 nm. To calculate the amount of H₂O₂ produced by the macrophages, a standard curve of a H₂O₂ solution of known molarity is performed for each experiment.

[1222] The studies described in this example tested activity of agonists or antagonists of the invention. However, one skilled in the art could easily modify the exemplified studies to test the activity of polynucleotides or polypeptides of the invention (e.g., gene therapy).

### Example 24

### Biological Effects of Agonists or Antagonists of the Invention

Astrocyte and Neuronal Assays.

[1223] Agonists or antagonists of the invention, expressed in Escherichia coli and purified as described above, can be tested for activity in promoting the survival, neurite outgrowth, or phenotypic differentiation of cortical neuronal cells and for inducing the proliferation of glial fibrillary acidic protein immunopositive cells, astrocytes. The selection of cortical cells for the bioassay is based on the prevalent expression of FGF-1 and FGF-2 in cortical structures and on the previously reported enhancement of cortical neuronal survival resulting from FGF-2 treatment. A thymidine incorporation assay, for example, can be used to elucidate an agonist or antagonist of the invention's activity on these cells.

[1224] Moreover, previous reports describing the biological effects of FGF-2 (basic FGF) on cortical or hippocampal neurons in vitro have demonstrated increases in both neuron survival and neurite outgrowth (Walicke et al., “Fibroblast growth factor promotes survival of dissociated hippocampal neurons and enhances neurite extension.” Proc. Natl. Acad. Sci. USA 83:3012-3016. (1986), assay herein incorporated by reference in its entirety). However, reports from experiments done on PC-12 cells suggest that these two responses are not necessarily synonymous and may depend on not only which FGF is being tested but also on which receptor(s) are expressed on the target cells. Using the primary cortical neuronal culture paradigm, the ability of an agonist or antagonist of the invention to induce neurite outgrowth can be compared to the response achieved with FGF-2 using, for example, a thymidine incorporation assay.

Fibroblast and Endothelial Cell Assays.

[1225] Human lung fibroblasts are obtained from Clonetics (San Diego, Calif.) and maintained in growth media from Clonetics. Dermal microvascular endothelial cells are obtained from Cell Applications (San Diego, Calif.). For proliferation assays, the human lung fibroblasts and dermal microvascular endothelial cells can be cultured at 5,000 cells/well in a 96-well plate for one day in growth medium. The cells are then incubated for one day in 0.1% BSA basal medium. After replacing the medium with fresh 0.1% BSA medium, the cells are incubated with the test proteins for 3 days. Alamar Blue (Alamar Biosciences, Sacramento, Calif.) is added to each well to a final concentration of 10%. The cells are incubated for 4 hr. Cell viability is measured by reading in a CytoFluor fluorescence reader. For the PGE₂ assays, the human lung fibroblasts are cultured at 5,000 cells/well in a 96-well plate for one day. After a medium change to 0.1% BSA basal medium, the cells are incubated with FGF-2 or agonists or antagonists of the invention with or without IL-1α for 24 hours. The supernatants are collected and assayed for PGE₂ by EIA kit (Cayman, Ann Arbor, Mich.). For the IL-6 assays, the human lung fibroblasts are cultured at 5,000 cells/well in a 96-well plate for one day. After a medium change to 0.1% BSA basal medium, the cells are incubated with FGF-2 or with or without agonists or antagonists of the invention IL-1α for 24 hours. The supernatants are collected and assayed for IL-6 by ELISA kit (Endogen, Cambridge, Mass.).

[1226] Human lung fibroblasts are cultured with FGF-2 or agonists or antagonists of the invention for 3 days in basal medium before the addition of Alamar Blue to assess effects on growth of the fibroblasts. FGF-2 should show a stimulation at 10-2500 ng/ml which can be used to compare stimulation with agonists or antagonists of the invention.

[1227] Parkinson Models.

[1228] The loss of motor function in Parkinson's disease is attributed to a deficiency of striatal dopamine resulting from the degeneration of the nigrostriatal dopaminergic projection neurons. An animal model for Parkinson's that has been extensively characterized involves the systemic administration of 1-methyl-4 phenyl 1,2,3,6-tetrahydropyridine (MPTP). In the CNS, MPTP is taken-up by astrocytes and catabolized by monoamine oxidase B to 1-methyl-4-phenyl pyridine (MPP⁺) and released. Subsequently, MPP⁺ is actively accumulated in dopaminergic neurons by the high-affinity reuptake transporter for dopamine. MPP⁺ is then concentrated in mitochondria by the electrochemical gradient and selectively inhibits nicotidamide adenine disphosphate: ubiquinone oxidoreductionase (complex I), thereby interfering with electron transport and eventually generating oxygen radicals.

[1229] It has been demonstrated in tissue culture paradigms that FGF-2 (basic FGF) has trophic activity towards nigral dopaminergic neurons (Ferrari et al., Dev. Biol. 1989). Recently, Dr. Unsicker's group has demonstrated that administering FGF-2 in gel foam implants in the striatum results in the near complete protection of nigral dopaminergic neurons from the toxicity associated with MPTP exposure (Otto and Unsicker, J. Neuroscience, 1990).

[1230] Based on the data with FGF-2, agonists or antagonists of the invention can be evaluated to determine whether it has an action similar to that of FGF-2 in enhancing dopaminergic neuronal survival in vitro and it can also be tested in vivo for protection of dopaminergic neurons in the striatum from the damage associated with MPTP treatment. The potential effect of an agonist or antagonist of the invention is first examined in vitro in a dopaminergic neuronal cell culture paradigm. The cultures are prepared by dissecting the midbrain floor plate from gestation day 14 Wistar rat embryos. The tissue is dissociated with trypsin and seeded at a density of 200,000 cells/cm² on polyorthinine-laminin coated glass coverslips. The cells are maintained in Dulbecco's Modified Eagle's medium and F12 medium containing hormonal supplements (N1). The cultures are fixed with paraformaldehyde after 8 days in vitro and are processed for tyrosine hydroxylase, a specific marker for dopaminergic neurons, immunohistochemical staining. Dissociated cell cultures are prepared from embryonic rats. The culture medium is changed every third day and the factors are also added at that time.

[1231] Since the dopaminergic neurons are isolated from animals at gestation day 14, a developmental time which is past the stage when the dopaminergic precursor cells are proliferating, an increase in the number of tyrosine hydroxylase immunopositive neurons would represent an increase in the number of dopaminergic neurons surviving in vitro. Therefore, if an agonist or antagonist of the invention acts to prolong the survival of dopaminergic neurons, it would suggest that the agonist or antagonist may be involved in Parkinson's Disease.

[1232] The studies described in this example tested activity of agonists or antagonists of the invention. However, one skilled in the art could easily modify the exemplified studies to test the activity of polynucleotides or polypeptides of the invention (e.g., gene therapy).

### Example 25

### The Effect of Agonists or Antagonists of the Invention on the Growth of Vascular Endothelial Cells

[1233] On day 1, human umbilical vein endothelial cells (HUVEC) are seeded at 2-5×10⁴ cells/35 mm dish density in M199 medium containing 4% fetal bovine serum (FBS), 16 units/ml heparin, and 50 units/ml endothelial cell growth supplements (ECGS, Biotechnique, Inc.). On day 2, the medium is replaced with M199 containing 10% FBS, 8 units/ml heparin. An agonist or antagonist of the invention, and positive controls, such as VEGF and basic FGF (bFGF) are added, at varying concentrations. On days 4 and 6, the medium is replaced. On day 8, cell number is determined with a Coulter Counter.

[1234] An increase in the number of HUVEC cells indicates that the compound of the invention may proliferate vascular endothelial cells, while a decrease in the number of HUVEC cells indicates that the compound of the invention inhibits vascular endothelial cells.

[1235] The studies described in this example tested activity of a polypeptide of the invention. However, one skilled in the art could easily modify the exemplified studies to test the activity of polynucleotides (e.g., gene therapy), agonists, and/or antagonists of the invention.

### Example 26

### Rat Corneal Wound Healing Model

[1236] This animal model shows the effect of an agonist or antagonist of the invention on neovascularization. The experimental protocol includes:

a) Making a 1-1.5 mm long incision from the center of cornea into the stromal layer.

b) Inserting a spatula below the lip of the incision facing the outer corner of the eye.

c) Making a pocket (its base is 1-1.5 mm form the edge of the eye).

d) Positioning a pellet, containing 50 ng-5 ug of an agonist or antagonist of the invention, within the pocket.

e) Treatment with an agonist or antagonist of the invention can also be applied topically to the corneal wounds in a dosage range of 20 mg-500 mg (daily treatment for five days).

[1237] The studies described in this example tested activity of agonists or antagonists of the invention. However, one skilled in the art could easily modify the exemplified studies to test the activity of polynucleotides or polypeptides of the invention (e.g., gene therapy).

### Example 27

### Diabetic Mouse and Glucocorticoid-Impaired Wound Healing Models

Diabetic db+/db+ Mouse Model.

[1238] To demonstrate that an agonist or antagonist of the invention accelerates the healing process, the genetically diabetic mouse model of wound healing is used. The full thickness wound healing model in the db+/db+mouse is a well characterized, clinically relevant and reproducible model of impaired wound healing. Healing of the diabetic wound is dependent on formation of granulation tissue and re-epithelialization rather than contraction (Gartner, M. H. et al., J. Surg. Res. 52:389 (1992); Greenhalgh, D. G. et al., Am. J. Pathol. 136:1235 (1990)).

[1239] The diabetic animals have many of the characteristic features observed in Type II diabetes mellitus. Homozygous (db+/db+) mice are obese in comparison to their normal heterozygous (db+/+m) littermates. Mutant diabetic (db+/db+) mice have a single autosomal recessive mutation on chromosome 4 (db+) (Coleman et al. Proc. Natl. Acad. Sci. USA 77:283-293 (1982)). Animals show polyphagia, polydipsia and polyuria. Mutant diabetic mice (db+/db+) have elevated blood glucose, increased or normal insulin levels, and suppressed cell-mediated immunity (Mandel et al., J. Immunol 120:1375 (1978); Debray-Sachs, M. et al., Clin. Exp. Immunol. 51(1):1-7 (1983); Leiter et al., Am. J. of Pathol. 114:46-55 (1985)). Peripheral neuropathy, myocardial complications, and microvascular lesions, basement membrane thickening and glomerular filtration abnormalities have been described in these animals (Norido, F. et al., Exp. Neurol 83(2):221-232 (1984); Robertson et al., Diabetes 29(1):60-67 (1980); Giacomelli et al, Lab Invest. 40(4):460-473 (1979); Coleman, D. L., Diabetes 31 (Suppl): 1-6 (1982)). These homozygous diabetic mice develop hyperglycemia that is resistant to insulin analogous to human type II diabetes (Mandel et al., J. Immunol 120:1375-1377 (1978)).

[1240] The characteristics observed in these animals suggests that healing in this model may be similar to the healing observed in human diabetes (Greenhalgh, et al., Am. J. of Pathol. 136:1235-1246 (1990)).

[1241] Genetically diabetic female C57BL/KsJ (db+/db+) mice and their non-diabetic (db+/+m) heterozygous littermates are used in this study (Jackson Laboratories). The animals are purchased at 6 weeks of age and are 8 weeks old at the beginning of the study. Animals are individually housed and received food and water ad libitum. All manipulations are performed using aseptic techniques. The experiments are conducted according to the rules and guidelines of Human Genome Sciences, Inc. Institutional Animal Care and Use Committee and the Guidelines for the Care and Use of Laboratory Animals.

[1242] Wounding protocol is performed according to previously reported methods (Tsuboi, R. and Rifkin, D. B., J. Exp. Med. 172:245-251 (1990)). Briefly, on the day of wounding, animals are anesthetized with an intraperitoneal injection of Avertin (0.01 mg/mL), 2,2,2-tribromoethanol and 2-methyl-2-butanol dissolved in deionized water. The dorsal region of the animal is shaved and the skin washed with 70% ethanol solution and iodine. The surgical area is dried with sterile gauze prior to wounding. An 8 mm full-thickness wound is then created using a Keyes tissue punch. Immediately following wounding, the surrounding skin is gently stretched to eliminate wound expansion. The wounds are left open for the duration of the experiment. Application of the treatment is given topically for 5 consecutive days commencing on the day of wounding. Prior to treatment, wounds are gently cleansed with sterile saline and gauze sponges.

[1243] Wounds are visually examined and photographed at a fixed distance at the day of surgery and at two day intervals thereafter. Wound closure is determined by daily measurement on days 1-5 and on day 8. Wounds are measured horizontally and vertically using a calibrated Jameson caliper. Wounds are considered healed if granulation tissue is no longer visible and the wound is covered by a continuous epithelium.

[1244] An agonist or antagonist of the invention is administered using at a range different doses, from 4 mg to 500 mg per wound per day for 8 days in vehicle. Vehicle control groups received 50 mL of vehicle solution.

[1245] Animals are euthanized on day 8 with an intraperitoneal injection of sodium pentobarbital (300 mg/kg). The wounds and surrounding skin are then harvested for histology and immunohistochemistry. Tissue specimens are placed in 10% neutral buffered formalin in tissue cassettes between biopsy sponges for further processing.

[1246] Three groups of 10 animals each (5 diabetic and 5 non-diabetic controls) are evaluated: 1) Vehicle placebo control, 2) untreated group, and 3) treated group.

[1247] Wound closure is analyzed by measuring the area in the vertical and horizontal axis and obtaining the total square area of the wound. Contraction is then estimated by establishing the differences between the initial wound area (day 0) and that of post treatment (day 8). The wound area on day 1 is 64 mm², the corresponding size of the dermal punch. Calculations are made using the following formula:
[Open area on day 8]−[Open area on day 1]/[Open area on day 1]

[1248] Specimens are fixed in 10% buffered formalin and paraffin embedded blocks are sectioned perpendicular to the wound surface (5 mm) and cut using a Reichert-Jung microtome. Routine hematoxylin-eosin (H&E) staining is performed on cross-sections of bisected wounds. Histologic examination of the wounds are used to assess whether the healing process and the morphologic appearance of the repaired skin is altered by treatment with an agonist or antagonist of the invention. This assessment included verification of the presence of cell accumulation, inflammatory cells, capillaries, fibroblasts, re-epithelialization and epidermal maturity (Greenhalgh, D. G. et al., Am. J. Pathol. 136:1235 (1990)). A calibrated lens micrometer is used by a blinded observer.

[1249] Tissue sections are also stained immunohistochemically with a polyclonal rabbit anti-human keratin antibody using ABC Elite detection system. Human skin is used as a positive tissue control while non-immune IgG is used as a negative control. Keratinocyte growth is determined by evaluating the extent of reepithelialization of the wound using a calibrated lens micrometer.

[1250] Proliferating cell nuclear antigen/cycin (PCNA) in skin specimens is demonstrated by using anti-PCNA antibody (1:50) with an ABC Elite detection system. Human colon cancer served as a positive tissue control and human brain tissue is used as a negative tissue control. Each specimen included a section with omission of the primary antibody and substitution with non-immune mouse IgG. Ranking of these sections is based on the extent of proliferation on a scale of 0-8, the lower side of the scale reflecting slight proliferation to the higher side reflecting intense proliferation.

[1251] Experimental data are analyzed using an unpaired t test. A p value of <0.05 is considered significant.

Steroid Impaired Rat Model

[1252] The inhibition of wound healing by steroids has been well documented in various in vitro and in vivo systems (Wahl, Glucocorticoids and Wound healing. In: Anti-Inflammatory Steroid Action: Basic and Clinical Aspects. 280-302 (1989); Wahl et al., J. Immunol 115: 476-481 (1975); Werb et al., J. Exp. Med. 147:1684-1694 (1978)). Glucocorticoids retard wound healing by inhibiting angiogenesis, decreasing vascular permeability (Ebert et al., An. Intern. Med. 37:701-705 (1952)), fibroblast proliferation, and collagen synthesis (Beck et al., Growth Factors. 5: 295-304 (1991); Haynes et al., J. Clin. Invest. 61: 703-797 (1978)) and producing a transient reduction of circulating monocytes (Haynes et al., J. Clin. Invest. 61: 703-797 (1978); Wahl, “Glucocorticoids and wound healing”, In: Antiinflammatory Steroid Action: Basic and Clinical Aspects, Academic Press, New York, pp. 280-302 (1989)). The systemic administration of steroids to impaired wound healing is a well establish phenomenon in rats (Beck et al., Growth Factors. 5: 295-304 (1991); Haynes et al., J. Clin. Invest. 61: 703-797 (1978); Wahl, “Glucocorticoids and wound healing”, In: Antiinflammatory Steroid Action: Basic and Clinical Aspects, Academic Press, New York, pp. 280-302 (1989); Pierce et al., Proc. Natl. Acad. Sci. USA 86: 2229-2233 (1989)).

[1253] To demonstrate that an agonist or antagonist of the invention can accelerate the healing process, the effects of multiple topical applications of the agonist or antagonist on full thickness excisional skin wounds in rats in which healing has been impaired by the systemic administration of methylprednisolone is assessed.

[1254] Young adult male Sprague Dawley rats weighing 250-300 g (Charles River Laboratories) are used in this example. The animals are purchased at 8 weeks of age and are 9 weeks old at the beginning of the study. The healing response of rats is impaired by the systemic administration of methylprednisolone (17 mg/kg/rat intramuscularly) at the time of wounding. Animals are individually housed and received food and water ad libitum. All manipulations are performed using aseptic techniques. This study is conducted according to the rules and guidelines of Human Genome Sciences, Inc. Institutional Animal Care and Use Committee and the Guidelines for the Care and Use of Laboratory Animals.

[1255] The wounding protocol is followed according to section A, above. On the day of wounding, animals are anesthetized with an intramuscular injection of ketamine (50 mg/kg) and xylazine (5 mg/kg). The dorsal region of the animal is shaved and the skin washed with 70% ethanol and iodine solutions. The surgical area is dried with sterile gauze prior to wounding. An 8 mm full-thickness wound is created using a Keyes tissue punch. The wounds are left open for the duration of the experiment. Applications of the testing materials are given topically once a day for 7 consecutive days commencing on the day of wounding and subsequent to methylprednisolone administration. Prior to treatment, wounds are gently cleansed with sterile saline and gauze sponges.

[1256] Wounds are visually examined and photographed at a fixed distance at the day of wounding and at the end of treatment. Wound closure is determined by daily measurement on days 1-5 and on day 8. Wounds are measured horizontally and vertically using a calibrated Jameson caliper. Wounds are considered healed if granulation tissue is no longer visible and the wound is covered by a continuous epithelium.

[1257] The agonist or antagonist of the invention is administered using at a range different doses, from 4 mg to 500 mg per wound per day for 8 days in vehicle. Vehicle control groups received 50 mL of vehicle solution.

[1258] Animals are euthanized on day 8 with an intraperitoneal injection of sodium pentobarbital (300 mg/kg). The wounds and surrounding skin are then harvested for histology. Tissue specimens are placed in 10% neutral buffered formalin in tissue cassettes between biopsy sponges for further processing.

[1259] Three groups of 10 animals each (5 with methylprednisolone and 5 without glucocorticoid) are evaluated: 1) Untreated group 2) Vehicle placebo control 3) treated groups.

[1260] Wound closure is analyzed by measuring the area in the vertical and horizontal axis and obtaining the total area of the wound. Closure is then estimated by establishing the differences between the initial wound area (day 0) and that of post treatment (day 8). The wound area on day 1 is 64 mm², the corresponding size of the dermal punch. Calculations are made using the following formula:
[Open area on day 8]−[Open area on day 1]/[Open area on day 1]

[1261] Specimens are fixed in 10% buffered formalin and paraffin embedded blocks are sectioned perpendicular to the wound surface (5 mm) and cut using an Olympus microtome. Routine hematoxylin-eosin (H&E) staining is performed on cross-sections of bisected wounds. Histologic examination of the wounds allows assessment of whether the healing process and the morphologic appearance of the repaired skin is improved by treatment with an agonist or antagonist of the invention. A calibrated lens micrometer is used by a blinded observer to determine the distance of the wound gap.

[1262] Experimental data are analyzed using an unpaired t test. A p value of <0.05 is considered significant.

[1263] The studies described in this example tested activity of agonists or antagonists of the invention. However, one skilled in the art could easily modify the exemplified studies to test the activity of polynucleotides or polypeptides of the invention (e.g., gene therapy).

### Example 28

### Lymphadema Animal Model

[1264] The purpose of this experimental approach is to create an appropriate and consistent lymphedema model for testing the therapeutic effects of an agonist or antagonist of the invention in lymphangiogenesis and re-establishment of the lymphatic circulatory system in the rat hind limb. Effectiveness is measured by swelling volume of the affected limb, quantification of the amount of lymphatic vasculature, total blood plasma protein, and histopathology. Acute lymphedema is observed for 7-10 days. Perhaps more importantly, the chronic progress of the edema is followed for up to 3-4 weeks.

[1265] Prior to beginning surgery, blood sample is drawn for protein concentration analysis. Male rats weighing approximately ˜350 g are dosed with Pentobarbital. Subsequently, the right legs are shaved from knee to hip. The shaved area is swabbed with gauze soaked in 70% EtOH. Blood is drawn for serum total protein testing. Circumference and volumetric measurements are made prior to injecting dye into paws after marking 2 measurement levels (0.5 cm above heel, at mid-pt of dorsal paw). The intradermal dorsum of both right and left paws are injected with 0.05 ml of 1% Evan's Blue. Circumference and volumetric measurements are then made following injection of dye into paws.

[1266] Using the knee joint as a landmark, a mid-leg inguinal incision is made circumferentially allowing the femoral vessels to be located. Forceps and hemostats are used to dissect and separate the skin flaps. After locating the femoral vessels, the lymphatic vessel that runs along side and underneath the vessel(s) is located. The main lymphatic vessels in this area are then electrically coagulated or suture ligated.

[1267] Using a microscope, muscles in back of the leg (near the semitendinosis and adductors) are bluntly dissected. The popliteal lymph node is then located. The 2 proximal and 2 distal lymphatic vessels and distal blood supply of the popliteal node are then ligated by suturing. The popliteal lymph node, and any accompanying adipose tissue, is then removed by cutting connective tissues.

[1268] Care is taken to control any mild bleeding resulting from this procedure. After lymphatics are occluded, the skin flaps are sealed by using liquid skin (Vetbond) (AJ Buck). The separated skin edges are sealed to the underlying muscle tissue while leaving a gap of 0.5 cm around the leg. Skin also may be anchored by suturing to underlying muscle when necessary.

[1269] To avoid infection, animals are housed individually with mesh (no bedding). Recovering animals are checked daily through the optimal edematous peak, which typically occurred by day 5-7. The plateau edematous peak are then observed. To evaluate the intensity of the lymphedema, the circumference and volumes of 2 designated places on each paw before operation and daily for 7 days are measured. The effect of plasma proteins on lymphedema is determined and whether protein analysis is a useful testing perimeter is also investigated. The weights of both control and edematous limbs are evaluated at 2 places. Analysis is performed in a blind manner.

[1270] Circumference Measurements: Under brief gas anesthetic to prevent limb movement, a cloth tape is used to measure limb circumference. Measurements are done at the ankle bone and dorsal paw by 2 different people and those 2 readings are averaged. Readings are taken from both control and edematous limbs.

[1271] Volumetric Measurements: On the day of surgery, animals are anesthetized with Pentobarbital and are tested prior to surgery. For daily volumetrics animals are under brief halothane anesthetic (rapid immobilization and quick recovery), and both legs are shaved and equally marked using waterproof marker on legs. Legs are first dipped in water, then dipped into instrument to each marked level then measured by Buxco edema software (Chen Victor). Data is recorded by one person, while the other is dipping the limb to marked area.

[1272] Blood-plasma protein measurements: Blood is drawn, spun, and serum separated prior to surgery and then at conclusion for total protein and Ca2⁺ comparison.

[1273] Limb Weight Comparison: After drawing blood, the animal is prepared for tissue collection. The limbs are amputated using a quillitine, then both experimental and control legs are cut at the ligature and weighed. A second weighing is done as the tibio-cacaneal joint is disarticulated and the foot is weighed.

[1274] Histological Preparations: The transverse muscle located behind the knee (popliteal) area is dissected and arranged in a metal mold, filled with freezeGel, dipped into cold methylbutane, placed into labeled sample bags at −80EC until sectioning. Upon sectioning, the muscle is observed under fluorescent microscopy for lymphatics.

[1275] The studies described in this example tested activity of agonists or antagonists of the invention. However, one skilled in the art could easily modify the exemplified studies to test the activity of polynucleotides or polypeptides of the invention (e.g., gene therapy).

### Example 29

### Suppression of TNF Alpha-Induced Adhesion Molecule Expression by an Agonist or Antagonist of the Invention

[1276] The recruitment of lymphocytes to areas of inflammation and angiogenesis involves specific receptor-ligand interactions between cell surface adhesion molecules (CAMs) on lymphocytes and the vascular endothelium. The adhesion process, in both normal and pathological settings, follows a multi-step cascade that involves intercellular adhesion molecule-1 (ICAM-1), vascular cell adhesion molecule-1 (VCAM-1), and endothelial leukocyte adhesion molecule-1 (E-selectin) expression on endothelial cells (EC). The expression of these molecules and others on the vascular endothelium determines the efficiency with which leukocytes may adhere to the local vasculature and extravasate into the local tissue during the development of an inflammatory response. The local concentration of cytokines and growth factor participate in the modulation of the expression of these CAMs.

[1277] Tumor necrosis factor alpha (TNF-a), a potent proinflammatory cytokine, is a stimulator of al three CAMs on endothelial cells and may be involved in a wide variety of inflammatory responses, often resulting in a pathological outcome.

[1278] The potential of an agonist or antagonist of the invention to mediate a suppression of TNF-a induced CAM expression can be examined. A modified ELISA assay which uses ECs as a solid phase absorbent is employed to measure the amount of CAM expression on TNF-a treated ECs when co-stimulated with a member of the FGF family of proteins.

[1279] To perform the experiment, human umbilical vein endothelial cell (HUVEC) cultures are obtained from pooled cord harvests and maintained in growth medium (EGM-2; Clonetics, San Diego, Calif.) supplemented with 10% FCS and 1% penicillin/streptomycin in a 37 degree C. humidified incubator containing 5% CO₂. HUVECs are seeded in 96-well plates at concentrations of 1×10⁴ cells/well in EGM medium at 37 degree C. for 18-24 hrs or until confluent. The monolayers are subsequently washed 3 times with a serum-free solution of RPMI-1640 supplemented with 100 U/ml penicillin and 100 mg/ml streptomycin, and treated with a given cytokine and/or growth factor(s) for 24 h at 37 degree C. Following incubation, the cells are then evaluated for CAM expression.

[1280] Human Umbilical Vein Endothelial cells (HUVECs) are grown in a standard 96 well plate to confluence. Growth medium is removed from the cells and replaced with 90 ul of 199 Medium (10% FBS). Samples for testing and positive or negative controls are added to the plate in triplicate (in 10 ul volumes). Plates are incubated at 37 degree C. for either 5 h (selectin and integrin expression) or 24 h (integrin expression only). Plates are aspirated to remove medium and 100 μl of 0.1% paraformaldehyde-PBS (with Ca++ and Mg++) is added to each well. Plates are held at 4° C. for 30 min.

[1281] Fixative is then removed from the wells and wells are washed 1× with PBS(+Ca,Mg)+0.5% BSA and drained. Do not allow the wells to dry. Add 10 μl of diluted primary antibody to the test and control wells. Anti-ICAM-1-Biotin, Anti-VCAM-1-Biotin and Anti-E-selectin-Biotin are used at a concentration of 10 μg/ml (1:10 dilution of 0.1 mg/ml stock antibody). Cells are incubated at 37° C. for 30 min. in a humidified environment. Wells are washed ×3 with PBS(+Ca,Mg)+0.5% BSA.

[1282] Then add 20 μl of diluted ExtrAvidin-Alkaline Phosphotase (1:5,000 dilution) to each well and incubated at 37° C. for 30 min. Wells are washed ×3 with PBS(+Ca,Mg)+0.5% BSA. 1 tablet of p-Nitrophenol Phosphate pNPP is dissolved in 5 ml of glycine buffer (pH 10.4). 100 μl of pNPP substrate in glycine buffer is added to each test well. Standard wells in triplicate are prepared from the working dilution of the ExtrAvidin-Alkaline Phosphotase in glycine buffer: 1:5,000 (10⁰)>10^{-0.5}>10⁻¹>10^{-1.5}. 5 μl of each dilution is added to triplicate wells and the resulting AP content in each well is 5.50 ng, 1.74 ng, 0.55 ng, 0.18 ng. 100 μl of pNNP reagent must then be added to each of the standard wells. The plate must be incubated at 37° C. for 4 h. A volume of 50 μl of 3M NaOH is added to all wells. The results are quantified on a plate reader at 405 nm. The background subtraction option is used on blank wells filled with glycine buffer only. The template is set up to indicate the concentration of AP-conjugate in each standard well [5.50 ng; 1.74 ng; 0.55 ng; 0.18 ng]. Results are indicated as amount of bound AP-conjugate in each sample.

[1283] The studies described in this example tested activity of agonists or antagonists of the invention. However, one skilled in the art could easily modify the exemplified studies to test the activity of polynucleotides or polypeptides of the invention (e.g., gene therapy).

### Example 30

### Production of Polypeptide of the Invention for High-Throughput Screening Assays

[1284] The following protocol produces a supernatant containing polypeptide of the present invention to be tested. This supernatant can then be used in the Screening Assays described in Examples 32-41.

[1285] First, dilute Poly-D-Lysine (644 587 Boehringer-Mannheim) stock solution (1 mg/ml in PBS) 1:20 in PBS (w/o calcium or magnesium 17-516F Biowhittaker) for a working solution of 50 ug/ml. Add 200 ul of this solution to each well (24 well plates) and incubate at RT for 20 minutes. Be sure to distribute the solution over each well (note: a 12-channel pipetter may be used with tips on every other channel). Aspirate off the Poly-D-Lysine solution and rinse with 1 ml PBS (Phosphate Buffered Saline). The PBS should remain in the well until just prior to plating the cells and plates may be poly-lysine coated in advance for up to two weeks.

[1286] Plate 293T cells (do not carry cells past P+20) at 2×10⁵ cells/well in 0.5 ml DMEM (Dulbecco's Modified Eagle Medium)(with 4.5 G/L glucose and L-glutamine (12-604F Biowhittaker))/10% heat inactivated FBS(14-503F Biowhittaker)/1×Penstrep (17-602E Biowhittaker). Let the cells grow overnight.

[1287] The next day, mix together in a sterile solution basin: 300 ul Lipofectamine (18324-012 Gibco/BRL) and 5 ml Optimem 1 (31985070 Gibco/BRL)/96-well plate. With a small volume multi-channel pipetter, aliquot approximately 2 ug of an expression vector containing a polynucleotide insert, produced by the methods described in Examples 8-10, into an appropriately labeled 96-well round bottom plate. With a multi-channel pipetter, add 50 ul of the Lipofectamine/Optimem I mixture to each well. Pipette up and down gently to mix. Incubate at RT 15-45 minutes. After about 20 minutes, use a multi-channel pipetter to add 150 ul Optimem I to each well. As a control, one plate of vector DNA lacking an insert should be transfected with each set of transfections.

[1288] Preferably, the transfection should be performed by tag-teaming the following tasks. By tag-teaming, hands on time is cut in half, and the cells do not spend too much time on PBS. First, person A aspirates off the media from four 24-well plates of cells, and then person B rinses each well with 0.5-1 ml PBS. Person A then aspirates off PBS rinse, and person B, using a 12-channel pipetter with tips on every other channel, adds the 200 ul of DNA/Lipofectamine/Optimem I complex to the odd wells first, then to the even wells, to each row on the 24-well plates. Incubate at 37 degree C. for 6 hours.

[1289] While cells are incubating, prepare appropriate media, either 1% BSA in DMEM with 1×penstrep, or HGS CHO-5 media (116.6 mg/L of CaCl2 (anhyd); 0.00130 mg/L CuSO₄-5H₂O; 0.050 mg/L of Fe(NO₃)₃-9H₂O; 0.417 mg/L of FeSO₄-7H₂O; 311.80 mg/L of Kcl; 28.64 mg/L of MgCl₂; 48.84 mg/L of MgSO₄; 6995.50 mg/L of NaCl; 2400.0 mg/L of NaHCO₃; 62.50 mg/L of NaH₂PO₄—H₂0; 71.02 mg/L of Na₂HPO4; 0.4320 mg/L of ZnSO₄-7H₂O; 0.002 mg/L of Arachidonic Acid; 1.022 mg/L of Cholesterol; 0.070 mg/L of DL-alpha-Tocopherol-Acetate; 0.0520 mg/L of Linoleic Acid; 0.010 mg/L of Linolenic Acid; 0.010 mg/L of Myristic Acid; 0.010 mg/L of Oleic Acid; 0.010 mg/L of Palmitric Acid; 0.010 mg/L of Palmitic Acid; 100 mg/L of Pluronic F-68; 0.010 mg/L of Stearic Acid; 2.20 mg/L of Tween 80; 4551 mg/L of D-Glucose; 130.85 mg/ml of L-Alanine; 147.50 mg/ml of L-Arginine-HCL; 7.50 mg/ml of L-Asparagine-H₂O; 6.65 mg/ml of L-Aspartic Acid; 29.56 mg/ml of L-Cystine-2HCL-H₂O; 31.29 mg/ml of L-Cystine-2HCL; 7.35 mg/ml of L-Glutamic Acid; 365.0 mg/ml of L-Glutamine; 18.75 mg/ml of Glycine; 52.48 mg/ml of L-Histidine-HCL-H₂0; 106.97 mg/ml of L-Isoleucine; 111.45 mg/ml of L-Leucine; 163.75 mg/ml of L-Lysine HCL; 32.34 mg/ml of L-Methionine; 68.48 mg/ml of L-Phenylalainine; 40.0 mg/ml of L-Proline; 26.25 mg/ml of L-Serine; 101.05 mg/ml of L-Threonine; 19.22 mg/ml of L-Tryptophan; 91.79 mg/ml of L-Tryrosine-2Na-2H₂0; and 99.65 mg/ml of L-Valine; 0.0035 mg/L of Biotin; 3.24 mg/L of D-Ca Pantothenate; 11.78 mg/L of Choline Chloride; 4.65 mg/L of Folic Acid; 15.60 mg/L of i-Inositol; 3.02 mg/L of Niacinamide; 3.00 mg/L of Pyridoxal HCL; 0.031 mg/L of Pyridoxine HCL; 0.319 mg/L of Riboflavin; 3.17 mg/L of Thiamine HCL; 0.365 mg/L of Thymidine; 0.680 mg/L of Vitamin B₁₂; 25 mM of HEPES Buffer; 2.39 mg/L of Na Hypoxanthine; 0.105 mg/L of Lipoic Acid; 0.081 mg/L of Sodium Putrescine-2HCL; 55.0 mg/L of Sodium Pyruvate; 0.0067 mg/L of Sodium Selenite; 20 uM of Ethanolamine; 0.122 mg/L of Ferric Citrate; 41.70 mg/L of Methyl-B-Cyclodextrin complexed with Linoleic Acid; 33.33 mg/L of Methyl-B-Cyclodextrin complexed with Oleic Acid; 10 mg/L of Methyl-B-Cyclodextrin complexed with Retinal Acetate. Adjust osmolarity to 327 mOsm) with 2 mm glutamine and 1×penstrep. (BSA (81-068-3 Bayer) 100 gm dissolved in 1 L DMEM for a 10% BSA stock solution). Filter the media and collect 50 ul for endotoxin assay in 15 ml polystyrene conical.

[1290] The transfection reaction is terminated, preferably by tag-teaming, at the end of the incubation period. Person A aspirates off the transfection media, while person B adds 1.5 ml appropriate media to each well. Incubate at 37 degree C. for 45 or 72 hours depending on the media used: 1% BSA for 45 hours or CHO-5 for 72 hours.

[1291] On day four, using a 300 ul multichannel pipetter, aliquot 600 ul in one 1 ml deep well plate and the remaining supernatant into a 2 ml deep well. The supernatants from each well can then be used in the assays described in Examples 32-39.

[1292] It is specifically understood that when activity is obtained in any of the assays described below using a supernatant, the activity originates from either the polypeptide of the present invention directly (e.g., as a secreted protein) or by polypeptide of the present invention inducing expression of other proteins, which are then secreted into the supernatant. Thus, the invention further provides a method of identifying the protein in the supernatant characterized by an activity in a particular assay.

### Example 31

### Construction of GAS Reporter Construct

[1293] One signal transduction pathway involved in the differentiation and proliferation of cells is called the Jaks-STATs pathway. Activated proteins in the Jaks-STATs pathway bind to gamma activation site “GAS” elements or interferon-sensitive responsive element (“ISRE”), located in the promoter of many genes. The binding of a protein to these elements alter the expression of the associated gene.

[1294] GAS and ISRE elements are recognized by a class of transcription factors called Signal Transducers and Activators of Transcription, or “STATs.” There are six members of the STATs family. Stat1 and Stat3 are present in many cell types, as is Stat2 (as response to IFN-alpha is widespread). Stat4 is more restricted and is not in many cell types though it has been found in T helper class I, cells after treatment with IL-12. Stat5 was originally called mammary growth factor, but has been found at higher concentrations in other cells including myeloid cells. It can be activated in tissue culture cells by many cytokines.

[1295] The STATs are activated to translocate from the cytoplasm to the nucleus upon tyrosine phosphorylation by a set of kinases known as the Janus Kinase (“Jaks”) family. Jaks represent a distinct family of soluble tyrosine kinases and include Tyk2, Jak1, Jak2, and Jak3. These kinases display significant sequence similarity and are generally catalytically inactive in resting cells.

[1296] The Jaks are activated by a wide range of receptors summarized in the Table below. (Adapted from review by Schidler and Damell, Ann. Rev. Biochem. 64:621-51 (1995)). A cytokine receptor family, capable of activating Jaks, is divided into two groups: (a) Class 1 includes receptors for IL-2, IL-3, IL-4, IL-6, IL-7, IL-9, IL-11, IL-12, IL-15, Epo, PRL, GH, G-CSF, GM-CSF, LIF, CNTF, and thrombopoietin; and (b) Class 2 includes IFN-a, IFN-g, and IL-10. The Class 1 receptors share a conserved cysteine motif (a set of four conserved cysteines and one tryptophan) and a WSXWS motif (a membrane proximal region encoding Trp-Ser-Xaa-Trp-Ser (SEQ ID NO: 2)).

[1297] Thus, on binding of a ligand to a receptor, Jaks are activated, which in turn activate STATs, which then translocate and bind to GAS elements. This entire process is encompassed in the Jaks-STATs signal transduction pathway. Therefore, activation of the Jaks-STATs pathway, reflected by the binding of the GAS or the ISRE element, can be used to indicate proteins involved in the proliferation and differentiation of cells. For example, growth factors and cytokines are known to activate the Jaks-STATs pathway (See Table below). Thus, by using GAS elements linked to reporter molecules, activators of the Jaks-STATs pathway can be identified.

| | JAKs | | | | | |
|---|---|---|---|---|---|---|
| Ligand | tyk2 | Jak1 | Jak2 | Jak3 | STATS | GAS(elements) or ISRE |
| IFN family | | | | | | |
| IFN-a/B | + | + | − | − | 1, 2, 3 | ISRE |
| IFN-g | | + | + | − | 1 | GAS (IRF1 > Lys6 > IFP) |
| Il-10 | + | ? | ? | − | 1, 3 | |
| gp130 family | | | | | | |
| IL-6 (Pleiotropic) | + | + | + | ? | 1, 3 | GAS (IRF1 > Lys6 > IFP) |
| Il-11 (Pleiotropic) | ? | + | ? | ? | 1, 3 | |
| OnM (Pleiotropic) | ? | + | + | ? | 1, 3 | |
| LIF (Pleiotropic) | ? | + | + | ? | 1, 3 | |
| CNTF (Pleiotropic) | −/+ | + | + | ? | 1, 3 | |
| G-CSF (Pleiotropic) | ? | + | ? | ? | 1, 3 | |
| IL-12 (Pleiotropic) | + | − | + | + | 1, 3 | |
| g-C family | | | | | | |
| IL-2 (lymphocytes) | − | + | − | + | 1, 3, 5 | GAS |
| IL-4 (lymplh/myeloid) | − | + | − | + | 6 | GAS (IRF1 = IFP >> Ly6)(IgH) |
| IL-7 (lymphocytes) | − | + | − | + | 5 | GAS |
| IL-9 (lymphocytes) | − | + | − | + | 5 | GAS |
| IL-13 (lymphocyte) | − | + | ? | ? | 6 | GAS |
| IL-15 | ? | + | ? | + | 5 | GAS |
| gp140 family | | | | | | |
| IL-3 (myeloid) | − | − | + | − | 5 | GAS (IRF1 > IFP >> Ly6) |
| IL-5 (myeloid) | − | − | + | − | 5 | GAS |
| GM-CSF (myeloid) | − | − | + | − | 5 | GAS |
| Growth hormone family | | | | | | |
| GH | ? | − | + | − | 5 | |
| PRL | ? | +/− | + | − | 1, 3, 5 | |
| EPO | ? | − | + | − | 5 | GAS(B-CAS > IRF1 = IFP >> Ly6) |
| RecePtor Tyrosine Kinases | | | | | | |
| EGF | ? | + | + | − | 1, 3 | GAS (IRF1) |
| PDGF | ? | + | + | − | 1, 3 | |
| CSF-1 | ? | + | + | − | 1, 3 | GAS (not IRF1) |

[1298] To construct a synthetic GAS containing promoter element, which is used in the Biological Assays described in Examples 32-33, a PCR based strategy is employed to generate a GAS-SV40 promoter sequence. The 5′ primer contains four tandem copies of the GAS binding site found in the IRF1 promoter and previously demonstrated to bind STATs upon induction with a range of cytokines (Rothman et al., Immunity 1:457-468 (1994).), although other GAS or ISRE elements can be used instead. The 5′ primer also contains 18 bp of sequence complementary to the SV40 early promoter sequence and is flanked with an XhoI site. The sequence of the 5′ primer is:

(SEQ ID NO: 3)

5′:GCGCCTCGAGATTTCCCCGAAATCTAGATTTCCCCGAAATGATTTCC
CCGAAATGATTTCCCCGAAATATCTGCCATCTCAATTAG:3′

[1299] The downstream primer is complementary to the SV40 promoter and is flanked with a Hind III site:

(SEQ ID NO: 4)

5′:GCGGCAAGCTTTTTGCAAAGCCTAGGC:3′

[1300] PCR amplification is performed using the SV40 promoter template present in the B-gal:promoter plasmid obtained from Clontech. The resulting PCR fragment is digested with XhoI/Hind III and subcloned into BLSK2-. (Stratagene.) Sequencing with forward and reverse primers confirms that the insert contains the following sequence:

(SEQ ID NO: 5)

5′:CTCGAGATTTCCCCGAAATCTAGATTTCCCCGAAATGATTTCCCCGA
AATGATTTCCCCGAAATATCTGCCATCTCAATTAGTCAGCAACCATAGTC
CCGCCCCTAACTCCGCCCATCCCGCCCCTAACTCCGCCCAGTTCCGCCCA
TTCTCCGCCCCATGGCTGACTAATTTTTTTTATTTATGCAGAGGCCGAGG
CCGCCTCGGCCTCTGAGCTATTCCAGAAGTAGTGAGGAGGCTTTTTTGGA
GGCCTAGGCTTTTGCAAAAAGCTT:3′

[1301] With this GAS promoter element linked to the SV40 promoter, a GAS:SEAP2 reporter construct is next engineered. Here, the reporter molecule is a secreted alkaline phosphatase, or “SEAP.” Clearly, however, any reporter molecule can be instead of SEAP, in this or in any of the other Examples. Well known reporter molecules that can be used instead of SEAP include chloramphenicol acetyltransferase (CAT), luciferase, alkaline phosphatase, B-galactosidase, green fluorescent protein (GFP), or any protein detectable by an antibody.

[1302] The above sequence confirmed synthetic GAS-SV40 promoter element is subcloned into the pSEAP-Promoter vector obtained from Clontech using HindIII and XhoI, effectively replacing the SV40 promoter with the amplified GAS:SV40 promoter element, to create the GAS-SEAP vector. However, this vector does not contain a neomycin resistance gene, and therefore, is not preferred for mammalian expression systems.

[1303] Thus, in order to generate mammalian stable cell lines expressing the GAS-SEAP reporter, the GAS-SEAP cassette is removed from the GAS-SEAP vector using SalI and NotI, and inserted into a backbone vector containing the neomycin resistance gene, such as pGFP-1 (Clontech), using these restriction sites in the multiple cloning site, to create the GAS-SEAP/Neo vector. Once this vector is transfected into mammalian cells, this vector can then be used as a reporter molecule for GAS binding as described in Examples 32-33.

[1304] Other constructs can be made using the above description and replacing GAS with a different promoter sequence. For example, construction of reporter molecules containing EGR and NF-KB promoter sequences are described in Examples 34 and 35. However, many other promoters can be substituted using the protocols described in these Examples. For instance, SRE, IL-2, NFAT, or Osteocalcin promoters can be substituted, alone or in combination (e.g., GAS/NF-KB/EGR, GAS/NF-KB, IL-2/NFAT, or NF-KB/GAS). Similarly, other cell lines can be used to test reporter construct activity, such as HELA (epithelial), HUVEC (endothelial), Reh (B-cell), Saos-2 (osteoblast), HUVAC (aortic), or Cardiomyocyte.

### Example 32

### High-Throughput Screening Assay for T-Cell Activity

[1305] The following protocol is used to assess T-cell activity by identifying factors, and determining whether supernate containing a polypeptide of the invention proliferates and/or differentiates T-cells. T-cell activity is assessed using the GAS/SEAP/Neo construct produced in Example 31. Thus, factors that increase SEAP activity indicate the ability to activate the Jaks-STATS signal transduction pathway. The T-cell used in this assay is Jurkat T-cells (ATCC Accession No. TIB-152), although Molt-3 cells (ATCC Accession No. CRL-1552) and Molt-4 cells (ATCC Accession No. CRL-1582) cells can also be used.

[1306] Jurkat T-cells are lymphoblastic CD4+ Th1 helper cells. In order to generate stable cell lines, approximately 2 million Jurkat cells are transfected with the GAS-SEAP/neo vector using DMRIE-C (Life Technologies)(transfection procedure described below). The transfected cells are seeded to a density of approximately 20,000 cells per well and transfectants resistant to 1 mg/ml genticin selected. Resistant colonies are expanded and then tested for their response to increasing concentrations of interferon gamma. The dose response of a selected clone is demonstrated.

[1307] Specifically, the following protocol will yield sufficient cells for 75 wells containing 200 ul of cells. Thus, it is either scaled up, or performed in multiple to generate sufficient cells for multiple 96 well plates. Jurkat cells are maintained in RPMI+10% serum with 1% Pen-Strep. Combine 2.5 mls of OPTI-MEM (Life Technologies) with 10 ug of plasmid DNA in a T25 flask. Add 2.5 ml OPTI-MEM containing 50 ul of DMRIE-C and incubate at room temperature for 15-45 mins.

[1308] During the incubation period, count cell concentration, spin down the required number of cells (10⁷ per transfection), and resuspend in OPTI-MEM to a final concentration of 10⁷ cells/ml. Then add 1 ml of 1×10⁷ cells in OPTI-MEM to T25 flask and incubate at 37 degree C. for 6 hrs. After the incubation, add 10 ml of RPMI+15% serum.

[1309] The Jurkat:GAS-SEAP stable reporter lines are maintained in RPMI+10% serum, 1 mg/m Genticin, and 1% Pen-Strep. These cells are treated with supernatants containing polypeptide of the present invention or polypeptide of the present invention induced polypeptides as produced by the protocol described in Example 30.

[1310] On the day of treatment with the supernatant, the cells should be washed and resuspended in fresh RPMI+10% serum to a density of 500,000 cells per ml. The exact number of cells required will depend on the number of supernatants being screened. For one 96 well plate, approximately 10 million cells (for 10 plates, 100 million cells) are required.

[1311] Transfer the cells to a triangular reservoir boat, in order to dispense the cells into a 96 well dish, using a 12 channel pipette. Using a 12 channel pipette, transfer 200 ul of cells into each well (therefore adding 100,000 cells per well).

[1312] After all the plates have been seeded, 50 ul of the supernatants are transferred directly from the 96 well plate containing the supernatants into each well using a 12 channel pipette. In addition, a dose of exogenous interferon gamma (0.1, 1.0, 10 ng) is added to wells H9, H10, and H11 to serve as additional positive controls for the assay.

[1313] The 96 well dishes containing Jurkat cells treated with supernatants are placed in an incubator for 48 hrs (note: this time is variable between 48-72 hrs). 35 ul samples from each well are then transferred to an opaque 96 well plate using a 12 channel pipette. The opaque plates should be covered (using sellophene covers) and stored at −20 degree C. until SEAP assays are performed according to Example 36. The plates containing the remaining treated cells are placed at 4 degree C. and serve as a source of material for repeating the assay on a specific well if desired.

[1314] As a positive control, 100 Unit/ml interferon gamma can be used which is known to activate Jurkat T cells. Over 30 fold induction is typically observed in the positive control wells.

[1315] The above protocol may be used in the generation of both transient, as well as, stable transfected cells, which would be apparent to those of skill in the art.

### Example 33

### High-Throughput Screening Assay Identifying Myeloid Activity

[1316] The following protocol is used to assess myeloid activity of polypeptide of the present invention by determining whether polypeptide of the present invention proliferates and/or differentiates myeloid cells. Myeloid cell activity is assessed using the GAS/SEAP/Neo construct produced in Example 31. Thus, factors that increase SEAP activity indicate the ability to activate the Jaks-STATS signal transduction pathway. The myeloid cell used in this assay is U937, a pre-monocyte cell line, although TF-1, HL60, or KG1 can be used.

[1317] To transiently transfect U937 cells with the GAS/SEAP/Neo construct produced in Example 31, a DEAE-Dextran method (Kharbanda et. al., 1994, Cell Growth & Differentiation, 5:259-265) is used. First, harvest 2×10⁷ U937 cells and wash with PBS. The U937 cells are usually grown in RPMI 1640 medium containing 10% heat-inactivated fetal bovine serum (FBS) supplemented with 100 units/ml penicillin and 100 mg/ml streptomycin.

[1318] Next, suspend the cells in 1 ml of 20 mM Tris-HC (pH 7.4) buffer containing 0.5 mg/ml DEAE-Dextran, 8 ug GAS-SEAP2 plasmid DNA, 140 mM NaCl, 5 mM KCl, 375 uM Na₂HPO₄.7H₂O, 1 mM MgCl₂, and 675 uM CaCl₂. Incubate at 37 degrees C. for 45 min.

[1319] Wash the cells with RPMI 1640 medium containing 10% FBS and then resuspend in 10 ml complete medium and incubate at 37 degree C. for 36 hr.

[1320] The GAS-SEAP/U937 stable cells are obtained by growing the cells in 400 ug/ml G418. The G418-free medium is used for routine growth but every one to two months, the cells should be re-grown in 400 ug/ml G418 for couple of passages.

[1321] These cells are tested by harvesting 1×10⁸ cells (this is enough for ten 96-well plates assay) and wash with PBS. Suspend the cells in 200 ml above described growth medium, with a final density of 5×10⁵ cells/ml. Plate 200 ul cells per well in the 96-well plate (or 1×10⁵ cells/well).

[1322] Add 50 ul of the supernatant prepared by the protocol described in Example 30. Incubate at 37 degree C for 48 to 72 hr. As a positive control, 100 Unit/ml interferon gamma can be used which is known to activate U937 cells. Over 30 fold induction is typically observed in the positive control wells. SEAP assay the supernatant according to the protocol described in Example 36.

### Example 34

### High-Throughput Screening Assay Identifying Neuronal Activity

[1323] When cells undergo differentiation and proliferation, a group of genes are activated through many different signal transduction pathways. One of these genes, EGR1 (early growth response gene 1), is induced in various tissues and cell types upon activation. The promoter of EGR1 is responsible for such induction. Using the EGR1 promoter linked to reporter molecules, activation of cells can be assessed by polypeptide of the present invention.

[1324] Particularly, the following protocol is used to assess neuronal activity in PC12 cell lines. PC12 cells (rat phenochromocytoma cells) are known to proliferate and/or differentiate by activation with a number of mitogens, such as TPA (tetradecanoyl phorbol acetate), NGF (nerve growth factor), and EGF (epidermal growth factor). The EGR1 gene expression is activated during this treatment. Thus, by stably transfecting PC12 cells with a construct containing an EGR promoter linked to SEAP reporter, activation of PC12 cells by polypeptide of the present invention can be assessed.

[1325] The EGR/SEAP reporter construct can be assembled by the following protocol. The EGR-1 promoter sequence (−633 to +1)(Sakamoto K et al., Oncogene 6:867-871 (1991)) can be PCR amplified from human genomic DNA using the following primers:

(SEQ ID NO: 6)

5′ GCGCTCGAGGGATGACAGCGATAGAACCCCGG-3′

(SEQ ID NO: 7)

5′ GCGAAGCTTCGCGACTCCCCGGATCCGCCTC-3′

[1326] Using the GAS:SEAP/Neo vector produced in Example 31, EGR1 amplified product can then be inserted into this vector. Linearize the GAS:SEAP/Neo vector using restriction enzymes XhoI/HindIII, removing the GAS/SV40 stuffer. Restrict the EGR1 amplified product with these same enzymes. Ligate the vector and the EGR1 promoter.

[1327] To prepare 96 well-plates for cell culture, two mls of a coating solution (1:30 dilution of collagen type I (Upstate Biotech Inc. Cat#08-115) in 30% ethanol (filter sterilized)) is added per one 10 cm plate or 50 ml per well of the 96-well plate, and allowed to air dry for 2 hr.

[1328] PC12 cells are routinely grown in RPMI-1640 medium (Bio Whittaker) containing 10% horse serum (JRH BIOSCIENCES, Cat. # 12449-78P), 5% heat-inactivated fetal bovine serum (FBS) supplemented with 100 units/ml penicillin and 100 ug/ml streptomycin on a precoated 10 cm tissue culture dish. One to four split is done every three to four days. Cells are removed from the plates by scraping and resuspended with pipetting up and down for more than 15 times.

[1329] Transfect the EGR/SEAP/Neo construct into PC12 using the Lipofectamine protocol described in Example 30. EGR-SEAP/PC12 stable cells are obtained by growing the cells in 300 ug/ml G418. The G418-free medium is used for routine growth but every one to two months, the cells should be re-grown in 300 ug/ml G418 for couple of passages.

[1330] To assay for neuronal activity, a 10 cm plate with cells around 70 to 80% confluent is screened by removing the old medium. Wash the cells once with PBS (Phosphate buffered saline). Then starve the cells in low serum medium (RPMI-1640 containing 1% horse serum and 0.5% FBS with antibiotics) overnight.

[1331] The next morning, remove the medium and wash the cells with PBS. Scrape off the cells from the plate, suspend the cells well in 2 ml low serum medium. Count the cell number and add more low serum medium to reach final cell density as 5×10⁵ cells/ml.

[1332] Add 200 ul of the cell suspension to each well of 96-well plate (equivalent to 1×10⁵ cells/well). Add 50 ul supernatant produced by Example 30, 37 degree C. for 48 to 72 hr. As a positive control, a growth factor known to activate PC12 cells through EGR can be used, such as 50 ng/ul of Neuronal Growth Factor (NGF). Over fifty-fold induction of SEAP is typically seen in the positive control wells. SEAP assay the supernatant according to Example 36.

### Example 35

### High-Throughput Screening Assay for T-cell Activity

[1333] NF-KB (Nuclear Factor KB) is a transcription factor activated by a wide variety of agents including the inflammatory cytokines IL-1 and TNF, CD30 and CD40, lymphotoxin-alpha and lymphotoxin-beta, by exposure to LPS or thrombin, and by expression of certain viral gene products. As a transcription factor, NF-KB regulates the expression of genes involved in immune cell activation, control of apoptosis (NF-KB appears to shield cells from apoptosis), B and T-cell development, anti-viral and antimicrobial responses, and multiple stress responses.

[1334] In non-stimulated conditions, NF-KB is retained in the cytoplasm with I-KB (Inhibitor KB). However, upon stimulation, I-KB is phosphorylated and degraded, causing NF-KB to shuttle to the nucleus, thereby activating transcription of target genes. Target genes activated by NF-KB include IL-2, IL-6, GM-CSF, ICAM-1 and class 1 MHC.

[1335] Due to its central role and ability to respond to a range of stimuli, reporter constructs utilizing the NF-KB promoter element are used to screen the supernatants produced in Example 30. Activators or inhibitors of NF-KB would be useful in treating, preventing, and/or diagnosing diseases. For example, inhibitors of NF-KB could be used to treat those diseases related to the acute or chronic activation of NF-KB, such as rheumatoid arthritis.

[1336] To construct a vector containing the NF-KB promoter element, a PCR based strategy is employed. The upstream primer contains four tandem copies of the NF-KB binding site (GGGGACTTTCCC) (SEQ ID NO: 8), 18 bp of sequence complementary to the 5′ end of the SV40 early promoter sequence, and is flanked with an XhoI site:

(SEQ ID NO: 9)

5′:GCGGCCTCGAGGGGACTTTCCCGGGGACTTTCCGGGGACTTTCCGGG
ACTTTCCATCCTGCCATCTCAATTAG:3′

[1337] The downstream primer is complementary to the 3′ end of the SV40 promoter and is flanked with a Hind III site:

(SEQ ID NO: 4)

5′:GCGGCAAGCTTTTTGCAAAGCCTAGGC:3′

[1338] PCR amplification is performed using the SV40 promoter template present in the pB-gal:promoter plasmid obtained from Clontech. The resulting PCR fragment is digested with XhoI and Hind III and subcloned into BLSK2-. (Stratagene) Sequencing with the T7 and T3 primers confirms the insert contains the following sequence:

(SEQ ID NO: 10)

5′:CTCGAGGGGACTTTCCCGGGGACTTTCCGGGGACTTTCCGGGACTTT
CCATCTGCCATCTCAATTAGTCAGCAACCATAGTCCCGCCCCTAACTCCG
CCCATCCCGCCCCTAACTCCGCCCAGTTCCGCCCATTCTCCGCCCCATGG
CTGACTAATTTTTTTTATTTATGCAGAGGCCGAGGCCGCCTCGGCCTCTG
AGCTATTCCAGAAGTAGTGAGGAGGCTTTTTTGGAGGCCTAGGCTTTTGC
AAAAAGCTT:3′

[1339] Next, replace the SV40 minimal promoter element present in the pSEAP2-promoter plasmid (Clontech) with this NF-KB/SV40 fragment using XhoI and HindIII. However, this vector does not contain a neomycin resistance gene, and therefore, is not preferred for mammalian expression systems.

[1340] In order to generate stable mammalian cell lines, the NF-KB/SV40/SEAP cassette is removed from the above NF-KB/SEAP vector using restriction enzymes SalI and NotI, and inserted into a vector containing neomycin resistance. Particularly, the NF-KB/SV40/SEAP cassette was inserted into pGFP-1 (Clontech), replacing the GFP gene, after restricting pGFP-1 with SalI and NotI.

[1341] Once NF-KB/SV40/SEAP/Neo vector is created, stable Jurkat T-cells are created and maintained according to the protocol described in Example 32. Similarly, the method for assaying supernatants with these stable Jurkat T-cells is also described in Example 32. As a positive control, exogenous TNF alpha (0.1, 1, 10 ng) is added to wells H9, H10, and H11, with a 5-10 fold activation typically observed.

### Example 36

### Assay for SEAP Activity

[1342] As a reporter molecule for the assays described in Examples 32-35, SEAP activity is assayed using the Tropix Phospho-light Kit (Cat. BP-400) according to the following general procedure. The Tropix Phospho-light Kit supplies the Dilution, Assay, and Reaction Buffers used below.

[1343] Prime a dispenser with the 2.5× Dilution Buffer and dispense 15 ul of 2.5× dilution buffer into Optiplates containing 35 ul of a supernatant. Seal the plates with a plastic sealer and incubate at 65 degree C. for 30 min. Separate the Optiplates to avoid uneven heating.

[1344] Cool the samples to room temperature for 15 minutes. Empty the dispenser and prime with the Assay Buffer. Add 50 ml Assay Buffer and incubate at room temperature 5 min. Empty the dispenser and prime with the Reaction Buffer (see the Table below). Add 50 ul Reaction Buffer and incubate at room temperature for 20 minutes. Since the intensity of the chemiluminescent signal is time dependent, and it takes about 10 minutes to read 5 plates on a luminometer, thus one should treat 5 plates at each time and start the second set 10 minutes later.

[1345] Read the relative light unit in the luminometer. Set H12 as blank, and print the results. An increase in chemiluminescence indicates reporter activity.

Reaction Buffer Formulation:

| # of plates | Rxn buffer diluent (ml) | CSPD (ml) |
|---|---|---|
| 10 | 60 | 3 |
| 11 | 65 | 3.25 |
| 12 | 70 | 3.5 |
| 13 | 75 | 3.75 |
| 14 | 80 | 4 |
| 15 | 85 | 4.25 |
| 16 | 90 | 4.5 |
| 17 | 95 | 4.75 |
| 18 | 100 | 5 |
| 19 | 105 | 5.25 |
| 20 | 110 | 5.5 |
| 21 | 115 | 5.75 |
| 22 | 120 | 6 |
| 23 | 125 | 6.25 |
| 24 | 130 | 6.5 |
| 25 | 135 | 6.75 |
| 26 | 140 | 7 |
| 27 | 145 | 7.25 |
| 28 | 150 | 7.5 |
| 29 | 155 | 7.75 |
| 30 | 160 | 8 |
| 31 | 165 | 8.25 |
| 32 | 170 | 8.5 |
| 33 | 175 | 8.75 |
| 34 | 180 | 9 |
| 35 | 185 | 9.25 |
| 36 | 190 | 9.5 |
| 37 | 195 | 9.75 |
| 38 | 200 | 10 |
| 39 | 205 | 10.25 |
| 40 | 210 | 10.5 |
| 41 | 215 | 10.75 |
| 42 | 220 | 11 |
| 43 | 225 | 11.25 |
| 44 | 230 | 11.5 |
| 45 | 235 | 11.75 |
| 46 | 240 | 12 |
| 47 | 245 | 12.25 |
| 48 | 250 | 12.5 |
| 49 | 255 | 12.75 |
| 50 | 260 | 13 |

### Example 37

### High-Throughput Screening Assay Identifying Changes in Small Molecule Concentration and Membrane Permeability

[1346] Binding of a ligand to a receptor is known to alter intracellular levels of small molecules, such as calcium, potassium, sodium, and pH, as well as alter membrane potential. These alterations can be measured in an assay to identify supernatants which bind to receptors of a particular cell. Although the following protocol describes an assay for calcium, this protocol can easily be modified to detect changes in potassium, sodium, pH, membrane potential, or any other small molecule which is detectable by a fluorescent probe.

[1347] The following assay uses Fluorometric Imaging Plate Reader (“FLIPR”) to measure changes in fluorescent molecules (Molecular Probes) that bind small molecules. Clearly, any fluorescent molecule detecting a small molecule can be used instead of the calcium fluorescent molecule, fluo-4 (Molecular Probes, Inc.; catalog no. F-14202), used here.

[1348] For adherent cells, seed the cells at 10,000-20,000 cells/well in a Co-star black 96-well plate with clear bottom. The plate is incubated in a CO₂ incubator for 20 hours. The adherent cells are washed two times in Biotek washer with 200 ul of HBSS (Hank's Balanced Salt Solution) leaving 100 ul of buffer after the final wash.

[1349] A stock solution of 1 mg/ml fluo-4 is made in 10% pluronic acid DMSO. To load the cells with fluo-4, 50 ul of 12 ug/ml fluo-4 is added to each well. The plate is incubated at 37 degrees C. in a CO₂ incubator for 60 min. The plate is washed four times in the Biotek washer with HBSS leaving 100 ul of buffer.

[1350] For non-adherent cells, the cells are spun down from culture media. Cells are re-suspended to 2-5×10⁶ cells/ml with HBSS in a 50-ml conical tube. 4 ul of 1 mg/ml fluo-4 solution in 10% pluronic acid DMSO is added to each ml of cell suspension. The tube is then placed in a 37 degrees C. water bath for 30-60 min. The cells are washed twice with HBSS, resuspended to 1×10⁶ cells/ml, and dispensed into a microplate, 100 ul/well. The plate is centrifuged at 1000 rpm for 5 min. The plate is then washed once in Denley Cell Wash with 200 ul, followed by an aspiration step to 100 ul final volume.

[1351] For a non-cell based assay, each well contains a fluorescent molecule, such as fluo-4. The supernatant is added to the well, and a change in fluorescence is detected.

[1352] To measure the fluorescence of intracellular calcium, the FLIPR is set for the following parameters: (1) System gain is 300-800 mW; (2) Exposure time is 0.4 second; (3) Camera F/stop is F/2; (4) Excitation is 488 nm; (5) Emission is 530 nm; and (6) Sample addition is 50 ul. Increased emission at 530 nm indicates an extracellular signaling event caused by the a molecule, either polypeptide of the present invention or a molecule induced by polypeptide of the present invention, which has resulted in an increase in the intracellular Ca++concentration.

### Example 38

### High-Throughput Screening Assay Identifying Tyrosine Kinase Activity

[1353] The Protein Tyrosine Kinases (PTK) represent a diverse group of transmembrane and cytoplasmic kinases. Within the Receptor Protein Tyrosine Kinase RPTK) group are receptors for a range of mitogenic and metabolic growth factors including the PDGF, FGF, EGF, NGF, HGF and Insulin receptor subfamilies. In addition there are a large family of RPTKs for which the corresponding ligand is unknown. Ligands for RPTKs include mainly secreted small proteins, but also membrane-bound and extracellular matrix proteins.

[1354] Activation of RPTK by ligands involves ligand-mediated receptor dimerization, resulting in transphosphorylation of the receptor subunits and activation of the cytoplasmic tyrosine kinases. The cytoplasmic tyrosine kinases include receptor associated tyrosine kinases of the src-family (e.g., src, yes, lck, lyn, fyn) and non-receptor linked and cytosolic protein tyrosine kinases, such as the Jak family, members of which mediate signal transduction triggered by the cytokine superfamily of receptors (e.g., the Interleukins, Interferons, GM-CSF, and Leptin).

[1355] Because of the wide range of known factors capable of stimulating tyrosine kinase activity, identifying whether polypeptide of the present invention or a molecule induced by polypeptide of the present invention is capable of activating tyrosine kinase signal transduction pathways is of interest. Therefore, the following protocol is designed to identify such molecules capable of activating the tyrosine kinase signal transduction pathways.

[1356] Seed target cells (e.g., primary keratinocytes) at a density of approximately 25,000 cells per well in a 96 well Loprodyne Silent Screen Plates purchased from Nalge Nunc (Naperville, Ill.). The plates are sterilized with two 30 minute rinses with 100% ethanol, rinsed with water and dried overnight. Some plates are coated for 2 hr with 100 ml of cell culture grade type I collagen (50 mg/ml), gelatin (2%) or polylysine (50 mg/ml), all of which can be purchased from Sigma Chemicals (St. Louis, Mo.) or 10% Matrigel purchased from Becton Dickinson (Bedford, Mass.), or calf serum, rinsed with PBS and stored at 4 degree C. Cell growth on these plates is assayed by seeding 5,000 cells/well in growth medium and indirect quantitation of cell number through use of alamarblue as described by the manufacturer Alamar Biosciences, Inc. (Sacramento, Calif.) after 48 hr. Falcon plate covers #3071 from Becton Dickinson (Bedford, Mass.) are used to cover the Loprodyne Silent Screen Plates. Falcon Microtest III cell culture plates can also be used in some proliferation experiments.

[1357] To prepare extracts, A431 cells are seeded onto the nylon membranes of Loprodyne plates (20,000/200 ml/well) and cultured overnight in complete medium. Cells are quiesced by incubation in serum-free basal medium for 24 hr. After 5-20 minutes treatment with EGF (60 ng/ml) or 50 ul of the supernatant produced in Example 30, the medium was removed and 100 ml of extraction buffer ((20 mM HEPES pH 7.5, 0.15 M NaCl, 1% Triton X-100, 0.1% SDS, 2 mM Na3VO4, 2 mM Na4P2O7 and a cocktail of protease inhibitors (# 1836170) obtained from Boeheringer Mannheim (Indianapolis, Ind.)) is added to each well and the plate is shaken on a rotating shaker for 5 minutes at 4° C. The plate is then placed in a vacuum transfer manifold and the extract filtered through the 0.45 mm membrane bottoms of each well using house vacuum. Extracts are collected in a 96-well catch/assay plate in the bottom of the vacuum manifold and immediately placed on ice. To obtain extracts clarified by centrifugation, the content of each well, after detergent solubilization for 5 minutes, is removed and centrifuged for 15 minutes at 4 degree C. at 16,000×g.

[1358] Test the filtered extracts for levels of tyrosine kinase activity. Although many methods of detecting tyrosine kinase activity are known, one method is described here.

[1359] Generally, the tyrosine kinase activity of a supernatant is evaluated by determining its ability to phosphorylate a tyrosine residue on a specific substrate (a biotinylated peptide). Biotinylated peptides that can be used for this purpose include PSK1 (corresponding to amino acids 6-20 of the cell division kinase cdc2-p34) and PSK2 (corresponding to amino acids 1-17 of gastrin). Both peptides are substrates for a range of tyrosine kinases and are available from Boehringer Mannheim.

[1360] The tyrosine kinase reaction is set up by adding the following components in order. First, add 10 ul of 5 uM Biotinylated Peptide, then 10 ul ATP/Mg₂₊ (5 mM ATP/50 mM MgCl₂), then 10 ul of 5× Assay Buffer (40 mM imidazole hydrochloride, pH7.3, 40 mM beta-glycerophosphate, 1 mM EGTA, 100 mM MgCl₂, 5 mM MnCl₂, 0.5 mg/ml BSA), then 5 ul of Sodium Vanadate (1 mM), and then 5 ul of water. Mix the components gently and preincubate the reaction mix at 30 degree C. for 2 min. Initial the reaction by adding 10 ul of the control enzyme or the filtered supernatant.

[1361] The tyrosine kinase assay reaction is then terminated by adding 10 ul of 120 mm EDTA and place the reactions on ice.

[1362] Tyrosine kinase activity is determined by transferring 5 ul aliquot of reaction mixture to a microtiter plate (MTP) module and incubating at 37 degree C. for 20 min. This allows the streptavidin coated 96 well plate to associate with the biotinylated peptide. Wash the MTP module with 300 ul/well of PBS four times. Next add 75 ul of anti-phospotyrosine antibody conjugated to horse radish peroxidase (anti-P-Tyr-POD (0.5 u/ml)) to each well and incubate at 37 degree C. for one hour. Wash the well as above.

[1363] Next add 100 ul of peroxidase substrate solution (Boehringer Mannheim) and incubate at room temperature for at least 5 mins (up to 30 min). Measure the absorbance of the sample at 405 nm by using ELISA reader. The level of bound peroxidase activity is quantitated using an ELISA reader and reflects the level of tyrosine kinase activity.

### Example 39

### High-Throughput Screening Assay Identifying Phosphorylation Activity

[1364] As a potential alternative and/or complement to the assay of protein tyrosine kinase activity described in Example 38, an assay which detects activation (phosphorylation) of major intracellular signal transduction intermediates can also be used. For example, as described below one particular assay can detect tyrosine phosphorylation of the Erk-1 and Erk-2 kinases. However, phosphorylation of other molecules, such as Raf, JNK, p38 MAP, Map kinase (MEK), MEK kinase, Src, Muscle specific kinase (MuSK), IRAK, Tec, and Janus, as well as any other phosphoserine, phosphotyrosine, or phosphothreonine molecule, can be detected by substituting these molecules for Erk-1 or Erk-2 in the following assay.

[1365] Specifically, assay plates are made by coating the wells of a 96-well ELISA plate with 0.1 ml of protein G (1 ug/ml) for 2 hr at room temp, (RT). The plates are then rinsed with PBS and blocked with 3% BSA/PBS for 1 hr at RT. The protein G plates are then treated with 2 commercial monoclonal antibodies (100 ng/well) against Erk-1 and Erk-2 (1 hr at RT) (Santa Cruz Biotechnology). (To detect other molecules, this step can easily be modified by substituting a monoclonal antibody detecting any of the above described molecules.) After 3-5 rinses with PBS, the plates are stored at 4 degree C. until use.

[1366] A431 cells are seeded at 20,000/well in a 96-well Loprodyne filterplate and cultured overnight in growth medium. The cells are then starved for 48 hr in basal medium (DMEM) and then treated with EGF (6 ng/well) or 50 ul of the supernatants obtained in Example 30 for 5-20 minutes. The cells are then solubilized and extracts filtered directly into the assay plate.

[1367] After incubation with the extract for 1 hr at RT, the wells are again rinsed. As a positive control, a commercial preparation of MAP kinase (10 ng/well) is used in place of A431 extract. Plates are then treated with a commercial polyclonal (rabbit) antibody (1 ug/ml) which specifically recognizes the phosphorylated epitope of the Erk-1 and Erk-2 kinases (1 hr at RT). This antibody is biotinylated by standard procedures. The bound polyclonal antibody is then quantitated by successive incubations with Europium-streptavidin and Europium fluorescence enhancing reagent in the Wallac DELFIA instrument (time-resolved fluorescence). An increased fluorescent signal over background indicates a phosphorylation by polypeptide of the present invention or a molecule induced by polypeptide of the present invention.

### Example 40

### Assay for the Stimulation of Bone Marrow CD34+ Cell Proliferation

[1368] This assay is based on the ability of human CD34+ to proliferate in the presence of hematopoietic growth factors and evaluates the ability of isolated polypeptides expressed in mammalian cells to stimulate proliferation of CD34+ cells.

[1369] It has been previously shown that most mature precursors will respond to only a single signal. More immature precursors require at least two signals to respond. Therefore, to test the effect of polypeptides on hematopoietic activity of a wide range of progenitor cells, the assay contains a given polypeptide in the presence or absence of other hematopoietic growth factors. Isolated cells are cultured for 5 days in the presence of Stem Cell Factor (SCF) in combination with tested sample. SCF alone has a very limited effect on the proliferation of bone marrow (BM) cells, acting in such conditions only as a “survival” factor. However, combined with any factor exhibiting stimulatory effect on these cells (e.g., IL-3), SCF will cause a synergistic effect. Therefore, if the tested polypeptide has a stimulatory effect on hematopoietic progenitors, such activity can be easily detected. Since normal BM cells have a low level of cycling cells, it is likely that any inhibitory effect of a given polypeptide, or agonists or antagonists thereof, might not be detected. Accordingly, assays for an inhibitory effect on progenitors is preferably tested in cells that are first subjected to in vitro stimulation with SCF+IL+3, and then contacted with the compound that is being evaluated for inhibition of such induced proliferation.

[1370] Briefly, CD34+ cells are isolated using methods known in the art. The cells are thawed and resuspended in medium (QBSF 60 serum-free medium with 1% L-glutamine (500 ml) Quality Biological, Inc., Gaithersburg, Md. Cat# 160-204-101). After several gentle centrifugation steps at 200×g, cells are allowed to rest for one hour. The cell count is adjusted to 2.5×10⁵ cells/ml. During this time, 100 μl of sterile water is added to the peripheral wells of a 96-well plate. The cytokines that can be tested with a given polypeptide in this assay is rhSCF (R&D Systems, Minneapolis, Minn., Cat# 255-SC) at 50 ng/ml alone and in combination with rhSCF and rhIL-3 (R&D Systems, Minneapolis, Minn., Cat# 203-ML) at 30 ng/ml. After one hour, 10 μl of prepared cytokines, 50 μl of the supernatants prepared in Example 30 (supernatants at 1:2 dilution=50 μl) and 20 μl of diluted cells are added to the media which is already present in the wells to allow for a final total volume of 100 μl. The plates are then placed in a 37° C./5% CO₂ incubator for five days.

[1371] Eighteen hours before the assay is harvested, 0.5 μCi/well of [3H] Thymidine is added in a 10 μl volume to each well to determine the proliferation rate. The experiment is terminated by harvesting the cells from each 96-well plate to a filtermat using the Tomtec Harvester 96. After harvesting, the filtermats are dried, trimmed and placed into OmniFilter assemblies consisting of one OmniFilter plate and one OmniFilter Tray. 60 μl Microscint is added to each well and the plate sealed with TopSeal-A press-on sealing film A bar code 15 sticker is affixed to the first plate for counting. The sealed plates are then loaded and the level of radioactivity determined via the Packard Top Count and the printed data collected for analysis. The level of radioactivity reflects the amount of cell proliferation.

[1372] The studies described in this example test the activity of a given polypeptide to stimulate bone marrow CD34+ cell proliferation. One skilled in the art could easily modify the exemplified studies to test the activity of polynucleotides (e.g., gene therapy), antibodies, agonists, and/or antagonists and fragments and variants thereof. As a nonlimiting example, potential antagonists tested in this assay would be expected to inhibit cell proliferation in the presence of cytokines and/or to increase the inhibition of cell proliferation in the presence of cytokines and a given polypeptide. In contrast, potential agonists tested in this assay would be expected to enhance cell proliferation and/or to decrease the inhibition of cell proliferation in the presence of cytokines and a given polypeptide.

[1373] The ability of a gene to stimulate the proliferation of bone marrow CD34+ cells indicates that polynucleotides and polypeptides corresponding to the gene are useful for the diagnosis and treatment of disorders affecting the immune system and hematopoiesis. Representative uses are described in the “Immune Activity” and “Infectious Disease” sections above, and elsewhere herein.

### Example 41

### Assay for Extracellular Matrix Enhanced Cell Response (EMECR)

[1374] The objective of the Extracellular Matrix Enhanced Cell Response (EMECR) assay is to identify gene products (e.g., isolated polypeptides) that act on the hematopoietic stem cells in the context of the extracellular matrix (ECM) induced signal.

[1375] Cells respond to the regulatory factors in the context of signal(s) received from the surrounding microenvironment. For example, fibroblasts, and endothelial and epithelial stem cells fail to replicate in the absence of signals from the ECM. Hematopoietic stem cells can undergo self-renewal in the bone marrow, but not in in vitro suspension culture. The ability of stem cells to undergo self-renewal in vitro is dependent upon their interaction with the stromal cells and the ECM protein fibronectin (fn). Adhesion of cells to fn is mediated by the α₅,β₁ and α₄,β₁ integrin receptors, which are expressed by human and mouse hematopoietic stem cells. The factor(s) which integrate with the ECM environment and are responsible for stimulating stem cell self-renewal have not yet been identified. Discovery of such factors should be of great interest in gene therapy and bone marrow transplant applications

[1376] Briefly, polystyrene, non tissue culture treated, 96-well plates are coated with fn fragment at a coating concentration of 0.2 μg/cm². Mouse bone marrow cells are plated (1,000 cells/well) in 0.2 ml of serum-free medium. Cells cultured in the presence of IL-3 (5 ng/ml)+SCF (50 ng/ml) would serve as the positive control, conditions under which little self-renewal but pronounced differentiation of the stem cells is to be expected. Gene products of the invention (e.g., including, but not limited to, polynucleotides and polypeptides of the present invention, and supernatants produced in Example 30), are tested with appropriate negative controls in the presence and absence of SCF (5.0 ng/ml), where test factor supernatants represent 10% of the total assay volume. The plated cells are then allowed to grow by incubating in a low oxygen environment (5% CO₂, 7% O₂, and 88% N₂) tissue culture incubator for 7 days. The number of proliferating cells within the wells is then quantitated by measuring thymidine incorporation into cellular DNA. Verification of the positive hits in the assay will require phenotypic characterization of the cells, which can be accomplished by scaling up of the culture system and using appropriate antibody reagents against cell surface antigens and FACScan.

[1377] One skilled in the art could easily modify the exemplified studies to test the activity of polynucleotides (e.g., gene therapy), antibodies, agonists, and/or antagonists and fragments and variants thereof.

[1378] If a particular polypeptide of the present invention is found to be a stimulator of hematopoietic progenitors, polynucleotides and polypeptides corresponding to the gene encoding said polypeptide may be useful for the diagnosis and treatment of disorders affecting the immune system and hematopoiesis. Representative uses are described in the “Immune Activity” and “Infectious Disease” sections above, and elsewhere herein. The gene product may also be useful in the expansion of stem cells and committed progenitors of various blood lineages, and in the differentiation and/or proliferation of various cell types.

[1379] Additionally, the polynucleotides and/or polypeptides of the gene of interest and/or agonists and/or antagonists thereof, may also be employed to inhibit the proliferation and differentiation of hematopoietic cells and therefore may be employed to protect bone marrow stem cells from chemotherapeutic agents during chemotherapy. This antiproliferative effect may allow administration of higher doses of chemotherapeutic agents and, therefore, more effective chemotherapeutic treatment.

[1380] Moreover, polynucleotides and polypeptides corresponding to the gene of interest may also be useful for the treatment and diagnosis of hematopoietic related disorders such as, for example, anemia, pancytopenia, leukopenia, thrombocytopenia or leukemia since stromal cells are important in the production of cells of hematopoietic lineages. The uses include bone marrow cell ex-vivo culture, bone marrow transplantation, bone marrow reconstitution, radiotherapy or chemotherapy of neoplasia.

### Example 42

### Human Dermal Fibroblast and Aortic Smooth Muscle Cell Proliferation

[1381] The polypeptide of interest is added to cultures of normal human dermal fibroblasts (NHDF) and human aortic smooth muscle cells (AoSMC) and two co-assays are performed with each sample. The first assay examines the effect of the polypeptide of interest on the proliferation of normal human dermal fibroblasts (NHDF) or aortic smooth muscle cells (AoSMC). Aberrant growth of fibroblasts or smooth muscle cells is a part of several pathological processes, including fibrosis, and restenosis. The second assay examines IL6 production by both NHDF and SMC. IL6 production is an indication of functional activation. Activated cells will have increased production of a number of cytokines and other factors, which can result in a proinflammatory or immunomodulatory outcome. Assays are run with and without co-TNFa stimulation, in order to check for costimulatory or inhibitory activity.

[1382] Briefly, on day 1, 96-well black plates are setup with 1000 cells/well (NHDF) or 2000 cells/well (AoSMC) in 100 μl culture media. NHDF culture media contains: Clonetics FB basal media, 1 mg/ml hFGF, 5 mg/ml insulin, 50 mg/ml gentamycin, 2% FBS, while AoSMC culture media contains Clonetics SM basal media, 0.5 μg/ml hEGF, 5 mg/ml insulin, 1 μg/ml hFGF, 50 mg/ml gentamycin, 50 μg/ml Amphotericin B, 5% FBS. After incubation at 37° C. for at least 4-5 hours culture media is aspirated and replaced with growth arrest media. Growth arrest media for NHDF contains fibroblast basal media, 50 mg/ml gentamycin, 2% FBS, while growth arrest media for AoSMC contains SM basal media, 50 mg/ml gentamycin, 50 μg/ml Amphotericin B, 0.4% FBS. Incubate at 37° C. until day 2.

[1383] On day 2, serial dilutions and templates of the polypeptide of interest are designed such that they always include media controls and known-protein controls. For both stimulation and inhibition experiments, proteins are diluted in growth arrest media. For inhibition experiments, TNFa is added to a final concentration of 2 ng/ml (NHDF) or 5 ng/ml (AoSMC). Add 1/3 vol media containing controls or polypeptides of the present invention and incubate at 37 degrees C./5% CO₂ until day 5.

[1384] Transfer 60 μl from each well to another labeled 96-well plate, cover with a plate-sealer, and store at 4 degrees C. until Day 6 (for IL6 ELISA). To the remaining 100 μl in the cell culture plate, aseptically add Alamar Blue in an amount equal to 10% of the culture volume (10 μl). Return plates to incubator for 3 to 4 hours. Then measure fluorescence with excitation at 530 nm and emission at 590 nm using the CytoFluor. This yields the growth stimulation/inhibition data.

[1385] On day 5, the IL6 ELISA is performed by coating a 96 well plate with 50-100 ul/well of Anti-Human IL6 Monoclonal antibody diluted in PBS, pH 7.4, incubate ON at room temperature.

[1386] On day 6, empty the plates into the sink and blot on paper towels. Prepare Assay Buffer containing PBS with 4% BSA. Block the plates with 200 μl/well of Pierce Super Block blocking buffer in PBS for 1-2 hr and then wash plates with wash buffer (PBS, 0.05% Tween-20). Blot plates on paper towels. Then add 50 μl/well of diluted Anti-Human IL-6 Monoclonal, Biotin-labeled antibody at 0.50 mg/ml. Make dilutions of IL-6 stock in media (30, 10, 3, 1, 0.3, 0 ng/ml). Add duplicate samples to top row of plate. Cover the plates and incubate for 2 hours at RT on shaker.

[1387] Plates are washed with wash buffer and blotted on paper towels. Dilute EU-labeled Streptavidin 1:1000 in Assay buffer, and add 100 μl/well. Cover the plate and incubate 1 h at RT. Plates are again washed with wash buffer and blotted on paper towels.

[1388] Add 100 μl/well of Enhancement Solution. Shake for 5 minutes. Read the plate on the Wallac DELFIA Fluorometer. Readings from triplicate samples in each assay were tabulated and averaged.

[1389] A positive result in this assay suggests AoSMC cell proliferation and that the polypeptide of the present invention may be involved in dermal fibroblast proliferation and/or smooth muscle cell proliferation. A positive result also suggests many potential uses of polypeptides, polynucleotides, agonists and/or antagonists of the polynucleotide/polypeptide of the present invention which gives a positive result. For example, inflammation and immune responses, wound healing, and angiogenesis, as detailed throughout this specification. Particularly, polypeptides of the present invention and polynucleotides of the present invention may be used in wound healing and dermal regeneration, as well as the promotion of vasculogenesis, both of the blood vessels and lymphatics. The growth of vessels can be used in the treatment of, for example, cardiovascular diseases. Additionally, antagonists of polypeptides and polynucleotides of the invention may be useful in treating diseases, disorders, and/or conditions which involve angiogenesis by acting as an anti-vascular agent (e.g., anti-angiogenesis). These diseases, disorders, and/or conditions are known in the art and/or are described herein, such as, for example, malignancies, solid tumors, benign tumors, for example hemangiomas, acoustic neuromas, neurofibromas, trachomas, and pyogenic granulomas; artheroscleric plaques; ocular angiogenic diseases, for example, diabetic retinopathy, retinopathy of prematurity, macular degeneration, corneal graft rejection, neovascular glaucoma, retrolental fibroplasia, rubeosis, retinoblastoma, uvietis and Pterygia (abnormal blood vessel growth) of the eye; rheumatoid arthritis; psoriasis; delayed wound healing; endometriosis; vasculogenesis; granulations; hypertrophic scars (keloids); nonunion fractures; scleroderma; trachoma; vascular adhesions; myocardial angiogenesis; coronary collaterals; cerebral collaterals; arteriovenous malformations; ischemic limb angiogenesis; Osler-Webber Syndrome; plaque neovascularization; telangiectasia; hemophiliac joints; angiofibroma; fibromuscular dysplasia; wound granulation; Crohn's disease; and atherosclerosis. Moreover, antagonists of polypeptides and polynucleotides of the invention may be useful in treating anti-hyperproliferative diseases and/or anti-inflammatory known in the art and/or described herein.

[1390] One skilled in the art could easily modify the exemplified studies to test the activity of polynucleotides (e.g., gene therapy), antibodies, agonists, and/or antagonists and fragments and variants thereof.

### Example 43

### Cellular Adhesion Molecule (CAM) Expression on Endothelial Cells

[1391] The recruitment of lymphocytes to areas of inflammation and angiogenesis involves specific receptor-ligand interactions between cell surface adhesion molecules (CAMs) on lymphocytes and the vascular endothelium. The adhesion process, in both normal and pathological settings, follows a multi-step cascade that involves intercellular adhesion molecule-1 (ICAM-1), vascular cell adhesion molecule-1 (VCAM-1), and endothelial leukocyte adhesion molecule-1 (E-selectin) expression on endothelial cells (EC). The expression of these molecules and others on the vascular endothelium determines the efficiency with which leukocytes may adhere to the local vasculature and extravasate into the local tissue during the development of an inflammatory response. The local concentration of cytokines and growth factor participate in the modulation of the expression of these CAMs.

[1392] Briefly, endothelial cells (e.g., Human Umbilical Vein Endothelial cells (HUVECs)) are grown in a standard 96 well plate to confluence, growth medium is removed from the cells and replaced with 100 μl of 199 Medium (10% fetal bovine serum (FBS)). Samples for testing and positive or negative controls are added to the plate in triplicate (in 10 μl volumes). Plates are then incubated at 37° C. for either 5 h (selectin and integrin expression) or 24 h (integrin expression only). Plates are aspirated to remove medium and 100 μl of 0.1% paraformaldehyde-PBS (with Ca++ and Mg++) is added to each well. Plates are held at 4° C. for 30 min. Fixative is removed from the wells and wells are washed 1× with PBS(+Ca,Mg)+0.5% BSA and drained. 10 μl of diluted primary antibody is added to the test and control wells. Anti-ICAM-1-Biotin, Anti-VCAM-1-Biotin and Anti-E-selectin-Biotin are used at a concentration of 10 μg/ml (1:10 dilution of 0.1 mg/ml stock antibody). Cells are incubated at 37° C. for 30 min. in a humidified environment. Wells are washed three times with PBS(+Ca,Mg)+0.5% BSA. 20 μl of diluted ExtrAvidin-Alkaline Phosphatase (1:5,000 dilution, referred to herein as the working dilution) are added to each well and incubated at 37° C. for 30 min. Wells are washed three times with PBS(+Ca,Mg)+0.5% BSA. Dissolve 1 tablet of p-Nitrophenol Phosphate pNPP per 5 ml of glycine buffer (pH 10.4). 100 μl of pNPP substrate in glycine buffer is added to each test well. Standard wells in triplicate are prepared from the working dilution of the ExtrAvidin-Alkaline Phosphotase in glycine buffer: 1:5,000 (10⁰)>10^{-0.5}>10⁻¹>10^{-1.5}. 5 μl of each dilution is added to triplicate wells and the resulting AP content in each well is 5.50 ng, 1.74 ng, 0.55 ng, 0.18 ng. 100 μl of pNNP reagent is then added to each of the standard wells. The plate is incubated at 37° C. for 4 h. A volume of 50 μl of 3M NaOH is added to all wells. The plate is read on a plate reader at 405 nm using the background subtraction option on blank wells filled with glycine buffer only. Additionally, the template is set up to indicate the concentration of AP-conjugate in each standard well [5.50 ng; 1.74 ng; 0.55 ng; 0.18 ng]. Results are indicated as amount of bound AP-conjugate in each sample.

### Example 44

### Alamar Blue Endothelial Cells Proliferation Assay

[1393] This assay may be used to quantitatively determine protein mediated inhibition of bFGF-induced proliferation of Bovine Lymphatic Endothelial Cells (LECs), Bovine Aortic Endothelial Cells (BAECs) or Human Microvascular Uterine Myometrial Cells (UTMECs). This assay incorporates a fluorometric growth indicator based on detection of metabolic activity. A standard Alamar Blue Proliferation Assay is prepared in EGM-2MV with 10 ng/ml of bFGF added as a source of endothelial cell stimulation. This assay may be used with a variety of endothelial cells with slight changes in growth medium and cell concentration. Dilutions of the protein batches to be tested are diluted as appropriate. Serum-free medium (GIBCO SFM) without bFGF is used as a non-stimulated control and Angiostatin or TSP-1 are included as a known inhibitory controls.

[1394] Briefly, LEC, BAECs or UTMECs are seeded in growth media at a density of 5000 to 2000 cells/well in a 96 well plate and placed at 37 degrees C. overnight. After the overnight incubation of the cells, the growth media is removed and replaced with GIBCO EC-SFM. The cells are treated with the appropriate dilutions of the protein of interest or control protein sample(s) (prepared in SFM) in triplicate wells with additional bFGF to a concentration of 10 ng/ml. Once the cells have been treated with the samples, the plate(s) is/are placed back in the 37° C. incubator for three days. After three days 10 ml of stock alamar blue (Biosource Cat# DAL1100) is added to each well and the plate(s) is/are placed back in the 37° C. incubator for four hours. The plate(s) are then read at 530 nm excitation and 590 nm emission using the CytoFluor fluorescence reader. Direct output is recorded in relative fluorescence units.

[1395] Alamar blue is an oxidation-reduction indicator that both fluoresces and changes color in response to chemical reduction of growth medium resulting from cell growth. As cells grow in culture, innate metabolic activity results in a chemical reduction of the immediate surrounding environment. Reduction related to growth causes the indicator to change from oxidized (non-fluorescent blue) form to reduced (fluorescent red) form (i.e., stimulated proliferation will produce a stronger signal and inhibited proliferation will produce a weaker signal and the total signal is proportional to the total number of cells as well as their metabolic activity). The background level of activity is observed with the starvation medium alone. This is compared to the output observed from the positive control samples (bFGF in growth medium) and protein dilutions.

### Example 45

### Detection of Inhibition of a Mixed Lymphocyte Reaction

[1396] This assay can be used to detect and evaluate inhibition of a Mixed Lymphocyte Reaction (MLR) by gene products (e.g., isolated polypeptides). Inhibition of a MLR may be due to a direct effect on cell proliferation and viability, modulation of costimulatory molecules on interacting cells, modulation of adhesiveness between lymphocytes and accessory cells, or modulation of cytokine production by accessory cells. Multiple cells may be targeted by these polypeptides since the peripheral blood mononuclear fraction used in this assay includes T, B and natural killer lymphocytes, as well as monocytes and dendritic cells.

[1397] Polypeptides of interest found to inhibit the MLR may find application in diseases associated with lymphocyte and monocyte activation or proliferation. These include, but are not limited to, diseases such as asthma, arthritis, diabetes, inflammatory skin conditions, psoriasis, eczema, systemic lupus erythematosus, multiple sclerosis, glomerulonephritis, inflammatory bowel disease, crohn's disease, ulcerative colitis, arteriosclerosis, cirrhosis, graft vs. host disease, host vs. graft disease, hepatitis, leukemia and lymphoma.

[1398] Briefly, PBMCs from human donors are purified by density gradient centrifugation using Lymphocyte Separation Medium (LSM®, density 1.0770 g/ml, Organon Teknika Corporation, West Chester, Pa.). PBMCs from two donors are adjusted to 2×10⁶ cells/ml in RPMI-1640 (Life Technologies, Grand Island, N.Y.) supplemented with 10% FCS and 2 mM glutamine. PBMCs from a third donor is adjusted to 2×10⁵ cells/ml. Fifty microliters of PBMCs from each donor is added to wells of a 96-well round bottom microtiter plate. Dilutions of test materials (50 μl) is added in triplicate to microtiter wells. Test samples (of the protein of interest) are added for final dilution of 1:4; rhuIL-2 (R&D Systems, Minneapolis, Minn., catalog number 202-IL) is added to a final concentration of 1 μg/ml; anti-CD4 mAb (R&D Systems, clone 34930.11, catalog number MAB379) is added to a final concentration of 10 μg/ml. Cells are cultured for 7-8 days at 37° C. in 5% CO₂, and 1 μC of [³H] thymidine is added to wells for the last 16 hrs of culture. Cells are harvested and thymidine incorporation determined using a Packard TopCount. Data is expressed as the mean and standard deviation of triplicate determinations.

[1399] Samples of the protein of interest are screened in separate experiments and compared to the negative control treatment, anti-CD4 mAb, which inhibits proliferation of lymphocytes and the positive control treatment, IL-2 (either as recombinant material or supernatant), which enhances proliferation of lymphocytes.

[1400] One skilled in the art could easily modify the exemplified studies to test the activity of polynucleotides (e.g., gene therapy), antibodies, agonists, and/or antagonists and fragments and variants thereof.

### Example 46

### Assays for Protease Activity

[1401] The following assay may be used to assess protease activity of the polypeptides of the invention.

[1402] Gelatin and casein zymography are performed essentially as described (Heusen et al., Anal. Biochem., 102:196-202 (1980); Wilson et al., Journal of Urology, 149:653-658 (1993)). Samples are run on 10% polyacryamide/0.1% SDS gels containing 1% gelain orcasein, soaked in 2.5% triton at room temperature for 1 hour, and in 0.1M glycine, pH 8.3 at 37° C. 5 to 16 hours. After staining in amido black areas of proteolysis appear as clear areas against the blue-black background. Trypsin (Sigma T8642) is used as a positive control.

[1403] Protease activity is also determined by monitoring the cleavage of n-a−benzoyl-L-arginine ethyl ester (BAEE) (Sigma B-4500. Reactions are set up in (25 mM NaPO₄, 1 mM EDTA, and 1 mM BAEE), pH 7.5. Samples are added and the change in adsorbance at 260 nm is monitored on the Beckman DU-6 spectrophotometer in the time-drive mode. Trypsin is used as a positive control.

[1404] Additional assays based upon the release of acid-soluble peptides from casein or hemoglobin measured as adsorbance at 280 nm or calorimetrically using the Folin method are performed as described in Bergmeyer, et al., Methods of Enzymatic Analysis, 5 (1984). Other assays involve the solubilization of chromogenic substrates (Ward, Applied Science, 251-317 (1983)).

### Example 47

### Identifying Serine Protease Substrate Specificity

[1405] Methods known in the art or described herein may be used to determine the substrate specificity of the polypeptides of the present invention having serine protease activity. A preferred method of determining substrate specificity is by the use of positional scanning synthetic combinatorial libraries as described in GB 2 324 529 (incorporated herein in its entirety).

### Example 48

### Ligand Binding Assays

[1406] The following assay may be used to assess ligand binding activity of the polypeptides of the invention.

[1407] Ligand binding assays provide a direct method for ascertaining receptor pharmacology and are adaptable to a high throughput format. The purified ligand for a polypeptide is radiolabeled to high specific activity (50-2000 Ci/mmol) for binding studies. A determination is then made that the process of radiolabeling does not diminish the activity of the ligand towards its polypeptide. Assay conditions for buffers, ions, pH and other modulators such as nucleotides are optimized to establish a workable signal to noise ratio for both membrane and whole cell polypeptide sources. For these assays, specific polypeptide binding is defined as total associated radioactivity minus the radioactivity measured in the presence of an excess of unlabeled competing ligand. Where possible, more than one competing ligand is used to define residual nonspecific binding.

### Example 49

### Functional Assay in Xenopus Oocytes

[1408] Capped RNA transcripts from linearized plasmid templates encoding the polypeptides of the invention are synthesized in vitro with RNA polymerases in accordance with standard procedures. In vitro transcripts are suspended in water at a final concentration of 0.2 mg/ml. Ovarian lobes are removed from adult female toads, Stage V defolliculated oocytes are obtained, and RNA transcripts (10 ng/oocyte) are injected in a 50 nl bolus using a microinjection apparatus. Two electrode voltage clamps are used to measure the currents from individual Xenopus oocytes in response polypeptides and polypeptide agonist exposure. Recordings are made in Ca2+ free Barth's medium at room temperature. The Xenopus system can be used to screen known ligands and tissue/cell extracts for activating ligands.

### Example 50

### Microphysiometric Assays

[1409] Activation of a wide variety of secondary messenger systems results in extrusion of small amounts of acid from a cell. The acid formed is largely as a result of the increased metabolic activity required to fuel the intracellular signaling process. The pH changes in the media surrounding the cell are very small but are detectable by the CYTOSENSOR microphysiometer (Molecular Devices Ltd., Menlo Park, Calif.). The CYTOSENSOR is thus capable of detecting the activation of polypeptide which is coupled to an energy utilizing intracellular signaling pathway.

### Example 51

### Extract/Cell Supernatant Screening

[1410] A large number of mammalian receptors exist for which there remains, as yet, no cognate activating ligand (agonist). Thus, active ligands for these receptors may not be included within the ligands banks as identified to date. Accordingly, the polypeptides of the invention can also be functionally screened (using calcium, cAMP, microphysiometer, oocyte electrophysiology, etc., functional screens) against tissue extracts to identify its natural ligands. Extracts that produce positive functional responses can be sequentially subfractionated until an activating ligand is isolated and identified.

### Example 52

### Calcium and cAMP Functional Assays

[1411] Seven transmembrane receptors which are expressed in HEK 293 cells have been shown to be coupled functionally to activation of PLC and calcium mobilization and/or cAMP stimulation or inhibition. Basal calcium levels in the HEK 293 cells in receptor-transfected or vector control cells were observed to be in the normal, 100 nM to 200 nM, range. HEK 293 cells expressing recombinant receptors are loaded with fura 2 and in a single day >150 selected ligands or tissue/cell extracts are evaluated for agonist induced calcium mobilization. Similarly, HEK 293 cells expressing recombinant receptors are evaluated for the stimulation or inhibition of cAMP production using standard cAMP quantitation assays. Agonists presenting a calcium transient or cAMP fluctuation are tested in vector control cells to determine if the response is unique to the transfected cells expressing receptor.

### Example 53

### ATP-Binding Assay

[1412] The following assay may be used to assess ATP-binding activity of polypeptides of the invention.

[1413] ATP-binding activity of the polypeptides of the invention may be detected using the ATP-binding assay described in U.S. Pat. No. 5,858,719, which is herein incorporated by reference in its entirety. Briefly, ATP-binding to polypeptides of the invention is measured via photoaffinity labeling with 8-azido-ATP in a competition assay. Reaction mixtures containing 1 mg/ml of the ABC transport protein of the present invention are incubated with varying concentrations of ATP, or the non-hydrolyzable ATP analog adenyl-5′-imidodiphosphate for 10 minutes at 4° C. A mixture of 8-azido-ATP (Sigma Chem. Corp., St. Louis, Mo.) plus 8-azido-ATP (³²P-ATP) (5 mCi/μmol, ICN, Irvine Calif.) is added to a final concentration of 100 μM and 0.5 ml aliquots are placed in the wells of a porcelain spot plate on ice. The plate is irradiated using a short wave 254 nm UV lamp at a distance of 2.5 cm from the plate for two one-minute intervals with a one-minute cooling interval in between. The reaction is stopped by addition of dithiothreitol to a final concentration of 2 mM. The incubations are subjected to SDS-PAGE electrophoresis, dried, and autoradiographed. Protein bands corresponding to the particular polypeptides of the invention are excised, and the radioactivity quantified. A decrease in radioactivity with increasing ATP or adenly-5′-imidodiphosphate provides a measure of ATP affinity to the polypeptides.

### Example 54

### Small Molecule Screening

[1414] This invention is particularly useful for screening therapeutic compounds by using the polypeptides of the invention, or binding fragments thereof, in any of a variety of drug screening techniques. The polypeptide or fragment employed in such a test may be affixed to a solid support, expressed on a cell surface, free in solution, or located intracellularly. One method of drug screening utilizes eukaryotic or prokaryotic host cells which are stably transformed with recombinant nucleic acids expressing the polypeptide or fragment. Drugs are screened against such transformed cells in competitive binding assays. One may measure, for example, the formulation of complexes between the agent being tested and polypeptide of the invention.

[1415] Thus, the present invention provides methods of screening for drugs or any other agents which affect activities mediated by the polypeptides of the invention. These methods comprise contacting such an agent with a polypeptide of the invention or fragment thereof and assaying for the presence of a complex between the agent and the polypeptide or fragment thereof, by methods well known in the art. In such a competitive binding assay, the agents to screen are typically labeled. Following incubation, free agent is separated from that present in bound form, and the amount of free or uncomplexed label is a measure of the ability of a particular agent to bind to the polypeptides of the invention.

[1416] Another technique for drug screening provides high throughput screening for compounds having suitable binding affinity to the polypeptides of the invention, and is described in great detail in European Patent Application 84/03564, published on Sep. 13, 1984, which is herein incorporated by reference in its entirety. Briefly stated, large numbers of different small molecule test compounds are synthesized on a solid substrate, such as plastic pins or some other surface. The test compounds are reacted with polypeptides of the invention and washed. Bound polypeptides are then detected by methods well known in the art. Purified polypeptides are coated directly onto plates for use in the aforementioned drug screening techniques. In addition, non-neutralizing antibodies may be used to capture the peptide and immobilize it on the solid support.

[1417] This invention also contemplates the use of competitive drug screening assays in which neutralizing antibodies capable of binding polypeptides of the invention specifically compete with a test compound for binding to the polypeptides or fragments thereof. In this manner, the antibodies are used to detect the presence of any peptide which shares one or more antigenic epitopes with a polypeptide of the invention.

### Example 55

### Phosphorylation Assay

[1418] In order to assay for phosphorylation activity of the polypeptides of the invention, a phosphorylation assay as described in U.S. Pat. No. 5,958,405 (which is herein incorporated by reference) is utilized. Briefly, phosphorylation activity may be measured by phosphorylation of a protein substrate using gamma-labeled ³²P-ATP and quantitation of the incorporated radioactivity using a gamma radioisotope counter. The polypeptides of the invention are incubated with the protein substrate, ³²P-ATP, and a kinase buffer. The ³²P incorporated into the substrate is then separated from free ³²P-ATP by electrophoresis, and the incorporated ³²P is counted and compared to a negative control. Radioactivity counts above the negative control are indicative of phosphorylation activity of the polypeptides of the invention.

### Example 56

### Detection of Phosphorylation Activity (Activation) of the Polypeptides of the Invention in the Presence of Polypeptide Ligands

[1419] Methods known in the art or described herein may be used to determine the phosphorylation activity of the polypeptides of the invention. A preferred method of determining phosphorylation activity is by the use of the tyrosine phosphorylation assay as described in U.S. Pat. No. 5,817,471 (incorporated herein by reference).

### Example 57

### Identification of Signal Transduction Proteins that Interact with Polypeptides of the Present Invention

[1420] The purified polypeptides of the invention are research tools for the identification, characterization and purification of additional signal transduction pathway proteins or receptor proteins. Briefly, labeled polypeptides of the invention are useful as reagents for the purification of molecules with which it interacts. In one embodiment of affinity purification, polypeptides of the invention are covalently coupled to a chromatography column. Cell-free extract derived from putative target cells, such as carcinoma tissues, is passed over the column, and molecules with appropriate affinity bind to the polypeptides of the invention. The protein complex is recovered from the column, dissociated, and the recovered molecule subjected to N-terminal protein sequencing. This amino acid sequence is then used to identify the captured molecule or to design degenerate oligonucleotide probes for cloning the relevant gene from an appropriate cDNA library.

### Example 58

### IL-6 Bioassay

[1421] To test the proliferative effects of the polypeptides of the invention, the IL-6 Bioassay as described by Marz et al. is utilized (Proc. Natl. Acad. Sci., U.S.A., 95:3251-56 (1998), which is herein incorporated by reference). Briefly, IL-6 dependent B9 murine cells are washed three times in IL-6 free medium and plated at a concentration of 5,000 cells per well in 50 μl, and 50 μl of the IL-6-like polypeptide is added. After 68 hrs. at 37° C., the number of viable cells is measured by adding the tetrazolium salt thiazolyl blue (MTT) and incubating for a further 4 hrs. at 37° C. B9 cells are lysed by SDS and optical density is measured at 570 nm. Controls containing IL-6 (positive) and no cytokine (negative) are utilized. Enhanced proliferation in the test sample(s) relative to the negative control is indicative of proliferative effects mediated by polypeptides of the invention.

### Example 59

### Support of Chicken Embryo Neuron Survival

[1422] To test whether sympathetic neuronal cell viability is supported by polypeptides of the invention, the chicken embryo neuronal survival assay of Senaldi et al is utilized (Proc. Natl. Acad. Sci., U.S.A., 96:11458-63 (1998), which is herein incorporated by reference). Briefly, motor and sympathetic neurons are isolated from chicken embryos, resuspended in L15 medium (with 10% FCS, glucose, sodium selenite, progesterone, conalbumin, putrescine, and insulin; Life Technologies, Rockville, Md.) and Dulbecco's modified Eagles medium [with 10% FCS, glutamine, penicillin, and 25 mM Hepes buffer (pH 7.2); Life Technologies, Rockville, Md.], respectively, and incubated at 37° C. in 5% CO₂ in the presence of different concentrations of the purified IL-6-like polypeptide, as well as a negative control lacking any cytokine. After 3 days, neuron survival is determined by evaluation of cellular morphology, and through the use of the calorimetric assay of Mosmann (Mosmann, T., J. Immunol. Methods, 65:55-63 (1983)). Enhanced neuronal cell viability as compared to the controls lacking cytokine is indicative of the ability of the inventive purified IL-6-like polypeptide(s) to enhance the survival of neuronal cells.

### Example 60

### Assay for Phosphatase Activity

[1423] The following assay may be used to assess serine/threonine phosphatase (PTPase) activity of the polypeptides of the invention.

[1424] In order to assay for serine/threonine phosphatase (PTPase) activity, assays can be utilized which are widely known to those skilled in the art. For example, the serine/threonine phosphatase (PSPase) activity is measured using a PSPase assay kit from New England Biolabs, Inc. Myelin basic protein (MyBP), a substrate for PSPase, is phosphorylated on serine and threonine residues with cAMP-dependent Protein Kinase in the presence of [³²P]ATP. Protein serine/threonine phosphatase activity is then determined by measuring the release of inorganic phosphate from 32P-labeled MyBP.

### Example 61

### Interaction of Serine/Threonine Phosphatases with Other Proteins

[1425] The polypeptides of the invention with serine/threonine phosphatase activity as determined in Example 60 are research tools for the identification, characterization and purification of additional interacting proteins or receptor proteins, or other signal transduction pathway proteins. Briefly, labeled polypeptide(s) of the invention is useful as a reagent for the purification of molecules with which it interacts. In one embodiment of affinity purification, polypeptide of the invention is covalently coupled to a chromatography column. Cell-free extract derived from putative target cells, such as neural or liver cells, is passed over the column, and molecules with appropriate affinity bind to the polypeptides of the invention. The polypeptides of the invention-complex is recovered from the column, dissociated, and the recovered molecule subjected to N-terminal protein sequencing. This amino acid sequence is then used to identify the captured molecule or to design degenerate oligonucleotide probes for cloning the relevant gene from an appropriate cDNA library.

### Example 62

### Assaying for Heparanase Activity

[1426] In order to assay for heparanase activity of the polypeptides of the invention, the heparanase assay described by Vlodavsky et al is utilized (Vlodavsky, I., et al., Nat. Med., 5:793-802 (1999)). Briefly, cell lysates, conditioned media or intact cells (1×10⁶ cells per 35-mm dish) are incubated for 18 hrs at 37° C., pH 6.2-6.6, with ³⁵S-labeled ECM or soluble ECM derived peak I proteoglycans. The incubation medium is centrifuged and the supernatant is analyzed by gel filtration on a Sepharose CL-6B column (0.9×30 cm). Fractions are eluted with PBS and their radioactivity is measured. Degradation fragments of heparan sulfate side chains are eluted from Sepharose 6B at 0.5<Kₐᵥ<0.8 (peak II). Each experiment is done at least three times. Degradation fragments corresponding to “peak II,” as described by Vlodavsky et al., is indicative of the activity of the polypeptides of the invention in cleaving heparan sulfate.

### Example 63

### Immobilization of Biomolecules

[1427] This example provides a method for the stabilization of polypeptides of the invention in non-host cell lipid bilayer constructs (see, e.g., Bieri et al., Nature Biotech 17:1105-1108 (1999), hereby incorporated by reference in its entirety herein) which can be adapted for the study of polypeptides of the invention in the various functional assays described above. Briefly, carbohydrate-specific chemistry for biotinylation is used to confine a biotin tag to the extracellular domain of the polypeptides of the invention, thus allowing uniform orientation upon immobilization. A 50 uM solution of polypeptides of the invention in washed membranes is incubated with 20 mM NaIO4 and 1.5 mg/ml (4 mM) BACH or 2 mg/ml (7.5 mM) biotin-hydrazide for 1 hr at room temperature (reaction volume, 150 ul). Then the sample is dialyzed (Pierce Slidealizer Cassett, 10 kDa cutoff; Pierce Chemical Co., Rockford Ill.) at 4 C first for 5 h, exchanging the buffer after each hour, and finally for 12 h against 500 ml buffer R (0.15 M NaCl, 1 mM MgCl₂, 10 mM sodium phosphate, pH7). Just before addition into a cuvette, the sample is diluted 1:5 in buffer ROG50 (Buffer R supplemented with 50 mM octylglucoside).

### Example 64

### TAQMAN

[1428] Quantitative PCR (QPCR). Total RNA from cells in culture are extracted by Trizol separation as recommended by the supplier (LifeTechnologies). (Total RNA is treated with DNase I (Life Technologies) to remove any contaminating genomic DNA before reverse transcription.) Total RNA (50 ng) is used in a one-step, 50 ul, RT-QPCR, consisting of Taqman Buffer A (Perkin-Elmer; 50 mM KCV10 mM Tris, pH 8.3), 5.5 mM MgCl₂, 240 μM each dNTP, 0.4 units RNase inhibitor (Promega), 8% glycerol, 0.012% Tween-20, 0.05% gelatin, 0.3 uM primers, 0.1 uM probe, 0.025 units Amplitaq Gold (Perkin-Elmer) and 2.5 units Superscript II reverse transcriptase (Life Technologies). As a control for genomic contamination, parallel reactions are setup without reverse transcriptase. The relative abundance of (unknown) and 18S RNAs are assessed by using the Applied Biosystems Prism 7700 Sequence Detection System (Livak, K. J., Flood, S. J., Marmaro, J., Giusti, W. & Deetz, K. (1995) PCR Methods Appl. 4, 357-362). Reactions are carried out at 48° C. for 30 min, 95° C. for 10 min, followed by 40 cycles of 95° C. for 15 s, 60° C. for 1 min. Reactions are performed in triplicate.

[1429] Primers (f & r) and FRET probes sets are designed using Primer Express Software (Perkin-Elmer). Probes are labeled at the 5′-end with the reporter dye 6-FAM and on the 3′-end with the quencher dye TAMRA (Biosource International, Camarillo, Calif. or Perkin-Elmer).

### Example 65

### Assays for Metalloproteinase Activity

[1430] Metalloproteinases (EC 3.4.24.-) are peptide hydrolases which use metal ions, such as Zn²⁺, as the catalytic mechanism. Metalloproteinase activity of polypeptides of the present invention can be assayed according to the following methods.

Proteolysis of Alpha-2-macroglobulin

[1431] To confirm protease activity, purified polypeptides of the invention are mixed with the substrate alpha-2-macroglobulin (0.2 unit/ml; Boehringer Mannheim, Germany) in 1× assay buffer (50 mM HEPES, pH 7.5, 0.2 M NaCl, 10 mM CaCl₂, 25 μM ZnCl₂ and 0.05% Brij-35) and incubated at 37° C. for 1-5 days. Trypsin is used as positive control. Negative controls contain only alpha-2-macroglobulin in assay buffer. The samples are collected and boiled in SDS-PAGE sample buffer containing 5% 2-mercaptoethanol for 5-min, then loaded onto 8% SDS-polyacrylamide gel. After electrophoresis the proteins are visualized by silver staining. Proteolysis is evident by the appearance of lower molecular weight bands as compared to the negative control.

Inhibition of Alpha-2-macroglobulin Proteolysis by Inhibitors of Metalloproteinases

[1432] Known metalloproteinase inhibitors (metal chelators (EDTA, EGTA, AND HgCl₂), peptide metalloproteinase inhibitors (TIMP-1 and TIMP 2), and commercial small molecule MMP inhibitors) are used to characterize the proteolytic activity of polypeptides of the invention. The three synthetic MMP inhibitors used are: MMP inhibitor I, [IC₅₀=1.0 μM against MMP-1 and MMP 8; IC₅₀=30 μM against MMP-9; IC₅₀=150 μM against MMP-3]; MMP-3 (stromelysin-1) inhibitor I [IC₅₀=5 μM against MMP-3], and MMP-3 inhibitor II [Kᵢ=130 nM against MMP-3]; inhibitors available through Calbiochem, catalog # 444250, 444218, and 444225, respectively). Briefly, different concentrations of the small molecule MMP inhibitors are mixed with purified polypeptides of the invention (50 μg/ml) in 22.9 μl of 1×HEPES buffer (50 mM HEPES, pH 7.5, 0.2 M NaCl, 10 mM CaCl₂, 25 μM ZnCl₂ and 0.05% Brij-35) and incubated at room temperature (24° C.) for 2-hr, then 7.1 μl of substrate alpha-2-macroglobulin (0.2 unit/ml) is added and incubated at 37° C. for 20-hr. The reactions are stopped by adding 4× sample buffer and boiled immediately for 5 minutes. After SDS-PAGE, the protein bands are visualized by silver stain.

Synthetic Fluorogenic Peptide Substrates Cleavage Assay

[1433] The substrate specificity for polypeptides of the invention with demonstrated metalloproteinase activity can be determined using synthetic fluorogenic peptide substrates (purchased from BACHEM Bioscience Inc). Test substrates include, M-1985, M-2225, M-2105, M-2110, and M-2255. The first four are MMP substrates and the last one is a substrate of tumor necrosis factor-α (TNF-α) converting enzyme (TACE). All the substrates are prepared in 1:1 dimethyl sulfoxide (DMSO) and water. The stock solutions are 50-500 μM. Fluorescent assays are performed by using a Perkin Elmer LS 50B luminescence spectrometer equipped with a constant temperature water bath. The excitation λ is 328 nm and the emission λ is 393 nm. Briefly, the assay is carried out by incubating 176 μl 1×HEPES buffer (0.2 M NaCl, 10 mM CaCl₂, 0.05% Brij-35 and 50 mM HEPES, pH 7.5) with 4 μl of substrate solution (50 μM) at 25° C. for 15 minutes, and then adding 20 μl of a purified polypeptide of the invention into the assay cuvett. The final concentration of substrate is 1 μM. Initial hydrolysis rates are monitored for 30-min.

### Example 66

### Characterization of the cDNA Contained in a Deposited Plasmid

[1434] The size of the cDNA insert contained in a deposited plasmid may be routinely determined using techniques known in the art, such as PCR amplification using synthetic primers hybridizable to the 3′ and 5′ ends of the cDNA sequence. For example, two primers of 17-30 nucleotides derived from each end of the cDNA (i.e., hybridizable to the absolute 5′ nucleotide or the 3′ nucleotide end of the sequence of SEQ ID NO:X, respectively) are synthesized and used to amplify the cDNA using the deposited cDNA plasmid as a template. The polymerase chain reaction is carried out under routine conditions, for instance, in 25 ul of reaction mixture with 0.5 ug of the above cDNA template. A convenient reaction mixture is 1.5-5 mM MgCl₂, 0.01% (w/v) gelatin, 20 uM each of dATP, dCTP, dGTP, dTTP, 25 pmol of each primer and 0.25 Unit of Taq polymerase. Thirty five cycles of PCR (denaturation at 94 degree C. for 1 min; annealing at 55 degree C. for 1 min; elongation at 72 degree C. for 1 min) are performed with a Perkin-Elmer Cetus automated thermal cycler. The amplified product is analyzed by agarose gel electrophoresis. The PCR product is verified to be the selected sequence by subcloning and sequencing the DNA product. It will be clear that the invention may be practiced otherwise than as particularly described in the foregoing description and examples. Numerous modifications and variations of the present invention are possible in light of the above teachings and, therefore, are within the scope of the appended claims.

### INCORPORATION BY REFERENCE

[1435] The entire disclosure of each document cited (including patents, patent applications, journal articles, abstracts, laboratory manuals, books, or other disclosures) in the Background of the Invention, Detailed Description, and Examples is hereby incorporated herein by reference. In addition, the sequence listing submitted herewith is incorporated herein by reference in its entirety. The specification and sequence listing of each of the following U.S. and PCT applications are herein incorporated by reference in their entirety (filing dates shown in format “year-month-day” (yyyy-mm-dd)): application Ser. No. 10/994,608 filed on 2004 Nov. 23, application Ser. No. 10/105,299 filed on 2002 Mar. 26, Application No. 60/278,650 filed on 2001 Mar. 27, application Ser. No. 09/950,082 filed on 2001 Sep. 12, application Ser. No. 09/950,083 filed on 2001 Sep. 12, Application No. 60/306,171 filed on 19 Jul. 2001, application Ser. No. 09/833,245 filed on 2001 Apr. 12, Application No. PCT/US01/11988 filed on 2001 Apr. 12, Application No. 60/331,287 filed on 2001 Nov. 13, Application No. 60/277,340 filed on 2001 Mar. 21, Application No. PCT/US00/06043 filed on 2000 Mar. 9, Application No. PCT/US00/06012 filed on 2000 Mar. 9, Application No. PCT/US00/06058 filed on 2000 Mar. 9, Application No. PCT/US00/06044 filed on 2000 Mar. 9, Application No. PCT/US00/06059 filed on 2000 Mar. 9, Application No. PCT/US00/06042 filed on 2000 Mar. 9, Application No. PCT/US00/06014 filed on 2000 Mar. 9, Application No. PCT/US00/06013 filed on 2000 Mar. 9, Application No. PCT/US00/06049 filed on 2000 Mar. 9, Application No. PCT/US00/06057 filed on 2000 Mar. 9, Application No. PCT/US00/06824 filed on 2000 Mar. 16, Application No. PCT/US00/06765 filed on 2000 Mar. 16, Application No. PCT/US00/06792 filed on 2000 Mar. 16, Application No. PCT/US00/06830 filed on 2000 Mar. 16, Application No. PCT/US00/06782 filed on 2000 Mar. 16, Application No. PCT/US00/06822 filed on 2000 Mar. 16, Application No. PCT/US00/06791 filed on 2000 Mar. 16, Application No. PCT/US00/06828 filed on 2000 Mar. 16, Application No. PCT/US00/06823 filed on 2000 Mar. 16, Application No. PCT/US00/06781 filed on 2000 Mar. 16, Application No. PCT/US00/07505 filed on 2000 Mar. 22, Application No. PCT/US00/07440 filed on 2000 Mar. 22, Application No. PCT/US00/07506 filed on 2000 Mar. 22, Application No. PCT/US00/07507 filed on 2000 Mar. 22, Application No. PCT/US00/07535 filed on 2000 Mar. 22, Application No. PCT/US00/07525 filed on 2000 Mar. 22, Application No. PCT/US00/07534 filed on 2000 Mar. 22, Application No. PCT/US00/07483 filed on 2000 Mar. 22, Application No. PCT/US00/07526 filed on 2000 Mar. 22, Application No. PCT/US00/07527 filed on 2000 Mar. 22, Application No. PCT/US00/07661 filed on 2000 Mar. 23, Application No. PCT/US00/07579 filed on 2000 Mar. 23, Application No. PCT/US00/07723 filed on 2000 Mar. 23, Application No. PCT/US00/07724 filed on 2000 Mar. 23, Application No. PCT/US00/14929 filed on 2000 Jun. 1, Application No. PCT/US00/07722 filed on 2000 Mar. 23, Application No. PCT/US00/07578 filed on 2000 Mar. 23, Application No. PCT/US00/07726 filed on 2000 Mar. 23, Application No. PCT/US00/07677 filed on 2000 Mar. 23, Application No. PCT/US00/07725 filed on 2000 Mar. 23, Application No. PCT/US00/09070 filed on 2000 Apr. 6, Application No. PCT/US00/08982 filed on 2000 Apr. 6, Application No. PCT/US00/08983 filed on 2000 Apr. 6, Application No. PCT/US00/09067 filed on 2000 Apr. 6, Application No. PCT/US00/09066 filed on 2000 Apr. 6, Application No. PCT/US00/09068 filed on 2000 Apr. 6, Application No. PCT/US00/08981 filed on 2000 Apr. 6, Application No. PCT/US00/08980 filed on 2000 Apr. 6, Application No. PCT/US00/09071 filed on 2000 Apr. 6, Application No. PCT/US00/09069 filed on 2000 Apr. 6, Application No. PCT/US00/15136 filed on 2000 Jun. 1, Application No. PCT/US00/14926 filed on 2000 Jun. 1, Application No. PCT/US00/14963 filed on 2000 Jun. 1, Application No. PCT/US00/15135 filed on 2000 Jun. 1, Application No. PCT/US00/14934 filed on 2000 Jun. 1, Application No. PCT/US00/14933 filed on 2000 Jun. 1, Application No. PCT/US00/15137 filed on 2000 Jun. 1, Application No. PCT/US00/14928 filed on 2000 Jun. 1, Application No. PCT/US00/14973 filed on 2000 Jun. 1, Application No. PCT/US00/14964 filed on 2000 Jun. 1, Application No. PCT/US00/26376 filed on 2000 Nov. 26, Application No. PCT/US00/26371 filed on 2000 Nov. 26, Application No. PCT/US00/26324 filed on 2000 Nov. 26, Application No. PCT/US00/26323 filed on 2000 Nov. 26, Application No. PCT/US00/26337 filed on 2000 Nov. 26, Application No. PCT/US01/13318 filed on 2001 Apr. 27, Application No. U.S. 60/124,146 filed on 1999 Mar. 12, Application No. U.S. 60/167,061 filed on 1999 Nov. 23, Application No. U.S. 60/124,093 filed on 1999 Mar. 12, Application No. U.S. 60/166,989 filed on 1999 Nov. 23, Application No. U.S. 60/124,145 filed on 1999 Mar. 12, Application No. U.S. 60/168,654 filed on 1999 Dec. 3, Application No. U.S. 60/124,099 filed on 1999 Mar. 12, Application No. U.S. 60/168,661 filed on 1999 Dec. 3, Application No. U.S. 60/124,096 filed on 1999 Mar. 12, Application No. U.S. 60/168,622 filed on 1999 Dec. 3, Application No. U.S. 60/124,143 filed on 1999 Mar. 12, Application No. U.S. 60/168,663 filed on 1999 Dec. 3, Application No. U.S. 60/124,095 filed on 1999 Mar. 12, Application No. U.S. 60/138,598 filed on 1999 Jun. 11, Application No. U.S. 60/168,665 filed on 1999 Dec. 3, Application No. U.S. 60/125,360 filed on 1999 Mar. 19, Application No. U.S. 60/138,626 filed on 1999 Jun. 11, Application No. U.S. 60/168,662 filed on 1999 Dec. 3, Application No. U.S. 60/124,144 filed on 1999 Mar. 12, Application No. U.S. 60/138,574 filed on 1999 Jun. 11, Application No. U.S. 60/168,667 filed on 1999 Dec. 3, Application No. U.S. 60/124,142 filed on 1999 Mar. 12, Application No. U.S. 60/138,597 filed on 1999 Jun. 11, Application No. U.S. 60/168,666 filed on 1999 Dec. 3, Application No. U.S. 60/125,359 filed on 1999 Mar. 19, Application No. U.S. 60/168,664 filed on 1999 Dec. 3, Application No. U.S. 60/126,051 filed on 1999 Mar. 23, Application No. U.S. 60/169,906 filed on 1999 Dec. 10, Application No. U.S. 60/125,362 filed on 1999 Mar. 19, Application No. U.S. 60/169,980 filed on 1999 Dec. 10, Application No. U.S. 60/125,361 filed on 1999 Mar. 19, Application No. U.S. 60/169,910 filed on 1999 Dec. 10, Application No. U.S. 60/125,812 filed on 1999 Mar. 23, Application No. U.S. 60/169,936 filed on 1999 Dec. 10, Application No. U.S. 60/126,054 filed on 1999 Mar. 23, Application No. U.S. 60/169,916 filed on 1999 Dec. 10, Application No. U.S. 60/125,815 filed on 1999 Mar. 23, Application No. U.S. 60/169,946 filed on 1999 Dec. 10, Application No. U.S. 60/125,358 filed on 1999 Mar. 19, Application No. U.S. 60/169,616 filed on 1999 Dec. 8, Application No. U.S. 60/125,364 filed on 1999 Mar. 19, Application No. U.S. 60/169,623 filed on 1999 Dec. 8, Application No. U.S. 60/125,363 filed on 1999 Mar. 19, Application No. U.S. 60/169,617 filed on 1999 Dec. 8, Application No. U.S. 60/126,502 filed on 1999 Mar. 26, Application No. U.S. 60/172,410 filed on 1999 Dec. 17, Application No. U.S. 60/126,503 filed on 1999 Mar. 26, Application No. U.S. 60/172,409 filed on 1999 Dec. 17, Application No. U.S. 60/126,505 filed on 1999 Mar. 26, Application No. U.S. 60/172,412 filed on 1999 Dec. 17, Application No. U.S. 60/126,594 filed on 1999 Mar. 26, Application No. U.S. 60/172,408 filed on 1999 Dec. 17, Application No. U.S. 60/126,511 filed on 1999 Mar. 26, Application No. U.S. 60/172,413 filed on 1999 Dec. 17, Application No. U.S. 60/126,595 filed on 1999 Mar. 26, Application No. U.S. 60/171,549 filed on 1999 Dec. 22, Application No. U.S. 60/126,598 filed on 1999 Mar. 26, Application No. U.S. 60/171,504 filed on 1999 Dec. 22, Application No. U.S. 60/126,596 filed on 1999 Mar. 26, Application No. U.S. 60/171,552 filed on 1999 Dec. 22, Application No. U.S. 60/126,600 filed on 1999 Mar. 26, Application No. U.S. 60/171,550 filed on 1999 Dec. 22, Application No. U.S. 60/126,501 filed on 1999 Mar. 26, Application No. U.S. 60/171,551 filed on 1999 Dec. 22, Application No. U.S. 60/126,504 filed on 1999 Mar. 26, Application No. U.S. 60/174,847 filed on 2000 Jan. 7, Application No. U.S. 60/126,509 filed on 1999 Mar. 26, Application No. U.S. 60/174,853 filed on 2000 Jan. 7, Application No. U.S. 60/126,506 filed on 1999 Mar. 26, Application No. U.S. 60/174,852 filed on 2000 Jan. 7, Application No. U.S. 60/242,710 filed on 2000 Oct. 25, Application No. U.S. 60/126,510 filed on 1999 Mar. 26, Application No. U.S. 60/174,850 filed on 2000 Jan. 7, Application No. U.S. 60/138,573 filed on 1999 Jun. 11, Application No. U.S. 60/174,851 filed on 2000 Jan. 7, Application No. U.S. 60/126,508 filed on 1999 Mar. 26, Application No. U.S. 60/174,871 filed on 2000 Jan. 7, Application No. U.S. 60/126,507 filed on 1999 Mar. 26, Application No. U.S. 60/174,872 filed on 2000 Jan. 7, Application No. U.S. 60/126,597 filed on 1999 Mar. 26, Application No. U.S. 60/174,877 filed on 2000 Jan. 7, Application No. U.S. 60/126,601 filed on 1999 Mar. 26, Application No. U.S. 60/154,373 filed on 1999 Sep. 17, Application No. U.S. 60/176,064 filed on 2000 Jan. 14, Application No. U.S. 60/126,602 filed on 1999 Mar. 26, Application No. U.S. 60/176,063 filed on 2000 Jan. 14, Application No. U.S. 60/128,695 filed on 1999 Apr. 9, Application No. U.S. 60/176,052 filed on 2000 Jan. 14, Application No. U.S. 60/128,696 filed on 1999 Apr. 9, Application No. U.S. 60/176,069 filed on 2000 Jan. 14, Application No. U.S. 60/128,703 filed on 1999 Apr. 9, Application No. U.S. 60/176,068 filed on 2000 Jan. 14, Application No. U.S. 60/128,697 filed on 1999 Apr. 9, Application No. U.S. 60/176,929 filed on 2000 Jan. 20, Application No. U.S. 60/128,698 filed on 1999 Apr. 9, Application No. U.S. 60/176,926 filed on 2000 Jan. 20, Application No. U.S. 60/128,699 filed on 1999 Apr. 9, Application No. U.S. 60/177,050 filed on 2000 Jan. 20, Application No. U.S. 60/128,701 filed on 1999 Apr. 9, Application No. U.S. 60/177,166 filed on 2000 Jan. 20, Application No. U.S. 60/128,700 filed on 1999 Apr. 9, Application No. U.S. 60/176,930 filed on 2000 Jan. 20, Application No. U.S. 60/128,694 filed on 1999 Apr. 9, Application No. U.S. 60/176,931 filed on 2000 Jan. 20, Application No. U.S. 60/128,702 filed on 1999 Apr. 9, Application No. U.S. 60/177,049 filed on 2000 Jan. 20, Application No. U.S. 60/138,629 filed on 1999 Jun. 11, Application No. U.S. 60/138,628 filed on 1999 Jun. 11, Application No. U.S. 60/138,631 filed on 1999 Jun. 11, Application No. U.S. 60/138,632 filed on 1999 Jun. 11, Application No. U.S. 60/138,599 filed on 1999 Jun. 11, Application No. U.S. 60/138,572 filed on 1999 Jun. 11, Application No. U.S. 60/138,625 filed on 1999 Jun. 11, Application No. U.S. 60/138,633 filed on 1999 Jun. 11, Application No. U.S. 60/138,630 filed on 1999 Jun. 11, Application No. U.S. 60/138,627 filed on 1999 Jun. 11, Application No. U.S. 60/155,808 filed on 1999 Sep. 27, Application No. U.S. 60/155,804 filed on 1999 Sep. 27, Application No. U.S. 60/155,807 filed on 1999 Sep. 27, Application No. U.S. 60/155,805 filed on 1999 Sep. 27, Application No. U.S. 60/155,806 filed on 1999 Sep. 27, Application No. U.S. 60/201,194 filed on 2000 May 2, and Application No. U.S. 60/212,142 filed on 2000 Jun. 16.

LENGTHY TABLE
The patent application contains a lengthy table section. A copy of the table is available in electronic form from the USPTO web site (http://seqdata.uspto.gov/?pageRequest=docDetail&DocID=US20070298491A1). An electronic copy of the table will also be available from the USPTO upon request and payment of the fee set forth in 37 CFR 1.19(b)(3).

The application's sequence listing, which the Patent Office published only in electronic form, follows.

SEQUENCE LISTING (6212 sequences)

SEQ ID NO: 1 - DNA, 733 bp, Homo sapiens
gggatccggagcccaaatcttctgacaaaactcacacatgcccaccgtgcccagcacctgaattcgagggtgcaccgtcagtcttcctcttccccccaaaacccaaggacaccctcatgatctcccggactcctgaggtcacatgcgtggtggtggacgtaagccacgaagaccctgaggtcaagttcaactggtacgtggacggcgtggaggtgcataatgccaagacaaagccgcgggaggagcagtacaacagcacgtaccgtgtggtcagcgtcctcaccgtcctgcaccaggactggctgaatggcaaggagtacaagtgcaaggtctccaacaaagccctcccaacccccatcgagaaaaccatctccaaagccaaagggcagccccgagaaccacaggtgtacaccctgcccccatcccgggatgagctgaccaagaaccaggtcagcctgacctgcctggtcaaaggcttctatccaagcgacatcgccgtggagtgggagagcaatgggcagccggagaacaactacaagaccacgcctcccgtgctggactccgacggctccttcttcctctacagcaagctcaccgtggacaagagcaggtggcagcaggggaacgtcttctcatgctccgtgatgcatgaggctctgcacaaccactacacgcagaagagcctctccctgtctccgggtaaatgagtgcgacggccgcgactctagaggat

SEQ ID NO: 2 - protein, 5 aa, Homo sapiens
  Site (3): Xaa equals any of the twenty naturally ocurring L-amino acids
WSXWS

SEQ ID NO: 3 - DNA, 86 bp, Artificial Sequence
  Primer_Bind: Synthetic sequence with 4 tandem copies of the GAS binding site found in the IRF1 promoter (Rothman et al., Immunity 1:457-468 (1994)), 18 nucleotides complementary to the SV40 early promoter, and a Xho I restriction site.
gcgcctcgagatttccccgaaatctagatttccccgaaatgatttccccgaaatgatttccccgaaatatctgccatctcaattag

SEQ ID NO: 4 - DNA, 27 bp, Artificial Sequence
  Primer_Bind: Synthetic sequence complementary to the SV40 promter; includes a Hind III restriction site.
gcggcaagctttttgcaaagcctaggc

SEQ ID NO: 5 - DNA, 271 bp, Artificial Sequence
  Protein_Bind: Synthetic promoter for use in biological assays; includes GAS binding sites found in the IRF1 promoter (Rothman et al., Immunity 1:457-468 (1994)).
ctcgagatttccccgaaatctagatttccccgaaatgatttccccgaaatgatttccccgaaatatctgccatctcaattagtcagcaaccatagtcccgcccctaactccgcccatcccgcccctaactccgcccagttccgcccattctccgccccatggctgactaattttttttatttatgcagaggccgaggccgcctcggcctctgagctattccagaagtagtgaggaggcttttttggaggcctaggcttttgcaaaaagctt

SEQ ID NO: 6 - DNA, 32 bp, Artificial Sequence
  Primer_Bind: Synthetic primer complementary to human genomic EGR-1 promoter sequence (Sakamoto et al., Oncogene 6:867-871 (1991)); includes a Xho I restriction site.
gcgctcgagggatgacagcgatagaaccccgg

SEQ ID NO: 7 - DNA, 31 bp, Artificial Sequence
  Primer_Bind: Synthetic primer complementary to human genomic EGR-1 promoter sequence (Sakamoto et al., Oncogene 6:867-871 (1991)); includes a Hind III restriction site.
gcgaagcttcgcgactccccggatccgcctc

SEQ ID NO: 8 - DNA, 12 bp, Homo sapiens
ggggactttccc

SEQ ID NO: 9 - DNA, 73 bp, Artificial Sequence
  Primer_Bind: Synthetic primer with 4 tandem copies of the NF-KB binding site (GGGGACTTTCCC), 18 nucleotides complementary to the 5' end of the SV40 early promoter sequence, and a XhoI restriction site.
gcggcctcgaggggactttcccggggactttccggggactttccgggactttccatcctgccatctcaattag

SEQ ID NO: 10 - DNA, 256 bp, Artificial Sequence
  Protein_Bind: Synthetic promoter for use in biological assays; includes NF-KB binding sites.
ctcgaggggactttcccggggactttccggggactttccgggactttccatctgccatctcaattagtcagcaaccatagtcccgcccctaactccgcccatcccgcccctaactccgcccagttccgcccattctccgccccatggctgactaattttttttatttatgcagaggccgaggccgcctcggcctctgagctattccagaagtagtgaggaggcttttttggaggcctaggcttttgcaaaaagctt

SEQ ID NO: 11 - DNA, 605 bp, Homo sapiens
ggcacgaggttggttggagcgagcatgtgggtctgcagtacccggcacgaggcgaacccccgcccggcagtggcgggggctgctcccagcttctggctgtcacggacctgccgcctcctcctactccgcatccgccgagcctgcccgggtccgggcgcttgtctatgggcaccacggggatccagccaaggtcgtcgaactcaagaacctggagctagctgctgtgagaggatcagatgtccgtgtgaagatgctggcggcccctatcaatccatctgacataaatatgatccaaggaaactacggactccttcctgaactgcctgctgttggagggaacgaaggtgttgcacaggtggtagcggtgggcagcaatgtgaccgggctgaagccaggagactgggtgattccagcaaatgctggtttagagtctcgctctgttgcccaggctggtgcaatcttggctcactgcaacctgcaacctccacctcacaggagaatggcgtgaaccccggaggcagagcttgcggtgggccgagattgcgccactgcactccagcctgggcgacagagggagactccgtctcaaaaaaaaaaaaaaaaaa

SEQ ID NO: 12 - DNA, 2610 bp, Homo sapiens
gcctgaaggactgcctcgtttcaacaacaactttatggctcccggaagtgcctcctccccgtccccttcctttccagcctcacgcccgtgggctgcagttggaacgatggcggcggcagctgccgccgggcctagcccggggtctggacctggggactccccagaagggcccgagggggaggctccggagcgtcggcggaaggcgcacgggatgctgaagctttactacggcctctcggaaggggaggcggcgggacgccccgcggggcccgaccccctggacccgactgatctgaacggggcgcacttcgacccggaagtttacctagacaagctgcgtagagagtgccctctggcccagttgatggacagtgagacggacatggtgcggcagatccgggctctagacagcgacatgcagaccctggtctatgagaactacaacaagttcatctcagccacagacaccatccggaagatgaagaacgatttccggaagatggaggatgagatggaccggctggccaccaacatggcagtgatcaccgacttcagcgctcgcatcagcgccacgctgcaggaccgccacgagcgcatcaccaagctggcaggggtccacgcgctgctgcggaagctgcagttcctctttgagctgccctcgcgcctcaccaagtgcgtggaactgggcgcctatgggcaggcggtgcgctaccagggccgcgcgcaggccgtgctgcagcagtaccaacacctgccctcgttccgcgccatccaggacgactgccaggtcatcacggcccgcctggcccagcagctgcggcagcgctttagggagggcggctcaggcgccccggagcaggcagagtgcgtggagctgctgctggccctgggcgagcctgcggaggagctgtgcgaggagttctggcgcacgcccgcggccggctggagaaggagctgagaaacctggaggccgagctggggccctcacctccggctcccgacgtgttagagttcaccgaccatggaggcagtggcttcgtgggcggcctctgccaggtggcggcggcctaccaggagctgtttgcggcccagggcccagcaggtgccgagaagctggcggccttcgcccggcagctgggcarccgctattttgcgctggtggagcggcggctggcgcaggagcagggtggtggtgacaactcactgctggtgcgggcgctggaccgyttccaccggcgcttgcgggctcccggggccctgctggccgctgccgggctcgcagacgctgccacggagatcgtggaacgagtggcccgcgagcgcctgggccaccacctgcagggtctccgggcggccttcctgggctgcctgacagacgtccgccaggcgctggcagcacctcgcgtggctgggaaggagggccctggcctggccgagttgctggccaatgtggccagctccatcctgagccacattaaggcctctctggcagcagtgcaccttttcaccgccaaagaggtgtccttctccaacaagccctacttccggggtgagttctgcagtcagggtgtccgtgagggcctcatcgtgggcttcgtccactctatgtgccagacggctcagagcttctgcgacagccctggggagaaggggggtgccacaccacctgccctgctcctgctgctctcccgcctctgcctggactacgagacggccaccatctcctacatcctcactctcactgatgaacagtttctggtgcaggatcagttcccagtgacgcccgtgagcacgctgtgtgcagaggccagggaaacggcgcggcggctgctgacccactacgtgaaggtgcagggcctggtcatatcacagatgctgcgcaagagcgtggagactcgcgactggctcagcactctggagccccggaatgtgcgggccgtcatgaagcgggtggtggaggataccaccgccatcgacgtgcaggtggggctcctgtacgaagagggtgttcgcaaggcccagagcagcgactccagcaagaggactttctccgtgtacagcagctctcggcagcagggccgctacgcccccagctatacccccagtgccccgatggacaccaacctcttgagcaatatccagaagctattctctgaacgtattgatgtgttcagccctgtggagttcaacaaggtgtcggtgctgaccggcatcatcaagatcagcctgaagacgctgctggagtgtgtgcggctgcgcacctttgggcgcttcgggctgcagcaggtgcaagtggactgccactttctgcagctctacctgtggcgttttgtggccgacgaagaactcgtgcacttgctgctggacgaagtggtggcctctgctgccctgcgctgcccagaccctgtgcccatggagcccagtgtggttgaggtcatctgcgagcgcggctaggcgcagccgctgccatgcaccggtctgtccctgcaccccatggcacccaggatctggtctcggtggtccttccccgcaggcaggtgtcaggaccggcctaataaacatgtgtggcctcctcaaaaaaaaaaaaaaaaaaaaaaaaaaaaaaaaaaa

SEQ ID NO: 13 - DNA, 1493 bp, Homo sapiens
ggcacgagttttttttcatataaaactatttattcataaatattttccaaaatgaaaataggtttaccaaaaaatgtccctcactggggagggggatcagcatgcgggggaagggggtgggtagagggaggggccggtgtcactggaggtcccggtcctccaggtagcggtactcaaaggtgaagccttccttcttccgctggccccacttctcgtagtcaaagtagatgtaggtgccctgctcaaactcgtcagtgatggtcttgggctcctcgtgcctctggaaccacatcatgtacttggtgtggaatcgccatgactgcttctttagggccttggctgccagatactgtgccttagtgccctccagatagtagaagatgaagaagagagtctcggtcgacaggcgctggtagaattccacagtgtccgagtgtgggggtggcatctggtggtggtaggggggcgtcggacaggggttccgggggaggtactgccgaatacgctcagagtcagaggggtgaggcatgtggtgccaggcggcctcttccatggcctgctgatagagctgctccttggtgaggggcacagggcccagtggacagacacccagcgacagcggtatgttcacctctgacagctgcaggggcggctgggctgaggccggaggtgctgatgtactgctcaggatgatgtctcgctcggtcaggtgcagcgttggcacagggtcctcaatgccagagctgatggctgcccgttccgccatggacttcaaggagctcagaggctcagggccttgatttctgggcggtgctgaactgtggaggcccattgagcagggcaccggctgccttggcatcactgaagctgggcgttggggagctgggaggattcacaggcagtggcaccaggaggctgggtccccctgagttgttccctgagcctggggccacgcccccagcccccgttggggctgccgcactgggttccttcgaggtgctgggaggtgggttgtgggggccggaaggggggcccaaggcctggctgctggcattgttgcccccactgctgctcaaagccacctctgccgggctgtctgccacaactgagctgtaactggtggcgccattctgcttgccagcccctccaccggcactgctgttactactgctgctgctccctccgcctccgctgccgccggaggggtaggtgggcggcacagctggggactgagggtgctggttgctgtggacaggcttggagccgtttttggctggagactggctgacttcactgtctgtggaacgtcccctcttcttatcatcttcagagttttccgtggtacagttggctgggctgggcgggatgggagagctggaggtggttgaggtgggcgtgctgctggactggttgaagatctcatcctccatgtggctgtggctggggggggaggtggcgaccagcgcctgtggaatgtcctcgagggggggccc

SEQ ID NO: 14 - DNA, 1300 bp, Homo sapiens
ggcacgagagcaaacttgcaggccctaatagcaacaggaggcgacatcaatgcagccattgaaaggctgctgggctcccagccatcgtaatcacatttctgtacctggaaaaaaaatgtatcttatttttgataatggctcttaaatctttaaacacacacacaaaatcgttctttactttcattttgattcttttaaatctgtctagttgtaagtctaatatgatgcattttaagatggagtccctccctcctacttccctcactccctttctcctttgcttatttttcctaccttcccttcctcttgtctccccactccctccctctttgtttccttccttccttatttcctttagtttccttccttagccgttttgagtggtgggaatcaatgctgtttcactcaaaagtgttgcatgcaaacacttctctttatcctgcatttattgtgattttgggaaacaggtatcaaccttcacagttgggtgaacaagtgttgtcctacagatgtccaatttatttgcatttttaaacattagcctatgatagtaatttaatgtagaatgaagatattaaaaacagaagcaaattatttgaagctctctaatttgtggtacgatattgcttattgtgactttggcatgtatttttgctagcaaaatgctgtaagatttataccattgatcttttttgctatatttgtatacagtacagtaagcacaattggcactgtacatctaaaaatattacagtagaatctgagtgtaatatgtgtaaccaaaatgagaaagaatacaagaaatgtttctggagctagttatgtctcacaattttgtagaatcttacagcatcttgtgataaacttctcagtgaaaatgttggctaggcaagttcagttaaaatatagtagaaatgtttatcctggtatctctaagtatacatttaattgtacagaaaatttacagtgtaacattgtgtcaacatttgcagattgactgtatatgaccttaatctttgtgcagcctgaaggatcagtgtagtaatgccaggaaagtgctttttacctaagacttccttctcagcttctcccataaagagaccctaatatgcattttgatttgtaattggaaatgtaactttcactgaaagtgtcatgtgatgtttgcattacttttaactgctatgtataaaggaaagtgtgtcttttgacttcatcagttatttctcttgtgcacagagaaaaatgcattaaaaatgactaaaaaaaataaaaaattaaaaaatgaaaaaaaaaaaaa

SEQ ID NO: 15 - DNA, 888 bp, Homo sapiens
ggcacgagctcccgtggcgtgggagctaaagagaggctggtgaattaaggaactttcaggtttacttctcagtgtgtcttctctgttccaaaccacagttgtgaatgggagagttcacatccgcgactggcgagaggagacactgtggaagacaaagcaaccggaagcgaaacagagactgctctctgaagcctgcaaaacccgcctctgctggttcttcatgcatcaccctgatggctgcgctctgtccacggactgctgcccgtttgcccatgggcctgcggactgcggccaccccggaccaccccgaggaagaagatttcatgagctgcatccttgccagccgaggcctggttggggaggccaaaccaaggagagcttccccagcagtcgtcagtgctgtggtctctgctctggctgtgtttcagcccacctcctcccagctttctccacatcctcacagtgatgaaccgtatttcataaacatcacacgccagagaagccacagttactcggaagcccccagctgactgcctggcttgtttcagatgcagccgcttgaaacgtgcgcagcatcttcatatcataaagattgtgcacggatccttacaatgtctcctgggggagagcggctgaggctgccttgcacaggcccttcccagggcgctgtccgacgcctgccccaccatgtccacatctgtgaagaggatggggctcctcgagaagtaagaccgtatctgccagcgtttctcaccacactggagagcagctgctctggagcagggatccaccagattggtatttttaaaaaaggtgtcaggcttgctatgttgaggttgtttttagagttacagagaataaaaacactcataatttcctgaaaaaaaa

SEQ ID NO: 16 - DNA, 3239 bp, Homo sapiens
ggcacgagctgtcttctgcctgcagtgcccaggagcttgtgaagctgctcaacgagctctttgcccgctttgacaagctggcagctaaataccaccagctgcggattaagatcctgggcgactgctactactgcatctgcggcttgcccgactaccgggaggaccacgccgtctgctccatcctcatggggctggccatggtggaggccatctcgtatgtgcgggagaagaccaagactggggtggacatgcgtgtgggggtgcacacgggcaccgtgctggggggcgtcctgggccagaagcgctggcagtacgacgtgtggtcgactgatgtcactgtagccaacaagatggaggccggcggcatccctgggcgcgtgcacatctcccagagcaccatggactgcctgaaagggagtttgatgtggagccaggcgatgggggcagccgctgtgattacctagaagagaagggtattgaaacctacctcatcattgcctccaagccagaggtgaagaaaacagccacccagaatggcctcaatggctcggccctgcccaatggagcaccagcttcctcaaagtccagctcccctgccctcattgagaccaaggagcccaacgggagtgcccacagcagtgggtccacgtcggagaagcccgaggagcaggatgcccaggccgacaacccctcattccccaacccacgccggaggctgcgcctgcaggacctggctgaccgagtggtggatgcctctgaagatgagcacgagctcaaccagctgctcaacgaggccctgcttgagcgagagtccgcccaagtagtaaagaagagaaacaccttcctcttgtccatgcggttcatggaccccgagatggaaacccgctactcggtggagaaggagaagcagagtggggctgccttcagctgctcctgcgtcgtcctgctctgcacggccctggtcgagatactcatcgacccctggctaatgacaaactatgtgaccttcatggtgggggagattctgctcctcatcctgaccatctgctccctggctgccatctttccccgggcctttcctaagaagcttgtggccttctcaacttggattgaccggacccgctgggccaggaacacctgggccatgctcgccatcttcatcctggtgatggcaaatgtcgtggacatgctcagctgtctccagtactacacgggacccagcaatgcaacggcagggatggaaacggagggcagctgcctggagaaccccaagtattacaactatgtggccgtgctgtccctcatcgccaccatcatgctggtgcaggtcagccacatggtgaagctcacgctcatgctgctcgtcgcaggcgccgtggccaccatcaacctctatgcctggcgtcccgtctttgatgaatacgaccacaagcgttttcgggagcacgacttacctatggtggccttagagcagatgcaaggattcaaccctgggctcaatggcactgacaggctgcccctggtgccttccaagtactctatgacggtgatggtgttcctcatgatgctcagcttctactacttctcccgccacgtagaaaaactggcacggacacttttcttgtggaagattgaggtccacgaccagaaggaacgtgtctatgagatgcgacgctggaacgaggccttggtcaccaacatgttgcctgagcacgtggcacgccatttcctggggtccaagaagagagatgaggagctgtatagccagacgtatgatgagattggagtcatgtttgcctccctgcccaactttgctgacttctacacagaggagagcatcaacaatggtggtattgagtgtctgcgtttcctcaatgaaatcatctcagattttgactctctcctggacaatcccaagttccgggtgatcaccaagatcaaaaccattggcagcacgtatatggcggcttcaggagtcacccccgatgtcaacaccaatggctttgccagctccaacaaggaagacaagtccgagagagagcgctggcagcacctggctgacctggccgacttcgcgctggccatgaaggatacgctcaccaacatcaacaaccagtccttcaataacttcatgctgcgcataggcatgaacaaaggcggggttctggctggggtcatcggagcccggaaaccacactacgacatctggggcaatacagtcaatgtagccagcaggatggagtccacgggggtcatgggcaacattcaggtggtagaagaaacccaagtcatcctccgagagtacggcttccgctttgtgaggcgaggccccatctttgtgaaggggaagggggagctgctgaccttcttcttgaaggggcgggataagctagccaccttccccaatggcccctctgtcacactgccccaccaggtggtggacaactcctgaatggcctcgagcctgcaacagtccaaaccggaagggagaatttattttttgaaactgaaggaagtcccgaccttcctggattgaagtgcacactcatggactttaggtttagaaacctcctcagccttcatttgttcgtggatgtgtgagctctgagggtggccctgctattcctgtgtgtgcctgtagtgtccccagcataggggtcttaggcatagggctgaacagtccttccagagccctcgttccaatccctgccgtccttgcccctgaggggccctgaccactgtgagcaggagggtggcagagctgggacaaagctgcctttgccgctgggctttccgggactgtggagggagcacaggcggggaagctccacttcagacagggcttggtggggcaggacatggctcccattttgaagggaggtctccatgtggtccgagtgaggtgagacggccctcgtcctggtgttcctgatcatcttgaaaggttcttctggaactcctgtccccttagtcatgagaacagaaagtgcaatatttcctttcacctggcaggggaggggggatttatttctgaaagaaaaatatataaacagatcttctacatttatatttttaatcttctgttaaatacactttccgatattgccttgccttttgagctcttgctacagtcgcctttgctactgctttaagagaatttacaggtattgataaagaacaagactgttttattaaaagctttattcaacttgaaaaaaaaaaaaaaaaaaaaaaaaaaa

SEQ ID NO: 17 - DNA, 667 bp, Homo sapiens
aattcccgggtcgacccacgcgtccgcgcagtccgaggcacgcagtccgaggcacgcacaggagtcccacagcactgcgtgtgtcggcgggacgcaggcacacgtgggtgtgtgtgcatgtgtgtttgtgtgagggcagcgtgtcctccagtgtgcatggtgtgtgggcttgggccccatccctggcccgagcatttcatcctgtgggggaggggtgctgacctagtgggaggagccccactgtgatccatgagctgccctgcccacgcctcccctccctgtagcaacacctctgggtgtttggagtttagcttttgtgggtttgctctccctatcccatctcctgtactacacagttcatggcagggtggggaggggtggggttggttcgggtgggtgaggggctttttcctctgcgtgcgatgttgttatctgacagttctccgtccctactggcctttctcctcgtcttcatatttgtacggtacaagcaataaagacactcatttcagaccaggaaaaaaaaaaaaaaaaaaaaaaaaaaaaaagaaaaaaaaaaaaaaaaaaaaaaaaaaaaaaaaaaaaaaaaaaaaaaaaaaaaaaaaaaaaaaaaaaaaaaaaaaaaaaaaaaaaaaaaaaaaaaaaaaaaaaaaaaaaaaaaaaaaaa

SEQ ID NO: 18 - DNA, 2318 bp, Homo sapiens
ccacgcgtccgcccaaagttctggggtgacaggcgtgagtcactgtgcctggccacttcctggttcttagatgctgtctttttccctgtgtcctcccatagtaaaggggcagacaagctcccctgggtgtcttataaaggcactgatgtcactcacaaggcttctatgcccaataactaatcacctcccaaaagcctcctaataaaaccactttgggggttaggatttcaacataggaattttggggagggacacgaacatttagtccttaacagtgatgtatttatttcccatgttgtaaaggattgggcatggcttattttttgtcacatttgttccttattacatgctaatgatgggaaccctggtgttgatattactacatgatgttattgtcacatttactgagttttataatgctcagaatttaaaatggtgattaatatttttgcaggtaattcatgaatattgtactttttttctgaacccttattcagaaaaggggctctgccaagtggaaaaaaattatttttcatcattaaattttgaggtagtacttttgtgaatgtatggttttaataagtaggactatagacatacagcccccctttttttaacctttacagctggtaggtattttcctattttggttaatattggctttgttgcttgattatagcacactgctttgccgtgtttaactttgagggtgtgttgtgttgttgaacagaaactgaccttttcagatatttcttctttggtgaagatcagacagttgaagttgaagtattcttcccatcaaattatcctgagggaggactacagagccagtttagtgaggattaaaaaggaaaaaaaaaataggtgaacctttgtaaatgccatcctggactctgccaactgcttttccggggaatactgtggtggtctgtggccttgtcacaatcagggatattggtgaaaggcattccctgaactgggggccgacagcaggctgacttttgagcagtcctgccaccactttgattttttatcttcttcctgtgccatgacttttatgcattgtttatccagctccaaccagggggagacccactcgaaagggtcctccagaatgaatggagactttccatgaggagtccctgtcatgacagtgacctggtgtgtgcaagctctccccacttactgatggctggaaggcagtagtgcctgcaggtttgcccttgccgaacagtatgatgtcagtgtgaatcgggaccaggcctcatccaggctttaatcttttttttttttttttttttttttgagactgagcctgggtgacagagtgagactccatctcaaaaaaaaaaaaaaaaaaaaaaagtaaatagctttattgagatagaaatcgagtcacacacttgtgtatccatcaccacaatcaatttcagaatattttcagcaccccaagggaagaagcctttagcgatcgcaatccctccctattctctccttccccaacccccggcaaccactactgtattggactctctgtctccatgggttcacctattccggatatttcatatgagtggaatcatacaacatgtgttcatttcttatccggcttctttcactgaggatgttttcaaggatcatccatgttgcagcacgtgtcggttctttttatggccaaataatatttcattgtatggctagaccacattttcctgattgatgcatcagctgatagacatttgaactggttccaccttttggctagtatgaagaatgctgctgtgaacagtcaggcacacatttttgtgtggccatcggttttcgcttatcttggttctataactagtggtgaaattgctcagtcccatgggaattctgtttgttgagtggacaaggattccacttgtttctaggatttggagtgtgaggaaattgggagaaaaggcacattgttaaaaggtacataaatgtgttctgtgaaggagggctttgttgagctaggtcctaatgataactgctttccattactattttttctttattttctttttagaaggaagagattgttgtgactctcttaccagctggtcactgtccgggatcagttatgtaagggggtcatttattttgtcattttattatatgtagacacatattgtatttgtagaaataaatttttagggtctaaaattaatagggggctgggtgcagtggcacatgtctgtaatcccagtgctttgggaggctgacgcgggaggattgcttgagcttgggagttggaggctgcagtgagtttttttttaaaaaaaaaaaaaaaa

SEQ ID NO: 19 - DNA, 330 bp, Homo sapiens
ggcacgagccagcaccagcgtcctagatggccccagcaccagctccaccatccggaccagaaatgctgccagagctggcgccagcttcttctcctggatccagcaccgttgacgaactgcagcgatcttactggccaagccagagcgcctcctctcagattccttctcgacacagcaccctaggcggcttcttcctgtcagtcggaggtggcatgcaagatgaagctctctttgctcttcctgctttcattttgtgcttttccttgtgttttcatgttttgggtatcagtgttacattaaagttgcaaaattaaaaaaaaaaaaaaaaaa

SEQ ID NO: 20 - DNA, 743 bp, Homo sapiens
gattggtcagatttgccttttttcagaatctgaagtcattccgtactgtatgtacacatttgtgtctggcttggctccagataaagtttttgggattcatgaatgttgttgcacgtattaggagagactcctttgtattgctgagtagtattcccctctgtggttagaccatgatttatttatccatctacctgttggtgaacattttggctgtttctaattcttggccatcatgaataaaactgctgtgaatgttcctacaataataattgtctaaacatatgtttttatttcttttgtgtcttagtccgtcgggctgctataactaagaaccacagcctgggtggcttataaacaacagaaatttatttttcatggttctggaggctgggaagtccaagatcaaggtgccagtggattcagtgtctgttgagggcccatgtcttgattcatagatggcggtcttcttgctgtgttctcctagacatggcagaaggggcaagggagctctctggggtctcttttataagggcaccaatcccattcatgcaggctctgccctcatgacctaatcacctccgaggaggcccaaaggccctacctccaagtaccatcatatgagggattaggtttcaaggtatgaacctggggaggacataaacagtcagtctagctttttgggtaaatgaattgctgggcttaataataaatgtatatttaactgtaaaaaaaaaaaaaaaaaa

SEQ ID NO: 21 - DNA, 1284 bp, Homo sapiens
gagctggccctatctgtctccgtccttgctacacacagctactgggaggatcattccaaaacacaaatctgagagagtcttcccttgccctcaacataaagactagactccagccaggcctaggaagccctgctcaagccagagtccacctacctgggccctctctcctatttcccattctgctactctgcttaacacacatggaatttatgccaaactacttggtgctctcaaaacatgccatggtgtcttttgcctctgtgtcttcacatattgtgtgtctctgcctgaaatgcttttccccgccttgataacctggtgaacttccagtcattccttgctgatgcagacagatgggtgagtgactgtacaccttcctctcccttgctaccttccatcagagaggctgggaagcaaaccctctacttccccagcctcccttgcagtgaggggtgcccacatgagagacattgtctggcaccagcccttccccactgctttctgtcttgaacccagatgtgatgcctggtgcagctgcagccatctcatgaccatgtcacaacaaacaccacaccacccaagtgacaagatgaacagtgcctggatgcctgatgacatggttcagctgccaggccaaccccaagcagccaacctccggaattctcatgagataattaaacattgttaagactgaagacactgtgaatcaaattgcctgtcacttgcaactaaaagcactcctgattgacactgggcctcacctcaagcacccactactcactgaagtccttctggatccctgctcctagtacaccttgcacaagcccatctcagcacttgtcctgttcactatattagatttgctcattgtctccctcccccattatactgagaccttttagaggaaagagactgagtctttccactttaatctttagtacctagcccagcccctagcacacagcaagtctttagtaggtagatttgtagaatataggtctattttccagccttatattgtaattttatacttacagtatttttattacaagctgcctccattccttattttaaaaaggccaagagaaacctagatgtccatcaataatggactggataaagaaaatgtattatggccgggtacagtggttcacatctgtaatactagcactttaggaagctgaggcaggaggattgtttgagcgcaggagttcaagacaagcctgggcagcacagtgagaccctatctctaccaaaaaaaaaaaaaaaaaaaaaaaaaaaaaa

SEQ ID NO: 22 - DNA, 5684 bp, Homo sapiens
  misc_feature (706)..(706): n equals a,t,g, or c
  misc_feature (755)..(755): n equals a,t,g, or c
aattttgggactgttgaccttgctgtgagaaaagagacaacgactgagcaagcactaccaccagcactgttactgggaattagaagacctgagtttctgtccagaccctcagtgcaaactgaggatgctccatccaaagtgaattatggtacttgccattttccaaaatgccttatcctttaccatctctgcacttttgttcatactctcattctactttggaactgctgctctgtggcttttcatctgtcaaaactgccattttctcagtatccaactcttatgccctcttttccatgagtctcctaactagccagaatagagctttaaagttttatgacatttcgttatgtatcctctatctgtatacaaaatcctgtaaaatagttacttgcctgcatttactgtctttgcagatagcagactccttgaaagcagggtccttgtttagtgcatctttgcccacatacaccacaacttatcaagatgcatttattaggaaggaggagtttagagagcaggctatcagaataaccactcagtaagtgttttcttaattgctatgtgataacttacattactcttaatgaggagaaaagtcgctagatatggatcatgtttatgttttaatgttttttaattctaaatttkgatctagggagccctcagacataaggagaaaccaatatgttgaakgatggggtantacatacagaaggaccaagaccttattttctccyacttaagaggaatcntgkyaagatgmmmggacagctttttaaaaggagaaggtcataagacagtttgaggaaggcattggaagaggaagargggcaatgtctcctttgktttattgttggtatataaacttaaaatctcagttctttttatggcacttgtggagccacttcctctcctcaccaaaaaatgcccagtaccctgaatccgatcaaattactctcctaaagtataaggcttagtttctgtgtgctgcttcgcgagacagttcccacaaatcgagagtgttaatcagacttttgtgttttcttttttggattgctgttgtttgttttcatttatcatttgtctttgcctaagccaggctcatcaagaattaacagccatcaggctgccgatgtgctgacagcagacccacttagagtcctgtgtttgtaattccatgcattkgttattttacctgttttgkccctgccccttctagtcctgtgcctcctgattgctgagtgttcacctggaccttctgactaccttccctgtgctattccatcagcctacagacctggtacctggatttttgcccgagatgattcctaccaccttactactgacgaagacacccattccagtggaccactgtgacccaggaggcattcagccatcatgatgtggcctttacctccactcctgtcttgttctacccagattcagcacagccctttatagtgaagtcagagtcctcaagccaaatagctaaagctgttttatcacaacaaaggcctagtttgttccatgagtgtgcatttcatttcttcagttaaagccttcagagacacacaataaatttggaccaggggattttttagttattaatgctctctgaagaaaggcaacatctttttgagagcagcattggaccacaccccacaatctcaaatgattgaaattcatgaacatctaggatcccatgaaggtcactggaccctgttttttctacttcaaatcctgtagtagcctactgaatgagaaaacatattctgacccattgggatcaaatcaaaggcacagtgaactcctcatagcatcttctttggaattactcaggaaccagaactttttacacaaatgtaagaaattctaccaaggagtccccttacctaacagcatctcacaaggctgcaccagattccagaaaaggcttctcttgatacatcaaggtagaaccwctatgcattttgtgaccgacttattcttagatcattggttttccaaaggctttgtggccatgaagccctttgagtgaaaactgtgcagaagcccagagtaaaagtgaagctgctctggatgaagtagtgaagcaagagtaggggcctgaatcctgctacaactatcttcctttaccaccgtggtgacacctaaggggacttccttacaacaccttgaactcttccgaacacagtttgaaaaccactgccccagacagcaatatgtttgacctgaatggcattccaatcttttctgtacctccactcagcacagttcatgttcagtagatgctgaacattcttagaaatactgtgtgtgaacttagaaaagtgcaagaagacaggcatgtctttgaccccaggaatgatcatttgctgaagatggtgtcaagtgaacctagattaacagccctccactccagatggatatccagtgattcctagaatgggatatagccagagaacaattctatgcaccctacactgacagactcccttaagcaacaccagatgctctactggtacttgaagtacatgactttgaagtcttgaccctccatgaatacctgaattatcagcaagcgggttttgaagctggtgcctcattgaggccatattagagcaacttgtacatttgacctcttgttatcagccatggtactctacttcgtgtgcaagagataactatgaaagccaaattcaaatactggcaacatttcctaaaggggctcaatatctatcattcgtcttcttttccaaactacacatcactgtatgactcaaccagtagcagttatattgccccttggtttttattcagtttaactactgtttccaagataaatgagctaataagctttaaaaaaaaaaaaaaaaaaggctgaattcttttttcttcatcactggcatatctgcctattctccagaattattatgactattcagctcactttaacagttgaacttcaagcgacaatctttgaacaccccttctcatgtgatttaaaatgaaaccatttggaaaagtttcttctagccagtaatagattttttttttaattgctctgccttgtgccgagagatgttcttttaagatgaatcttttgatgtctgataccaccaaatataggtggtagggagagttggaggctggccctttgagcaggccattagcttacttgctgggcatttccgatagcttattgcctacctttttgctggaaacaaactgatttgaaaaacaaaatctatgaagactgcagctaaggattttatcggtagacttaagagcttttgtccttgtggatattttagtggaaccacatcagtctcaatactgtcattttacactgactcagagcagctgacttcattccttgccatgatatatatttaaggcaggcattgtaacagacataaagacaacttatctgtttcagcaggaaggattcagtttatgaactctcagaccagatcatgttgaacaaggagactttgatgtgtgtcatgagaaaactcattctttacttcccagtcaatttaaaggccagctatcctgagctactcgaatgaatgcactggttaaacattggaaatagtttgtttatatccttgtctctctctaggccaattgtgattacatgactcgactctacatctcgtcaaacaaggcctaggtctggttgctgtagactgctcgccctcaacaaataaaatctggttgactagcctccttgtatatacaactattatttgttaagaagaaattatcgtcaattttctactaccttccaattgtcagctctttttttcctctctggtttttcctatactttacagaaaaagacattgatctatactgccattccctctaatcctgccatactcagtcaaaaggaatgacttaagatgaagatgatcatctgctcgagtctaaaatatacattgtatataagaattggtgattagaaaagcaaaaaacctaaaacttaaatctaggagtctgtatactgtctccatgtctccatgcctcagatctcatctaaatctttgaacagcaccattcaaccaatctgaggccttgacttgcttgtaagatgattctcagagatcggctgagttaaaaaagatgacgacttgattaccaaagaaagtagggccaactttgacaaatctggctctgctgaccctgtcactcccagatgtagcatagactcctaaacagaacctcaagtctgattgaggataaggccttctcctgagctgaaagttctttggcagatgagcaagaaactgaaagctgatgtacctgactggctctgtaagatcagaaaactgtatccagaataagccctatggattaacccctgagtacccagagtaaaaactaatttacagaacttccttattgatctgctggttcttccagatcatattctggctattggtatggctggcctttctgaaggtaccctgcttgtctattttcctgactcagctcttgcctgcctttttcacatgttgctgcaattagactcaccgtgaggactacagtcaatttcagtctatcttgtgcccaatacaacaaggatttttaatagtaacaacccacacctcacccactaggactcaatgttcacaacaggaaggaccattgctgcatactccttgaccagcaacttttttgaagatatttttaagtgcagagtaggcctctattcctgtatgtaattgttcattttcagcacctggaacctcatctatcgggtctggaaggaatacagcagttcgaaagccgcgtccatttctctccttcagtagtgcagaaatgagtccgattcaccagtacacacagaactgtaccagttcaacctagcaaaagaagaaaagtttccactgtacttaaaatttacagctgactcaaattgcctcacagaattatttgatgtagaaggctagttgtcttacttcagatcagcaggacagttgggctctcagactcatgaccactgagtttgcttgtgttgaaactgtggtttcatccaacatatgctattggacatgattattattccattcaaatggattacagacttcttgaggacaggacaaacttatctctcatggtgtttttttagaatacttttataaccaaggaagaaaccatgccagctgttaccattcaacttcttaagcagagattaagctttttcatatctgttcttatcctggacatcagtagtttttaattgcccagcatccgttccatcttgtaacaactccctgatgtttcttaaaaccacctcttcctattttcagtctgtggtttggacagtctgacccaaccttgagctttgtgggtgaacatgtaattcagacctcatcaatcagcaaatccatctgaactgtggaggagaagctctctttactgagggtgctttagctttgtaggatgaaaacctcaaactaacagggcctaccatgtagagaatgaagccagtgcaggggaaagcagagccaaaatatggagagacttgaatcctgatgacagcgtttgtgcccctggatccaaccgtgcctgaagctagaatatcccctggacttttcagttatgtgaaccaataaatacccttttttgcttaaaaaaaaaaaaaaaaaaaaaaawaaaaaaaaaaaaaaaaa

SEQ ID NO: 23 - DNA, 785 bp, Homo sapiens
  misc_feature (9)..(9): n equals a,t,g, or c
  misc_feature (22)..(22): n equals a,t,g, or c
  misc_feature (39)..(39): n equals a,t,g, or c
  misc_feature (44)..(44): n equals a,t,g, or c
  misc_feature (774)..(774): n equals a,t,g, or c
caattggancgcaaccggcaanttaaatggtggagttancccantcaattaggcaccccaggctttacactttatgcttcccggctcgtatgttgtgtggaattgtgagcggataacaatttcaccacaggaaacagctatgaccatgattacgccaagctcgaaattaaccctcactaaagggaacaaaagctggagctccaccgcggtggcggccgctctagaactagtggatcccccgggctgcaggaattcggcacgagtgtgagctaggtcttcaagatttatagaatgttacttatgaacaaaatataattatttatggtacaattcttgtactttagcaaatctggagttagttcatagtcaaagtcagttaatatttcttagaggaaagttttgctttttgtggcaacatttttatagcttgtgtgagttcttttttatttaatgatttgaaagcatttttgcacagtcgtgaccgtgtgtggtggcgtcactgtaaccaaagtatatgcaccagcccttgtgcatttattgtttctcctgattttgtggatttaaatgtccaaatgcaaacctttgtgacttcctttggaggacttggcagcacagcatgcccccgtgacctgcctgctgtggtatgagctatgaccaagagcaggcttcctgctccatggagtcctgagttgctctggggcaggggattacgttatgaaaactaaccatgtgtaacaataaatctaccttagcagaaaaaaaaaaaaaaaaaanaaaaactcgag

SEQ ID NO: 24 - DNA, 874 bp, Homo sapiens
ggcacgagtttattagatatattttcactaagaaaagaaagcagagtgaggttgaagctgatctgggctatccaggtggaaaggcgaaagtcatccataaggaatctgatatgatcatggcattttctgttaataaggcaaattgtaatgaaattgttttggcttcaacacatgatgttcaagaacttgatgttacttctctactggcctgtcagtcatacatatggatcggagaagaatatgacagagaatccaaaagttcagatgatgttgattatcgtggttccactacaactctttatcaacccagtgcaacatcctattcagcaagtcaggtgcatccaccttcatctctgccatggctgggcactggacagactagcactggagctagtgtgcttatgaaaaggaatctacataatggtaagagaatgacttcacacccagtccatcaatactatcttacaggtgctcaggacggcagtgtacgtatgtttgaatggacgcggcctcagcaacttgtctgctttcgtcaagctggcaatgcaagagttactagattatattttaattcacaaggcaacaagtgtggtgttgcggatggagagggttttctgagtatctggcaagttaaccaaactgcatcaaatcctaaaccttatatgagttggcagtgccacagtaaagccacaagtgactttgcatttattacctcttcaagtctagttgccacatctggacactccaatgacaatagaaatgtttgcctctgggacacattaatatcacccggaaacagcctcattcatggtttcacgtgccacgatcatggtgccacggtactgcagtatgcacccaaacagcaactcctaat

SEQ ID NO: 25 - DNA, 2440 bp, Homo sapiens
tacggctgcgagacgacagaaggggccttctagcagaaatggcggctgcggcggctcgagtggtgttgtcatccgcggcgcgcggcggctctggggtttcagcgagagtcttctaatccgaggcgctgcgggacggtcattatattttggagagaacagattaagaagtacacaggctgctacccaagttgttctgaatgttcctgaaacaagagtaacatgtttagaaagtggactcagagtagcttcggaagactctgggctctcaacatgcacagttggactctggattgatgctggaagtagatacgaaaatgagaagaacaatggaacagcacactttctggagcatatggctttcaagggcaccaagaagagatcccagttagatctggaacttgagattgaaaatatgggtgctcatctcaatgcctatacctccagagagcagactgtatactatgccaaagcattctctaaagacttgccaagagctgtagaaattcttgctgatataatacaaaacagcacattgggagaagcagagattgaacgtgagcgtggagtaatccttagagagatgcaggaagttgaaaccaatttacaagaagttgtttttgattatcttcatgccacagcttatcaaaatactgcacttggacggacaattttgggaccaactgaaaatatcaaatctataagtcgtaaggacttagtggattatataaccacacattataaggggccaagaatagtgcttgctgctgctggaggtgtttcccatgatgaattgcttgacttagcaaagtttcatttcggtgactctttatgcacacacaaaggagaaataccagctctgcctccctgcaaattcacaggaagtgagattcgtgtgagggatgacaagatgcctttggcgcaccttgcaatagctgttgaagctgttggttgggcacatccagatacaatctgtctcatggttgcaaacacgctgattggcaactgggatcgctcttttgggggaggaatgaatttatctagcaagctggcccagctcacttgtcatggcaatctttgccatagctttcagtctttcaacacttcctacacagatacaggattatggggactgtatatggtttgtgaatcatccactgttgcagacatgctacatgttgttcaaaaagaatggatgcgactctgtacaagtgtcacagaaagtgaggttgcacgagccagaaatcttctgaaaacaaacatgttgttgcagcttgatggttcaactccaatttgtgaagatattggtaggcaaatgttatgctataatagaaggattcccatccctgagcttgaagcaagaattgatgctgtgaatgctgagmcaattcgagaagtatgtaccaaatacatttataataggagtccagctattgctgctgttggattctttcttcttaggatataatcacagaagtgaacttcatgaatggaaatggaacaagttattttccaaaaggcaaactatttcatactcctacgtgaacatccttttaccacagcctcagccacagtacgtctaattatttaaaatttgtgattatcgctggtggtcaacaatttttttgtttttcatcctttaactggaaaaaggaggggctgtctcagtttttcttctgactctgtgtgtcacttacaattaataatgctagctgttaacatctacatagcagttgacatgtgccaggcctgtttaccagttaatcttctccatgatcctatgaggaaagtgctattgctgtctccatttcatagatgaggaaaatgaggcacagaggagacgttatgtagccactaccactgcaacttgctcaaacttccggccaagtcggctctagtccagacagcctgactcctcagcctgcgtctgtatgctgcctctcctaattcattatgtttattaataatttttccccgttttgttaacacttatgtttcaaaaacagtcatctttatttacattgactgatcatttcttttgtaatttcttctagtacttacaatagttctagtttcattaacatttcctatagactgaaaaaattttttaatctttttggaattttaatatagtcaagaaagtatctaaacttctcatttttcaaaatcttactgtcatttaataatccttcccttttccactgawwwgtgacactataatagtaaattttacaagggcttgttttggttacttattcttgccctggggttatctttaaactgaccacagytttctaatatatttgatcgtaacttccaaaaactgtgtaatttttgcttatttgtcttgcatctagtcacttaactctcttttgcttttctaggcagatcctatattatctacaaataatatatttatttccttctttccaaaaaaaaaaaa

SEQ ID NO: 26 - DNA, 1346 bp, Homo sapiens
ggcacgagcagcgggacagtcagacaggcatggccaatccctttagggatcctttcatcaattccctcaaacaccggttgctggtatatttgtggcgccgggcagaacaggatggtagtgcaatggccaagaggcgcttcttccagtattttgaccaactgcggcagctgcgaatgtggaaaatgcagcttctggatgaaaaccacctgtttatcaagtacactagtgaggatgtagtaacactgcgagtcacagatccatcacaggcatctttctttgtggtgtacaatatggtgacgacagaggtgattgctgtgtttgagaatacatcagatgagcttttggagctctttgagaacttctgtgacctttttcgtaatgctaccctgcacagtgaagttcagtttccctgctcagcttctagcaacaattttgcaaggcagatccagcgccggttcaaagacactattataaatgccaagtatggagggcacacagaggcagtacgccggctgctgggtcagctccccatcagtgctcagtcttacagcggtacccctatctggatttgtctctcttcagttatgatgacaagtgggtatctgtcatggagcggcccaagacttgtggagatcacccaatcaggttctatgcccgggactcgggcctgctcaagtttgagatccaggcggggttattgggccggcccatcaaccacacagtgcgacgccttgttgccttcacctttcacccttttgagcctttcgctatttctgtgcagaggactaatgctgagtatgttgtcaacttccatatgcgacactgctgcacgtaggtgcctcaccagagccagattatctggtcttccaagactttgccactcacttatctcagtggactccaaagcaaaagctcccgactactagctctgttagttccagcctgctatacctcagatgggagagagccagagagaggagtgagggtggctcaacctaatggaatttttaaattgtatacaatactgctactgattgttataatatcctcttgcgttttccctgtgggaatgcccagcattaattaagtccatttcatttttgctttactttgcatttgattgctgtgaagatgaaagcattagacttttatccccttcatgtcacttcttcggcattatggtttgcatctgaaagcagttaaatcttgtttactgatgagaatgacatacatcctttccatttagctcataagcacggctatctttttaagagaaaaataaagccatggtattttcatacttaaaaaaaaaaaaaaaaaaaaaaaaaaaaaaaaaaaaaaaaaaa

SEQ ID NO: 27 - DNA, 1237 bp, Homo sapiens
tcgacccacgcgtccgggcagccatggagtctctgggatatttatgaaatatgatctcagttctcttatggtgacagttactgaggagcacatgccattctggcagttttttgtaagactctgtggtattgttggaggaatcttttcaacaacaggttaacaaccatttcctttttgtctaatttctgaaagtgttgcttatacttaagttgcttcttctcaaaggggcaagaagtatacagattttcatgtttcggtgtttaatagcttttgctttaattacaaaactccaaaattatatggactaaccagtaaacataactaatttcattgtattcaatgatgtaaggtagattatataatggtgagttggaaagatcctgggtgttaacatcagattgaagtagaattgaatgtaagttctgtcatttacttggtggtagcttggaatagatcacctaccttttctgaggttttctaatcagtaaaaatagcaataataatacctaatttgcaagtgtgctataggattaaatatgaaaatgcctagaaggcatttaagacatttttaactgtacagtatgtaaaatcatatgttatagtactttgaattatgcaatacatgaaactagatttgtaatcagtaacatgtttatgatttttgtcctgagatcctggaattcgctaagattatttgtcgaattgtaatgatgaaaattgggagttaagtccatagagaaaaaggaaacaatcctattttcaccttcagtccttattcagtattaatggagctggggtatttattatacttagaatcatatttttaaatgaatgaatagctttcttcgaaattcttgttagtgctcatttcatctatttaaatttgtgtggttgactcattattccaaatgtttgggtggaactgaaaagattgtgtttaggcccggtgcagtggctcatgcctatatcccaacactttgggaggccaaggctggcggatcaacttgaggccagaagttccagatcagcctggccaacatggctaaaccccgtctctactaaaaatacaaaaattacccggttatggtgtgcgcatttgtactgttagctactcgggaggctgaggttggggaatcgcttgaacctgggaggtagagattgcagtgagccaagatcatgccactgtactccagcctgggcaacagggtgagactctgtctcaaaaaaaaaaaaaaaa

SEQ ID NO: 28 - DNA, 2345 bp, Homo sapiens
  misc_feature (1088)..(1088): n equals a,t,g, or c
  misc_feature (1909)..(1909): n equals a,t,g, or c
  misc_feature (1913)..(1913): n equals a,t,g, or c
ggaactcctcgatgaggaccatctacagtgcttttttttttctatctctctgtctctcagttctgctttcttctacagtatttgatgactggcatcccatttctataagctgggtccagaactttgggctcacaccttcctttgacgtgcaagtgccacagaccctgagatgtttcttcagatcagggtgccgctggcatccactgaacttgcttcagtttaagctgagcaccttcctgagaatcatttcattttatctttcattctgtagtgagaagaggcttcagcatgaatagtctagggacatgcaagatgtataaaatagaatggagttgtgaattaggktatatgagggrgaaatttataaaaaatataaagcattgtaaagacaaatgcatgttacacaaaaccaggrgaccacttcattttaagaggtacctgctggtctcagaagctttaagtgatttataatctagtcaacaataagtggcagatgaactgaaaatatatttgcatgaagttcttagttcagaggtaaagctagggatgctatgcatggcaacactggaagggaaagagcttttgawatccaggtctgggcatttgcyctaatcagaggtcaacatcttctctgccctcataacccamtccccgccaggggtcctgtctcctagaccacacattagcagatataatayckgkcawtctggkttctcattctctttccagaaaaatccagacatgattttattgcaagatggagagaaaaggagacagcatcacatgtcttatattagtcacaaaaactggatgggttttatttcaggcgctaattcttttgagaacacaagggaaactttgatcttaatctatttgatgtggttttaagtaaaggagcatcttgtgcttactttgaaagtgtttttttacttcgggcttggtcaaatattacattttgttccagagaaaaactcatttggaaggcagcatggagtatagaattagacatccctgggcttgaagcccatctcagccatgaactacctttatgactttcagctagttacttttcctcactcagcttcagnttcttcatttataaagyaagtgcctcaacatcgctttttgactttcttaatcttgtctacgcatctacaagtagcccttttattactgatttttaactactcctggccattggaatgaccgagaagcccatgtctcattctcagacgggggattttgattctaatgacagtcatggttgagagtccactgtgttaaagtctcttcatttgaagcatctgatgtgaattctattttctgcttaaaccccagacatagatgttaagtttcaaaattatgtcgtacattcactcccactacatactcattgaatgcttaccatgtacagactctgtgatagactatggaaatacatagaaagaaattccctgtttttaagaactttacctagtgtttagaaattgcatttaaaactgataattaaaatactatagaccttggcttaaaggatgcaccttgtaatctgtaatcatatttgtagttatatattgctttgaaaatacactgtagacagtaagacaaaaaaggaaataaaaagtacatgaattgcgaaggagaaaataaaattggctttggtcacagatgacatgattggctatgtagaaaatcccgaggaactgacaaaacaaacaaacaaacaaatctagaactaattagttctagattatagcaaggktgcaggatcaagcttaatacctgaaagwaaattcctttcctatataccagccmtgaaccattggaatttgaaatcaaaatacmacaccattaatawtattaccaaaagagagagagggagamaatatgtattatgctaacaaaagangtanaaaaggtatgtgagaaaaactacaaatctctgatgaaataaatcaaaggagatctaaattaatggaaagacaaactatgctaatggataagaaaactcaatcttgttatgtgtcagttcattccaatttgatccatagattcaatgcaatcctagaaagctactttgtggacatctgcaaactgattctaaggtttacacgaaaaggcaaaaagatgcaatagtcgaaacaatattgaagaagaacaaagaagtcggactcttcttgacttcaagtctttctataaagctacaataatcaaaatagtgtggcattggtgaaagaatagatagatcaaaaccaattcaatggagaaagggaaaagacagtctttttaacaaatggtgctggaactggagttccttatgaaaaaaaaaaaaaaagggcggccgc

SEQ ID NO: 29 - DNA, 2536 bp, Homo sapiens
ccacgcgtccgcacgtatcaagataaagaggaagttgtcttatggatgaatactgttgggccctaccataatcgtcaagaaacatataagtacttttcacttccattctgtgtggggtcaaaaaaaaagtatcagtcattaccatgaaactctgggagaagcacttcaaggggttgaattggaatttagtggtctggatattaaatttaaagatgatgtgatgccagccacttactgtgaaattgatttagataaagaaaagagagatgcatttgtatatgccataaaaaatcattactggtaccagatgtacatagatgatttaccaatatggggtattgttggtgaggctgatgaaaatggagaagattactatctttggacctataaaaaacttgaaataggttttaatggaaatcgaattgttgatgttaatctaactagtgaaggaaaggtgaaactggttccaaatactaaaatccagatgtcatattcagtaaaatggaaaaagtcagatgtgaaatttgaagatcgatttgacaaatatcttgatccgtccttttttcaacatcggattcattggttttcaattttcaactccttcatgatggtgatcttcttggtgggcttagtttcaatgattttaatgagaacattaagaaaagattatgctcggtacagtaaagaggaagaaatggatgatatggatagagacctaggagatgaatatggatggaaacaggtgcatggagatgtatttagaccatcaagtcacccactgatattttcctctctgattggttctggatgtcagatatttgctgtgtctctcatcgttattattgttgcaatgatagaagatttatatactgagaggggatcaatgctcagtacagccatatttgtctatgctgctacgtctccagtgaatggttattttggaggaagtctgtatgctagacaaggaggaaggagatggataaagcagatgtttattggggcattccttatcccagctatggtgtgtggcactgccttcttcatcaatttcatagccatttattaccatgcttcaagagccattccttttggaacaatggtggccgtttgttgcatctgtttttttgttattcttcctctaaatcttgttggtacaatacttggccgaaatctgtcaggtcagcccaactttccttgtcgtgtcaatgctgtgcctcgtcctataccggagaaaaaatggttcatggagcctgcggttattgtttgcctgggtggaattttaccttttggttcaatctttattgaaatgtatttcatcttcacgtctttctgggcatataagatctattatgtctatggcttcatgatgctggtgctggttatcctgtgcattgtgactgtctgtgtgactattgtgtgcacatattttctactaaatgcagaagattaccggtggcaatggacaagttttctctctgctgcatcaactgcaatctatgtttacatgtattccttttactactattttttcaaaacaaagatgtatggcttatttcaaacatcattttactttggatatatggcggtatttagcacagccttggggataatgtgtggagcgattggttacatgggaacaagtgcctttgtccgaaaaatctatactaatgtgaaaattgactagagacccaagaaaacctggaactttggatcaatttctttttcataggggtggaacttgcacagcaaaaacaaacaaacgcaagaagagatttgggctttaacacactgggtactttgtgggtctctctttcgtcggtggcttaaagtaacatctatttccattgatcctaggttcttcctgactgctttctccaactgttcacagcaaatgcttggattttatgcagtaggcattactacagtacatggctaatcttcccaaaaactagctcattaaagatgaaatagaccagctctcttcagtgaagaggacaaatagtttatttaaagcatttgttccaataaaataaatagagggaaacttggatgctaaaattacatgaataggaatcttcctggcacttagtgtttctatgttattgaaaaatgatgttccagaaagattacttttttcctcttatttttactgccattgtcgacctattgtgggacatttttatatattgaatctgggttcttttttgactttttttttcccaatccaacagcatccttttttttaaaagagagaattagaaaatattaaatcctgcatgtaatatatctgctgtcatcttagttggaccaacttcccatttatttatcttaaaactatacagttacatcttaattccatccaaagaagatacagtttgaagacagaagtgtactctctacaatgcaatttactgtacagttagaaagcaaagtgttaaatggagaagatacttgtttttattaaacattttgagatttagataaactaaaaaaaaaaaaaaaaaaaaaaaaaaaaaaaaaaaaaaaaaaaaaaaaa

SEQ ID NO: 30 - DNA, 2182 bp, Homo sapiens
ccacgcgtccgaaagaaggcccctggctgtggcgccatgtgaaaaggatgaagacctccaggcccttctccctctgagtctccctccccctgatgaccctctggaagcctgctggctcctcctcaccctcactcacacttcaactcccagttggattggcctgtggacctacctgctgcgtctcagtaggagagaaataatccagacctcaggaacttgacctcacagctccagggaattcaccacgtgggcgaacgggtagagtagaagatgctcagtgaacatgcgcactgaggtgggcgcccaaagagcatgcgcagtgagatgtgtgcttgccttaggggctgtggtgtccctccttgttccccctacccctgctctttcctccatcccttcctaggaccccactaaggactttggaatccatcctcccttgtgtgttttttttatgcctctgagactcaaatatctcaatatcaccgttcaaaactcactctgtgttcacctgaccctcctgccctctatggcccttgtcctcccttgtctgggcccctcaagggagcaagtgcatggtggtgttgctgacttctagtagaaggatgaggatctctatcaggccgtggaccaagtggcccaacccatcgaagtctgctcactttccctcatgttcactcacactcaacttctgggaggactgatctatggacctatctgatgtgttatagttagcaagaaagaagtcacaacatttcctcccacagctctgcagggacagaaggcagagagcatggcccacagggaacaggaatttgcataggaagggacatgcacattgagccagggactttcagggaatgccagagttttccctctgtcaccatgatagcagcagccactgccatcatactggctgcagcagggaagcccagccagagctgcatgctctgtggagccagcaaaagccagggacaagtgggatccccaccttttacaagttggggagggagcccctgggtgcccctgcagccacccaaactgcagttgaagacccagacttctggctctatggagcaggcaggatccctgccctcctgggtgcagctgtagccactggatccatggctgcagacccaggagctggggacaagtgggagccccaacccttcagagttggcgggtcaggagctccttgggtgcagctgcaacttcccttcaaggtgcaggacccaggtgtgtctgtagcctgcaatctctgaagcctgggaaggcccccactgtccctggggagcagggaacaggggacactgtccctggggagcaggctcagaggtgtctgctcccactacctggtctctccctgctcccagcacccactatgatttcagagcaggttgtgggctgagcccctgcactctcacagctcagatgggcttgcacatgggcaggtcagccctggaatgccagccccctgccacctcagacccctccagaatttgggtgccaagaaacatgagaggggaagccaagggggtgctgagggcagctgggtagtgctctgcaggtccgagcagcctgggcaccatggactgcagtgggaggcagacagggtccagagcagaagggggtggtcctaggtaaggtcccaccttcaggccagggatgggccaggctgccaatcccagagaccagagtatggacttgtggtgccttttctaggcccacccatggactaatgtacatgcactttctcccctctgaggtccgtaaatgcctgggactcagccagagcagggcagaggatgggagcaatgggacaaccagctgcagagaggagctaccctctccagggcctcctctctgctgagagctgcagatgttggaaagacctgcctgcagagaggagacacactcttcagggcctcctctctgctgagagctgaacacttgacctgacgacctgcctaaagaggagctactgactgtggatctcctctgagctgttctaacactcaataaagctccacttgtttgcataccttattcttcccagatgcattaacaagaacttgaacaaaggtgccaccagacacagaggtttccagccagaaaattgactgcccaaagatcccatataacccgtacccacatccacagggcattttttagtaaaaaaaaaaaaaaa

SEQ ID NO: 31 - DNA, 5143 bp, Homo sapiens
ggcacgagtggaactccccttcgtcactcacctgttcttgcccctggtgttcctgacaggtctctgctccccctttaacctggatgaacatcacccacgcctattcccagggccaccagaagctgaatttggatacagtgtcttacaacatgttgggggtggacagcgatggatgctggtgggcgccccctgggatgggccttcaggcgaccggaggggggacgtttatcgctgccctgtagggggggcccacaatgccccatgtgccaagggccacttaggtgactaccaactgggaaattcatctcatcctgctgtgaatatgcacctggggatgtctctgttagagacagatggtgatgggggattcatggcctgtgcccctctctggtctcgtgcttgtggcagctctgtcttcagttctgggatatgtgcccgtgtggatgcttcattccagcctcagggaagcctggcacccactgcccaacgctgcccaacatacatggatgttgtcattgtcttggatggctccaacagcatctacccctggtctgaagttcagaccttcctacgaagactggtagggaaactgtttattgacccagaacagatacaggtgggactggtacagtatggggagagccctgtacatgagtggtccctgggagatttccgaacgaaggaagaagtggtgagagcagcaaagaacctcagtcggcgggagggacgagaaacaaagactgcccaagcaataatggtggcctgcacagaagggttcagtcagtcccatgggggccgacccgaggctgccaggctactggtggttgtcactgatggagagtcccatgatggagaggagcttcctgcagcactaaaggcctgtgaggctggaagagtgacacgctatgggattgcagtccttggtcactacctccggcggcagcgagatcccagctctttcctgagagaaattagaactattgccagtgatccagatgagcgattcttcttcaatgtcacagatgaggctgctctgactgacattgtggatgcactaggagatcggatttttggccttgaagggtcccatgcagaaaacgaaagctcctttgggctggaaatgtctcagattggtttctccactcatcggctaaaggatgggattctttttgggatggtgggggcctatgactggggaggctctgtgctatggcttgaaggaggccaccgscttttccccccacgaatggcactggaagacgagttcccccctgcactgcagaaccatgcagsctacctgggttactctgkttcttycatgcttttgcggggtggacsccgcctgkttctctctggggctyctcgatttagacatcgaggaaaagtcatcgccttccagcttaagaaagatggggctgtgagggttgcccagagcctccagggggagcagattggttcatactttggcagtgagctctgcccattggatacagatagggatggaacaactgatgtcttacttgtggctgcccccatgttcctgggaccccagaacaaggaaacaggacgtgtttatgtgtatctggtaggccagcagtccttgctgaccctccaaggaacacttcagccagaacccccccaggatgctcggtttggctttgccatgggagctcttcctgatctgaaccaagatggttttgctgatgtggctgtgggggcgcctctggaagatgggcaccagggagcactgtacctgtaccatggaaccsagagtggagtcaggccccatcctgcccagaggattgctgctgcctccatgccacatgccctcagctactttggccgaagtgtggatggtcggctagatctggatggagatgatctggtcgatgtggctgtgggtgcccagggggcagccatcctgctcagctcccggcccattgtccatctgaccccatcactggaggtgaccccacaggccatcagtgtggttcagagggactgtaggcggcgaggccaagaggcagtctgtctgactgcagccctttgcttccaagtgacctcccgtactcctggtcgctgggatcaccaattctacatgaggttcaccgcatcactggatgaatggactgctggggcacgtgcagcatttgatggctctggccagaggttgtcccctcggaggctccggctcagtgtggggaatgtcacttgtgagcagctacacttccatgtgctggatacatcagattacctccggccagtggccttgactgtgacctttgccttggacaatactacaaagccagggcctgtgctgaatgagggctcacccacctctatacaaaagctggtccccttctcaaaggattgtggccctgacaatgaatgtgtcacagacctggtgcttcaagtgaatatggacatcagaggctccaggaaggccccatttgtggttcgaggtggccggcggaaagtgctggtatctacaactctggagamcagaaaggaaaatgcttacaatacgagcctgagtctcatcttctctagaaacctccacctggccagtctcactcctcagagagagagcccaataaaggtggaatgtgccgccccttctgctcatgcccggctctgcagtgtggggcatcctgtcttccagactggagccaaggtgacctttctgctagagtttgagtttagctgctcctctctcctgagccaggtcttcgtgaagctgactgccagcagtgacagcctggagagaaatgggacccttcaagataacacagcccagacctcagcctacatccaatatgagccccacctcctgttctctagtgagtctaccctgcaccgctatgaggttcacccatatgggaccctcccagtgggtcctggcccagaattcaaaaccactctcagggttcagaacctaggctgctatgtggtcagtggcctcatcatctcagccctccttccagctgtggcccatgggggcaattacttcctatcactgtctcaagtcatcactaacaatgcaagctgcatagtgcagaacctgactgaacccccaggcccacctgtgcatccagaggagcttcaacacacaaacagactgaatgggagcaatactcagtgtcaggtggtgaggtgccaccttgggcagctggcaaaggggactgaggtctctgttggactattgaggctggttcacaatgaatttttccgaagagccaagttcaagtccctgacggtggtcagcacctttgagctgggaaccgaagagggcagtgtcctacagctgactgaagcctcccgttggagtgagagcctcttggaggtggttcagacccggcctatcctcatctccctgtggatcctcataggcagtgtcctgggagggttgctcctgcttgctctccttgtcttctgcctgtggaagcttggcttctttgcccataagaaaatccctgaggaagaaaaaagagaagagaagttggagcaatgaatgtagaataagggtctagaaagtcctccctggcagcttcttcaagagacttgcataaaagcagaggtttgggggctcagatgggacaagaagccgcctctggactatctccccagaccagcagcctgacttgacttttgagtcctagggatgctgctggctagagatgaggctttacctcagacaagaagagctggcaccaaaactagccatgctcccaccctctgcttccctcctcctcgtgatcctggttccatagccaacactggggcttttgtttggggtccttttatccccaggaatcaataatttttttgcctaggtgcctgactcctttcagattccctctttatcttccctcacagtttggaaaggatgagggttatcttcctcgattcttccaccctctcactttcctgcctgttccccactccacaggagggagctgacgttggcttgaaaggagtaaagtcaacatctgctgctttcctgtggactctggtgattcatagagccggatggggagagtcaacaggaaaaaaggagggaggaggaaaagccacaagagacattctgtacaattccaaggaacagagaagcctttagacaggcaactgccatcccccctgaaacctgagacctgtagtgcactcgaccgccctcaggtgttggtgaaacagagctgcccccaggctcgctgggcataggcttcctgattccaagccttttctgggagcaaagccagggcctggtgcctgattttctgaagccaggagccctcaggtggctggagctggaatagcagggaggactgggtgtacctaggcagtattttctctacttctctcaagtcttatactcactcttgagccctccttggggcctgcttagaaagcagacaggagagagagtactgctacttgatgatgggaaatgctttcactttaccagctttgggaagcagcagccccatgggatctaaaagtgtggagtctgcattaagaaacctacatgggtggcatggggctctggggagcaagcccttacttgctcagcactggttatgtagcacaaatagctcctaggaaaatgtttctggggcaaccctagaaccctggtcatattttgcagggtttctctggtggaatcagtttgccagcccttgcttgatgcttactggaaatctccaggttaatttctatctctgatccctccccaacccactccatatttgggtcatggacagtaaaggcagttggattctcatagacaactgggtaacttatatttctttgtaatcaagacttgagatatcgaagtcagttattggtctccagagtgcagctctgggagccttttgaagaatcagcactcattaagagctgagaagagagaagacctgattgggtggttgactagcagtcacagaacctgtcctcccaggctgttcctgaggcctgaccacagtatttattttggcatgtctctggccttctgcagaggcccaccctcatgggcattgtctctgtttcccagtggggtggacagtatatcagatggtcagaacaaataaagttcagtgtcwaatgaaaaaaaaaaaaaaaaaaaaaaaaaaaaaaaaaaggggggggg

SEQ ID NO: 32 - DNA, 607 bp, Homo sapiens
ggcacgagtgggcctggaattcgccacaggacggatcttacagaggcaagtggtccctggacctctcttgcatccattctctagacggccgtgtcagaggctccaccctgttgtgaacttggtatggaggcaaaggcttagaggctggaccagcattcttgggcaaggactgactctcgaagggttttgttcttggctttggacacctgagaaccccctcctcccctcccccaatacaaggtttttgacatgagtgtactcctgcttagttcctcttgtggggctgcatttgcggtgctttgccctccccactgtgagtgaggggccaagggatctcctcaatcctgtctccccagcggctctgtttcctccttctttccttggcctctgtcctttgctgacttcctcttccttacccagcagaactcaccctggggtcggggcagtggggaggggcctatccactgctcttcctagtccttggcagctggcctaggtgggcagactataggagggactggttaggagtctgcattgctttgacttccctctccttggttaataaacacaaatgcttgtttctcaaaaaaaaaaaaaaaaaaaaaaa

SEQ ID NO: 33 - DNA, 596 bp, Homo sapiens
  misc_feature (564)..(564): n equals a,t,g, or c
  misc_feature (569)..(569): n equals a,t,g, or c
  misc_feature (571)..(571): n equals a,t,g, or c
  misc_feature (578)..(578): n equals a,t,g, or c
  misc_feature (580)..(580): n equals a,t,g, or c
cagctatgacccatgattacgccaagctcgaaattaaccctcactaaagggaacaaaagctggagctccaccgcggtggcggccgctctagaactagtggatcccccgggctgcaggaattcggcacgagaattggggaaaagggtattcaatatttattaagtaacaatgagaaatgcaacaaacttccttatttatgccttatgaataaaagagtgtggaatgtaaggtgaaattttatgtgcaagatcctgaaggaatgggtattcttgaaggcagggactgtcttttctatgtttgttctgtacagctctcagcacactcttggtgcttgataaatgttatgatgttatataataccaataactaagcacatttttagatcttttttcaaatggcttgtgtaaaatttggttaatgtacaatggttggtttgaagctatcatgtaaaattggcctctccaaatataatcagaaataaaccgaaaaaaatataaaaaaaaaaaaaaaaaaaactcgagggggggcccggtacccaattcgccctatagtgagtcgtatacnctaantnctttttntncctatagtgagtctta

SEQ ID NO: 34 - DNA, 1380 bp, Homo sapiens
gagtagatattcaacacatggacaagtgtttaattattctttgtatattcctgttgtttgtaaaacagcttataatttttaaaactattttaaagggaatgaaagtaggaattacagggaggcagttatcaattagatataaggatgaattctctagtagagttagatgtaataaagatattgccacactctatccatatgtttatacatcaaatttttactgagtacatacatcatgagacaaaataaacttcctgtcacaaaaggtgcttgaccaaaactcaagaatcacctttcagggatactgttaaaagtgttcccacatcagctaggagttagctctagagggcttttaagagctttggccatcccgaaattctatgcttgaaacacgttttctcatagaaacgctcctaccaaaggccagtgagagaactatcactttgtgaagaatttcagaatgcccactagctctcctgtagccctaaaaggtaatgagagtctacctgttcagactgagagctccggctgccttgtgctacagaagcagtaagtgcatgtaaaggacgccatatttctaagacaaaagcagtaacaatgactcaaggatgatgcctaatagacgatttaacctataactttgctaattgtcatattttcaaaacagccctatgggaagggtacacaaatgtctggggagtatttcctgctttttagcacccagggaactacaaccaggagcccagcttattttggattggggatggggatagacaagaagagatggggcagggagaagagacggctggtttattttacatacacatattttatttataatacatctctgtgtctaggaggctctatgctggtctcataaaatctgaattatacaaataaaagtttaattcctggctgtttttgaatgacttgggcctgtattacaaaattaatcagatacaattatactatcttcacaacaacaatcatctacattggggtttgacaatgtacaaagtacttccatgtgtattatttcgtttatctttaccacaacctttgaagtaggaagacatgatgatccccattttactgcctaggacagagagacatcaggaggttaactgacttgttcactgagaaagcggaggagcacagactataactccaacagtttgaccccatactgcatacgcatcagggccttaatcatgagactgtatgacccttctgagcctgggattcacttgcaactgggtattccctcttctacctcaggccccctataccttttcaaaaagtgtccttcactgtaaataatcttcctggtggtgaccctaaaggatctgacaacctggatctacgtaaaaaaaaaaaaaa

SEQ ID NO: 35 - DNA, 903 bp, Homo sapiens
agctcaaaacaaacaaacaaacaaaaaaacctaagtcccttcgctgtcaaatccttaggggagtaaattctgtcatctctgggtacctgttttcctgacttttcaaggtgttgaaaagagccttatgattcagccaaactttccaacagctctgatgggcagtttatcctcactcccactctacccagctctgttcctttcttctcttccactgtgtctgaatttgacagggtcccagtctcagtggtactgttcaaagtgtttataatgttactcttctgggcaatttttgcttcatacgtctccatccaatcaatgcatttcaggtgttgtggcagagagatttttgggggtgctggtacaagcaagacaggaatamcccttaagtcacaataaaggcctctgcagggagtttttacattcacttcattttagacatcctcatttccctttcctacatcatgtaatttgtgtgattttttttttttagatggctattcatatgaaaaggaagcaatggaaaattggatcagcaaaaagaaacgtacaagtcccatgacaaatcttgttcttccttcagcggtacttacaccaaataggactctgaaaatggccatcaatagatggctggagacacaccaaaagtaaaattgttgatattgtattatttatattttcagtgatctcatttgaatgatttataggtaaatactaatcagacattattaaaagcaaaacaggaaaaaggtaaacttcttaaatttagttacctataaaaattgtcaattttcattctttaaaaacacatggacttactataaaagcctttttgtactagtgaaaagaatcttcagctatatagaaataaagttatactttaaaaaaaaaaaaaaaaaactcgag

SEQ ID NO: 36 - DNA, 1809 bp, Homo sapiens
gttaagttgacccattgcagtggattgagtggagggcaggtgaagggcaggtgttttcaagtcaaaggagttcaggtgaagggcaggtgcttttagtcaaaggagttccttagcattatttcctcctttatttggagatcagattgaagatgtaggggactagaatgcagttgtagtttgtggtgtttactttttatggaaaagtgcctcttatgtgaaaagtcttctgtgcttgatcctgggggtaggggggttataaaaatgtcatacctgggatcctgcccttaaggagttgatggtaggtaatgctttcctttggctttttgttcatcttgagtctgtgtatgttcagttatcttcagccatttcctgggcaatgggraacatttctgttaaaacaaacttctgactttgatctgtgacttatatttctttttagataatgaagaaccactgggattagagggtgtataaaatacaataataagtatagtgtatgtaggaacctctgtmcaaccaatttggtgacttttaggcaactcatttgactatttgactgtttgttacatgagtgtgcatttggcyttgtttaaaattcctctataaagcacattttaaaaaatgacccagtacttagtatataagatgaactgccatttgtataattgatcatttaaaaatgcttattatacttttaatcaatcagtttccatgtttatgaaatgggaataattattatatctagctcatagaattgtcctgaagatgaaatttatatccatatatacataatgaagctctttagagcaatgtataactacatgccaactgttcaaaaaatattaatggctacatcactattaatattttaaaattagtactgtcattttcccttcctacatgactgaatgtaggaggtgactatttttgttataaaaggatttccaatgagatacctttgaatggtaaaatttcctatgcatttatttaaatgtttatatatatatgtctttaaagtatgaaagttaagtgcacttatacaaggcagattcaggtactaattaaactgctcatttagattacagaatgagggactgaaaattatatgtatttaattaggaattggattgattggtcttgactgctgktgtctttcagttcttttttattgttatacttcccatgtgtttgtctccttttctttttatcttttaaaaattgctttctgatttatttcctgttcagttttcagtaatgggtgtagaatagggcaagaacttatgttggtgcccgttgtttgaaccaggaaggagcaactgcatcagacagcctggggctcagttgggagggacttcagatcagtccctgcagagctgcctggcccagggaaccactgaattccagtttcctaactccaaatcggacagtttgtgggtctacactgtatgtacataatgaacattttaaggctcattcatccagtgttttccacatgctcccatttgtttagttctcctttttaaaaaccaataattatggaaaaatttagctatgtacagaaatagtagtgagaaaccccccacttagccatcatgcagcttcagcagttgatcatctcatagccagtcttgtttgctcaatactcccaaccatttcttttctcccattttattttgcaggaaatcccagacattatatcatttaatctaaaagtatttcaggatgtatctgtaagagatgaggactcaaaaatgcatacacacattttgagaacttcccaaaaaaaaaaaaaaaaaaaaaaaactcgag

SEQ ID NO: 37 - DNA, 934 bp, Homo sapiens
ggcacgaggttgtctaccctcattagtttatttttgacaaaaagttgcttttagaaatactttacttgttgaagttgttttactatcaaagcatacctattagcttttgaagggagtcctcctgtaaaatttataggattaaaagttttcatgtgcttgtgactaattatgaggtttatagtggtttacattttgagatagttatatatataatatgcccttttcttttgtgacattatacgtatttttttatattgcatttaaaattaaatgacttgcttttgccagattaaatacagataccattggggttttctgttttgattcctaatgataatatggattgatttcaggtgtaattattgaaacagatataattggttcagaccttttgaagaactctgacccagagacacagtccagcatgcctgatgtaccatatgaaccagatttggatatcgaaatagattttcccagaggtactcaaaacctttatgactatggaatttagttatggagtcaactgtggttatgatcatttaccatttgatgtttgtgtcattgccttttagcagtgttcatattttttattcttgttattttttaaactcaccttaagagttaacttcatattttgttgttgtttttttttaaaaacccaccttaacagttaacttctggaatgagatcacttgagtccaggagttcaagaccagcctgggcaatgtggtgaaacactgtctctactgaaaatataaaaattggccaggcgtggtggtgcatgcctgtaatcccagctactcgggaggctgaggcaggaggattgcttgagaccaggaggtagaggttgcagtgagccgagattgtgctgctgcactccagcttgggcagcagagtgagaccctgtctttaaaaaaaaaaaaaaaaaaaaaaa

SEQ ID NO: 38 - DNA, 850 bp, Homo sapiens
gggctgcaggaattcggcacgagaaaatagtcctcccttcaacatggctatcttttttcaagttttatatgcatagctctctcagcacttgaatggaaaaactgttacagcatttgggagttgtttttcttttagacatttgcagatcttatctcaaggtgactaggaacccagagctaagtatctgtgaggcaatctctgcgaacgctgaacttacctagttggtttctatgaaatatgtagaatgcactgcagtagccattgtaagaaggtactataccggttttttggggcttgttgttgttgtttggtctgagaatgtactgccaacccctcttttataagagagaactgattttgatacatattttaaaatatgatagtacagagttaatggatgttaaaattttatttctttgttttggtaagtagattaaatcgagaatcatataatcagtacatttgagaattatataaccagtatataataatactggacacaaccatttgccatcttttcctgttatcatcccatagagtgggtggggagaatgaatagacataaacctagaataatgataaatggtttttaaaactctatattgaatacattccagctgataatgacttttctttttcaccttggtgatatcagcctcagggtaaaaaaaaaagtttcataaatcttttagttataaacaggaaagttttatattagtgtgtcatttcatttctagactgttgatggtgatgatgataaagaatttggagccaattttgatatatgaatgtattgcttttacatgtgatgattaaagctctccattagcaaaaaaaaaaaaaaaaaaac

SEQ ID NO: 39 - DNA, 1713 bp, Homo sapiens
gtctcaatggacacttagaagaatttgatgatcttactgtcataaaatcagtaatgaaattctcagcaaaactatttggtaaacattgcaccctgtatttttacccaacatcttgttatgaaaattatcaaatacattaaaaagttaataattttatagtgtactcactacctagatgctaattagcattacctatgcttgctttgtcacatatccattcatcatttcatattattatttgatgcattttaaattgcatatcattaactagagttcattgttggcttttttacataaaattagcatgcaatgaagtgcatagaaatatgtgttcactgaggtttggcaaatgcatatagtgctatggaaataggaaacgttatcaccaccctagaaagtttccacactgccctttccagtcaattcctgtccctacttgaccctcaaaggcaaccactgttcctttttctaccataagatttttctgttctaaaactttatataaatagagtcacgcaacatgtacgcttttctacaaggcttcatttttttattgctgttcttttttattgctgagtagtattccactgtatgacaatattacagtttgttttcttaatttcctattattgatagatacctgggctgtttccaggattggccattataaataaagctgctatgaccattcttacgtaagtctttgtgaacataggttttcatttctttgcagtaaattccttggattagaattgctgggtcacagggtagttttaaaagaaactgccatacctttttccagttcagttttattgtgccctgtattttgtattttgatgtgcataaaggtgtaaactatttttatgatccatattgaagtattagaagaagtgagtttggaataacaatggcattgttcatggtcaaggatgacaattggaactatctgaggaaagcaaagacctgtctgccccagacagctcctcaaggggttcctatgcctgaaactttagcaatatttcactccttgaaaggttaaagcccaaccatggtgatatgttagctagaagaaacagcactggtttgtttatgttactaactttcaccacccgttttcagtaggtaaagtaagactgatcattgaacagaaaaggttatttctgtgatgaggttgagggggtagtggaaagcatgtattgctagtaagccccaggtacagctatgtgagagagagtcacctggacagggaagtcccccaaatggtggccagaagagcagaaaacggggtgggaaaaattctacctcacagttttgcataggggatagctatgcttttacgggacattttagcgtttaaaaatattttcaatattgtctctttattcaataccacccagctgtagttttttcacactctgatgactctcttatccactcttttacctctcccagctgttctattacatacagcattcacctgtattagtctatagaattataatcatctgtgtgtttctaatgctcattttcaaaaatatgtatggtttattcgatttttcctattaaaattttaagggctgggaaatttggcttctactgtaaatccttataatgttccacacattgtaaatatgcaataaaaatgttaacaactawaaaaaaaaaaaaaaaaaaaactcgactcgtgccgaattcggcacgagcggcacgagc

SEQ ID NO: 40 - DNA, 720 bp, Homo sapiens
ccacgcgtccggggaaatggcagatactgcatgtgattctgatgtcctgcttcagctggtgcttgtctggctgggtgaagtgctaggtgtcattggggactgtccagagctagttcagcgctccttcctggtggctagtgttctgcctggccccgatggcaacattaactcacctacaagaaatgctgacatgcaggaggagctaattgcctccctagaggagcaactgaagctgagtggggaacattctgagtcttccactccacgacccagatcatctcctgaagagacaattgagcctgaaagtcttcaccagctctttgagggtgaaagtgagaccgagtctttctatggctttgaagaagctgacctagatctgatggagatttgagtgttggggtcatgagggggtgtggagtgggggtgggaacatgtgagggagggtaaaggggcttagggaaaagggggcataccaggtggggtatttggtttctattttttaattttataccaccactcccccctgaagttgacttacacttccctgtggatttgtggattaattaggaaaaccaatagtaatcacgtctgagccaaggagctggcccattggtcattcacttctgctaaaaacaggtttttgtgactttttttttttttaaatttaaatcactgtgtttggtatttttctgacaaaaaaaaaaaaaaaaaaaaaaaaaa

SEQ ID NO: 41 - DNA, 687 bp, Homo sapiens
  misc_feature (675)..(675): n equals a,t,g, or c
gggtttctccacatccttaccaactcttattattattagtcttttttattatagctatcctagtacatgtgaagttatattgtgatattaatttacactgccctaatgattaataatattgatcatcttttattgagaatctttgatgaagtgtctgtttaaatcttttgcccattatcagttgggttatttgggtttttttattgttgagcactgatagtttttaaaaatatattctgggtgtaacttcactatcagtccattatccttgcaaaggttttctcccagtctctggattgtcttttcattctcttaagagtgtcttttgaagaacagaactgcttattttgatgaagtccgttctttccatttgttcatttctgggttgtgctttgagtgctgtatctaagaaatccttgcctaaccaaagattacaatgattttttcctgtgttttcttctaaaggtttaagttttacatctagatctagcatgtattttgagttatatggtgtgaaatatggatccaagttcttttatgtttttgttttgttttgttttgtttttgcttatggatattcaaatgtttccacaccatttgtttaaaaatactaccctttctcaataaaaaaaaaaaaaaaagggcggccgctctagaggatccaagcttacgtangcgtgcatgcga

SEQ ID NO: 42 - DNA, 1007 bp, Homo sapiens
  misc_feature (995)..(995): n equals a,t,g, or c
cggcacgaggcatatgttcagctatatgttataaaaccagttttcaagtggttgtaccaatgtacactcccaccaacccagtatgcgagttctagtgctccacatacttgccaacatttggcattttccatcttttttactatagccattagtggtgggcatatagtgatatgtcagttttagttttcggttttattttcttgtcctccaaaccattgtagtatctccccaggatagatgagtgatggctgagacctgagacctaggcctgttcctcacatgactgcaccattttacattctatcaatgtatgaggtttccggtttctccacatccttaccaactcttattattattagtcttttttattatagctatcctagtacatgtgaagttatattgtgatattaatttacactgccctaatgattaataatattgatcatcttttattgagaatctttgatgaartgtctgtttaaatcttttgcccattatcagttgggttatttgggtttttttattgttgagcactgatagtttttaaaaatatattctgggtgtaacttcactatcagtccattatccttgcaaaggttttctcccagtctctggattgtcttttcattctcttaagagtgtcttttgaagaacagaactgcttattttgatgaagtccgttctttccatttgttcatttctgggttgtgctttgagtgctgtatctaagaaatccttgcctaaccaaagattacaatgattttttcctgtgttttcttctaaaggtttaagttttacatctagatctagcatgtattttgagttatatggtgtgaaatatggatccaagttcttttatgtttttgttttgttttgttttgtttttgcttatggatattcaaatgtttccacaccatttgtttaaaaatactaccctttctcaataaaaaaaaaaaaaaaagggcggccgctctagaggatccaagcttacgtangcgtgcatgcga

SEQ ID NO: 43 - DNA, 1856 bp, Homo sapiens
ctgactttccacctttcctacaaattccgattactgttgctgttgactttgtgcctgacagtggttgggtgggccaccatgtaactacttcgtgggtgccattcaagagattcctaaagcaaaggagttcatggctaatttccataagaccctcattttggggaagggaaaaactctgactaatgaagcatccacgaagaaggtagaacttgacaactgyccttctgtgtctccttacctcagaggccagagcaagctcattttcaaaccagatctcactttggaagaggtacaggcagaaaatcccaaagtgtccagaggccggtatcgccctcaggaatgtaaagctttacagagggtcgccatcctcgttccccaccggaacagagagaaacacctgatgtacctgctggaacatctgcatcccttcctgcagaggcagcagctggattatggcatctacgtcatccaccaggctgaaggtaaaaagtttaatcgagccaaactcttgaatgtgggctatctagaagccctcaaggaagaaaattgggactgctttatattccacgatgtggacctggtacccgagaatgactttaacctttacaagtgtgaggagcatcccaagcatctggtggttggcaggamcagcactgggtacaggttacgttacagtggatattttgggggtgttactgccctaagcagagagcagtttttcaaggtgaatggattctctaacaactactggggatggggaggcgaagacgatgacctcagactcagggttgagctccaaagaatgaaaatttcccggcccctgcctgaagtgggtaaatatacaatggtcttccacactagagacaaaggcaatgaggtgaacgcagaacggatgaagctcttacaccaagtgtcacgagtctggagaacagatgggttgagtagttgttcttataaattagtatctgtggaacacaatcctttatatatcaacatcacagtggatttctggtttggtgcatgaccctggatcttttggtgatgtttggaagaactgattctttgtttgcaataattttggcctagagacttcaaatagtagcacacattaagaacctgttacagctcattgttgagctgaatttttcctttttgtattttcttagcagagctcctggtgatgtagagtataaaacagttgtaacaagacagctttcttagtcattttgatcatgagggttaaatattgtaatatggatacttgaaggactttatataaaaggatgactcaaaggataaaatgaacgctatttgaggactctggttgaaggagatttatttaaatttgaagtaatatattatgggataaaaggccacaggaaataagactgctgaatgtctgagagaaccagagttgttctcgtccaaggtagaaaggtacgaagatacaatactgttattcatttatcctgtacaatcatctgtgaagtggtggtgtcaggtgagaaggcgtccacaaaagaggggagaaaaggcgacgaatcaggacacagtgaacttgggaatgaagaggtagcaggagggtggagtgtcggctgcaaaggcagcagtagctgagctggttgcagstgctgatagccttcaggggaggacctgcccaggtatgccttccagtgatgcccaccagagaatacattctctattagtttttaaagagtttttgtaaaatgattttgtacaagtaggatatgaattagcagtttacaagtttacatattaactaataataaatatgtctatcaaatacctctgtagtaaaatgtgaaaaagcaaaaaaaaaaaaaaaaaaaaaaaac

SEQ ID NO: 44 - DNA, 802 bp, Homo sapiens
ggcacgagagccagcagaggcgagggaaggcgtcactgccccggcggggagacgggcaggacgccctgccccgcaccagcagcctccgccggggcgccctcagctccctgcttggctctgtctctccacacccggcagggccgcgggctgccccagccctgggggtcgtgggcagctgctactcagtgccaaccccgtggggcacagagccatatacctcgctgtccggcccccaccccagcctcgccttcccaccccatcgtctccacttcaggaaaagccgcactttacacccccacctgcctcttccccctccatccctgctccccgatcctgagcggttggggtggggtccctcagcaaccccaggcgtgggtttgaggagacaggtgatttacatcccctttgctgtcctcccccggtaccaaggcagggagcctccggaggagccggccctgctggccacgcaggggccagactccagcctgtttccccagccctgcaggtcttccttctgtgggaagcttcctagcaagatggcttggagtcctggtccccctcctccctggccctctcgttcgtttctgtttctgtttacacgttggagtggggtcctccgtgggcggcggcgcgccctgccccgggtgtcgtccggcctcttgtgctcgagcccctttccgagttggactcgaccatccctcaccccaccaaggaccacactgtgaagtgataactgccttgaacccccctttgctgttttatttattaaacttgatttgaagccaaaaaaaaaaaaaaaaaa

SEQ ID NO: 45 - DNA, 690 bp, Homo sapiens
  misc_feature (142)..(142): n equals a,t,g, or c
  misc_feature (525)..(525): n equals a,t,g, or c
  misc_feature (677)..(679): n equals a,t,g, or c
  misc_feature (682)..(684): n equals a,t,g, or c
  misc_feature (686)..(686): n equals a,t,g, or c
  misc_feature (690)..(690): n equals a,t,g, or c
ggcacgagtgctttcaggcaacctgaaatggtttttcttcgagtacctgtaaagtactgactctgaagcaggagcgccttaatagttttataaactcaatcaatagaatgaattttttcttttctccctttctttctctctncttccttcctgcctttctttctctcccttcttttcccttcccttcccctcccctccctccctccctccttccctcccttccttccttccctccttcttggtcttgttctgtaacccaggctgcagtgcaatggcaaaatcatagctcactgtaacctcaaactcttgggctcaaggaatcctctggaaagctttttcaaagagatggtcgtaggtcttctcctcaaagatgtttaaaaatgggatcaggctgggctcagttgctcatgcttgtagtcccagcactttgggaggccgaagcaggcagatcacatgaggttgggagttcgggaccagcctgaccaacatggagaaatcccgtctctacttaaaatacaaaactanccaggcgtggtagcacatgcctgtaatcccagctatttgggaggctgaggcaggagagtcgcttgaactggggaggtggaggttgcagtgagccaagatcgcaccattgcactccagcctgggcaataagaatgaaacaccatctcaaaaannnaannnanaaan

SEQ ID NO: 46 - DNA, 1647 bp, Homo sapiens
ggcacgagatgaagccctgtccaggctatgggcatcaagacagcattgccggcggctgagctgggcctctactctctggtgctgagtggggccctggcctatgctggccggggcctccttgaggcttcacaagatggggcccacaggaaggccttccgggagtctgtgcgacctggctgggagtacattggccggaagatggatgtggctgacttcgagtgggtgatgtggttcacctcctttcgcaacgtcatcatctttgccctctccggacatgtgctgtttgctaaactctgcacgatggttgccccaaagctccgctcctggatgtatgctgtgtacggggccttggctgtgatgggcacaatgggcccttggtacctgctgctgctgcttggtcactgtgtgggcctctatgtggcctcgcttttgggccagccctggctctgtcttggccttggcttggccagcctggcctccttcaagatggaccccctaatctcttggcagagcgggtttgtaacaggcacttttgatcttcaagaggtgctgtttcatgggggcagcagcttcacatgctgcgttgcaccagctttgcactggagagctgtgcccaccctgaccgccactactccttagctgacctgctcaagtacaacttctacctgcccttcttcttcttcgggcccatcaatgacctttgatcgcttccatgctcaggtgagccaggtggagccagtgagacgcgagggtgagctgtggcacatccgagcccaggcaggcctaagcgtggtggccatcatggccgtcgacatcttctttcacttcttctacatcctcactatccccagcgacctcaagttcgccaaccgcctcccagacagtgccctcgctggcctagcctattcaaacctggtgtatgactgggtgaaggcggccgtcctctttggtgttgtcaacactgtggcatgcctcgaccacctggacccaccccagcctcccaagtgcatcaccgcactctacgtctttgcggaaacgcactttgaccgtggcatcaacgactggctttgcaaatatgtgtataaccacattggtggggagcattccgctgtgatcccagagctggcagccacagtggccacatttgccatcaccacactgtggcttgggccttgtgacattgtctacctgtggtcattccttaactgctttggcctcaactttgagctctggatgcaaaaactggcagagtgggggcccctagcacgaattgaggcctctctgtcagtgcagatgtcccgtagggtccgggccctgtttggagccatgacttctgggccatcatcatgtacaaccttgtgagcctgaacagcctcaaattcacagagctggttgcccggcgcctgctactcacagggttcccccagaccacgctgtccatcctgtttgtcacctactgtggcgtccagctggtaaaggagcgtgagcgaaccttggcactggaggaggagcagaagcaggacaaagagaagccggagtaggagggagcgggtagagggatgggctctgctcagctattcttgggccagatggggcctgaccgatagaataaaagacttttctacaacaaaaaaaaaaaaaaaaaaa

SEQ ID NO: 47 - DNA, 2392 bp, Homo sapiens
atttcacactggcattaacaggtctagcataagtggcctaggcagtcatcccaggctccaaaatgaagatgtgcaaaagagatgccactgggaatagaaacactgagttggttcagttaggtcatcccctgcagacgtgtcatcgagcaggctgactcccacccctcagccatgccatgggtatgagaagccccttataatgaaagctgccagccctttcgtccttgtttcagagggtgggtcaggtggttggggtgagaacttgctcacggtgcacccaacaagacctgcaggtgcatataagtttagtcccaactgcagggccagaccaaacacttcctgggaagtgtgtggagggctgtgctagaccttcctgagtttctggctaaatcatcagccctgtttggtgcagtctcatgtctctgtggttcccaagctgcatgatcagagccagtgagaagacaggatcagtgacccacagctttggggaaaaacagccccactgttaacttccctcctgcaaacctgggtccccaggccataaggtgggcacactggtgcttacagactgggtggagagccctaccttccaaggtcttgatcccagcctgcctataaggttgggattagcatgcaatcccccttccccaatcctgtctttttaaaatctcaagtttgcacttaaccttgacaacagcaccctctcctactccagtcctagaactcagtggccttagagaatggggtcccctgcactgaaggtccccgccttgctcccagttccatcctggccaataggctgcgcctcaagaggtgaaagagaaaaaagggagggagggaggaagaattatttagaacaaaaggatggctcgagcacgttagaggcaagtgagaggcacgttggtgagaagagcatgtgcatgtttggggtagctggggcctactgtcccttcattagggaaggaggcttccagaagcggatgtcttctagaaagaaaaattgtgtgaaggctgaaaaggggcttggagttttgtctttgttgattagaaagaaggaagaagtcagctctgagtgtttcaggaagaagagagcaggtagaaagggaatttagtgatttaacacccaagggtccagccatagcaggttggaaaatcctccaaatttggccacagaagctggctaggaaaaaactgccactcattgggccacacgctgggtccccatcagttctcaatgaatggtcattgatttacttagcagagagaagtcaccagccacaaaccaatctttgagtttgcaggccctgattccagaatatatgcatccagctcccgggttctcagctggttttgcccacttccctttgactgtccaatccaaagccagtctctcaagttgtatggctcaaagagcagtgaccacaatgggtcatacagtagggacccacctccacaaattagaaccagagttcagactccattgggcacatctgggaggaaggcaacctcctttgtcgtcttgttggtaccagtcattctcaagtatctctgacacctgtggtggttcagtttgctgagcctgccacctggtatgaattagaytgggtgtgatgaacattcatccatggatataccctaccattttgcgttgccttataaccaaggcacactccccataagagtttactgcagagaaagaacagcaaaacagccaccctccttgaatttacaactcattatctgcaacaggttttctttaaatccaagacacaggatgggaaatgggtttccccaccaggtactcagaggtctgcaggaagtgactcccgggcaaggcagacttcagtaatccctgaagcgtgagcatgtggactgcatggctgggtggggactggtggatgtctctggagctccagaaccttggagaattcctcatggaattcccctcccagctcttagtgggctctgtggggtcaggaggagcccttcctccaggttttccttctttcctcctcagcagagaaactggagaaaggacattaaactcagtgcagtcgatttgagtgctgaaatatttccagaatcaatggtggtgctaaactatctccatgtttctagcatttttaatagtggagttggtttgtttttaatctcatcacaaaaatgcagtgcccttggggaagggaccagccccttggcctgccactttccaggtgtcctttatcactttgacgggactctttggtctgcagaaaatgctctgtcttggcatgcttctagactgtaagatttgggttttgttttgtattttatgtttacatgcatcttatatttccctgaaaactaaataaagttttgggcctttttaaaaaaaaaaaaaaaaaaactcgag

SEQ ID NO: 48 - DNA, 1782 bp, Homo sapiens
  misc_feature (1765)..(1765): n equals a,t,g, or c
  misc_feature (1771)..(1771): n equals a,t,g, or c
ggcacgagcccgcctcagcccaacatggcgatgcacaacaaggcggcgccgccgcagatcccggacacccggcgggagctggcggagctcgtgaagcggaagcaggagctggcggaaacattggcaaatttggagcgacagatctatgcttttgagggaagctacctggaagacactcagatgtatggcaatattattcgtggctgggatcggtatctgaccaaccaaaaaaactccaatagcaaaaatgatcgaaggaaccggaagtttaaggaagctgagcggctcttcagtaaatcctcggttacctcagcagctgcagtaagtgcattggcaggagttcaggaccagctcattgaaaagagggagccaggaagtgggacggaaagtgacacttctccagacttccacaatcaggaaaatgagcccagccaggaggaccctgaggatctggatggatctgtgcagggagtgaaacctcagaaggctgcttcttctacttcctcagggagtcaccacagcagccataaaaagcgaaagaataaaaaccggcacaggattgatctgaagttaaacaaaaaaccacgagctgactattagaagacacattagtgcagaagcttccaggctgtagagccctgcttcccttctctgacctcacaaagataaacatccttcacctgagttcgtggccatccacctctgctctcccagacccagtgcctgtgactttgagtagtttgttctaaatgtggtgacaaacaagtcatttctgtaagacattgggtcttactttatgtcatttttagtaacagaactgcaggaagatcaagacaatgttgtaatcccggcaagttgctaactgtgcgtttctcccttcttagaatgaatgtctcccccaaaactggctggcaccagcttcatctgtgatacccttcaagaaatgttctctggttttgttttatgctgaaagtagaacacaagtcacatttcagatggaggctgtaaatatctggcattttcttatattgttttatgttttcttgtttttctcttgttgtttttatcttattttctttggggtttttttgtaatgcctttgtacagctcatactttcctgctgacatatctgatcatctctttcatgcagttgccaatattcataactgaaaataatctggtttatcataagtaaaatgggaaacttgcctctgttttttgcaaggggaggtaaagagtgtttagtaattacctatcttaaatctttctgagttggtagtagattcatgttcaaggaacaggaaaaatggaaaaacataagtttaaatcagttctttttaaataactttttattcttttgtataaataaaatttcacaggcttcaaattctcatgctttacttttaaacccgagattgttttttcacttatttattcatatcatgccttatggaaatttctttttctgtattttctctctttgctggtattcacctgattaaatattgctctaaaaatcaccatggcatatggaaagtctcaaaattataccaaaagtgataacttatgtcgttcttaagtggagtgaaaggatagcatcagtgatagccagtgttgcccaccaggtctccctttcttggagggcttgttggggctgaggaatctgctagtaatcgttacctgcctctagtgctgtggtgaacttgcgacagggtctggctggcacattggaatcacctgagaagcttttaaaatacttcatgncctggnattcccattcc

SEQ ID NO: 49 - DNA, 619 bp, Homo sapiens
aaattttgtttcactgaatatgtttagagatgccgccagaacattaaccattgtttcatttttatgtaagttgaagaaaaatgaagctagatagcatgttctccatttgcagtctacaaaggggaattttattgcttaaattaaagtttcattttctggcctgtgcaagagacttttatatctaaaatatggatgtacgtttttcatattttagagttcattgtatggaaaaataccatcaaagttgaccaaaagattttgaaaatccttaccagttgtttgtcatatgttaaagtcttatggttaattttatttattttatcttgttctcttgctggttattggcagactcagtctttctgttttcacaaagaactcatgaagaggacgataggggaaacccacgtatgcctttgaggctagggactatgttgtaagttcacctgtgatggccaggtcatacagtcatggcacagccactaaccccattcacagcaccaaggactggggacccagaaggcacttggttatggcttccacactaacgaaaatggaaattccttaaattgagagaactgggaccacccaggaaaaaaaaaaaaaaaaaaaaaactcgtag

SEQ ID NO: 50 - DNA, 1693 bp, Homo sapiens
gatccggggtcaccagttattagaggaagtaacacaaggggatatgagtgcagcagacacatttctgtccgatctgccaagggatgatatctatgtgtcagatgttgaggacgacggtgatgacacatctctggatagtgacctggatccagaggagctggcaggagtcaggggacatcagggtctaagggaccaaaagcgtatgcgacttactgaagtgcaagatgataaagaggaggaggaggaggagaatccactgctggtaccactggaggaaaaggcagtactgcaggaagaacaagccaacctgtggttctcaaagggcagctttgctgggatcgaggacgatgccgatgaggccctggagatcagtcaggcccagctgttatttgagaaccggcggaagggacggcagcagcagcagaagcagcagctgccacagacacccccttcctgtttgaagactgagataatgtctcccctgtaccaagatgaagcccctaagggaacagaggcttcttcggggacagaagctgccactggccttgaaggggaagaaaaggatggcatctcagacagtgatagcagtactagcagtgaggaagaagagagctgggaacccctccgtggtaagaagcgaagccgtgggcctaagtcagatgatgacgggtttgagatagtgcctattgaggacccagcgaaacatcggatactggaccccgaaggccttgctctaggtgctgttattgcctcttccaaaaaggccaagagagacctcatagataactccttcaaccggtacacatttaatgaggatgagggggagcttccggagtggtttgtgcaagaggaaaagcagcaccggatacgacagttgcctgttggtaagaaggaggtggagcattaccggaaacgctggcgggaaatcaatgcacgtcccatcaagaaggtggctgaggctaaggctagaaagaaaaggaggatgctgaagaggctggagcagaccaggaagaaggcagaagccgtggtgaacacagtggacatctcagaacgagagaaagtggcacagctgcgaagtctctacaagaaggctgggcttggcaaggagaaacgccatgtcacctacgttgtagccaaaaaaggtgtgggccgcaaagtgcgccggccagctggagtcagaggtcatttcaaggtggtggactcaaggatgaagaaggaccaaagagcacagcaacgtaaggaacaaaagaaaaaacacaaacggaagtaagcagagctgccaggctcccaggagagcatggggactaggaggaagggtgtggcatggctcagtctggcccccttgattaccggcctagcccctgctcacatcacagctgtctgaagaacagtgaggtggagtgcctagaactcccgtggtggtcctgagcagagaggaggatgtcctcctgcctgcctgaaggtctcccatgaaaacactgctgaactgtgttgacactcatgaccctttttttaaaccgttaaagggaagttcggtgttggagcgatactcaatgtagtcagtctacacctggacgtgtgggccacttaagccctccccacccccatcctattcctaaataaaaccaggataatggaaaaaaaaaaaaaaaaaaaaaaaaaaaaaaaaaaaaaaaaaaactcgagggggtcc

SEQ ID NO: 51 - DNA, 1685 bp, Homo sapiens
  misc_feature (1667)..(1668): n equals a,t,g, or c
ctgcaggaattcggcacgagtactattataatggcaattaaattccaacatgagttttggaggggccattcaaaccatagcagtactgttagcctgttagtcacatggccccaggtcgctgcaagggaggtggggaatgcagtcttggctctgggcagctgtgtgctcagctggctgtccctgcttctgggggatgaaggcattgtgagatttttgattaaatctgggccatttccaggctgaaaagctggaccagagcttcagggcttgagtctctcacagagagatttcccaatggggacatcagtcctgccttgggaccagaaagccacatgctgtaggccaggaagggggaagcaggggctgagcccgagggagaaaggctttagaggtgttagcagacagctcagtggcagtggttagaattagggaggcagcgacctcttcttagtgtggtcagagcatgccaagaaagtgtggtctgtgtctgggctgctgaggcccgagggcaagggccaagctcattcataggacagtggccaagaagcggggactgaaaggcttgggaaaagtaaggaagctctgcaggttctgggacacaagtgaacacggtaagcagtggaaggcccaccccaggacagggttagactgggagcactgtctccttgtagcccacaagaggccaggcaggggtgggggtggaggcttcctgcgtcctcctcacctcatgcccaccccctgccctgcacgtcatgggagggggcttgaagccaaagaaaaataaccctttggtttttttcttctgtatttttttttctaagagaagttattttctacagtggttttatactgaaggaaaaacacaagcaaaaaaaaaaaaaagcatctatctcatctatctcaatcctaatttctcctcccttccttttccctgcttccaggaaactccacatctgccttaaaaccaaagagggcttcctctagaagccaagggaaaggggtgcttttatagaggctagcttctgcttttctgccctggctgctgcccccaccccggggaccctgtgacatggtgcctgagaggcaggcatagaggcttctccgccagcctcctctggacggcaggctcactgccaggccagcctccgagagggagagagagagagagaggacagcttgagccgggcccctgggyttggcctgctgtgattccactacacctggctgaggttcctctgcctgccccgcccccagtccccacccctgcccccagccccggggtgagtccattctcccaggtaccagctgcgcttgcttttctgtattttatttagacaagagatgggaatgaggtgggaggtggaagaagggagaagaaaggtgagtttgagctgccttccctagctttagaccctgggtgggctctgtgcagtcactggaggttgaagccaagtggggtgctgggaggagggagagggaggtcactggaaaggggagagcctgctggcacccaccgtggaggaggaaggcaagagggggtggaggggtgtggcagtggttttggcaaacgctaaagagcccttgcctccccatttcccatctgcaccccttctctcctccccaaatcaatacactagttgtttctaaaaaaaaaaaaaaaaaaaaannaaaaaaaaaaaaaaaag

SEQ ID NO: 52 - DNA, 1135 bp, Homo sapiens
gctcaaaagtaggctcttaattctaccagtgataattataccttgcatgcttagtccatttactcttttgctctcttatgcaactatcgtacacttctgcatgcccctaataccttttctccttattcttactatcaaatgatgatcttgcttttcacttttactgtactaagaaagatggaagcaattagaagagcacatttagcacagtctagccaacaaatctgactacctacagccacctacacctatgttattcttgttttccaccctattaccataatgacccatgcgttctacttacaacacattttcacactttgttgggtcatttcatcaacatagaaawacattgttacttctctcatcttagaagaaaatcttcctttgatccaacctcctccgtaagttactttcccatttctttatttccctttgaagcgaaacttttcaaagagtcatctccatttctccgacttggtcttctcccattctctggtaagcccatttcagtcaggattttgtccctgtctctctgcatgcgcacacacacaggtttagcctaaaaaagctctcgaaaaagagcaatggtaagagggactggcactgctgatgtgtaaaatacttagtaaagttatggtagtttttattttatttttttagaatttaatagatacttcacagttcaaaatatcagaaagataaatatgaagatatcacagaccttttctcaccatttttattttttatttgtccttttttcaaatgtagatgtttttctcccttatttcacaacagtaaactataatgattaaaaccatgtagtataggttcagaaatacataggcaaagcagtgggtaaatagcctcaacaaacataaagatacatgaggacttggtagatgataaagatgacatctcaaattggtgggaaattggtgggaaataggtggtagtgacataactggttagctgtctatggggcaaatctttaatatgtcactctttagaccaaaattaataccaggaggattaaagacttcattgggggcagggcaaagtgctgggattacaggcatgaaccactgcacccagcctatttctctctcttaaaaaaaaaaaaaaaaaactcgta

SEQ ID NO: 53 - DNA, 3208 bp, Homo sapiens
ggagagtatgaggcgagctccggcccgggtgcggccgggcttcaggggcccaggcgccgctgctgccaccgccatctaacgctgcgccctggaggcccggcgcgcggatggtgccggtgcggctcgggtgttgaaacgggtgtgccctccccctcctcccctcccccacgcggtggtctcccctcccacccggctcaggcagagccatgtctcggggtggctcctacccacacctgttgtgggacgtgaggaaaaggtccctcgggctggaggacccgtcccggctgcggagtcgctacctgggaagaagagaatttatccaaagattaaaacttgaagcaacccttaatgtgcatgatggttgtgttaatacaatctgttggaatgacactggagaatatattttatctggctcagatgacaccaaattagtaattagtaatccttacagcagaaaggttttgacaacaattcgttcagggcaccgagcaaacatatttagtgcaaagttcttaccttgtacaaatgataaacagattgtatcctgctctggagatggagtaatattttataccaacgttgagcaagatgcagaaaccaacagacaatgcccaatttacgtgtcattatggaactacttatgagattatgactgtacccaatgacccttacacttttctctcttgtggtgaagatggaactgttaggtggtttgatacacgcatcaaaactagctgcacaaaagaagattgtaaagatgatattttaattaactgtcgacgtgctgccacgtctgttgctatttgcccaccaataccatattaccttgctgttggttgttctgacagctcagtacgaatatatgatcggcgaatgctgggcacaagagctacagggaattatgcaggtcgagggactactggaatggttgcccgttttattccttcccatcttaataataagtcctgcagagtgacatctctgtgttacagtgaagatggtcaagagattctcgttagttactcttcagattacatatatctttttgacccgaaagatgatacagcacgagaacttaaaactccttctgcggaagagagaagagaagagttgcgacaaccaccagttaagcgtttgagacttcgtggtgattggtcagatactggacccagagcaaggccggagagtgaacgagaacgagatggagagcagagtcccaatgtgtcattgatgcagagaatgtctgatatgttatcaagatggtttgaagaagcaagtgaggttgcacaaagcaatagaggacgaggaagatctcgacccagaggtggaacaagtcaatcagatatttcaactcttcctacggtcccatcaagtcctgatttggaagtgagtgaaactgcaatggaagtagatactccagctgaacaatttcttcagccttctacatcctctacaatgtcagctcaggctcattcgacatcatctcccacagaaagccctcattctactcctttgctatcttctccagatagtgaacaaaggcagtctgttgaggcatctggacaccacacacatcatcagtctgataacaataatgaaaagctgagccccaaaccagggacaggtgaaccagttttaagtttgcactacagcacagaaggaacaactacaagcacaataaaactgaactttacagatgaatggagcagtatagcatcaagttctagaggaattgggagccattgcaaatctgagggtcaggaggaatctttcgtcccacagagctcagtgcaaccaccagaaggagacagtgaaacaaaagctcctgaagaatcatcagaggatgtgacaaaatatcaggaaggagtatctgcagaaaacccagttgagaaccatatcaatataacacaatcagataagttcacagccaagccattggattccaactcaggagaaagaaatgacctcaatcatgatcgctcttgtggggttccagaagaatctgcttcatctgaaaaagccaaggaaccagaaacttcagatcagactagcactgagagtgctaccaatgaaaataacaccaatcctgagcctcagttccaaacagaagccactgggccttcagctcatgaagaaacatccaccagggactctgctcttcaggacacagatgacagtgatgatgacccagtcctgatcccaggtgcaaggtatcgagcaggacctggtgatagacgctctgctgttgcccgtattcaggagttcttcagacggagaaaagaaaggaaagaaatggaagaattggatactttgaacattagaaggccgctagtaaaaatggtttataaaggccatcgcaactccaggacaatgataaaagaagccaatttctggggtgctaactttgtaatgagtggttctgactgtggccacattttcatctgggatcggcacactgctgagcatttgatgcttctggaagctgataatcatgtggtaaactgcctgcagccacatccgtttgacccaattttagcctcatctggcatagattatgacataaagatctggtcaccattagaagagtcaaggatttttaaccgaaaacttgctgatgaagttataactcgaaacgaactcatgctggaagaaactagaaacaccattacagttccagcctctttcatgttgaggatgttggcttcacttaatcatatccgagctgaccggttggagggtgacagatcagaaggctctggtcaagagaatgaaaatgaggatgaggaataataaactctttttggcaagcacttaaatgttctgaaatttgtataagacatttattatatttttttctttacagagctttagtgcaattttaaggttatggtttttggagtttttccctttttttgggataacctaacattggtttggaatgattgtgtgcatgaatttgggagattgtataaaacaaaactagcagaatgtttttaaaactttttgccgtgtatgaggagtgctagaaaatgcaaagtgcaatattttccctaaccttcaaatgtgggagcttggatcaatgttgaagaataattttcatcatagtgaaaatgttggttcaaataaatttctacacttgccatttgcatgtttgttgctttctaattaaagaaactggttgttttaagataaaaaaaaaaaaaaaaaa

SEQ ID NO: 54 - DNA, 2325 bp, Homo sapiens
  misc_feature (51)..(51): n equals a,t,g, or c
  misc_feature (2323)..(2323): n equals a,t,g, or c
ggccaacggcttcctggccctggacgtggctgccaatcggctgtgggtgantcccggggagcgggagcccgccgtggcgccggactttgtgcccttcgtgcagctgcgcccgctgagcgcgctggctgaagctggagaggcggtgctgctgctgcgggaggggcttctgcgccgcgtgcgttgcctgcagctggggtccccaggtcctggccccgtggccgccggccccgggsccgcctccgtctctggccttgccgcggggtccggccgcgactgcgtgctgctgcaagaggactttctggcgcacaggggccgaccccacgtctacctgcagcgcatccagctcaacaaccccacggagcgcgtggccgcgctgcagactgtggggcccactgccggcccagcccccaaggccttcaccagtaccctggagaaggtcggagaccatcagttcctcctctactcaggccggtccccgcctacgcccactgggttggtgcacctggtggtggtggccgccaagaagctggtgaaccgcctccaagtggctcccaagacgcagctggatgagacggtgctgtgggtggtgcacgtctctggccccattaacccccaggtgctcaaaagcaaagcagccaaggagctcaaggcgctgcaggacttggcacggaaggaaatgctggagctcttggacatgccagcggcggagctgcttcaagaccaccagctcctctgggctcagctcttcagcccaggagtggaaatgaagaagatcactgacacccacacgccgtctggcctcaccgtgaacctgacgctctattacatgctctcctgctcgccagccccactgctcagcccctccctgagccacagggagcgagaccagatggagtcgacgctcaactatgaagatcactgcttcagcgggcacgccaccatgcacgccgagaacctgtggccggggcggctgtcctccgtccagcagatcctgcagctctctgacctgtggaggctgaccctccagaagcatggcccagcaggaccccgggctgcccttcctcttctggttcagcgtggcctccctaatcaccctcttccacctcttcctcttcaagctcagctttggggggctgcagttcacagagaaccacctccagttccaggccgaccccgacgtgctgcacaacagctatgcattgcatggcatccgctacaagaacgaccatatcaacctggccgtgctggcggatgccgagggcaagccctacctacacgtgtccgtggagtcccgtggccagcctgtcaagatctatgcctgcaagcaggctgcctggacgagccagtggagctgacctcggcgcccacgggccacaccttctcggtcatggtgacacagcccatcacgccactgctctacatctccaccgacctcacacacctgcaggacctgcggcacacgctgcacctcaaggccatcctggcccatgatgagcacatggcccagcaggagtaaggaagatcccagtgtctgagtgaactaacagtcctgctttcagccaccatttgcacaagacacccagcactgaaagtcccgctgccaggagcaagggatcctttggaagcacccgccctttgtgccttgttgggggaaaccggtgacgcagaagtgagtgtggatacaccagagtttgcattggaaggaatgagtgtcacgtggggagggaaggggccagtggaccttttgtaagctttccactcaataaaatgaacctgtatggcaaatacttgaaatggaactcactccttccactttccccctttcttctgtcccaggaaatagatcatcttttgaaaagactcttgtctaggaaaagttgtgtccttttcctaatttaacgtgttctttcttaatgaagttttaatttatttttgttgagattttgctagatggcttttgcatcccctgtagatggtgagtgttggcggtgatgtccrtctcggcgttcggaggccccacggtcccgaggctgggccggggccccccagggtggctgtgctgctgcctgtaggagggtgcgggttgtgctgtcatcctcgggtttgcacgcccttttttaggagcctgtggacatctgtggttttgtactttggggcttcaggggaggtgtttaactttctagtgattgatgattgtcaggttttgaaataccaaagcttttttgttctgtttttaaataaatatctttcaaactttmaaaaaaaaaaaaaaaaaactcgagggggggcccggtacccaattcgccctatagtgagggggtantc

SEQ ID NO: 55 - DNA, 637 bp, Homo sapiens
agtccactttctgaagtttcagttatggtcaacagtggtccaaaaatattaaatggaaaacttcagaaataaacagttcataagttttaaattacatgctttctgagtagcatgatgaaatcttgtttcaacctgcttgggacatgaattatccctttgtccatcatatgcacgttgtatatgttactcacccgatagtcacttagcagctgtcttgattattaggttgactctcgtggtattgcagtgcttgtgttcagttcaataaagttaaggttcaataaagttaaaataaaggttcaataaagttaacctttattttacgtaatgaccctagggcacaagaatagtgatgatggcatattgtcatgattttttttattatttaatatcttattgtgcctaatttacaaattagactttctcataggtgtgtatatttaggaaaaaacatagtacgtgtaaggttcagtactatctgcggtttcaggcatccactggggttctgggaacatattccctgtggataaagggggactactatagtgaatttctattttcccttgtatatgcagtttcttttgaatgcctcagtccttgatgtttggctcctaaaaaaaaaaaaaaaaaactcgta

SEQ ID NO: 56 - DNA, 750 bp, Homo sapiens
ggcacgagtttcaacatgagactaatccagggtggtgacatgccggtctttgtagttcttgcttcggggttaatgaggggcaggaaagagttccttagactcctgcatggcatcatgaatgctgctgttcttcttaccttggtttttttcctcctcctctaccttttctaccttggtgtgctgggatcagatcctgcttatcttccacttcttaagaaaagctgacatagaagacacattgggactataacagggctgggtctcctcttccactcccactagacacatgctgcagtacatcagagagtttgtcaccagttaagcaggctcctcggaagtccccctccgacactgagggtcttgtaaagagtctgccttctggatctcaccagggcccagtcatatatgcacagttagaccactccggcggacatcacagtgacaagattaacaagtcagagtctgtggtgtatgcggatatccgaaagaattaagagaatacctagaacatatcctcagcaagaaacaaaaccaaactggactctcgtgcagaaaatgtagcccattaccacatgtagccttggagacccaggcaaggacaagtacacgtgtactcacagagggagagaaagatgtgtacaaaggatatgtataaatattctatttagtcatcctgatatgaggagccagtgttgcatgatgaaaagatggtatgattctacatatgtaaaaaaaaaaaaaaaaaaaaaa

SEQ ID NO: 57 - DNA, 543 bp, Homo sapiens
  misc_feature (529)..(529): n equals a,t,g, or c
  misc_feature (533)..(533): n equals a,t,g, or c
ggcagagcgatcctcccagcaacccacaaggaagcttcacagagaggcagatgccacacaggccacccacccagatgcagagccagattccctgcgtggactggacgggagtttcccagctggagttctctcggccaagctgcctgtgacatggggttggaggtgctccagagagtcatggccacccctggaggaagtgacttgtggctgactgctcaaggggaagtcctgtggcagtggagtcgtcagcattaattcaaataagatctctccctgcacacaatctgctttcgtgttcctgatggattgaatcaagagtgaatgagctcctacttcgcgaaagcaaaacaaactaaacgcatcaaccacgaccgcagagcccccatctctcccaggagggtgagcccatgttgtgttttcatttgtcagaaatctatcttaggaagccattcctgagatctgttctaatttaggccatttttaaaaaaaataatgcagttgaaaaaaaaaaaaaaaaaactctaggggngggnccggtaccca

SEQ ID NO: 58 - DNA, 637 bp, Homo sapiens
ggcacgagcgcgatgtaacacgagaaagcacataccaaggccaccacacaccacctgtccaaaaaggccttcgatacgggataatcctatttattacctcagaagtttttttcttcgcaggatttttctgagccttttaccactccagcctagcccctaccccccaattaggagggcactggcccccaacaggcatcaccccgctaaatcccctagaagtcccactcctaaacacatccgtattactcgcatcaggagtatcaatcacctgagctcaccatagtctaatagaaaacaaccgaaaccaaataattcaagcactgctcattacaattttactgggtctctattttaccctcctacaagcctcagagtacttcgagtctcccttcaccatttccgacggcatctacggctcaacattttttgtagccacaggcttccacggacttcacgtcattattggctcaactttcctcactatctgcttcatccgccaactaatatttcactttacatccaaacatcactttggcttcgaagccgccgcctgatactggcattttgtagatgtggtttgactatttctgtatgtctccatctattgatgagggtcttaaaaaaaaaaaaaaaaaaa

SEQ ID NO: 59 - DNA, 1629 bp, Homo sapiens
ggcacgagaagaaaatgatttggatgattctttaagtgtaaaaaatggtgatagtagtaatgactttgtgacttgcaatgatatcaatgaagatgattttggtgattttggtgactttggctctgccagtggctcaactccaccttttgttactggtactcaagattcaatgagtgatgccacttttgaagagtcttcagagcactttccacattttagtgaaccaggtgatgactttggagaatttggggatataaatgctgtttcttgccaagaggagacaatattaacaaagtcagacctaaaacagacttctgataatttatcagaagaatgtcaattggcaagaaaatctagtggaacaggcactgaacctgttgcaaaacttaaaaatgggcaagaaggtgagattggacattttgattctgtgccaaatattcaggatgactgcaatggttttcaagactctgatgattttgcagacttcagttcagctggtcctagccaagttgtagattggaatgcttttgaggatgaacaaaaagatagttgttcttgggctgcttttggagaccagcaggctactgaatctcatcatcgaaaggaagcctggcagtcacataggacagatgaaaatattgatactccaggaacccccaaaacgcacagtgtaccttcagcaacttccaaaggagcagttgctagtggccatttacaggaatcagccacttcagttcagacagctttattaaaccgcctggagcgaattttcgaagcatgttttccttccatacttgtccctgatgctgaagaggaagttacttccctgaagcacttgctggaaacaagcactttgccaataaaaacgagagaggccttacctgaaagtggggaattgctagatgtgtggactgagctacaggatatccatgatgcacatggcttgagataccagtggggcggctcccatagcaacaagaagcttttgtcctccttgggaatagacacccgaaacattctcttcacgggcaataagaagcagcctgttatagtgcccatgtatgcagcaggattgggtatgttagagcccaccaaggaaccactgaaaccactttctgctgcagaaaaaatagcttccatcggtcagacagccaccatgtcaccagatatgaacacatgtacatctgatcagttccaggagtctctaccacccgtccagtttgactggagtagcagtggccttactaaccctttagatggtgtggatccggagttgtatgagttaacaacttctaagctggaaatctccacctcaagcctcaaagtgactgatgcatttgcaagactcatgtctacagtagagaagacaagcacatctaccaggaaaccgaaaagagaagagcacctaagtgaagaagctatcaaggtgatcgctggccttcctgacttaacattcatgcatgccaaggtgttgatgttcccagccacgttaacaccttccacaagctctcaagaaaaagcagacggataactgatgtgaattggacagtttctattgcttttccttttttccatcccttccctaccatcaaaagcatacctgctctaattaaaaaaaaaaaaaaaaaa

SEQ ID NO: 60 - DNA, 1076 bp, Homo sapiens
ggcacgagtcctgaccttgtgatccacccacctcggcctcccgaagtgctgggattgcaggcctgagccaccacgcccagcctattttgtgtttttttaaagctaactaccattaagatcattatagaagtttggtataatgaagatttgggtttttcagtccaatgagtttccatattcttgaatgaaaaagatccacatttcatcatttgcctgtttcattttcttttagtacttttgaacttagtttggtcagaaaatactagaattttagtttgatctaaagaaccagcttatataacttgctgttgccatgtacattgtatgtctttgctgtgtcaaataactggatcgattttagctcttttaagtggtgaaagcaatgcattttattcttcaaattcagacattgaatgtgtataaaatgtgtgtgcttacctttaatcctctccccaccgacaattaggaacacgtttctccaattactgttggcaagactaccaagaaaaattgttgaattagaatcccagcaccgggcacggtggctcacgcctgtgatcctagcactttgggaggccaaagcaggcggatcacctgaggtcaggagttcgagaccagcagggccaacatggcgaaaccccgactctactaaaaatacaaaaattagccaggcatggtggtgggcgcctgtaatcccaactactcaggaggctgaggcaggagaattgcttgaacctgggagttggaggtcacggtgagctgatatcacaccattgcactccagcctgggcaacagagcaagactctgtctcaatcaatctatccatcaatcgataagaaccccagattgtatagctacatgttttagcccccttttcaaagtatatgttctccttggtacttattttgacattctgacttttctacatatgctttatcaacctcttaattaaaccatcattgtctattttgagagataactgcgctgcttcccgttgtgtgttttaaatgttattgttcagtttgagtcaaataaaaggatatttaatctgtgaaaaaaaaaaaaaaaaaaaaaa

SEQ ID NO: 61 - DNA, 1652 bp, Homo sapiens
  misc_feature (1500)..(1500): n equals a,t,g, or c
  misc_feature (1527)..(1527): n equals a,t,g, or c
  misc_feature (1546)..(1546): n equals a,t,g, or c
  misc_feature (1614)..(1614): n equals a,t,g, or c
  misc_feature (1640)..(1640): n equals a,t,g, or c
tcgacccacgcgtccggattgttctgtttttctcaccctactatgtgaatatatattctgttagagatgggctgttatctgcaatgtggactcaataccatgggcttgagtttggttagttcatcattagagattttttttcagcagttggtttactttatgagaaaggatcatgagtttaattttcccactgatatatttgtgttctcattgctgagatataagtttcttaatgatttgttacctttttctattttcctagactagtattaaaattttgatggcatatgggtttggttccacttgtagagaataaatgttcacaacttactggtattagcacacacacatcacatgcagaaatggtgttttcttgccacttactctttctcataagatgcttatattcctgtgggcatttgtcttccacactacagcacataatttgatgaaactgattttctgtgcaagagcttgtgtttctccaactctgggttttatggaccacttttcattggtatataggaggcggttaaaacgtggtggtagaatgcaggttttaggttagctgggtgtgaagaatcccaggtctttgggatagtcttggcaagttactcaactcctctaagttagtttcttgatctgtcagatgmcagtaaacctcagagttgtgaaaattaaatggatataatgtgtgtaaagcacttagcataatgctttatacatcgtaaaactttcaaaaataggagtagtaattattacaaagaaatgtgaagaagagtcctagtgggctgcatgttaaaaatagtttttagttaatgaaaattaaatcacatcttagatgtttatcatctgcatggtacttttctggttgctgctttaacctttgtatagttgaaagtctgtaaactttctagtattctttgatttctggcccatttccctcctaccattcacgcttatattttttggttcaagtcaccattccttgcaaaactaattaaatacattcctaaatacataatattgccaatattcattcacatccaccacgtctagatccaagtcttcatcttctttatgctggtctaatttttgctgagccttagaagcaaagacagactccgggggttgatatgggacctccagaatggggattgcacagaataatcttatttttcctctattcttctagtctgttatgttctgaacccacacatgttttcggaaggaccagatggctgacactggctaatgggaaccaaaagacgagtgaaagtaacctggttgtcacatacccccagcttagaggtgcttcaccctgccccaaggtcaatttcttttttctctagagactttaccccattatatcaaaaacctttactacagcctgactttatctgatgttagagtatcattaagtcaagcagcagcatttattgagtgaaaaaagattgtcacaggactggaagagaagcatctgcctttaaaatacagtanaaggccggcatggtggctcatgcctgnaattctagcactttgggangccaagcaagtggattggctgagctcaggagttcgagacaccctgggcaacatggggaaaacctgctntctaaaaaaaaaaaaaaaaaaactcngggggggcccgg

SEQ ID NO: 62 - DNA, 1639 bp, Homo sapiens
ggcacgagctgaaaatggatactgctttagtgatgtctgctttattcgtaaaatgcttatttcttttgctagatgtaaagatttggtgttaacaaaagtggttttaatatgtaaatatgaatgaatgcctttagtttaccctgtttgtctattattaatctgttttcatttatccttcatagaggaggatcctttcatgatcttgaatacatttcattagatattgttgcattttaagaatgaaaatacaactgttttctgtcttagattaatcctgctgctatgagaaactgaaaatcaagaatgtgatgcactttttacattactatataccatacatataccataggttgctttgatacctttcctgtagcacagccactaacaagagtgaatgaattataaaattctttttgggagggaatcaatacaagtaactaattcttagctgatattgtcctatgaaggacaataacttaggaatataagaattctgttaatagtacactttttggccttaaatgtcttctactactgaaaatagtttaaatcttagctttgtttctattattccctctctctgcctcagaaagaggaattgggaagaatggtttaaaggacgtggtgtcattgatttgttgctgatcttttagaaaacatttgtctatgtaagctggggacttattttttgtttgtatatagaggggaaatagtgctgccctgaaccaatcagatttagtttaaatcaaatcaatcaaaactccagctgtttctcttgtctttttacttagcaaaggaaaactttagtgaatgctacttgacaagaagaaaagtcatttctcaagcacatacccaaacttgaagtgattgaacccaaaataatgggtgggaaacaccaaatgagtggagaatgagaaagatgtgtgggccaaagctatctggttatattttgatgttgccaatatcgcaaagccaaaattttaatttgcttatttaatatatttgttggccagagatctatttttatatcaatgttgccttgcatgtatattaaaaaaaaaaaattggaaacgcccatgtagtaatgcctgagatagtcgatggttccttaccacctcactaatttttatgcagtatgaaagctcattctattgccccaactggtgctctctgtttaaagttacagatcttgcgaaactggaactattttataagctggggaagtgatttactttttttgttgtatcttttttgttcttagtctgttagtggctgtcctgtagtgggaaatagtaaaaggattcttcactcccttctcccctcagcaccttcttcaagtaaacatttcttgtgtgctttgaaaaaagtttcagcttgctgtctcttttagtgttttaaagaagtgttatacaaagcattgtttgcaaaatatagggagataatgtagtccactttaatttggaattctgtgtgagctatgatccaagttatcagctctttccaactttaaaaattttgttaaaagcaccttgcttagaaaattttaaatatttatgtctgcaacaattgtctcaaaataataaactgtgcaattcttgtcattaaaaaaaaaaaagatctgaaaaaaaaaaaaaaaaaa

SEQ ID NO: 63 - DNA, 1308 bp, Homo sapiens
gaaattaaccctcactaaagggaacaaaagctggagctccaccgcggtggcggccgctctagaactagtggatcccccgggctgcaggaattcggcacgaggatgaatggtttgcacatattttctcccattctgtaatgtgtttctttgtttattgtttctttggctgtgcagaagctttttcatttgctgtaatctcatttttcygtctttgcttttcttacttgtgcttttggagtcatatccaaaaaatcattgcccagtccaaagtcaagaaacttttccttacattttctttagtagctttataatattaggtcttacgtgtaagtctttaatccagtttgagttgatttttgtatatggtgtgagataagggtctaatatcattcttctttatgtggatatccagtttttcagacatcatttattgaagagactgttctttctccattgtgtgttattggcatctttgtcaaatatcaattgaccataaatgcatggtttatttctgggctctctgttgttccactggtctgtctgttttcgtgtcagtaccatgctgtttttattactatagatttgtagtatattttgaagtcaggtggagtgtgacgcttccaggtttgttcattttgctcaagattgctttgactatttggggtcttttgtggttccattcaaattgaaggattgtttcttctatttctgtgcgaagtgtcatgagaattttgatagggattgcattgaatctgtagattgctttggctagtatggacattttaacagtgttaattcttcaaattcatgaatgaacatgggatatctatccatttattcatgactaatttctttcatcagtgttttcagtataaaggtcttttatctccttggttaaatttattactaagtcttttttttaagctattgttaatgggattgctttcttgatttctgttttggataggttgttgttattatgtaagttttaaagatgaagaaagtgaggccaggtgcagtgctcacgcctgtaatcccagcagtttgggaggccgaagcgggtgaatcacccgaggtcaggagttcaagaccagcctggccaacatggtgaaaccctgtctccactaaaaatacagaaattgccagatatgttagcacatgcctgtagtcccagctacttgggaggctgaggcaggagaatcacttgaacccgggaggtggaggttgcagtgagccgagatggtgccactgcactccatgctgagcgacagagtgagactccgtcttaaaaaaaaaaaaaaaaaaaaa

SEQ ID NO: 64 - DNA, 1891 bp, Homo sapiens
  misc_feature (1164)..(1164): n equals a,t,g, or c
ggcacgagcatgaatgtactgcaagggaacacatttgtgtcatgtgaagagacatgacaaaaacagccctccttaaattatttgtggcaatagtgatcacattcattttaattttgccggaatatttcaagacaccgaaagaaagaacattggagctatcatgtctggaagtgtgtttgcaatctaattttacctattcactctcctccttaaatttttcttttgtgacttttctgcaaccagtaagggaaactcagattatcatgagaatctttctaaatccctccaattttcgtaacttcaccaggacttgccaagacatcacaggtgaatttaaaatgtgctcctcgtgtttggtttgtgagtctaaaggaaacatggattttatttctcaggaacaaacatcaaaagttcttatcaggagaggatcaatggaagtgaaagcaaatgattttcattcaccttgtcagcactttaacttcagtgtagctcctctggttgaccacttggaggaatataacactacctgtcatctaaaaaaccacactggaagatcaacaatcatggaggatgagccaagcaaggagaaatcgataaactacacttgtagaatcatggaatacccgaatgattgtatacacatttctttgcacctggagatggatataaaaaatatcacttgttccatgaagatcacttggtatattttagttctattagtttttatatttttgatcatcctcactatccgcaaaatacttgaaggccagagaagagtgcaaaagtggcagagtcatagagacaaacctacatctgttctcttaagaggaagtgattcggagaaactgagagcattgaatgtgcaggttctttcagcagagaccacgcagaggctgcctttggatcaagtccaggaagtgcttcccccaattccagaactataagttacttccacagtgcatcagtgagatcaatatacacgaatatccccgggcaagttggaccgagccctttgaagaatactcagaagtttattttgtgaatgagtagactggaaaatgtttgtgtccagctgaggatgcacagttggaaagcaggaggaatgctgactggttgatgaaaactagcttaagagcattcattcgctccatgagatcaagggancaagagtgtttgcaagaagccattatgagtcatggaaaaaaagatgatgaaacccatggaaacagcaagagaattcccactctctctcttcttaaaaaaaatctatcattatacagcacagagtggagccaattttttaattttgaggaaccaaaaacaggatcaaatatgaaaaccctttcttttattgggccacattgtagatgctgatttgataattgtttcctatgcagatagattatttttatttcacagattatttaaaagggaagagggcctggttgtttatttatatgtttgtttgcatttatgaatcttgctgccttttagcaccaggatgtttttaaaaaaattcaaagaggccaggcgcagtggctcatgcctgtaatcccagcactttgggattctgaggtgggaggatcatgaggtcaagggatcgagaccatcctggccaacatggtgaaaccctgtctctactaaaaacacaaaaattagctgggtgtggtggtgcgcgcctgtagtcccagctcctcaggaggctgaggcaggagaatcacttgaacctggcaggcagagtttgcagtgaaccaagatcacgccactgcattacagcctggtgcagagcaagactctgtctcaaaaaaaaaaaaaaaaaaaaatcaaagataccaataaaacgaatttaaataaaatacttaagtactttaataaaaaaaaaaaaaaaaaa

SEQ ID NO: 65 - DNA, 726 bp, Homo sapiens
ggcacgagggatgacaaagctcatgaatcggcttttaagaactgtttccatgttggagtatttcatcaaccggagttgggaatggagcacgtacaatacagaaatgctgatgtctgagctgagtcctgaagaccagagagtattcaactttgacgtgcgccagttgaactggttggaatacattgaaaattatgttttgggagttaaaaaatacttattgaaagaggatatggctgggatcccaaaagcaaagcaacgcttaaaaaggctccgaaatattcactacctctttaatactgccctcttccttatcgcctggcgccttctcattgcaagatctcagatggctcggaatgtctggttcttcattgtaagcttctgttataaattcctctcctactttagagcatccagcacgctcaaagtttaagagcatttagccatcgctttttatctggaacctctcagatacctctaaaacagcaaactgtgattctcaagattagaaagtaacaaggaatatgcccaaactgtcaaatgtcacctgttatgtattcgtccctattccttaactatgtatttttatttcagtgagagaaggaaagttgtaaactagcccatagtcacctatattttagggaaaaaaatccaaattgtttcctaacattctattttatgcccttgcgtattaaacgtgaaagtactcccaaaaaaaaaaaaaaaaaa

SEQ ID NO: 66 - DNA, 1118 bp, Homo sapiens
ggcacgagagggttctgacctgggtggatgacgggcaaatggtcctgaactctctgctgtctctctccttaatgtcctctgtctgttctaagctgagatgttagatagaccttcagggatccctgacaaagaggcatctggtcttaactgcttgcttctagtggccatgtgctcattactttcttcacttcattgagactgccccatgtgctagagaggtctcttccatgttgggaaatgcctctgccctcatctgggcagttctgatctgtgttcatgggttatttttcccattgtcagggtgaggcattcactctttggggaagtgaggaagctcatcacagacgagtttgtgaagcagaagtacctggagtacaagagggtccctaacagcagaccacctgaatatgagttcttctggggcttgcgctcctaccacgagactagcaagatgaaagtcctcaagtttgcatgcagggtgcagaagaaagaccccaaggactgggctgtgcagtaccgcgaggcagtggagatggaagtccaagctgcagctgtggctgtggctgaggctgaagccagggctgagtggttccaacaccagcactggctttactggcgaacccagcaccagcacgggcttcagtagtggacccagttctattgttggcttcagcggtggaccaagcactggtgttggcttctgcagtggaccaagcaccagtggcttcagcggtggaccgagcacaggagctggcttcggcggtggaccaaacactggtgctggctttggtggtggaccgagcaccagtgctggctttggcagtggagccgccagtcttggtgcctgtggcttctcgtatggctagtgaggtttcagatttattccccatgtttacagataccgctaataaattgcagtagtccttcccatggagccaaagtacatccttggaatctttgtccacacagcagtcaaggcagttatggccaatcagctgagggtgtcatgtgatggaaaaatctgtttgctgttcctgctttattgtttgctttctgtgtgctgtcatattttggtatcagagttacattaaatttgcaaaaaaaaaaaaaaaaaaaaa

SEQ ID NO: 67 - DNA, 2793 bp, Homo sapiens
  misc_feature (223)..(223): n equals a,t,g, or c
  misc_feature (2782)..(2782): n equals a,t,g, or c
  misc_feature (2786)..(2787): n equals a,t,g, or c
gaaagatacactcaccggagaaaagaagtttctgaagaaaaccacaaccatgccaatgaacgaatgctatttcatgggtctccttttgtgaatgcaattatccacaaaggctttgatgaaaggcatgcgtacataggtggtatgtttggagctggcatttattttgctgaaaactcttccaaaagcaatcaatatgtatatggaattggaggaggtactgggntgtccagttcacaaagacagatcttgttacatttgccacaggcagctgctcttttgccgggtaaccttgggaaagtctttcctgcagttcagtgcaatgaaaatggcacattctcctccaggtcatcactcagtcactggtaggcccagtgtaaatggcctagcattagctgaatatgttatttacagaggagaacaggcttatcctgagtatttaattacttaccagattatgaggcctgaaggtatggtcgatggataaatagttattttaagaaactaattccactgaacctaaaatcatcaaagcagcagtggcctctacgttttactcctttgctgaaaaaaaatcatcttgcccacaggcctgtggcaaaaggataaaaatgtgaacgaagtttaacattctgacttgataaagctttaataatgtacagtgttttctaaatatttcctgttttttcagcactttaacagatgccatyccaggttaaactgggttgtctgtactaaattataaacagagttaacttgaaccttttatatgttatgcattgattctaacaaactgtaatgccctcaacagaactaattttactaatacaatactgtgttctttaaaacacagcatttacactgaatacaatttcatttgtaaaactgtaaataagagcttttgtactagcccagtatttatttacattgctttgtaatataaatctgttttagaactgcagcggtttacaaaattttttcatatgtattgttcatytatacttcatcttacatcgtcatgattgagtgatctttacatttgattccagaggctatgttcagttgttagttgggaaagattgagttatcagatttaatttgccgatgggagcctttatctgtcattagaaatctttctcatttaagaacttatgaatatgctgaagatttaatttgtgatacctttgtatgtatgagacacattccaaagagctctaactatgataggtcctgattactaaagaagcttctttactggcctcaatttctagctttcatgttggaaaattttctgcagtccttctgtgaaaattagagcaaagtgctcctgttttttagagaaactaaatcttgctgttgaacaattattgtgttcttttcatggaacataagtaggatgttacatttccagggtgggaagggtaatcctaaatcatttcccaatctattctaattaccttaaatctaaaggggaaaaaaaaaatcacaaacaggactgggtagttttttatcctaagtatattttttcctgttctttttacttggttttattgctgtatttatagccaatctatacatcatgggtaaacttaacccagaactataaaatgtagttgtctcagtcccctccaggcctcctgaatgggcaagtgcagtgaaacaggtgcttcttgctcctgggttttctctccatgatgttatgcccaattggaaatatgctgtcagtttgtgcaccatatggtgaccaggcctgtgctcagtttggcagctatagaaggaaatgctgtcccataaaatgccattcctattttctaatataaaactcttttccaggaagcatgcttaagcatcttgttacagagacatacatccattatggcttggcaatctcttttatttgttgactctagctcccttcaaagtcgaggaaagatctttactcacttaatgaggacattccccatcactgtctgtaccagttcacctttattttacgttttattcagtctgtaaattaactggccctttgcagtaacttgtacataaagtgctagaaaatcatgttccttgtcctgagtaagagttaatcagagtaaatgcatttctggagttgtttctgtgatgtaaattatgatcattatttaagaagtcaaatcctgatcttgaagtgctttttatacagctctctaataattacaaatatccgaaagtcatttcttggaacacaagtggagtatgccaaattttatatgaatttttcagattatctaagcttccaggttttataattagaagataatgagagaattaatggggtttatatttacattatctctcaactatgtagcccatattactcaccctatgagtgaatctggaattgcttttcatgtgaaatcattgtggtctatgagtttacaatactgcaaactgtgttattttatctaatccattgcttaatgagtgtgtttttccatgaatgaatataccgtggttcatatgttagcatggcagcattttcagatagctttttgtttgttgggaagttggggttttggggggagggggagtattagtacgttgcatgaaatagcttactttataatgatggaattgctttttcttttgtcttgtgatttttttttttgaagtgaaatttaactttttgtgcaagtagtactattatacccatcttcagtgtcttacttgtactgtatcacattccataccctcatttaattcttaataaaactgttcacttgttaaaaaaaaaaaaaaaaaaaancccnngggggg

SEQ ID NO: 68 - DNA, 1974 bp, Homo sapiens
  misc_feature (1967)..(1967): n equals a,t,g, or c
tggttgggatgtggagttgttgctggactctcaggcgaacgtgaagtcattgaagtgtgtgaagctctgtgcttgcatgagggcaagcaaggaatggctgtgctgaggctgctctgggaaactccttgccccttgacctcttttgagagcattcacgtggtcttcttgctcatccccttataaatgtgctttgcctgcctcagcctcatggtcagagcagtggagactggagccctgtttgcacgttctagttgttcggagaaagcctaggttctgggctcaggtccagatgcagcggggattctgttctctgactgtggcgaccttgctttggttcttgttgaagtgaaccaagcccggccaccacgcatggcatgctgtgcttggctccccataagacgtcctctttgggtgcacggtgtcaaagtgtgggcaggagtggagagctggtgccctcaggaggagaccacagcatgtccatcagctcagcagagctcgacagccacaagtcctgagaagctttgaccttgaagggcttctgggagaggaggaatttctgcatggggcgtgaaggcacactgtcccaccacaactgaaccagaagagagtgaagactcccctcttcccatcctctgtgccaggtgccagactgwctccagccaaggtgcaaagacgagattatgagacaggtcctcaggcctgtgttccaagtactcacaggggctctgggtgcccatcgccgggagtatggttcagctgccaccggcactgtccatttgcctgtctgtcaagctcagagcatggataagccacacagcagggcagtgcaccctggcaccatgcacggccagcaagaatcaaggcccgcagatgctaagagggcctattgtcaggggaaggtccccgctcctgcacactctctatggatacttgggttgtgggggctctcttggagagtaagtttgtggtttgtttctggtttacagtggtggctgacaccccttgtaagaaagcattcctgggaagtcttctgtgggtccaaacatgttgctccgatcatcacaggagagcaaaaggccctagataccccctttggaatgtgagagtcttgttgtctgatatttgccactgagctggtgaagcccctctaaagagatctcgaccctggggagcagaattcttgtcatctatgaggggtcctgagaaagacttgtcattttttttcctggagttcttcccattgaggtcctaggatttgcacaccactgtcccacaagagctttcctgcctaatgaaaggaggtcttgtggtgtgtgtctcctctcttctctatagttcccgagttggcccccattgcagcccccaccctgtgggtagtcttccagaagtgatgcagtggtgtgagatgccctacaccttgttatttgggagactttgagagtcattcacttccatggtgactagtgtttgttttgcctgattttatattctgtgttgcatttctccccactccctgccctgctttaataaacagcaaaccaatatctaggaagaatgactgagggatagtattgggtattggccccatggcaggaacagccacttgcatctggtcccggtgccacactgcggtgcttggtgtggttgtggagcctgtccctgcgcgccttgctcccgttgagccacgctgtctggtgggtgattctctgccctgagccaccaccctggactggcccagtctccagagctggcacaccctgcctgttttctctttttagacacaacagccgcagtttggccagccactaagtcccaccagctgaggtccgaggaaagcggggtgactcatttcccttgtccagggcccgaggagagtgaggtgtccagcctgcaaagctattccagctccttggtgttggtttgcaataaattggtatttaagcagtaaaaaaaaaaaaaaaaaaaanactcgag

SEQ ID NO: 69 - DNA, 1331 bp, Homo sapiens
tgccaggaattcccttaaactccacggggctcctttgtatacaacctatatttattcaacctctctcatttccattttgaaaaactggagtagtctgaaactcttttggcttatggtgaccagaaatagtgttctggctggcacctctctaaaagcatcttcttgacgagacataggttgaaatgttaaatgcatctccacttacccacaactctggtgttgtagtaatctgggagcatgcgctcacacaaagccacaagcagccagaaagcttcctcctctttggcataaagcagcagcactgaagtgacaatattcatggcctaaaaaagtgaaagaggatgtcatcaaatacagttgaaaatataagcaattctgttagcatattaaaattactcagttattctcacaagggctggcaaaccttttctgtgaaaagcgagataaatatgtttaggctttggaggctttacacatagtctctgtcatatattcttctgagttttgttttatgaccctgtaaaaacataaaaacctgagtccttgaaccagtaagtgtgcagggtcttccttaacaccaatattcaccagacagagccccgaactcatgctggcaaacccctattccaaaaatttgcccaaaggctatttcacaaagcttttaacctgttaaaatctctcagtgttcttaatccttaattcagtgaggtaaacatttcctttgtaactttccgtaatggtttctataatcaggtacacatggctccaggctctcctgagagaacaacgaaacctttcagacttggagtcctcacccaacatttccatacggagagagatggtagtgataactgagagtgatttaaattctaaagtaactgtagtttattaaaagatattatcagatacctcataaccactctagactcaactactttaatagtcttcttaattaaaaagaggaagatcaaaaggtaaatatgaactttatcatattagaggccaactacctcctgtacttcttttgatctcccagaaaccggtaactgttcatcaggcttctacaattcaatttcaaaaaaggtattttggtttaataggctctttcttgtaagtcttactcattatgttcccaagtgacatcatcatggaaattccacttgagaattaacctgctgatcctagtacatgatgatggtccctgccagttccttagtcatttagcggagataggtttttttaggggtctaccttgtaacaggctctggactaggtattggaggatgggggaggaattcgatatcaagcttatcgataccgtcgacctcgag

SEQ ID NO: 70 - DNA, 2111 bp, Homo sapiens
  misc_feature (225)..(225): n equals a,t,g, or c
  misc_feature (612)..(612): n equals a,t,g, or c
  misc_feature (1142)..(1142): n equals a,t,g, or c
  misc_feature (1203)..(1203): n equals a,t,g, or c
  misc_feature (1245)..(1245): n equals a,t,g, or c
  misc_feature (1765)..(1765): n equals a,t,g, or c
tgataactaaacacacatgtggtgaatcgtcactcatggtcctgatcacttgggttcattgtgcttgtcaatcaaaaggaccccagacgtgcctgccaccaatccccaggctgacccagatgcttctagtgactcagttaggaggatggagggcaaactgacaacaagcaaaattctaattgttgggaaggtattttgggtttcctgcactttgttttatatttnttttttttgagaaaaagatagtcaaaccatccaggcataaaatcattctaatagaaaagctgttgagaatcatggagaaaaaaaataaaccctgtacactggagctcactgcttactcacaggcacttacatcaggatagcagcagcagcggcagcaggagcagaaaaacaggctaatcagaaggaagaaaaaacattctctgaaaacgctaaaatggagcaacagtagtggcctagaaaggggtatcatatgttttggtaaaaataataataataataataagccatgtagcaatggagaattgaaattcctgagagtcactgaaactgttcaggggctcctttcattctcttcttcacttccaaaccctgcaaatcccccacggnagctctttgtatagasataatttctcagactacttagcggagaaattcatacttttatagaaaggtatgtgatgatggtgtatttatgtgtgaaagagaaaagaggaatttactggtctctccatcttcaagaaagaaaattctaagaattttcacatcaccacctacagaccatgacaatgtcttccagaaaaataaacattgttccttttatggcttttagaactagaatgcagaattcaattatttattttaaaatccctaacaggattttatcctggaggagaaagcgtgcacaagtaaaaggaattgtaaatgctaacaaaataaaggaaaaaagacaaaaaggctcattatagaattttcagtatcaggggattctaattctaaactgtggattaaattcgtgtcattgttgattacatcttctgggctgtgaccagtgttgtaaaagaataggagaagcatgaagtctcaaaggcaacttctcttctccatgcccatgggaatatcttagagctcacaatgangttaataaaaagcccctgattccttggatctcatggataaagagctcaccaattamcaggncccacaggaaagaacaaagcagcttcatatcgaaacagaaanaacaaaaaacaaagccctgcaatttgcaaatgtccaagaagtgcatggaatatcagtaaataatggaaaggaatacaatttttaaaaaaataggctctgtgcatatttgaaagtgtctttttttccagataaataattctagatgaacaatttcatacacacagagcatttgaataattccatagaatccattttaccagatctttctgcctaattacaagtctttgaaccagacaccggtacttgaaagatcaatgcctggctgcacaaagcatatataaagcataattaagaggaggactgctcgacagagccacggataacatgcatatggatgtgtgaagtcttcacatgtacacactttatagctgtgatatgcacatcagacacatactctcactgtccaaaatgtctttggctgccattttataaatgaggcaatcaaaggaaaatggaattaaaaacaaataataaggtaaccaaattttagatcatcttcttatttgaatctctgagtatnaagcaagtctatttaactccattttgaagtatttatctctgaaaataccttacttcctatttagatcaaaatttggtacatttctaggaaatacgtggattttaaatgtgaaatgatttgttcaacttgcttctcatttttttaattccaaatcaatataatcaaacattaacactttggactactcagaaagtatatttatactttcaggaaggattatggtagagtatgtacttaagtgggagcattttgtgtgtaaactaggaaggttggcttagtctctgggaggcaaacaaatcgaagtcgcggaattcgatatcaagcttatcgataccgtcgacctcga

SEQ ID NO: 71 - DNA, 592 bp, Homo sapiens
  misc_feature (8)..(8): n equals a,t,g, or c
  misc_feature (451)..(451): n equals a,t,g, or c
tttgcctnctgccatgccttttccctacccgcttcctcagccctcgccacctcccctcttcccacccctgccccaggataccccttttttcccaggccagcccttcccaccccatgaattcttcaactataatccagtggaggacttctcgatgccaccccacttaggatgtggccctggagtgaactttgtgcctggccctctgccacctccaatccctggccctaatccccatggtcagcactggggcccagtggtccaccgggggatgccacgctatgttcctaacagcccctaccatgtgcggagaatgggggggccctgcaggcagcggctcagacactcagagagactgatccacacatacaaactggacagacggcctcctgcccattcggggacatggcctgggtagactggatcttgggctgggactggatgtgccaatggnccttcagggcctgcctggcacctcaggtactgggctagggtgtctgctatgcctggtattgttcttgtccattgctgtcaccaataaaggcatggaagaacagagtgacaaaaaaaaaaaaaaaaaaaaaaaaaactcgag

SEQ ID NO: 72 - DNA, 1010 bp, Homo sapiens
  misc_feature (350)..(350): n equals a,t,g, or c
  misc_feature (584)..(584): n equals a,t,g, or c
ggcacaggtttaaacgaggtgagttcacataacaggaattctggaactgcttgaaaactaggacgattgggcaatatcggccttaactccacctgatggcaggtgacccggatagaaaatggccctgcgtttagccaggatgtggctctccagcttggcttcagtgtgatcacttgtcagtgcgctttctctttcgatagtgaaatccttctctatacctatgttttgttttgtttcttaagttgggaaacagaatgggccagggaggttgagtgactgaagaccaagggttggtgcagcctcctcgccgcgctgcgggggctgggccgcacaggcttctgcccttctcnggtgtccaggctccttgggtratgctggagttktmatgsccgcagttcagtgtgagattttttaccaggtattgcgcttaaagggacatgattttccattttcttcgcccggacaacttgaatgaaatgggcactgttgattccacttctgtcragragcttcggggctcagagaggtgatgacgtgcccaaggtgacgcaactcgtgaacagccgtgcctgccttgggcgcanctccggcgccagagctgggctcttcaacacggcatttagcgcagaaagtcgtggttcaggcagtatgggccgctgtgacaaaacacctaagactgggtagtttataaagaacagacattcaggccaggcacggtgactcacgcctgtaatcccagcactttgggaggccgaggcgggtggatcatttgaggtcaggagtttgaaaccagcctggccaacatggtgaaaccccatctctactaaaaaaacaaaactagctgggggtggtggtgcatgcctgtggtcccagctacttgggaggctaaggtagaagaattgcttgaacctgggaggcagagattgcagtgagccgagatcacgccattgcactccagcctgggtgacacagtgagactccatctcaaaaaaaaaaaaaaaaaactcgag

SEQ ID NO: 73 - DNA, 1219 bp, Homo sapiens
  misc_feature (575)..(575): n equals a,t,g, or c
  misc_feature (582)..(582): n equals a,t,g, or c
  misc_feature (606)..(606): n equals a,t,g, or c
ttttttttttttttttttggacatgtctatggaaggataattccagaagtatcatgcaacggtagccaaggcacaggtcctgtctttaagcagtttatggtatagtggggaaaaggggtggtaaaaacacaaaatacctcccatgcaaatgtcctaactctcttcattaatcaatatctacatgatcccacaggtctacttctttatcttcatctctgcaggactagatatttgatagttactactttcccaatgctaacttcttcatttatcctgtcatattttgtttgtttcagtttttatttttttgtttgtttgtgttctgttttttttagagacagggtctcagtctgtcactcaggctggagtgcactggcacacaaaaagctcagcagcctgggacttctgggcacaaaccctcctcacgcatcaacctccaaagtgggtaggactacaggcatgtgccaccacatctggcaaatttttaaacttttttttttttgcaaagacagggtctcactctgttgcccaagcgagtctggaactcccgggcacaagcaatccacccacctcancctctcnaagtgctgcaatcacaggcattanccaccttgcccagcctgattttgtttttaatatatttcacagtcacattcgctgaaacttacttctcccttattctcttatatttcagtacttttcaacattctgtttggataacgtcacttatctggtgccaaatacttaaatcgtagtctgatctattcccaggaattcagcattaccagtgttctgactcctaaagctacattcttctgcttatctatactcacaaatttcagatctatatcctgttaaatatcacttgcatttttcaaagataccttaagtacaggatatcttaaccagaatcattccaaggaaaatgtgctgctctttccacttttcccaaggttggcaaatggcaccactttttcctcaccctctcgggtaggtatctttggtatctcccactgttctccatagccttatccacatttctgcttagcaaatccctacttttccacccttcaaaccacggctatgattttttgtaacccacactcaagtcctcctctacttcttgtagcatataatcagtctctccatataatgcctctcatgcctttacttttaaacatcaaatctgctcgtgtcgaattctttggatccactagtg

SEQ ID NO: 74 - DNA, 1392 bp, Homo sapiens
  misc_feature (11)..(11): n equals a,t,g, or c
  misc_feature (17)..(17): n equals a,t,g, or c
  misc_feature (26)..(26): n equals a,t,g, or c
  misc_feature (71)..(71): n equals a,t,g, or c
  misc_feature (86)..(86): n equals a,t,g, or c
cttaagaaccncccccnattctttgncccatccagtcttttctaacttggtctggtcttttgtcccatccnttttgaagattttgnccgawttttgamcaaggccaccaacctgcagcaatgamcaaagttccaatgccaaataagtaaagaggggagccaccacgaacccggtgagggcatcgagattttggtttccaacatagcacaagccagtcagttcatctgcatccaccagtctcataatcaagatgacaatggttttcactgcggggatggcccaggctgcaatgtggaaataagagctgtgcatttcaatggcttcatgaccccatttgagtcctgctgccaaaaaccaagtgagtgtcagaataacccaccaaatggagctggccattccaaaaaagtacatcagcaagaaaattattgcacatcctgtgttcttaagtccttcttggatgagaacaggttctgctgcctcttcaaaatcacaggatatcctttcccggcctacagtcagcctgacaataagcaatgctataaatattatagcacatactgagaaatatgatggggcgctcagggtaggaaaacctagaagaatcgatcaggaaggtcagtactgtgaaggcagtggagatgaaacacaggctggcccacacagccatccagatatcagtgaactccttggctgagcggctgtataagccagcatcatagccacacttgagcacacagttcaggctccttttcacccagatgtactgatcagaattggttcccacagagtgacactcttccccaggctggatgggggttttgtgaggtaagggcacctcttcatcacctggcccttccatgcacatgtggttgtggtcgttctgtggtgggaatttgctgcagttcagactctctggccaggcaaatccaaattccttcaggacgggttcacagcgtctcttgactgaaagacacatgccgccgcatgggccaatggggatgttgatcttctctgtgcacattggcacataaacagaacaaaggaagaactggaaaagtaacaaaatgaacacacacaaaaaaaacaatgacttggaagtttgaccaaatgctcccacaaagctgagttgaatgcttccaggcaatctaggtatctacttttaaaccaacctatcgggagtctgtctgtttactctgacctcaaacaagggcgcctgataatccatcacttacatacttttcttagtttggctttagtaatcctttccagaagaatgtacataaataaataaataaaataaatagggtctgaagaattgcataagccctctttgcacaacacttgaaataaatcttaaaaaactgaaaaaaaaaaaaaaaaaaaaactcgtag

SEQ ID NO: 75 - DNA, 813 bp, Homo sapiens
  misc_feature (30)..(30): n equals a,t,g, or c
  misc_feature (54)..(54): n equals a,t,g, or c
  misc_feature (81)..(81): n equals a,t,g, or c
  misc_feature (97)..(97): n equals a,t,g, or c
  misc_feature (807)..(807): n equals a,t,g, or c
tttttaaccccttttagggcttccggggcncggtatggttggtgtgggaatttntggggcgggttaaccaatttcaccccnggraaccagctatggnccatggatttasgccagctcgaaattamccctycactaargggamcaaaagctggagctccaccgcggtggcggccgctctagaactagtggatcccccgggctgcaggaattcggcacgaggtttaggaggaatacaattcaagaacctcactttgaagctaaccatagcaaacctagtttacctctagaatgcaggtgacagtgtgcaaccactcctgtcatctgtcttttgtatgctcttcataagcaatcttcctcttccttcccagttcatttatttagcctctgattcattcttctcttctcccacccctttctcttctaccagccagcctaccaatacttattctctctgaaaggatcttatcctttaccagaagttcagttattacctctaagaaccagtcccttcccttttaaattttcttttccctgaaagagtcagttttatgtattagaaaaatgaaggtatatgttttcctttaaagggattataatcattacagaaaattttaaagttttcaaaaaattaaaaaaaaaacccagaatttcccaaaacctgactatccaaagagaagcacttaatgttatgtgtgtgatcttgagtgaaaatttaaaatttatattagaacattttataaattatccaaactttttgtacgaaaaaaacagaaaatgtaaaaaaaaaaaaaaaaactcgaggggggncccgca

SEQ ID NO: 76 - DNA, 1896 bp, Homo sapiens
  misc_feature (933)..(933): n equals a,t,g, or c
  misc_feature (940)..(940): n equals a,t,g, or c
ggcacaggaccagtggagtgagctgttcatggatgcgctagggcccttcaacttcgtgctggtgagttcggtgaggatgcagggtgtcatcctgctgctgttcgccaagtactaccacctgcccttcctgcgagacgtgcagaccgactgcacgcgcactggcctgggcggctactggggtaacaagggtggcgtgagcgtgcgcctggcggccttcgggcacatgctctgcttcctgaactgccacttgcctgcgcatatggacaaggcggagcagcgcaaagacaacttccagaccatcctcagcctccagcagttccaagggccgggcgcacagggcatcctggatcatgacctcgtgttctggttcggggacctgaacttccgcattgagagctatgacctgcactttgtcaagtttgccatcgacagtgaccagctccatcagctctgggagaaggaccagctcaacatggccaagaacacctggcccattctgaagggctttcaggaggggcccctcaacttcgctcccaccttcaagtttgatgtgggtaccaacaaatacgataccagtgccaagaaacggaagccagcttggacagaccgtatcctatggaaggtcaaggctccaggtgggggtcccagcccctcaggacggaagagccaccgactccaggtgacgcagcacagctaccgcagccacatggaatacacagtcagcgaccacaagcctgtggytgcccagttcctcctgcagtttgcctttcagggacgacatgccactggtgcggctggaggtgggcagatgagtgggtgcggcccgagcaggcggtggtgaggttaccgcwtggaaacaktkttcgsccgcagytcctgggactggatcggcttataccgggtgggtttccgccattgcaaggactatgtggnttatgtntgggccaaacatgaagatgtggatgggaatacataccaggtaacattcagtgaggaatcactgcccaagggccatggagacttcatcctgggctacyatagtcacaaccacagcatcctcatcggcatcactgaacccttccagatctcgctgccttcctcggagttggccagcagcagcacagacagctcaggcaccagctcagagggagaggatgacagcacactggagctccttgcacccaagtcccgcagccccagtcctggcaagtccaagcgacaccgcagccgcagcccgggactggccaggttccctgggcttgccctacggccctcatcccgtgaacgccgtggtgccagccgtagcccctcaccccagagccgccgcctgtcccgagtggctcctgacaggagcagtaatggcagcagccggggcagtagtgaagaggggccctctgggttgcctggcccctgggccttcccaccagctgtgcctcgaagcctgggcctgttgcccgccttgcgcctagagactgtagaccctggtggtggtggctcctggggacctgatcgggaggccctggcgcccaacagcctgtctcctagtccccagggccatcgggggctggaggaagggggcctggggccctgagggtggggtaggcagatgggccaaggtgaccaccattctgcctcaatcttttgcaagcccacctgcctctctcctgctgctcctccagctgtatctgcacctgcctctctgtcctggccaggggtggacaactggggtcccccaaaactcagtcctggcacctcaactgtgacaatcagcaaagccccacccaggcccccatctgggatgatgggagagctctggcagatgtcccaatcctggaggtcatccattaggaattaaattctccagcctcaaaaaaaaaaaaaaaaaaaaaactcgag

SEQ ID NO: 77 - DNA, 1276 bp, Homo sapiens
ggcacgagtttccgttccaggatcttgagtacagacatatgtggttttattgcactttgctttatcatgctttgcagatattgtgttttttacaaattgaagatttttgacaatcctatgtcaagcaagtctattggtgccattgttccaacagaatgtgctcactttttgtcacattttggtaattctgaaatatttcaaaagttattattaatctgttatggtgatctgtggtctttgatgttaatattgtaattgtttgggagcacaacaaaccatgcccatgtaggttgcaaacttagttggtaaatgttgtgtgtaatagttgctacaccaaccagctgttccccaatcactctccctctccttaggcctccctattccttgagacaaaataatactgaaattaggcaaattcacaaccctataatggcttctaactgttcaagtgtaaggaagagtcacacatctttcactttaaaccaaaacctagaaaggattgagcttaataaagaaggcatgtcaaaagctgagataggccaatagctaggcctcttgttccagttagccaagttgtgaatgcaaaggaaaagtccttgaagaaaactagaactactttagcgaatacacaaatgataagatagtgtgacattctaattgctgatatggagaaagttttagtagtctggataggagatcagccacaacattctcttaagccaaagctaactctcttcaattctatgaaagcttagaggtgaggaagctgcagaagaaaagttggaacctggcagaggttggttcatgaggtttaaggaaagaagccatcctcatagcataaaagtgcaaggtggtgcagcaaatactgatgtagaagctgcagcaagttatccagaagatctagctaagattattgatgaaggtggctacactaaacaagagattttcagtgttgacaaaagggttttcttttggaagaagatgccatcttggctttgaatagctggagagaataaggaaatgactgacttcaagggacaggctatcttgttaggggctaatgcagcaggtgaccttaagtcgaagcccatgctcatttaccattctgaaaatcttagggcccttaagaattatattaaatctatcctgcctgtgctttataaatagaacaactaagcctggatgccagcacatctgtttatagcatgatttactgaagattttaagtccactgttgagacttactgctcaaaaactaaaaaaaaaaaaaaaaaaa

SEQ ID NO: 78 - DNA, 1807 bp, Homo sapiens
  misc_feature (1807)..(1807): n equals a,t,g, or c
cccgggatcgacccacgcgtccgctttacatatcatactttggggttaaaggagattcctcagactcatccagcccttgggtgctgaccagcagagtcactagtggatgctgaagttacatgagctacatgttaaatatttaaagtctccaaaataaaacaccccaacgttgaccttacccggctgatggttagccccttgctgcctgctccatgtgtcttatgagagcccgtagttacagtgtcctctaatttgaaatccataagttaacaagtctatatcaggtgcagctggctttgattaaaggccatttttaaaacttaaaaactcaacacctcacagattataatagaaaaagaaatggcctcagtttgatctcgttcagaatgacccagattgtttctgctttgggtgcagctgtttagttcagagttatattacagagaattattttctgagataatcttaaactagaatgttcaaaactaattgataattgaagtatcaagatacgtagaacacctcagagatttttcttcaggaacttccacaaactttgaatccttgtatctttatttggtattcatactactagtagcaaaatacaggttttttgttttgttttgttttggcttcatagagtatctcaaattgaaacttttctgcacaaagaataaaattaaggattttataaactcaaattggcacctactgaattaaaatacataaaatcatttaaatataattcagcatatgggaagtaacattgcactaatatggaaatcactgccagagacagtctattttcttttaatttgttactacttagtcacaaaccccacattattccagtttggaattacttattaaggagaattggaaatacatatgcccatgcttaaattttatagctttaatttgtgttatttctttattgacgggaagaggtacatctttttttccttactgaaaacaaatatggattaattgcctcaaatttgtataagtgattggctagtgattcttgttttcagaagggagagtggtatagatagaaaatgacaaagatggcaatatacacttaatgttgttattgtatgttgttactgaagtacttagatttttaaaatttcaaatcctaaatcacttcttgtaggagggttttcattaactgcagtatatacagttcactacatatgggttgtttgagttttttgtgtgctgtatttctttctgttttttaatacctggttttgtacatatctaactctgttctcttttggttgttcagaaactggattttttttttcttaagcagtgcttaatttgtgttttttaattttgattcagaagtagtcccagctcataggtgttcatactgttacatccagaacatttgtcaggctctctgtcagctttcatgtacatatggtatagaaaccatggagttaggcacttcctggattttttttttatgagaaaaatactgtatttaaaatgtaaaataaacttttaaaaagcaggcactaatatatatttcttccagcctttgattacaaatttgtccttgcacatgttaagatgaattatctcctaaaaatatcattgttcttgggagcagtgtatgttactttacatagcagcggttcctgtcatgtgttcatgtcagaatatttttggttttaaactttcttattgcctttggctgttgattagtacagtacaagtgcgatttcaaaaagatcttgaaagtaatatatttaatcaattaaaatgtttatctgtaaaaaaaaaaaaaaaaaaaaan

SEQ ID NO: 79 - DNA, 1732 bp, Homo sapiens
  misc_feature (6)..(6): n equals a,t,g, or c
  misc_feature (56)..(56): n equals a,t,g, or c
  misc_feature (83)..(83): n equals a,t,g, or c
ttaaantggtttttggggttttattcccaaaggaaaaccttccaccaaaggttacntatttacctaggttcaaaattatattntttaggaaggtgccctggatttttggtcaggagatttcttacmaaccatwttaaaaamcamactttgaaaagtmtcctactaccagaagcacttagactatcacagaaaaatacatgaagagttaatgtctgagataagaccagcagcttatagttataagaaaaacacactgtacaatgtttgggggggaaatctgttgtttatagaaaagctttacctttttcttatttatcctcagataacgttgtgaaatctgctcatcagtaaggatgatatggaaagaattctctttttctatctatggtttatttacatattaaaattttactcagtttattaagtacacatatgataccacactagatgcaaatatatatacaggctatgacagtcaatgttcaatttaatactggtcaataaagtgaatttattcaaatgtaacaacttcacttgaattttttggatcacacatatcctatataaagccatctggtttctaatattatgcacaacacattccattttaattataacattcatctacaagaaaaacaaggaaaacaattcaaaactatgttagtaattagttcttgtttggtccattgtacgcaatcaggraagtataggacttaattagttgctatcaaattgaagcmatgaaaaaggtaaaaatcaagtacttaaaataaaaatatggaaataaccccccctccccaatactwwagggacacwwaacaacaactactgtcccatcaagcaaaagtggaaaacaaacagagcatgtgtgtaacctcacttaccatctttttgttattctacttcaacgggtcaagaaaggtgaagagagagaaggtagaagtaagagtcagaaaaggcctaaataaaatcctcactgaaatgtttaaacatacaagcaatagagacaattaggttgaggtcagatgcagtactactatatttaatggagttaataattagggccaaattaacatggacagttattcctgaatgcaaattaactcattaaacgatttaaatttccatttttcagtctaccacattttagctaacaagacacaaaaagtataagtcaaaatactaagcacaggaattccaaaaagtaagcttctttaattcattactgaacttaagaactttaattaagaaaaataaatgataacagcaaaggtctagctgagtaggcagagtgttagatagctcagggttgtttttccaagctctagtgttcaagttaaatttatttgacacaggtatcttttgctgktttctactcgaagaataatttaacttgataggcttacaagattgcacagagtgaacagaattgagccaatagaatacagaatgacaaaccatacmagcaaatgctgctagggaattccttggcaaaaatgktttattagcatactgacaaatttgatttctatcacttggccttaaacacgaagaaagtgggcatgaagagatgtgtagttatttgtgcctatgttggaaaataaatttatggctatacatgatatttcttcatacctcaaaaattttattgtccagtatataaaaaagccattctttaaaaacctgacactgaataaaaagtatagccttcaacttcattaaaccggcacga

SEQ ID NO: 80 - DNA, 1419 bp, Homo sapiens
aattcggcagagatttaccttagcttactgtaatttttttaacttaataagctttttaacttttttttaaactttctgtctttttaaataacacgtagcttaaaacagcctcataatatggatccactgtagtatatgtggtctgttgtgttgacagaaatgtcattaggtggtgcatgactaattacttttgggcctcagcctcatcttgtactgtttttccccttgctttcctttgctccagttgtgtggggcctccttcattctcctgtgctcaccatattctccaccaggaatcttggcacttgttcttttcctctgcctggaatgcctttctttgttaacagttattcctggtctttagagtttggctcaagcatcacttttaatgaaattttctgtgtgcgtgcttgcacattttcataagataaagagattggactgtactgatattcatcaccgactccaacaagagcgaaactccatctgaaaaaaaaaaaaaaacaaaaaagttacaactttggcaccaactcaggcctaagtgtcatcttccctgaattactcctgtgcttctgcatgcatctatctcttctctattatctctttggatgtctatgtccccttccaaactctactgtattaaatgtcctgttatgatggtcactcacaccctctcaggtgtttaggaagcccaataacatcaattgaggacgtaagtaagagatccagtcctcagcctgtaatcacacctttctgccccctgaaaagatttaccaccataatctgaagcatgtcctcctaaatggacccataactaatcatagttcactcattagctttcatatattggatgtctccagtatcaacaccctcccagataccccatccagtatgtctagttatcgatttgatgccaccacttattggtctctgattcttcatatggccaaaacaaccctctggatatccacagtgaatattatgtcaataccaacgtcatctcagctgaagcagtgtgcatggttacagctgctaagatcaaaaaccttgggctcatgcccgattcctctttcatgctcctatcatccacattagaaaatctagctgtctgcaaggcatggtggctcgtgcctgtaatcccagcacttggggaggcagaggccggcgagtctcctgaggtcgggagtttgagactagcctggccgacatggtgaaaccccgactttactaaaaatagaaaaattagccgagtgtggtggtacatgcctgtgatcccagctactcgggaggctgaggcaggagaatcacttgagcccgggaggtgaaggttgcagtgggctgggattgtgccactagactccaggctggacaagagagtgaaactccgtctcaaaaaaaaaaaaaaaaaaaaaaaaaaaa

SEQ ID NO: 81 - DNA, 1052 bp, Homo sapiens
gctgccgtgtgcacggccgtctggtctctctcccacacgtgtgcgcaacctgtcatggagatgtgagggccttgtgtgtgcttctgtgtgtgactgtgtgactgcgggtccagacccccgcctggcggtgatgtgggcccttaaatcactcttcctgctcaccccctccccagtgattcggttttactttgcagcactgtggatccgggcagctgggcggcttctcgggggtgggggatcccccaccccgcccacaagtctggccccagggttctcggaggcagggggtctctgttagtgcgctccctccagctgcaggcacatagcccgagctcacagctcgcctgagtcgacgccggctggggtgaaagctccaagtgggcctctggccttcccgctgctctgggtccagagtgtctggagcatgtggcacagaccagggccccttgtcctccgaggagggtgggacatcctctctgtctcacgcccctgggtggagattctggctggcctcctctccctgtttgccaaggtcaaagtgggccaagggtgcaggtgcttagcctggttccctctcccgggccccgaggttctgtgggttgggcagattggagacaggactcgtgtaagggctctgctggggtgaaggatggagacagagaaaatcaagatcctttcacaagttaattctacgtctgctgagccccagcccccgacacatcaccctgaggaggtgctaggcttctctgggccccctgtgccccatccacatgttgcagagtaaatctggccccttggacctggggtccgagatggacgcctggctgcccctcctggactgcgggtgacagctggcgagacactgcggggcttgggtgcggggagatggagtggggctgagctgcatttttccagccaccccacatcccacagaaggggagtcatggtcagtgccttgagctggaaagacgggcaatgcttccggcccacaccaaccaagaaaaccaccaggggctcattcatcctctcaaaaaaaaaaaaaaaaaactcga

SEQ ID NO: 82 - DNA, 992 bp, Homo sapiens
  misc_feature (405)..(405): n equals a,t,g, or c
ggttccagcccaccccatcccacacccacctggctcatgtctctctgacctcagttcccgcctgcacccccagggatgggtgggaagggtctagaaggtatggacctggagtgggtcacttctgggtggtaatctggctagtcagaagcatgagtgatcgaatgaacaagaatgctctgtaaactctgagacctttggaggctgcagagggagaggggagcagaactccagagatctgcatcttgtcagaggagtccatcaagctgatttggggagaagtccccgcactcccccagctccccggctctcccagcagctcatctacctgcccccaccctggggcacctgcaaagctgttaccatggactcggatttggatttcttcgactcctacagcatcactgnctgccgcatcgactgtgagacgcgctactggtggagaactgcaactgccgcatggtgcacatgccaggtcaggcykggggytccgagcatactcctggggtcctgggsctttgctgccyttcactagctccccatccatatcaatctcccttcccatcttctcccagcttacaccttctaggcctttggtactaccaccatcaccagaccccttgaattcccatcctgcatcattgtcttttctcctctgtaggggatgccccatactgtactccagagcagtacaaggagtgtgcagatcctgctctgggtgagcgcccctggcctggggcagtctgggggagggaaaaggtgctgccagccacgtgcgcaggagtttcaggtcacgctcccagaagcctcacataactcctggactgggctgcaccctctcttgtgtctgacattaaagctgagaatggtcagtcatggtggcttacacctgtaatcccagcactttgggaggctgaggtgggcaaattgcttgagcccaggagttcgagaccagcctggtttcatggtgaaaccctgactctatgaaaaaaaaa

SEQ ID NO: 83 - DNA, 1229 bp, Homo sapiens
ggcacgagaaaatacaaaaattatccaggcgaggtggtgcacgtgtgtagtcccagttactcgggaggctgaggtgggaggatggcttgaatctgggaggtgaagattgcagtgagctgagatcacaccactgcattcagtctggataatagaacaagactctatctcaaaaaaaaaattgtatactttattgactcatttatgtctgatgggtatttttgattacaaattgtttagtcactactttaaggcctgctttatttttttcttaattttattgactcatttatgtcttagtcttttttattacaaattatttattgttcagtcactaccttagagcctgttttattttttcttaattttattaaaggatgatattgatgatgaaatgtcttacgatgatcatttagaggtttattttgaacaactggcaattccacgaatgatggaataaaacatatgaagtagaaggactggaacctccagaaaaagtactttaagttacctacaggtgatcctagtcaggtatgaattgataagaaatgcctgcaccttccctccttcctatctttcccttgcctacagaaaattaaaaggcaaaacaatggacatctacatattcttcattcagatcaaccagtggctagcatttgccaccttttgcagtttctttctctttccataagtactttcttctctgaatcatttgaaagcaaatgaaaacagtagcctaaagtgtcagtttcaaccagaaaataacagctctgatttctcatggctcacactcttctgaaacgactcgggtagaggctgaggaaggccgtgttgtttgtctacctgggactagtaagtatagaaatagaattcctttgttcttaaattctacctttgactttacttttaaaatataatttctttggtacgatttagctcatgcctgtaatcctagcattttgggaggccaaagagggagaattgcttgagcccaggagtttgagaccagcctggacatcatagggagactctgcgcacgcacacacacacacacacgcgcacgctaaccgggaatggtggcatgcgactgtggccccagctgcctgggaggctgaggttggaggatcatttggacccaggaggtggagactgcagtgagccatgattgcaccactgcactccagcctgggtgacagagcaagaccctgtttcacaaaaaaaaaaaaaaaaaa

SEQ ID NO: 84 - DNA, 1811 bp, Homo sapiens
  misc_feature (1804)..(1804): n equals a,t,g, or c
tccacggattctctgccacaaggatatgtggctcagtgtggtcaagttccttccaaagaacctgcacttggtctgcgtggacatgccaggacatgagggcaccacccgctcctccctggatgacctgtccatagatgggcaagttaagaggatacaccagtttgtagaatgcctgaagctgaacaaaaaacctttccacctggtaggcacctccatgggtggccaggtggctggggtgtatgctgcttactacccatcggatgtctccagcctgtgtctcgtgtgtcctgctggcctgcagtactcaactgacaatcaatttgtacaacggctcaaagaactgcagggctctgccgccgtggagaagattcccttgatcccgtctaccccagaagagatgagtgaaatgcttcagctctgctcctatgtccgcttcaaggtgccccagcagatcctgcaaggccttgtcgatgtccgcatccctcataacaacttctaccgaaagttgtttttggaaatcgtcagtgagaagtccagatactctctccatcagaacatggacaagatcaaggttccgacgcagatcatctgggggaaacaagacgcaggtgctggatgtgtctggggcagacatgttggccaagtcaattgccaactgccaggtggagcttctggaaaactgtgggcactcagtagtgatggaaagacccaggaagacagccaagctcataatcgactttttagcttctgtgcacaacacagacaacaacaagaagctggactgaggccccgactgcagcctgcattctgcacacagcatctgctcccatcccccaagtctgacgcagccaccactctcagggatcctgccccaaatgcggtcggagcgccagtgaccctgaggaagcccgtcccttatccctggtatccacggttccccagagctttggggaccacgcgaaaacctccaagatatttttcacaaaatagaaactcatatggaacaaaataagaaaccccagccatgaaatctaccatgaagtcttcaagttcatgtcactgacaagcttgtgcaaagcagccaccttggaccataattaaatcaaggacattttctttgagacattccttatagttggagactcaagatatttttgttgcatcaggtgtattcccttgcatgggcagtggcttttataggagcattagtcctcattcgctgaaccctgttgtttaggtctaatttaagttttacatagagacccatgtatgactgcagcccattggctgcaagaccagggaggaaagtggcaagctgtagaaaatgtttacacgcatggaggggcattgctccagccctcagagcgtccggagcagcaggrtacatgggtgggaggttcattcagcacccaccagtcaggtatgttctgagtgaacccacagcagtcgcagaatgagcacctggcagggtgggtttcctaggaataatttattatttttaaaaataggcctaataaagcaataatgttctagacatctgtctaagtaatcagactcaggttccacacacaagcaacaactcgtgggcctcttttctatttcaatgtgctactaagaacccttggatgtaacatactagttagttaatgaattctgtgaattctgtgaagagtaatgtgattgaaaataagtctaaacagctgtaaaagtgaccacaatgacatgaaataaatttaataagtctagatcagcaaaaaaaaaaaaaaaaaaaaaaaaaaaaaaaaaaaaaaaaaaaaaaaaaaanaaaaaaa

SEQ ID NO: 85 - DNA, 1305 bp, Homo sapiens
ggcacgaggggattttgggcccaggagaaacacttacattctggtgccttgtcttttgcttgtacagaatctgtagtgattttggtggccagtaaatgccagccatttctcaaacccacctcggaccacccagagtttcctcttggtccctgtctactaagagtcatgaaggcagggtgctctgcccactccatcaccatgaagcctgggattgggccacgaggaacaaacagcagatgcccttgccttccagtccaagaaactgcttcttgaaatggatttaacaacagccactcaccttttcctcctgagcctgctctctgatcagctggatccccacgtgagcaacagctggcccaggaaaggctgcctgcagaggacaggtgtgttgggcgtgttgagagccttgaagtgactacctgtatcttagatctgagtacaagcctgaggcttttgcttttgtcttttttgatgagggctcactccagcttcatatggtgccaagacgttgctgcttctgaggttggctctaacatctctggtctttagagccaccagatctctctggcccatacagatatcagagcagacggaaatttctccctgcaagcgctcagtctcatcccagcaagtcaaagacctcctggccaagtcctgccctcttaagtctccaggaacgctgcagggaaaacccagctgaggcctgggctagactgtggtgaggtcactagattctactgctcttcccccacattaataccttttccttcctcagagagaaatctcccctaacctgaattgcagccccctccagtttgctttcctttggccttccagaccccaggaagttggccttcccttcctagtgctatggtttctgccattggccatgatttcagggagctggctgaggccggctgaggccacacctgtgccagtggggcttccctggtgctgcagcacttgtaaaccacacacacagcctctctccctggacatacgttagcacattggcattcagtattggtggcctggcatggtaggtactacccaatgaagagtgtactatatattttcattactataggccatacttatacagacgtgtatatatatttatataagatctacctatcttaggatggaaccttggggaaaaataaaattgaggggaagtaaaaagtatgtaacacttccagttgtgagccaagattgtaaccagagagcagccaggagcttcctgtcagtaaccatgttttcaataaatactctttcatgtaaaaaaaaaaaaaaaaaaaactcgag

SEQ ID NO: 86 - DNA, 1434 bp, Homo sapiens
ccacgcgtccggggagattgagttagagttgtgatgtttgggctagaggatgacaagatgagctgctttgtcggttccagatatctccagcccagcagagatggccctctgcagtctagccgtattttgcccttccaccattcttggctgtgacctggtccagctgggccctgaatgaatgtttgcttctcaggccagtattctcccctcctcaccaagccacctccacacagctctaaggaagctcccccaggtccaggcctcaggggagccctgccctcaggccgaccctactgccttttcagagccctccctgccctcctcggaagttgctgatgaacctcctaccctcaccaaggaagaaccagttccactagagacacaggtcgttgaggaagaggaagactcaggtgccccgcccctgaagcgcttctgtgtggaccaacccacagtgccgcagacggcgtcagaaagctagcaccatcccggccctccgcctcctggccctgcctctatttattgcattctggttctggccgcgccgcgttgctggggtaagggcaagcactggggtcaagagcctgcacacatgagccttccgggctggaaggctggcgtaggacttggggctgtagcatcatcttcctgaccctggcacctgtgtctacttgctcccgagaagaggagcgctcatgtcttttttgcaccccaagttggctggagcatcggccaccccaagattcatctgtgacctccaggcagcagtctctgctccagaatctctggacggagctgctggcagcttctgcgagaagagagagatgtggaaggcaccttttagaagagagcgtgcctcaggttactgaacttgaacggagactgtagactcccggactttcccctaggactgggggccctgtaggctgctgttggaggactgggtagagacattggagggaagggaagggcttttctccacacaagggcagagagtccgtctagatttcttgctgtcctgccagctctgcccatgcctgaggtggtcctacctctcacgggcaccctagctgctgacagccctttgtggccgccgtccccatcccctgccctcagcacacacatctgcacacacgcagctttgttctcacctctacctgtcattccagcatccctgcctcttgtcacaaactgccccagcaagaatttgaggttctgacaacagtacccatcccccacagtaccccttcagctcagtttctagaaagctcccttttctttgaaatctgcatgttgaattgaactttgtgattttattttttgtttcaaaaaagtttaagaaaatggaaatgggcaacagtgagtgaagacatattttagcactgaatagaatatttttaaaattaaactatttgaaatatgaaaaaaaaaaaaaaa

SEQ ID NO: 87 - DNA, 910 bp, Homo sapiens
  misc_feature (17)..(17): n equals a,t,g, or c
  misc_feature (857)..(857): n equals a,t,g, or c
  misc_feature (862)..(862): n equals a,t,g, or c
  misc_feature (883)..(883): n equals a,t,g, or c
ggtccggaattcccggntcgaccmacgcgtccggccgccatctcaggtctcttggctttgcagggcccaccggagaaaactgacgacccgtttctgtaatccttatgggagaccaaccttgtgcctccgggagatccactctcccacctggaaacgcacgggaagccaagcctccaaaaaagcgctgcctcctcgctccgcgttgggattatccggaaggaactcccaacggaggtagtaccactctaccctccgcacctcctcctgcatcagccggcctgaagtcgcaccctcctcctccggagaagtagagaaataaatttctcccaccctaaaccagtctttgagtgattgcagtatgactccatttccctggtgcattcatataatagttcacctggtgaaaacaatgaagattatttacaatgctaccctgctttttctggtgtcctgaacctggaagttgtgctttttaagtcttatgatgtaatcagcacgatttcacttcctgaatttcgatgaattctaagacatgggcaagatcgggttgtaagacctctgagatttaaggccatgccctggatcatggtgaacttaccaaagcaaacaatgcctgtgagatggtcctgcagcagccaaccagtgaactcttttggtgacatcctgttcttgttgtataactttatattcctataaatccattaaggccccaataaagtttgtctctaaagcgctgtgttagatctatatggactacatctagtaaaattgtgaattttwaagtaaatattttataaggaactcctatgtaaagcmttacttaaaattargtgttggaaatatggaccttctttccnaacanttattcatttatttatggtcntatttattccattattttaggggaaaa

SEQ ID NO: 88 - DNA, 1359 bp, Homo sapiens
  misc_feature (1005)..(1005): n equals a,t,g, or c
  misc_feature (1128)..(1128): n equals a,t,g, or c
  misc_feature (1342)..(1344): n equals a,t,g, or c
tcacgcgtccggggctgcagtaggtcccggcaaccgcaggctcgcggcgggcgctgggcgcgggatccgactctagtcgtaatggaggcgggcggctttctggactcgctcatttacggagcatgcgtggtcttcacccttggcatgttctccgccggcctctcggacctcaggcacatgcgaatgacccggagtgtggacaacgtccagttcctgccctttctcaccacggaagtcaacaacctgggctggctgagttatggggctttgaagggagacgggatcctcatcgtcgtcaacacagtgggtgctgcgcttcagaccctgtatatcttggcatatctgcattactgccctcggaagcgtgttgtgctcctacagactgcaaccctgctaggggtccttctcctgggttatggctacttttggctcctggtacccaaccctgaggcccggcttcagcagttgggcctcttctgcagtgtcttcaccatcagcatgtacctctcaccactggctgacttggctaaggtgattcaaactaaatcaacccaatgtctctcctacccactcaccattgctacccttctcacctctgcctcctggtgcctctatgggtttcgactcagagatccctatatcatggtgtccaactttccaggaatcgtcaccagctttatccgcttctggcttttctggaagtacccccaggagcaagacaggaactactggctcctgcaaacctgaggctgctcatctgaccactgggcaccttagtgccaacctgaaccaaagagacctccttgtttcagctgggcctgctgtccagcttcccaggtgcagtgggttgtgggaacaagagatgactttgaggataaaaggaccaaagaaaaagctttacttagatgattgattggggcctaggagatgaaatcactttttattttttagagatttttttttttaattttggaggttggggtgcaatctttagaatatgccttnaaaggccgggcgcggtgctcacgcctgtaatcccagcactttgggaggccaaggtgggcggatcgcctgaggtcaggagttcaagaccaacctgactaacatggtgaaaccccatctctactnaaaatacaaaattagccaggcatgatggcacatgcctgtaatcccagatacttgggaggctgaggcaggagaattgcttgaacccaggaggtggaggttgcagtgagctgagatcgtgccattgtgatatgaatatgccttatatgctgatatgaatatgccttaaaataaagtgttccccacccctgaaaaaaaaaaaaaaaaaaaaaaaaannnaaaaagggcggccgc

SEQ ID NO: 89 - DNA, 2253 bp, Homo sapiens
  misc_feature (28)..(28): n equals a,t,g, or c
  misc_feature (100)..(100): n equals a,t,g, or c
atctgtgtgcagcaaccagaaagggatnaacttggccctcttgcgggcgtggacaaggtctcttccttaccctttctgttgccagtcagcaacctgtaantcacattctcttcccagtgaatccctgggagcgcctgaccctggtgggctgttcagcttcctgctgctggggccagcaatttttgaggatttatctttaggccaggcttgctccgtacttatccctgctctcccatttctctcttgtttgagagagaatgaggaagcaaagagtgagaaagaataggggctgaagacgccactcccagatggctctttctatcctgctcttctgttgaaacacacgtgctgtgggcctcaggcgtttctgaagtgctctttcttggattggacaggagatcagcagcgtgcacatctgctgtggtctgaagtggtttgcaggtcagcctcctctccctagtgtagagcaagccagtgtccttcgaggaacccacccggctggccgggaagttttacagcaaggcgcctgccttgggataattccttggtgaaattcaccttccccccgcctctgtctggagccccatcctgtgttatctgtggtttttggacccctaatgtcagcttggctgtaggactccccgaggtttggtatgtgctagaacaatgggaggctgtgatttgctgtgtaagctcacatccagccttggaatctaacgggcattcacaacccgagttaccactttccactccctgcttaggattctgttccctgggctgaaactgaaataagctaattttttgggtcayggtggcagtaggggaacctaggagggtgtgagtggcatttgtcagggatttagcccatgacgtgtttcttgaaccctactttctggaagtggagttgactctggaagttttctagcaactgaacaaaagctcaggtttgtcctggtcatgcacatgccttaagccagttccgtcttccctagaccttggcatcctgtgcttctatttcttggaatacgttctcctctgacctgcctgtaccacgtgggtcctcttcaagtactgttttgaagctgggctcttttgtgtagctcccacccacctgtagggctagctcggcttaagggaactctccccattggcaaaccggacccggccgccgccaggactgtgtttccaaaggttccccgcccccaaccccagcatcagcctgtagctcccctgctgaggcagtgtggttatgttcccagcagtgggggtcagacgcccttcctcagaactttctagttgccctctacctgactcctgacttgtattccttttagcagtagccttcttccctcggggagccaaagagtgtggtgtgtggcgctatattgtggctgctatttcatctggtttcttttaatgtgaggaactcacatactgacttcagtgggactcggtgagccggggccgtctgtgtggtgggaccccctttagcgggactcagtgagctggggccgtctgtgtggtggagccagggcctctccctttagtggagccaggttgtcgggccccgaatgtcactggtggatctaagaagggctgagtggtctgacaccaaaacatgccgcagggagggctgtggtgccggtgcttccaacaaggacagccctccttgaccctgaaaggaacactggcttgaaggactgcagacaggctctgaggggcacgccctcctcagcgagaggcagcaaggtggccacagtgtcactggtcaggtgcttctcaccacgggaaagccgccgacctgtgactcgcttgagatgggaaagcggcgccacagaccccgggtctccttggctgtctgtgggccgcccctggccaccttgtcctggctcgcagggtgcaggagcgcctcgttctctgggtggccggcttgctgctccggtttgggctgtcttaccataamaccgtcccagggctctgcaggccactgtgaacgctggctccctgggcagtgctcctccgtgtggactgtgcctcaggccagggctcaccagctggggtcctgtccggaaggatgggatctttctgggactgcgccggacagagtggggagctcctagtttgtggggggaagctttgatatccatgccacgtccatccaccccaccccttttcgtcacgagcacaatggtcttacattggatttttgtaaaaaaataaaaataaatggagactttaactcaaaaaaaaaaa

SEQ ID NO: 90 - DNA, 746 bp, Homo sapiens
  misc_feature (662)..(662): n equals a,t,g, or c
  misc_feature (672)..(672): n equals a,t,g, or c
gttaagactcttttgattcctgatttagaatgtataataggtgctttataattgattawgtccccagtragactcttaagcttttttgagtacaagaacaatgccttatatgtattcatcgcccctgccaatattttacacatagtargtcttgtcctagargcagaaccaatttggacagcagttttamcaattcagacaccctgtaacatgttgcttctgtaacaatccatggctttggacttaagcccagtgaaagcacattagtggttatgagtttctccctgtaaggtttttcctctttgtctcctttctattttttggtacgtgagcagcctctgtctctctgtagggaagcaacagacagcttcagtgagtacaaatgttatattcacatgtggaacatagccccagagataatcatatgtaccagtgatccgtcagtagatgctattacccgtgtggttcttttatcaaaggaattaagttctcttgatgtgttaataaacagtacttttttggccagctctggagtggatgaataggtgtttggatgtctgtctagattgacagctttagattgcttttttcctgaaatctggtgattccagatttacagtgaattttctcttaagttgtgttttcaagtgatcacaccgaantggtgggcancaattctttcttttaccaaaaaaaaaaaaaaaaaactcgagggggggcccggaacccaattcggcctatagtga

SEQ ID NO: 91 - DNA, 1728 bp, Homo sapiens
  misc_feature (165)..(165): n equals a,t,g, or c
  misc_feature (167)..(167): n equals a,t,g, or c
  misc_feature (198)..(198): n equals a,t,g, or c
gcggagatcgaaccctctcctccgaacccctcctttcgccttccccgcctcctcccctccgcctcgagcaccgcgcgcgcgcattcggtcccagccaccgctaacactacaggctgcttacccccgccccctccaccctacccctggcggcctcaggcgacgccnantgaggctgaggctgggggcgaatcgccgcanagctgggtgtcggcggcgcattctgattggacagcggggaagcccgtcagcctgttggccccgctgatcccgccccgtagcgcagggcagcctttaacctttagccccagtgggcgccagccactcagatcgcttcttgttggtatgtgtagcggcagtggccgccggcggagcagtctgagcccgacgatgaggccggggacgggagctgagcgtggaggcctcatgatggggcaccctggcatgcattatgccccaatgggaatgcaccctatgggtcagagagcgaatatgcctcctgtacctcatggaatgatgccgcagatgatgccccctatgggagggccaccaatgggacaaatgcctggaatgatgtcgtcagtaatgcctggaatgatgatgtctcatatgtctcaggcttccatgcagcctgccttaccgccaggagtaaatagtatggatgtagcagcaggtacagcatctggtgcaaaatcaatgtggactgaacataaatcacctgatggaaggacttactactacaacactgaaaccaaacagtctacctgggagaaaccagatgatcttaaaacacctgctgagcaactcttatctaaatgcccctggaaggaatacaaatcagattctggaaagccttactattataattctcaaacaaaagaatctcgctgggccaaacctaaagaacttgaggatcttgaaggataccagaataccattgttgctggaagtcttattacaaaatcaaacctgcatgcaatgatcaaagctgaagaaagcagtaagcaagaagagtgcaccacaacatcaacagccccagtccctacaacagaaattccgaccacaatgagcaccatggctgctgccgaagcagcagctgctgttgttgcagcagcagcagcggcagcagcagcagcagctgcagccaatgctaatgcttccacttctgcttctaatactgtcagtggaactgttccagttgttcctgagcctgaagttacttccattgttgctactgttgtagataatgagaatacagtaactatttcaactgaggaacaagcacaacttactagtacccctgctattcaggatcaaagtgtggaagtatccagtaatactggagaagaaacatctaagcaagaaactgtagctgattttactcccaaaaaagaagaggaggagagccaaccagcaaagaaaacatacacttggaatacaaaggaagaggcaaagcaagcttttaaagaattattgaaagaaaagcgggtaccatcgaatgcttcatgggagcaggctatgaaaatgattattaatgatccacgatacagtgctttggcaaagttaagtgaaaaaaagcaagcctttaatgcctataaagtccagacagaaaaaraaraaaaagaagaagcaagatcaaagtacaaagaggctaaggaatcctttcagcgttttcttgaaaatcatgagaaaatgacttctacaaccagatacaagtaagatgtttagtgt

SEQ ID NO: 92 - DNA, 1796 bp, Homo sapiens
aggggcaaacctaacctgggatctgacgggatgcgttttgccagctcagatctcctctgctactggaaacttgcattatttacagccattaggagctccctggcttccattccactcatgactagctttacctctttgaccccactgtattattgtctagcccagttcagctgaatctttcaacacaaaatatacagggaaccccttcctggggaacttcctttgttattgaggtcttcgctgatggcttcttccatttgatactcagtctcagtcacagtaggattacggaatcttttgccagagtatcaatctacatgggtgctacacattactgaaaaaaattaggaacatggtgctagttaattcaagtcttcatgtaaaacttcttctatcatagtggacattaaaaaaaatctctctgcaaagtgcattgaccctacctctagtagatgaatgttgaacaagtagcctatctaggaagcaagtgactagcatccatgggcatcccacaggttgtagtccagccccgatcttggtggttgggattgatgttgctgccaagtccctccgtttcatgttcaggctctgcctatgttcctggtgtctggtacctgatttttcaggatgctgacatttacttcttgcccacaacaccatataccctaagtcttgccaacatctttgaatgtcttctgctggtctgtctctcctccgttgttcttttactatgtcccaagtgcatgctttgttcagtatctgcctaagtctcaggatamtgattttagctttttactaggtcctgacattcccgtagtttcctcttacctttctggacatgccagacaaactctgaccttaggttctgtgaaaactggtacctgcagaattcctcagtgtttgtttatatgaaagttcattgtgcctcttgattgtgggtgagttgaggaaaagaggtaaagcagtgggcagaggttgcaacatttatttggttataggacacctttgctactggagcatcttgtagggtaatgtagttcagaacatgcatggagaaatgctgccatagagtagtagtgacatttgggacttgaaaaaaatcttaagagcaggtataattccctcaacaacagaagaacatcagtgctttagaatgtttgattttgaactttcttgatgttttctctgccgttctgtagtgttattctaattaaaatctttcctctaaactctgctcttttttttccaattgagcaaattcggcatttattgaggccctactacatgtcatatgctgttctatttgctggaaacacaaatgtgaatatggtaggcctgcccttaaacaatgaattacagtgtaaaatgaaccttttataaagctggtcctatatcaatctaattattttgtttttcttcatttcaggcctaagacagctttattttctttccactccaaataatgaagaatccccttagggcaaagaaggaatttctgagcatgttataaaaaaatagaaaataggataagttgcgtgaagatttaatatttctatacatcaaaacctaccataaacaaaattaaaaggcaaatagtaaacttggaagaacatttgtaacataaaagacaaaagtttaatatcataataaaataagcacatagtagcttttagtaaatcattgctgaatgaatgaatacatatatgaattcaaagcaatgaaaaaatcaccccaggaaaagatgtaaacatttgacataggacaagtcaccaaaaaaaaaaaaaaaaaaactcgta

SEQ ID NO: 93 - DNA, 2166 bp, Homo sapiens
  misc_feature (20)..(20): n equals a,t,g, or c
  misc_feature (2164)..(2164): n equals a,t,g, or c
ttggcacatacattacctgntttctcatcaattgctaaaycatcaaacatttattgagcatctcctctatgtagggtataagtaatgctgaggtagtactcgtgacttacagtggtaaaagacttaagttttaggccgtgagccactgcgtctggccagaaatctcttaaccatgggagttaagtctcaaaattctggtgatacaagtggttgaaacttaaaactgtatttaaaaaataggattcgtgaatttgagatagttcataagtctgcaaaaggctgtataaatacatattttacatttactattattaattttgtagtaaatttgagtacagcactctctttatctgtggaaacttcagactctcccctattactttaatttcagtgagacattattaaatataagtgggcttacacatttgttttgctttactgacaaataatacacaacttggaggcttttttttcctttctattcttcctctaaatgttcaacacttttctgattttgtgatttgaggttgtttaatagcttcctgaggctccattgagaccgtatatacgtgacacttaacagtctagccttcctcggtacatatagatatatgatggtggctttgcctgtagtaaattcatgccaaaacataggctttcagtgcctattacatatggctttcagctctctctactgagggatgtaggagtttatttctgaggtctgagcctcttttcctttacttcctttactctttcctaagccttctttataaaaactatgcatgttctattgttttcctttttgattccctttcttttattatccccagtaggagtgacttgtaattctcatatgttagaaaggcagrtctcctggttgaagaaaagatccacccaagcaagtcagcatgtttaataatttttgagggggatctcaaatgtgggaaggattgttatataagacaaccaaatgatgacatgagacaataaatgctataggaattatggaggaataattagctatttattttcttggttagggaagagatattattagttgtagaagtaattactaacttctacattttttattgtggaaatcaaaaatatatatatgaaaataaaatgttataattgacttcagtgtcccataaaccagcttcaacaattaccaaattgtgaccaatctttacacacatgcacaggtgtccctcagtatctgtggggcattggttctaggaccacttatggataccaacatctatggatgctcaagtccctgatataaaatggtggactatttgcatataacctgtgtacatcccgtattatttaaatcatccctagatcacttataatacgtaatacaatgtaaatgccatgtaaataactgttatactgtattaaggaataacaacaagaaaaatgtacatgttcagtacagacgcaattttttttgtgtgtggaatattttcattccaaggtcagttgaacccatggacataggaggctgactgcgtgtgtgtgtgtgtgtgtgtgtgtgtgtgtgtgtgtgtgtgcatacagacacacatatttctgaaatgtaaatattctctttttaaaaaaattattatcacagctaaacaaattaccagtaattcttttatcctcatatacccggtgttcagattttctagattggctcctaatttttttacagattatttgaatctgattcaattcatgtactgtaatgtttgataacttaagtaccctttataggttctcttttacctcttctttattaaattccttgtaatttgttgtactaaatagattgtcttctagaatttcctgtagtctgaattatgtagtattgtttcacatgttccagtgtcctcttatttcctgtgagttggtagttagatctagaagcttgattaaattcagattttctctctttagatcatcaactttagatcatcaacttggatcatttgtttcattttgcttttgatatgttgttttttagaattacctcttaaaattttgatttaattttataatcatgtaaaatgtttataaatttccaaattcagatcagcaaaacacaataaaatctattcagagaaggcaaaaaaaaaaaaaaaaaaaaaaaaaaaaaaaaaaaaaaaaaaanaa

SEQ ID NO: 94 - DNA, 1287 bp, Homo sapiens
  misc_feature (1281)..(1281): n equals a,t,g, or c
  misc_feature (1285)..(1285): n equals a,t,g, or c
  misc_feature (1287)..(1287): n equals a,t,g, or c
aagaaatcgggcgctatatacctgtaacaggagacagawttggacamcaaggrttttaagagycattgcccattgtaaagcattaagccagagctggttattcattatcagactarctacatactagtccatgctagtgtcagcctatattaaaatagtctttccttgccatagtgctggcgaaaacccaatcccttctgatgaaacattgcttcttgggaagacaagctgaggaaagcaatgaagatcccagtgtcggcctttattgagctatgtatgagggtcagggtccctcaactcctagtgactatgaagcagcagtgtgatsgcttcgccctctttgcccctctgtcatcaatcctttgcatgtggctattttaagcttctcagctttcttttgggaggcttcatgtgtaacttattatagaaatgttactgaaaagctgcctaaacaaaaaattgtataaagtaggaatttgtataaagtaatactgttgtaaatccatcttcaagatgtaaagaatcaatttgtaaagtgtatattttcacttctcccttcaaatttatgtgaacaagtttttcatgtttcaatattgcttacataggaatacaccttacgtttttatcagtataaatggaacatttaaaaccagtcaacaacagaacagataatccagctccctgtttgtgttctgggttaattttgcaaggatgaagggctagaaagtggtgagtttgggtgtgtttcttattttcaggataaccggctgcattgcagtagaggaatggaatggtgaggtcatttgacctgttccaggtgagtggaggccaaagaacattgtttctgcctccccttggatgggaaaattgagaaattaaaaagttgcctttccgaggaaacaaaagttattttctctatttaaaataaatgtccaaaggcacccctctaaacaccaaaacttttagctcctggcaaacttacctagctagaagttggagaagagtgcggtttcaaaccatgcttcctttctgcccttgccaatacgttctcactgactgtgattctgctgtgaacacacacacacacacacaaacacacacacaagccccttctgtgtatgatcaggacaagtagttcaacagttaataaaaaagttaaattattggatgagaaagatatatttaacctaaatcataaatatgtawatccatttaataaacactaaaattgagaaaaaaaaaaaaraaaaactcgaggggggcccggaggccaattcgganctgnan

SEQ ID NO: 95 - DNA, 1929 bp, Homo sapiens
  misc_feature (10)..(10): n equals a,t,g, or c
  misc_feature (26)..(26): n equals a,t,g, or c
  misc_feature (1912)..(1912): n equals a,t,g, or c
  misc_feature (1924)..(1924): n equals a,t,g, or c
cacccccgangatcccaatttggtangtaccctccaataatatatccaactatatattaaaaaagcacacttgaggagctagggaactattttgaaaaatatatacaatatttaaagatacaaacagtagtgcttaaaaatactacataaagcattattttaaaggttatactggaaagtgcaattttaaaatgagtaaaacctctgtatttctgctggcattaagggttgatggtgttaccatgtatcatcatggcggtactattttttaaaagaaattaaacactggatctctccttaagccaacattgaaaagacttgccgcacttctgagtccaaacactggaaagctctcctttgccaccgttagccggggctcattctccatgtgccttagccttaaacatgcccccactcccacatctctcaccctgtcccctcctccccagattcccaatcccaccgcaatgtttggcaagcctaggactgataagtagctctgatagaggagctggtggcttttatacttcttcctgggtttttgttggggtttgttgtttcgttgttttttgtttttttttttgtttggttggggaagtattgtcttctacgtgtgctattttcagtagcagagtaagcacaaggttttaatcgagttgcataagacacctttgcatagctatttaattgcccaatgtaaaactttaatgccatttctaatgcttttattcatttttgaagtatgagtttgtagggacaaagaatgtatgttatcgtagacaagacccccagagactcttttcagcagaaagttatgcttctagttgccttaccatgtttcttgcaaaactgtccatggtcctcaagggtgttggaaacattatgtttattaaatgggcctctyttcctttgctgtgcacttgatgggtgaactggattggggtgtgcacatccaggaggaggaggagagacctgtagaagtttaaagatagtttgtaaatatcttctaatgcttgtttttagtccttttatgttggagaagttcatggtatgtagtttaatgcaaaatgaaaccattttatttcaatgttattaaaaaggtttgttttattaggaagttaatgtattgttgcagtgttttgtgcctgtttaaaggcttttgtttagcagagtgaatgtaaaatacagtaaaatgttaagattgtcatctactttttaaaaaaaaatatcaacttggaattgttttttaaaggctcaatcaaggaagtgaggtgtgcaataaggtagcaagtaaaacgcagttgcgtttttatgtcatgttagagatccatacaattttccactcacgggatttttgttgatggctgaattcttgtggattcataagaggatcatgcccttagcaagtacttttgttttgttttaaattaagagattcccaaatgcctttttccccctcatcttgaaatgagatgagtttttatgtgtaagcaatatttatttaactattctataaaattattgagtgcctactgaggcctttaagcaccgctaacattcctttccatcattcttttaaatgacataaaataattgtgcaatgttcctgatgatgtaccccacaagctgcattcaaactcaaatctgtgggaatgagtgactcgacaaaatgtaattcggatcagatcctcatcccctgactgtgtgaaaaaagtactctccttctagtgaaggattgtcacagagtttcactggatgaaactatgacccagtattcttactgtattttacatatgcctgtaaattatttgcaaaaaagaagaagaagaggaagaaagaaaagaaagaaaagaaagaaagaaagaaagaaagaaagaaagaaaaaaaaaaaaaactcgagggggggcccggnacccaattcggnctata

SEQ ID NO: 96 - DNA, 788 bp, Homo sapiens
ggcacgagaagatggcggccccgcggcgagggagaggatcctccacagtgctctcttcagttccccttcaaatgctgttttatctcagcggaacgtactacgccctgtatttcctcgccacgctcctgatgatcacgtataaaagtcaggtgttcagctatcctcaccgctacctggtcctcgatcttgctctgctgtttctgatggggattctagaagcagttcggttatacctgggcaccaggggcaacctgacagaggctgagaggccgctggccgccagcctggccctcacggctggcaccgccctcctctctgcccacttcctgctttggcaggccctagtgttgtgggcggactgggccctcagcgccacgctcctggcccttcacggcctggaggccgtcctgcaggtggttgccatcgcggccttcaccaggggcttcggaggagaggtcagggctaaggccggggatgagactgcaggagagagagcagcggagggccacattcggagcctccgtccactccagttttatcagcttttgcctttttgcacggagttaaacaaattctagctctgtgtttttttcccattcccagatttactatcagttctccttaaaaagtatctaagctgttacagtagctttcccttcacttgattctattgtgtgttttctatgtttggaataattacacccaaatatctagatattttctcttcaccgcattttgtaaataaagagatgtgtatgcctccctgaaaaaaaaaaaaaaaaaaaaaa

SEQ ID NO: 97 - DNA, 1264 bp, Homo sapiens
ggcacagcgggaatgggcgtggcctgggcggggcgggcgctaggacccaccggagcgccgtgaacgtcaccgagcggcgccgaggccccgggttgagcgggaggcgcgatcggtccggtcggtggctccccgcggcggggccgggcccgatctcgggcgggaaccgagcgcagagccggtagcgggaaggatgaccacgctcacacgacaagacctcaactttggccaagtggtggccgatgtgctctgcgagttcctggaggtggctgtgcatctcatcctctacgtgcgcgaggtctaccccgtgggcatcttccagaaacgcaagaagtacaacgtgccggtccagatgtcctgccacccggagctgaatcagtatatccaggacacgctgcactgcgtcaagccactcctggagaagaatgatgtggagaaagtggtggtggtgattttggataaagagcaccgcccagtggagaaattcgtctttgagatcacccagcctccactgctgtccatcagctcagactcgctgttgtctcatgtggagcagctgctccgggccttcatcctgaagatcagcgtgtgcgatgccgtcctggaccacaaccccccaggctgtaccttcacagtcctggtgcacacgagagaagccgccactcgcaacatggagaagatccaggtcatcaaggatttcccctggatcctggcggatgagcaggatgtccacatgcatgacccccggctgataccactaaaaaccatgacgtcggacattttaaagatgcagctttacgtggaagagcgcgctcataaaggcagctgagggggcacctgccaccccactgatgcccaaactgtcagactttgggggatccccgcctagggcagtgctgcatggctgccctgattccaagtgctcttatcgcctctgtgtgtggatcgcccgccccagcccggggccgctcaggtctgcttggaggatgcctcccccaggagggcagtgagggatgccgcaacctcgacttctcagcctcctggggttccgccggccaacactgtctgtctcaaatactgtgctgtgagttgtttcaataaaggggccccaaggggctgaaaaaaaaaaaaaaaacattggggcctctgcggattcttgggctcgagggcaatttccccattgtgatcgaataaatccgaatcagggaaagcggttccgggggaattgtaaccgctcaaattcgaaaagtatgggcgaagcataatt

SEQ ID NO: 98 - DNA, 892 bp, Homo sapiens
  misc_feature (21)..(21): n equals a,t,g, or c
  misc_feature (33)..(33): n equals a,t,g, or c
  misc_feature (855)..(855): n equals a,t,g, or c
  misc_feature (868)..(868): n equals a,t,g, or c
  misc_feature (891)..(891): n equals a,t,g, or c
gaatatccctttaagctggtncgcctgcaggtnccggtccggaattcccgggtcgacccacgcgtccggatgactgtaattctccttgttaccgacgagagatcattggaagctgccttctaacactttgtgtagctctgtggagttggattttcttaaggtttaaaaagaatcacagcttcggaacttttaactgaaaatgagagacagaagccacaggggaagcaaagcaaataggattttcaatataaatatcagtgtggaaaaataacctattctgttgaatttagtgttcatgcacttgagaacaacattatttccatttactccgaaaatccttctgtgggggtttgagaaagtgaatgttgcagacatgttctgttgtgttgcactttatcctgtgtttatgtgtatgtgtttttagattaattcaagttgtgtgctatatttcttgtataatttacaaagttacacaaaatataaagagcagtaaacttgtctgaaagtttttggcaaaggaaggtaacttcaatgtaatagcttcctttaagagtacaggaaaatgcattctgtaatgaagtggggcccatgtaattgtttatattttcagttttaagcaggtatagtgcaggcttgktaggaatgtgtggaagggaagawtggaagtgatttttcctcttttaaaagtaaacaaaattcttyaaatatgccctagttaactatttcagcataccatttttacttggttaacagtgtacattttgataacctatcaggaatgaataaagtatttttatttaaaggtgaaaaaaaaaaaaaaagggcggccgytytagaggatccaagcttgcgtangcgtgcaaacganatcaggagtcgatgagtagcttnt

SEQ ID NO: 99 - DNA, 597 bp, Homo sapiens
ggcacgagcaaactctgatggattgtcattctctccagacgggctcacctttctgtgtttcctttggtggcaaaagccattatcatctgctgggaagtgccggcaagagtcctggggctgttgcagatggttctctcaccgctggagttccatccgttcttccccaaggctcatctgttctttctcttaaatatccctccatcttctctccctctttgccttggtacacatgccaaacacgttttatctgagccttcacgggagcctagttaactctttcgctgtcactagcctggccctcttgaatccatcttctggtgtgtcttacagttttctcaaaaacaaatgggttctcactttggtgtctaagtctctatgtaatctggtcccagtctccctctctctctctctctctctgtctgcctctttcgtgttgctgggccttgcatgccgtaccctggcctttgtgaaatgcccttcatctgtgctcttccctccacctggaatgtccgtctctctttttctgccaacccactcggcccctccctcctgcaagcccttgagtgtcccctccctccatgtcctgtggtggcagag

SEQ ID NO: 100 - DNA, 530 bp, Homo sapiens
  misc_feature (308)..(308): n equals a,t,g, or c
tcggcagagctcccctgcggttggaagtgttcatgcaaattccagatctgtcctggcccagcttggaggtgggccttcctgactgggccatcccttgcgagcgttctcagcccacactggctccctctgcgcaggcccctacttgtgaaggagctgagccgcactcggtgggctgtcctggggcacccatgttgtgtgttttggttttgtttattttgtatctgcctggtttttccaagtctaatcaggatgtcccctggggtgacattctttgctgagagaagggcacatgcctcggttccctgggnctgtagaaagccagtgctcagccttgctttctgccgcagacttggtgcccggagactcgctatcaaagtgcagtggagataatgtccaatgggaggctgaggcaggagaatggcatgaggcagagcttgcagtgagccaagatcgcaccaccgtactccagcctgggcaacagagcgaggctctgtctcaaaaaaaagaaaaaaaaaaaaaaaaaactcgag

SEQ ID NO: 101 - DNA, 1143 bp, Homo sapiens
  misc_feature (1109)..(1109): n equals a,t,g, or c
tcgacccacgcgtccgagccgagactgcgaaggagaacgcagcaagcccaggcggcggtggaaaggctggaggacacacctaaacatgtggaatcccaatgccgggcagccagggccaaatccatatccccccaatattgggtgccctggaggttccaatcctgcccacccaccacctattaatccaccctttcccccaggcccctgtcctcctcccccaggagctccccatggcaatccagctttccccccaggtgggccccctcatcctgtgccacagccagggtatccaggatgccaaccgttgggtccctaccctcctccatacccaccgcctgcccctggaatccctcctgtgaatcccttggctcctggcatggttggaccagcagtgatagtagacaagaagatgcagaagaaaatgaagaaagctcataaaaagatgcacaagcaccaaaagcaccacaagtaccacaagcatggcaagcattcctcctcttcctcctcctcttccagcagtgattctgactgaatacaggccctggacccttccctcaagtctcaccagttctgctctcccatcaagcttcagatgccatgttgtactgggggaatgtagcccttgtgctccccaccccctacctscacctgagcctcaccctgctgttgagccctgagtggctaggggaaatgggaagaggattgccatggcctggccatcttgttgctgcttggttagatcatatagctaatgaattaggcaggggagctattttttgaagatgatgaactaaatgttgaagacaagtttgagatctgtaaaatgtgattttttacttccacttataatacttgtgattggggaggtttgtggaaattcaattatgatgaaaaacctatcttttttgtaatgttggcatacttggggaatttagtggcaaatacattccccagcaggccttttgttggttgcactaactgcaaggttgctgggaagtagagtccatttggttgatgagctttgactgcggttttggaaccttacctctcctccttagcccaatatgctgtcttgggtcctattcaaataaagttatttctcctggtcnaaaaaaacggcacgagcggcacgagctacgtggg

SEQ ID NO: 102 - DNA, 402 bp, Homo sapiens
  misc_feature (373)..(373): n equals a,t,g, or c
  misc_feature (397)..(397): n equals a,t,g, or c
gcccccgggtctgcagtaattcggcactagcacagcctctgcatgggcccagagccgggmcccccccagcccagccccgccctccccagactccgcgcaatcacatactgtatatagacgtgaatcgattttatttttattctttaaattaaggtcgtgataaagtgttgccaaagatacctgctgaattctcgcgtttcaggaaacaaacaaacaaaaaaaaatgatatttgaggagggtcgtgttgactccatatgaaaggacacagctcaaagcttttttgtttggttgtttggggttttttgtgttttctttttttggggtgttttttttttaactgcctggtacaaaaaaaaaaagagaaaaaaaacncggggggggccccggaaccaaatnccccc

SEQ ID NO: 103 - DNA, 471 bp, Homo sapiens
ggcacgagccagcacccacttcccacaggccttccctcctcccctgcctgctgacccggcagctcccgacagcacggccttgtttcccagggaacaatgcatctgtgtcacggacaacaatgtcctttcatgtcaggcgcactggccccggtgcacgccgggacgtggcacaaagggtgctttgtgcagctcagggatgtgagttcctggctttgccatgttggtgctgccgacccggggcctctgtccttgggtcccagttatgcaacagtcagtcgaggctgtggggctggcccaggggctttatctgtctccctctccaacttttgccaagttacccttctgggcttccgccagccaggagcccacactccctcagccctcccacacgctcctctcaactcctagctgggcttcgctgacttgaacctggccgagtttgcgggctcggggctccaaggtgcgctgctg

SEQ ID NO: 104 - DNA, 467 bp, Homo sapiens
cggcacgagcctaccagtagctccctgtcagccccttcccccgtgacctgctcttccagagataacccatctgccattgtgtcaagaggggggttgagggttaagctcttctctggggaatcacatggaaagtctaggcacagttcgtccctcagagagccactgtgtgccatctccatgctctgaaggagagactccagcttcttgttttggatgtttatgtccacaaaatatttctgaatgcctttatctttatcagccaagctctccgcatggtttcgatgacctgtttgagctgtttaatctctttcctggcttctttgagtgccaactgggcctctacccggtgacactcctcctcaatccagtcctctcgcatgcgggccagctgggacttaagctccacgatttcactttccctagagtgccaagacaagcatggttaattaaaaaaaaaaaaaaaaaaa

SEQ ID NO: 105 - DNA, 761 bp, Homo sapiens
ggcasagaccatatacttaacatgtatccctacagtaacctagtgaggtgactctcactatcgccatcttacagataagaccactgaggcactggctccgggcttctcatccagttggcggcacagaggagtccaaggtcaggttgtctagagtccagctcttctcacgaccctagtccgcctccacagaaccagggacgccggacaaggaggacactgccttcaggacccttctgcggaggtccctcatggtgcagaagttgggagtagaggcagaaacagctgtgaaaattctgatttgtttgtttctctgagccaagctaaagtggataatgaagccaagctggcaattaccttcctgtgcgtgataatggtggtagtggtgatgctgactgcagcaggatgacggtgatgtcagcagcgacaccattggtcttattgatggtggcagtgcccagggtggtgtgggggtaatagcatgagtgggtgctgggatgctgttagtgatcctgctagggccaggttagcttggaggggagagtgatgtccatcactgcagtggtggcaatgctgctagagacctcctgagtagttggactcgggctggcattgctgctgggaccttccctcacccccatcaggaagacccctctgctcctccccaccctcagtgaarggggcagggctcagarccttccgtagaactggctttattgcattccctgttctggacagtgtaagcsatggccctgcctctcgag

SEQ ID NO: 106 - DNA, 943 bp, Homo sapiens
ccacggcgtccgctaaattgttctctgcatatagcaggaaaactagcatgaaatattgtttcaggccctgggttctatgtgacactacattaggaattggattgtttgggtttgctttgtgtttttgaggtagaggaagaaatgggaatcttttttttctcttccaggagtcagtggaagaatagttctctagctaaggaacggacatacctttgttttaaaatattttatacttacaaaaatctagaaatggagagggaactgttttgaataaggatttaaaatacctgcacaaggatagagagaaactatgtgactcattctgtgaaaagacttcttgcagttgtgagttatttagaaatgatcaaaatttgtaattaggctaatccatttagtgattcctaatattttgtactcacagagaactaattgactaaacaacttgaacgctagtggtttgtccttagacaatctgtctttgaatttaaagtctttatcgctaagaccttgactttaaatttttcatcactacaaccttgaatttaatttcaggtcttcaacatgatgaccttggatttaatttaaagtcttcaacactatgcgctttatcatattattcccagatgcatttttgaaatgtagtatgtaaaagtatgtaacgtgctgtttattaacaaaagattgttcacaacatctcatgtagtttaaatttgtaaatactgcttctgttttgtttctcctttatacacttgactgtctttgtgataagtgacatgaattttatgttaggattaagtatgttttcctgaaacttggattttttttgtaattatataattgagagttaagaatgaaatccttcaagtgttaaaaactcacattttaaaagcaaattttggttccaaaaaaaaaaaaaaaaaaaaaaaaaaaaaaaaaaaaaaaa

SEQ ID NO: 107 - DNA, 497 bp, Homo sapiens
ttttttttttttttattatgaaaccatgatttggccttaaaaacttaagaagaataaagtaagagttgctacaatgaagtcagaatgaaactattaaagaatggtaatggaatgatttcaggtatgagtgttattagaaacgtggctctctcttcctctatgcatcaacctgtaatgactccctaatacttatgtgataaccacactttgtctctcaagaattccaaaggcagagagaatgatcagtgattgtcagagtttgaaaacaatctcaaaagagcagtaataacttcaaattatttggaaatcccttattttaagaattcaagaaaatttagcatcatatttcctatttaagttgctacagagatatttaacatgacttatcaattaattaattataagtttccctactctgctagttttacttcaaataatgaagggaaacttataattaattgataagtcatgttaaatataagtttcccggacgcgtg

SEQ ID NO: 108 - DNA, 1536 bp, Homo sapiens
ccacgcgtccgcacatctcccccatagcaccctgccctcatgggacctgccctccctcagccgtcagccatcagccatggccctcccagtgcctcctagccccttcttccaaggagcagagaggtggccaccgggggtgctctgtcctacctccactctctgcccctaaagatgggaggagaccagcggtccatgggtctggcctgtgagtctccccttgcagcctggtcactaggcatcacccccgctttggttcttcagatgctcttggggttcataggggcaggtcctagtcgggcagggcccctgaccctcccggcctggcttcactctccctgacggctgccattggtccaccctttcatagagaggcctgctttgttacaaagctcgggtctccctcctgcagctcggttaagtacccgaggcctctcttaagatgtccagggccccaggcccgcgggcacagccagcccaaaccttgggccctggaagatcctccaccccatcactagagtgctctgaccctgggctttcacgggccccattccaccgcctccccaacttgagcctgtgaccttgggaccaaagggggagtcctcgtctcttgtgactcagcagaggcagtggccacgttcaggaggggccggtggcctggaggctcagcccaccctccagcttttcctcagggtgtcctgaggtccaagattctggagcaatctgacccttctccaaaggctctgttatcagctgggcagtgccaccaatccctggccatttggccccaggggacgtgggcctgcaggctgcaggagggcactggagctgggaggtctcgtcccagccctccccatctcggggctgctgtgtggacggcgctgcctcaggcactctcctgtctgaacctgcccttactgtgtttaacctgttgctccaggatgcattctgataggagggggcggcagggctgggccttgtgacaatctgcctttcaccacatggcttgcctcggtggccctgactgtcagggagggccagggaggcagagcgggagggagtctcaggaggaggctgccctgaggggctggggagggggtacctcatgaggaccagggtggagctgagaagaggaggaggtgggggctggaggtgctggtagctgaggggacgggcaagtgagaggggagggagggaagtcctgggaggatcctgagctgctgttgcagtctaacccactaatcagttcttagattcaggggaagggcaggcaccaacaactcagaatgggggctttcggggagggcgcctagtccccccagctctaagcagccaggagggacctgcatctaagcatctgggttgccatggcaatggcatgccccccagctactgtatgcccccgacccccgcagaggcagaatgaacccatagggagctgatcgtaatgtttatcatgttacttccccacccctacattttttgaaataaaataaggaattttaaaaaaaaaaaaaaaaaaaaaaaaaaaaaaaaaaa

SEQ ID NO: 109 - DNA, 1550 bp, Homo sapiens
ccgggctaggagacctgttctgatgatgtgtgtggtcctcaccacactgccctgcctcaccttttccatagcagtgactgaggttcaaaagagcattaatgggtccgctgatgtcttacctgatatgttacctgacctgcccgtatctctggttctgttatccctgatcatggttgatattattgaaaaactcaggatatatcctcttagagggagtcaaaagagtaagtgttcttttaaatgtgaatattttttaaagtttgatatatttttcacatttctgccactgtgttatctgacaacatgtttaatgataccttttcttagggctaacattactgatagaagattgcaaatgaagatatctaaacataattatttttaaacctaccttgatagctagatagctgcttttgtttgctattcgcattttagtagtactgataaattaaaaattatcaaatagttaataccaaaaaccttaatgtttattccagcaagaaattatccaagtaaattattatagatgtatatttttctaggaagtctcttaaagcttatgtttaaatggattaataaaaagcttagtttggagacttttactacaggaattaatatgactgtggtagttgtgtcctagataatcatgtgtttaattgtgaattataaaaatgccaaagatcacactaataaaaccaagatatggctgggtgcagtggctcacacctgtaatcccagcatttttggaggccaggatgggaagatggcatgagctcaggagtttgagaccagcctgagcaacatagcaagacaccatccctataaaaaaataaaatttaaagaaaactcaacaagatgtgtcacatctcctccaaagtgatgagttgaaactaaatacagattggcccttacaaaaagatattttgttaatggaatattttatttatttagtcgtaaattactccagcctgggtgatagaacatacctctgtctcaaaaaaaaaaaaaaaaaaggaaagaaaatttgcatgcgtgtgtgtgttgaatgtgtgtgtttgggagaagggagagcttcatcatgatcaacaatatttttgtgtgtttaagagtggtgttttatgtgagatttcatttgggggaaaaaaaagcttcctctgctaaatgtttaaaaatcattaacctagggcttcattcagcattgtaaccgcacctgtttctaggacactaccatttctatgaagagatagataggttgccaactctctctccaggcccagctccctggcaatcatgactgcaccacctagaggcaaagtgagcccccatctaaggtcttgtgactactgctgctgctctgggcagtttcagctttgtaggcagagtgacccgtcttggtggggtacaaactggcttgaggctcaacacctttgaaaaacagataaaccttttaacatgccatgttgaattttttctttccaatgttgcatttttccaaaagaacacatactcatttaaaaaagttataaaatagagataaaaaaaaaaaaaaa

SEQ ID NO: 110 - DNA, 1997 bp, Homo sapiens
  misc_feature (1468)..(1468): n equals a,t,g, or c
  misc_feature (1495)..(1495): n equals a,t,g, or c
cccacgcgtccgtatcttaggaaatgcccatgataattcagaagaacttgaaagagccagggagctgaaggaaaaggaagccacactatgtctagagtttctgcttcaaaatgatgcaaatccatctatccgggacaaggaaggttacaatagcatacattatgctgccgcctatgggcacaggcagtgtctggaattgcttttggaaagaacaaacagtggatttgaagaatcagattctggtgctactaagagtccactccacttagctgcctacaatgggcaccatcaagccttggaagtcctctgcagtcgttggtggacctggacatcagggatgagaaaggccgcactgctctggatctggctgcctttaaaggacacacagaatgtgtggaagcgcttatcaatcagggcgcatccatctttgtgaaagacaatgtaaccaaaagaaccccacttcatgcctcagtaattaatggtcacacactgtgtttacggctgttgctagaaattgcagacaacccggaggcggtcgatgtgaaagatgccaaaggacaaacaccactgatgcttgcagtagcatatggacatattgacgctgtttcattgttacttgaaaaggaaccaacgtagacactgttgacatcctaggatgcacagctttacacagaaggattatgacaggacacgaagaatgtgtgcaaatgctgctggaacaagaagtgtcaattctctgtaaagatccagaggagacgcccttgcactatgcagctgctcgtggcacgccacgtggctgagcgagctgctccaaatggctctttctgaggaggactgttgtttcaaagataaccaaggctacacgccgctgcactgggcttgttacaatggtaatgaaaactgtatagaggtacttttggagcaaaaatgttttcgcaaatttatcggtaatccctttactccactgcactgtgcaataatcaatgatcatgggaattgtgcatcattgctgcttggggccatagattccagtatcgtcagttgtagagatgacaaaggcaggacaccccttcatgcggcagcatttgctgatcatgtggagtgcttgcagcttcttctgagacacagtgctccaagtgaacgcagtagataattcagggaaaacagcactgatgatggctgctgagaatgggcaggcaggcgctggggatattttggtgacagtgcccaggttgatctgactgtaaaggataaggacttgaatacacccttacatttggcttggagtaaaggtcatgaaaaatgtgccttgttaatacttgacaagatacaagacgagagccttattaatgaaaaaaataatgcactgcagacacccttccacgtcgctgcgcgcaatggcgaaaggtggtagttgaggagttgctggccaaaggggcctgtgtacttgctgtagatgaaaatgttntaggtcaaatggaccccgttccacacntggaaccgctgtacaaaaagaagaatgagactctttaaaaattatgcacatacacatgcacacatatatgtgtgcgtgtgtatatatatatatatgtgtgtgtgtgtgtgtagttcatcagccagtacacatgaggaccaaaatgcatcagtctaaaatggaagatacacattttttttccttcaaaattcaagtgagaactgaagtagcttttttatggagttaaatgtaatctttctgtgttaccagtctttgttgtattttatatttcttaggacacagatttctagttgaccacttaacatttgtaactgatgatgtgttgacctttttttttttttttgccaaactagagaaaatgtccatatacttttgctgtaaatgtgtttatatttatttgaaatgaaacaaatggtgaggaaacatccattatttgttctctattttaattgctatgtatcttatttagaataacaaaaaaaaaaaaaaaaaaaaaaaaaaa

SEQ ID NO: 111 - DNA, 2582 bp, Homo sapiens
  misc_feature (1006)..(1006): n equals a,t,g, or c
gcagcccgctctccatgtgacttcagtttccgtccgttccttccgctggtgctaaaataatctgatgccccacagcaaggaggtagcccagccccgcgttcggctgctctcgaggaggccggagtccccggagacgatgcgccccgcgcagccgcctgcgcctgcgggagccggctgcccttgagatggagttgctgcctctttggctctgcctgggttttcacttcctgaccgtgggctggaggaacagaagcggaacagccacagcagcctcccaaggagtctgcaagttggtgggtggagccgctgactgccgagggcagagcctcgcttcggtgcccagcagcctcccgccccacgcccggatgctcaccctggatgccaaccctctcaagaccctgtggaatcactccctccagccttaccctctcctggagagcctcagcctgcacagctgccacctggagcgcatcagccgcggcgccttccaggagcaaggtcacctgcgcagcctggtcctgggggacaactgcctctcagagaactacgaagagacggcagccgccctccacgccctgccgggcctgcggaggctggacttgtcaggaaacgccctgacggaggacatggcagccctcatgctccagaacctctcctcgctgcggtccgtgtccctggcggggaacaccatcatgcggctggacgactccgtcttcgagggcctggagcgtctccgggagctggatctgcagaggaactacatcttcgagatcgagggcggcgctttcgacggcctggctgagctgaggcacctcaacctggccttcaacaacctcccctgcatcgtggacttcgggctcacgcggctgcgggtcctcaacgtcagctacaacgtcctggagtggttcctcgcgaccgggggagaggctgccttcgagctggagacgctggacctgtctcacaaccaagctgctgktcttcccgctgctgccccagtacagcaagntgcggaccctyctgctgcgcgacaacaacatgggcttctaccgggacctgtacaacacctygtcgscgagggagatggtggcccagttcctcctcgtggacggcaacgtgaccaacatcaccaccgtcagcctctgggaagaattctcctccagcgacctcgcagatctccgcttcctggacatgagccagaaccagttccagtacctgccagacggcttcctgaggaaaatgccttccctctcccacctgaacctccaccagaattgcctgatgacgcttcacattcgggagcacgagccccccggagcgctcaccgagctggacctgagccacaaccagctgtcggagctgcacctggctccggggctggccagctgcctgggcagcctgcgcttgttcaacctgagctccaaccagctcctgggcgtcccccctggcctcttcgccaatgctaggaacatcactacacttgacatgagccacaatcagatctcactttgtcccctgccagctgcctcggaccgggtgggcccccctagctgtgtggatttcaggaatatggcatctttaaggagcctgtctctggagggctgtggcctggggcattgccagactgcccattccaagggacctccctgacctacttagacctctcaagcaactggggggttctgaatgggagcctcgccccactccaggatgttgcccccatgttacaggtcctgtctctcaggaacatgggcctccactccagctttatggcgttggacttctctgggtttgggaatctcagggacttagatctgtcggggaattgcttgaccaccttcccaaggtttgggggcagcctggccctggagaccctggatctccgtagaaactcgctcacagccyttccccagaaggctgtgtctgagcagctctcgagaggtctgcggaccatctacctcagtcagaatccatatgactgctgtggggtgratggctggggggccctgcagcatgggcagacggtggccgactgggccatggtcacctgcaacctctcctccaagatcatccgcgtgacggagctgcccggaggtgtgcctcgggactgcaagtgggagcggctggacctgggcctgctctacctcgtgctcatcctccccagctgcctcaccctgctggtggcctgcactgtcatcgtcctcacttttaagaagcctctgcttcaggtcatcaagagccgctgccactggtcctccgtttactgacctggctgtgtgccaagactcgaaattcggtccgcacacaacaggacactttctctgccagctttcaagatgtgatgcagaggccaagtctgacgaattgaagtttcaattaaaatttaatatgtttccattcctcatcgcccaccccacccccgcccccaccaccgcccaagttctttttccatcattataattcatcctcattatcttggtaaaatatttattaagtgactttttcagaaataaaaggcaacgtgtctcataaatattttttaaattaaatgcaaaaaaaaaaaaaaaaaaaaaaagggcggccgc

SEQ ID NO: 112 - DNA, 1904 bp, Homo sapiens
cccacgcgtccgccgggagtcgctgggtgcgtggggctgcctcgccgcgtctcgccacgggctctgccagcagacagccttggcacacaggcacaagggctggagcccagagatgagagtgcccaagggagatgtgagcctggcgggctgcccgctaacctgtcgctgaagccccagaagcgggccctcaggccaggcctaccctgcctccggcccagcatgcgcctgtcggtgcggagggtgctgctggcaaccggctgcgccctggtcctggtgctggcggttcagctgggacagcaggtgctagagtgccgggcggtgctggcgggcctgcggacccccggggggccatgcggcctgagcaggaggagctggtgatggtgggcaccaaccacgtggaataccgctatggcaaggccatgccgctcatcttcgtgggtggcgtgcctcgcagtggcaccacgttgatgcgcgccatgctggacgcccaccccgaggtgcgctgcggcgaggagacccgcatcatcccgcgcgtgctggccatgcgccaggcctggtccaagtctggccgtgagaagctgcggctggatgaggcgggggtgacggatgaggtgctggacgccgccatgcaggccttcatcctggaggtgattgccaagcacggagagccggcccgcgtgctctgcaacaaggacccatttacgctcaagtcctcggtctacctgtcgcgcctgttccccaactccaagttcctgctgatggtgcgggacggccgggcctccgtgcactccatgatcacgcgcaaagtcaccattgcgggctttgacctcagcagctaccgtgactgcctcaccaagtggaacaaggccatcgaggtgatgtacgcccagtgcatggaggtaggcaaggagaagtgcctgcctgtgtactacgagcagctggtgctgcaccccaggcgctcactcaagctcatcctcgacttcctcggcatcgcctggagcgacgctgtcctccaccatgaagacctcattggcaagcccggtggtgtctccctgtccaagatcgagcggtccacggaccaggtcatcaagcctgttaacctggaagcgctctccaagtggactggccacatccctggggatgtggtgcgggacatggcccagatcgcccccatgctggctcagctcggctatgacccttatgcaaacccccccaactatggcaaccctgaccccttcgtcatcaacaacacacagcgggtcttgaaaggggactataaaacaccagccaatctgaaaggatattttcaggtgaaccagaacagcacctcctcccacttaggaagctcgtgatttccagatctccgcaaatgacttcattgccaagaagagaagaaaatgcatttaagtggaaatcggacctctaatccaagcatattgcttgctattaatcgccaaaacaggactgctgatgaggaatgtatttgcatatgtttgcaaaagctgaatcattgaaaacgtaccttgaaactctctatctctggacactccagggtagagaatgaagggtatggaagtagtccggcttttgaaacttaggtattttatatttttcccctcaagaactttttttaagagacagatttgccatcctccttaatttgcaggactgccttggtggctttgtttgctgggacaaggcccacaacctgtgcctctcctattgacccttactttgaattcaaagaatctatttaagagtttaatatatgaggctttctttgattcctcctcagttctacctagtttcacagaggaaaaaaatactctttgaataaagtgaacagaggctcaaaaaaaaaaaaaaaaaaaaaaaaaaaaaaaaaaaaaaaaaaaaaaaaaaaa

SEQ ID NO: 113 - DNA, 2187 bp, Homo sapiens
  misc_feature (347)..(347): n equals a,t,g, or c
  misc_feature (2097)..(2097): n equals a,t,g, or c
  misc_feature (2187)..(2187): n equals a,t,g, or c
ggccctcaatttatcctctgcctctgacaaatatattccattttgttacattgcaaaaatttcagcacattgctttgcttacccatctttgctctggaacgacttttaattcttcttttggcaatcttggttgttttgagatgtgtgaaattagaatcatatgcaggtgtttgagttcttttgattttgctttttaaaagagttttttttttgttttgttttgttttgtttttagaatggggcaatgtaaagccagaatatcaacgtccttttgtcaagatttcaaacctattkggstgatagtacacttacaagaataggtaaaaaagatcccaaagattttactncacttactkgaactactagccctactattaagagccacagcaagcttacagktcaaaaaaaaaaaaaaaaagagctgcaacattcctttcgcactcccactcgcccctgaggttcttccacttccttcctatggctttttttagaagcgagtgtgtttttctcacgtccggcaacaaaggatgttttgtgctactactgaggtttgtgtgtgtgacttactttagaactctttctagaaaatgcgattactatttgcataggtctggtagaactttgtattgagtgaaagtctccgatgactgtttttgtttttgtgtagatttgccactgcttaacatcaaatcactttcccctgtgtgttttaaaatacctctaataggacctgtcaaaattctcccagaagtctcacaaattcttacctttaaagaaagtgtaagtgataccttcagtgtattgtatttattcttatatacctttgcaaagacttctcatcacttccttaaatatgtctgatagtgccataatgagaaggggacatggtaattaaccatcaactttggttttcatggagaaaatctatctggagcagtcacagtatcctatgctggagctatcagatgccttgacattagatgtttccatctaattgtaattctctgagcaaggagacaaggtgggataaacagaattctcagatggctgagaattataccctaaatcctgggagagaatttacctttccattgtcagataatatgaatcatttaaaacatgtgctggaacagctttgccttttcttgaggaaaatggggtttctctctcaaagagaaagataaatgcgcctcagaagattttagtggtcgatctctgtcagtgtactaccagcaaaaatcccagcaatcaatattacaaagargcagcactcacttgagtacaraaktwacaacattagctgcttcgtwaacaagatggcatgggagatattctgttttgagtaaatgacaagtcctacagtctagataggaagatttytcctccatatggattttgtgatttygtcttgtgttgagtaaggaaggggagcttggattccaagatcaatttaatgtctatattccttggcattgtcatgttagagcagcacatctcagatggctttcaatagttattttagcattgattttcctctactagagtaaatcaaaagatgatttagaaaatcaaagtcagttttccttggagttttctcagaataaagggaagctgtggtgttgaagggtttttttggctcctatttacatatgatgcaaaatcaatctgtgtgaatctctttcctctgttgagctctactataggctctactatatgcagagccttgggtatttctgtgcgagggggattatgcaaaagaattttaaggcatgccacttgactttgtgaaaccaagtatttgtttaaagagacacgatattatagtgggaggctgttttgtgagaacccacactttcatgtcagcaccctgagatgggatcccattacgccctttaaccaggcaagggactttatgcagttcttcgtcaggaaaatggagacaattaaactgcttttctcataggttgttgtgtaaaaggcagcaagatgtggctgtgtaagaacatgactgaagccagactgcttatgcttaaaacctaggtgagctgtttacacctgatatgaccttggacaagtctcatctaacttctcttgccntcaggtgcctcatctgaagatagcagtgatgttagtgtctgccctcctgccctcataagcctggtcatggttggagaccatcctggccan

SEQ ID NO: 114 - DNA, 2625 bp, Homo sapiens
  misc_feature (780)..(780): n equals a,t,g, or c
  misc_feature (1594)..(1594): n equals a,t,g, or c
cccacgcgtccggtaagatgagttagggtgacttgctaatagacattgtaaatcttaatatttatgtatgtattttattattaccggttttccatttatgatggtaatattgtttcttctaagaatatttatttttccttctaaatattgagataaaattcatgcttttgaaatgttctattcagtggcttttagtatatttgctatgttgtgcaaccatcgacactatccatttctagaactttttcgtcatcccaaacagacgctctgtattcataaaaaaataacttcctacctgtctctccccctagtctttggtaacctttgttatactggtaaactttgttgtgctctctgtctgtgtgaatttgcctattctaggggcctcatataagtgtaatcatacagtatttgtctttttgggtctgtctgatttcacttagcgggttttcaggggttcattcatgttgcagcatataacagtactgcgttcctttttctgggctgaataatattccactgtatggatagaccccattttgtttattcacacatcatttggacatttggaataattctggtttttggctattatgaacaatggtgctatgaacagttgcgtacaagtttttgtgtgaacatatgttttcaattctctcattatatacctaggagtagaattactggggtcatatgggaactggtatatttttggagggactgccaaactattttcccacggtccatgcaccatttcacattcccaccagtaagtaaganggttccaatttctgccattcttgccaacactagttattatctgactttctggttataatcattctaatgagtgtgaagtagcctctggtgtcatttggatttgcatttctctgatgaatgatgctatcaagcacctttgctggtgctgttggccatatgtgtatgttccctggaaaagtgtctgtgctgagccttggcccactttttaattaggcgtttgtctttttattactgagttgtaagagttctttatatattctggattctagacccttatcagatacatggtttgcaaatattttctcccattctgtgggttgtgttttcactttatcgataatgtccttagacatataataaatttgtattttaaaagtgacttgatttggctgtgcaaggtggctcacgcttgtaatcccagcactttgggagactgaggtgggtggatcatatgaggaggctaggagttcgaggtcagcctggccagcatagcgaaaacttgtctctactaaaaatacaaaaattagtcaggcatggtggtgcacgtctgtaataccagcttctcaggaggctgaggcacgaggatcacttgaacccaggaggaggaggttgcagtgagctgagatcatgccagggcaacagaatgagactttggttaaaaaaaaaaaaaagtgacttgatttaagggaaaaaatgactggctatattcagtcagatatggcaaaaagtctcaaggtggtaatgtgaatgattaaggtcttggggggggtgtcccctatcagactacaggtggttaaaggcacagaaaaaggtncagttgggttcttaatgtgaaatgatgagaagcacaactccagtgtgtctctttgtgtagaatgtcagcagacaccccctgctagatgtgctggatcatgggaaagcatttccatttgttactagattgttcagaagttttaatttatgatgggtgtggtggctcatgcctgtagtcccagcactgtgggaggctgaggcaggaggatcatctgaggccaagagttcaagatcagcctgggcaacatagtgataccctatctcttaaaaaagaagaagtttttaaatttgaaataataataggtactggatttatgcaaatgtcttttctgcgtcttttgagatgagtatcaggtttttttttttccttttatcatctgatgatgaacttaatgtttccatttgtattaatggaatactaagtccctctgtgatttctgaaccaagctattcctaggcctgagttttattttgttgacacagaaataaattagaagsccaagcgtggtggcatgtgcctgtagtcctagttgctgaggtaagaggattgcttgagcccaggagttcaaggctgcagcaagctttgattgcgcccactgcactccagccttggcgacagactaagacgctgtctcaaaaaaaaacaaaaacgacaaaaaaaaaacaaaacagaaaaaataaactaaggcaatgacagtccctggcaaatgctgggagggaggcagcagtggtcagggaaggtaaccctgaagcaggacttgtaaagcaaataagattgggaggccaaggtgggtggatcacgaggtcaggagttcgagaccagcctggccaacatagtgaaaccccgtctttactaaaaatacaaaaaaattagccaggtgtggtggtgggtgcctgtagtcccagctacttgggaggctgaggcaggagaatctcgaacccaggaggcggaggttacagtcagctgagaccgcaccattgcactccagcctgggtgacagagcaagattccgtctcaaaaaaaaaaaaaaa

SEQ ID NO: 115 - DNA, 2196 bp, Homo sapiens
  misc_feature (1921)..(1921): n equals a,t,g, or c
ggcacgagctgagtttgtggctgcatttttatctctggtggctctgctacggcggcgcagaaatgaggcagaagcggaaaggagatctcagccctgctgagctgatgatgctgactataggagatgttattaaacaactgattgaagcccacgagcaggggaaagacatcgatctaaataaggtgaaaaccaagacagctgccaaatatggcctttctgcccagccccgcctggtggatatcattgctgccgtccctcctcagtatcgcaaggtcttgatgcccaagttaaaggcgaaacccatcagaactgctagtgggattgctgtcgtggctgtgatgtgcaaaccccacagatgtccacacatcagttttacaggaaatatatgtgtatactgccctggtggacctgattctgattttgagtattccacccagtcttacactggctatgagccaacctccatgagagctatccgtgccagatatgaccctttcctacagacaagacaccgawtagaacagttaaaacaacttggtcatagtgtggataaagtggagtttattgtgatgggtggaacgtttatggcccttccagaagaatacagagattattttattcgaaatttacatgatgccttatcaggacatacttccaacaatatttacgaggcagtcaagtattctgagagaagcctcacaaagtgtattggaattactattgaaaccagaccagattactgcatgaagcgacatttaagtgacatgttgacctatggctgcacaaggctggagattggggtgcagagtgtttatgaagatgtggytagagacaccaacaggggccacactgtgaaggcagtgtgtgagtcatttcacctggccaaagattccggttttaaagtggtggcccatatgatgcctgacctgccaaacgtgggactagaaagagacattgaacagttcacagagttttttgagaaccctgcttttcgtcccgatgggctgaaactctatcctaccctggtgattcgtgggaccgggctttatgagctttggaaatcaggaagatataagagttactctcctagtgacctggttgaattggtggctcggatcctagccctcgtgcctccatggactcgagtgtaccgagtacagagggatattccaatgcctttagttagctcaggagtagagcatggtaacctgagagagctggcacttgcaagaatgaaagacctcggaatacagtgtcgagatgtgagaaccagagaagttggaatccaagaaattcatcacaaagtacggccataccaggttgaattggtaaggagagattatgttgcaaatggtggctgggaaacattcttgtcatacgaagacccagatcaagacattttgattggcctcctacgattacgcaagtgttcagaagaaactttccgtttcgaattgggtggaggtgtctccatagtacgagagctgcatgtgtatgggagtgtggtccctgtgagcagccgggatcctactaaatttcagcatcagggatttggcatgctgctgatggaggaagcagaaagaatagctagagaagaacatgggtctgggaaaatcgctgtgatatcaggggtcggcaccaggaattattatagaaagatcggctacagattacaaggcccgtacatggtgaagatgctgaaataatggccacaccagtccactcttctgcagtatcctccctggcagaacacggagaatcaggatttcttaaatactcaacagagaggctgagcagagcaaatggggggcttcaccctcatcccgcagctgcagagactggaaactgccttcaaggccacggctggtcatctgctgaccacaccccagatccgccctctcctgcgtgcaccccaaaaaantcacttgcgtttttgaggcttaaatcatctatccagtttctacattttgcatgaggcctgcaggtggcctattttgactcagacggtgaaaaaagcaaattaactcatttggacaccataactcatgcaataaaactgattgtcattcgaggaaaaaaaaaaaaaaaaaaaaaaaaaaaaaaaaaaaaaagggcggccgctctagaggatccctcgaggggcccaagcttacgcgtgcatgcgacgtcatagctctctccctatagtgggtcgta

SEQ ID NO: 116 - DNA, 1777 bp, Homo sapiens
  misc_feature (1066)..(1066): n equals a,t,g, or c
  misc_feature (1764)..(1764): n equals a,t,g, or c
cgctggggagagtccccagcctaaggccgcccccgaggcckcctcgccgcctgcctcacccctccagcatctcctgcctggaaaggctgtggaccttgggccccccaagcccagcgaccaggagactggagagcaggtgtccagccccagcagccaccccgccctccacaccaccaccgaggacagtgcaggggtgcagactgagttctaggccagtgggtccctgactgctgcacatggcacaggccgttcccttccggacccaggcaggctcagctctggggagggcaccctggtctgtgccttgtgggtggaggcggggcagggctgtgtggcaccgccagggagcgggcccacctgagtcactttattgggttcagtcaacactttcttgctccctgttttctcttctgtgggatgatctcagatgcaggggctggttttggggttttcctgcttgtgccaagggctggacactgctggggggctggaaagccctcccttcctgtccttctgtggcctccatcccctcatgggtgctgccatccttcctggagagagggaggtgaaagctggtgtgagcccagtgggttcccgcccactcacccaggagctggctgggccaggaccgggagagggagcactgctgccctcctggccctgctccttccgcagttaggggtggaccgagcctcgctttccccactgttctggagggaaggggaaggagggggtcttcaggctggagccaggctgggggtgctgggtggagagatgagatttagggggtgcctcatggggtgggcaggcctggggtgaaatgagaaaggcccagaacgtgcaggtctgcggaggggaagtgtcctgagtgaaggaggggacccccatcctgggggatgctgggagtgagtgagtgagatggctgagtgagggttatggggagcctgaggttttatgggcctgtgtatccccttctcccggccccagcctgcctccctcctgcccgcctggcccacaggtctccctctggtccctgtccctctggtggttggggatggagcggcancaaggggtgtaatggggctgggttctgtcttctacaggccaccccgaggtcctcagtggttgcctggggagccggacggggctcctgaggggtacaggttgggtgggccctccctgagggtctggggtcaggctttggcctctgctgcctctcagtcaccaagtcacctccctctgaaaatccagtcccttctttggatgtccttgtgagtcactctgggcctggctgtcgtccctcctcagcttcttgttcctgggacaagggtcaagccaggatgggcccaggcctgggatcccccaccccaggacccccaggccccctcccctgctgctttgcggggggcagggcagaaatggactccttttgggtccccgaggtggggtcccctcccagccctgcatcctccgtgccstagacctgctccccagaggaggggccttgacccacaggacgtgtggtggcgcctggcactcagggacccccagctgccccagccctggtctctggcgcatctcttccctcttgtcccgaagatctgcgcctctagtgccttttgaggggttcccatcatccctccctgatattgtattgaaaatattatgcacactgttcatgcttctactaatcaataaacgctttatttaaagccaaaaaaaaaaaaaaaaaactcgrgggggggccsgtaccmaattcgccanatagtgatcgtat

SEQ ID NO: 117 - DNA, 1489 bp, Homo sapiens
ccccctcccctttttttttttttttttttttttttttttttcactattcaaaatgctttgataatcttaatttttgtttctggtgctgagatattatgaaaggaactgcatttgcaacttattaaatacttccaggaacaaatagttcactttgcttgggacttgtagttttgagtaattaatcatccatggagcaggagccagtcaggagatacccgttggtaccactggtcccattggtggttgtcgcagtgtggggattctttcccggaggttctgagtcctcctcatctgagctagactcaatatcacttcgatcatccttggacaccttgcctcttgaaacagctttgcaagctattttcacaatcaagtaagaccagaagcagttcaacccttgtactagcaatagcagtaggttaaaaacccaccaggaagggtaaggtccaacgatctcccagctttcaaataatgtggtatttaacacccagagaggaaatacccagtcgtgtggtgataaaaaccacggcaaacataacaaacaggagatcacacattttctgaaacttggcataatttgccattttggcagcctccagaagagcatcagctgaatcatgaacacaaaggaccagcgttcctactcgggccatattgttgacatatgaaaaggtaatcaacaaaatatatacaaggtggtgcaggaacataatgccaaagtcctttcttttgatatcagtgaattgagaaatcatcaaagaccaataaaacgacagctccaggatgtaatagtagtgaaggtcagttgtgagtggctgataggggtagttgtaccagcaatgcctcgtattccacaaccagggggtctttttcaggaatctgactccgtaggtaaatacataaaggtaaaatgaaaatctccacatgctctcacagaacctcgtcagcgtgcttggcttctcctgattgcgtctttgtcgaaaccagcgctgaatgcttcgaacatcccagtccagttgcttggagaggccttccaatctcttttcatcaggatgctttgtaattgcagtgaagaccttttccagaatggcattgggcggagcaatttgtggtccattggcctgaatgttgagggctatggcgcacggtttggctacaaatctctcgaagatgagccgcaccatgaagatacagaaggccaggggaaaagcgagatagaggtcctcagcctgcgggaaggtggcctcctccgtgttcttcaggtccgcccaggtgacattgtgcgggagccaaaacctctcgttccagaaccaggctaagatccctgccatcttgctttgtccactcctgtcctgcggcacccgcagctccgccaagctctccaccgcgcagggcgcccggggatgcgcgcccggctggccccgagcctgtgccgccgccgccgctgctcccgcccgccgccgccgcctcctccgcggccgctctagag

SEQ ID NO: 118 - DNA, 645 bp, Homo sapiens
aattcccgggtcgacccacgcgtccgggcggactatgacttagttgcgttacaccctttcttgacaaaacctaacttgcgcagaaaacaagatgagattggcatggctttatttgtttttttttgttttgttttggttttttttttttttttggcttgactcaggatttaaaaactggaacggtgaaggtgacagcagtcggttggagcgagcatcccccaaagttcacaatgtggccgaggactttgattgcacattgttgtttttttaatagtcattccaaatatgagatgcattgttacaggaagtcccttgccatcctaaaagccaccccacttctctctaaggagaatggcccagtcctctcccaagtccacacaggggaggtgatagcattgctttcgtgtaaattatgtaatgcaaaatttttttaatcttcgccttaatacttttttattttgttttattttgaatgatgagccttcgtgcccccccttcccccttttttgttccccaacttgagatgtatgaaggcttttggtctccctgggagtgggtggaggcagccagggcttacctgtacactgacttgagaccagttgaataaaagtgcacaccttaaaaaaaaaaaaaaaaaaaaaaaaa

SEQ ID NO: 119 - DNA, 701 bp, Homo sapiens
  misc_feature (670)..(670): n equals a,t,g, or c
ccacgcgtccggttgcttctcagtatcatgttgcttctcagtattgtgttgcttctgattctatgaatgttcattttaagaccccttgttgaaatgggacagttggcagcggctctgatgagcccgagaagaggcctgcccttgggtgcggagtctccctccgcacgatgctcccacgcgtccaacttgcacccaaggggcttttccctcttccaagtggactccttcaaggaagctgcagctcggtcagcagagaaggggcctgccgccagcgccctggaggaagaggaagaggaacccaagaggatggcttgtctcccagcagccacaccggctttgtgctcagccagttcatttgagtttgcatgtttctctgcactatggattttgagcatttagatttctttaatcaaaagcgttttagtgactccagcagacccactgtcccagaaaagcctgatcctgtagtttatgtagaatgccacatctgcgtcctcaagacctgtttcatccatttgggaaaagatgttgggaaaggccactttgctcgcaggggtgaggggaaggatagagaatctatttttaataaataacattctagaaagaaaaaaaaaaaaaaaaaaaaaaaaaaaaaaaaaaaaaaaaaaaaaaaaaaaaaaaaaaaaaaaanaaaaaaaaaaaaraaaaaaaaaaaaaaaaaa

SEQ ID NO: 120 - DNA, 1063 bp, Homo sapiens
acgcgtccgctaattcccagagcccctggggagaccatgggctgcaggagagcagatgagactgtggctgggtgtccagagctgctgcctgctccggcaccttcatggaatggcattggcctcaagtcctcgctgcctcttactggctgtgtgaccttgggcaggccaggtagcctcagcttcctagagaatgtatgtaatgggcttggcatacagaatatggcacatagtaggtactcaactattattattctgtatttaatagctaattggctggcatttgctcagcactctgcatacattgggccattgcgaggtctctcgcctgcatcttagtttgctaattaggtgcttatctgggaccttcctggagcaggcattctctgctccattctctcctctgtacgcgtgacagccccaacccttgttcccccagcaggagcaaaaggggttgggtatgatgacctccagctcaatgtctaaggatctctgggtttcagtttccccctcggccagctcctcctgcccctaccagccacctcccaagctggggatttcactggcccacccttgttccctgcagaatcctagagtcctccagcccttccctctctggccttcacactccacatcctcagcccagcacaggagccaattttgcaaagaggtaaagagacctcaccactgctgcaccagtctgtccatttcctagcaggcaactggcacttgtttggttttataaattaaggtttcgattcttggccaggcgcgatgcctcacacctgtaatcccagcactttgggaggccaagggttggtggattacctgaggttaggagttcaagatcagctctgccaacatggcgaaaccctgtctctactaaaaatacaaaataattagcagggcgcggtgatgcgcacctgtaatcccagctactcaggaggctgaggcaggagaatcgcttgaacctgggaggctgcagtgagccaagatcacgccattgcactccagcctgggcaacaagagcaaaactccatctcaaaaaaaaaaaaaaaaaaaaaaa

SEQ ID NO: 121 - DNA, 552 bp, Homo sapiens
  misc_feature (3)..(3): n equals a,t,g, or c
  misc_feature (69)..(69): n equals a,t,g, or c
  misc_feature (128)..(128): n equals a,t,g, or c
  misc_feature (164)..(164): n equals a,t,g, or c
  misc_feature (198)..(198): n equals a,t,g, or c
cancttccgccccattgacgcaaatgggcggtaggcgtgtacggtggaaggtctatataagcagagctngtttagtgaaccgtcagatcgcctggagacgccatccacgctgttttgacctccatagnagacaccgggaccgatccagcctccggactctagcntaggccgcgggacgggataacaatttcacacagnaaacagctatgaccactaggcttttgcaaaaagctatttaggtgacactatagaaggtacscctgcmggtaccggtccggaattcccgggtcgactgcgcccccggcgccgwttcccacgattgccacgatgctgtccacgctgatgaacctcgccctgccgctgacccggctgcacatgcccgcgggagccggcgatgctgatggcctcggcgctgagccgctgcgcgggggcggccgtgctggtgctgctgctgtggctggcggtggactgggcgctgatgtgagcgctccggtgccggcgggcggcgtgctgctgaggctggatcggctgacgctcgcgcgaggcggccgc

SEQ ID NO: 122 - DNA, 1756 bp, Homo sapiens
  misc_feature (907)..(907): n equals a,t,g, or c
tcgacccacgcgtccgaaaaaagtccctagtttattgggtgttctcacacaacctgtaagatgaagctgtttttctgcctgtgtgcagggctgattctggaattccagaaggccttgtgggagcgtaaaaggcttttgaataaagtgtggaacagagcgcctcattctgataacatgcaatcataaaaaccatagggcaacttggagttaaggagtttctagaatttgctttagtctccaactgcaattctttattgatcatgaaattgttgaagagaaacacaaatgtcagttttacctttcctgtgggcatgaaagcacatcgaagtttcaggcaactgttaacatctctaccatctgtctgagttgagatttcaggttgtgacacttgccgtgacttatttgtaaatgacatttgtgtgtcttagatactaatggaattcatattctggctagttctttcagtgcatttgtagacatgttcttttcctttgtagcagtcctccctcaccctgaaatgttggtgttctaaccgatttctaatgctaatttcaactggaagcactttttcaagcccagctatcaaaccacaccagacatgtatggattcgggttgcccaataaagcgttgctattatgtaagcatccctcacgcatacagcatcaccagttttgaaagcttgaactattctgcttacttcaaggtacagaaaaaaaaatgtacttaaactgtgcagaaaagatgaaatcactggataatatgtattataaaataagcttcatgtgagtgacactggtttaagttgaaataaaatggtgaaagcattgatatcaatcattgtgactttatctcaaaacaatattgacacacatagatgtttttcttgctttatggtaagattacagnctttattgtcttaaatctgttatactcttcaatattttcaaagaaaacattctagtctcagaaatagtccatctctttgcaaaacagggctggccaattatcaaggacccataaaaatcaaaacactttcaaaaattttaaaaataaaaataattttcacatgattgctttaggaattttgaagtatccattcttttcactatggagtgttgaatatagaagattttttaatgaacaggcttgccctttgatgccaaaggcaaaaaataataataataacatttgcacgtgtgatcacagagcagctgtgaggcatcccgggggagcgcacgcagtggggatgtgattgctccactcaactattttatcacaaagtgttgtaaacatgggagatgaaagcttaactctctctacacccagctacagacccgcaatggccctaaaaatctggggtattcattgggtgggctgccatggaggaatttttggttttgtttttatttttatttgttgttctgtttacaaatcaggagagcccctgtttttatatgctaggaaggtccttgggataggccgaagaggtgtgcaaacgagcagtggaaggcccgggccctgtctctcaggaccacggcggcctgccccacacacagttctgcttctccctatctagaacgaggttttcctggcagattcctgccagactctgagtggagcccccccatgaccctataaaaggggctgtttgtcctcctcccaccctcctgtgctcttcctccctccccttgagggcacatggccgctggtaccacatgttggagcggccgctctagaggatccctcgaggggccc

SEQ ID NO: 123 - DNA, 1547 bp, Homo sapiens
gcattttttaacctgaagtatctcaccagggttccactggggaccttcctatcttcccaccctgtcatctacctaggtgacccagcctgttctgttggctttaaaaaaattaaaagaaaaatttttttatggctacacagcagtgtatatatwwrtwgctctgttggctttttatatactctctatatagaaggaagttgaacatggatcataccttctccccagagttctcctttagcttgcaggtgccacaaaattactgtgtcctgaactgagcttctgggcctctcgctgtccccagttcctgtgcctgccgtcacgaggtgtggttgagtcttcatgtggtcttctgtctccattctgtagccaccccatcctgttctcctcacgtccatttgtcctacatcctttcctgtcatccctttggaagaacagccttttatggactgcagtaccttgggggacgaatgcagggtcctgagcatggcatcagtgatgtagaagccctttggggattgaggcctcttcaacctcttcctccagtctcactttctgatcattcacctgggctctctttttttgccaaaacacttttctcttccccagccatctccctccatcctgctttccatagcaccctggcacttatcttagcagaaggccgttactcctctgtttggaaattacctttctcagggtacccaagtttctgagtctcatgcacctgtctccctagcacctaacctcatacctgacacctgggtgaagagctgaaggaatgggtgaagggctgacaactgggtgaagagctgcagaaggaatgcaagctcatgcttttacatttaragcttttacattgattacttgtatgttttgcagtcctccacgttcaacctgcaaccatattgccattgaaatacagactagtattkgtgtttaaggctgtatcttttatttttagttttattttttgagacagggtctcagtctgtcacctaggctttagtgcagtggcatcatcttagctcactgcaacctccgcctcctgggcttaagggatcctccaacctcagcctcttgagtagctgggaccacagtcacctgccaccacggctggctgatttttgtattttttttgtagagttggggtttcacgttgttgcgcagtcttgtctcgaactcctgggctcaagtgatccacccgccttagcctcacaaagtgctgggattacaggcgtgagccactgcgcctggcccagagactgtattattattattatttttgagacggagtctcactctgcactccagcctgggcgacagagcgagactccgtctcaaaagaaaacaaaacaaaacaaaaaccaaaaataagccgggcgtggcagcatgagcctgtagtcccagctactccagaggctgaggcaggagaagtgcttgaactcaggaggtggaggttgcagtgagctgagatcgcgcaactgcactccagcctgggtgacggcaagactccatctcaaaaaaaaaaaaaaaaaaagggcggccgc

SEQ ID NO: 124 - DNA, 377 bp, Homo sapiens
aattcccgggattttaataatcaacaccctcctagccttactactaataattattacattttgactaccacaactcaacggctacatagaaaaatccaccccttacgagtgcggcttcgaccctatatcccccgcccgcgtccctttctccataaaattcttcttagtagctattaccttcttattatttgatctagaaattgccctccttttacccctaccatgagccctacaaacaactaacctgccactaatagttatgtcatccctcttattaatcatcatcctagccctaagtctggcctatgagtgactacaaaaaggattagactgaaccgaataaaaaaaaaaaaaaaaaaaaaaaaaaaaaaaaaaaa

SEQ ID NO: 125 - DNA, 660 bp, Homo sapiens
ccacgcgtccgtgaagacatcaccgagccgcagagcatcctggcggctgcagagaaggctggtatgtctgcagaacaagcccagggacttctggaaaagatcgcaacgccaaaggtgaagaaccagctcaaggagaccactgaggcagcctgcagatacggagcctttgggctgcccatcaccgtggcccatgtggatggccaaacccacatgttatttggctctgaccggatggagctgctggcgcacctgctgggagagaagtggatgggccctatacctccagccgtgaatgccagactttaagattgcccggaggaagcaaactcttcgtataaaaaaagcaggccatctgcttaacccttggctccaccataaggcactgggactcggatttctctatctgatagaggtattttctgtggccctgggagctgtctgtctttcccctacccccaaggatgccaggaagacgtccaccattagccatgtggcaacctttacttctatgcctcacaagtgcctttcagagagccccaattctgctttcccacaaaataaacctaatgccatcaggcaaaaaaaaaaaaaaaaaaaaaaaaaaaaaaaaaaaaaaaaaaaaaaaaaaaaaaaaaaaaaaaaaaaaaaaaaaaaaaaaaa

SEQ ID NO: 126 - DNA, 678 bp, Homo sapiens
tcgacccacgcgtccggtggtagctgggattacaggcgcacgtgtgccaccacgtccagttaatagagattttcagtagagacgaggtttcaccctgttggtcaggctggtctcgaactcctgaacaagggagacttctaagaaggtaggagttgagcaagaaatggctgctatggttttcctcctcctgagcatcacaaccatctggggagctttcaaaaaatgaagttgctcagccgttgagaactgctggaaagcccagcttaacaagttgtttgcttgggtggactctgcttgggggtgcagcggggggttctttccagtcctggtgtgttgctgggatgaagcagagagccctagaactgttctctccatcccacttacggcaagggctgttcctctgtcaggccagtccttgggggcaatgacagcagcaggaacattctggtaagtgtgtggtttccctcccagtgagcaggctaaccctgagtataggaacttaggggaggttaggtggctgatgcatgttttccagaccggtttgtatctgcttgtcattgatcttagaagttcatattatggtggaattatctatttgcatgtgtaaactttgaatatgtttttaacttttaataaaaagttatttttacaaaaaaaaaaaaaaaaaaaaaaaaaaaa

SEQ ID NO: 127 - DNA, 2261 bp, Homo sapiens
ccacgcgtccggtgcaatgctcttacaaacgcttgactccatgttaaagctttagccttaactacttcattttctttcaaaaactgtactggaatatttgtgaaaagaatgaaaaatatggaataaattcataaatacacaaagagagagagctctaggtatatgtcaagtctggattaaagacagatctgtgtttatttttatgaagcatcttctgactttgatccaaagcaaaacttcttccatggccccatttaatccttgttgcacccctgggaagggaaatgctgctgtcccactttgcagatgaggggctgcatgttccaggccacccctctcatgggctgagcagcctggttgcaggtctcatggtggcgccactttgccattgtccctactttggcttctgtaaacaccctctgaggttggtgagctctctggggaaacaggctagcaccagttaatacacagagggagaacaatcagtaactttgttcttgtgcccagattggtggaagtcaccctatgtggagaggaggactttgaactcagacctggacttccctctgggacctttccctacactgtctgacctggggctggtcgtcacctcttccaacctttgcatcctgctctgtaaaatgagaataagaacaccatcctctccacattattagaaggattaaaattaatgtatctgaaggttcttaacagtgtcacacactcatcgttagtgattgtcatctcagtcatgtctcctgtttatcgatgccccttttgtagccaaaccctctgcccccgtggtattgggccctgcggcgaggaccacacctgagcatacagtgagtttcacctgtgagtcccatggcttctctcccagagacatcaccctgaaatggttcaaaaatgggaatgagctctcagacttccagaccaacgtggaccccacaggacagagtgtggcctacagcatccgcagcacagccagggtggtactggacccctgggacgttcgctctcaggtcatctgcgaggtggcccatgtcaccttgcagggggaccctcttcgtgggactgccaacttgtctgaggccatccgaggtagaggaccctcacacccagcccaagcccacacctggctgtcaagcccactcccctctccccaggctgttgctccaaggttgaatggcctgtaatctaatccctgactatactgcccgccgccatgcacctaggtgtgctggtcacttactatcattttattggcagcggtcaggggaccagcaatcacgtgccaagctctgcgctagagagtttcatttatctcaccaagaacaactactattattccacccaccttggaggttactcaacagcccatgagggcggggaaccaggtaaacgtcacctgccaggtgaggaagttctacccccagagcctacagctgacctggttggagaatggaaacgtgtgccagagagaaacagcctcgacccttacagagaacaaggatggtacctacaactggacaagctggttcctggtgaacatatctgaccaaagggatgatgtggtcctcacctgccaggtgaagcatgatgggcagctggcggtcagcaaacgccttgccctggaggtcacagtccaccagaaggccagagctcagatgctacccctggcccggcatcatctcttactgcgctgctcctcatagctgtctcctgggccccatctacgtcccctgaagcagaagacctgactctccttccttcctcccctgccacgtgggaccctcatctctgctgcctccttcctttcctgagaggctcagcttgagagaatgagccagtgagaagcttctctagacttggctccaaacatctcccctcccaagacatctgcctgcccacaggctcctgttgctccttcacacagacctggatgccccagagcaaggtcttcattcatggtcctgagcaggggccatgggattgggctctgggcactgacttaacggcacctccctagaaggcgagaaacatgccaaatctaaacacaccaggactcccatccatcgccttgagactgaccgtaaaccacagacgctctccaggttctcaagagttatcctgccttccagattcctgcctatcccaactccccagccttgttgaggttctctattgcctcttgaatacaaatgcactcccaaagtggttttaagaaaataaaaagattatccttcaaaaaaaaaaaaaaa

SEQ ID NO: 128 - DNA, 525 bp, Homo sapiens
aattcccgggtcgacccacgcgtccgcagtataatgcttgccagaaaaaaataggttaggagatcttgataatagtttaatatgatctgtatttttaaaatactagaaggttacttaatataccacatttccaagtccaaacggtgatcagagaaccccaaaataaaattttggcactgaattcataggaatacaattattttaaagcattagaaggaaagagaactcatagtctgtgttactgtgctgggtgggcttaggtttggggcttgtttgtattttgttttaccaatttagattcctttccacacttgcctgctaccacaagtaaggattgaggttaaatgggttttcatcttttattgggattggtgaaccttttaggattggtaaactgctttctcttgggcaagccaaactatctctcactaattgtttcaatagtggcccctttgaccttcctcttttcctttatctcaaacattaaaaaaaaaaaaaaaaagggcggccgctctagaggatccc

SEQ ID NO: 129 - DNA, 1663 bp, Homo sapiens
ggtattaagtccatcttgtgttggtacattggcagagacatatgctttaaaaacttaaatatttcggaggcacatgttggactactttgttttaattaaactgctagtatttctttgtcaaggatgtttctagttttttgctttattgccttgcattctaatgcagtttgttctgtaactcgagagccagtagcattggattgatggaagtgtagggtttatgaattattgcagctgactaccatacctcacacagcgttggtgttgtgagcggcccatgaaaagccaaattaaaaatcaaggattcagtcaaactaagcaggtactcatgccaggtactcctttctctacccacatccatgtttgaatgctattgcctgtgatctttacgcttaactgttgtgtatcttttttgttctttacaagaagtgcagaggggttttttgtgtattgcgtgaaaacttataaaacaaatgttaacagaatggaattttttttcaactgtatgtagggctgcagtggtggccagaattagatatctttaaagaattttaaatacaataaacacttcatattattcgccttgttacactcaatgcaattctcaagtctataagaggtatgtgcttaatatttcctactgtgtaggagaatttgcagtcagccataggtatgtaggaatagtcactcactggctgatacatttaaagcagcagtgtgaatagcaaggacagacaccttcaatttgtgaaatcaaagaactgatgcactatatagaacgaatttgggtttttaaagaaatattaaaagttaggtactgtaagtgttcttaaaacctgtaaacttcattctgtgggctagtggtgtgggacaaaatattcctaatgaaaggaagtaccaattagttgatttgttggtggcattccccttttgggaaagcaatgtaaggttatgtctgtgtatgtcattcacacttaggcaagcatacacaggcacatggctttaagaaccacactgatgccttgataattaaaaagaatacaagcattccatgtacacatgttaattagcagttagtgactgggccaacactttctcataaaaattggccttttacatgttgtctaattatcatttttccccaaattttgcgttgtaggactactgttcgaagatttttggaagaatactgagaacggcataaagtgaagatcgacatttaaaaaatgaggtgaaagaaagctatagtggcatagaaaaagtataaagctcagttagtttttttattattattattattaaaagttaattcaggactgatgtgacctaccagatttcagaacatgtgttaatagtatatatgccactgaaaacttaggtcctgtatcatacttttttctttaagactttttaagaaatattacttaaacatgtggcttgctcagtgtttaattgcaagttttcaatcttggactttgaaaacaggattaaacgttagtattcgtgtgaatcagactaagtgggatttcatttttacaactctgctctacttagcctttggatttagaagtaaaaataaagtatctctgactttctgttaaaaaaaaaaaaaaaaaaaaaaaaaaaaaaaaaaaaaaaaaaaaaaaaaaaaaaaaaactcgag

SEQ ID NO: 130 - DNA, 3034 bp, Homo sapiens
  misc_feature (5)..(5): n equals a,t,g, or c
aaggntaccgtccctcccctcccaagtgctgagccactgcgctcggccagcgtaaatttcttctaaagatacattttagctattaaaaaaatctattttagctatagctacagcttttagctatcagtagctatagataaaaataactatattctaatatggcttaaatggagatatgaccctctcattgatattttcctatgtgtaattatttttgaagcattgtgagttctgtgaaattttgctatttattgaactatgaaagcacttgattttcttaactcttgagtgccagaaatttgggaagaatattcctgaggattagacaaataatgataccttgtgtatatacatggtgttggaatgtctacatttcccttaagggcatcaattccataagttggtctacagataacttcacattagttgaccattgtttaacaatgctttaaagttacatttgcataagaatccaacttgatttttctaggaaaagttaaggaaaagaaccgaagaacctgatcgtgatgagcgtctaaaaaaggagaagcaagaaagagaagaaagagaaaaagaacgggagagagaaagggaagaaagagaaaggaaaagacgaagggaagaggaagaaagagaaaaagaaagggctcgtgacagagaaagaagaaagagaagtcgttcacgaagtagacactcaagccgaacatcagacagaagatgcagcaggtctcgggaccacaaaaggtcacgaagtagagaaagaaggcggagcagaagtagagatcgacgaagaagcagaagccatgatcgatcagaaagaaaacacagatctcgaagtcgggatcgaagaagatcaaaaagccgggatcgaaagtcatataagcacaggagcaaaagtcgggacagagaacaagatagaaaatccaaggagaaagaaaagaggggatctgatgataaaaaaagtagtgtgaagtccggtagtcgagaaaagcagagtgaagacacaaacactgaatcgaaggaaagtgrtactaagaatgaggtcaatgggaccagtgaagacattaaatctgaagtgcagctktaagtatgcacagatgaagatggaactaagccgagtaagaagacatacaaaagcctcttctgaaggaaaagacagtgtagtcctgcaaaacattttgaggtacattgttttgtctcagctattttgtagcagactcgtgcccccattagtgtgcctctttggaaattatcgcccacatttgtaatatagtcgccattgaaaagttaattatcctttttttagggattttgatgtcatttcttttttttttttaataaaaaggttgaactgtttttttttttctttttggtattaagtccatcttgtgttggtacattggcagagacatatgctttaaaaacttaaatatttcggaggcacatgttggactactttgttttaattaaactgctagtatttctttgtcaaggatgtttctagttttttgctttattgccttgcattctaatgcagtttgttctgtaactcgagagccagtagcattggattgatggaagtgtagggtttatgaattattgcagctgactaccatacctcacacagcgttggtgttgtgagcggcccatgaaaagccaaattaaaaatcaaggattcagtcaaactaagcaggtactcatgccaggtactcctttctctacccacatccatgtttgaatgctattgcctgtgatctttacgcttaactgttgtgtatcttttttgttctttacaagaagtgcagaggggttttttgtgtattgcgtgaaaacttataaaacaaatgttaacagaatggaattttttttcaactgtatgtagggctgcagtggtggccagaattagatatctttaaagaattttaaatacaataaacacttcatattattcgccttgttacactcaatgcaattctcaagtctataagaggtatgtgcttaatatttcctactgtgtaggagaatttgcagtcagccataggtatgtaggaatagtcactcactggctgatacatttaaagcagcagtgtgaatagcaaggacagacaccttcaatttgtgaaatcaaagaactgatgcactatatagaacgaatttgggtttttaaagaaatattaaaagttaggtactgtaagtgttcttaaaacctgtaaacttcattctgtgggctagtggtgtgggacaaaatattcctaatgaaaggaagtaccaattagttgatttgttggtggcattccccttttgggaaagcaatgtaaggttatgtctgtgtatgtcattcacacttaggcaagcatacacaggcacatggctttaagaaccacactgatgccttgataattaaaaagaatacaagcattccatgtacacatgttaattagcagttagtgactgggccaacactttctcataaaaattggccttttacatgttgtctaattatcatttttccccaaattttgcgttgtaggactactgttcgaagatttttggaagaatactgagaacggcataaagtgaagatcgacatttaaaaaatgaggtgaaagaaagctatagtggcatagaaaaagtataaagctcagttagtttttttattattattattattaaaagttaattcaggactgatgtgacctaccagatttcagaacatgtgttaatagtatatatgccactgaaaacttaggtcctgtatcatacttttttctttaagactttttaagaaatattacttaaacatgtggcttgctcagtgtttaattgcaagttttcaatcttggactttgaaaacaggattaaacgttagtattcgtgtgaatcagactaagtgggatttcatttttacaactctgctctacttagcctttggatttagaagtaaaaataaagtatctctgactttctgttaaaaaaaaaaaaaaaaaaaaaaaaaaaaaaaaaaaaaaaaaaaaaaaaaaaaaaaaaactcgag

SEQ ID NO: 131 - DNA, 809 bp, Homo sapiens
  misc_feature (372)..(372): n equals a,t,g, or c
ggctgcaggaattcggcacgagtgttagggtaaaaagtgaattaaagcaacaggactatttataaaataattagatttagaaagcagtcgtagaaatataagcctggagttgcctctgaattacatatttaacaaacctagaagctaaatcagtttgtcttttatcaaaactgcaactcctctaagttgaaagcacagtgacaagagaaagcattacaaattcttgagaaataatagaaattaaagctcttttcaaacctgtgaacaagtatagtaccagaagtataagattcagataggcccaagttgtagttcttgttatgagtcttacaaccctatggactttggacaaattacttctctgcgtctgtntcctcatctgtaaaatgaaaataatttctgtttcatacaggtatagtctaaatagggataattacacctacttcaaagttgtaaaatacacaattacaactagataggaggtataagttctagtgttctgtagcactgtaggatgactatagttaacaatattgtatagtttcaaatagctagaagaaggatattgcatgttcccaaaacaaagacataagtttttgagatgatagatatgctaattaccctaatcactatatgttatatgtattgcaacatcactatgtacccccataaatatgtacagttattgtgtattaaaatttttttaaactaaaattataagacattaaaaaaaggtatcacatgtaaaaaaaaaaaaaaaaaaaaaaaaaaaaaaaaaaaaaaaaaaaaaaaaaaaaaactcgaggggg

SEQ ID NO: 132 - DNA, 566 bp, Homo sapiens
gagcagtgatgcactcacccagcttctggtcctctttcttccacctcttagagtgccttggctccctcctgtcgtcctggggaacctcggccccagccctgcctccccagccagtcacagctcctccctggtcaccctgagggagctcagggcccggctggtagctgggttgctctgcttctgtccccgactcctgtggagcctggcaggcaactccatgatctgaccccggttaccttgacagccctgcctggcctcccctctcatggcccagccaccccagaacctgaagaggttttctagctgccgtgcatttgccaggctgggttacccaccctactttccctgcctgccctccagtgctgccaggcctagtgtgccagccagcgctcagccttcagtaaagggttcccctgcttccaacctccattgcactgcttcccctaagactgtgacctcctggaaggctggagcacaactgcctctcaataaacgtgttgcaaaaaaaaaaaaaaaaaaaaaaaaaaaaaaaaaaaaaaaaaaaaaaaaaaaaaaaaaaaaaaaaa

SEQ ID NO: 133 - DNA, 1569 bp, Homo sapiens
tatcacctgaatccctgttcaatgtaattttccagcagtgatgaagaggcataatttttatgctattagtctttcctttagccatcactagatcccttactttaaccatattattttgtgtaatttcacagcaacaagtggtcctggtggcatccgaacggtaataatacgccagcatgagattgtcctgaaggtggcttatccacaggcagacagcaacctccgaaacatcgtgaccgagcagctggtagccctgatcgattgcttcctggatggttatgtttctcagcttaagtctgtggataaatccagtaatcgggaaagatatgacaatctggagatggaatacctacagaaaagatcagatctcttatctcctcttctttcactaggccagtacctgtgggctgcttctctagcagagaaatactgtgactttgatatattggtacaaatgtgtgagcagactgacaaccagagccgactccagcgctacatgacccagtttgctgatcagaatttttcagactttctcttccgttggtatctggagaaaggaaagcgaggcaaattattatctcagcccatttctcagcatggacagttggcaaattttttgcaagctcatgaacatctcagctggttacatgaaattaatagccaagaattagaaaaggctcatgcaacacttctgggtttggcaaatatggaaactcgttactttgcaaagaagaaaacccttcttggcttgagtaaattggctgcattagcttcagacttttcagaggatatgctacaagaaaaaattgaagaaatggctgagcaggagcgctttctactgcatcaggagaccctacctgaacagctgctggcggagaaacagctaaatctcagtgcgatgccagtattgactgcaccacaactcattggtctatatatctgtgaagaaaatagaagagctaatgaatatgatttcaagaaagctttggacttgttggaatatattgatgaggaagaagatataaatataaatgatctaaaactggaaatcctttgcaaagctcttcagagagataactggtccagttctgatggcaaagatgatccaattgaagtatctaaagacagtatatttgtgaagatcttacagaaacttttaaaagatggcattcagctcagtgagtacttaccggaggtgaaagacctgctacaagcggatcagcttggaagcttaaagtccaatccttacttcgagtttgttttgaaagcaaattatgaatattatgttcagggacaaatataactttttctaaaaatggccattgtttatgaaatctgtataagtgtgtccttatacaaattttaggccataaacaagtgtaagtttgtacaatttcataacatgtatagctgagtttttatactttatatgtaggaagctaatataaaatagttatgtaactgtgattttggttttcagttatgtgacttgttttttccacctgaaaaaaaaaaaaaaaaaaaaaaaaaaaaaaaaaaaaaaaaaaaaaaaaaaaaaaaaaaaaaaaa

SEQ ID NO: 134 - DNA, 1323 bp, Homo sapiens
agtctgtctcaaaaatgaatgaatgaatgaatgaacgaatgaatgtactatgagctgatactgggatttcaggtaccgcagtttgtgctgaatgatatgtttggggtaaatcagtttttttcttayagaatttcggcgtttttgctgcaactgccactaattttgcatttaaaagaacaaaagaggaatgtatttttcaaaggagtgaatgaggttaaaatcaagattttgaatggtataaatatgcaactaattcagttgtaggatattattaaattttttattgctaaatatgtttctttcatacgttgcagtgcttacagttccaacagctttccaagaaaacatttccatatttgtgttatttgtaaagtatacataaataatgtaaaataatttgggattatttcaactttacattgtatgtctgaatttcatcgatgttgtacctggctcagtcaatagttgtcacaggtattaagccattttggaatttgccacttttttctgggtaacctgttttagtttagtttacagcatttagaaacagaaggtaactttatagaagtaacaccmatatcctagtctgcttgccccgaatataactaatagtrttaggrtgtaagcaatattaagatggkttttattattttttatacactgtgtgcttttactttttatttaaactacagcaaaaaactgattttttaactaaaattgaatggcgtttatcttaatgaccagttattgaccaaagtgtactcagaagatgttattatgtcccaatctaaggaatcctttaatttggggattaattttacttacacatgccatttcagtttcagttgcctcattctattacatcattcttgtcaagtctaagctttatcatgtctgaattcttttaacactgaatctgtgatgtaaaaatgtatgatgtgccataaattttattcataataaactaagttatagcctattgtaatctgtaaaacatttcttgtaaattacctaatttattttttcatttatgtacagtatcttatgtaaatttgaaaaatgtttgccatggcgcattctgtaaacattcccgtattcttttccttaatgcttatttgcatgaaggtaacttgggttttgcttgtttgtattggataaccattaagccaacttcagtttctctgcctttttttctgtagtttaaccatttctaattttgttcatattctaaatagatgttagaatcatactttttattttctactttctaaataaattatctaagttgtttactaaaaaaaaaaaaaaaaaaaaaaactcgag

SEQ ID NO: 135 - DNA, 845 bp, Homo sapiens
ggcacgagctggtcctttgtaaactcctgttgaacccctcatgccctttccttggtcttttaggctcttaatgctactttcaacagcccaaagcccccaaccccagaaaagattcccccttcacagcactcccctccaatccaacttcccactgagcaaatgctgaaatccaggcactcttgcagattattagatcaaaataaaccatcctaaggtgtgagtgagattgagggggtaaaactcagggaagccattgatgttttaagtaaggaacttcctaatccaatcaattcccctaacacatgaaatttgtggggaggggaaagccccaaatgagatgatggtcttttattcatgccttttataaatatacattaagtgtttcctgggtgccatgtactaggccaaacattaagatgtaaaaaagaaaaacgtacaattaattgccactctcaagatgctcacagtaagtctagtaagtagacaagtattacaaaacaaaaatacaagtgagctcacctacagcaggatgctccctcctccatccctctcgtacccatccctcttgtacccagcctgctttatttaaatagagactgagcatggcaagtcagtaccatcccgtctctccctatccccttcctcatctttgacagcagcccagtactccacataagccattaaaacagtacgcctacctagttagtagatgaacctatgtttgtgaaatgaggaataacaagaggcattgagcctccagcttaacacaaagcacccaacttacacttaggagatttcaacttaacttaaccgctctgaccaaaaaaaaaaaaaaaaaaaaaaaa

SEQ ID NO: 136 - DNA, 1526 bp, Homo sapiens
aattcggcacgagcgaaagcccacagttatggaaagaattactgtctagatggtctgcagaacgtgtttggggtgagtgggagtgaggggcaatgttactttttctccctgtagtttggagtccattatgagctgctgctttttcttctcatcttgtcatcttctggggatgtttgaaggctgagttccaacagaattcacaaagggaataaaacaggattgagattttgaggtgtgcacaaggtggtaagataaagggcatatgagcttcaaaactaatgctgttgcatacatgaagccttttgttttttgaggagctatttttgttattcttgtaacgctccaccttacatgccacatctgtgtgagtcaacagggatcaggtttggtcaccacacatgtctgaagctgggcagcgtctgctctgtgttctgtgtggaatggagaaaaaaacgcctgccctgctgccttccatgttcataggcccagcccaagagagtgacacacagtgctggccctgagacatttccacaaagtggtcaactctgccttgcatcctaaaactttttgggcatctattttgaaaactataggagcctttggaaggcctcttatgtttggaggggaagggtgttgagattgtcaccatccttcaagctgagactcctggtgagcctttgccaccatgaaaaccacatagctgaccagggctgtgcttgaggtacagaggacacacatcgtagacaggcctgtgtcatgtttccttacagtcgttttttacagagaaaaggggcattggtttttcactgctttctcaacagttcctgtgaataaatgaaacatttcggagctccctgagagcaagagccttcacttcttcttgcggtgccgggaccatgtgttggtgaagctggtgctgtgggggccactcactcgaatgacacctggaggcctgttcctcccttaccactcccttccccagcccgacttcttggcctcctgcccaaccagacacctcaaactctgtcagtgccctggcattctggcagagaatcctcaccagttctcaccaaccttccccccaggcaagggcagctgccagcatggtgctctgccaggacaggtttccctgaaggaagctgctcacactgagatgagcctctcagggcaggacctcttcccaagccctgcacacccacccctgcagcccttttggctccccttttccctgtgcctcagcactcctttcctggttgcagataacgaactaaggttgcctaaagggcagatctgccttctccatgtcttcgtcctggcaaacagggtcgtcttaaaattatgcgctaattctgtatgggagcactcaaaaggcattacttagagattgaaatttcaaactatctctagtttttcaatggaaatatatcagctagggaaaaaccatcaagctcattattattttttgatcttcagttgtatttttgtgaatattttaatacatctttttcaatttcttaaaaaaaaaa

SEQ ID NO: 137 - DNA, 941 bp, Homo sapiens
cctctggagagtragcgcactgctccattttwagtttatgtccccttctctacttctracctgtataattggaaggctcataatccccccttctctgaaaagccccagdtcttgacttcactgatggagtccgtgctctggactcactggcccaccaggaatgactgtcagcaaytccttttaacgcttttcacctctgaagagagggaccgtatccgaagagaggccagaaagtattttctcacatcagccggtagaccagaggaggaagcccaggacctccttgaggaggcttttccctctacccggcctgattgggatccaaattcctcaggtgggaagacagctttggatgattttcaccagtatctccttgcgggtatcaagggagccactggaaaacccatgaatctgtccaagacaactgaagttgtccaggggcctgatgagtcaccaggagcgtttctagaatgcctcccagaggcccatcggacttacaccccttttgaccccgcggctcccgagaatagctgtgctattgatttggcatttatgactcaggcagcccctgatattaaaagaaaattacaaaagctggaaggatttgctggaatgaacaccagccaacttcttagaaatagcccagaaagtttatgacaatcgagagtttgaaaagcaagaacaggcagcccaggtagctgaaagaactgctgacaaagcatcaaaaagacaggcaaaaatcttagtagccaccatccaggggggcaagaagaaagggcccccatcacaaaacactggccaggggaccccgggtccccaccagaaaggccaaaaaggtgagtgggctcccctacaaagaaaccagtgcatgtattgcaaacagattggacactggaaaaagaaatgcccattaaaaccagaagaaaaaaaaaaaaaaaaaa

SEQ ID NO: 138 - DNA, 867 bp, Homo sapiens
ggcacgagccacagtccggcctggtacgcctcctgacttcatcctcaaggtggtaatagacaaacatcctgtccgtttttttgtacataagaggccccatgtggatttcttcctggaagtggtgagccagtggtacgagctggtggtgtttacagcaagcatggagatctatggctctgctgtggcagataaactggacaatagcagaagcattcttaagaggagatattacagacagcactgcactttggagttgggcagctacatcaaggacctctctgtggtccacagtgacctctccagcattgtgatcctggataactccccaggggcttacaggagccatccagacaatgccatccccatcaaatcctggttcagtgaccccagcgacacagcccttctcaacctgctcccaatgctggatgccctcaggttcaccgctgatgttcgttccgtgctgagccgaaaccttcaccaacatcggctctgactgggacacaggcggaagcctaggagagccgaatcagtgtttgtgaagaggcaggactggccagagtgacagacatacggtgatccaggaggctcaaagagaagccaagtcagctttgttgtgatttgattttttttaaaaaactcttgtacaaaactgatctaattcttcactcctgctccaagggctgggctgtgggtgggatactgggattttgggccactggattttccctaaatttgtcccccctttactctccctctatttttctctccttagactccctcagacctgtaaccagctttgtgtcttttttccttttctctcttttaaaccatgcattataactttgaaaccaaaaaaaaaaaaaaaaa

SEQ ID NO: 139 - DNA, 2000 bp, Homo sapiens
cccacctagggcacgctgccacgccgccgttacctggtccaagtgcccgggaggctccgcctgtcggcttcgctctgcagctgcatctctgatctgtcctgcaggctcaggctctgacacctccattctctgtccccaagcgccatgagaggccttctttgctggcccgtgtwgctgctccttcttcarccctgggaaacccagctccagttgacaggtcccaggtgtcacactsggmccctggatctggtgtycgtgattgacagctcccgcagcgtgcgccctttcgagttcgagaccatgcggcagttcctcatgggcctcctccgaggcctgaacgtgggtcccaacgccacgcgcgttggcgtgatccagtattcgagtcaagtgcagagcgtcttccctctccgcgcgttctctcgccgcgaggacatggagcgcgccatccgcgacctggtgcctctggcgcaaggcaccatgacgggactggcaatccagtacgccatgaacgtggccttcagtgtggccgakkkcgcgcgaccgccagaggagcgcgtgccgcgtgtcgctgtcatcgtgacagacgggcgkycccaggaccgcgtggccgargtggcggcacaggcgcgcgcccgcggcattgaaatttacgcggtgggggtgcarcgcgcggacgtgggctccctgcgcgccatggcatcgcccccgctagacgagcacgtcttcctcgtagagtccttcgacctcatccaggagttcggcctgcagttccagagccggctgtswggtccgggacctttgcaatggcgtggaccatggctgtgagttccagtgtgtgagcgagggcctctcctaccgctgcctgtgccccgaggggcggcaacttcaggcagatggcaagagctgcaaccggtgccgggaaggccacgtggaccttgttctgctggttgatggctccaagagcgtgcgtccacaaaacttcgagctagtgaagcgcttcgtgaaccagattgtggacttcctagatgtgtcccccgagggcacgcgggtggggctggtgcagttctcgagccgcgtgcgcaccgagttccctctgggtcgctacggcaccgcagccgaggtgaagcaggcggtcctggccgtggagtacatggaacgcggcaccatgacagggctggcgttgcggcacatggtggagcacagcttctccgaggcgcagggtgcacggccccgtgcccttaacgtgcctcgtgttggmctggtcttcacggatggccgctcccaggatgacatctcggtgtgggcagcgcgcgccaaggaggaaggcatcgtcatgtacgccktgggcgtgggcaaggcggtggaggcggagctgcgcgagatcgcctcggagccagcggaactgcacgtgtcctatgccccggacttcggcaccatgacgcacctgctggagaacctcagaagcagcatctgtccagaggagggcatcagcgcagggacagagcttcggagcccatgcgaatgcgaaagcctcgtggagttccagggccgcacgctgggggcgctcgagagcctgacgctgaacctggcccagctgacggcgcgcctggaggatctggagaaccagctggccaaccagaagtgagggtcacggacggcccagacccgggctggggcgcggcaccacggacggtgccccttgcgcgccatcggtgcgccggggccaggcagaacctgggcccgtccggcttgggctgtcggggcggaggcgctggcgggcttccggcattgagctgagttggcctcgcccggaccattaggcggactgcggcgtcagggggatagcgggtggtgagggaaggggcacgtgctagaccggcacgccctcgccgcgtgtgcgctcagttctttgttggatttcttgtttgtgttcttaaaaaaataaaaaaaactgatttccaaaaaaaaaaaaaaaaaaaaaaaaaaaaaaaaactcgtag

SEQ ID NO: 140 - DNA, 1526 bp, Homo sapiens
ggcacgagcaggggttgaccaggacagttccccatctcagctggtgattgggaacagagactcccttgttctcctgcacaccctggctcatggctcttacttggtgtgtggaggaaggaaaaaagaagaccttcaccatcacctctccccattcatttattcacagcacttaccaccctctacagtgatccccttggaagatgagctccatgagggcagggattgtgtgtatcttgtatatcttcatatgctcagtgtttgcacaatgtctggtgcacagcagggtttcaatgtatgaatgtgtgggatagtggcctggtagggcaaggttacacagcaagtccaggacagagcctaactctggagcctcagactatattctgccagtccaagcaagggaatcctgatttcggcctgagagatgcatcttctagcaaagtcaacatcgggatggctcctgagctttccttctcagaggggtgggcttcctacttccccctcccagactcccagtctgcaaggccaagatccatttccaggagaaaatcaatatttgatgttcccttccttccccagcattggttcagagctctggaaatctcctgccctccttacaccacgcagataggaaatctctcctttggcttttaccttctgggcccaggccacccactgctgccgtggattttagccatattattttctgctgctctgagtgccaacagcacactcagcactagacacaaacatgcaaagacgcagctcttgcctgccccaaaggcttgctgggtaagttaaacagactgtaaaatgcagacttcaaatatgccagaggcaaaggcatttaaaattctcagcgggggctggaaagagaacgcttttaaagtcttttcatttctccctcttcctttgccttcagcatcgagctgcctgtgagttgtcctgcctcttctgtctatgaccatttaaggatgactggtccttttgtgagcaggcaaaggctttgagatgttggctgtgaatgtggacagctcttcccaggctgcctgaaagagcggaggcagctaaacttggcaacaaatatttccaagcctgctttccattccatcatgcagaatggtgttattaaattgatgattcaggatctcaaaccagcagagctctgtcctttgggagaaacataatccatatgacaggtttcaccagggctatttctgaataccagaaaccagtgcctaggacagtgtagatcagagagcaggtgagctgggtgctttgggatcagaagccacctgggccagagttttgcaggtaacactctgcagtggacatgcctgggtcaacctggtgcaccgagtccatgctgtgttcactttggtgtccttttctcctgacaaagacttaacctggtgccatatctctcctaagcaatgtgaggaggatcaccttaacctggggggtcaaggctgcagtgagccatgatcacaccactgcactccagcctggacagagtgagacagtatctc

SEQ ID NO: 141 - DNA, 1887 bp, Homo sapiens
  misc_feature (1882)..(1882): n equals a,t,g, or c
gttcatcttagtcaatcctatgccacctcttcttcctccagtcccctcacctgatggtcccgacacttcatcatccaccacctcctggagggggtaccctgaggtgctccgctgggggctccgctcttcctggggctgcggttgatggctcatcatgatctttcccaaaatctgtcccatctcaccaaacctagtctctgttctgtccttggtcttcttctggacactgctgggatccagaagagtgtgttatcaattctcgaggctgggagaagtcaggagtggagaacagctctgagaagttactgttgtccaactgaactcccaggtgccgacagagtccggtccctccaatcaggaaggtcggaatctctgatgtcatcgctcatgccaacctggcaaccagtttgaaaaaaaacacatgtaactgccaggctgatctcttgtcctggagatcctgggtgaatggtatctcctgccactgtcccaacctcagaccaytgtccaaaagcatcttcagggwctccrcatccctctrttccctgtcccagcagaggctgtgtcctctccactcaaagcytgaagcrtgttggggtctcytcttctctgtacatgcccgtttcagagtccagtctggtgggagagggatcaggatgggaaagaaaagtagggtaagcagaaacgatgaaaccttacaagagtgagattatcatgtacaagagatcccaggaacattgacttgatgaaaaagtcacatcagagcactcaatttggcagaggttttctgccgagtgtctactgacattcactgtccgagattctgtactgggggtacacgcgtcctctgccctaaggcatctttgagtccaagagatattttgaggactggaaatcataggaaactgcccatgagttcacacatatttccaatggtgtccccaatttcagggagtccacggatcacctaaagccagcccctccagtttggctaagaaactctatatatcaagttttgtatcatatgtattgctcttaactcagaaaattccaccatttatagcagtggtttatttatttataccattgaaggaaatggtttatttatgaatctatattatggatattctataagatactgggtgtacaaaaagactaagtcgaaaaatctcagctgtgcacagtggctcatgyttgtaaycccatctctttgggtgsccaagggaggaagactgcctgaggccagcagttcaagaccagtataggcaacatagcaagagcccatctctaaaacaaaacaaaacaaaacaaaacaaaattagccaggtgtcgtggctggcacctgtgttccaacaacttgagagactgaggtggcaggaggattgcttgagcctaggagttaggggctgcagtgagctgtgatcgtgacaccgcactccagtctgggcaacacagcaagrccttgtgtcaaaaaaatttttttaattaaatataaaagagtttcatgacattcagagaccatccaaagaacctgtgggttccggccaggcacagtgctcacgcctgtaatcccagcgctttgggaggccatagcaggtggatcgcttgaggtcaggagtttaagagcagcctggccaacatggtgaaaccccatctcttctaaaaatacaaaaaattagtcaggcatggtggtgggtgcctgtaatcccagccactcaggaggcggggacagcagaatggcttaaacttgggaggcggaggttgcagtgagccaaggtcacaccattgcactccagcctgggcaacaagagcaaaactacatctcaaaaaaaaaaaaaaaaaactcgagggggggcccggtacccaattcgccctatggtgagtngaatg

SEQ ID NO: 142 - DNA, 1887 bp, Homo sapiens; identical to SEQ ID NO: 141
  misc_feature (1882)..(1882): n equals a,t,g, or c

SEQ ID NO: 143 - DNA, 1995 bp, Homo sapiens
gaattcggcacgagtcactctggacttttggattgtttttcacattcagtgttataatatttgattatgctgattggttttggtgggtactgatgcgaattaataaaaacttttcatttccatgtttattttgtaatctcttccacattgtaggctatgtttaccatacgtagcagaatgtgtttacatttcttggttctagtcatttgtattcttcgtgagtgtgagagtgtgtgtgtgtgtgtgtgtgtctgtgtgtgcctttggcatttaggaagggttgtatagctcatgttaaatattgcactaaaaatgtttttgatggttttcctccctttgaactagacacacttctaatatttggtttatagttttaaattataactttcagcatcaaatatttccatacaacagtcaattacatgatgtgttttctttttyctacctcctttacctgccacttctcataatagtatttgaacctaaacatataccggtgacattctgtgattatcatcttgcccctaccttggtttttggtttagatccacaatgaaatatattaacgctcatgagctattcaaaagtgaatgtcacagtcatcacttgctgagtggtactcatccttaacagagtcctcatgagggaatcaggtctcgctgagtttagcatgtttaataatcttttctcacggtctcgatacatggatcgcattactagatataaggtgcttgcccaaaatgatttttctggagtttttaggagayattgtcttccttgggggacatacatggtgtatgttctcattgtgggattckattttgttctaccaggacctctaatttctgccagttacttcaytcatttgttctcttcaccatgagtctccagaggatacttccatggtccgtgcctccccatctcccagcaattctgcatttccaagattggcacctctggtcctctgcacggtgaagccccttcctttcaattccccagtagccagtgctctaatccaccaggtctcaggcatgatctatgtttctccacactcgctttctgaggakagttttgcctgggttctatcatgaacaggccctccctgctgtcctggcctctatttgcatagtgtttcctgctccctctgccgtcgtgtggctcccagacctggctaaagaaaatcacctgagggccacagtgttccctagccctggtgtttagggcaggattatgggtgagatttttgagtctctaagttgacccctacrgctctgaagtgtatgttgagaaattcagctgttatcatcctaggtggacttgctccctcctatcctcctacttcaaatgcagaacttcaatcgtttacaaaagaagactgaatcgtataatagaacacacccttattcattggctggcttcaccaatctcatggctgaacttgtaaaaatacaatcttagccacatacctatgaaatgtatatgtgtgtrtatatatatacatgaatttgcttctgagattatggaggctgaaattcccaagatggaaggaaagctggatacccaggaaagcatttgtttcccattaggcctcttaattctctcctggcccttgattgattgcatgaggcccacccctattaaggagggcaatctgcttcacttagtctgcccatcccaatgttaatcgtatctgaaagactctctggaacacaaccagaatcatgtttggccaaatgtcctggcaccctggtgctcggtcacagtgacaagtacaagtaactatcacacatgccctttgtcatattggtgatttccactgtttttctcccaaactgcagcttatatttgttctcttartactgttgagcaaaaacttttaatttttataaagtcgaatttatcaatgttttctttaatggtttgtgtttattgataataaagaacactttrcctaaaaaaaaaaaaaaaaaactgcgaggggggcccggtacccaa

SEQ ID NO: 144 - DNA, 2908 bp, Homo sapiens
  misc_feature (2)..(2): n equals a,t,g, or c
tnttaggtgacactatagaaggtacgcctgcaggtaccggatccggaattcccgggtcgacccacgcgtccgcccasgmgtcmggccgctggcaggagacagcatgtcacccaggactctgccggtgcagaatatgaacaatgccatgttcttgcagaaaacgcttagcctgagtttcataggaggtaatcaccagacaactgcagaatgtrgaacactgagcaggacarctgacctgtctccttcacatagtccatrtcaccacaaatcacacaacaaaaaggagargagatattttgggttcaaaaaaagtaaaaagataatgtagctgcatttctttagttattttgarccccaaatatttcctcatctttttgttgttgtcatkgatggtggtgacatggacttgtttatagaggacaggtcagctgtctggctcartgatctacattctgaagttgtctgaaaatgtcttcatgattaaattcagcctaaacgttttgccgggaacactgcagagacaatgctgtgagtttccaacctcagcccatctgcgggcagagaaggtctagtttgtccatcaccattatgatatcaggactggttacttggttaaggaggggtctaggagatctgtcccttttagagacaccttacttayaatgaagtacttgggaaagyggttttcaagagtataaatatcctgtattctaatgatcatcctctaaacattttatcatttattaatcctccctgcctgtgtctattattatattcatatctctacrctgcaaatttkgggtctcaatttttactgtgcctttgtttttactagtgtctgctgttgcaaaaagaagaaaacattctctgcctgagttttaatttttgtccaaagttaattttaatctatacaattaaaaccttttgcctatcactctggacttttggattgtttttcacattcagtgttataatatttgattatgctgattggttttggtgggtactgatgcgaattaataaaaacwtttcatttccatgtttattttgtaatctcttccacattgtaggctatgtttaccatacgtagcagaatgtgtttacatttcttggttctagtcatttgtattcttcgtgagtgtgagagtgtgtgtgtgtgtgtgtgtgtctgtgtgtgcctttggcatttaggaagggttgtatagctcatgttaaatattgcactaaaaatgtttttgatggttttcctccctttgaactagacacacttctaatattggtttatagttttaaattataactttcagcatcaaatatttccatacaacagtcaattacatgatgtgttttctttttctacctcctttacctgccacttctcataatagtatttgaacctaaacatataccggtgacattctgtgattatcatcttgcccctaccttggtttttggtttagatccacaatgaaatatattaacgctcatgagctattcaaaagtgaatgtcacagtcatcacttgctgagtggtactcatccttaacagagtcctcatgagggaatcaggtctcgctgagtttagcatgtttaataatcttttctcacggtctcgatacatggatcgcattactagatataaggtgcttgcccaaaatgatttttctggagtttttaggagayattgtcttccttgggggacatacatggtgtatgttctcattgtgggattckattttgttctaccaggacctctaatttctgccagttacttcaytcatttgttctcttcaccatgagtctccagaggatacttccatggtccgtgcctccccatctcccagcaattctgcatttccaagattggcacctctggtcctctgcacggtgaagccccttcctttcaattccccagtagccagtgctctaatccaccaggtctcaggcatgatctatgtttctccacactcgctttctgaggakagttttgcctgggttctatcatgaacaggccctccctgctgtcctggcctctatttgcatagtgtttcctgctccctctgccgtcgtgtggctcccagacctggctaaagaaaatcacctgagggccacagtgttccctagccctggtgtttagggcaggattatgggtgagatttttgagtctctaagttgacccctacrgctctgaagtgtatgttgagaaattcagctgttatcatcctaggtggacttgctccctcctatcctcctacttcaaatgcagaacttcaatcgtttacaaaagaagactgaatcgtataatagaacacacccttattcattggctggcttcaccaatctcatggctgaacttgtaaaaatacaatcttagccacatacctatgaaatgtatatgtgtgtrtatatatatacatgaatttgcttctgagattatggaggctgaaattcccaagatggaaggaaagctggatacccaggaaagcatttgtttcccattaggcctcttaattctctcctggcccttgattgattgcatgaggcccacccctattaaggagggcaatctgcttcacttagtctgcccatcccaatgttaatcgtatctgaaagactctctggaacacaaccagaatcatgtttggccaaatgtcctggcaccctggtgctcggtcacagtgacaagtacaagtaactatcacacatgccctttgtcatattggtgatttccactgtttttctcccaaactgcagcttatatttgttctcttartactgttgagcaaaaacttaatttttataaagtcgaatttatcaatgttttctttaatggtttgtgtttattgataataaagaacactttrcctaaaaaaaaaaaaaaaaaactgcgaggggggcccggtacccaa

SEQ ID NO: 145 - DNA, 4907 bp, Homo sapiens
  misc_feature (2797)..(2797): n equals a,t,g, or c
ttcgactccttcaggttatcttgaactgcctgacttaggccagccctacagcagtgctgtttactcattggaggaacagtaccttggcttggctcttgacgtggacagaaytaaaaaggacsaagaagrggaagaagaycaarrcccaccatgccccaggctcagcagggagctgctggaggtagtagagcctgaagtcttgcaggactcactggatagatgttattcaactccttccagttgtcttgaacagcctgactcctgccagccctatggaagttccttttatgcattggaggaaaaacatgttggcttttctcttgacgtgggagaaattgaaaagaaggggaaggggaagaaaagaaggggaagaagatcaaagaaggaaagaagaaggggaagaaaagaaggggaagaagatcaaaacccaccatgccccaggctcagcagggagctgctggatgagaaagggcctgaagtcttgcaggactcactggatagatgttattcaactccttcaggttgtcttgaactgactgactcatgccagccctacagaagtgccttttayrtattggagcaacagcgtgttggcttggctgttgacatggatgaaattgaaaagtaccaagaagtggaagaagaccaagacccatcatgccccaggctcagcagggagctgctggatgagaaagagcctgaagtcttgcaggactcactggatagatgttattcgactccttcaggttatcttgaactgcctgacttaggccagccctacagcagtgctgtttactcattggaggaacagtaccttggcttggctcttgacgtggacagaattaaaaaggaccaagaagaggaagaagaccaaggcccaccatgccccaggctcagcagggagctgctggaggtagtagagcctgaagtcttgcaggactcactggatagatgttattcaactccttccagttgtcttgaacagcctgactcctgccagccctatggaagttccttttatgcattggaggaaaaacatgttggcttttctcttgacgtgggagaaattgaaaagaaggggaaggggaagaaaagaaggggaagaagatcaaagaagraaagaagaaggggaagaaaagaaggggaagaagatcaaaacccaccatgccccaggctcaacggcgtgctgatggaagtggaagagcctgaagtcttacaggactcactggatagatgttattcgactccgtcaatgtactttgaactacctgactcattccagcactacagaagtgtgttttactcatttgaggaacagcacatcagcttcgcccttkacgtggacaataggttttttactttgacggtgacaagtctccacctggtsttccagatgggagtcatattcccacaataagcagcccttastaakccgagagatgtcattcctgcaggcaggacctataggcacgtgaagatttgaatgaaastayagttccatttggaagcccagacataggatgggtcagtgggcatggctctattcctattctcaraccatgccagtggcaacctgtgctcagtctgaagacaatggacccacgttaggtgtgacacgttcacataactgtgcagcacatgccgggagtgatcagtcrgacattttaatttgaaccacgtatctctgggtagctacaaaattcctcagggatttcattttgcaggcatgtctctgagcttctatacctgctcaaggtcaktgtcatctttgtgtttagctcatccaaaggtgttaccctggtttcaatgaacctaacctcattctttgtgtcttcagtgttggcttgttttagctgatccatctgtaacacaggagggatccttggctgaggattgtatttcagaaccaccaactgctcttgacaattgttaacccgctaggctcctttggttagagaagccacagtccttcagcctccaattggtgtcagtacttaggaagaccacagctagatggacaaacagcattgggaggccttagccctgctcctctcaattccatcctgtagagaacaggagtcaggagccgctggcaggagacagcatgtcacccaggactctgccggtgcagaatatgaacaatgccatgttcttgcagaaaacgcttagcctgagtttcataggaggtaatcaccagacaactgcagaatgtrgarcactgagcaggacarctgacctgtctccttcacatagtccatrtcaccacaaatcacacaacaaaaaggagargagatattttgggttcaaaaaaagtaaaaagataatgtagctgcatttctttagttattttgarccccaaatatttcctcatctttttgttgttgtcatkgatggtggtgacatggacttgtttatagaggacaggtcagctgtctggctcartgatctacattctgaagttgtctgaaaatgtcttcatgattaaattcagcctaaacgttttgccgggaacactgcagagacaatgctgtgagtttccaacctcagcccatctgcgggcagagaaggtctagtttgtccatcaccattatgatatcaggactggttacttggttaaggaggggtctaggagatctgtcccttttagagacaccttacttataatgaagtacttgggaaagyggttttcaagagtataaatatcctgtattctaatgatcatcctctaaacattttatcatttattaatcctccctgcctgtgtctattattatattcatatctctacrctgcaaantttgggtctcaatttttactgtgcctttgtttttactagtgtctgctgttgcaaaaagaagaacattctctgcctgagttttaatttttgtccaaagttaattttaatctatacaattaaaaccttttgcctatcactctggacttttggattgtttttyacattcagtgttataatatttgattatgctgattggttttggtgggtactgatgcgaattaataaaaacwtttcatttccatgtttattttgtaatctcttccacattgtaggctatgtttaccatacgtagcagaatgtgtttacatttcttggttctagtcatttgtattcttcgtgagtgtgagagtgtgtgtgtgtgtgtgtgtgtctgtgtgtgcctttggcatttaggaagggttgtatagctcatgttaaatattgcactaaaaatgtttttgatggttttcctccctttgaactagacacacttctaatattggtttatagttttaaattataactttcagcatcaaatatttccatacaacagtcaattacatgatgtgttttctttttctacctcctttacctgccacttctcataatagtatttgaacctaaacatataccggtgacattctgtgattatcatcttgcccctaccttggtttttggtttagatccacaatgaaatatattaacgctcatgagctattcaaaagtgaatgtcacagtcatcacttgctgagtggtactcatccttaacagagtcctcatgagggaatcaggtctcgctgagtttagcatgtttaataatcttttctcacggtctcgatacatggatcgcattactagatataaggtgcttgcccaaaatgatttttctggagtttttaggagayattgtcttccttgggggacatacatggtgtatgttctcattgtgggattckattttgttctaccaggacctctaatttctgccagttacttcaytcatttgttctcttcaccatgagtctccagaggatacttccatggtccgtgcctccccatctcccagcaattctgcatttccaagattggcacctctggtcctctgcacggtgaagccccttcctttcaattccccagtagccagtgctctaatccaccaggtctcaggcatgatctatgtttctccacactcgctttctgaggakagttttgcctgggttctatcatgaacaggccctccctgctgtcctggcctctatttgcatagtgtttcctgctccctctgccgtcgtgtggctcccagacctggctaaagaaaatcacctgagggccacagtgttccctagccctggtgtttagggcaggattatgggtgagatttttgagtctctaagttgacccctacrgctctgaagtgtatgttgagaaattcagctgttatcatcctaggtggacttgctccctcctatcctcctacttcaaatgcagaacttcaatcgtttacaaaagaagactgaatcgtataatagaacacacccttattcattggctggcttcaccaatctcatggctgaacttgtaaaaatacaatcttagccacatacctatgaaatgtatatgtgtgtrtatatatatacatgaatttgcttctgagattatggaggctgaaattcccaagatggaaggaaagctggatacccaggaaagcatttgtttcccattaggcctcttaattctctcctggcccttgattgattgcatgaggcccacccctattaaggagggcaatctgcttcacttagtctgcccatcccaatgttaatcgtatctgaaagactctctggaacacaaccagaatcatgtttggccaaatgtcctggcaccctggtgctcggtcacagtgacaagtacaagtaactatcacacatgccctttgtcatattggtgatttccactgtttttctcccaaactgcagcttatatttgttctcttartactgttgagcaaaaacttaatttttataaagtcgaatttatcaatgttttctttaatggtttgtgtttattgataataaagaacactttrcctaaaaaaaaaaaaaaaaaactgcgaggggggcccggtacccaa

SEQ ID NO: 146 - DNA, 4102 bp, Homo sapiens
  misc_feature (1992)..(1992): n equals a,t,g, or c
agacagtaccttggcttggctcttgacgtggacagaattaaaaaggaccaggaagaggaagaagaccaaggcccaccatgccccakgctcagcagggagctgctggaggyagtagagcctgaagtcttgcaggactcactggatagatgttattcaactccttccagttgtcttgaacagcctgactcctgccwgccctatggaagttccttttatgcattggaggaaaaacatgttggcttttctcttgacgtgggagaaattgaaaagaaggggaaggggaagaaaagaaggggaagaagatcaaagaagraaagaagaaggggaagaaaagaaggggaagaagatcaaaacccaccatgccccaggctcaacggcgtgctgatggaagtggaagagcctgaagtcttacaggactcactggatagatgttattcgactccgtcaatgtactttgaactacctgactcattccagcactacagaagtgtgttttactcatttgaggaacagcacatcagcttcgcccttkacgtggacaataggttttttactttgacggtgacaagtctccacctggtsttccagatgggagtcatattcccacaataagcagcccttastaakccgagagatgtcattcctgcaggcaggacctataggcamgtgaagatttgaatgaaastayagttccatttggaagcccagacataggatgggtcagtgggcatggctctattcctattctcaraccatgccagtggcaacctgtgctcagtctgaagacaatggacccacgttaggtgtgacacgttcacataactgtgcagcacatgccgggagtgatcagtcrgacattttaatttgaaccacgtatctctgggtagctacaaaattcctcagggatttcattttgcaggcatgtctctgagcttctatacctgctcaaggtcaktgtcatctttgtgtttagctcatccaaaggtgttaccctggtttcaatgaacctaacctcattctttgtgtcttcagtgttggcttgttttagctgatccatctgtaacacaggagggatccttggctgaggattgtatttcagaaccaccaactgctcttgacaattgttaacccgctaggctcctttggttagagaagccacagtccttcagcctccaattggtgtcagtacttaggaagaccacagctagatggacaaacagcattgggaggccttagccctgctcctctcaattccatcctgtagagaacaggagtcaggagccgctggcaggagacagcatgtcacccaggactctgccggtgcagaatatgaacaatgccatgttcttgcagaaaacgcttagcctgagtttcataggaggtaatcaccagacaactgcagaatgtrgarcactgagcaggacarctgacctgtctccttcacatagtccatrtcaccacaaatcacacaacaaaaaggagargagatattttgggttcaaaaaaagtaaaaagataatgtagctgcatttctttagttattttgarccccaaatatttcctcatctttttgttgttgtcatkgatggtggtgacatggacttgtttatagaggacaggtcagctgtctggctcartgatctacattctgaagttgtctgaaaatgtcttcatgattaaattcagcctaaacgttttgccgggaacactgcagagacaatgctgtgagtttccaacctcagcccatctgcgggcagagaaggtctagtttgtccatcaccattatgatatcaggactggttacttggttaaggaggggtctaggagatctgtcccttttagagacaccttacttataatgaagtacttgggaaagyggttttcaagagtataaatatcctgtattctaatgatcatcctctaaacattttatcatttattaatcctccctgcctgtgtctattattatattcatatctctacrctgcaaantttgggtctcaatttttactgtgcctttgtttttactagtgtctgctgttgcaaaaagaagaacattctctgcctgagttttaatttttgtccaaagttaattttaatctatacaattaaaaccttttgcctatcactctggacttttggattgtttttyacattcagtgttataatatttgattatgctgattggttttggtgggtactgatgcgaattaataaaaacwtttcatttccatgtttattttgtaatctcttccacattgtaggctatgtttaccatacgtagcagaatgtgtttacatttcttggttctagtcatttgtattcttcgtgagtgtgagagtgtgtgtgtgtgtgtgtgtgtctgtgtgtgcctttggcatttaggaagggttgtatagctcatgttaaatattgcactaaaaatgtttttgatggttttcctccctttgaactagacacacttctaatattggtttatagttttaaattataactttcagcatcaaatatttccatacaacagtcaattacatgatgtgttttctttttctacctcctttacctgccacttctcataatagtatttgaacctaaacatataccggtgacattctgtgattatcatcttgcccctaccttggtttttggtttagatccacaatgaaatatattaacgctcatgagctattcaaaagtgaatgtcacagtcatcacttgctgagtggtactcatccttaacagagtcctcatgagggaatcaggtctcgctgagtttagcatgtttaataatcttttctcacggtctcgatacatggatcgcattactagatataaggtgcttgcccaaaatgatttttctggagtttttaggagayattgtcttccttgggggacatacatggtgtatgttctcattgtgggattckattttgttctaccaggacctctaatttctgccagttacttcaytcatttgttctcttcaccatgagtctccagaggatacttccatggtccgtgcctccccatctcccagcaattctgcatttccaagattggcacctctggtcctctgcacggtgaagccccttcctttcaattccccagtagccagtgctctaatccaccaggtctcaggcatgatctatgtttctccacactcgctttctgaggakagttttgcctgggttctatcatgaacaggccctccctgctgtcctggcctctatttgcatagtgtttcctgctccctctgccgtcgtgtggctcccagacctggctaaagaaaatcacctgagggccacagtgttccctagccctggtgtttagggcaggattatgggtgagatttttgagtctctaagttgacccctacrgctctgaagtgtatgttgagaaattcagctgttatcatcctaggtggacttgctccctcctatcctcctacttcaaatgcagaacttcaatcgtttacaaaagaagactgaatcgtataatagaacacacccttattcattggctggcttcaccaatctcatggctgaacttgtaaaaatacaatcttagccacatacctatgaaatgtatatgtgtgtrtatatatatacatgaatttgcttctgagattatggaggctgaaattcccaagatggaaggaaagctggatacccaggaaagcatttgtttcccattaggcctcttaattctctcctggcccttgattgattgcatgaggcccacccctattaaggagggcaatctgcttcacttagtctgcccatcccaatgttaatcgtatctgaaagactctctggaacacaaccagaatcatgtttggccaaatgtcctggcaccctggtgctcggtcacagtgacaagtacaagtaactatcacacatgccctttgtcatattggtgatttccactgtttttctcccaaactgcagcttatatttgttctcttartactgttgagcaaaaacttaatttttataaagtcgaatttatcaatgttttctttaatggtttgtgtttattgataataaagaacactttrcctaaaaaaaaaaaaaaaaaactgcgaggggggcccggtacccaa

SEQ ID NO: 147 - DNA, 3977 bp, Homo sapiens
gctcgtgccgctcgtgccgctcgtgccgctccttccagttgtcttgaacagcctgactcctgccagccctatggaagttccttttatgcattggaggaaaaacatgttggcttttctcttgacgtgggagaaattgaaaagaaggggaaggggaagaaaagaaggggaagaagatcaaagaagraaagaagaaggggaagaaaagaaggggaagaagatcaaaacccaccatgccccaggctcaacggcgtgctgatggaagtggaagagcctgaagtcttacaggactcactggatagatgttattcgactccgtcaatgtactttgaactacctgactcattccagcactacagaagtgtgttttactcatttgaggaacagcacatcagcttcgcccttkacgtggacaataggttttttactttgacggtgacaagtctccacctggtsttccagatgggagtcatattcccacaataagcagcccttastaakccgagagatgtcattcctgcaggcaggacctataggcacgtgaagatttgaatgaaastayagttccatttggaagcccagacataggatgggtcagtgggcatggctctattcctattctcaraccatgccagtggcaacctgtgctcagtctgaagacaatggacccacgttaggtgtgacacgttcacataactgtgcagcacatgccgggagtgatcagtcrgacattttaatttgaaccacgtatctctgggtagctacaaaattcctcagggatttcattttgcaggcatgtctctgagcttctatacctgctcaaggtcaktgtcatctttgtgtttagctcatccaaaggtgttaccctggtttcaatgaacctaacctcattctttgtgtcttcagtgttggcttgttttagctgatccatctgtaacacaggagggatccttggctgaggattgtatttcagaaccaccaactgctcttgacaattgttaacccgctaggctcctttggttagagaagccacagtccttcagcctccaattggtgtcagtacttaggaagaccacagctagatggacaaacagcattgggaggccttagccctgctcctctcaattccatcctgtagagaacaggagtcaggagccgctggcaggagacagcatgtcacccaggactctgccggtgcagaatatgaacaatgccatgttcttgcagaaaacgcttagcctgagtttcataggaggtaatcaccagacaactgcagaatgtrgarcactgagcaggacarctgacctgtctccttcacatagtccatatcaccacaaatcacacaacaaaaaggagargagatattttgggttcaaaaaaagtaaaaagataatgtagctgcatttctttagttattttgarccccaaatatttcctcatctttttgttgttgtcatkgatggtggtgacatggacttgtttatagaggacaggtcagctgtctggctcartgatctacattctgaagttgtctgaaaatgtcttcatgattaaattcagcctaaacgttttgccgggaacactgcagagacaatgctgtgagtttccaacctcagcccatctgcgggcagagaaggtctagtttgtccatcaccattatgatatcaggactggttacttggttaaggaggggtctaggagatctgtcccttttagagacaccttacttayaatgaagtacttgggaaagyggttttcaagagtataaatatcctgtattctaatgatcatcctctaaacattttatcatttattaatcctccctgcctgtgtctattattatattcatatctctacrctgcaaatttkgggtctcaatttttactgtgcctttgtttttactagtgtctgctgttgcaaaaagaagaaaacattctctgcctgagttttaatttttgtccaaagttaattttaatctatacaattaaaaccttttgcctatcactctggacttttggattgtttttcacattcagtgttataatatttgattatgctgattggttttggtgggtactgatgcgaattaataaaaacwtttcatttccatgtttattttgtaatctcttccacattgtaggctatgtttaccatacgtagcagaatgtgtttacatttcttggttctagtcatttgtattcttcgtgagtgtgagagtgtgtgtgtgtgtgtgtgtgtctgtgtgtgcctttggcatttaggaagggttgtatagctcatgttaaatattgcactaaaaatgtttttgatggttttcctccctttgaactagacacacttctaatattggtttatagttttaaattataactttcagcatcaaatatttccatacaacagtcaattacatgatgtgttttctttttctacctcctttacctgccacttctcataatagtatttgaacctaaacatataccggtgacattctgtgattatcatcttgcccctaccttggtttttggtttagatccacaatgaaatatattaacgctcatgagctattcaaaagtgaatgtcacagtcatcacttgctgagtggtactcatccttaacagagtcctcatgagggaatcaggtctcgctgagtttagcatgtttaataatcttttctcacggtctcgatacatggatcgcattactagatataaggtgcttgcccaaaatgatttttctggagtttttaggagayattgtcttccttgggggacatacatggtgtatgttctcattgtgggattckattttgttctaccaggacctctaatttctgccagttacttcaytcatttgttctcttcaccatgagtctccagaggatacttccatggtccgtgcctccccatctcccagcaattctgcatttccaagattggcacctctggtcctctgcacggtgaagccccttcctttcaattccccagtagccagtgctctaatccaccaggtctcaggcatgatctatgtttctccacactcgctttctgaggakagttttgcctgggttctatcatgaacaggccctccctgctgtcctggcctctatttgcatagtgtttcctgctccctctgccgtcgtgtggctcccagacctggctaaagaaaatcacctgagggccacagtgttccctagccctggtgtttagggcaggattatgggtgagatttttgagtctctaagttgacccctacrgctctgaagtgtatgttgagaaattcagctgttatcatcctaggtggacttgctccctcctatcctcctacttcaaatgcagaacttcaatcgtttacaaaagaagactgaatcgtataatagaacacacccttattcattggctggcttcaccaatctcatggctgaacttgtaaaaatacaatcttagccacatacctatgaaatgtatatgtgtgtrtatatatatacatgaatttgcttctgagattatggaggctgaaattcccaagatggaaggaaagctggatacccaggaaagcatttgtttcccattaggcctcttaattctctcctggcccttgattgattgcatgaggcccacccctattaaggagggcaatctgcttcacttagtctgcccatcccaatgttaatcgtatctgaaagactctctggaacacaaccagaatcatgtttggccaaatgtcctggcaccctggtgctcggtcacagtgacaagtacaagtaactatcacacatgccctttgtcatattggtgatttccactgtttttctcccaaactgcagcttatatttgttctcttartactgttgagcaaaaacttttaatttttataaagtcgaatttatcaatgttttctttaatggtttgtgtttattgataataaagaacactttrcctaaaaaaaaaaaaaaaaaactgcgaggggggcccggtacccaa

SEQ ID NO: 148 - DNA, 2036 bp, Homo sapiens
aattcggcacgaggaagagtggtgtctccttcagcagggcgtgcagtggtggctctttttcttctgtgaccctttatacccattttcacttttccccattgtggacactctgagtccatgttgttcttcccacttgtcctcctgccatgtgttttcctttcttatagtaaaaggaggagagcgcagggttaaaaagacggtaactgtgtgcttctcctcccatgcagacaagcagccagcagcagctcctgagccccacgctgtcggatcgaggaggaagtcggcaagatgcagccgacgcagggaaaccccagaggaaatttgggcagtggcgtctgccctcaggtaggtccatccaggcatttctccagcgatcgaggcattttaaaggtatttactctgtttgtgtgttttgggtcttgcctttcaaaatgcaagtctgcatctacagttgtttacagacagcaacataatgaaaaatgtagtcttgtcaaaaacattgtcccccaaaataacttctctaaatatgacttacattagcccccattttccgggtacatttcaggctatcatggttgagaagccagcacctatgaaaaagacaagattcagaaagagggagaaatttccaagggctttctgtgtgcctcaaggcatgctcaaacatgggcaaaagtattcaactgaagagggagtgggcagatgcaatcattcagaaaatgccacgaagttctcaaaaaagggacaggcccccgatttctctcagcacactttgcagctgagccggtcactggctttaggcaagctgctttacctccatacaataacaaacaacaacaacaaacacttacgtagtactcactgtatgccagtcactcttctaagtgcattacttgtgttctctcattcaatcctttaataaacaatcccattattttccatattttactgattcagtaagagaattttcttctatgagcttcttctctatagggttttggaaagccaggataatcccattaagagcactcaggaatcgagggagagcaatgctccccacagcccagtgtccttgtacatgtttttttctatagataactaagttcatgctaaagcaggagctttataatgctctttaactgtgccccaacttcagcccaattgaaaggagaagatgtgtagcatatgtgttccacaaagcagatgacagcacagcttacattttgaggctgacgatgttcagtgggtcttcactgggactaccaccaaggaaagtatcccctttcatatccaggaacttatttttcagagatcagagaagatctaggttcctcctgattcaaaacacagcagagaatgacagcatcaagacaacgtagatggtggtgccaggtcataaattacaagctgagtcggttcaattttatcctgtaggcaattaggagctagcaaagatttctgagcagtatgtgacttttggaatctgtgctttaggaagttgacttggcagcaaaggagggaattgtctatgacagagcctggaggcaggttacaagctggaggaagttaccgtggtgtgagcacaaggcaacaaaggcatggacagagctgggggccagatactgcagggacagataggagaggtgacctggggagaatgcacagtccttggtattcatttaaatggacaaaagaaatgatgctgtcaaaagtacttccattgggccaggcgcagtggctcacccctgtaatcccagcactttgggaggccgaggcaggtggatcatttgaggcctggagttcaagaccagcctggtcaacatggtgaaaccctgtctctactaaaaatacaaaaattagctgaccggtagtggtgtgcacctgtaatcccagctgcttgggaggctgaggcaggagaatcacttgagcctgggaagcagaggttgtggtgaaccaagattatgccgctgcactcctgtctgggtgagagagtgagaacctgtctcccaaaaaaaaaaaaaaaaaaaaaaaaaaaa

SEQ ID NO: 149 - DNA, 2204 bp, Homo sapiens
ggcctgggcgacagagtgagaatctgtctcaaataaataaataaaattaaattataacaggcaaaccgtcactggccagggaactcctacgtggaataaacawagctgatgtgtaaagaattctgaggtgtgcttcacaggtcaccacacacagctagccttctgttggggtctggcccagccctgtgcttgggtaaggacagaaggctctgggtgacgctccgtgaaggagaacccagttgctgggcattgtctcttgtgcggtgatgctgatgcctatcctttggtctcatgcctggctctgctttgctgcgcaytctgtctcccactccgtgctgtctgagatgcaggtgattgagcaggaaaccccagtgagtgcaaaatcctctcgctcgcagctggacttgtttgacgatgttggtactttcgcctctggacccccaaagtacaaggacaatcccttttccttaggggaaagctttggctcccgctgggatacagatgctgcctggggtatggacagggtagaggagaaggagccagaagtgaccatctcaagcatccggcctatttcagaaagagccacaaaccggagggaagtggagagccggagctcaggcctcgagtctagtgaggcgcgtcagaaattcgcaggagccaaagccatctcatctgacatgttctttgggcgggaggtggatgcggagtatgaggccaggtctcggctgcagcagctctcaggcagcagtgccatcagctcttcagacctctttggggacatggatggagctcacggagcaggaagtgtatctctggggaacgtgctgcctacagcggacattgcccagtttaagcagggtgtcaagtctgtggctgggaaaatggctgtgctggccaatggtgtgatgaattccttgcaggatcgctacggttcctactgatccgagctctgtgactcaggcttacgatggtgacggcaacaagaactccacagttcccaggctggggatgctttgccttgtggaagctggggaggatttgttacttcgtatgtgtggtgtgtgtgtggggtggcctttgaggcgctcactcctgtgaggggaatggtcagtaccagcccttgtcctctgcctgtggactgagccctttattccctctcacaccaccctccgtgtgttagactcttgtccttctgtcctgcccccacagctgctgctcacttatcctgccatactgggaaagggggttcccccacgatggcttattctgggtccagactttccccaggtagggaaagcggaaggtagaaggctttttttgctggctctagggttcttctagttcgaggccttgggtccccatcctctggaaccagggggaggcctggaaggagttcactgtagacccgtcccatggggaaagaggctgcggacttgctgctgctgctgctgccagtggcctcttctgggtgccaggagaggggaaggacctttgtctgggcgttaccaagggctggaaactttacctggtacctaaaggtttcatttggtatcagaccggagacccttgggttctcccgtctcaccacccctttctacagtaagcacttggaagattgtttcagggtgtctcagggtccctctgtaccatctgctgtggaatgcaggaccctctgtgacattctttatcccttcttccccgggttggtggccatggagggtcttgtctgctgtgattcgactctggatgctgtgagcttgatgctggccagggaagcagaggatgtgagaggcagaggcaggctcctggggctgagctccttcctctgcatcattctgggcttggcctggacagcacccgccagtgagagctgtgggcctcaccctctggcagctgagccaagcactgtcattcttggtgccatcttcccctgccgcaccggcagtctcagcccagcccccacctttgggttgtaggttgggctcccaagcaacacagaccactcttccccttgcccctcccccagagggacttgactttctttctggactgtttgtattgaaacaaagtggtgtcaaaataaagcccctgcagggcctggctccctgttggtctgagtgaaaaaaaaaaaaaaaaaaactcgggtcgacggtatcgataagcttgatatcgaattcgatatcaagcttatcgataccgtcgac

SEQ ID NO: 150 - DNA, 1047 bp, Homo sapiens
  misc_feature (34)..(34): n equals a,t,g, or c
caggaactaggaggttctcactgcccgagcaganggccctacacccaccgaggcatggggctccctgggctgttctgcttggccgtgctggctgccagcagcttctccaaggcacgggaggaagaaattacccctgtggtctccattgcctacaaagtcctggaagttttccccaaaggccgctgggtgctcataacctgctgtgcaccccagccaccaccgcccatcacctattccctctgtggaaccaagaacatcaaggtggccaagaaggtggtgaagacccacgagccggcctccttcaacctcaacgtcacactcaagtccagtccagacctgctcacctacttctgccgggcgtcctccacctcaggtgcccatgtggacagtgccaggctacagatgcactgggagctgtggtccagacagaggggcaggccccagggtggagatgatctgccaggcgtcctcgggcagcccacctatcaccaacagcctgatcgggaaggatgggcaggtccacctgcagcagagaccatgccacaggcagcctgccaacttctccttcctgccgagccagacatcggactggttctggtgccaggctgcaaacaacgccaatgtccagcacagcgccctcacagtggtgcccccaggagggttscccagggcacccaccatcgtgctggttggcagccttgcctccactgcggccatcacctccaggatgctgggctggacccacgtgggcccaggtggtgaccagaagatggaggactggcagggtcccctggagagccccatccttgccttgccgctctacaggagcacccgccgtctgagtgaagaggagtttggggggttcaggatagggaatggggaggtcagaggacgcaaagcagcagccatgtagaatgaacygtccagagagccaagcacggcagaggactgcaggccatcagcgtgcactgttcgtatttggagttcatgcaaaatgagtgtgttttagctgctcttgccacaaaaaaaaaaaaaaaaaaaactcga

SEQ ID NO: 151 - DNA, 2114 bp, Homo sapiens
  misc_feature (676)..(676): n equals a,t,g, or c
  misc_feature (699)..(699): n equals a,t,g, or c
gattttgaatggcagccattgttatttttcattttctccccttttgctttctctgtttccctggtttaaagtgtgcactctaataatttagaagatggcagaagcattcaagagcgggaccttctgagcagggcgaggctttgagttcggggcagttttcatggtagcatctgcctgtgctgaagcagaaaacagcatctgggacccccatgacttgggcactcttaggacagcccgcagatggttgcgtggggttcaggggcccttcccgcctggctcctcttgtctgcatcctgccctgtcatgtggacctagttcacactctgaggccctgcaaaacatgtcacctgtgggcacctccagttttccagtgcctggtccgcagctcgtctcggcagctgcatccttagggccattcccaaaacctcgggtcacggcgggggcctagggggacagcaaggcctttgccccttaagcctgatgaaaatttgtaggagagacttcagtgtccttawgaatttcagtgaagccgagtgggattaaggtgacagacagaagctctaagtgctttcttcagggagataaagcgctggcgagtgcatcatttaaaccgaagatggagtgagcgccaacaggcactggtggttgttgctgttctaatgggattgcttcgtanatggcccttcatggcggaacacncgtgtgtcagtggggttcgggctgcgggtggckgctgartgtccctgtgtgtctcttacaggaacartgtgtggtggatgcagctctggartacgttcccggcgctcaccartttggtctcacacaaaacarccatttcatcttgccttttaatcagtcggctgtcagaaagaagctctcggttgagctaagcatccgcacgttcgcctccagcggcctgatttactacatggctcatcagaaccaagcagactacgctgtgctccagctgcacgggggccgcctccacttcatgtttgaccttggcaaaggcagaacaaaggtctctcaccctgcactgctcagtgatggcaagtggcacacggtcaagacagactatgttaaaagaaaaggcttcataactgtcgacggccgagagtctcccatggtgactgtggtgggagatggaaccatgctggatgtggagggtttgttctacctaggaggcctgccctcccagtaccaggccaggaaaattggaaatatcacccacagcatccctgcctgcattggggatgtgacggttaacagcaaacagctggacaaggacagcccggtgtctgccttcacggtgaacaggtgctacgcagtggcccaggaaggaacatactttgacggaagcggatatgcagctcttgtcaaagagggctacaaagtccagtcagatgtgaacatcacactggagtttcgaacctcctcgcagaatggcgtcctcctggggatcagcactgccaaagtggatgccattggactagagcttgtggacggcaaggtcttgttccatgtcaacaatggtgctggcaggataacagctgcatatgagcccaaaaccgccactgtgctctgtgatggaaaatggcacactcttcaagctaacaaaagcaaacaccgtatcactctgattgttgaygggaacgcagttggcgctgaaagtccacacacccagtctacctcagtggacaccaacaatcccatttatgttggtggctatcctgctggtgtgaagcaaaaatgcctgcgcagccagacctcgttccgcgggtgtttgaggaagctagctctgattaagagcccgcaggtgcagtcctttgacttcagcagagcgttcgaactgcacggagttttccttcattcctgtcctgggaccgagtcctgaacttcaagcagaatcctcagttggaatcattgctaatattttgaggagaagtgtatgtgtgaattaagaatctcttcagttcatatttcatttccaactcaggttaagtgtttctggggagagatgttgtgtttacgttacactaaaaccacatgtgcaacaaatacctccattaaatggtctaaaatgtaaaaaaaaaaaaaaaaaaaaaaaaaaaaaa

SEQ ID NO: 152 - DNA, 676 bp, Homo sapiens
  misc_feature (638)..(638): n equals a,t,g, or c
  misc_feature (656)..(656): n equals a,t,g, or c
  misc_feature (675)..(675): n equals a,t,g, or c
ttcggcagagtggcccctcctcgacactaagccccccacagactcagcctccaaggaaccgctgagcacccttgaagcatgtcattgtcagtgatacctttttattctatggaactctaacctattcgtgtcatattgaccttttgctgcatgagtcataaattatgaaatcagtcttacagtttttgaaatktagccagcatttgtaaggctaaacctttttcatgaactgaatttaagtgaataaccaagccacagttcctcctcaaatggagagtgatgatcgacatttgaatctctttgccctttccaacggctatggcatcaggttctaaaataagctcgtaatttttcctgttattttaataatatggaaatattagcatagtgtttcttttgatagtgatagactataatccatatttaaattttatagagaagaaattttattgtactgtgatgtagatatttattatccaggtaaggatttgcccggtgtgtattttttacaattgagacattttactttaatctttaaaaaaaatgcattaaaaacacactcaaaaaaaaaaaaaaaaaactcgagggggggcccggtamccaattcgscctatagtgagtsgtataaaatcactggngtcgtttacaagtcgganggggaaacccgggttaccna

SEQ ID NO: 153 - DNA, 1121 bp, Homo sapiens
  misc_feature (286)..(286): n equals a,t,g, or c
  misc_feature (1102)..(1102): n equals a,t,g, or c
  misc_feature (1105)..(1106): n equals a,t,g, or c
gtttctttattcctaatgcagttagaaagacctttctccttgagctctttgactcccagaaggtaccccagtccccagtgtacttagaaaggatctcgaacattgctggacgtcctcatagtactcacaaagggctagccttgaatgtcactcgcccagtcttcagtctcctgacttagagatacaatcacgtcacaggtctcttggcctcaatctgaaaactgctgccgccgcgccgaggagactcgcatgccgccaccacctcactgggagggcgccgagccanccgtcgccccctagaccctgacagctgcagctgccttgccttgccgccgcctccctgcagggcccctgttccaatgaaaaacagaacacaaaagagcagagcacctaagcctgtctctgcctccctgtctaccggactggccagggccaagacccccgctgctccactgcggggctgggcgggctgactccctgcttcctccargctgctgcctcccctgcagccagggtctgggcagggtgcagccggtcctcgggcgcacgcagcttccttcaagtacactgtgtgtgcttcccggacctgcggcgatgccacgggcctgccttttctatgcgcctcactagcttaccaccctgtgcaggtaatgcaactgactttgtctcatcagtctttttctttccctgccaccctttatttatcaagcgtaatgttacactttaaaggacagcaaataagaactttgtagaatcccaccaggactttgctaacaataatgtttggaaataaagaagtgctctgaaaaaatatcagccaccaaaatagttatgttggcactgtgttcacacgcatggtccccacacccccaggttgggtgggtttttttgttttttgggtttttttggggggggggctttttcatgttacatccatatctgtatttatatcttatttgtttcactttcaagtgtatcatggcaaatgtacagatttttttgttaataatgtgctaggatttgctaaaaaagaaaaaaaaaaaacccttttgagtttgccctagaataaatgagacttaattcaaaaaaaaagggaaaatgnagnnggaaaaaaaaaaggg

SEQ ID NO: 154 - DNA, 1189 bp, Homo sapiens
ggcacgagattgtttttcccaccttgtcgctgaacctgtctcctcccaggtttcttctctggagaagtttttgtaaaccaaacagacaagcaggcaggcagcctgagagctggcccaggggtcccctggcaggggaaactctggtgccggggagggcacgaggctctagaaatgcccttcactttctcctggtgtttttctctctggacccttctgaatcatagaccggacaagagcctgcagcggaagggactctgggctgtgcctgaagctggctgggggcaggacaacacagctgcttccccaggctgcccactctggggaccgctgggggctggcaaaggcatcggtcagcggggcagcggggctggccatgagggtccaccttcagccctttggcttcaaggatggagatggttttgccctccctctctgccctcgggtggggctggtgggtctgcagctggtgtgggaacttccccacggatggcggtggagggggttcgcaccgtgctgggctccccctgactgtagcacggagtgttggggctgggcgccatctccaggagggcttgagagctcagcctgcctgggagagcccttgtggcgaggcattaaaacttgggcaccagcttctttctcggtggcagaaattttgaagtcagagaagaaacggtcctttgttggcttctttgctttctcgtgggtcctttggcaggcctccctttggggagagggaggggagagaccacagccgggtgtgtgtctgcagcaccgtgggccctcaagctttcctgctgtcttctccctcctcctcctttcccctttctctttcctcatttcctagacgtacgtcaactgtatgtacataccggggctcctctcctaacatatatgtatatacacatccatatacatatattgtgtggtttcccctttctttcctttttttaagcaacaaaactatggaaataataccccaacagatgagcgaaaatgtattattgtaaagtttattttttttaatactgttgtctataatggggaaaaaggacattggccccgcagtgccctgccccagtcagcctggctgggctctggtgggggctcctgatccgcatccaagcttaaccaaggctccaataaacgtgctaggaagcaagcaaaaaaaaaaaaaaaaaaaaaaaaa

SEQ ID NO: 155 - DNA, 1820 bp, Homo sapiens
ggcacgaggtcaatggcttggacagacagacgggctcagtggcatttggaaccctctttggtgccctcccattctctctggaattgtttcaagtctgctggttttcaaacaagaaaagacctttctggccatagggagaatagcagggagtctatgttttggtggttacattggaaacatcttaagcaagagagggaaagttgattttaggcacacatgtaccctccttgacagcaggaactcagacttcaatcttgggggtctaagaccagaatattttccttctgccagaaaagaatcttgcacatatactcctgaggcatgagtgtgtggtccatggcaagaaatagctaaaggctgctttccaggacccaaagccccatttaatgcaagaaccagagaagtgttctaggccattagtggacaatgtcatgtttggagaaagataacaacacaaataatgtaacctttccttaaaaggcagaactcaatccattttatttgatgcttattctaaccctaaccctgggtcacctggaatgaagaactctatgaataatatttgattttacaacgtgttatggttatgtgaaaactaaacatttgccttttataaagactgacaaaatataaatctttattctaaccctatccccaaaactagccaggccacaccccagatgttcttattgactattgggaagatagaaaaggcgttgtgttttttgtttttttgttgttgttgtcattgttgtttttttcagaagaccagtgtctcagttctgtcttagtagtaccacacccgtaaccgtgttttaaaagtttgttttagcctagagacagatcatacgagttcaacaatgtacagtgtgattgaaaagacaggttggtgtctatttttctttttaaaatatctgaatgtgtatttgtaatacgtaaaggtaaaaaaaaatagtgccaaaaatgtgcaaggcatctcattacagctcatgtacgtctgtttttataagatcaatattaaaacccattgggattaaatatttttgaataggatacactcttgrgaaactcgrgaatggactgagccttcctacaagccactctttgtttttaaaacagtggggaaatacgtttacagagattgtgagcttcagagaatgcatgtgatggtgtgtattacatgctaattcatataagctgtatctgtcagctaccaccctgtgctttaaaaatgcacacactcaaccctctttagcttggagctcagctttttgcttttttttttttttttgtagaattatttagctaacataagtattctgawtgctacctgatggccattcttacttagtttcatagatgtgctttaactatgatcctttgaagctcaccccttggagascctacagaacctcaggctgatagctttgaagactgccaaacagcccagaaggaagcaaagcatctgcataatcaggagggttgtataacaagtagtgatttggcaaatatgtgggtagctttaggctgaggcacgggcctcaggcaaaaatgcccttcgagtgaatccgaagggcatgatcttcctatgtccttgactaggcatgacgagtcatttgaggtcagatattatttgagttgttcagcacccccaaaggtaggcattctcctgggaaattttcatttccattttatcgccaaacaaaataaaaagcaaaacaaactttctaagctagaataatgaaattaagtcattttccactttgtatatattgatgctaataaaacagatgaaaaaraaaaaaaaaaaaaaaactcga

SEQ ID NO: 156 - DNA, 1573 bp, Homo sapiens
  misc_feature (1549)..(1550): n equals a,t,g, or c
gacaattcctgcccctaaagcctaggagatccctctcccttgctagagagccacccccaaatcaaaatgtgaaaatccctagaaagcaatagccttcgaggtaccttgcactgaatttcccaccccagcccttccacccgatgggaggctgtaacttgggcactggggtgactttttccatgcccttgtcatctccagggtgggaggcaggccccacttcccctcccctatcccccacttcccattgttgttgccccacccctaatctccagactgaacccagatggagatctgagtgccaaaacaattcttgatgtaactttgtacatatcttctactaccgttgggggctcttggggttagaggtgggggcggctctgtgggccattgctcccctccacctctcaaaagaccttacagtatttcacagtatctctacccgcacgcgagtattacagtatctagctggaatatccccctacagccccccaggaccctatgaggaagggaaggagccagggagagtgaagtaaggtctgggactggggaggtgggatctgaatgaactcatttgcatatcatttgcatcctccgcttggcagccgctttctacaaactcattcactggagtctgggtcccaatcagccgggtccaggactcctctcacacagacacatctccggaggctgggcctcctgaaaagtgtttgcttggggtgtctgtgtaacaacccctccctattcatatttcttggggaccccctacccagccagccagggtgatctgaaaggtatactttgctagctcagtgagctagttcactcaccatgttggtgagcagagagccacacctttccccattttaccytgggaaactcactccaccatctttgccatctcttgaaagtcccttctgcaatctgacctcaatcttttgtgctgcagtttgtccagaggggacacagatgtggggtcagggatgaggattattgraaaacccatcatctctttttttttccccgtctccctattagccaatccgatctcagagtctctgagtggcctccttgcacccttctcttcagcacccagtaggtgcttaataagtgtttgctgcattgaattatctccctattccttctcatttgccctctagcttcccataccttctccaagtgtcttcctccctttctttgtctggctccctatgactttctatttttttttcctccgtgtggttcccattgttttctgtcctgtctctatcttagtctttgtctgtcttcctcctttcctcaaatgtctcaactctctctccccaatttccccatttaaaaaaaaaaaaaagtgccaaacttccttggaactgagccgctctggggggagaggaccttggatagaggggaggaaatgggaccatttctctttgaggaggtccctaagaggcattgcaaaagtgtggacatggagctaaattgggtcccccttccacagccctcccaccctgagtttttcttagaatctttgtaaaaaaaaaaaaaaaaaacnngaggggggggccggtaaccaatt

SEQ ID NO: 157 - DNA, 1304 bp, Homo sapiens
  misc_feature (41)..(41): n equals a,t,g, or c
ggcacgaggttgggccaagggcagagggggctgcacctgcnggcctgggaagcattgctcagggtggggggctgggaccatggcccgcagaggcactgccacagctgtgagggccaagatgctgtccccccatccaaaacccgtgcgccactgcagtgagtgttgagggcacctctcctcccctcttacacctactcagatgaggcagcagcagacccatctcgcggcgggggttttgttctgttgccgcctaactttctcatcctcggtctctggaaagtcaggctgagaaatcctttcccaggccaggccgctgcggtacactggatggttctgaagctggcccattgaaagagcctcttaaggcagctgggacagaggcctggtggccctgctgggcagcccaactgctgggggagacgtttctgccaccctgggtgatgagcagcttttcccccctggctttctgggggaggagtgggcctccttagggagacaggtgaccctgggtgccacccctgccccgtgtgtgccccgggtgttctcagtggttgctgaaggcaggtagagggtgctgtccagtatcccccatgtgaaggtcacttcccttctcatggagtcagctgagcatcagctcagccctgccatgtccccactcaccctcctcgcctcctgtccggccctgggtttctagcggtgcctgaggcatcactctggcccattgacagatgagaggtctgaagccttcctggccacaggcatcactttctcctcctcctcatgccctgccttgtccttgtcgtgttgccatggggttctgagaggctgggagttcacagacctcagacacagctgagtccgacaaccattggggtggggctgcatcagtctccggagtggcccgccacctcctgaagcagggcctggcccacccaaggtgcctggggcaggcgggcaccgtcattcgctgccattggcttctcagatgtatttcaaggactaaagtgggctctaagatctaagatggcccggcgcggtggctcccgcctgtaatcccagcactttgggaggccgaggcgggcggatgagttgaggtcgggagtttgagtccccgtctctactaaaaatacaaaattagccggacaaggtggcgcatgcctataatcccaggtactcaggaggctgaggcaggagaatcacttgaacctgggaggcagaggttgcagtgagccaagattgtgccactgcactccagcctgagcaacaaaagcaaaactctatctttaaaaaaaaaaaaaaaaaaa

SEQ ID NO: 158 - DNA, 1867 bp, Homo sapiens
ggcacgagctaaccacaccatccatctgcagatagaacatcatcagcaacattgaaataccccatgtgctctctgcttcctaatctcagcgccctcctgtcctccatgatgaatgtttctcttgaaatttactttgttgtctttctttcacttttctgtgtcgttttaccattacatgcattattcctaaagtcgttcttttttttggattttgcttgctttcaaattttatgaaaatggcagcaaaatgtttatattcttctgccacttgctttttttcatttaatattgttttgaagatctatgcatactgatgcacactgatcatattttcagtgttgtactaattacagtttatgactattccacaatttgttcatccatttattccctcatttttgtgtatttggtttgttggaagatttcctggctttttttttctattatcaactgggctgccacatatgtctttatgcctgtttcatgataaatacgtgcaagaggccaggctatgcaaagtgccagctttacaagatcatgagcagctgttttgctacgtggtattgccaatttagactcacacaagtggtaaagaagcatccccagtgtcctaaatccttgccaacacttagtgtcaccaggcttcttaatttttaccaatctggccagtggataatagcattgaaaagttatttttattgtgatttggagtccaatattttttctgtaagaaatgcatgtacaatgttataagaacatgcaaaaatcaaaatactttataaatgttcactttataaaaaatgaatgagaaaaacataacgcattttacataaagaaaatctgtaatgcttttgttattggctgggtattttcacaccttccaagtggtggctgttgataaattcagcaataatacctttatgtttattaatattaaatgataatgtcgaattaattaaatgaagttcaatttattgatagttattcattatatcctgctgttctaactcatcctggaagagaatagagtgaaagagaaattgcctttatatataaatgactcatagaatttcatatactgacctaaatagatttcattgcaaaggtattatagaggtaataacacagtaactcttaggactgttttgagattttcacaatttgaaaaatccttttagatccttggttgacaaatgccctggctgtgctaattatatgacatttcctgacactagtgacgtggcatggcctctcccggcttacattatagattgttttctgcccccatgggatctgatttgttaaggctcattttctattttaatgtggtggaagaattttagaaaccctagaaccccactttcaccctccactgaaacaaatagaagcagtgtattagtcagttttctcactgttatgaagaaatacctgagactgggtaatttatgaagaaaagaggttgaattggctcatggttccacagctgtacaggaagcatggcaacatctgcctctggagaggcctcaggaaacttttactcatggtgggaggcaaagtgggagcaggtgtcttatgtgacagaagcaggaccaagagagagacgggggaggtgctacacactttttttaaaacagagtctcactctgtccctcaggctggaatgcagtgatgtgatctcggttcgctgcaaccttcgcctcccaggttcaagcatttctcatgcctgtagtcccagctactcgtgaggctgagacaggagaatcgcttcaacccgagaggtggagtttgtggtgagccgagatcgcgccattgcactccagcctgagcaatcagaacgaaactctgtctcaaaaaaaaaaaaaaaaaa

SEQ ID NO: 159 - DNA, 1125 bp, Homo sapiens
gcttaaacctgattgtagctatctaagttgtagccaatgaggtgtcagaaaatgtaccatgcagtgcaacttcttaagtagcctagaaagatggggtcacatccccctgggttgtttccttctttgtgtcattttgatctctctcgctggaaaacagaaatgatgtctggagtgtaagcagccatcttgggctaggagactacatgctgacatggtgacacaccacccagaaagaatctgagtagtcgatgatcacagagctaccatatcagcactagactctctacctccacattttatttgtgtgacatagaaataaagtttaagctttgttttttctggggtgtatgtgtgtacacatgtgcgtctctgtctgtctcacatgcagtgagacctaattctaactgatatgccggtaggatggggggaccttgccacaaggtataattgtggtgggatggctgtgtcttgctcccattcaggatccatggaaagctcctcctccttcctgttcccctggatgccaagcgatgggcctgagaccctggctttgccatgtggatgctccccctcaggactttggatgtgcagtgattgctacaaaaagggcaatgaagatgcctggaccacagccacacagtctccatcacagcagtggtattctgtggaatgagtactaattttctggccacattttctgttaaaaactggttgttgagctgcccacttgtcttggtcaagggatgctggagtggcctgggaaggcagtgttgtttgcttttcttaggatggaacacacttaggcatatttttggtcaaagcaaaagaagaattcaaaggtgagagaagttgaagataaaaaggggaaaatgagggtagcagatgaagcaaagtcacacagaaagctggcaggcgagtagtagaatcagagtacaggctgagcatcccaaatctgaaaatccaaaatcggaagtgctccaaaacctgaaacttttggagcaccaacacaatgctcaaagtaaatgctcagtgaagcattttggatttcatattttcagatttgggtttgcccaaccggtgtaatacaaatattccaaaatcaaaaaaaaaaaaaaaaaaaaactc

SEQ ID NO: 160 - DNA, 2168 bp, Homo sapiens
  misc_feature (676)..(676): n equals a,t,g, or c
  misc_feature (735)..(735): n equals a,t,g, or c
  misc_feature (1551)..(1551): n equals a,t,g, or c
ggcacgagccaggtagccccatcccacacactttccactagtgcctatattgggatgaatcttctggcaatcttccttaaaacttcaagagacctctttaagattctgtagttgggtgagcctgtctgtgcccagggtagcctgaagttaaggtgagggcttaacagtggtaccaggcagtttggatcccaactagctagctgtccttgggcaaatgactactttcctactactgttacttcttgtttctattttctcctctgtaaactgtgggtaatgaaaagttgcgcaaagtagggtgggtgagtgacagctacaggctcactgttcctgaaaactgcaattcgaaattccacagccccctgaaaataaaaagtctttcagtgaatgttcagcaaactcccttggtgggcaaaactgacttgaattaacatgaggctatttatgatattttgtaaatctcagttagtgagactagttgtacattttactgtagaaatatccatgtgtttgatttcagagtactaccctgaaaatacccaggtatttggaagcatagaatatatgaattaaatgacttttttaaaaaattgtggtaaaatacatataacacaacatttactatcttgaccacttttaagggtacagttcaatagtgtttgtatattcacattgntgtgcaaccaatctccagaattctttttacttattaaactgaaactctgtacctatcanacaactccccgttttcccctttccccagcccctggcaaccaccatttgactttccaaatttcttttagaattgcaaaaattccaaattccaaaacacatctggcctcacaagcatttcagataagggattgggaaacttaattagggaaggggaatgcctamcatttgatagagtcaccacctttcgagatgatcctggaagagggagttcttccaatcttacaggggcctgtcaaccacagcacactgcttcccaaywtcgatgcccttttgtaaaagatggcacagkrgcaagaacaagggccattagattctgaccagagcaaacagaacgcaggtacttgcatgggatgtttgataccttccccttcttttctgtcattcccttgatctcagtttttytcagtaagtagaagtgcacatgttggcagctggttctggcatctactttttatttccattccagggaccatgatggaggatgcttttacagtgaaaaggcatgaaaacctttatgcagactgaactcatggggaagatgctgacagtctgtttagaacttgctggaagccattgaaggccagatttatccattttgcagaactctctaggaatcttcagaaaagcagtagggcttactctgctgttccccagcagatcacagtatggagaccggttctgagtcatgctccctataactggaataacacagggaattcttcacatgtttcataatgtgtgtgagtgaaaggacaacccagacttgktattgaaaaacccgmcagtggtcaggcatcattattggaatgtcttctnccacactgcccattctgtaaacatcctggggaaatgtcgaggttactttctgtgtgaggsttgtgckttcttwtcctgkttgtaaataccagggatgaaagtggatgccttyaraattggagccctgaacmcaaaattctgcagaatacaaaaccctctgatggaccactcctgataaatataaaataaccttagtaccagaacttctacttttgggttatggaaaatatgccaagaattttatgttttaaaaacaaactacaggctgggcgtggtggctcacgcctgtaatctcagcattttgggaggccaagccaggtggatcaactgaggtcaggagttcgagaccagcctggccaatatggtgaaaccccatcactactaaaaatacaaaaattagccaggcatggtggtatatgcatgtgttcccagctacttgggaggctgaggcaggagaattgcttgaacccgggaggcagagtttgcagtgagccgagatcgcaccgttgcaccacagcctgggtgacaagagtgagactctgtgtcaaaaaaaaaaaaaaaaaaaaaactcgtagggggggaccsgtacccaatccgaccctgtgagtgtattcgta

SEQ ID NO: 161 - DNA, 1260 bp, Homo sapiens
gtcgggttggatttttcttttgggaatcagtcaaaacccactgtgggttattaagagtagaagatgacttataaagggataatgaggatagcctccttttgctgggaagacagaatttttcattccaaattctaatctccagtgtcaccttgcatgtccatttctggatttatattttgtattttagtatttatatcccatgtttcatttgactctgggatacaagcaattgtcagatgcaccattattttccagaccactaagaaaggaaaaaaaaaacctaccgattaaactgtgacacaccattgattgtaagacacaccctgattggtgaggtgtaaaaatgggggaaagtggctctcttagaatgaaatatcttagaatgaatttgtgtgagtcaggggcaggtgaaagtcattttgcaggattctaatggcttctccatacacctctctccgaagaaagaaaggacttggggtgttttgctgactcctggcagcattcttggcccaatgtattctgggtttgctcttccccgttggagagccctttgccagagaacagccactggcttgttgagccaggaagcttaccatgtgagtgcagcttgtgtctgaagaggctgggccagtacagataatacgaatcacatttcactggctttttgatcggctgtttagctcctggcagcttgttcccagcattcatgtttgctgtgagtaggaaacacaaagaacctcgtcttcagaacgagaaagacttggggctggattctagctgtgcccgtggctggcttagtgctcatgattgtggccctgtgcagaccactttgcctccctcagtctcagtttccccatctatcaaaacggatattcattcctgccttgaatgtgttatgtaataatgattaaggaaaataaaatgcaagtgttgaagttgatacaggatctttatttcattccagaaaactctgtaaagtttcctcatttaaaaattccttccttctgtggccgggtgtggtggctcacactgtgatcccagcagtttgggaggccgaggcaggcagatcacttaaggtcaggagttcgagaccagcctggccaacatagtaaaaccctgtctctacaaaaaatacaaaaattagtcggacatactgtcttgaacccaggaggcagaggtttcagtgagctgagattgtgccgctgcactccagcctaggcaacagagcgagactctgtctcaaaaaaaaaaaaaaaaaaa

SEQ ID NO: 162 - DNA, 1109 bp, Homo sapiens
ctaaactatttattcaaaagtaacccaactaattaaagtgaaaaaaaattgttgaatcacaatgaacaaacataaaacaatacttaaatgagaattctgtgtcttttttggttttatctgtgatttattttgtccagtattaaggaatggttatctttatcattcttctaacatgttttggtttctctaatggttcattttcctttagcttgtgaaaattagggcagtttgtccagagccttactcgcaggagacaccagacccaacccatgcttagatttctgttaataaaagggagaagggtatttgaataggtagtaaaggcaggtacaagtttaagggagcagggctatcatatgtactaggtgagatttctataaatgtctgaaaagttacatgcatagtcattggctcaggtaatttctctgaatttgaacttatttgatttatttaaccaagttattataatatgcagttctctttaatcaatcttctattattcaatcatctatccatttattaattcaacaaatatttattaaagtgcctaccatgattatgtgctgtagaaaagacaaggacatttactaggggggattgtgggcccaatcggcatcataagcatgtctgaagcaaaagacaataatcacatccaacggcaccagttcagctcaactttagaattcagcagtaacagtacagatggcctaaagtacatctgtgtgtatctgtacgtgtgcacacacccatgtatatatatttatctatctgtacaaacactacatatgtatacacactatctatgtaaaatataatatatgtataatgcatataaattctaacaagtgtatttgtgttatctttaaaatagaacaattgtatcttgaagtggtaaatgcagagaattggttttattgttgatctgtggatttaatgatttctaggtgaaaaggacgtttaagtgtacaatttcttttcttaatttaatatatttatgtaaatgcatgcctgaaatttggttagattggctgtgttttgtgtcttttaacatgatcaaatgattaaactttatcttatgacttgaaaaaaaaaaaaaaaaaaaactcgag

SEQ ID NO: 163 - DNA, 1109 bp, Homo sapiens; identical to SEQ ID NO: 162

SEQ ID NO: 164 - DNA, 1614 bp, Homo sapiens
  misc_feature (28)..(28): n equals a,t,g, or c
ggaaggatcgatcttatttaactatgtntggaacaacccagtgaatatcagactcggaattactatttcattctatttcaaatgcttataaagctactattgtagattatagtgttaatgcaaagtttacagacttttgatatggaaaaccagataaaacaatgttacaaaaggcaaatataaagagtawgttttctttttagtgctttggaaaaatttcacttaaactcttattactgtatagattaagccctataatgctatttatattccaggggaacgaaaatctgaatttgttttatgatttaaagcatctggtttgcatattgtattgtaatactgatacagtttggctgtgtccccaccaaattgaattgtgttaatagttcccataatccctacgtgttgtgggagggacccagtgggcagtaatttaatcatggtggtggttaccctcatgctgttcttgtgatggtgagttctcatgagatctgatgggtgtttttttttgttttgttttttgttttttgagatggagttttgctcttgttgcccagactggagtgcaatggcacacgatctcggctcaccgcaacctctgcctcctgggttcaagcgattctcctgcctcagcatctcgagtagctgggattacaggcatgcaccaccacgcccagctaattttgtatttttagtagagacggggtttctccatgttggttargctggcctcaaactcccgacctcaggtgatccgcccgcctgggcctcccaaagtgctgggattacaggcgtgrccactgctcctggcccaagatctgatggttttgtaagggaattttccccctttgcttggcacttcttcctgctgccatgtgaagaaggatgtgtttgcttcccttccaycatgattgtaagttycatgaggcctccycagcctgtgggactgtgagtcaattaaacgtgtttactttataaattacccagtctcaggcaattctttatagcagtgtgagaacagactaatatgaataccaatactgaaaaattgtttcttgcctcaccttgtcctatgaacaggaattaaattttaaagtattgccttaagatggctgtgctaaataataatcattgcaagagcaatacttttacctgtttctagatgacaatattactaaaatttctcaaatgaagactttgttttagcttcaattacttcagaaaatataaattttaaagatgactatgagataaatcatgaactcagtggaattttcagatgagatggggcgcgttcagggtggtatgactgtagacggaattttcagatctttgtyatttagaagcaagtataggtataacgtggactatcaactgatatctgcaaataatttggttaaaaagaaatttgattgtagtatttgttgctgtaggattataaatgtcaaatatcattgtaaacatttctatatttttagaaatatcttgggtggcctgaaacagaagtgaggaaatcaattttttaaggtgagccatttggcttttttaaaaaattgagattcaacttacataccataaagttcactcttctaaaaaaaaaaaaaaaaaactcga

SEQ ID NO: 165 - DNA, 939 bp, Homo sapiens
ccacgcgtccgaaacgaagctgaattccccttcacggacctgaagcctaaggatgctgggaggtacttttgtgcctacaagacaacagcctcccatgagtggtcagaaagcagtgaacacttgcagctggtggtcacagataaacacgatgaacttgaagctccctcaatgaaaacagacaccagaaccatctttgtcgccatcttcagctgcatctccatccttctcctcttcctctcagtcttcatcatctacagatgcagccagcacggtgagctcagagaacgcaaagggagagagggggagtgaaggattttctcggtaggtaaattcctcctgcattttttgtaggttcatcatctgaggaatccaccaagaggtagatgcttggcatagctcatgctccacttagttcccatgtcattctcaagggaacccattggcacatccgggattggcaccctgagcccccaccccagcccattctgtgaccttcctcctctcccttcttctcccttcctctccctacattgccctcaccctctccccgaaatcttcacatcccatcctttcacgtgtgtctctctctttcagaaccagccattccaaacttccagagcaggaggctgccgaggcagatttatccaatatggaaagggtatctctctcgacggcagacccccaaggagtgacctatgctgagctaagcaccagcgccctgtctgaggcagcttcagacaccacccaggagcccccaggatctcatgaatatgcggcactgaaagtgtagcaagaagacagccctggccactaaaagaggggggatcgtgctggccaaggttatcggaaatctggagatgcagatactgtgtttccttgctcttcgtccatatcaataaaattaagtttctcgtcttaaaaagaaaaaaaaaaaaaaaa

SEQ ID NO: 166 - DNA, 746 bp, Homo sapiens
gcgccaggagccctgtaacatcagccatcgtcaaccccaccgtgttcttcaacatcaccgttgacggcaagcctttagacctgcgtctccttcaagctgtttgcagacaaggttccaaagccagcagaaaacttttgtgctctgagcactggagagaaaggatttggttataagagttcctgctttcacagaattattccagggtttatgtgtcagggtggtgacttcatacgccataatggcactggtggcaagtccatctatggggagaaatttgatgatgagaacttcatcctaaagcatacaggtcctggcatgttgtccatggcaaatgctggacccaatacaaatggttcccagtttttaatctgcactgccaagactgagtggttggatggcaagcttgtggtctttggcaaggtgaaggcatgaatattgtggaggccatggagtgctttgtgtccaggaatggcaagaccggccagaagatcaccattgctgactgtggacagctcttataagtttgacttgtgttttatcttaaccaccagaccattccttctgtagctcaggggagcaccctccaccccatttgctcccagtatcctagaatctttgtgctctcgctgcggttccctttgggttccatgttttccttgttcccttccatgcctagctggatgcagagttaagtttatgattatgaaataaaaactaaataacaaaataaaaaaaaaaaaaaaaaa

SEQ ID NO: 167 - DNA, 1647 bp, Homo sapiens
cccacgcgtccgaggtgaaaaccatcctttattgttgctggcacaacttgatatatagtctgactcagaactgaagctcacatctcaaattcatttcatgccagtaaatgtggcaaagagaagaaaggcccaagagcgagacaagaagaatggagaagggggcagccaagaagaacttctgggttcagggtactgtttatttgctccttctcttcatgcctgtggctggatgtcccacaacactataagaaatataagtcaagccctttgtgttaagcaagaactacagactccatcttttcacccaaatcatgaatgaccaataaaaagcaagttattccagaggaagaagcagcccttgaaatgttaaggcttaggcttgaaaggtgaagagcaggaattctctctttcaaatcctagagcataaacccatgtgtggccaagtgagatcagccctcaagggcacatgccaagggcagagcagcccatgtagacagcttcggagggcatgggggtgtagggagttcggggtagctcctcattaactatttgttgggtgagtaaaggggtgaggctcagtggcaggtacctctgcaatgacaagctgcctcccctctatgtgtttagcatatgttattagaacatgtccgacacccctaccgctgccatttgggccctttaataaagccaagtagagaaatctggcaataaaaggcaaatgtaagcatgctttctttaagacgcatcataaatggttttctttaagtgaatggaagagtttgacagagatacacctttgtaagaaaacattaagaatgctggctggctgtggtggctcacacctgtattcccagcactttgggaggcctaggcaggaggattgcttgagcctgggacttcgagaccagactgggaaacatggcaaaatcccatctctacaacaaaaatacaaaaattagccaagtgcggtggtgtgcctgtagtcctagttacttgggaggctgaggtgggagaatcacctgagcccaggaggtggaggctgcagtgagccatgccaatgcactccagtctgggcaacagagtgagaccctgtctcaaaaataaataaataaataaatgaataaagagaatgctaatcatttctgggttcactgcgactcactgtagtgctggggatcccccttgtaacactggaactgaaagacagtgatgaaagctatgtcaagcattcattattctgaagaggaggagaaatgccacatacctttcccatgggacctgtggtggaatgaatccatacttctgcctcacttcgagcagacttttgttctcggcgctcctcacgatggagtttcatgcttcattttcacatctctctgcacaattagattgggagctccttgagggcagagtacgtgccttaatctttatctttgtaatgccacaatgaacagagtgcctcctggtacactgaggagcttaagaaatactcactgaatgcatgaatgaatgaatgaacaaatgaaggaatgactaaggatgtttgtagtgctataatatagaatgggatttactctgctttaccagttagtttcataataaacaaatagtctgtaaaaaaaaaaaaaaaaaaaaaaaaaaaaaaaa

SEQ ID NO: 168 - DNA, 859 bp, Homo sapiens
gaggtgaatgagctggcgtctccaggtccactctagtcactggggaatcaggggagtcccaacagctgagggcatgtgacagggaaactctgcagcttgcaagtgtccctgagtgtgcatcagatgctctgttcctccacggcagagtcgctccactagagagcctggcgccagtcaccaagactccctgacccttgtctgccaagaagaaacagccaagcctttgctgtctctgagggtctccctcgggtgtccctggcagactgcaccagcctcacaggcatctcccaagccgtgggtcagggatgagtctctcggtggcttggtggctctcagtgtgctcagcagcaggtgaggggcctaccccagggcagtgctcggcattcagaaggccgacaggaaaccagaagtttccgaatattatggccccatctcctcttcagtcttcctttccctgaagctcttgtaaacccctttctttcctagctcaacacaacaaaagaaaaccactggataggccgggcatgctggttcgtgcctgtcatcccagcactttgggaggcccaggcgggtggatcacctgargtcaggagttgaagaccagtctggccaacgtggtgaggccccgtctctactaaaatacaaaaattagctgatgatgcgtgcctgtaatcgcagctactcgggaggctgagacaggagaattgcttgaaccgaggaggcagaggctgcagtgagccgggatcgtgccacttcattccagcccgggtgacagagcgagactccgtctcaaaaaaaaaaaaamaaaaaaaraamaaaaaaaaaaaaaaaaaaaaaaaaaaaaaaaaaaaaaaaaaaa

SEQ ID NO: 169 - DNA, 2285 bp, Homo sapiens
tgctcctgaccacggctgtagaggtggcccagcgctggcgrgagctggctgagaagctggccarggtctccaagcagcagatggacgcctacgagtctccccaccgggacaggaacggggttgtggacagcgaggccatgtggaagcctgcgtatgacttcttactcacctggagccatcagatcggggacagctaccgggatgtcatccaggagctgcacctgggcctggacaagatgaaaaaccccatcaccaagcgctggaagcacctcactgggactctgatcttggtgaactccctggacgttctgagagcagccgccttcagccctgcggaccaggacgacttcgtgatttgaatgggtcccctcccctcctgctgctctggagtgcaagccctcttctgccctgcgtgccctgctgtcaccgcggagctgaagagggaggaaggggcggctgctcagacagatttagggcccgccagctaggctacacccatcatgcgccgccctcctccatcgagggagaggcctgaagggactgcctactgcagctcgttgccaatcacatagctttctatttgttaagtataaatttaaatttaaaatcacttttttaacgaatggggggaagggatctatgagaaaggtggtatctaatttttttatggaccataaaggtttaaaagaaaataggggcacaggctgttgaggtttttatgttgttatagacctttttaaattatgttagagatgtatataggtatttaaaggtcactgggagcgtttctgattcccggccacactttgcatttcaacactcagcccggaaagatgctcgttcggttgttggacctctttcactccctgcgtgtaagaaggtgaatcacgtgggaaaaagtggcttttcagtaaacgggtacagctcattctttctgagaaggccccaggtcctgctccctcctcggatttgattgtcttccgtgctttgcctcactcgtagtaaatgaccatccatagaatatgtgaatctttggtgagcttcagtgggcagagtgaagtcccgcattagcatttaggtgccctgagctgtttctgccaatagattagaaagcagccatgagttgacagtctttagggcccctgccagtgtgcaattagtcattgacaagaacaatgccatttgagagtgaggtggtccctgctgctacgaggccattgtactgttttttccttgaggtcaaagcagtgcttcccatagagtttgctgcctcttctgtggacaggaagaaaacttcatgaccgaatcagagccttggtggccactgactctcgtgcttattgcagatgctgtggttggcctcacaagcaacgccttatgctgatgtgcagaggtgccagctgccatttgccaaactctgcatttcatttcatctaaggcttaacccctcttccttcctggtgtacctgtgtctcctcggaaggaagtcatagtttagatgaaaccattttttgtacaatgtaaagatcatctgagcaagatgagcattttgtaaaaatgaaaatgtgactcacataaaatcaggaacttgacacagtgttgcattaataactttagggtgcagacatgctgtgtgaatctcacaatgcgtcgtagatgtcgcgtgttggaagggagcaggaggaaggactgatactggcaaatcagtagagtgaggtgatccttagcaacgtgccaggacacttcctgtgtgcctgcagttgtcagggaccatttgggatcccgaatctcattctctaaaactgctttcttgaaacatgttacttccttagtataatcaatgtatactcccttactggcctgaaacgttgtatagctacttattcagatactgaagaccaacggactgaaaaaaagaacaaacattagctattttatgctgcaagaaccaggacacacaattcgccaatcatcccaccatataaccttcgattgtgcttctcaactccaccccataatttctcccagagaccatctatcaccttttccccaaagaagaaacaaaaccagttgcaccttaaaccatggatattttttcctcaggggctttaaatagtttcctatgcaacgtgtcttgtagcacaaataaaattctacaaaagttgcagtaaattttatttggatattttaacctgttaagtgtgtgtgtgttttctgtacccaaccagactttaaataaaacaaacatgaaacctaaaaaaaraaaaaaaaaaaaaaaactcgag

SEQ ID NO: 170 - DNA, 1533 bp, Homo sapiens
cctgtctggatgacttcttgcggctgttctacccctccccctccccgcgtcgcctgctgctgtcgtcgggaggtgggtgaggtgacgcaaacagccccgttgttgccctccgcgtatcccctcaccacctttgcggccatccacgactttcgcaccttccgccattttcctgcctgtgagggtggacagatcgcgctcgggtctcggcctcctgagtgccggtgactgcgggaggcgacggatgcttctgggggtgtgagctggggaagttcgtggtcacggatgcgtgtggggttgctgctcagtctgtaacggsaggaaagatgaatgggagggctgattttcgagagccgaatgcagaggttccaagaccaattccccacatagggcctgattacattccaacagaggaagaaaggagagtcttcgcagaatgcaatgatgaaagcttctggttcagatctgtgcctttggctgcaacaagtatgttgattactcaaggattaattagtaaaggaatactttcaagtcatcccaaatatggttccatccctaaacttatacttgcttgtatcatgggatactttgctggaaaactttcttatgtgaaaacttgccaagagaaattcaagaaacttgaaaattccccccttggagaagctttacgatcaggacaagcacgacgatcttcaccacctgggcactattatcaaaagtcaaaatatgactcaagtgtgagtggtcaatcatcttttgtgacatccccagcagcagacaacatagaaatgcttcctcattatgagccaattccattcagttcttctatgaatgaatctgctcccactggtattactgatcatattgtccaaggacctgatcccaaccttgaagaaagtcctaaaagaaaaaatattacatatgaggaattaaggaataagaacagagagtcatatgaagtatctttaacacaaaagactgacccctcagtcaggcctatgcatgaaagagtgccaaaaaaagaagtcaaagtaaacaagtatggagatacttgggatgagtgaaaaattacatcattggacatgaaggagtttcaacatccagcttcatctaggtggtcatgattacctgcatgctttgagctcagcagcagtcttcataaacacatttaaaacaagatcctgggtttttgtggtttgacttctatggtgttttaaaaaaacacagatttttagtgttaatattgtgtaaatgtactcaccttagggattcatttgaatgatggtattataccatgattgtatacagtttgtgaaattgttgcaagggcaaagataactcttaaaaaaccgtcgagattacaatgctctagaatcagcatataagaaaataaatgatatctgcatgttgaattggggtggatggggggagcaagcataatttttaagtgtgaagctttgcatcaagaaattattaaaaagctttttttctccaaaaaaaaaaaaaaaaaaaaaaaaaaaaaaaaaaaaaaaaaaa

SEQ ID NO: 171 - DNA, 1778 bp, Homo sapiens
cggcacgaggcaggatgagaatcgtggagtgcggaggcaggtagcccgtggggtgcctcctgtgctcggtggagctggaagccgcttaggtgccagagctttttctgtgaccaaattctggcttttgaaataacccagtaacagttctctatcttttcattctgcccgctcctcccacagcctggtccctcagaggaaaggaaggacaaggagtgctttgcagcacgtgcccctggcggcgtcatggtactttcctggccctgctgcccctgcccgtccgtcttttatgatttttatttactcgtattggtttttttaaattctatttttgcagaactgagcctttttctgccctgcctttctcctgtttgtctttcctttgtggttgatattgtgttgtcttctccaaagtatttgtcattagaaacttacagcaagcgtatactttttagcatgtcagtatttttattatgttgccctccttgtctttgataactgcctgtggacgctgtgtaaactttctggtaaaaatccttttttttccccctgtagtctctccatttcaaggactaaaacagtcttgcgttaagtaaaaacctgtgaccagagctgaaggaagactctaggactgaaaactgcaacagaaattagcacaatttgaaaacaaaacaaaattgcaaaagccttagttgctttttccacctaagaagttgatcaatggagaaaatgtccactggagtttgaataatgaactttgagtttgggtgcaagcaaatgactcagagaagggtccagctctcaagctgaatgacaaacatgctgttgtaaatttagtctcaggtgtaaatacccaagccctctggtacccagggagctggctggtctgtggtgcatgtgtgtccctgtgatggcaatcattgtagttgctggccttcagaagaattgaggatctgatggaggttttttatgtatttattttctgttcaccttgtgaccctgtgtcaaaatttataaagatacaaaaggcattactgaaatggtactttctgtaatttgatactatttggcttaatcatcttcacttgactatttgtaatactgttgtaatgttaactctgttaagtacccaagctgcttgtcttccaccaaagagtgctttattaacaagaatctgtgaaaatcacatttaaacactgttgcatgttgtaagaccaggtggtaccttagtaacctaaaacttgcaagagaatattaatggtagctttagaagactcaggaggagaaactgacttcagagttggaagatgttgcaagtcgttcctttttctgtccttcagggactgaagaactgggaggctgcccattgtttggttgccagtcatacaaattaaaatcatatttccttccatgaatggaagaaacacactattggtttttccccttggaaacagcaatcccaaataatgtcggcttacaaaaaaaaaaagttaccacttttttagagtccttccctgtaacattggattttttttttcccttatgagatccacctaaggccattgacgtggcctgcgatctcagtgacaatgatctgcttctggatctcactgttgcctttggttagggaacacaactagtaactctgcagagtgccttctcccgcagccctactggaacacagcagagtctgtgccatgaagcagttacagaaacagaattgatgtgctgctaaaaaaaaaaaaaaaaaaaaaactcgagggggggcccggtacccaatt

SEQ ID NO: 172 - DNA, 871 bp, Homo sapiens
gtttttccttgtagcatttggaaatgatttactggaattacaaaacctatttttcctttaaatttcagctttggctctggctgctttttagaataatgcaagataaaaatcacacctgagggctgaaaacggagagggaatgggagacttgatatttaagcagcttgaatggtttttcttttctttatttttaaagaaatgcacttgcctatgatactgtctctccagtgaaatgattactcctccattactctattgatacaatattgtgcatgctagtgttgtatttctatacagtagcttgaaattgattaacttatactgtaggtgttatgtattcctatgacaaaaaaaattaagtcttcaaattttttaaaggttttttttttttaatttaattttcccttttgggggtaaagtttgctctaccaaatagtgattgtaacaaattgatctgttttggatgttgctatagtgacatgcagttatatattttgtttttaaaagggggggagcaaaagaaacaccagtgttagcttaatcttaatgtctggtgtttgtcatggtgaaattataactattacagtgtttggaaaacaacaaatatgttctctgaatgagcctttgtgctttttgtcatgttatgcagtgaactatttttaaggtctaatcagtgattatttttccagctccgtgtttctctaaggaattatttcacacacggaccatctttagcagtttcctcagtgatggaatatcatgaatgtgagtcattatgtagctgtcgtacattgagcaaataaacttacagatctgaaaaaaaaaaaaaaaaaaaaaaaaaaaaaaaaaaaaaaaaaaaaaaaaaaaaaaa

SEQ ID NO: 173 - DNA, 887 bp, Homo sapiens
ctgcaggaattcggcacgaggaaaatattgtcttttttctttcctcactcttattggatatttgtttagtcctaaacaaagtagctttagcttttaatcatactcattactgtatttttgttcaatgtttcttgatttctgcctactttattaataattatctctttatttcagtttggtctgttcttctctttcaatgaatctaatagaattcatggctcattttatttcaatgtctttatactttctggtcagtgtatttaaagtkatacattttcctctgatttctgctttagttgtgccctgcatgattttatatgcagagatattgttgtcattcaattctaagtatcttataatttctcttatgatttctgcttaagcccaagggtaatttaatagcaggctttttagtttcaggactaggtaacatttttggttctttttaaaattattgtttttctaactttatttcagtagagttagggaacatattctgatgttgattcattggaattgtttgagcctttctctctgtaattgttacaaatttaatttttgtgaatattccatgtgagctaaaaaaaaatctgtttttgttctctgctctccaccctaatgagactttagaaattctcagctgtaatccatgatccctggtctaataaaaagaagggtgtaaacatggacctgaccttcagatggggagggggaggcaaaagaacacaactgaaaatgctcccccagctacattgaggaggggtaaagggtaggagggagctagggagagaacatttaaagggtgttgacagagtttaaataggtggtgatagggacttgaagtgatagcaaaaacaaaaaacaaaaaaaaaaaaaaaaaactcgag

SEQ ID NO: 174 - DNA, 1437 bp, Homo sapiens
ggcagagcagctccaccgttaccgctaatataagtaaagtttgtaaaattcatacttaataaacaatttaggacagtcatgtctgcttacaggtgttatttgtctgttaaaactagtctgcagatgtttcttgaatgctttgtcaaattaagaaagttaaagtgcaataatgtttgaagacaataagtggtggtgtatcttgtttctaataagataaacttttttgtctttgctttatcttattagggagttgtatgtcagtgtataaaacatactgtgtggtataacaggcttaataaattctttaaaaggagagaactgaaactagccctgtagatttgtctggtgcatgtgatgaaacctgcagctttatcggagtgatggcaatgctctgctggtttattttaagtggctgcgttttttttagtttggcaggtgtagactttttaagttgggctttagaaaatctgggttagcctgaagaaaattgcctcagcctccacagtaccattttaaattcacataaaaggtgaaagctcctggttcagtgccatggcttcatggcattcagtgattagtggtaatggtaaacactggtgtgttttgaagttgaatgtgcgataaaattattagccttaagattggtaagctagcaatgaatgctagggtgggaagctggtgagccagtggccattagataaatacctttcaagtgtgagcttagacgtcaaccctaaaatacttaaccgtaatgctaattgtgatcattatgaatcccttcagtcacattagggggaaagtagttggctataagtaccgtcattcttagtccagtcagtcttaaaaacatcttgggttacccactctgtccactcccataggctacagaaaaagtcacaagcgcatggtttccaaccatatgtgttttctgcagttatttctcttgttctggccaaacaaccctaaaaatccttaccattccacaaagttggaccatcacttgtgcacccactttgactatgagtataccaccacattgcatttctgtttgcaccatgtcttccaggagactagactactgttgtccagggtcaatttgagtgtaaagaaaatgtagacaaggaattgcccaattttaaattctgactttgctgacttaatttaaatgctcgttctgaaccaattttctcctatcttctctaggggtttcaaaagactcagttaattgatttccaggaagtactcatagcaagttcataaaagttcttgagacctaaatttcttcacaaaaaaagaaaagatcttaagtcatacattttaattgtgtagaggttgttcaactgaaggaataaatgtctattaaactaaaaaaaaaaaaaaaaaaaaaaaaaaaaaaaaaaaaaaaaaaaaaaaaaaaaaaaaaaaaaaaaaaaaaaa

SEQ ID NO: 175 - DNA, 1205 bp, Homo sapiens
ggcacgaggtttgtacattggtgttttagacatgctattgtatacttaatagactgcaaacttctatatgcatcggataaccaaaaaatctgcgttgcttgctttattgcaatattctttattgtggtggtctagaaccaaacctgcagtgcctccaaggtgtgtccgtgtatcataatttttcctttataaagttcctggtatcatggggctaaatgaaaactgtctctcctaaatgcctcaggattactttgtctacctcttgcccgtaattgccttctggggacctattgacatggatgtagttaacgttttcattttatggcatgacagaaggggcagtggagcagcttctaatttttcaagagtatttctcagtaattggggttaatgagtaaaaaaaaaagtgcattgaaatttcacaatatttgtacttgcagattactacaatgcagctagaacgtgaaaaggctcttgaacataagaatcgaatgtcacgaatgcttgaagacagagatttattcgtaatgcgactcaaagctgcacggcagtctgtttatgaggtgagcttgctgatttttgggaaatgtttattcatgagctttctagtattggcctaagggttctcccttaacaaattggtatattctttattgagttactatgtgtaacggtcattcaaataatagaaatttttggatgatatttcataagcaaaacaatcatcaaaattgttctaaaggtgaaagttgaatgcataatttaatacaagttttgtttactgtttttgttagaaatgaaaaaactagatcaaaatgtcctgggcttagattctaatttgaccattgaattattttgtataaagacaaacccactggaggtaggtaatatcaacaatttaaatgttttaaaatttggcctgctgacaagttaatggtcatttggaagttagagtttttgtgctgagaggttgctttcgatgattctgatacacttgagagtcttttgtaaacctaatagctttctggagtttgtgctcttgacaaagtgtgccctttttgggttgggggttacttcgattgcaggaaaaacttaaacagtttgaagagcgattagcagaagaaaggcataatcgattggaagaacggaaaaggcagcgtaaagaagaacgcaggataacatactataaagaaaaaaaaaaaaaa

SEQ ID NO: 176 - DNA, 1153 bp, Homo sapiens
ggcacgaggagcatcaccgcagaaacaaaggctccagcctccggacaccatgtctgtgcgcttttcttctacctccaggagacttggctcttgcgggggcactggctctgtgaggctctctagtgggggagcaggctttggggctggaaacacatgcggtgtgccaggcattggaagtggcttctcttgtgcttttgggggcagctcatctgcaggaggctatggcggaggtctgggcgggggaagtgcttcctgtgctgccttcacagggaatgagcacggcctcctctctggcaatgagaaggtgaccatgcagaacctcaacgaccgcttggcctcctctctggagaatgttcgagccctagaggaggccaacgctgacttggagcagaagatcaagggtggtatgagaaatttggacctggttcttgccgtggccttgatcatgattacagcaaatatttcccaattattgacgaacttaaaaaccaagtataatttctgcaactaccagtaatgcccatgttgtcctgcaaatgataatgcaaaactaacagctgatgacttcagactaaagtttgaaaacgagctagcgcttcaccagagcgtggaggcggacatcaatagtttgcgaagagtcctggatgagctgaccttgtgcagaacggacctggagatccagctggaaactctcagtgaggagctcgcttacctcaagaagaatcatgaggaggaaatgaaagctcttcagtgcgcggctggaggcaacgtgaacgtggagatgaacgcggcccccggggtagacctcacggttctgctgaacaatatgcgagctgagtacgaagccctcgcagagcagaaccgcagggacgcggaggcctggttcaacgaaaagagcgcctcgctgcagcagcagatctctgacgacgctggcgccaccacctcagcccggaatgagcttaccgagatgaaacgcactcttcaaacccttgagattgaacttcagtccctcttagcaacgaaacactccctggagtgctccttgacagagaccgagagtaactactgtgcacagctggcacagatccaggctcagatcggggccctggaggagcagctgcaccaggtcagaaccgagaccgagggccagaag

SEQ ID NO: 177 - DNA, 866 bp, Homo sapiens
ggcacgagtagagttcctctccattaaagggactgggggatggcctctgtgtttcttttgctttatcttgagcttttttgtcagccctttccctctactttgggggcctgcaaaagcagaggggctttattttgagaagtagcctcctgtataacctcgtttgagatagatttgggccagtttctggtgtctgtagcagtcgggttttttccccctaattcctgtcttttcgtttctgttttcttggtcatttacatcatttcaagaactagagaaagctgaaaaccaggttctggccatgcggaagcagtctgagggcctcaccaaggagtacgaccgcttgctggaggagcacgcaaagctgcaggctgcagtagatggtcccatggacaagaaggaagagtaagggcctccttcctcccctgcctgcagctggcttccacctggcacgtgcctgctgcttcctgagagcccggcctctccctccagtacttctgtttgtgcccttctgcttcccccattcccttccacagctcatagctcgtcatctcggcccttgtccacactctccaagcacattacaggggacctgattgctacacgttcagaatgcgtttgctgtcatcctgcttggcctggccaggcctggcacagccttggcttccacgcctgagcgtggagagcacgagttagttgtagtccggcttgcggtggggctgacttcctgttggtttgagcccctttttgttttgccctctgggtgttttctttggtcccgcaggagggtgggtggagcaggtggactggagtttctcttgagggcaataaaagttgtcatggtgaaaaaaaaaaaaaaaaaaaaaaaa

SEQ ID NO: 178 - DNA, 1280 bp, Homo sapiens
  misc_feature (1137)..(1137): n equals a,t,g, or c
gctcgtgccgctcgtgccgctcgtgccgctcgtgccgctcgtgccgctgttctatcctctgcctcccatcaggccctgtttctttgttcctttgttaatatcttgaatttagtccctccatccttaatccccccatccctccccatcatgcaaccagtggtttaatccatgtaccaataggggctagtaccacagaggcctcctgtggtgccctcgtatcataccacctgttcctgtggagagggaatgaccggcactgaaggtaccttacaactggctcatattatcagaggaccttggtcctttctaaatctctagtctctcttcatatccttcatcaggtgttttaagatgtctctgagaagccatcaaggcaaaagagaactttaagttccttgttccagcccggagttttgggaaagaaagaaaggaaaggtcacagtgacctaggattggaaccttcctgcccttttggcttgcagactgccttctatcccagaacagctgagaaatctatgaagctgagattctgaaggacccagcttaggttcttccacttaggcctcaattcccttccttttccaggggcagccttagttcccatggccctgaaacacacacatttcccccttcctttcccagaagccactggccccccatagcacccagtgcatcctttttacaagtggaagaactaggatggctttccaaagtcttctagaaatgaagttctttctctgtgcagctttcccccttggagcaggagtgaagatgtttcattatcttgggcctgggaaaccacttccccaggcttctccctccccccacccccataggaacaggatttggccttagcttctgggcctatcggctgccttccctctacttcctaccacctcttctgccttcctttgagctctgttgggcttggggatcttagttttcttttgtttatttcccagctcatttttttcttctggtcagtttttttaagggggggtgttgtggttttttgtttttgttttgcttctgagaaagcatttgcctttcttcctctcccaacataacaatcgtggtaacagaatgcgactgctgatttaccgatgtatttaatgtaagtaaaaaaaggaaaaaaanaaaaggaattcctgcagcccgggggatccactagttctagagcggccgccaccgcggtggagctccagcttttgttccctttagtgagggttaatttcgagcttggcgtaatcatggtcatagctgtttcctgtgtgaaattg

SEQ ID NO: 179 - DNA, 1275 bp, Homo sapiens
gcaactagtgacaagagctggtcgcaacacttagtaggaagcacagtggcataaggaaacctggactagtggggcctttatatctaaaattatgtattattccttatakgcagaatctgtaagtacgttatgactgctaatgacttttaaagcaaacatgttaacgatctttctatggtaaaaactgttatttggggacatcaccagatgatgtggacattcttgcaggtattttggcatacccaggcaagctgtcattggtgtatattccagttaacctctggagatgatcgtaacagtttacagggcctttccatttgggatggatatatcaagagggagacaaactggtccaaatcaccagaaagaaaatctcacagcaccgacttggcatctgtgttaaaaaatagcaactatatttaaaataaactgtacaacataaaaaatttaaattaaaaaatgcattaagcaagttgcctttagaaatgtgaagacattttaaaacactacaagataatgagcaagtctcacctacataatcatggctccacagacggtgccagtccatgcatccaccatttctcaacacctacaaagttttaagatctgcttggttcagatactgtccagccacagcagctccctctgctgtagagagcagcatattcagctttgcctttttatttcagatactgaatatcctttggcaatttcagatatcacagcaaaaaaaaaaaaagttccaagtgtttttggcaatcatattggtgatagtgtttttgttactcttaagaatgttatggtggaggtgggaggatggcttgagcctaagagttcaagaacagcctgggcaacagttgagtgactttgtctctacaaaaattaaaaaaaattagctgggtgtgttggtgtgcacccgtagtcctggctagctactccagaggctgaggtggatcacttgagcccaggagtttgagactgcagcaaaccatgattgtgccactgcactccagcctgggcaacagagaccgtgtctcaaaaaaaattgcacatataacagataaagtaatgataaagtaaatacgtaaagtaaatgagtaattatgggacattctaattcctcatcccctatgtctttaagaattaaaaattctcagtgtagaaggaagagtgtaatacagaattggttaaataaaaccctataagctttgaatttgaattggatatacaattggtaaaataaaaaccctatgagctttgaaaaaaaaaaaaaaa

SEQ ID NO: 180 - DNA, 1157 bp, Homo sapiens
ccacgcgtccgcttggcattggtttacctgccaggtgtgatagcagcaattgtccaacttcataatggaaccaagtataagaagtttccacattggttggataagtggatgttaacaagaaagcagtttgggcttctcagtttcttttttgctgtactgcatgcaatttatagtctgtcttacccaatgaggcgatcctacagatacaagttgctaaactgggcatatcaacaggtccaacaaaataaagaagatgcctggattgagcatgatgtttggagaatggagatttatgtgtctctgggaattgtgggattggcaatactggctctgttggctgtgacatctattccatctgtgagtgactctttgacatggagagaatttcactatattcaggtaaataatatataaaataaccctaagaggtaaatcttctttttgtgtttatgatatagaatatgttgactttaccccataaaaaataacaaatgtttttcaacagcaaagatcttatacttgttccaattaataatgtgctctcctgttgttttccctattgcttctaattaggacaagtgtttcctagacataaataaaaggcattaaaatattctttgttttttttttttgtttgtttgttttttgtttgtttgtttgtttttttgagatgaagtctcgctctgttgcccatgctggagtacagtggcacgatctcggctcactgcaacctgcgcctcctgggttcaggcgattctcttgcctcagcctggccaatatggtgaaaccccgtctcaactaaaaaaatacaaagagtagccgggcgtggtggcatatgcctgtagtcccagctgcttgggaggctgaggcaggagaatcgcttgaacccgggatgcagaggtggccatgagccaggatcacaccattgcactcttgcctgggcgacagaaggagactccatctaaagaaaaaaaaaaattagccgggcatggtggcgggcacctataatctcagctgtgtgggaggctgaggcaggactattgcttgaatccgggaggcagaggttgcagtgaaccaagatcacaccactgcactccagcctgggcgacagagtgagacttcatctcaggaaaaaaaaaaaaaaaaaaaaaaaaagg

SEQ ID NO: 181 - DNA, 1885 bp, Homo sapiens
ggcacgagtacaaggtggcggcgctgggcctggccaccggcatcgtcttggtgctgctgctgctctgcctctaccgcgtgctatgcccgcgcaactacgggcagctgggtggtgggcccgggcggcggaggcgcggggagctgccctgcgacgactacggctatgcgccacccgagacggagatcgtgccgcttgtgctgcgcggccacctcatggacatcgagtgcctggccagcgacggcatgctgctggtgagctgctgcctggcaggccacatctgcgtgtgggacgcgcagaccggggattgcctaacgcgcattccgcgcccaggcaggcagcgccggggacagtggcgtgggcagcgggcttgaggctcaggagagctgggaacgactttcagatggtgggaaggctggtccagaggagcctggggacagccctcccctgagacaccgcccccggggccctccgccgccttccctcttcggggaccagcctgacctcacctgcttaattgacaccaacttttcagcgcagcctcggtcctcacagcccactcagcccgagccccggcaccgggcggtctgtggccgctctcgggactccccaggctatgacttcagctgcctggtgcagcgggtgtaccaggaggaggggctggcggccgtctgcacaccagccctgcgcccaccctcgcctgggccggtgctgtcccaggcccctgaggacgagggtggctcccccgagaaaggctccccttccctcgcctgggcccccagtgccgagggttccatctggagcttggagctgcagggcaacctcatcgtggtggggcggagcagcggccggctggaggtgtgggacgccattgaaggggtgctgtgctgcagcagcgaggaggtctcctcaggcattaccgctctggtgttcttggacaaaaggattgtggctgcacggctcaacggttcccttgatttcttctccttggagacccacactgccctcagccccctgcagtttagagggaccccagggcggggcagttcccctgcctctccagtgtacagcagcagcgacacagtggcctgtcacctgacccacacagtgccctgtgcacaccaaaaacccatcacagccctgaaagccgctgctgggcgcttggtgactgggagccaagaccacacactgagagtgttccgtctggaggactcgtgctgcctcttcacccttcagggccactcaggggccatcacgaccgtgtacattgaccagaccatggtgctggccagtggaggacaagatggggccatctgcctgtgggatgtactgactggcagccgggtcagccatgtgtttgctcaccgtggggatgtcacctcccttacctgtaccacctcctgtgtcatcagcagtggcctggatgacctcatcagcatctgggaccgcagcacaggcatcaagttctactccattcagcaggacctgggctgtggtgcaagcttgggtgtcatctcagacaacctgctggtgactggcggccagggctgtgtctccttttgggacctaaactacggggacctgttacagacagtctacctggggaagaacagtgaggcccagcctgcccgccagatcctggtgctggacaacgctgccattgtctgcaactttggcagtgagctcagcctggtgtatgtgccctctgtgctggagaagctggactgagcgcagggcctccttgcccaggcaggaggctggggtgctgtgtgggggccaatgcactgaacctggacttgggggaaagagccgagtatcttccagccgctgcctcctgactgtaataatattaaacttttttaaaaaaccaaaaaaaaaaaaaaaaaaa

SEQ ID NO: 182 - DNA, 1031 bp, Homo sapiens
  misc_feature (1024)..(1024): n equals a,t,g, or c
acagcatgagcatgagctgtccctggttgggcacctgggcagtggtctgtgcttcacctagacaaagaaatgacagtcaaggaacagatgctaggggaggaaacagagctgaccagaggttacctgggcacaagaggaatctggaagagcgcacacctgctgagcaaacctaaggcagtgacatcagggtggaaaaaagaatacatatgcttattgttagtgttcaccaaaaaaggttcacagtgcgttgctctaaaagytcagttagcttctctaacacaaggtagatacagtgtgaagtgccaaactcagtttccataaaactttttacaagcatgtaagttccttattgactttttcaaaagaaattcatgtaggaaatgcatcctaactcattctatgatgccagcattmccctgatactaaagccagccaaagacactaaaagtaaagaaaactgtagagcaatatcccttatgaaggttgatgccaaaatcatcaacwaaatactagcaaatcaaattcagtagcaggctgaaaggattatacaccctgaccaagtacagtttgttcctggaatgcaaggatggttcgacacatgaaaactgatcagtgtaaacagaatgaagggggaaaaacacatgatcatctcaattgatgccaaaawaaaagcatttgacaaaattcaacatctttcatgatgaaagcactcaatatactagaaatagaaggaaactacctcaacataataaaagttatatgaaaaatctacagcaaatatcatactcaatggcaaaaaaactgaaatcttctcatctaaaatcaggaacaaggcaataatgcccacttctattcaacatattactggaagttctagctagagcaattggacaagaaaaagtggggggtgggggagaagaggcatccaaactggaaaggaagaagtaaaattatctctattcccagatgatgtgatcttatatgcagaaaaccctaacagttccacaaaaaaaaaaaaaaaaanactcgag

SEQ ID NO: 183 - DNA, 2735 bp, Homo sapiens
agtaggaaaggcttctcagaaaaaaaaaaaaaaagtataggctgaatttagctcagtgcttgaaatgggaagatatgaattattatatacgcatctgtccacacatacacacatactgttgtgtacacacacacaacatgcctgtgcacagagccaacaacccttcaaaagtgtgctctgggtgtgtacctctggataaataagatgcatgccargccaacccacagattttcaccagtgtggggcagtcaccaggcacctgttcaatgagctgtccacatggattgaagatgttttaaaaacacagaaaactcatggcttcaatggcagacttactagtctccatttcaaatgccaactctgagctgctgtacagcacaatctattccctattctctctttgaaaacagttaacccacctcacaggtgaatgargagagaagatgtgctttctgcttcagtctcttactctgtgtgtgaccacatgcaagagtaaacttgcacctcagtgcttcagttcaaatggggtttccaaccccagtataattaggggtgtttcagagcatccccagttatttagcacaacactgaaggagcacatcccctctccattttgacttctctccccacttttacagccactgccttcatcagttttgtagaggtttgatttccatgtgggttttgttgtcattgttttgcatttttgttttgttattgatattgtttgctttcattgctaaaactcatatacgacttactatgagccaagcactgttctcagtattacataggtatgaattcatttaagtcctgaagaaaaagaaaaaaaaatacgaagtggatattacccttcccattttcaaataaggaaactgaagcacaaaaagaacaagtaacttgacaaggacaccccggtagtaaatcatggggctggagctcaaccccagggtaggctggctccagagctgtgctctccttgactcttctgatggtctcctagctggaagcctcacatttcagtctcattcccccaagtggcccatcagctactccatctctggctccccaactaaacagtttctctcatagtgctggacctccactcactagttttttttccagctgttcttctcttttcttcaggtcactcttctcgaccgagtgcaaaaattatcccctccataccagctttgatgaccttccttccatactcctcaccagacacaacataataggtcacacactcctctgtgctttctggcacgttttaaacattattattattgacctttacctatagtataccatggcctatttatgtatccatctcccctagcatttttcctcaaagacaagaaccatgtcttacccatctcttgggtaagtgcctagcatggtggctgacgcttgggagggtgtcattaaatgttgctcaaaagaacaagcaaacatttaaggtggtggagagcagcctggggacagctgacatgctgcatgcttctcagtaccagcaccatcacaatgcaaaaagcaacatctttcttaacctcagcttattctgtttttcagtctactctgtgagagagcaggaatgagaccagactagcaacaccattgccaagctcaaggactgggctcaatgcagtcactccttcagagagaccccccaccccaagcatgccccactttaaaatagcatgtttattgaagggggcatcctttacagtagctagaaaatgactgaggcccaagccagggttgatcaaggatgtgccattaaggtaaagagttacagagcagggcagagggactctgggggcagaagtggatgatttgcccggcctcttccagggggtctggatacaactgaaggagctttagctacatgaggccctcagagccaaagacaggatgcaaatagagttctagagagtggccgtggaagcagaactccaggtggggaatgttcaatctctgsctcccttaaagcagggccaggctcagctggccccattgttcacttggtcacaagtttcctacctttgtttctggatgagtcaaaggccaggaaggcagttatggagagctcctgcacctccagctgccccacagaaaagcctgcaagagtacttccaggcacaggccctctcccaccctattccatttgtaagcaagggaggtcgaggaaaaggacatctccaaaagggagcataagaatagccatatatacaggggctgaaaaagtgctcatgagtccatcttttctggaaagcaaagaccagcctgaagcagtgggagctgctgcccaagcggtagtgaactggagagaaacaggccctggattttcagtgaggatgtggatctgaagagtcccccaaatgcctctgaagtctgacatctctgcttagccctaggagtctggttccctgccttcagttgcagagtgatgtgtttgtgtcattgttgatgtcacctcctaaaaagaccttcactttctggctgccacaaagccatatgtgttgctccccatatacagcctgacagagtaaatggagaggaagtgctggatttgtgtatcactggctatcagttcctcatgttgttaagcctcacacaggtgtgctagcattgaactgtagagtgtcacatacctgagtttgaaaataaaagcacatttccaaaaaaaaaaaaaaaaaaaaaaaaaaaaaaaaaaaaaaaaaaaaaactcgtag

SEQ ID NO: 184 - DNA, 2644 bp, Homo sapiens
  misc_feature (428)..(428): n equals a,t,g, or c
  misc_feature (430)..(430): n equals a,t,g, or c
  misc_feature (433)..(433): n equals a,t,g, or c
gctttaatccacataataaccctatgggatagataactgaggaacagagaggttaggtaatttgtctaasatcacagagctagggaatgatggcaccakagtttraactgcatactgactccagcaacttctggggaaaatcacactcagtgttttgtagtaagatttggatttagggggtaaacagtactaacagagagttacagaactttgtacttctctcatctgctatttagttcattggacttgaactatgggctaggagagtgagaatggatcttggagattatctagttagcagcccttatagttcatggaactaagacccaggctgtgcagtagcctgttcagggatatgcatatgggaaaagctcaagccagaatggagtgcttttttactgaagaattctaaaatgtttctgcttcananaanatcctctctctgtcctttttccccttctttctccttgtcttctctccctttttatttatggtgctatcatgtgttagaacaacaataatagaaagtacatggaaaagatcacttaaaatcctaccacaccatgttttaaactattttcatgtattgctgatttctgaatctgttatcttgttagattatgacattgatttaagtttcatagctcaaatatggaacctctataaagaagttccagggagtggaaagggaagggaaaggaattgctgttatttattaagagcctactgtctgtcagtcactctgcctacctgctgtctctgatgtctcaaacttccttcccactttatgggattctgtaggaggaccagcacaataccctgcacaaagtgagcattctgcaaacctaaagaacgaggaaatgaatgaaaggaagtgctttgaattcagcagaagaaagagataacaatcatgtgcgaactactcccagctattgcctattgactgttagctttcagttcatttttgtacaatttaaccattgaggcaaatgtgtatacaggatmccatggaatgctgtttacaggtatagattttggtctkgtacttttgaagcagctgaatmctgataaggcctgtgtccagaaactatttttttccttcatttaatcaggtttctttacttccttgaccacaaatattatttgctaaggaaatttcttctttggggtggtatttamccatgcaagtggggaaaattgtgctacgatactgttctgacagcctgtggacttgaggaaaaaactgcaggagcagagtttcctttcagcagtcaactataggctcagtcacttcttgacaaaacataagttaaaatagtgctgatttctttttgaacataatcaattctaatggaaactgttccagctgagtttggaaacacacagaagcagccttcagttaccattgaggctattattgccctagtaataccaaagagactctttcagcctacttatttgtattggatgcttgtagggctatttcatggggacctggtgttgactctcagtgacttccactttgactctgagatttatcttcaaatgctgatgcattctaagatttatagaagtacaaacttatcttattattgctaatttgtcccattactagactatgccccttagagttataattatgactagcccaattacattttattgtcgtgcccttttttggcaaaaaataaaatttctttgttaaactcaaggatttaaaatttagcacaagttcataaacttactttgatacttcttcatttcctttttaaaaatacatcagtagactcaaaatgtaaaagtggcttagggctcacttgacctctgaaaggtggctgactgacttttagttaaaaacaatatttgtctatatatctctgtcatctatttgtggctactatgtgttgaaactttgtggaacagatatctttctcccttcttcttccctcctctctgcccaaaagacacacacacaaacacacacatgtacacacagagacttgaaggcttttgtgtacatttaccaactactacaacaacaagaaatgaagaacaatacagctcaactctgtaaatctagaatggggaatctattycccaaaggctgtatgcagtatcttttcagcgagtcatggtagcctccaacaactagtagcactctttgtgcatgaggatatttctgactaaaaatccacctttgttgataakgtttgttcactgtaaaggaattgagtggataaaagaggtatacactttcctttctatatcaaggaaggtggaatattcaaacagaacactctatgtgtgcacacgtgcacatggacgtgagtgagagatgatttatagatatagaagagtcctactgtattcttttaagaggtattcagcaactatttgttgaataccttctgtgtgtttatcactatgctgagttcctggtgagaggggaatgagtgtaaagcagggatgttaycactatgctgagttcctggtgagaggggaatgagtgtaaagcagggatgtccaatcttttggcttccctgggccacactggaagaagaaatctcttgtaccatacataaaatacacttaacactaatgatacctgatgagaaaaaaaaaaaaaaaaaaaaaaaaaactcga

SEQ ID NO: 185 - DNA, 3115 bp, Homo sapiens
  misc_feature (519)..(519): n equals a,t,g, or c
  misc_feature (558)..(558): n equals a,t,g, or c
  misc_feature (2101)..(2101): n equals a,t,g, or c
ggttatgggtatgatgtgctggtctcctcctctggataagatgggcaacagtgttaagggaattcacttttgtcacgatcttgtttctctgtgtaatttccataactatgataatttgagacactttgcaaaaaaacttgatcctcgaagagaaggtggtgatcaaagggtaaagtcagtgataaatcttttgtttgctgcatatactggagatgtgtctgcacttcgaagatttgctttgtcagctatggacatggaacagcgggactatgattctagaacagcactccatgtagctgctgcagagggtcatgttgaagttgttaaatttttgctggaacctgcaaagtaaaccctttccccaaggacaggtggaataacactcccatggatgaagcactgcactttggacaccatggatgtatttaaaattctcccaagaataccaagtcccagtacacacctcaaggagattctgacaacgggaaggaaaatcaaaccgtccataagaatcttganggattgttgtaatggkctccaaatcccaagatttaaatncacttacctatttaattgtggaaaatgattatgaagaacatgtgtatttctatctggtagtgatgtatattttacatttgtcatttcagtgttactggagttttcttcattgtgcacacaggacaaatctgatctctttgggaaaaaatagaaataaaacaatctccctccataatgtgagcaatattacctcgtgcattgtataatttgatgtaaaagaaatagttaccaatgctagcttgtgtggtcttccatgatttatttgtgttttgtgaattttcaatttatggtgatgatctgctgatatgcatttataaagtaagctctgttgtacagtctgtccaaatgggtcaaggttgcctttagaagcaaatagtgtgattttcaagacttcaaatacaaatttagtttaagtgtttgaacaactatatgcacttacggttgtgtgtttaaaatgtctctctcwcmccctagcttcatgatgtgactcttaaaaaactataatagttaacaactgttagtaagatagaccaattctgattagactttatcagggaatctgtttaagatatgtttggtgaccaaaacgtatgtgtgaatgtagttataatgcttttgaaaaattttcctttttctatatccccttagtccagcctctcttctcagacatttagctatctgcctctttcctttagctgggaaagtgagagctggcatactatgcagtttttatgttttccatagtaagtcagaaaakgcctcctatttctggcatcagaactttgccatttgtctacagaagacgaaccagagacaaaattactaagtataaattagtcaagtttatcagtctaaaaagcgaagggatgtgcaactgcagctctttaagaagtttttttttttagcttctagggtaaagataaattcagaaatgctctaagctaccaragttattctgaaagtatgggaactgctacaactaacaaacatttgtttccaagcctgtcattaagagtctgcatcaagagatttgtcctccttgggggaccactggatcattccagatttcttgtgatttttctattgtgtaattcttggtgggctctgtagtttaataataagaaaaaggccatttcattttaaattgtgacctataattctttgtcttgggttggtaattcaggattcatttggaaagtgggtaaaaggggcttcaaaaaacggatagaacaggattttctaggagttacacatacattttatcctgtcatacctcgagataaagtggcatgttagtgaggagttctgatattaagcacacacacacatgcacacaaatggacttctctgaagctgtgtttagtgaaatgagctcaagtacatgaatgttagttgttatcacatacagcaaattcctttttttttctttttctatgagcacactctgctgcttctaaactttacatgcctgatggcaccttactccagcagcctccaggtgctttcattttcacttccagtctaagccagtggctcctgccantgccctcccattacctagatggcacctcctttggtgaaaccacgggccaatgttccttagctgcaccaggcccgaagctgttcccatgcttgagcttccatggggaggatgctgagtgagcagtttcctacsccgtgggatctagcaagccatggagacaggtagcatttgtaagatgctgcacaggagcagcattatccccaaagatattacagggtagacacgttttaactgaaatcaatcaagataactttattcaaagagcagcccgctttgtgtgactaaaatgaaacaagacagttgaattgtgtgacttgaagattaccaatgattttgaggcttttctataataaaaagaggttctaaccattatttgggaacaaagagagttttcatcttttttcagatcaaaaccattctgtaaaatctttgttgtttaattaaatgtgccgttatttacccctgatgttatttatgactatgtgccgattcctgcttgggctgtttgctgttggctggtaataatatatttgatttaaatgctgttgactgtgctattaactgctgccgtcagtaaactccaaagatctttttgttttggctttagtatcatatgtgctttttctgtatcctgagcgctctatatgatcatgttaatttaaagctttatacacattgttgtttttgctggtctcatctttggtaatatgctataccccactgctgcccgacactgccctttagctgcagagctggattagctgttgaccatttgatgctgttgtctgtctggcagggactgaatgacctgatgtcagatttagattcttcctggggattacacagctatgaatgtatttgcttctaaaacctcccaaagtgaatctaatcttaaaactacaagttgtaagtattctgaaattgggaaacatttattttaaatgcaatcaggtagtgttgctttttacagcataataaatatatgtatcaaaaaaaaaaaaaaaaaaaaaaaat

SEQ ID NO: 186 - DNA, 1419 bp, Homo sapiens
ggcacgagggaaactataaagcagagcagtggtgtctttagaggaaactcattcaagtcagggcactgattttcctctcagtttattatttggggggatagggtcaggtgggtatagtagtactttaccagggtgcttttaagttactttaaaaaaagcctacaaaatattttttttcttttatttgctcgagttcacattaatgatggtcacaaggctgccttgttgggcaggcgtattgcccccagttcctcttctgctggcctgtatgacctccacagccaggccctgggcccaagccccttgtcccttctccactgcccctctttccagacagtaaaggccatggtcagtgtgtttttctcttgtaaacaaaccccagcttgtttaacagaaatgctaataaacctactggggaaagatggaggtctaaattacctccagggtttttctgggggtttatcaccagtgtgggtcccttctgataccaccaggttcactccaggcagagtggggcggaaggctgctgaggatatgggtcagttacagcagccctcacctcaaagggctggcctgcttctcagcctacattcatttgcaagcttcaatctctggaccatctggtgttcacaggtgttagagggttaggggttaggggccagttttggatttgattcataggtaggagggcttagattttaaggcacttctgaaagtcaatccctggacaaggcagtcatcacataagaacagctaccttctccacttggtggcacaagaggtagggaggggagtatgggttcatttggcttcgcattatgcaaggtgaaaccgtttgttttccctctccattttccctaactaaatgaaaaggacacattctgaaatcccttttgttggagaataagtcagtctgaggggaaatgggaggccagagatgagaaccctttgaaaagattgtaaaatactgattttcattctttcaagcttatttgtaaatacctatttgaatgctgtgtatttgtacaggaatttgagcaaaaaatgtatagagtgtgatgtccaattggtattcagcactataaatgtgtttttaacctcccgcattctgtgcttatttaaaacaaggaaacttctaaccatttcttttgtgtattcatgtttaaagaaaaaaagtgatttaaaaatgatcttacctgtaccagaaaagcaaagttaaaggaaacaaaatttgtaccattgtcccaagaggtattttactgtatatattgtggtagcatgttcaaaatccaacaagtaatgtgaattttagatgtaaatatctgccacttgattttttttccccctttccccacttccttgactgctgtgatgtgaattaaagataaatacgtgatactgaaaaaaaaaaaaaaaaaa

SEQ ID NO: 187 - DNA, 1941 bp, Homo sapiens
  misc_feature (499)..(499): n equals a,t,g, or c
  misc_feature (558)..(558): n equals a,t,g, or c
  misc_feature (1890)..(1890): n equals a,t,g, or c
  misc_feature (1938)..(1938): n equals a,t,g, or c
cagtatccaaccatcctctccattctcctctggacctcaccactctcagagctgcttgtcctggcagaatctacarttcaccccaactctatgccttacccctcccaacccaacagcatttgcagtttgcaaaatatacagacccaagtcctgaggggactgaggacatgatgctgggcccaagtctcctgctcagggcttctctccaatgccagccctgccactccttcctcaccctccttggagcctcctctgctgcttgtctatcccaacggccctgctcccctcccttcctgcccttcaccagctttctggacaccakgcmswgrgraagggacctttggttttytctaaacatctttraagggctgaggcagtcagggctggctgccttgtmactctttatttggaagccactcaaaccattcccaagaagagggaacctcasctggcaatctgggaaacctggcccaggtctgggcmgatgtyttcacttctncctaccttcccagttcttgtgaatcctgtgaatgagcaccaggatgggccctgtgggtnccctagaagcaccccttcatggctgtagggtcctgcagccccatcctttctctactgggccctggtatcctggctcctctctcagctctgccactgatctctgtgccttagtttacttctctgcacgggggactcaccccaagaccatttccagcagcttcccaggtgatgtggtgccccaaggctgggctttgccagctgtggcccagctccttagtgctgcccaggagacaccaggctgctcagaatgaggtgactgcgggcaccattctcagccagtggttcttgtattgcattccagcagcaggaatatcacctgggaacttgatagaagtgcagattagcagccccacccaagacccactgaattagagcttgtggagtggggccctacaagctggggttttaaggagccctccaaatgattctgacgcataagaatatgccaactgctgatctgggctagccattagtagagcctggggagggactgggactggctaggccaagaacaggtggaaaacaccagccttatctggactcctgagattgggaaccaccaccaacaaaaaccaaccctatagtcgctcctcttggaagaggaagagaagttgaagggcctggagaaagcacacattgtttgtttccctgctcctgctcacctctctcacttgtcttggttttacaaaaggctgtgtggatggtgccagccagggagggggtgggagtcctggggaggcaggaggcagaagaccctgactgtttctcccttgggaacctcaccataggccagatagcgcctcttcaaactgaaagaaatcttaactccacaaagaaagcatcctaaatccccagttcctcctcctcccaaccccagggataccttgtagacagtgccaaaaaacagctccaacccccagcagctgggaagagagccagaagctgcccttcctcctcatcctggcccctccccagcccccgccaatactgtgaacccccttcccactcagcctggtttcctggtgagggtcctgcagtcatgggccctgggggacccccaggcaaggcccatgggagggaagggaccaagggcatccttgggccaactgtccacctctcttgtccactattctctcctttccacttctgtcttcaaaaggctccttcctaggatggatcgggtgctaggacaactgcagtccaatccaccagctctccctgcccctgtgtcttatttcagacatgagaataactgtacagtgtaaacttataaagcgtttttaatggttgtagattggaaataaagtatgtcatatgaacagctgctgtggnaaaaaaaaaaaaaaaaaaaaaaaaaaaaaaaaaaaaaaaaaaaaaaangga

SEQ ID NO: 188 - DNA, 820 bp, Homo sapiens
ggcacgagattaattacagtttaagccaaagcatgagtggctttttaaagtgcatctgtggaggggatgtggcaggtagcccctgttcacttgctgtaagataagtgttttagtatttcagccacccttaggcacaactcagccaggcctaggaagcaacccaacgtcattgccatgaaccatttacacaagtcacaccaaaatcaactgacacatttttttcctgatggaacagttaaaaaaacaaaaaactatacagtcaaagtctggggttgaagagcgtgaagttcacagctcctccacacacgcccaactgagcatgctcatcctgtgagggggaaccagagccttcctgtaaaccatgagagcttaccaatgtctggtatacaaaatattctggcccataaactcaacctgtttttgaggggtaggggattttccatcttgtacataaagaaagaaatctgggtatccttcaggttagaaaggcattctgtaagaatagtgttccagagttacaaatcatactggtaagagaaaagcaattcttcctcttggggaaaaagaggaaaagaaagaagaaaagagaaaaaagaaaaaagggggaaaaaagaaagcctatcaatgcttaatctgttctttcattcccactgtaaatcacatcaatacatttggtgaaactgcaacggaccaccatttacaaggtagttgaatgcagaaaccgaaacgattatgccccctccccactctaaaggaaaagacacagagtacatttcacatattcagagagtggctcagtgggctctttcaagcggcacga

SEQ ID NO: 189 - DNA, 1236 bp, Homo sapiens
ggcacgagaatgaaacaacagatatgtgtgactccactgttagaggactctggaagcttatacctggtttcccccagactttgcctctgtaccttttctctttgctgttttgcttcatatgcttttgctgtaataaatcatagctgtgtgatgatatgctgagtcttgtgaattctcctagcaaatcatggaacctggaggtagtcttggagaccctggcatacaaagcagttcctaagtgtttactggtagctgtaggaataggcaaagaagaaacagcaaagaaaaaggcacactgtggtataactttggaggtttaccttgcaaaatgctcagatatttaacctatcagaggttattgtgcatataaaagagagtgatatactaacaactgcctcaggatatactctttttaatcagtattgtaactaaccttggcttatttcacttttagacttggggttctattttgctttaaaacatgtacatcagttttgttttttgttttgttcttttcttttcttttttttttttttttttttaaagacaggatctcactctgtcacccaggttgctgagagtgtggtgtggcccgatcttgacctcactgcagccttgacctctcaggctcaagtgatcctcccacctcagcctcccaagtagctgggactataggcacgcgccaccacgcctggctaatttttgtattttctgtagagacagagttttgccatgttgttgaggctggtcttgaactcctgggttcagacgaccctcccgcctcagcctccgaaagtgctgggagtacaggtgttagccactgcgcctggcctcattgtactccttaacacaagaagacttcaacaatgataagtagttgtttataaggaagcaggatcattaccaaaataaatcctgctaaaacaacaggaatcatgttttaaagcctagtttgctaatttttgctagtaggataagagtgatcgtaatatctcgaacattacatagacacttaaaacctttagttgtatttcatcaaaaatctgttcataccccacgttggtttcaaaacatactatgctttttcttcgtgttatttcctatattcatttttgtgtgtatgtgtatgtcacaaatattgatatgcctggttgtttatttttgttttctattatgcctttttcaaaatataaaaataaacttgtaatttctaactaaaaaaaaaaaaaaaaaaaa

SEQ ID NO: 190 - DNA, 1233 bp, Homo sapiens
  misc_feature (637)..(637): n equals a,t,g, or c
gaaaggcctccttggcattggctctggctctaaggcattttatggtagagaactggctgaaagacttctcttacatccgccagcattacttatggaagctgtataccattatttcttactgctgcttttggaaatattttctgagtacttaatacttcattttctcttgagctttgccattgaattttttattccaatgattacatcttaatattttcattttcttcatctttctattttttcttagtaactttctgtcctggtttcaaagattcagttccctcctttatttcagtgagcatttgaacatacttattttacagtttattakggattactgtagctccatttcttcacaggtaactttttcagtttgtagattcttagctgtttttcttggcatgcagcccccagtgagttagcaattcaaattttagtgttcatctgttatgggagttttatatgatcccttccctgtgaagcagtttcatggttccttcacactggmtgttcacagtctctgctttcagaccaggccttacatatacagattgctctatgctttcactctgtgtatatgcacaattctgggtccctcttctatgtcccttatctgctaggtcttggtcttatagangaacaatttctgtttttggcaagctagacytgtctgcctgcagtgctatgtgatggatgcagctctttaatctcytgctcctgtgtagacagtattaccccaattcccagctttatgctggatgtttaagttcagcaccttaccactctgttgggtgctgagaatttagtcctaaaaacccatatccagactgggccctacttaccactttggttttcctttctgcttctcttgttttgactacagatctgaatatttattattaatatttcctttttttttggagtggtatgagaggtttgtgctatgctcagccttctatctcgaccctagaagtagaaaaatagcttttaaatccactacaaagagcttttacttatataaggttaataggtggtagacagtctttgacatggggtgaaaaaatctaaaagttataaaaataaaaccaacttggctgggcatggtggctcatgcctgtaatcccagcactttgggatgctgaggcagaaggatcacttgagtccaggagtttgagaccagcctggacgacatagtgagatctcatctctaaaaaaaaaaaaaaaaaactcgga

SEQ ID NO: 191 - DNA, 1520 bp, Homo sapiens
  misc_feature (1507)..(1507): n equals a,t,g, or c
cacctcgcattctctctgtgttacgtgttggtggttctcacgatctttcagacttttttattgttatgacacctgttacagtgatctgtgatcagcgatcctccatgttagcattgtcattgttttgggcaccacagaccggacccggcaaccttcatctatgaacgttgtgtgttctggctgttccgcccaccagcctttcccagcctctctcttctccccgctccagcctccctattccgagacacaaaaatatccaagttagtccagtgagtaaccctacagtggcctcgaggtgtgcgtctgtcactttaaatcaaaagctagaaatggttcagtttagcccgggctcggtggctcacgcctgtaatcccagcactttgggaggccgaggcgggcagatcacgaggtcaggagttcaagaccagcctggccaacatggtgaaaccccatcgctactaaaaatagagaaattggccgggcgtggtggcgggcgcctgtagttccagctactcaggagtctgaggtgggagactcacttgaacctgggaggcagaggttgcagtgagctgagattgtgccgctgcactccagcctgggtgatagagactgtctagaaaagaaagaaagagggagagasagaaggaagagagagagagagagagaaaaaaaaaaagaaatgatttagtgtagtgaggaaggcttgttgaaagccaagataggctggaagcggagcctctcctaccagttagccaaattgtgaacacacaggaaaagtgttttaaggaaattcaaagtgcttctccagtgaacacaagaatgataagggaaacagccccactgctgatatggagaaagtttgagtggtcggataaagatcaaaccagccacaacgttcccctgagccggagcccaatccagagcaaggccctcgcactctgcaagtctgtgaaggctgagagaggtgaggaagctgcagaggaaagtttgaagctggcagagatttgttcatgaggggtcaggaaagaagccgctttcataacagaaaaaggcaaagtgaagcagcaagtacggayssagaagctgcggcccagttgtgcagaagatgtagcaaagactgtaaaggaaggtcaccgcactaaacatcagatttttggccaggcgcggtgctcacgcctgtaatcccagcactgtgggaggccgaggtgggtggatcacttgaggtcaggagttcaagatcagcctggcctacatggtgaaaccctgtctttactaaaaatacaaaaatcagccaggcctggtggtgcacatctgtaatcccagctactcaggaggctgaggcaagagaatcacttgaacctgggaggtggaggcaagagaatcacttgaacctgggaggtggagcttgacagtgagctgagatcgcgccattgcactccagcctgggcaacagagccagaccctatttcaaacctcgtgccgaattcgatatcaagcttatcgatanycgtcgacctcga

SEQ ID NO: 192 - DNA, 1379 bp, Homo sapiens
ggcacgaggcaccactgaaattccctgtcaagtcccctggttagtgtctaattagtgtgtggctttaggaagtgggacaacacatttacatttttgcaggctgttacctgaacgtgatcgctgaatagcgtcagctgttcaaatagtaatgctgcatacaatgagaaatgtgagagggtgtgtgtgtgtatgtgtgtgtgtgtgtgtgtgtgtgagtgaaggccatttgttaaatggaacacctaaaaataccattgtttttgtttttgcggttgtcaggggcctcaataaatgcaagctggctcaggagatgcttgacctgagaggtctggaaagaccagattagaagtctcagcagaggaccaaacccagaccccacttctgcagaagttctgtacccaggtttccccactgcaggcataaccagcagcccctcaaaggccccagaccagccaactgtctttagaaatgcagacccaggatcagctttgctaccagccatggaatcttgggtcagtggcccatactctgagctgtgtttccacagtgcaaggctggccggacagtgttttatttcagagttctcctgtctgtggcatcttcagaagttaaagatttgcttgaccactataaggtgccctgggagtgtagacctcccacatcccagctgcctggctggcagtgggtggggagtaagcagtagagagaggacaggtggcccggaatctaacagcttgcctctggattctccctagtaagcttggaatgatgctggagcagctctgggccgaggggaccagtctaaggctggacgcaaaagactgggcgccacctagtctgttcatcaggtattaaatgccctgagttttcaaagctctggtgattcagtagtggacgggtaaggttcctgcctctcctggggcttaccgtccaggggtggggaggacgtcactatatgaaattatcttatttatagcttaatgtcattatttaaaaagggggagggaatcacttgacgggtgggcaaggtggggacggggttggatggaatggtcaaaaaaggtctttcagagttcttccaatcctgaactaactcacctgcacccttggcccaatcattttcactcccgagggtctgcactcctcgtttctacattctaggaagaaaaggggttggaccctcccctctttaagctgggttgggtccgaatcccgtgcttctttcacttcctgagccgggctggctgggtgggaacaggctccttgccgcctccccagcgctggccactaccacactgccgcccgcctgggcctcctttcaacctcgtggtggagccctgcggtttcccagcggagccgggcccggggctgctcgtgcc

SEQ ID NO: 193 - DNA, 1001 bp, Homo sapiens
ggcacgagcatggtgtctgatagtggctcaatttcagttttttttaaattgtttctgaggcgtgtttcaaatatttgactttttcccactggtctgaatagtgcttctcagatacggcaagtctctaggtttgcatgagtcagcctctgtgccctctgttcttttcccctgatgttctttttgcttcttcttatgctattaccacactgtcttaattactatattttattaacaaatctcactttctggtagaccatttccttcacctacttcttcactttccttcaggaatgtcttggatattgtaactcttttccttatgatttagcatcagcttgacaagtttaataaaccttgttaggactgagataaaattagaaagattggacatctttaaggtactgagttctcctagccaggaatgtggcacgtttccctatttctttagggaattgtaaaatgtctttttataaagttttataattttccccatagagatctttaaaatattttgttagatttattcctagcaccttatatattttgttactcttgtaaaaagtatcctttttttttttttttttttagaaacggagtctcgctctgtcgcccaggctggagtgcagtggcacgatctcggctcactgcaagctccgcctcccgggttcacgccattctcctgcctcagcctcccgagtagctgggactgcaggcacctgccaccacgcccggctaatttttgtatttttagtagtagagacggggtttcaccgcgttagccaggatgttctcgatctcctgacctcgtgatccgcccgcctcggcctcccaaagtgctgggattacaggtgtgacccaccgcgcccggccagtatccatttttaaaaactacattttctctttgttgcttgggtagagaaataaaatcaatttttaatttatcttatatctgatcattttctcgtgccgaattcgatatcaagcttatcgataccgtcgac

SEQ ID NO: 194 - DNA, 1378 bp, Homo sapiens
ggcacgaggtgggtgtgtgtgttcctaatcatatttttttgtgaaccaaagcaaataaaaaaatgctggtgttaagtccttatttatccagaaaaaaaatagcataatactaaaaccaagataacactaatgtgatgtgatgttcttgtaaaaagctaacctatttccaaaggcttgtgtgaaaaatcagtcttaaaattatactacaggttttcacatttttaaaaaaatcttcatttggggtgaggaggtgaaatatgctcttacctcttttatgaattaaatggaatatgaaaaatgctctaagtatatttcttcacatcttcctttcagtgctgtttttccgttgtgtgtatgcttgcaacttttcttgctctgcagtttcaaatggagtagttaaaaaatgacccttttatccagtgggtaaaggacaacttttacctatgaaacatttatttgcctaaattataagaatgcaagatttatatctgacagagatttaatcattgtctagcccttcattgtttagaaacacacaaaaattaagggtataggcagttctacaaaatgtcttctttaggtaaaatatgtagaacatctttatctttgtatatagcatctctgttgatatattttagcattaattgtttgatcattgtcaggaaatctaattagataagcctgtttctactctcatgaaggtattcaaatcttcgtatataatgaaatttttcactcatttattagctgttgactgatctgagaataaaataataaaaataaaactctatcacttatgtgggatgatgtcaaatcctgacacatcatccaccactcacagataactatagacataactcttataaaggcctcattatactatattagggcataaaaagaagccatttacctctcaatgccctaaagtataaaacttggacattcagaaaaaaataaataagagaaacacaatcccattctagcccagaattcctaaattgcaaatttgttttcagaaattacttttcattatacagttatttaatctttgatgactatgaagtcatgccatggataaaaaattagagaaaaaacagaaaaaagtttgtattcttataaataagtaaaaatgtaattcagcttgaccaagaatatctggattattttcatttttaatacagtaaactcaaagtaagtcatgtaaatgaaagtctgtttttattacctcctcaatcaactatctttttcaaggtgttaaccttgcagtccacttcaataagaaaatacatcaaccaaactactctttcacctgtggtaaatatcagccacatttctaggcaagctcgtgccgaattcgatatcaagcttatcgataccg

SEQ ID NO: 195 - DNA, 1316 bp, Homo sapiens
aggaattcggcacgagctttgactcccctcctttctaacagaatgttgccaccactgcttgagtgggctgtgtttgttcctctgtcccagcttctgttgtagaaaataacattgttaggggaactcaggctagtgtcagcgtcttggtttggggagaaaaaattaaatgtttcggtttttgtttcttttgctgttttgtttttaccttgttactttatcatattgactttagggtcaaaggcaacatcagaagaagtcagatatgtatagtgacattccaggggtggggaaggtgtagggatccagggttctcccggtcttggccacaggcacaatcatcaccttcatcgttccagattcctggggagaaaactgagaagatcgttacctgccagcctcatacagagcaaaagctctgtcctcagggccaagttctaaccactgctctgtagaccttctctgcaatcaagtggcctctaaggagcatgcctgaggacaaataactgtgcctcagtttcctcacctgcagatggggttatcaaataacacgaagtgtgcagcctgacctgtaggaggtgtgagtgtgttcccaaactaaagccccaggctgccatcatttacaggcttggcttgccccgggcccctcacccccgtttctgaccatcccaagtctctctgggacaggcaagtcactctggttctttaataagcttggaggtgttgggaagcttcagtggtactggccaggccaggaggaatcaggccaccagggctccatctctatcctgggatagcattcaccccactcctcctcagggctgaccccgactcatggcccctttaaaccctgaaggccgattctgccccttcctctgttatatgcacaactgaggaaggaggtaaaagtgggctcctaggtgagcccaaagtctcctgagagataagggaaaagaattggactgtaggtttaaaaaagttgctcttggccgggcacagtggctcacgcctataatcccagcactttgggaggctgaggcaggaggcagatcacctgaagtcaccctgaccaacatggagaaaccctatctctactaaaaatagaaaaattagctgggcgtggtggtgagtgcctgtaatcgcagctactcaggaggctgaggcaggagaatcgcttgaacccaggaggtggaggttgcaatgagccaaaatcgcgccattgcactccagcctgagtgacagagcgagactccgtctcaaaaaaaaaaaaaaaaaaaaaaactcgagggggggcccggtacccaattcgccctatagtg

SEQ ID NO: 196 - DNA, 1738 bp, Homo sapiens
ggcacgaggggagagaaaggagacctgggtctcccaggaagcaaaggggacaggggcattagtatcagtgacaccagcaatgtaggttcccagccccttcccagtggcagcttgtgtgtccaggagataggacatcatttaacgcatcagcaaagtagcagcagatgccacatacagagtagagcgaaggcatttggtggatcggtcactagagatctatcttgcagaaagtatgtttttcctcataaaagtgcctcttaattggccattgtaccagccacttgtcctagccaaatgtccaaaacacgcccttgggccccgccacgttacaatccacagattgtctgtctgagtcgtttaaggcatttcctggtgcttgtgttccatgaataaaaggacaaagtcagaagatcactgatgtcttactgtcaacagagatattttaaaagagagaagcaggaaaagatcttcctttttttgatctacaacttatatagttttctgattatgcacataatagatatgccttccagatgcataaggcaaacatctggaaagaaatatacccaaatcttagcaggggttatctttgggagtggagtacatgggattttgctttcttcatttttataattttatattactgtcttggaagatgtgtttatgtgtgtgtgttacttttacaatcaggaaaacatatttaataacatatagtcaagaaaacagacttaaaaataaatactatgtgtccattgagaaaattcacaatataaacagaaatacaaataaatacatacacaattttaaagtcacctgtagccctacccttagaggtacccagggttaacattttggtggtattgtcttatcaatttttccgttgatacattcagcaaatttggagcacattgaccatggagttttgtgtccaaatccaatctgaatttacctggaagaggccttgacacctgcatggaaatgagctaagaaaaccactggagccttgggagctctttggcctcctggctggcccagtaatatctgagctcctttggttaatttataactgatataaaactacatcttctttataatataaattgtacctgtgagtctagaagctttaaatgtgtttaaattaaaatattcaagctaaatgttactgctctctcccaaattctgtaagtttgactcccgttaccccaattagaagtaacttctttgtttcatgccacttttatagcatttggtaattctgctataacacatcttgcccctattattaactgtgcacagtacacaaaggtgtgcctttacgtgggaacatggattgtgaatgactctgtaatgaggcctgagtattagttatctttccactcactccccgttcccctttccaaccccaaaggctcacgataggggctcactaaatgtcagtgtttcaccaaagtattttttccattgtattaagagtccagtcactgtatatggaagtattttattttttatttttttatatcacttgagtccactagtagtacttccttgctctgtttgacttgtcagatacaaagacacgggattagattttgggtggtaaaattgtgatacgcatggctgttgatggagtggaacatcttagtgatgtgagaaaggtcattttagttataaatgtaaaccaattactttagcacaacaataaagatgttctggaaattacaaaaaaaaaaaaaaaaaa

SEQ ID NO: 197 - DNA, 528 bp, Homo sapiens
  misc_feature (106)..(106): n equals a,t,g, or c
gaattcggcacgagctcgtgccgagagtgcagagctccaggaaagggtatcagagctgcagccagctctgccctctaccctagggaggccagaaagacacaaacancctccgggcctttacgctggactctggcttggcaggctccaggcagggtcctctgggaagttactctagaaaacgaagggaggaggagcacaagatcctcagcaacgaacacctgcacttagaaaaagtggacagcttctgccaaccacaccctacccatggtactgtatgctattaactcctggaaacgccccgtaaatgcgagttgtttttgtatttgtgtgttgagatgggccttgtggtttctctgtactcagagcacatttcttgtaattactattgttatttttattgtcatgactgcccctgagctctggtgagaaaagctgaatttacaaggaaagggatgaagttaatatttgcatcacataattatatcattactgtgtaaaaaaaaaaaaaaaaaactcgaggggggggcc

SEQ ID NO: 198 - DNA, 1054 bp, Homo sapiens
ggcacgagtggatatatcacattttgtttatctgttcatcagttgatgaacttttgggttgtttctgctttttctggctattgtaaatagtgctgttatgaacactgatgtacaattttttggggtgaacatttgtttttattcttttgggtatatacctcggtgtggaattgcgggatcatatatggtaattctgtctttaacttaatgaggaactgccaatctgttttcctcagtgactgtaccattttatattcctattagcaatacacaagtgtcccaatttctccacatttttgccgacactgttttccattaaaaaatttttattgtagtcattctagtgggtgtaaagtggtatctttttgttttgatttgcatttccccagtaactaatgacattgagccttttttcatgtgcttgttggccatttgtatatcttctttggaggaatgtctgtttaagtcctttgcccactttaaattgtgttgtctttgtgttgtagagttgtaagagttctttatacattctgggtactagacatgattttcaaatttagatacatgattttcaaatcttttgcctmtaratgttttttacttttttatttttgatccttgaactcatctatattstakggttgtgatgwaawratgtcagaattggtgtcatttgtgtttatttaccaggttatttggaaggattatattttaggtgctctcctytcccccagtaaatggtattatgacacaagggttataaaggactgataagaaattacttaagacagaaagggaagttggcctgcttccaaaatatggtcccagcagaagtgaagttagttacacaaataactacagtcaaaaagctatttttatccatgataatgtatttgttgttattaatattaaagattatattttgccaggtgcagtggctcacatctataatcccagcactttgggaggctcaggtggatggatcacttgagctcaggagtttgagaccagccagggcaacatggtgaaaccccatctctacaaaaaaaaaaaa

SEQ ID NO: 199 - DNA, 5061 bp, Homo sapiens
  misc_feature (5057)..(5059): n equals a,t,g, or c
ggcacaagcagctcgccgcgcagcggctgtatttgcggcctgtgcgagtaggcgcttgggcactcagtctccctggcgagcgacgggcagaaatctcgaaccagtggagcgcactcgtaacctggatcccagaaggtcgcgaaggcagtaccgtttcctcagcggcggactgctgcagtaagaatgtcttttccacctcatttgaatcgccctcccatgggaatcccagcactcccaccagggatcccacccccgcagtttccaggatttcctccacctgtacctccagggaccccaatgattcctgtaccaatgagcattatggctcctgctccaactgtcttagtacccactgtgtctatggttggaaagcatttgggcgcaagaaaggatcatccaggcttaaaggctaaagaaaatgatgaaaattgtggtcctactaccactgtttttgttggcaacatttccgagaaagcttcagacatgcttataagacaactcttagctaaatgtggtttggttttgagctggaagagagtacaaggtgcttccggaaagcttcaagccttcggattctgtgagtacaaggagccagaatctaccctccgtgcactcagattattacatgacctgcaaattggagagaaaaagctactcgttaaagttgatgcaaagacaaaggcacagctggatgaatggaaagcaaagaagaaagcttctaatgggaatgcaaggccagaaactgtcactaatgacgatgaagaagccttggatgaagaaacaaagaggagagatcagatgattaaaggggctattgaagttttaattcgtgaatactccagtgagctaaatgccccctcacaggaatctgattctcaccccaggaagaagaagaaggaaaagaaggaggacattttccgcagatttccagtggccccactgatcccttatccactcatcactaaggaggatataaatgctatagaaatggaagaagacaaaagagacctgatatctcgagagatcagcaaattcagagacacacataagaaactggaagaagagaaaggcaaaaaggaaaaagaaagacaggaaattgagaaagaacggagagaaagagagagggagcgtgaaagggaacgagaaaggcgagaacgggaacgagaaagggaaagagaacgtgaacgagaaaaggagaaagaacgggagcgggaacgagaacgggatagggaccgtgaccggacaaaagagagagaccgagatcgggatcgagagagagatcgtgaccgggatagagaaaggagctcagatcgtaataaggatcgcagtcgatcaagagaaaaaagcagagatcgtgaaagggaacgagagcgggaaagagagagagagagagaacgagagcgagaacgagaacgggagcgagagagagagcgagagagggaacgggagcgagaaagagaaaaagacaaaaaacgggaccgagaagaagatgaagaagatgcatacgaacgaagaaaacttgaaagaaaactccgagagaaagaagctgcttatcaagagcgccttaagaattgggaaatcagagaacgaaagaaaacccgggaatatgagaaagaagctgaaagagaagaagaaagaagaagagaaatggccaaagaagctaaacgactaaaagaattcttagaagactatgatgatgatagagatgaccccaaatattacagaggaagtgctcttcagaaaaggttgcgtgatagagaaaaggaaatggaagcagatgaacgagataggaagagagagaaggaggagcttgaggaaatcaggcagcgccttctggcagaagggcatccagatccagatgcagagctccagaggatggaacaagaggctgagaggcgcaggcagccacaaataaagcaagagccagaatcagaagaggaggaagaagaaaagcaagaaaaagaagaaaaacgagaagaacccatggaagaggaagaggagccagagcaaaagccttgtctgaaacctactctgaggcccatcagctctgctccatctgtttcctctgccagtggcaatgcaacacctaacactcctggggatgagtctccctgtggtattattattcctcatgaaaactcaccagatcaacagcaacctgaggagcataggccaaaaataggactaagtcttaaactgggtgcttccaatagtcctggtcagcctaattctgtgaagagaaagaaactacctgtagatagtgtctttaacaaatttgaggatgaagacagtgatgacgtaccccgaaaaaggaaactggttcccttggattatggtgaagatgataaaaatgcaaccaaaggcactgtaaacactgaagaaaagcgtaaacacattaagagtctcattgagaaaatccctacagccaaacctgagctcttcgcttatcccctggattggtctattgtggattctatactgatggaacgtcgaattagaccatggattaataagaaaatcatagaatatataggtgaagaagaagctacattagttgattttgtttgttctaaggttatggctcatagttcaccccagagcattttagatgatgttgccatggtacttgatgaagaagcagaagtttttatagtcaaaatgtggagattattgatatatgaaacagaagccaagaaaattggtcttgtgaagtaaaactttttatatttagagttccatttcagatttcttctttgccacccttttaaggactttgaatttttctttgtctttgaagacattgtgagatctgtaattttttttttttgtagaaaatgtgaattttttggtcctctaatttgttgttgccctgtgtactcccttggttgtaaagtcatctgaatccttggttctctttatactcaccaggtacaaattactggtatgttttataagccgcagctactgtacacagcctatctgatataatcttgttctgctgatttgtttcttgtaaatattaaaacgactccccaattattttgcagaattgcacttaatattgaaatgtactgtataggaaccaacatgaacaattttaattgaaaacaccagtcataaactattaccacccccactctcttttgatcagaaatggcaagcccttgtgaaggcatggagtttaaaattggaatgcaaaaattagcagacaatccattcctactgtatttctgtatgaatgtgtttgtgaatgtatgtgtaaaagtctttcttttccctaatttgctttggtggggtccttaaaacatttcccaactaaagaatagaattgtaaaggaaaagtggtactgttccaacctgaaatgtctgttataattaggttattagtttcccagagcatggtgttctcgtgtcgtgagcaatgtggtttgctaactggatggggttttcttattaataagatggctgcttcagcttctcttttaaaggaatgtggatcatagtgatttttccttttaattttattgctcagaaatgaggcatatcctaaaaatcctggagagctgtatttaatgcatttttgcactaattggtccttagtttaattctattgtatctgtttatttaacaaaaaattcatcataccaaaaagtgtaagtgaaaaccccctttaaaacaaaacaaaaaaatgaaataaaattaggcaaattgacagacagtgagagttttacaaacatgataggtattctgctcggcaatttgtaagtttacatgttatttaaggataaaggtaaatcattcaaggcagttaccaaccactaactatttgttttcatttttgtcttgtagaaggtttatatcttgttttaccttggctcattagtgtttaaaaatgtactgatgatgtgcttagagaaattcctggggctttcttcgttgtagatcagaatttcaccagggagtaaaattacctgaaaacgtaagaagttttaaacagcttttcacacaaattagatgcaactgttcccatgtctgagtacttatttaaaagaaaggtaaagattggcctgttagaaaaagcataatgtgagctttggattactggattttttttttttttaaacacacctggagaggacatttgaaaacactgttcttaccctcgaaccctgatgtggttccattatgtaaatatttcaaatattaaaaatgtatatatttgatcctggggactcatattctttcagaatcatgtaaataaatggcatcatgttgtaattgtgtggtgcatactagaaaagttaaaaatatgggctgamctttttatggacttgatttttatgactattggtatctaaaggtcaaggaagccatttacattattttggatgaatctactatacatctatggaaatgtctcttttattttaaattctggtttctcaacggaaaatttcagaaaagatgccccttgccattttcgttaatttttcagtcttttcttagacacacccccagcctaagaccttgttcgaggagtttattgtgtctgtcttttcttaacatactgcactgttcttaagcatcatattgtgttgtttttatttagccactattaacatgaaggtttattcaggtagatttgatttcctttgcttcgtttcttctcctgctctgtcaactgtacttatcttaaagggccactctaaaaacaagggagatgtcgtaatctgaaacctttggggagatgtactctgtactgcataacatctccagtgaggtttgtgacaggacctcaactaaatatatgaatttgtgcaagttcatatattaaagtttctgcagcagagtgaaaattgttacagtaaatgtggtagaaactgttaatcgcttaatgccagtttaaatcatgttttgtaaccaagcttcagtaaaaggctttagattgtcagagttggttgatttttagaattgtatatataaagaattagacattaaacaggcatattctagtgtctgaaaatacacmtaagaaatttctawwaaaaaaaaaaaannnaa

SEQ ID NO: 200 - DNA, 1534 bp, Homo sapiens
ggcacaagcagctcgccgcgcagcggctgtatttgcggcctgtgcgagtaggcgcttgggcactcagtctccctggcgagcgacgggcagaaatctcgaaccagtggagcgcactcgtaacctggatcccagaaggtcgcgaaggcagtaccgtttcctcagcggcggactgctgcagtaagaatgtcttttccacctcatttgaatcgccctcccatgggaatcccagcactcccaccagggatcccacccccgcagtttccaggatttcctccacctgtacctccagggaccccaatgattcctgtaccaatgagcattatggctcctgctccaactgtcttagtacccactgtgtctatggttggaaagcatttgggcgcaagaaaggatcatccaggcttaaaggctaaagaaaatgatgaaaattgtggtcctactaccactgtttttgttggcaacatttccgagaaagcttcagacatgcttataagacaactcttagctaaatgtggtttggttttgagctggaagagagtacaaggtgcttccggaaagcttcaagccttcggattctgtgagtacaaggagccagaatctaccctccgtgcactcagattattacatgacctgcaaattggagagaaaaagctactcgttaaagttgatgcaaagacaaaggcacagctggatgaatggaaagcaaagaagaaagcttctaatgggaatgcaaggccagaaactgtcactaatgacgatgaagaagccttggatgaagaaacaaagaggagagatcagatgattaaaggggctattgaagttttaattcgtgaatactccagtgagctaaatgccccctcacaggaatctgattctcaccccaggaagaagaagaaggaaaagaaggaggacattttccgcagatttccagtggccccactgatcccttatccactcatcactaaggaggatataaatgctatagaaatggaagaagacaaaagagacctgatatctcgagagatcagcaaattcagagacacacataagaaactggaagaagagaaaggcaaaaaggaaaaagaaagacaggaaattgagaaagaacggagagaaagagagagggagcgtgaaagggaacgagaaaggcgagaacgggaacgagaaagggaaagagaacgtgaacgagaaaaggagaaagaacgggagcgggaacgagaacgggatagggaccgtgaccggacaaaagagagagaccgagatcgggatcgagagagagatcgtgaccgggatagagaaaggagctcagatcgtaataaggatcgcagtcgatcaagagaaaaaagcagagatcgtgaaagggaacgagagcgggaaagagagagagagagagaacgagagcgagaacgagaacgggagcgagagagagagcgagagagggaacgggagcgagaaaaaaaaaaaaaaaaaaaagggcggccgctctagaggatccaagcttacgtacgcgtgcatgcgacgtcaaagtcttctg

SEQ ID NO: 201 - DNA, 1771 bp, Homo sapiens
  misc_feature (1672)..(1672): n equals a,t,g, or c
  misc_feature (1696)..(1696): n equals a,t,g, or c
  misc_feature (1706)..(1706): n equals a,t,g, or c
  misc_feature (1749)..(1749): n equals a,t,g, or c
gcctgcagtcgacactagtggatccaaagaattcggcctgtgcgagtaggcgcttgggcactcagtctccctggcgagcgacgggcagaaatctcgaaccagtggagcgcactcgtaacctggatcccagaaggtcgcgaaggcagtaccgtttcctcagcggcggactgctgcagtaagaatgtcttttccacctcatttgaatcgccctcccatgggaatcccagcactcccaccagggatcccacccccgcagtttccaggatttcctccacctgtacctccagggaccccaatgattcctgtaccaatgagcattatggctcctgctccaactgtcttagtacccactgtgtctatggttggaaagcatttgggcgcaagaaaggatcatccaggcttaaaggctaaagaaaatgatgaaaattgtggtcctactaccactgtttttgttggcaacatttccgagaaagcttcagacatgcttataagacaactcttagctaaatgtggtttggttttgagctggaagagagtacaaggtgcttccggaaagcttcaagccttcggattctgtgagtacaaggagccagaatctaccctccgtgcactcagattattacatgacctgcaaattggagagaaaaagctactcgttaaagttgatgcaaagacaaaggcacagctggatgaatggaaagcaaagaagaaagcttctaatgggaatgcaaggccagaaactgtcactaatgacgatgaagaagccttggatgaagaaacaaagaggagagatcagatgattaaaggggctattgaagttttaattcgtgaatactccagtgagctaaatgccccctcacaggaatctgattctcaccccaggaagaagaagaaggaaaagaaggaggacattttccgcagatttccagtggccccactgatcccttatccactcatcactaaggaggatataaatgctatagaaatggaagaagacaaaagagacctgatatctcgagagatcagcaaattcagagacacacataagaaactggaagaagagaaaggcaaaaaggaaaaagaaagacaggaaattgagaaagaacggagagaaagagagagggagcgtgaaagggaacgagaaaggcgagaacgggaacgagaaagggaaagagaacgtgaacgagaaaaggagaaagaacgggagcgggaacgagaacgggatagggaccgtgaccggacaaaagagagagaccgagatcgggatcgagagagagatcgtgaccgggatagagaaaggagctcagatcgtaataaggatcgcagtcgatcaagagaaaaaagcagagatcgtgaaagggaacgagagcgggaaagagagagagagagagaacgagagcgagaacgagaacgggagcgagagagagagcgagagagggaacgggagcgagaaaragaaaaagacaaaaaacgggaccgagaagaagatgaagaagatgcatacgaacgaagaaaacttgaaagaaaactccgagagaaagaagctgcttatcaagagcgccttaagaattgggaaatcagagaacgaaagaaaacccgggaatatgagaaagaagctraaararaaggaagaaagaaggaaggagaattggccaaaggaagcttaaacganttaaaaagatttttttaggaagantttttgttgnttgattaggaggttgaccccaattttttaccagagggaattgntttttcaggaaaagttttcctt

SEQ ID NO: 202 - DNA, 2014 bp, Homo sapiens
tagcgcggccgccctttttttttttttttatcttaaatacaatcaaaacttcatgtttaatagggattcatctgtttcccatactttttacatgttcagttcagacagaactcatggaagaaaagacttttctgtgagatagaacagaccatctgcttgaccggatggctctgagggacagccaaactcccaatggccaaagggctgtgaggaagggcaacacatatcagaagaattttcagcaagggctgaaacacagtaaggttagccacaaaatggaatgagagaagccctaacccaatgggagtttgcctaattttaatgaacccaaactctaacattgtactggaaaagcagcattaaaatccagcctgattatcacaatttacagaatttctcaccagaggcccacaggtgaaaaagctgcttactctaaagcccttagaaccgtattgtgaactgcgcatgcgagggatctaggttgcgtgctccttatgagactctaatgcctgatgatctgaggtggaagtttcatcctccaccaccaccccgtccatggaaaaactgtgttccacaaaactggtccctggtgccaaaaaggttagggactgctgctttagaatataagaaacaactcaagcagccaacgggtctagagttaacacttccagccctcccctttgtacacactcaacacttcttgctgaactggccgttaataaccacttgtgaaatccctccccacacctgcacttaggcgtttgtctcttcctaccttcctttactgagtagtggcaaaataataggagagtggaagatggtgatgggcaatgaagagggacctatttctgaagaggagatgttttaaagatattttatttttcaataccagtaatgactgaaaattaaagaattaaagcaggaagcaaaacaaaaacaaacaagaaacccaaaacttgcaacctaaactctccgggaaaaaaaaaattgctataaatgttaaaagacttaaagagaacattgacaatgcagccctgatgtacctaatcatacttcaaactgctggatgttttaagctgagaatctccccagtgcctttctagtgctctaaaatcatctcccaaacagatgagaaatgaaacaaacaggtctcccttcttgagtacataatttttataaattgcgtcggacccacagtgaatgtattttagagagtttcaccaaaactatcaaagatcaaatggcagcaaaagatcagggaaagaaggtagaaaaactatgcagtcacagagctaacccgcaagctgcccttagtcctatacacctgaaatcaaatccatagccaatggtgaggaagaccacatcagaggttagctgcatgacagcacagctgggtcctatctccctgccaggggtctcaactgtaactcgcgctccaamtgctctgcagtcagggtgccctggatggcttcacagcctggattgaacacagagtaggcgctcttctctccctctttcttctcttcagggcctcgtgtcccgacgtacatccaatagaacaaggacaggacaaaatatgccaggccaaattccagttccacaaacagtcccagcaggaccaaccagagaagaaccttcaagaaggtgatattggtcaggaaagactggtcccagcacgacggcagaggaatggctgtgttccatggtgtctctgatgtgctgccctggggctgagccgcttcctgaactaggccgggctgggcccgggcactcgcgggcctaggtttccataccaggaaccgctttagccagcctggggctgcctttagagtcgctgctgcttccgccttctctcctggggtttgtgcgccctgactggcagcagggggttgggccgccagacccgcccgtttccgcgccgcccgaaactcagctaaccgctgttccatggcgcgcgcctcgcgtccgttggccgataagggagcgcgcgcccgcaggccgcacagcagttgcc

SEQ ID NO: 203 - DNA, 594 bp, Homo sapiens
  misc_feature (587)..(587): n equals a,t,g, or c
ttgaataaatagggaaaggggaaaaactggaagggggaatcattaggacccagctgcacagacatttgcagctaaaggagtggagatccagacgatctccgtgggactgggagcagctgtgtttaggattgacactgggggaacaggcagagggaagcatggtcttggcattggcagttttcacattgttggcttctgtctgttgccagcttcattctcattctttctatccttgtatgtcctgtttttactcttcattgtcattttagtgggtttccaggaggcagcagtgataaactgcatgcgtttagtatgccatgttttcctggagatcccactgactttactttcagtaacagtggttttcatttgccaactctggtgtttccccaccatgcaggtaagatagttaggctctaaacctattgaaatctggggttttcattttcatagggcacttatttatccttattcatatatgggaagkttatctctctgtgccaataggcagagtttttggctcatttttatggagtttttagctctgtgagagaacttgctttatacaggggtttcacttcaaaatntcttcct

SEQ ID NO: 204 - DNA, 1589 bp, Homo sapiens
acgcgtccggcggggcgaggaggagggtgggtatgaggcggtacggaccgcggagtcgagacctacccgaacgacgcgggcgagcggggctttggacgccggtggagacgcaggcgagcaggaagaagatgagccttaggtctgaacgccgaggaattcatgtggatcctgtgcaagaaaggatgtggttactgtggcaaccctacctggcagggtttctgctccaagtgctggagggaagagtagcacaaagccaggcagaagcagattcaggagtactgggagctggtggaacgactccagcgggaggaagaagaggcctttgccagcagtcagagcagccaaggggcccaatccctcatattctccaagtttgaaggaaagaaaaccaacaagaagacccgcaaggttaccacagtgaagaaatcttcagtacgtcttccagggtcggatcaaagaaggatattgaaatggattccaggcgtgtgcctcgagacaagctggcctgcatcaccaagtgcagcaagcacatcttcgatgccatcaagatcacctagaacgagctggcgtcagcagatgacttcctccccaccctcatctacattgttttgaagggcaacccccatgccttcagtctaatatccagtatatcacgcgcttctgcaatccaagccgactgatgactggagaggatggctactatttcaccaatctggtgagtaagtgagttcttggcgttgtggagaaggactaggaaggtggtggttttggggatgtgataggtcactcaggcccatgacaggtgaatgcttctgtgtgagaaggcagcacggctgaggaagctcactttgcatcagggagcacaaggaccaggccgtacagacactccgcctcccagcacttgatcagagattgtgtttatcctacagaaacagatgacatgtgttgggcatcactccccacggtcctgggtagaagagtccttcacttggcagggctttttcaaccaatgaataaggcaaattatatataagttaataatgccatttcgaaccgagacagatggcagctaaatgaagtttaattaaagaatgagtgctggggccctttttattgggtactgcatctacttcgaccacaaaagacgaagtgaccccaacttcaagaacaggctttgagatggaagaaagaaacagaagcttgccaaggagagagctgggctttccaagttacctgaccttaaagatgctgaagctgttcagaagttcttccttgaagaaatacagcttggtgaagagttactagctcaaggtgaatatgagaagggcgtagaccatctgacaaatggaattgctgtgtgtggacagccacagcagttactgcaggccttacagcaaactcttccaccactagtgttccagatgcttttgactaagctcccaacaattagagaattctaagtgctcagagcttggctgaagatgatgtggaatgagaaacaaatgttaacataataaaatctcagttaaaaataaaaaaaaaaaaaaaaaaaaaaaaaaaaaaaaaaaaaaaaaaaaaaaaaaaaaaaa

SEQ ID NO: 205 - DNA, 1547 bp, Homo sapiens
aggaattcggcacgagtagagagtgatccccagcaggtggtacaccggagtggcattaaggggtgaagatgtcccccttacggagcagaccgtgtctcaggtgctgcagtcagccaaagaacagatcaagtggtcactccttcggtgaagacctcactgttcctggctcttcatcctcttcaaaaaatttgcatgtctgctgtgaattttcatctagttccccaatcgatgctctcagggtcatctcggggatcacagggatccttaaatctccatgtctgtttgtggttgccccctcaacctcccctacacccttcctattctttttcattcttcttgcagttctgggagtaaagctcccagcatatttagataatagggcaggggaagcaccctctttctttctagactggattatgctcacatgctcccttgccctgacatttttgtaaattctgtgccttttgctgtagctacacttcagattaaagtaggagaaagaatgtgctgagtgttttcctccctttgcctctacctggccctcatcccaacagcccagcaaggggagagagaaagagaattcttttctatagaacgagtgggggcggggatgggtagggatttatccaatctaagccctaaccccacttagtgacctcagtgttttcttccattccttcttactgccctgtcctctgccttggaagaggctttgggaatagttcatagggaagggacaacatggaagaaacagcgatttaaattgtattgaacagggcatataaaatgcattctgtaccctgatctggcatatagcttcaaaactgcagtggcgagtgtccatctcttagttagctaccttaactgtccacccttactacctgtgggatcgttgcctggtttgtcttctctgtgtcctggagcaaagccagttcctaaaactaaaactccattctagtcttgggaagaaaagtttctactcagaactggggaaggagtggaacttatgacttgggcctctaggctgtctctgtcccctcagctccccgacatgcatttactctctgccgtgggtctgcagtcgctgcaacctaccctctctctgcctcagccttacacccaagcagtaggtctgtgctctccctgtctctaggtcgctgagagaggtgcttttcttcataaaacctttggggtttggatttccccaggaagatggagaatggaatactcactcttgggtctaatctttccccttgacccagaacttcctccccacaaaaatgcctttaaaaaccttcctgagacttaagcattctgccccacttactaactgccagttctccagcactgaggtggggcagataacggggcatatttaagggggcatctttgtgtaaaagatgcatggagtcaggagaaaaccaccttcataaactgctctgtgcaaagaggaataaaacattttttccaaaaaaaaaaaaaaaaaaaaaaaaaaaaaaaaaaaaaaaaaaaaaaaaaaaaaaaaaaaaactcgagggggggcccgg

SEQ ID NO: 206 - DNA, 2632 bp, Homo sapiens
ggcacgagctgctggccaccgtcaccgagttgtcttttgacatgtggggactcgtcagcgccctcgccgccacgctgtgcttctcgcttcagaacattttctccaaaaaggtcttgcgagattcacggatccaccatctccggctgctcaacatcctgggctgccacgccgtcttctttatgatccccacctgggttctggtggacctctcggctttcctggtcagcagcgacttgacctacgtctaccagtggccctggacgctcctgctcctggctgtcagcggcttctgtaactttgcccagaatgttatcgccttcagcatcctcaacctcgttagccccctgagctactcggtcgccaatgccaccaaaagaatcatggtcatcacggtgtccctgatcatgctgcgcaacccagtcaccagcaccaacgtcctgggcatgatgaccgccatcctgggggtcttcctctataacaagaccaagtacgatgcaaaccagcaagccaggaagcacctcctccccgtcaccacagcagacctgagcagcaaggagcgtcaccggagcccactggagaagccccacaacggcctcctcttcccccagcacggggactatcagtacggccgcaacaacatcttaacagaccacttccaatacagccggcagagctacccaaactcgtacagtttgaaccgctatgatgtgtagagtccaaaggacaggaccagactgttggtgactccttccccggcccccacagcagtatcagaaacttctgacaatcagtgaatgtacaacccagccgaggggacggtgcataactctccatcagaagccctggggttcctggccccccgtgagccgcaggaggatgcgttgcctgcagtgcagacggccgtgagctctgggcaaacctaaacagagaccagtgtctcatgctctttcttcctggagtctgtcatctgagggccgtgtccctgcggagatcttggcacgttgtacctttcatgtggaattattccccaagcagtgttagctcagagcacttgtgtctgcattccagataacattcaggacctgtgtgaaaagctggggtcactgtggctgtagaccatgaactggcagtgggggtgtccagggcggtgcttgagaacgtcagactggctagtttaattccctggcgcagatacgcataggaccaacagggtcaccaagcagacagggagcccgcgagaatcattcaaaacatccccagccacagagatggatccagtttcctggtcatccccttagcagttcacaagttcctggcaaatgttccaaagcaaaaagcgattgcaattagcatccagttcctgcagcctggtgctctgccctgcacgtcagggttggcatccacccagatccagatggaagggaaacttctctcttctcctttgcctcctcttccctcaccagagcagggcgcttctcttggggtggtgagaaggatcttcgagaaatcgtgttcagtatttcaagctctatttctgtggcacatgtcttttgagaggcatcttcacctcttctgtgatgacttggtatgttgtttggtagatcttgattttcggaggatcttgcatttttctagggaatattttgtagttgtgtgtgtgtgtttttgccttggtccccattatgggatgcattaggactggcctatgcatcgaaaatctttttgtttgtaaacgtttaaaaacaaagttccccggccaggcacagtggctcacacctgtagtcccagcactttgggagccaagatgggcggatcacgaggtcaggagttcgagaccagcctggccaacatggtgaaaccccatctctactaaaaatacagaaattagccgggcatggtgtcgcgtgcctgtagtcccagctcctcaggctgctggggcaggcgaattgcttgaacctgggaggcagaagttgtggtgagccgagattgtgcactccagcctgggtaacagagcgagactccatctcaaaaaaaaaaacaaaacaaaaccaagttcccactggtgatgcctgtctgacacgttttggtatttagtaggaaatgaagtgtttcgaagcttcgagagaagcttcaaaattgtcacaattgctgaaaacagaatgaatcgtgaacattatctcaatattttgtataatagacaagaccacagtgttttggttccctgacctgtttttgtgtttatgttaggatctgaatcatgttctgggtaaggggacgaggagcgaacactgcactaagatttggtttgccaaatcagattctttggtcaagagtcagtttggggccaggcgtggtggctcatgcctgtaatctcagcactttgggaggctgaggtgggtggatcactggagtttgagaccaccctggccaacatggtgaaaccccatctctactaaaacaaaaattagccaggcatggtggcacctgcctgtaatcccagctacttgggaggctgaggcaggagaatcacttgagcccaggaggtggaggtttcagcgagctgagatcacaccactgcactccagccttggtgacagagtgagactctgtctcaaaaaaaaaaaaaaaaaaa

SEQ ID NO: 207 - DNA, 1816 bp, Homo sapiens
agaaagtacaggaagccgttcttgacaaatgggtgaatgaccctcaccgcatggacaggcgcttgctggccctcatttacctggctcatgcctcggacgtcctggagaatgcttttgctcctcttctggacgagcagtatgatttggctaccaagagagtgcggcagcttctcgacttagaccctgaagtggaatgtctgaaggccaacaccaatgaggttctgtgggcggtggtggcggcgttcaccaagtaactctgctcggggtgaaccattctcctttctctcaagtaaaccagtagtttttcttctgttgacttctggttttctgtaatttgtactttcccacactataattggcttctgttttacaaaatggtgggtggctttttcttttttgtacgtgtacaggattctgctggtacgagaggccttcctctttctgtttttaaaaaaagttttactgccatattggcattccattccctgttgccatcctcactgttacctgttttgggtttctggtctactttgactttcaaagtacctccagcctcctcatacgcacagcttttggatgactcagcttgagtttctccatatgtgcatgtacatctagcatctgcctacagttcagacagaagtcacaaaaaggccttcaactcaccaaaggtaaatatctgtatctattaggacatttttttacatagacttcagttgagatgtataattagcaaaattatttttaaattgaaacagcacagtaaatacttaatataaaatgtcccttggattttgcttcccatgtaaatctattgtattattacacttgttataattttaactataaaggtccaattgtttcacagagccagtttgggatgggctgcattccatttatgctgtatatagtttgaattatatataaattaccccttcttctggccacccctgctcccatcttagtattttgcaagatctaatcagttgtacacctggtgcccctcgcttgcttcaatcatggttatttgatggcaaaatcgacctcttgtcgctgaaggagagagaaaagatgtgtgtctgattggtcctgggattttttgagctgtgccatttatggtactctttgcctatgcatcccctttttagattttttttaaattttatcttactgtttttataatttctattgggaagaggcttgtgaccagtaccaatcttgagtttctttttctgtccacaagtaaattaatatctgctctgaaatgtcatttatctactcacacattcttggggaaaaaaatcaaatgtcagtcctagcagatgttgcatgtaaattggtagcaagtaatgattacaacccagaggattaagaattttgtaacagaaagctctatgttttaattttttatatacaattaggataattagcattgtcagactataaacctttgctttttaaagtttatttttactatttctttatcactttattgtatcatcaccattggtttcataatgtaaatactatatgttgaacaaattaaatgtcaaaattttttattaccatagtccatgttaatagtggggctttcaggtgtttagagattttttttgttgttgttaacattcattgcaaaagtactagatggtgtataactctagagttgaattttaagggattccctaatatgtatactatctttttatctgaagtaataaataaacaatgatcttgaaagtgcctgaaaaaaaaaaaaaaaaaaaaaaaaaaaaaaaaaaaaaaaaaaaaaaaaaaaaaaaaaaaaaaaaaaaaa

SEQ ID NO: 208 - DNA, 575 bp, Homo sapiens
ggcagaggcttttgaagttaatccttttgtgtgatacaggatgaacttgggatgtttgaaccctggacattccaaataaagaataggcccctgcctggctcctgggagataacctctaagccattagaatatcttgcctgataagagtgtttttgtttacctgtgggccttgggccatgcagtatcagcttgaccttgcaaggtcaagctgaggagactaagttagccatgtgggcagtgaagcatgccaatgtgatcaatccctagtaaaagccctggacacctaggcatgggtgagctactctggttggtaatactctgtgcacacatcattgtagccacacatcattgctgggagaattaagcattatcctgaagactctgccaggagaggataattggaagttctcttggaccttaccttatgtgcctttcttcattgctgattttaatctgtatcctttcactgtaataaactgtaactatgagtgcaacacttaaaaaaaaaaaaaaaaaaaaaaaaaaaaaaaaaaaaaaaaaaaaaaaaaaaaaaaaaaaaaaaaaaaaaactcgag

SEQ ID NO: 209 - DNA, 1584 bp, Homo sapiens
ggcacgagaaaattttataattatgataggactcctagctcttataagaagtggcctttataatgccacctttagtacttttcagcattctacaggtggacaattcaagaactatatttgtaaaataatgttttaaagagagccaacggtaaaggcaggaaatcactcaaaacattttgtatgttccagagactactcaaatattaatcctgttttcaggagtaacttcgtaggcgtggaaaagatttttgtttatttagaccaattcattatttattaacttcattcaataaatagttacattgtacctactacatgccaggcactatgttagtgagtttgttcactcagtcagccagctctgtaacatggaaagaaatgggaacaatttcacctatctcatagccacctgaaatagctcagcatagatagttttctgttcatttgcttctcaggctgttccctcactcactcattcactcattcatttgcttattcatcaagtacccattgagggcattctgggtgctgaaccctgtgctgggtaggcactgtgcgggtgtgagttgtgttctgaagggtgaaggctgaggatcttgagagcccagaggagggatccagcccgacccgagggaccaggaagagtggtctggaaccagcaccctttggacctaggctagaggccgagcaggaaccattgaggagagaggcaggaggtcagtggcccaggcgggaaccctcacacccaagccccaacatttttattttgttttgggaaatgtataggattaaagtaataactggaaaggaaataaatggaaacatggaatggaaacatttcctattttccctattgttatctgaagacaaacttaatttttatgttgctactttctctcttaaatatcctcttactaaatagtctgttgtattaattagactgggtagtcctaactcaagaaagcatttggcaattaaaagatggaggactcagggtctgaccgttttccttggccttcatttggctttctctctcttttctcccctccttcttcccaggcctggctggctggtgcctggacaccatttggggctctgagagggttgtggctgccacccccagtcccaatgcctggtcaggcactcgtatcccctgtcctgttcaccatttctcctttctcattgttctcataatttgtcctgcttaaaactcctaggttctaagggacacccctgcattgcttgcctttcctttgctagacaccagagagaggctaaaaagtgaaatgtggcctggtgcagtggctcatgcctgtaatcccaacactttgggaggccgaggcgggcagatcacttgaggtcaggagttcgaggccagcttggacaacacgacggaatcctgtctctactaaagatacagaaattagtcaggcatggtgacccatgcctgtagtcccaactacttgggaggtaggaggatggcttgggcccgggaggtcaaggctgcagtgagctgagattgtaccactgtactccagtctgggtgacaaagcaagaccctgtctcaaaaaaaaaaaaaaaaaa

SEQ ID NO: 210 - DNA, 1838 bp, Homo sapiens
aattcggcacgaggtcagaaatgattcagggttatttgaggggaaaaaaccccatagtgccttgattttaattcaggtgataactcaccatcttgaagtcattgtccggtttccgtagcagttttgaaaccttagtacctttttaacagcatgtgggtgtcagtgtcattattagtctcctaataagttcctctgaagactgctatcagtctcttggactggaggtacaaataatttagaaataaaagatgataacctaacactatcatagttattaatgtgatcctaaaattgtttcctaaatcagcatttttctttagtcatttaagaatttaccagaaatatttgctcaatatgatcttgatattcctacaaagaaaaaagaaggggtagggatttggctatgccttcactacaacattagaatattgtaactcacatgccttctaaacgtgaactaagatttcctttggcaatatcatattctaaaagtaataaattccaatacaagttacatacatttaaaaaacattttacagattttatggtactaatgaaatttacagtgatagaacaaaagaggattagtagaaaatacattattagaatataaaaaatgttattactgaggaaagggaggagaggacaagtgtaataaatcaaaattgacctcaaaagaaaatgtgtaacagagttgaggttgttaaaacagaaaaggttctgaataatgaagattaacctaatgcagaattgctaggtaaagaggtcaggggaatgctaagccagttcttaagacttctctgtcctctgctttgctgttatccttaaggcatatactttgtctttctgcagaaaattctacctggctacaattactttgaacattaatgttgaaaaagaaaacaaccaaagaaaattggtacttacccttctacaaaagaagtgtgactagatatcaatcagtaattaacatatcaaggagctcttctagctaaatgaccatccagtagagatttcccacattcccatgaatatcaagaatagttgtcagaatatgtatgtacctgagcatatgtacacagacaagggggatgttgtggaatatggcaatagcattgttcttctcccctttcaaattgcctttcttgaccttatgccattccatatatatctgagttgtgcctcatttatttattggcaatacctagtgatacggatttagctaacaaaagatatgaagaactattatattgaggcctgtcctctacataccacacttaaaagatggtgaactgtgagtactacttaggttgacagcaacaaagcataagacaagccccaggtaaacgtctaaactgtttactcacattgtcctactccagccccttcaattatttcccatctccacaaatagtcgggggaaaaaattaaaattttcctttatgattcttactgttcttcgcagctcatcttttcctgcttagaattaaccattgctaatttaaaggagcagctagctgcttttctgtcagtctgaagcgtagtagtggaagaggtagtaagcaccagctgcctctttgctgctttgttttcctcctgattctcttaaatttgggttgcaaagctatcccgccccccaccctgccccatgaaacttgagcattcaaatgaagattcagcagtgtctgttcttcatttctatagccaaagctgttagttaaaatcccaaatctatagcatttaaagataccaaatagaaacaccttccagctttaaaaaaaaaaaaaaaaaaaaactcgagggggggtcccgtacccaatcgcctgacatgcatcgta

SEQ ID NO: 211 - DNA, 1147 bp, Homo sapiens
ggcacgagctcgaagcaaaattgcacaacctgttagaagttttcttcagcctccaaagcctctgtcttcactcagcactctgagggatggaaattggagagatggttgctactaatgcagttttatgtacccttgaaaaatgggaaagaagtaaaaatgagggttgtgttacctagctggctgggtagcagtggatgttgggatattctttcccttttgtgttttaatatatttactgcattgtttctcaatggaccagtcaccagagactaattattgcacttaaatatttgcctgagatactgcaacattctcaaacccatggttgcagtattgtgacacttagatctaggaagtttttgtagaactgctctgtacctgaatactttttgagagaattaagatgtatcaataatgctttgccatatgagttttttaaagtaacttgttcaatttactcacgtgttctaaacatctttccattacatgttctgtattttaatacattgcatattgacaactaggttctataatgtatgctttgaaatttacttttttatagtttacaggaattttattttttgtgcctatttctttttacacctatgtgaaccactatggaacaacttaaattttgtgccataaaaatatttttgtggtaaggtactatttttttagctctagggatatatcagcaaaaacacatcatgcaatttgagacacataattttgtgttgaatgagcacaacataatttgaagcattgcaaggagataaccagacagcagaattaaatggtcctgtctttttcatttttaatttattgtcatacatgggtttcatatttataacggcatcatgagctcattgcacttaatacctgcaatgtttgctactgtaccacaattgattttcaatactttattacgaaggatgaaactgtaatgttttattaacaatgcttctggaaatgaatgcattttaaagcaaataaatctttttgatagaccttttacaaaatccatttgcactaatgaatgctttcttatggcatataacttaatatttgttactgtgtacactgctgttttggaatgttcagaaataaagactctatttcagcaaaaaaaaaaaaaaaaaaaaaaaaa

SEQ ID NO: 212 - DNA, 1049 bp, Homo sapiens
  misc_feature (8)..(8): n equals a,t,g, or c
taccgggnccccccccgrgtttttttttttttttttttaaatattgctcccattatgcccaagaatcaaagattcttttgtttgggtggaggactctctgtccacttagctccctcccaactcagctacagattaggtttgtttcaataacataaggactgttctccaaaagctctggcaactgtggacaaaaagggcttcttcgagctattacacaacatgtgactttgctaaatcaaacctttatttataagatatggaagaatcagttatttgtgtgataagacatgcgaattctaggatagtaggacctaggcagatgtccacatgaacttgagggactttaaaaatcttaggattttaactataacccactttactccaacaaaatagaccaaatagctaatacttacagaatacttaccctgtaccaggcactaagtactttatatgtgcgaaattaatcctctcagctctaactttacaaacgaggagacggagacacaaagcagataaggaacttgcccaggatcacaggtgaagtggcagaggctcgccctagctgccaacagacaccgcccccatgccaggctgctgcccatcgtgagcagcagtcccatgctaccaggctccgggtagtcaagaggccagcagtgttacaggtaggctgcatcatacagtcggcaggcttttgtgagctagcctgagaatctttcacaacactaaaatttgatgcgtcttcccacaggaagaaacactggacttccaatactgataataacagcagtagctaacattctaagagcattacctacgttaattctttgaatcctcagaataccatgaggtaggtgttattattacccctattttacagatgaagaaactgaggcacagagagtctttgtaagtaaccaacagtttagtaagtgggagatttgagattccaacccaggcagcctggcttcagagtcttggctaccggagtttttaaccctcacattatgctgccctcagaatgcttatttaacctttccggacgcgtgggt

SEQ ID NO: 213 - DNA, 1444 bp, Homo sapiens
actgttcagtactctaggaagtgggtcaggcaccttgggggcccaacgctgctccgtggggatgtctgcctgcctgcctggttctcttttcctgctgtttcctccagcagggaggtatcagaggcggggacacccaagtaggcctggcatgggcagaaaggaggtcacagctaaggcggtagagtggggttggcaccagccacttgtctgtttcccttgtggatcttagcctgtcgtctcccaaccccagctgcccctctgtctccccgcagctggtaggtgagtgctgtcctcggctcactttcctcaagctctccggctgccacggtgtgactgctgacgctctggtcatgctagccaaagcctgctgccagctccatagcctggacctacagcactccatggtgagccctgtgtcccaaggggccctgaaaaaacccaggccggggtgacgggtgctcttgtattggggccccaggtggagtccacagctgtggtgagcttcttggaggaggcagggtcccgaatgcgcaagttgtggctgacctacagctcccagacgacagccatcctgggcgcactgctgggcagctgctgcccccagctccaggtcctggaggtgagcaccggcatcaaccgtaatagcattccccttcagctgcctgtcgaggctctgcagaaaggctgccctcagctccaggtgctgcggctgttgaacctgatgtggctgcccaagcctccgggacgaggggtggctcccggaccaggcttccctagcctagaggagctctgcctggcgagctcaacctgcaactttgtgagcaacgaggtcctgggccgcctactccacggctctcccaacctgcgcttactggatcttcgtggctgtgcgcgcatcacgccggctggccttcaggatctgccatgtcgggagctggagcagcttcatctgggcctgtatggcacgtcagaccggctgactctagccaaggagggcagcccctttttgacccagaagtggtgccatacactgcgagaactggacttgagtggccaggggttcagtgagaaggacctggagcaggccctggctgccttcttaagcacccctgggggctcacacccagccctgtgctctcttaacctcaggggcacccgggtcacaccaagcactgtcagctctgtgatcagcagctgcccgggcctgctctacctcaacctggagtcctgccgctgccttccccggggtctgaagcgggcctaccggggcctggaggaagtccagtggtgtctgtagcagctgctcaccagcccctcacccagctaggcagccacagacctgggacacctcagccagcttgcccaccctccacctttgcccaatttcagatatttgagcattttgttaaaataaaacatttttaggaaaaaaaaaaaaaaaaaa

SEQ ID NO: 214 - DNA, 1277 bp, Homo sapiens
ggcacgagctttaattcaaaaatgtttgtagttaacattattttgatttcttcagttgttgcttggaatgtttttatactgaccaagttggtatgtgacgtttatttttctctgactataaaagtaaaaaagaactgaaaatacccaaaaagtaatgttttatagaaagtctcccattgatttaagaagttatctattagattgatatcagaagtttcatatgagtatttggcttatgcatttctgtcttttggttttaggcaaaaggatgtcaattcttgatgttaaactttaggattcttaaagtataatgaagactggaatgggctgtggggaacataatagtggatgacagtgacttaggattcaattcagaaaatagttgtgaatctgttttattttggttacagcctactcatacgatttatttcatattttctaagtgtatttttgttcttcctgtatgtttcttggcccttgagtcttctctgtctttaatctttctctcctctcctactatttatagccagtctcatattaatttcctttctctagggcctttaaccacttggtgctcatttcagaccagtagtagtagcaacaaagttctgcaaatcaaatgtatcttcactcctgctgtatttaagacacagctatctcagtatcttaaaataacaatgtaattattttttggcatacccttgcctgacttctgaggacctcactaagtctagttctagcctttgtagaatggtcaacttctttcatcaaggctttggtttcattactggtgtctgaattagttccactcctagcttgacccagattttagtttttattatggattttttcttcaaacttgtttatttaatattaagttttcatttttggcagcatatggatgattttatttttaataatcatatctcttagtaaactaatggttaaataatattaaagtataagaagctaaaattggccaggtgtggtggctcacgcctgtaatcccagcactttgggaggctgaggcaggcagatcacctgaggtcaggagttcaagatcagcctggccaacgtggtgaaaccctgtctttactaaaaatacaaaaattagctgggcgtggtggcgcacgcctgtagtcccagctacttgggaggctgaggcagtagaatcacttcaacccaggaggtggaggttgcagtgagcaaagatcatgctactgccctccagcttggatgacagagcgagactccatcttaaaaaaaaaaaaaaaaaa

SEQ ID NO: 215 - DNA, 531 bp, Homo sapiens
tggctggctgcttggccaggacagtgatgccaccagggagagcttccgcttggtgaccagggacatgtcccagatggacatagaagcccctctctgcctccctgggattttttagacttttacttttgatttccctaggatggaagagtataggtgggagataagggaagtggggtgagaggagaaaggaaatgttggcatgggcctgtgtgatgtccctgaggcagaagagccggggactgatgggttcaggtgggagctgctgggtgaggcagggaacccttttcactcccattccttagctttagtctaatggagccaaggactgctgggaccttcaaccctgatcttttgtcttccagtcttctcttagtgtcctgctcctaggtttccctctcttctggttcttctcccaggtattctcttcccaggcctctctggccactgctttgtatcagggtttttcacgcttttgtagaactgaggtttcaataaacagtttcagttgcaaaaaaaaaaaaaaaaaaaaaa

SEQ ID NO: 216 - DNA, 1093 bp, Homo sapiens
aagctaccagtaagacaatgaataattcagaagagaacactattcttttactgactgagtgcccaagatgccaatttccatgaagtcttgatttatatatatgtacacatgttatgcacatacatgtttgttttctaacagttattttttaagcttttgagataattttagacttacagaagagttgtaaaagtagtagagttcttgtatactctgcacccaccttgcccttatgttaacatcttacgtaacaatagaacatttgtcaaaattaagaaattaaccttgatataatactaactaaagtagaaagtttaaaaagtagagattttagtcttttcactaatgtccttttactgttccaagacccagccttgcatttagctatcatgcctacgtcctgtcttccagtctgtgacagtgtatcataacaggggatacctgatgttgtaatgtatttctggtgttgttaaccttgatcactatgctaaggtggtgtctgctaggattcgctactgtaaacttactgtgttttccttgtaattattgaatatttgctggagatacccggagactatgcaaatgtcccgtttctgcttaaacttttgctcattttactatccattggcagatcttgcttgtggcagttactactgtggtgttctaatggtgattttctatttctctcaatccttctacatttattattggaattcttctgtaaggaagagttgtcagttctggatttatatttttaactataataagatattcaggataagtatagatttagaacttaaagatgttaaatcatgttaaaattattccaaataccaatatcaaagaaaactaagttggtaatctatctcagaaaatatatgaacttaagaaggaaaatagtatttatgatttgtagaattggttcaacttttgacttaatactgactttggactgaattcaaagttttcttgaaatttcacatctggactttttaaagtgtctacatttatattactttggggatcattttgtcaaagtcttgaataaagttacccagtcctggcatgataaaaaaaaaaaaaaaaaaaaaaa

SEQ ID NO: 217 - DNA, 1980 bp, Homo sapiens
  misc_feature (35)..(35): n equals a,t,g, or c
cggacgcgtgggcgagcccgggcgccggcgggcgnccgtcgcgtctgacagaccactgcagaccacgggccgaggcccagcgcccgtccgcagcgcggcggcatggcggcgacaaggagccccacgcgggcaagggagcgggacggtctggcgctcccgccgcaggaagtgaccaagttcactcctggatgctagctacaagccaagccttagacactgtctggagaatggcaaaaggctttgtgatgttggcagtttcatttctggtggctgccatctgctacttccggaggctacatttatattcagggcacaagctgaaatggtggattggatatctgcagagaaaattcaaaaggaacctcagtgtggaggcagaggttgatttactcagttattgtgcaagagaatggaaaggagagacaccccgtaacaagctgatgaggaaggcttatgaggagctattttggcggcatcacattaaatgtgttcgacaagtaaggagagataactatgatgctctcagatcagtgttatttcagatattcagccagggcatctcttttccatcatggatgaaagaaaaggacattgttaagcttcctgaaaaactgctgttttcacaaggttgtaattggattcagcagtacagttttggtcctgagaagtatacaggctcgaatgtgtttggaaaactacggaaatatgtggaattattgaaaacacagtggactgaatttaatggcattagagattatcacaagagaggaagtatgtgcaacacccttttttcagatgccattctggaatataaactttatgaagctttaaagttcatcatgctgtatcaagtcactgaagtttatgaacaaatgaagactaaaaaggtcattcccagtctttttagactcctgttttccagggagacatcctctgatcctttgagcttcatgatgaatcacctgaattctgtaggcgacacatgtggactagagcagattgatatgtttatacttggatactcccttgaagtaaagataaaagtgttcagactgttcaagtttaactccagagactttgaagtctgctacccagaggagcctctcagggactggccggagatctccctgctgaccgagaacgaccgccactaccacattccagtcttttaagtccgctgggggccgaacagcagtgctcaccagtgacggtggtcacagttgcaataaagtctctctctgaaaccaaagctagcatttcagcatggaaggaattaggaccttttcttcaggattacaggtacactggatgcagccatgcatggatggtttttctttatttttcagtgatttcctctgaagcagctgcactgatacatttgggagttggtggcttgactttgtccataaggggcgtggccacttcacatgatggcgggcctttaagagcacaaagaagtttaatatggacaacaacaggaaaaagcaagaagaaaacaagtagggaaaaacagctaacctggagagaaagaatttctttaacctttatgttcttcattaaaaatcttatcttggactgatttgagggatttttagaaacatggccttattttatataagcattaccttcccaggaatctttgttgtatattaatttttgataaccatttgattaactttaaaattaagtatatgtgtgtatatatacatatgtatgtttatatacacacatgtatctgtatagttttatatatacatatatacacatagacatacagagaaccactactttgtaatagtgtacagtttgttttatatctctttactttttttgttactattttatctggccagcgtaatagttttatttagattttttaaaattctgtagattaaagcaaatgacagttattgaactatcacaaaactattaaactgtggtacatttaaaaaaaaaaaaaaaaaaaaaaaaaaactcgta

SEQ ID NO: 218 - DNA, 1982 bp, Homo sapiens
  misc_feature (35)..(35): n equals a,t,g, or c
cggacgcgtgggcgagcccgggcgccggcgggcgnccgtcgcgtctgacagaccactgcagaccacgggccgaggcccagcgcccgtccgcagcgcgsscggcatggcggcgacaaggagccccacgcgggcaagggagcgggagcggtctggcgctsccgccgcaggaagtgaccaagttcactcctggatgctagctacaagccaagccttagacactgtctggagaatggcaaaaggctttgtgatgttggcagtttcatttctggtggctgccatctgctacttccggaggctacatttatattcagggcacaagctgaaatggtggattggatatctgcagagaaaattcaaaaggaacctcagtgtggaggcagaggttgatttactcagttattgtgcaagagaatggaaaggagagacaccccgtaacaagctgatgaggaaggcttatgaggagctattttggcggcatcacattaaatgtgttcgacaagtaaggagagataactatgatgctctcagatcagtgttatttcagatattcagccagggcatctcttttccatcatggatgaaagaaaaggacattgttaagcttcctgaaaaactgctgttttcacaaggttgtaattggattcagcagtacagttttggtcctgagaagtatacaggctcgaatgtgtttggaaaactacggaaatatgtggaattattgaaaacacagtggactgaatttaatggcattagagattatcacaagagaggaagtatgtgcaacacccttttttcagatgccattctggaatataaactttatgaagctttaaagttcatcatgctgtatcaagtcactgaagtttatgaacaaatgaagactaaaaaggtcattcccagtctttttagactcctgttttccagggagacatcctctgatcctttgagcttcatgatgaatcacctgaattctgtaggcgacacatgtggactagagcagattgatatgtttatacttggatactcccttgaagtaaagataaaagtgttcagactgttcaagtttaactccagagactttgaagtctgctacccagaggagcctctcagggactggccggagatctccctgctgaccgagaacgaccgccactaccacattccagtcttttaagtccgctgggggccgaacagcagtgctcaccagtgacggtggtcacagttgcaataaagtctctctctgaaaccaaagctagcatttcagcatggaaggaattaggaccttttcttcaggattacaggtacactggatgcagccatgcatggatggtttttctttatttttcagtgatttcctctgaagcagctgcactgatacatttgggagttggtggcttgactttgtccataaggggcgtggccacttcacatgatggcgggcctttaagagcacaaagaagtttaatatggacaacaacaggaaaaagcaagaagaaaacaagtagggaaaaacagctaacctggagagaaagaatttctttaacctttatgttcttcattaaaaatcttatcttggactgatttgagggatttttagaaacatggccttattttatataagcattaccttcccaggaatctttgttgtatattaatttttgataaccatttgattaactttaaaattaagtatatgtgtgtatatatacatatgtatgtttatatacacacatgtatctgtatagttttatatatacatatatacacatagacatacagagaaccactactttgtaatagtgtacagtttgttttatatctctttactttttttgttactattttatctggccagcgtaatagttttatttagattttttaaaattctgtagattaaagcaaatgacagttattgaactatcacaaaactattaaactgtggtacatttaaaaaaaaaaaaaaaaaaaaaaaaaaactcgag

SEQ ID NO: 219 - DNA, 2154 bp, Homo sapiens
  misc_feature (461)..(461): n equals a,t,g, or c
cccacgcgtccgarccgagctgaggctcggcttcctgctgatggtcagggttttggcaactccccggtgtgagaggggtagggagtgctcccggcggcgacggggccgagttcaccagccgccggggcagtagtcgaaggcccggcgcggcatgtcctgggtgccgcggtgcgggcagtgaacgcgcgccgggcgggatgggccggcgccgggcgccagagctgtaccgggctccgttcccgttgtacgcgcttcaggtcgaccccagcactgggctgctcatcgctgcgggcggaggaggcgccgccaagacaggcataaagaatggcgtgcactttctgcagctagagctgattaatgggcgcttgagtgcctccttgctgcactcccatgacacagagacacgggccaccatgaacttggcactggctggtgacatccttgctgcagggcaggatgcncactgtcagctcctgcgcttccaggcacatcaacagcagggcaacaaggcagagaaggccggttccaaggagcaggggcctcgacaaaggaagggagcagccccagcagagaagaaatgtggagcggaaacccagcacgaggggctagaactcagggtagagaatttscaggcggtgcagacagactttagctccgatccactgcagaaagttgtgtgcttcaaccacgataataccctgcttgccactggaggaacagatggctacgtccgtgtctggaaggtgcccagcctggagaaggttctggagttcaaagcccacgaagggagattgaagacctggctttagggcctgatggcaagttggtaaccgtgggccgggaccttaaggcctctgtgtggcagaaggatcagctggtgacacagctgcactggcaagaaaatggacccaccttttccagcacaccttaccgctaccaggcctgcaggtttgggcaggttccagaccagcctgctggcctgcgactcttcacagtgcaaattccccacaagcgcctgcgccagccccctccctgctacctcacagcctgggatggctccaacttcttgccccttcggaccaagtcctgtggccatgaagtcgtctcctgcctcgatgtcagtgaatccggcaccttcctaggcctgggcacagtcactggctctgttgccatctacatagctttctctctccagtgcctctactacgtgagggaggcccatggcattgtggtgacggatgtggcctttctacctgagaagggtcgtggtccagagctccttgggtcccatgaaactgccctgttctctgtggctgtggacagtcgttgccagctgcatctgttgccctcacggcggagtgttcctgtgtggctcctgctcctgctgtgtgtcgggcttattattgtgaccatcctgctgctccagagtgcctttccaggtttcctttagcttccctgcttcctgggaatcaggagcctggacactgccatctctagagcagagtggaggcctggactccctttgctcactccattcgggtccacagctgaggttgcctctgacaagatgaatgggcactgcctgcccttctagtgaaaaggcttggctatggccctgtgtgactccaggtcccaggaaccttgccttcgtcatctgtggatccatccagaacagcggtatctgaagcccaggccatactccctgcctcctttcttctgcctaccagaggctccagagttgagcttgtccttatctagaaacatgtgaagatgcccaagagcctggaggcactgctgtccttcctgcagaaacagtttctcctcctcccctcagccttgtggccagttcctcttcacatgaagcccctggcatttgctggggaagggactggcctggtacttgctgttagggcaggaaggggcaaaaggaagacttgggtagtaatctgggggttcagatgggtagcactaagccagctggcctaaagatgcaataagttcctaggtagtctacccttaccttgaggaatgggaaaatgaacctcagcccattaggcaggaaaagttgatatttaataaacaaggaaagagtgaactgagaccccaaaaaaaaaaaaaaaaaaaaaaaaaaaaaaaaaaaaaaaaaaaaaaaaa

SEQ ID NO: 220 - DNA, 1009 bp, Homo sapiens
ggcacgagcaaaggtgaagctggttttcatggtctcctgagggcccctggcccctgggagatgggtcacactccctgaatgctgtgctgttggtttccctggaggattcttgctgcaggccaggtcccgtattctccacactcaccacaagtggctgggtgtgacttgacacggtgtgaaagtggaggggcgcgagcactcagtatccagcgagcagcattggtggtcctagaaaattactacaaagatttcaccatctataacccaaacctcctaacagcctccaaattccgagcagccaagcatatggccgggctgaaagtctacaatgtagatggccccagtaacaatgccactggccagtcccgggccatgattgctgcagctgctcggcgcagggactcaagccacaacgagttgtattatgaagaggccgaacatgaacggcgagtaaagaagcggaaagcaaaggctggtggttgcagtggaagaggccttcatccacattcagcgtctccaggctgaggagcagcagaaagccccaggggaggtgatggaccctagggaggccgcccaggccattttcccctccatggccagggctctccagaagtacctgcgcatcacccggcagcagaactaccacagcatggagagcatcctgcagcacctggccttctgcatcaccaacggcatgacccccaaggccttcctagaacggtacctcagtgcgggccccaccctgcaatatgacaaggaccgctggctctctacacagtggaggcttgtcagtgatgaggctgtgactaatggattacgggatggaattgtgttcgtccttaagtgcttggacttcagcctcgtagtcaatgtgaagaaaattccattcatcatactctctgaagagttcatagaccccaaatctcacaaatttgtccttcgcttacagtctgagacatccgtttaaaagttctatatttgtggctttattaaaaaaaaaaaaaaaaaa

SEQ ID NO: 221 - DNA, 665 bp, Homo sapiens
cccacgcgtccgcacaggaagagtgtgtagaagtggaaatacgtatgcctcctttcccaaatgtcactgccttaggtatcttccaagagcttagatgagagcatatcatcaggaaagtttcaacaatgtccattactcccccaaacctcctggctctcaaggatgaccacattctgatacagcctacttcaagccttttgttttactgctccccagcatttactgtaactctgccatcttccctcccacaattagagttgtatgccagcccctaatattcaccactggcttttctctcccctggcctttgctgaagctcttccctctttttcaaatgtctattgatattctcccattttcactgcccaactaaaatactattaatatttctttcttttcttttcttttttttgagacaaggtctcactatgttgcccaggctggtctcaaactccagagctcaagagatcctcctgcctcagcctcctaagtacctgggattacaggcatgtgccaccacacctggcttaaaatactatttcttattgaggtttaacctctatttcccctagccctgtccttccactaagcttggtagatgtaataataaagtgaaaatattaacattaaaaaaaaaaaaaaaaaaaaaaaaaaaaaaaaaaaaa

SEQ ID NO: 222 - DNA, 1017 bp, Homo sapiens
ccacgcgtccgctcagcccatagtggagagcctcggcttccaggggggccgtctgcagcgcgtggaggtgacctggcgaggctcccaccctgaagccctggaggtgcacgtggaccctgtaggccccctggacaaggtgaggaaggccaagatccgagtcaagaccagcagcaaggccaaggtggagtctgaagagccacaggacaatgacttcctcagttgcatgtcccggcgctcgggtctgcctcgctggatcctggcctgctgcctcttcctctccgtgctggtgatgctgtggctgagctgctccaccctggtgaccgcgcctggccagcacctcaagttccagcctctgaccctggagcagcacaagggcttcatgatggagcccgattggcccctgtacccgccgccgtcccacgcctgtgaggacagcctaccaccctacaagctgaagctggacctgaccaagctgtaggcctccactggccccatcactgccaactgcagggggcccctcgggcctcacttgccctgagcccaggagtccaagggcagggtgggtccagccttgagcccctccacccccaaatccttcctctcctcccagtcccaccccttgccccacggagtcctggggacgcagtgccccagctgggaagagggcgggatcgggcactggttcctccttgtccccgctttcttgggggcttgctactttttgtcttctattgtgtggctttctgagtatttgaaccccagtcctgtgtcaccttcctttttccttctctgtcccctctctgcgggggggcgctgaggctgagggggagctgcgtcttgctagggcttcccccttctccccatcccggtctccagagacccagcttctgagagacagggtgtgggcatctccatgcccctataaagcgtgcctggggcttgtctggggctggggaggaataaaccatgtatataaaagaaaaaaaaaaaaaaaaaaaaaaaaaaaaaaaaaaaagg

SEQ ID NO: 223 - DNA, 2886 bp, Homo sapiens
  misc_feature (391)..(391): n equals a,t,g, or c
ggggcgtggcggccggaggaggcgttggcagcgggctcggacccacgcggcgccgcggcccgcctggcctgcagcgctcccacccccggcggcggcacgatgccctttgacttcaggaggtttgacatctacaggaaggtgcccaaggaccttacgcagccaacgtacaccggggccattatctccatctgctgctgcctcttcatcctcttcctcttcctctcggagctcaccggatttataacgacagaagttgtgaacgagctctatgtcgatgacccagacaaggacagcggtggcaagatcgacgtcatctgaacatcagtttacccaatctgcactgcgagttggttgggcttgacattcaggatgagatgggcaggcacgaagngggccacatcgacaactccatgaagatcccgctgaacaatggggcaggctgccgcttcgaggggcagttcagcatcaacaaggtccccggcaacttccacgtgtccacacacagtgccacagcccagccacagaacccagacatgacgcatgtcatccacaagctctcctttggggacacgctacaggtccagaacatccacggagctttcaatgctctcgggggagcagacagactcacctccaaccccctggcctcccacgactacatcctgaagattgtgcccacggtttatgaggacaagagtggcaagcagcggtactcctaccagtacacggtggccaacaaggaatacgtcgcctacagccacacgggccgcatcatccctgcaatctggttccgctacgacctcagccccatcacggtcaagtacacagagagacggcagccgctgtacagattcatcaccacgatctgtgccatcattggcgggaccttcaccgtcgccggcatcctggactcatgcatcttcacagcctctgaggcctggaagaagatccagctgggcaagatgcattgacgccacacccagcctaatggccgaggaccctgggcatcgccagccttgcctccagtgccctgtctcctttggccctcaatctggtcccaaatctggctgtgtcccaaagggtgtgtgggaagtggggggaaagtagaggatggctcgatgttttgcagctacctcttttccccgtgtttctttttagacaaattacactgcctgaagttgcagttcccctttccctggggagccccaagaacagagtcaggcaaggggtggggagtccagggatcttggggacccctcctaggagagctgcagtctcttccctcaggggaacatcccagaatgcatatcgatcagctctcagccaggcttcgacaatctcgcagcccccactaggtggacacattaatgatttggtttctcccctgggcagccaacctgccccagaggcaccagacctgggctttcagctttgggaccaggctgcccaaaggtactcctttatacacccggcaccttccacgaaagatggtacttcccaagcaagcccctatgatttgtcactatagatggaaccctgacttctgccccatcccttcctgcccaacctagaacccaggcctcaagtctttaccccacccctttcttgttcttccaagaagcagatgcccagttgctcagcagcagcggtagagacttgaatctgcccaccagtcacaaggcgggtcacagattcctcttcctctcttctcctcgttcctctgaaccctccaccaatgtgcctcagcctgtgtgctgtgtggcaacagcattctggttcccactgccaagatctcccaccactctgctgggatctgcagtggcagggagtgggggttgtgtaaaggggaagtcatcttttgagatccagatagacatggtttgtgcacttacgtccagatgggaagcatccttcctgcaaccctaaaataatcatgcagcctctcagacggacgccatcggtcccaaggccttaggtggaggaagcaaagcaggccaggcctgtcctgtccgtggacctctaccttctggactccctacgggtgcagagcayttgggtttctctacagccatcgtggcccacttgacactgtgctcctccatcagctggtcacatgccaacacgttcccagcccctgaggcagctccagggtgccccacctgctcctgaggtgggtccctaccctgctgctcctcttcatcctttcccttttgtcctgaaagggaggagcaatggtccaggcattaattccacccagggaattttagctatgccctcatgtcccagggagagagccacacgcctgttttccatttatagcaagattgtttgcatacttttgtaatgaaggggagtgtccagtggaaggatttttaaaattatcttatggatagctcaagtctctgccatttgtaatttttggctctaagctccgattggagacgcttctccttgtgcatgtgagttgactgatgttgtgagtgtaaatgcatttggttatttctggtatcggtggccacttggatggatttttttacattctgttccccagttacaggaaggagtccctttggtgtgtgaatatgtgtgcctgtagagggtggggcagggtggggtggggatggaaatgtgtggcatgcacatgagttgaaattcttttatgcatttttttgaagaaaaaaaaaaaaaacaactctgaggacataggggatgtcagtttcctatggaagagacacctctgacccgttattcttataatcaaaatctgaagggaaaaaaatgttttagttctttccccactcgttgggttcaactagattaaaaggctgattttcagaaaaaaaaaaaaaaaaaaaaaaaaaaaaaaaaaaaaaaaaaaaaaaaaaa

SEQ ID NO: 224 - DNA, 1298 bp, Homo sapiens
ctcttgcttgctgtgactggtggagctgccgcgctgtccgcgttatctcctcccggtgagaacgaaccgcagtgtccaccggcgaggagccagccctgtcccggtcagagaaagacgacgaggatacctgggagcgggcggcggccgggctgggccgcgccggtgcgggctggcgactctgctcctccgcttgctgctgtctctgggaactgggtgccagcgctgaggggcttccagcggacagggacccccttccccggctcccctgcccaccctgccggggagggcggaagatgccggtgaagaagaagagaaaatcccctggggtggcagcagcagtagcggaagacggaggcctcaaaaagtgtaaaatctccagctattgcagatcccaaccccctgctagactaataagtggagaggaacatttttcaagcaagaagtgcctggcttggttttatgaatatgcaggtcctgatgaagttgtagggccagaaggaatggaaaaattttgtgaagacattggtgttggaacctgaaaatattattatgttagttttagcgtggaaattggaggctgaaacatggggattttttaccaaggaagaatggtttaaagggaatgacttcattacagtgtgactgcacagaaaagttacaaaacaaatttgactttttgcgctcaacagttgaatgatatttcgtcatttaagaatatctacagatatgcctttgattttgcaagggataaagatcagagaagccttgatattgatactgctaaatctatgttagctcttctgcttgggaggacatggccactgttttcagtattttaccagtacctggagcaatcaaagtatcgtgttatgaacaaagatcaatggtacaatgtattagaattcagcagaacagtccatgctgatcttagtaactatgatgaagatggtgcttggcctgttcttcttgatgaatttgttgagtggcaaaaagtccgtcagacatcatagcaagaactatgtgaagaaaatgcaaacctttcaattcccacgtgtatacaagctaatgtgatgagggggaaaaaaatccaacgggtgcattttcattcatatgaaagacttctcatagtacttttttttcctttttttaaaggaggtttttcttgttacatgtgatgggcattgagccacacctcttcttagactgaatattgaagtttttgttttgagttatgtttataacatttatttcagaacaataaagattcagatttgtgacaaaaaaaaaaaaaaaaaaaa

SEQ ID NO: 225 - DNA, 989 bp, Homo sapiens
  misc_feature (338)..(338): n equals a,t,g, or c
  misc_feature (352)..(352): n equals a,t,g, or c
ggcacgagtgaaggaggggggcattaagcaccctggggccccacgatgggcagcaagagtttgccgagggaggaaagcccaccggtggagtgggcagaggggttggtgtgtggacttctggagcctcaggaggaagggtgcgggttcccctggctgcagacgtccctgaggctgccctgcctcccccaggagagaccttcctgccctactacacgggccgcgccattgatggcatcgtcatccagaaaagcatgggatcagttcagcacggctgttcgtcatcgtgtgcctgctggccattggcaggtagctggctcaacccccacgccctgccccgnaaaccccgacctgnaaccagggaaggaaagggaggggcctgtttcctaaggaagacaaggggccagggaggccctggaaatgcccctggtgggcctgtccctcagctggtcaccctgggaaccggcttccacactgtcttagagcaccctagaaccacaccctctggtccctgaaaagggcttcagtcctcagggttccctgctcaccctccctggctgttttccaagtaggaatctggtcccaaacagaaccggctttgtctgagttgttctggaaggaagagggtctggctggcacatttgggtctcttgtcccacaactgtcccctttgccctcaccttgaggggggctcccactgggaatgagggggaccccgcagggatgccagccctggagtggggctgcggtggggctcccaggcctgcagctgcaggcattctgaggggcaacgtggaggaagggccagggatgcatgggattttaattgtttcatcacaccttccccgtggcaaagaaacagtcagtcctcttcaggtgtcttctggatttctggtgatggacagagaaatctttttacagtttcaaattatgttcaacaaataaaaattgcattttttattttgaaaaaaaaaaaaaaaaaaaaaaaaaaa

SEQ ID NO: 226 - DNA, 879 bp, Homo sapiens
ggcacgagaaattacagcagtgcaaagcagagctaaactctaccactgaagagttgcataagtatcagaaaatgttagaaccaccaccctcagccaagcccttcaccattgatgtggacaagaagttagaagagggccagaagaatataaggctgttgcggacagagcttcagaaacttggtgagtctctccaatcagcagagagagcttgttgccacagcactggggcaggaaaacttcgtcaagccttgaccacttgtgatgacatcttaatcaaacaggaccagactctggctgaactgcagaacaacatggtgctagtgaaactggaccttcggaagaaggcagcatgtattgctgagcagtatcatactgtgttgaaactccaaggccaggtttctgccaaaaagcgccttggtaccaaccaggaaaatcagcaaccaaaccaacaaccaccagggaagaaaccattccttcgaaatttacttccccgaacaccaacctgccaaagctcaacagactgcagcccttatgcccggatcctacgctcacggcgttcccctttactcaaatctgggccttttggcaaaaagtactaaggctgtggggaaagagaagagcagtcatggccctgaggtgggtcagctactctcctgaagaaataggtctcttttatgctttaccatatatcaggaattatatccaggatgcaatactcagacactagcttttttctcacttttgtattataaccacctatgtaatctcatgttgttgtttttttttatttacttatatgatttctatgcacacaaaaacagttatattaaagatattattgttcacaaaaaaaaaaaataaaaaaaaaaaaaaaaaaaa

SEQ ID NO: 227 - DNA, 1919 bp, Homo sapiens
  misc_feature (1903)..(1903): n equals a,t,g, or c
agacagggwggcggtggcagaggacacttgtcatggccgcctctaaacctgtggaggcagcggacaccctgaaggtcccggtgctcacttggacatgaactctcttgatagagcccaagcagccaagaataaaggcaataaatattttaaagcaggaaaatatgaacaagctattcagtgctatactgaggctattagcttgtgccctacagagaagaatgttgacctttctacattttatcaaaacagagctgctgcctttgaacagttgcaaaaatggaaagaagtggcacaagactgtacaaaagctgttgaacttaatcccaaatatgtgaaagctctctttagacgtgcaaaagcccatgagaagctagacaataagaaggaatgtttagaagatgtcactgctgtgtgtatattagaagggttccaaaatcaacaaagcatgctgttagccgataaagttcttaaactccttggaaaagagaaagccaaagaaaaatataagaatcgtgaacctctgatgccatctccacagtttatcaaatcttacttcagttctttcacggatgatatcatttcccagcccatgcttaaaggagagaaatctgatgaagataaagacaaggaaggggaggctttagaagtgaaagaaaattctggatacttaaaggccaaacagtatatggaagaagaaaactacgataaaatcataagtgaatgctcaaaagaaatagatgctgaaggcaaatacatggcagaagcattgctactacgagctaccttctacctgcttattggcaatgccaatgcagccaaaccagatttagataaagtcatcagtttgaaagaagctaatgtgaagcttcgagcaaatgctctcatcaaaagaggcagcatgtacatgcaacagcagcagcctttgctgtccactcaagattttaacatggctgctgacatcgatcctcagaatgcagatgtttatcaccaccgaggacagctgaaaatactccttgatcaagttgaagaagcagtggcagattttgatgaatgtattaggttaagacctgagtctgctctggcacaagcacagaaatgttttgcattgtaccgccaggcatatacgggaaacaactcttcacaaatccaagcagctatgaaaggttttgaagaggtcataaagaaatttccaaggtgtgccgaaggctatgcactatacgcccaggcattaacagatcaacaacagtttggtaaagctgatgaaatgtatgataaatgtattgatttggaaccagataatgctacaacatatgttcataaaggtttacttcaacttcagtggaagcaagatctggatagaggtttggaacttatcagcaaggctattgaaattgacaataaatgtgattttgcctatgaaaccatgggaactattgaagtacaaagaggaaacatggagaaagccattgacatgttcaacaaagctattaacctggccaaatcggaaatggagatggcccatctgtattcactttgcgatgccgcccatgcccagacagaagttgcaaagaaatayggattaaaaccaccaacattataaaacagggggaaagcagactgaccctctttttaaaagtttaccccctcttcaactgaaccctaaagacactgtcatgaactgtgttgaatggtggaaatcagtatttctgtttgtggtgttgttatttgttacatctgtttcatgtctaggtgttgtgggtgtggctgttgaaggaagtttgcagtcttgcagcttttattccctgtgcaacaaaagattagaacatgttaaagggatttttaaataaagttgcaaagagtacaaatgataattggccatgcaaataaaaaaaaaaaaaaaaanaaaaaagggcggccgc

SEQ ID NO: 228 - DNA, 1181 bp, Homo sapiens
ccacgcgtccggcagtggcaggaccaaggtcaaatgagttatagccaagtctacagtaagatgtggcagtattctgttttgaagccgggaccatgattggcaagcttgccacttggtcaagtgctcaccctctgaaaatgtcttccttggtctttgcctccagctgggtgccacaaactctgaactggattccaaggctttcatgaatgcacttatgtttgctgtggcagctgcattatgtcgtgggggatgtggatgcagaacctcacattctgtcatcttgcttatgttactctcctttatgtttcactttctcaaatgaatgtcaagcaggtgattttcagattcaaaagttctaaaataaattgctcaaatttatacattatgtaagctgttaataaaatttcttgtaggtgctacatatttgttaaaatttttggttgtaattttaagctcactgtaggcagaaaggaatcattaagatttctattcttttttagtctgtatctaaatgaccatatattttaattccaaatacttactttatacttcagtaatgctcattgtattttgcaaaatttatattgttcttttatttgaaaatataaggctttttttagctcctgaaagctatattatagtcatatagttttattatagtatttgataagaagagcagcaacatattgagaacagataaaattctgctgtctttttaatgattatttattaaattcttctcattagagcctattattaatgattgtaatgtatttactgtataatttttctgcaatttattaaatgccaatgacttccaatgtctgcttttcatgactgcacacagtttaaagctgtagatatctaaagggttatttttcagcccggcatggtgctcacgcctgtaatcccagcactttgggaggccaaggtgggtggatcacgaggtcaggagatcaagaccatcctggctaccacggtgaaaccccgtctctactaaatatagaaaaaattagccgggcatagtggtgggtgcctgtattcccagctactcgagaggctgaggcaggagaatggcgtgaacccagtgggcggagcttgcagtgagccgagatggcaccactgcactatagcctgggcgacagggtgagactctgtctcaaaaaaaaaaaaaaaaaaaa

SEQ ID NO: 229 - DNA, 1801 bp, Homo sapiens
acgcgtccgcgcccttttttttttttttttttttttcagacagcatctcactaagccgcccaggctacagtgcagtggcacaatctcagttcactgcagcctcaacctcctgggcataagtgatcctcccacctcagcctcccaagtagctgggattacaggcatgcaccactatgttcggctacttttaaaaatttttttgtcgagacgacatctcattatattgccccagctggtctcaaactcctaggctcaagcaatcctcccacctaggcctcgcaaagtactggaattaaggcatggaccaccatgcccagccccacagccaaacttcttgaaagaatggtctatatttactatctttactttctgaccttctattacctcctcaacccactccaccagaccaccacatatgggacttcccagggctccagcctgggtgccctcttctttaaatactcagtactaatgaaaaataaattcaacatataggagctgccttttcctgactcctccctccttttgctcatcttcagctctctattccatccctctcttcagcagaacaagagattgtgtttgtgtggtggtgagggcaggagaggctaagaacaggattgggggaccaagagtatagcaggggagatgggccctatctatcagcccaagccctcagcagctctttacacagccagttacctgtggcagcaagagggggaaagtcttgagagcacagaagagggaagaagggggagatgaaaggaaatgtgctgaaagagtacagctgtaagactgggtggcaatggacctggcggtggtactgggggcctgagattcacaggtgggggtgtaagaattggtggaggtggggggagtccaggaggaggtggtccttcaacaacaggaggctgtgctgggaaaggcagcataccaggaagattcacatcttctacaactactggatcacttccatgatcaaaaggacacatgtctcctctcatacaaaaacccttttcatcatagtctctacaccgtttctttggcatgggtggtcttacgtaagagttatggtccacttggtcttcatgaaattcagaccaactttcggtagtgttgtttccatgatgagtaggagcaattactgtaatagtgctgctcaaagtaggtacagggtagtggccagatgaaatactaggtaccgaagagactggagtataattattttctaatggatctgttctatccaggtcatatttaggttttaccagatccctttccctgcttcgtgttctgcttctgcttctagtcctgcttctatctctgtccctctcacgaagcctctctttactccaacttcgacttcgactcctgctataactgcgactccgccctcgtcttctattgtaccggtctctgtatgaatctcttccttctttatatctttttcttggtgtggaaaaaattctaccttcaggcttcctgatgatggctgctctggaggaggtaggtaactctttgtattcacagcatcaaaaagtttttccacaaatatctgtgtctctttctgaagaaatacatccagctgatcaatacataatgcctttaactctttttcacttttgtctttctttaccaaagccagaacatattttgctagggcggatggatctgcatcacagatgggctcgagagtcttgctgagccaggacttgagtgcctcgaagttttcaatgatcattttagaaaccatccacagcggccctaaggcccgtcacactcctccgcccgcccaggtcgc

SEQ ID NO: 230 - DNA, 2007 bp, Homo sapiens
  misc_feature (1991)..(1992): n equals a,t,g, or c
gccaacatgagccaccgcacccggccctctccatcttccttgaacgaccccattcacctactgctcctatttctaagactgtgaccaacagagcactggagcatgcagcagcacacagaccccccgcccagatgcctcgtcgtctgggaccccatgcttgccccaggtcccttgggccacatactaatccccctctggagaccttgagggaggtaagattgggaattagcaatacctgaaatgtgttaattctctaggtcatgtttgactctactccagtcctcgtcgccctcttcctccaccccagacttggtgcaagctattccctctgcctacaacactcttcttctccatgtttacccamctcataaccactgatcctttaggcctcagcttttctcaacccccatgcagccattcaacagaatctggsctgtggmaggctctcttctaggtaacgaagtgsattccttgcagcmtttagggacccagggtatcaagggctccgcaattaactttgacacwtggtttccaagatcgccctgaccctgaatrtcccaaggccagacaggagaagagcgaaattggagggctgtgtgagaggcattttggattgggactggaggtagggaacatccctttagccttcattccactgcctggatagctttcacatggccatgcctaatggccagggaggcttatgaccatggtcagaaagtcagctgtgtttccagggtgacaaaggaacaggtttgtgaatcatcatggtctgaagttcctggtacacgggatccatttcactcatcttgcctcatagagaaccctcattctcacctcccacaagggagaaaatgcaaagtttcatgcagtcactgcacagagtcttccagtgatgtgcatttctggacatcaagcctgaaagcggtacatcatagtttgtcaatgtaaaaactaaaataaaaccgtaacaattccccaccacacaccaaaaaatacctaacatcaggttaatgttacctccctycctgagtacagaaacaggatacgcacaaggaaaactgccattagaaagggaaggtttggaggcccatggcaagttcctggtccacaagcaattatwaaactcttctgggcaggtactgtgaagtcctcatactcctgctggttcaaaccaaaggacccaaggttgttttaagcatgacagttaaaggagtttggggtcctagcatgagctgattggtttcttggcaatgcaagtttctcagaaatgtaataggttctgatgacttgtttctagttatttccatgtatccatagccatgtccagagtttcttgttgtacataattccctaacttgatgaattatgctttctagttcatagacttctctctctctaatgatagagtttatgcaaaaccatcagacacaggtgggaagattacacctattattattacaccaattatttcatcttttctacagggctcagtcttaactggccacttaaaggatttttcatacttattttctattattgagctttaggtacaatcagctttttcaaccctgtgaaataccaaatttctrrgtratctgttctctatatcatttatatcatttataaactagcccttccttccctrarcctawttatctcctctaataagctttttaaaagcacaactaacaggccaggcacagtgctcacgcctataatcccagcactttgggaggccaaggcaggtgaatcacttgaggccaggagttcaagaccagtctggacaacatggtgaaaccccatctctagtaaaaatacaaaaattagctgggcgtggtggtgcacacctgtaatcctagctacttgggaggctgaggcacaagcattacctgaacctgggaggcagaggttgcagtgagccgagattgcaccactgcattccagcccgggagacagagcaagaccctgtctctgaaggaaaaaaaaannaaaaagggcggccgc

SEQ ID NO: 231 - DNA, 788 bp, Homo sapiens
  misc_feature (274)..(274): n equals a,t,g, or c
ggcacgagaaaccactatgcttaatgttaacatgattctgtttgttaatattttgacagattaaggtgttgtataaataatattcttttggggggaggggaactatattgaattttatatttctgagcaaagcgttgacaaatcagatgatcagctttatccaagaaagaagactagtaaattgtctgcctcctatagcagaaaggtgaatgtacaaactgttggtggccctgaatccatctgaccagctgctggtatctgccaggactggcanttctgatttagttaggagagagccgctgataggttaggtctcatttggagtgttggtggaaaggaaactgaaggtaattgaatagaatacgcctgcatttaccagccccagcaacacaaagaatttttaatcacacggatctcaaattcacaaatgttaacatggataagtgatcatggtgtgcgagtggtcaattgagtagtacagtggaacctgttaaatgcataacctaattttccygggactgccatattttcttttaactggaaatttttatgtgagttttccttttggtgcatggaactgtggttgccaaggtatttaaaagggctttcctgcctccttctctttgatttatttaatttgatttgggctataaaatatcatttttcaggtttattcttttagcaggtgtagttaaacgacctccactgaactgggtttgacctctgttgtactgatgtgttgtgactaaataaaaaagaaagaacaaagtaaaaaaaaaaaaaaaaaa

SEQ ID NO: 232 - DNA, 1049 bp, Homo sapiens
ggcacgaggacacataagacagctacaaaacccctgttctagtggaggaaggcagacagtaaagaagcagaacaatagagaatgtaagagccaagtcacaatgaatgctattattattaagtaaaatcaagataagggggaggaaggacaaatctcctctacagaagaatgccaaataatttatggagatatgcgaagacgtttcagaacctaatgtcccattctctaagtgtggcctgtgtttactgactttcttccacagagtatggtatggaaggaggaggaaaagtgacttcacagtggcgaaagctgatgaacattagcttggccaagtattggagatcaacatcaacagttataagtcatattgatagtatgtgccctgataggatgtgatgagaagggtacttcccctctgtggtcctcctcctcaaaacctgtaaccccagtctaaatagcagaaagacattgcacaaacccagagtgagggactctcaagaatgcctgaccagtactcctcaaaatgtccaggtcatcacaagcaaggacagtctgagaaacgtcacatccagaggaacctaagaatgaggactcaatgtaaaagggrtcctggaacagaaaaaagacattgggaaaaactaatgaaatctgcccaaagtgtagagtttagtttagttaataacaatttttaaagaggtattaaaaaaaaaaaaaaaggcaggtgaaggccggtgtggtggctcacgcctataatcccagcactttgggaggccaaggtgggaggatcatttgagctcagaagtttgagaccagcctgggcaacatggtgagaccccatctctacaaatactaaaaaattagccgggtgtgctggcatgtacctgtgttcctagctactcgggagcccaggtggtcaaggctacagtgagccatgatcacaccactgcactctaggctgggtgtcagagcaagaccctgtctcaaaaaagaaaaaaaaaaaaaaaaaactcgagggggggcccggtacccaattcgccctaggaaatgga

SEQ ID NO: 233 - DNA, 1098 bp, Homo sapiens
ggcacgagccggatcctcttcattcttttcggctactcaaccactccgcatgctgctggaatatttctggctttagaagtacaggagggcgcagatggctaactgagtaacattcatgaaatgaggctttctgtggcggcgtagtgtttggaattagaaggtaattcagtagagtgtaacttagagaatattgcaagtgacacattgaatcctgcccgtcagggaccttttcctcagagcaatccggccacacgaatagaaggctgtcgtgaatcacatcagatgtaaaatcattccttctgtttactcttttaattttcatcctttgcaggtagtgcaaattcaacttcaaatatggtgtaggttttgctagattccatatttttttcttggatttttgctaattatttttagcaaaaaatttttgctcagtggcaccctccctagtgtccatgggttagggccatgctggggaaaacgggccggtatttacacacgcgcaaaacacccagagacggcacaaggaggttgaactcatgtttcagttcgcgaacattgactccttacgaaagtcacttcattctaactagatgcgcccacttccggtcattatttcgtttgcatgatgtattgcttcttcacgttttgtttttattgagcacggagtagaattccagggctgccttgacttcttccctgcatgctccctcccagtgactttccttccctttcacatgaggatctgccgttcatgttgctttctcctttgtcctcttggacttgagggcattgtgaaaagctttgctgtgatttaaaaatgccagcaattttaatctagcagtgttgaagctgggaattttttggcgcaatccatgtagcagtgacccaggcttgggagccagaaacaagtgtgacctgggattttatttaacacaactgttgccaaagagttggctttgtttatttggttttggcggggagaggagtggtatttgatgctttctgtggacaatgtaaccctaaacacatcatgtattttaaatgccacctacataaataaaacataagcatattgaatacaaaaaaaaaaaaaaaaaa

SEQ ID NO: 234 - DNA, 797 bp, Homo sapiens
ggcacgagcccacctgactgacaaaaaaaagagcaatcctttatgcctctgtcctcccccagttattctaggttctggtcccttacacctggccaagctgtcaggtattattatggcatcttgttcagctaattaagcagtacaactgagacaattgccaccccatttgtcatgtgtggtgccttccaagatagcccccagtgattctcacctcctgatattcacacccttgtgttgtgtcctcccatgtcataccaaggttggtctttgtgataaaattcagggaagtgatggtgtgtgacttgtgacactagatccgaaaagacacggtgatgtctgacttgttctcttggatgtctctccctgagtgaagccagctacttttcatgaggatactcaagcattcctatggagagatccacatggtgagaaactgaagcctcctaccaagagccagcaccaacttgccagctatgtgaatgagccatcttagaagtgggttctctagccctagtcaggccttcatatgactgcagccagggctgatattttgactacaacctcatgagagactgagccacaacaacctagctaagaagctcctgaattccctaccaacagaaactatgtgagataatgtttgttgttttaactaagttttcaagtggtaatttgttatacagaatatgtaactaataaagcatggctcctttaggtctaaaaaaaaaaaaaaaaaaaaaaaaaaaaaaaaaaaaaaaaaaaaaaaaaaaaaaaaaaaaaaaaaaaaaaaaaaaaaa

SEQ ID NO: 235 - DNA, 652 bp, Homo sapiens
ccacgcgtccggagatgactcatggaaaaattgtgttggcttggtctgcatgtttaatgatgtgcttgtatatcgattagctgtgtcacttttaaataagaagtccacacaagcaagccaaatttttagatgacgaagtccataaataactagagaatttttgttatctgttgttaagttgaaatgtataatcatttatcactaaattgcacattgcctttatttatttgtgctctgtttttggtttacagtgtaataatacctcatttaaaaaataaaaaccactactgttacattttattaatttaaaaagctagaaaattcatgtagttactttttttacatatataatctgttaatgaattattgatttttgtatctgccacagtaaattaaagcattacacagtatttatcagtattttttaaacatcctgtccttttttaaaatctttgcttagtcagtcatatttttgtctgtatgattagaagtttttacgtccttccttttttgtacaaatctgtattgtattaatttctggatgcaatttttcaaatattaaaattatacagtcagtcaggcttcagtttattttttgaacacttgggcaattaattaaagccatatgtttaaaataaaaaaaaaaaaaaaa

SEQ ID NO: 236 - DNA, 1815 bp, Homo sapiens
  misc_feature (1115)..(1115): n equals a,t,g, or c
  misc_feature (1119)..(1119): n equals a,t,g, or c
gagctgaaccacgtcttcaagaaagaagccaaaaatatttccgtgaggtttttaactacctctgaatctgtcctactctaaatactaccggagtctctttgtaggttggccagtatatgtttttagtgaaatattatttcacaaagaactatatcacgtacctttcctctgactgtttcctggcatatatgcatgaatatggccattattgaactatcacttcagtaaagaagttaaacagtacttttctgaggtttttcagctacctctgggtcattctgtaatgtaaatgttgttaataagaatggtttttacataaattatgcaaaggttaacaagcagtaacactgcactcctcaaaaagtggcggtatgtaatgaaaggcccttttgatatccttgatttttcattgtgtatctgkttgggcacggtctatgtaacactagttctgcgtattagtattttagagtatctctgcctcccttgtcctgttgtttcttttgcccccttggaacacattggtcagcagttctaagagacactgcccacatgatggccattccctacttcatccttgctgagctaaattttatatttttgtgcatccttctcccagatgacttaggtggtaagtccagattagtcaaagctaatcatggaagttccattttaatgattctgttggggtgaacttgggagcaatgagatgtttgggaagtattgtgtagtacttctgggaaagatctccttgatacaacattgtcatgacatgagaagagactctgctgggctttttcatgtctgtaacatggtattggcttatcgtttttatctctgaagggcagtagcctgaagataacagtgcacaaggtgggaaaagccagctcagaggtgacgttgccgagctactctgctctctatacctgttctctactgggactttttataaccctcaataactgttttttatttggtcttagggctgtctgatacttagagctgaaggcattccagctgacacagaggaatatttttctaagtgttaatgttctatatggtaattagggggaagaattatttcttttcacaagttaatatagggatggctgtttgtntcanccatggttctttctggtggaaaacagaattctccaactaaaaatattttaatggcagactgattacagtggtgtgggccagaaacaagggacagtgaaacacccagagacttgtatcagcaggaagccattgccattctgagccttgaagggcaaggagggaaacagtgttaccagagcccagtaagaactgctgtcatgaaggaggggccaccttgtaagagacatcattactaccagaactgtggtgccaaattgctggtgtctctctttggagaaaccaaccagatacatctgctggagagcccaggtgggcacagagaagggtggagagagaatctgggaagagaaatggagaataagcagcacagtgttattcatttctgtaaattcctatgtagaaggctcagtgttagaaataaagttattctactagttgcaagttaagtgtttctgtttgttctgctttcctgttagcataagtaaactccctttggaactacacaggtatgtctctccttcaacatgtgtgaagcagacattatattaaattacattattcatacctccctgtggtgtttcttattgtatgtggtgtaaggtaagcagctctgtattcttccaaataaatagccagttgtccctgmaaaaaaaaaaaaaaaaaaaaaaaaaaaaaaaaaaaaaaaaaagggcggcc

SEQ ID NO: 237 - DNA, 1488 bp, Homo sapiens
cgccaagtttccggagggagagggtagaaactggagggggtggacctgtcactcacgggactgagggtccttttctcccgctcccaggaggaacgagaatgaatatgactcaagcccgggttctggtggctgcagtggtggggttggtggctgtcctgctctacgcctccatccacaagattgaggagggccatctggctgtgtactacaggggaggagctttactaactagccccagtggaccaggctatcatatcatgttgcctttcattactacgttcagatctgtgcagacaacactacaaactgatgaagttaaaaatgtgccttgtggaacaagtggtggggtcatgatctatattgaccgaatagaagtggttaatatgttggctccttatgcagtgtttgatatcgtgaggaactatactgcagattatgacaagaccttaatcttcaataaaatccaccatgagctgaaccagttctgcagtgcccacacacttcaggaagtttacattgaattgtttgatcaaatagatgaaaacctgaagcaagctctgcagaaagacttaaacctcatggccccaggtctcactatacaggctgtgcgtgttacaaaacccaaaatcccagaagccataagaagaaattttgagttaatggaggctgagaagacaaaactccttatagctgcacagaaacaaaaggttgtggaaaaagaagctgagacagagaggaaaaaggcagttatagaagcagagaagattgcacaagtggcaaaaattcggtttcagcagaaagtgatggaaaaagaaactgaaaagcgcatttctgaaatcgaagatgctgcattcctggcccgagagaaagcgaaagcagatgctgaatattatgctgcacacaaatatgccacctcaaacaagcacaagttgaccccggaatatctggagctcaaaaagtaccaggccattgcttctaacagtaagatctattttggcagcaacatccctaacatgttcgtggactcctcatgtgctttgaaatattcagatattaggactggaagagaaagctcactcccctctaaggaggctcttgaaccctctggagagaacgtcatccaaaacaaagagagcacaggttgatgcaagaggtggaaatgttctccatatcaagatgtggcccaaggggttaagtgggaacaatcattatacggactcttcagatttacagagaacttacacttcatctgttccacctctcctgcgatagtcctgggtgctccactgattggaggatagagccagctgtctgacacacaaatggtcttttcagccacagtcttatcaagtatcctatatgtattcctttctaaactgctactcatgaatgaggaaagtctgatgctaagatactgcctgcactggaatgttaaacactaaatatataacaagctgtgttttcctaagctgaaaaaaaaaaaaaaaa

SEQ ID NO: 238 - DNA, 721 bp, Homo sapiens
cggccgtgtcacagctgggaatgatgaggtggrggctgctgctcaggctgcaggcatccatgatgccattatggctttccctgaagggtacaggacacaggtgggcgagcggggactgaagctgagcggcggggagaagcagcgcgtcgccattgcccgcaccatcctcaaggctccgggcatcattctgctggatgaggcaacgtcagcgctggatacatctaatgagagggccatccaggcttctctggccaaagtctgtgccaaccgcaccaccatcgtagtggcacacaggctctcaactgtggtcaatgctgaccagatcctcgtcatcaaggatggctgcatcgtggagaggggacgacacgaggctctgttgtcccgaggtggggtgtatgctgacatgtggcagctgcagcagggacaggaagaaacctctgaagacactaagcctcagaccatggaacggtgacaaaagtttggccacttccctctcaaagactaacccagaagggaataagatgtgtctcctttccctggcttatttcatcctggtcttggggtatggtgctagctatggtaagggaaagggacctttccgaaaaacatcttttggggaaataaaaatgtggactgtgmraaaaaaaaaaaaaaaaaaaaaaaaaaaaaaaaaaaaaaaaaaaaaaaaaaaaaaaaaaaaaaaaaaaaaaaaaaaaaaaaa

SEQ ID NO: 239 - DNA, 1842 bp, Homo sapiens
  misc_feature (1134)..(1134): n equals a,t,g, or c
  misc_feature (1210)..(1210): n equals a,t,g, or c
aattcggcagagtttgggtctcagctgccacctcccttccttggatgctgtcccaaccaccccattccaaaagaggttatcgcttgtgattctctatcactgggccaaatctgcctgttgcctagtgctcctagccctttctatattaattcatttcattatttcagccctgtctcctccactaggatataagctgcacgagagatgggctatgtctcttactcactgttgggcctcccaggacctcagcacagggcctgacacacagtargtgggttaatagatactgattgaatgaaagaacaaggtgggtactaaaatcccccttttaaagaggaggcttggagttatgaggttgtacgagcaaagcttattccctaactaccacagtcccccccctgcagccagggccgggatcataccacaattccctgcccatcaagctgtcatgaatagccctaagatatcaggaagcacaaagatatcaatgccaggagggataggaggaggcggccaagaaaccccggaattgtacttaaaawtctggctacgcaaactgcttgcccaactttagacaccatgatgaatgatcaggtgctgcaaccatgaaacatgacgtaattagtgctgcactcttggctgggggttggcttggaggccccacctcgaggttagcctcccccagagggtcactgcacgargcagtctggtgcggggtgggggttacaacagagggaggtggaatcagaccactcggcagccctgtgaccattatgtgcacttttatacaaaggatacaaaagacaccaatactggggaatttatttaagaatacttctaggatgtgtcctgtgatgcctcaggtctatgtcccacattttcttaaatctatagtcctgtgtaataagaragartatttgaaagattagtcaattaattggtctaacaaaaagaattctatttctgcagccccaggagtggaagaaagagccagaactctgtggtgcagggctttagacttgcttcaggtcttctttcccctgggtcttctggatcttgctgccctggccatgaaagggaaaggataaaggaagtttgttcccttaagaccttgtgctgccctgtgctatctgnttctggccaacctgaatttgagaacgcttcttcagtttgcatctgtgtgaccttgggcaagataggaactgtctgnatctgctccttcagctacccaccttgtaaagcagttgggcaccatagagtagctgctgkcacagtggggtattctcttaccatcaatatggctggcatagtcattctacttctcctttacttgggcccttgcctaggccactcagcctccccagagcaggccccctctcagtcccaaggcctcctaggcctaggtgtctgccctagctggagaaaggcacaagaagaaaacaccagtcaatgggagaaaagtcccccaggccagtcttccacctagagcccctcccctttctcaccacaaagrttgcttcactgagggcggggcgcagtggctcacgcctgtaatyttaacaytttgggaggccaagacaggcgatcacttgaggtcaggagttcaagaccatcctgaccaacatggcaaaaccccgccttcattaaaaatgcaaaaattagccaggcatgatggtacacacctgtagtcccagctattggggaggctgaagcaggagaatcgcttgaacccaggaggtggaggttgcagtgagtcgagattgcgccactgcactccagcctgggtgacagaatgagactctgtctcaaaaaaaaaaaaaaaaaaaaaaaaaaaactcgtag

SEQ ID NO: 240 - DNA, 1427 bp, Homo sapiens
gaacatttcaagtagcctccctctatgttcctttcctttttaaatatattgataatcctactgcagggaatttgggagccatacttggtcttcgcatgcaacgtaattagatataactatactatgtgaatatgactaaagaaatgaaaatgaaaacagtatcttgtgctctgtaacgattgttattaaatatatcatagaaatgagaagagtaggctcaggagctgaactgcctagttcaaaaggccaaatttactactttttgttccgtgattgaatttgttgtgctcctgtttccttagttgtaaaacagagataacaataggacgtgcccataagcttttcatgaggattaaatgagttaatgtgtttggtggggaccaggtggacatggtactggtagggccctatttgacattggctttaagtatcattggctttaagtgcatcagtagatatatgatgacaataattgtattatcatggtgatatggatttcttataaatacttgtattatgttagtcacttctagaaaagaatacatctatacagtagaatataattcaaaaaataatgtcatatttttgtaaagaaattttttgtaaaacttttcagtcttcaaagagtttcatagactttattccatttatattgagagcctactttgtgttaagcattttgctgaacattgtcctcactcttatgttacttaccatctattgggaagagaaagaagtaaacaaataattacatgtagagtagtagtgtcaatggtagaggcatgaacacaacacagatttaacactagagaaagagtgatcacaaaagaaatgatgtttcagttgagttttaaatggcagctggagttcatctgaatgattaggtgtctaggacaggtttaaaggttagggagtaaggaagataatattcaaaataaaaagaacctgaggatattcacagaggacatttgcagaggcctgaaatagcattggtacattcctagaaccataaatagtttgatggtaatgtaaattacagtatgttttgaaaaatcatggaagatttataccacgatagaaacttcaactttattctaaagttgatgagcatttgacagattttaagcaagaaacaaatattaaatttatattttagaaagattctagatacataaaaagcacttattataatccagtatccattcatgataactctcagctaactggaaataaaagggaacttccttagtctaaggaagaacatctacataaattctacaaccagccacatacttaatggtgaaataatgaatgtttttctcctaagatcaggaaaaagaaaaagatgtctcctcttacttctattcaggatggtactggtagttcaggccagtacagctatgcaaaaaaaaaaaaaaaaaactcga

SEQ ID NO: 241 - DNA, 1768 bp, Homo sapiens
  misc_feature (1743)..(1744): n equals a,t,g, or c
cccggaatttccgggtcgacccacgcgtccgtttgaggatgagccacctttattagaagagttaggtatcaattttgaccacatctggcaaaaaacactaacagtattacatccgttaaaagtagcagatggcagcatcatgaatgaaactgatttggcaggtccaatggttttttgccttgcttttggagccacattgctactggctggcaaaatccagtttggctatgtatacgggatcagtgcaattggatgtctaggaatgttttgtttattaaacttaatgagtatgacaggtgtttcatttggttgtgtggcaagtgtccttggatattgtcttctgcccatgatcctactttccagctttgcagtgatattttctttgcaaggaatggtaggaatcattctcactgctgggattattggatggtgtagtttttctgcttccaaaatatttatttctgcattagccatggaaggacagcaacttttagtagcatatccttgcgctttgttatatggagtctttgccctgatttccgtcttttgaaaatttatctgggatgtggacatcagtgggccagatgtacaaaaaggaccttgaactcttaaattggaccagcaaactgctgcagcgcaactctcatgcagatttacatttgactgttggagcaatgaaagtaaacgtgtatctcttgttcatttttatagaacttttgcatactrtattggatttacctgcggtgtgactagctttaaatgtttgtgtttatacagataagaaatgctatttctttctggttcctgcagccattgaaaaacctttttccttgcaaattataatgtttttgatagatttttatcaactgtgggaaaccaaacacaaagctgataacctttcttaaaaacgacccagtcacagtaaagaagacacaagamggccgggcgtggtagctcacgcctgtaatcccagcactttgggaggccgatgcgggcggatcacaagggcaggagatcgagaccatcctggttaacacggtgaaaccccgactctactaaaactacaaaaaaaattagctgggcgtggtggcgggcgcctgtagtcccagctactcagraggctgaggcaggagaaaagtgtgaacccagragscggagcttgcagtgasccgagatcacaccactgcactccatccagcctgggtgacagggtgagactctgtctcaaaaaaaaaaaaaaaaaaggagacacaagacttactgcaaaaatatttttccaaggatttaggaaagaaaaattgccttgtattctcaagtcaggtaactcaaagcaaaaaagtgatccaaatgtagagtatgagtttgcactccaaaaatttgacattactgtaaattatctcatggaatttttgctaaaattcagagatacgggaagttcacaatctaccttattgtagacatgaaatgcgaacacttacttacatattaatgttaactcaaccttagggacctggaatggttgcattaatgctataatcgttggatcgccacatttcccaaaaataataaaaaaatcactaaccttttttaaggaaaatatttaaagttttacaaaattcaatattgcaattatcaatgtaaagtacatttgaatgcttattaaaactttcccaattaattttaaaaaaaaaaaaaaaagggcggccgctctagaggatccctcgaggggcccaaggttactcnnaaagagtttcccttaaagatcccg

SEQ ID NO: 242 - DNA, 840 bp, Homo sapiens
  misc_feature (789)..(789): n equals a,t,g, or c
  misc_feature (805)..(805): n equals a,t,g, or c
  misc_feature (836)..(836): n equals a,t,g, or c
gtctgtctcctactggcacaacagaattttggctgggaaatgagaagattcatttgataagcacacagtctgccatcccatatgcattaagagtggaactggaagactggaatggcagaaccagtactgcagactatgccatgttcaaggtgggacctgaagctgacaagtaccgcctaacatatgcctacttcgctggtggggatgctggagatgcctttgatggctttgattttggcgatgatcctagtgacaagtttttcacatcccataatggcatgcagttcagtacctgggacaatgacaatgataagtttgaaggcaactgtgctgaacaggatggatctggttggtggatgaacaagtgtcacgctggccatctcaatggagtttattaccaaggtggcacttactcaaaagcatctactcctaatggttatgataatggcattatttgggccacttggaaaacccggtggtattccatgaagaaaaccactatgaagataatcccattcaacagactcacaattggagaaggacagcaacaccacctggggggagccaaacaggctggagacgtttaaaagaccgtttcaaaagagatttacttttttaaaggactttatctgaacagagagatataatatttttcctattggacaatggacttgcaaagcttcacttcattttaagagcaaaagaccccatgttgaaaactccataacagttttatgctgatgataatttatctacatgcatttcaataaaccttttgtttcctaaganaaaaaaaaaaaaamwnggggggggcccgkacccattggccttatggngggc

SEQ ID NO: 243 - DNA, 903 bp, Homo sapiens
ccacgcgtccggatgaattagaagaaagaggtttggggactcagcggatactagttcttttaccttctgcttggtaacttagattaaactgagcattgtttttctgtcacaaatgttttccttatgacactggtttcgacatgtaaaatgtgtttgaaaacctgctttgtagatgcagagagaagctataggaaacccagtaccacccctggtctgttctgacgagacatcgttcataaggcacagcacatcgcaagatgaacagttgttaataaaagctgttgctggaaacttgctttaggaacagctcaagaaccttggagttcatatttcacaaatattaataaatataagtccaagagctgtcagcctaatctgtaggagcagaacctctgattgaccaaaaggcatatgggtttaggttggttttttgatgtcatatgtctctgatggggctgcaagtgctacctcgcgcttgtacactgctgctgtggggctccgcgcctgccggtgaagagctgcagatgccgagaagccagcaaacacagggcccactggaaaaaaatagttttttcattagtatttctcgggaggacccaaaagttaaggtcagcttgttcactgtaatttctggaagaagttcactcagaccttcctgaattcagatcatctcagaagtctggagggaaatctggcgaaaccttcgtttgagggactgatgtgagtgtatgtccacctcactggtggcaccgagaaacttacttccttgtattaagtgcacttcttgtatttctaataagatgactttccagaaagtgagatttgttatgttctggcttttaaaaggtaaaatataaataaatttcataacttaatctaaaaaaaaaaaaaaaaaaaaaaaaa

SEQ ID NO: 244 - DNA, 976 bp, Homo sapiens
ccacgcgtccgtgaagattcaagtcagttgttcagttacttgaagcaaaacgaaatctttcatttcagtcaaatcactgcagtcatgaaatactgaacaattgccttaagtctttgcttgactcactgggatagactgaggctttgggtgtgtctgtattagcatttcattagtacttcacatgcttttgatgtactcttgagattgctttaaattttgtattgaaacaacaatacattttgcactgtagtaatgggagcactaactcttacaacagttagtgaatcgttttaaagaatcagttcagtgtagacattttgaaaagattgtttcctgtgctttacgatagcttagtgcaatgtgcacttctgttttacttgccattttcctgctctgtttctctgtgacatgaagcaacagaaactgagatcaaagttaagattatatcctgtttgtagtatcagatatttttctgtgtacaattataggattgtaatctaaactggaatttttaggcagtaagtcaccacaaaatgttttagataagacacaataaaattattataaataaaagcttaatgtttgtaaaaaatctcttttttagtatttcttttttcacatgaaagaagtggtggctgctaaaaaaaaagctacagtgtttattaagggtctttttgatttatgtaaatatttgtaaattggtcagtgcctgtaaatttaaatataaaaagtaaccttgaaaacagttttaactttttcaaaagaactatgtccaacattttttagacctgctgtagtacagttttgtacctctaacgtattttttttttgcagaccaaatgctaaaacttttgcttttctttgacttgtaaaaggtgcacattttcattttcttccttaagttcaaatttttgtatgatgtcaaatgcaataaaatttatatatggacaaaaaaaaaaaaaaaaaaaaaaaaaaa

SEQ ID NO: 245 - DNA, 622 bp, Homo sapiens
ggcacgagccggaagaacctgcgggagtcgcagcagctccgatgggatgagagctgggtgcagactgtgctccctttggttatggacacataactcctgggccagaggctaaaaccccaggacccctgctgtccttcccgcagcttcttcttggagtctcagggcaaaccctttcgagcagcacctcccagtggccagaagctgaaatgacagcagtggtactgcctggtaaaagaattggttctgtgacccgggaagctttggttggccttgatttcttctctggaggcttggaaacgcttcctctcttcttctgttcttcacgccccatgcccctgctagcgtattactgttctgtgacttccctgtgacctctgcagaactcctcatcctgcgtttggtctccaggtgtcccctttctgccgtgttcctaacattttgattcctgtcttgaaaaaagcacctgctgcaccgtaagcccagggatgtggcagctgcagtgggcttggctttgtgaggaactgagtgtgtccacgttgggggaacatcatacttgatacacacgtttttatttgcacaaagaaaatgctgtttttggagccaaaaaaaaaaaaaaaaaaaa

SEQ ID NO: 246 - DNA, 1063 bp, Homo sapiens
ggcagagctacgttccagggattacggcatgaacatactgttttcaggaccctatctagcccaccatggtaaggaaacacccaacaaacatcatgcttattaagtttccaggcaggtgcctctctatcccagcttcattgttgtgttcttttcttcacaagtattttcagagctgcccttggccatctggaagatgcatggtgaaagaaacggatgcttgctctcagcacacacttccttccctgacagtttgtcgcctagcagctattttggcttcccaagggaaatcttgtcctttgcccttgtggggcttactgcaaatcaactcatcatgaggaagattaatcagrgaaaagacatacaattttttttttttaaactgtgagcatgaagagaatcacagagtgtatactcaatccccaatgggggcaaaatacttctgtaacctcctttcagtgscgaaggggacatggaatgtaggtaatyctgttgagcggtaataagtgatgaytaggaagattgaatggatacttgggagaatgaatagggggaggaaacagagattgacttattaatggttccctttggaaattaaatactccttggagaccagtcattactttgtaaaaaagtctgtttgagcgggcttacatcttaacgttctttcctgtagtcaagaagaagatcccagggagggagggaaagtgaattgtaataatcccgacatgttcagggagggaccctgtgggaggtcattgaatgatggggggcaggtgcttcctgtgttgttcttatgatagtgattaagtctcacaggatctgatggttttataaagccaggttccgctgcacatgccctcttgcctgccgccatggaagatgtgctttttctcctcctttgccttccgccatgattgtgagtcttccccagccatgtggaactgtgagtccattaaacctgtttcctttatacattacctagtcttggatatgtcttcattagcagcgtgagaacagactaatacagaacggaaaaaaaaaaaaaaaaaaaaaaaaactcgag

SEQ ID NO: 247 - DNA, 804 bp, Homo sapiens
ggcacgagctgatgtgggctggggccagtaggggcaggacaggtgccaggctggctgttcctctgcatgcctggtgcaccctgtggccgctagcccttggccaggccatcctgttgcagatcccagtgctgccacagggacaccaccaggcacctccctaggcaacgccaagcaggaggacctcacccacacccatggcaaagcaaaacaaaagaggcaccccgaccccattctacagaagccccagtccatggtcacctgtattctacctcacactccagcgtgggctttttccaggatgtgccctgagcctgttctgaacagctgtaaccccaactcccccacacaatgtgtctgcctgggaggtaagtaagtccagactgggtgtccaggagctggaacccagagagcgtcctgtccctaaccagccactgcagccctccagctctggccctcagctgcttgacaggacggactgctgggagatggcagccggttggcagggcccttgccctcacaccccgctgcccaggagccaggtctgaacttctgtgcacaggcctggcccctcagactcactcctgccaagaggggccacttcttcagggtgagccccggctatcaggcagccgtgagctccagggcgggctgcagctcccatccccttgcgccatgtttggagtaaagggatcagtggaagtggaggagccacttgggttctcctaagaccagcccttccggaggggccggtcctggaagaaacccataatccctggagtgtgaaaaagggcaaaaacggcacga

SEQ ID NO: 248 - DNA, 268 bp, Homo sapiens
gcacgagcggcacgaggtggagtctgcagtgagccgacgtcgtgctactgcactccagcctgggcaacaaagcgagaccctgtcttttaagaaaatggtctttaagttcagtgtagcccttaaaagtgatgtacatggattaaggactggaagaaagtactgcaaagtgtttatatttgtatgcatggagagattacaggtagtatgctttgctcttgtccattttgtattttctgaatttcaaacagttaaaaaaaaaaaaaaaaaa

SEQ ID NO: 249 - DNA, 2450 bp, Homo sapiens
ggcacgagcggcacgaggtttcttgaggagtaattgtcgggaaagtagataaagtataagctttagaatcatatatttagattcaaatatctggtatcgaatcctggctctgaatttactggctgtgtgaccatgggtaaattacttaaattccttaactctccctgttttccattcctaaatgtgtatgatgaattatttgcagagccatttggaggactagtggtatggaatgcaaactatttatgtctatttactaaaacataaacagagtaaatcaccaagtacagacaggctccaaggaatggtttgcttacttgttcactcttttttgtctttctgattctatcctctgtcactctaggtcttcagtttctttactctccatggtggtgcctggctgctgcgactctaggggtcctttgcctgggattagtagtgaccattatggtgctgggcatgcaattatcccaggtgtctgacctcctaacacaagagcaagcaaacctaactcaccagaaaaagaaactggagggacagatctcagcccggcaacaagcagaagaagcttcacaggagtcagaaaacgaactcaaggaaatgatagaaacccttgctcggaagctgaatgagaaatccaaagagcaaatggaacttcaccaccagaatctgaatctccaagaaacactgaagagagtagcaaattgttcagatttagagtccgaggcgctgtctcccagacatacccttcaggtacctgtgcatatatacaacgaggagctgtttatgcggaaaactgcattttagctgccttcagtatatgtcagaagaaggcaaacctaagagcacagtgaatttgaaggctctggaagaaaagaaaaaagtctttgagttttattctggaatttaagctattctttgtcacttgggtgccaaacatgagagcccagaaaactgtcatttagctggctgcagaactcctttgcagaaactggggttccaggtgcctggcacctttatgtcaacatttttgattctagctatctgtattatttcacctagcttgtcccaagcttccctgccagcctgaagtccattttcccctttttattttaaaatttgactcctcttcaagcttgaaaaccctctgaactcagtcttctttacctcattatcaccttcccctcacactcctaaaattgcatgaaagacagaacatggagaacttgctcaagtgcaggcagagagcaaaaaggggaaatatgtctgggaaaaagtgcacgtgaagaaacaaagaaggacagaggccattccgaaatcaagaaactcatgttcttaactttaaaaaaggtatcaatccttggtttttacactgtggtccatctccagactctaccacttacagacagacagacagacacacacacacacacacacacacacattttgggacaagtggggagcccaagaaagtaattagtaagtgagtggtcttttctgtaagctaatccacaacctgttaccacttcctgaatcagttattatttcttcatttttttttctaccagaggacagattaatagatttaacccttcacaacagttcttggtagaatcatgggatgtgtggcccagaggtaaagaatagaatttctttccctaaagaacataccttttgtagatgaactcttctcaactctgttttgctatgctataattccgaaacatacaagacaaaaaaaatgaagacactcaatctagaacaaactgagccaggtatgcaaatatcgctgaatagaaacagatggaattagaaatatatcttctatttttaggcttctatttcctttccacccactcttcacaggctattctactttaaaggaagcctttttattttgctgcacacaatctagcaggaatctttttttttttttttaagagctgtgtcatccttatgtaggcaagagatgtttgcttttgttaaaagctttattgagatataattaacataaaataaactgaacatatttaaagtgtactatttgataagttttcacaccttgtggagaacatgcatactacaattaagagagtgaacatatccatcatccctcaaagtgtcacaatgctcctcctgatgactcctccccagaaaaccaccaatcggctttcattttgcattttgtagttttatgtgaatggaatcatatagtatgtcttttttttttgtctggcttctttcactttgcataattattttgagattcatatgtctccatcttgatgctcgtatgaattcattcttttaaatgttgaatattcccttgtatggatataccacaattcatttacccatttacttgttgatgacatttgggttgttttagttttgggatattacaaataaagctgctgtgaacatttgtgtacaaaaaaaaaaaaaaaaaa

SEQ ID NO: 250 - DNA, 2385 bp, Homo sapiens
  misc_feature (4)..(4): n equals a,t,g, or c
  misc_feature (14)..(14): n equals a,t,g, or c
  misc_feature (16)..(16): n equals a,t,g, or c
  misc_feature (35)..(35): n equals a,t,g, or c
  misc_feature (2376)..(2376): n equals a,t,g, or c
ctgntcttctcccngnaaccccccttggcatttantatgatggactcatgtcctttgctggtggaaaactgctgatcgtgggagaaaatgcaacagcacacatttttgcaacatacccagctccgtatctatctctggcgaacgcatttgcagatcaagtggtggccaccatgatactcctcataatcgtctttgccatttttgactccagaaacttgggagcccccagaggcctagagcccattgccatcggcctcctgattattgtcattgcttcctccctgggactgaacagtggctgtgccatgaacccagctcgagacctgagtcccagacttttcactgccttggcaggctgggggtttgaagtcttcagagctggaaacaacttctggtggattcctgtagtgggccctttggttggtgctgtcattggaggcctcatctatgttcttgtcattgaaatccaccatccagagcctgactcagtctttaaggcagaacaatctgaggacaaaccagagaaatatgaactcagtgtcatcatgtagtggcatgctcagctctggatttgcagtcagtttgggattctcttcagaaagatggcatctaagtgtctgtgttcttgtaagcctgaggtggaatccacccagttttgtctgctagccatatgggacatctaattggaaaagcatctgcataaaagtttggaaacaatgaccacttctctaccattgtcccccacccccaccccccagaataacgctgactgtcccctgaaacagccttctctcctgccctgtttatttcatcctcgatgggaattcttgctaggtaagcactaataactcggcatcttgacgatagtcccatttgggtggtttcagctgcactatctgtatgaaatggtgtcaccaaaacccttttcttcagtatcgacaaagattacattctgagtaccaaccaaaccctaaattgaaagacaaaactatggtttcagtcaacatattcatgaattagggagctaatgggttaagcttccagttcccgctatgctactggatttgtataaatactgatattctccaaacctagtggtgtagggagcaagagaatgcagctggaaggcacaaggggaggacattgtggcattcagaaactgcaggagacaagatgaatttgagaagccaaatggaatttttaatggaaaccatttatcagattaatctcttgctctcctgcattttagaggacaccaattaatttcctggtctttagtatataataacctaaaataccattgtaacctcagtcatgaaaaatacatcactctgtctttttagctcaaatgtattttcctaattgcccacttgagaacagacatttgacaagttatatcaacgactgtgcttgtccattattttacacatgccctagaagccaaaactgaaagccactggatcctggtctagctgaatcttcagagtgggaggtctccaaaaagatattaccttattgggcttaacaattcacaaggcactttcacacccattatctaatttaatcctcataatgactatgtgaggcaaatgccacattgcccatttttcagataaagaaacaaaatcttagggaagataagttgagttgtccaagagcacactgaaagttgaatgttatctaatgcattcctctacctttcagaagatcagtagctggctgagaatctttgccaaatcttccttgctagccagaagtggaattggcagcttctagaatatgtacacctctggacaaaatgttcctcaatcttaagatacaaagaccctcattgtctgggtctattcccacacttactgagtacagatgaaggaaagtggtagcaatttaatcataactttcatttgctgaaaaacattatgagaaggcctcccttcctaagccacctctggtcttgctaagtcttgatcttgcttcctgccagcaccaaacattacattcaggggatttcctctggctcagtcttttccccttgaagttctctaatagatgttacttttgacaaaagatcgcctatgagttacaagcaccaggggatgctctacatcaagggatgcaccttcagtcaaactgtcaaaaagcccagaattcccaaaggcattaggtttcccaactgctttgtgctgatatcagaacagcagaaattaaatgtgaaatgtttctgatgacttatgttctacaatctatggacatacgggatttttttttcttgctttgaagctacctggatatttcctatttgaaataaaattgttcggtcattgttaaaaaaaaaaaaaaaaaactcgagggggggcccggacccwttgccctagnagaggcgaa

SEQ ID NO: 251 - DNA, 1243 bp, Homo sapiens
ggcacgagtgcctgtaagcccagctactcgagaggctgagcaccaaaatggggatgctagtcacacttacgtcctagggttcttggggatgaaatgggttcttacttgtacaactcttgaagtggtgtgcctggcatgtgacaagcatgcagcagatgtgatgctagctttcattattattggctatttgccatatccacggatgtcatcttgtcccttgtctcctttaattattgacagaagttgacacaagtgatcatctcatcctttaaaaagtgctttctctcttcccttggctactaggacactttactgtcgtcgttcttttccagtgtcattggccattttcagctccttcattagtttctctcccacttgtcttttaaatgcatgtatttctcaaggatctcttcatctaaatgtccttccctcaaattgctgtcttgtgcattttcctttttagttaatactattatatcctccaagtcactcaggattgttaccgtgaaatcatccagaattctgtctcctcctttgtctcccttttcagaccactccaaagctgaccttttttcaaattttgttgattggacctaccccatcttatgcatggccttctcatgttcgatgctacgatcccattttggatatctggtcattctctttttctgtcttctcattactgtcagagttctctttcttaaagttcagccctaatgtcactccccattgcatgaagtggtggtctccaaagaggggcgctggcataataggaggtatgcaaataagtacatttggatatgaaaagaaaatattcaagctgtatttatgccttaagttaagctttactaatatttggtgcatgcattggtacctttattggctctataagccatttgctcatatatcttgaagtacccaagggaagactgcaagatgaattaatggtcttccactgtttgttgcttctcagcatattgcagtctattaaagcttccatgtatctgcttaagtagatctacagggtaaagcatgtagtttttaagatgcatgtgttctcaaaaagggtaagtgacataaaatatttgtacagaaaaggggccgggcgcagtggctcacgcctgtaatcccagcactatgggaagccaaggcgggtggatcacgaggtcaggagattgagaccatcctggctaacatggtgaaaccccgtctgtactaaaattacaaaaaaaaaaaaaaaaaa

SEQ ID NO: 252 - DNA, 2564 bp, Homo sapiens
ccacgcgtccgcaccacacttggtccacttacttataataaacattgatttggtcgttcaggttcctttggtcctcctattgagaacagtttgaagtccatgaaaattttaacaatatttttgatcctgaatctaacatatttgaaaaatagttgctccactaggcttccacagtgcaggcttcaaatgggatggctaaattcacctcatggttcttagttttttttgtacttgtggcacattctcttcatatattaccccaccctgtttgtttgggcagttaagatgctggtactgtctggtggcgataaggaaagggaaacagaagtcagtaattcagacaagaataaacaggatgaaatgcatctattcctaggtaagattagcccaccacctccacactgctgctgtctcttcagctcaggctgtttttctctgttttgattgtgtaaagagtagagtgctgatttgtgtgttacagagggtggtctgtacaagtcataaagctcgacatggccttgcttcctgctaggtgttaggacacccatgatggtggagtctcttggcattctgtgtaattagataaggctgtttatagcattggtccatgagaacttccttgtttctatttaaaatgaaaatcattgtataagtaaaacttcttaaatgtagatagaaatagaattttaactgaaattttatgaagccattggccgcagggatgtgtgtcatggaggagggctccatacttttttggtatacttatctcaaacttaattcatttgcatactgctttttctctaagtgccaactgtcctagtatattttctaagtcaacttttactttcactttatcctaagcaagaatatctttggcatcacagactcagtaagcccgtttttttctaatgcacatacaaataaataaaatgcacaacttttaacataaatggctgcctccaatttgggaaatactgttctggccagaggccgttgctctgataatgtcatgtggttagtgcattttaggaagacctcctttccctttggttgactcctgcaggacataagatatcagtgacgttatcctttgttgagccatcctggtttgagtcaggatgagtgttgagagtttttggggagttgcccctgtgtcctatattattttatcctcttaaattctgatggtctttggctccactgactccaggtaagttggggtgacagtgcagcatatttctattttctagttgtttctggccagacatggggaaggtcaagacatcttgttcatgcaaacggattgatgggcattcctaatctgattttattagtgtatttaggaagtaaagtaagatcttgagcccagctgaactcccctattgaattttctaacaaaaagagagtttgcgtatgggttcataattgagcctgctcttgtagaaatgttttatcagaattgaaatcctctctgatccccaaattctagagacaaagttgttttctgaatttgagaaatctgttcagttcacaaggaaaggtgacaatgtgtcatttggatgttgtcccacacgtgaggcctcgttgggtgcttgtggtgggagggaccctccaggcaggctttgtatggagggtttcatgtctggacacatttctgttccgagaagcattgtgcgtttttgggacgtggaccctgccagacctgtgcccagctctgccctcctccctttcttgcctgtcttttgagtatgtagtgggctttgtgtggcatcctgccaggttaaagctgcatggtgcttaggatagagctgtgctgtggggagctcttgatgatggggctgccatctatttgcctgttaattttagaaaccaaactcaaatgtcagaatttcctttctagaagaggtggttgaataggaaccagaaaggccttcatacaggcagggctgttcactcctctgacttgcgtgtttgtccttccttgtaggaaggcttttagggaatttatctgtttaggggaaataagcctgcaggaatgaacttttttttaaaataaaaactcttgatcaaaatggaaagaaaaaaaccagtgaaacaggctaggtagtttgtggaattctcctttgcaggtgaggggagaaagcagctatctcaagggcacagctacagattgggagctggggcttccatccagggtctgggacacccaaaccttaggcttgcccctcccgggaggcctccccctcagagctatgtgggatgcagttgcctttttacctgtgatgagaaactggtgaattgccaggattctggctctggcttcagtctgcccctttccggggattagagggcattaaccctacttcctacagccaagcagctcttcctcatgactctactttctaactcggggggttgactgattgatttgaagaccgccttgttgatgaatgtgttgaaacttgctatcataatgtaaatgctccttaataaaataacaggacctggtgggttcagttgccttgcccacgtgtgacttaaaaaaaaaaaaaaaaaaaaaaaaa

SEQ ID NO: 253 - DNA, 2495 bp, Homo sapiens
  misc_feature (913)..(913): n equals a,t,g, or c
tgtaaggtggtttggggtcatgtttttaaccacctggccaatacagtccactttctggtttcttttattgtgggaagtaaatggtcaagctgctcaggcagtgaaaagatgtggagaatgtccgttgtcattcttgccactgtattccatttgctaccgagatataacattaaggtggacacatttyctaactgtattaattaaaagtcaatggatacagagagtggatttyctcccaagtcccatccctgctgaagaccgcttggatgaactccccaacccactgtgcccctcccgcaacactaccagtagactttagaaccatagttaactaagtcttttacctctgagatacttaattctgggaaaattggtgacaattttcaacttctaaataggtaactcgactgcaaaataatcaaaactgataacaatgaaactgcggctcttaaacaaagccatgcatgccgtgcatttgtattgaaatgtctccatgatatgaagccaaatattcaatgtaacatacttaatatccaaaggtggaaacaaaagaatgtagagatccagtgttaagagttccatttgcttcaattaattatttaccttcctgtggaataatatatatatatatatttaatagaaccatagatagactagtagaatttagattataaatgtgtgagtgcagattatcctgctattgcacaagctagaggggggaaaaatctcaattccagctggcaagatgctagccaggacacatataagaaagttgcactagattgaatggtcacagaatcggaggacatggaagaaaaaggaaacttcggtggttctgcagcagacatgggctaggtcatatgtggtttctrtsaagttcgtgtctcaaaaaaaaaaggagggggggcatctntccccggtggagctcacctatttggraatatggggcatttgttttttccactgcaatgatttcagtctggtttcatcatgttggaattcgatcacaccattttcaaacaatgttaacatagtccagcttttgtttttctcatctcttctgagaggagactcactgtttctgtctgaggaagctcataccctcggcaaaacatcaggacaaataaagagaaatgggggtacgcattcccaacagaagcagtgtgttatttgttttaaaactctgaacagagatcttgggaaatctttcaaaaagaccattgaattcttcattggctgagaacgacgttttaaaatgtcttaaataaggctttgtttgcattgtttgagttcaaggggccttattattgaatggaattgcacaagcctttctttgtgcaatcaaaccattgttattggtagttctgtaaaggaaactgtggaatcgaattggcagtggagtcataaatctatttactgagtgtggcttccaagaaatgttgcaattcaaaatgcactaagtctgtgatttattggagatttggagattctaaataatatttttaaaaaacttccatgcaacttctggtttaatgtttggcaactccacatgataaaaaaataaaaacagcccaaccgagtttcggaattaagtattcttctagtaagtgattcaaacttgtaatatttgccacaggactgacttatttatttactagctagaagctcttaagttcacttgtttatcagggcatatacagaagggtttgttaaaactcgatgttaactttacaactttctgacctggtgcatgaattctcaagtactgtatttcactgtgttggtgtgtctgatggaaatttcgaggtggtcccacaaaaatattttatgtagtgtgccttcaaagagaaccatttatttctcttcacttatcgtcccacaaagtcacatttggtggtggtcagccaagtcgcatctggtctagttttactcttgtcccaattttaaagagaaatgggaatgagtttgccctggtgagacccataccattgcaatgattatcttgagcacttaaagtccagtgttggctgttagtgtatttgatattctgcctgtctcctcatggttgaaatatgtctgaagaatagcagcataatctcttggctgtttatacttttttaaactttcctgtgttgtaaatattgtatacttttggtgattccagctatgtaacctctatgctctgtaaggtgattatttgtatatagcaacatggcccagtgatattatatagtttcccaatggagaggttattgagtaacctttgcattagtttaaacactaccagaagaatgctgagccaactataaacactcaattttgtatgttttccaaattgtacttattactgcttttgatactgtattacgtgccaatagtttcccaatcacatagcaggcaagagatattttgtactttttgatccactgtaatatttaataaaaaatgttactatctgttaaaaaaaaaaaaaaaaaagggsggccgcccaaggg

SEQ ID NO: 254 - DNA, 947 bp, Homo sapiens
ccacgcgtccgcggacgcgtgggaaaaaaataaaaacagcccaaccgagtttcggaattaagtattcttctagtaagtgattcaaacttgtaatatttgccacaggactgacttatttatttactagctagaagctcttaagttcacttgtttatcagggcatatacagaagggtttgttaaaactcgatgttaactttacaactttctgacctggtgcatgaattctcaagtactgtatttcactgtgttggtgtgtctgatggaaatttcgaggtggtcccacaaaaatattttatgtagtgtgccttcaaagagaaccatttatttctcttcacttatcgtcccacaaagtcacatttggtggtggtcagccaagtcgcatctggtctagttttactcttgtcccaattttaaagagaaatgggaatgagtttgccctggtgagacccataccattgcaatgattatcttgagcacttaaagtccagtgttggctgttagtgtatttgatattctgcctgtctcctcatggttgaaatatgtctgaagaatagcagcataatctcttggctgtttatacttttttaaactttcctgtgttgtaaatattgtatacttttggtgattccagctatgtaacctctatgctctgtaaggtgattatttgtatatagcaacatggcccagtgatattatatagtttcccaatggagaggttattgagtaacctttgcattagtttaaacactaccagaagaatgctgagccaactataaacactcaattttgtatgttttccaaattgtacttattactgcttttgatactgtattacgtgccaatagtttcccaatcacatagcaggcaagagatattttgtactttttgatccactgtaatatttaataaaaaatgttactatctgttaaaaaaaaaaaaaaaaaa

SEQ ID NO: 255 - DNA, 2062 bp, Homo sapiens
ccacgcgtccgatcaattagatgccccgaaatctacagtcgctgaataaccaataaacagtaacctccatcaaatgctataccaatggaccagtgttagtagctgctccctgtattatgtgaacagtcttattctatgtacacagatgtaattaaaattgtaatcctaacaaacaaaagaaatgtagttcagcttttcaatgtttcatgtttgctgtgcttttctgaattttatgttgcattcaaagactgttgtcttgttcttgtggtgtttggattcttgtggtgtgtgcttttagacacagggtagaattagagacaatattggatgtacaattcctcaggagactacagtagtatattctattccttaccagtaataaggttcttcctaataataattaagagattgaaactccaaacaagtattcattatgaacagatacacatcaaaatcataataatattttcaaaacaaggaataatttctctaatggtttattatagaataccaatgtatagcttagaaataaaactttgaatatttcaagaatatagataagtctaatttttaaatgctgtatatatggctttcactcaatcatctctcagatgttgttattaactcgctctgtgttgttgcaaaactttttggtgcagattcgtttccaaaactattgctactttgtgtgctttaaacaaaataccttgggttgatgaaacatcaacccagtgctaggaatactgtgtatctatcattagctatatgggactatattgtagattgtggtttctcagtagagaagtgactgtagtgtgattctagataaatcatcattagcaattcattcagatggtcaataacttgaaatttatagctgtgataggagttcagaaattggcacatccctttaaaaataacaacagaaaatacaactcctgggaaaaaaggtgctgattctataagattatttatatatgtaagtgtttaaaaagattattttccagaaagtttgtgcagggtttaagttgctactattcaactacactatatataaataaaatatatacaatatatacattgstttcactgtatcacattaaagtacttgggcttcagaagtaagagccaaccaactgaaaacctgagatggagatatgttcaaagaatgagatacaattttttagttttcagtttaagtaactctcagcattacaaaagagtaagtatctcacaaataggaaataaaactaaaacgtagatttaaaaagaactgcacgggctttagggtaaatgctcatcttaaacctcactagagggaagtcttctcaagtttcaagcaagaccatttacttaatgtgaagttttggaaagttataaaggtgtatgttttagccatatgattttaattttaattttgcttcttttaggttcgttcttatttaaagcaatatgattgtgtgactccttgtagttacacttgtgtttcaatcagatcagattgttgtatttattccactattttgcatttaaatgataacataaaagatataaaaaatttaaaactgctatttttcttatagaagagaaaatgggtgttggtgattgtattttaattatttaagcgtctctgtttacctgcctaggaaaacattttatggcagtcttatgtgcaaagatcgtaaaaggacaaaaaatttaaactgcttataataatccaggagttgcattatagccagtagtaaaaataataataataataataaaaccatgtctatagctgtagatgggcttcacatctgtaaagcaatcaattgtatatttttgtgatgtgtaccatactgtgtgctccagcaaatgtccatttgtgtaaatgtatttattttatattgtatatattgttaaatgcaaaaaggagatatgattctgtaactccaatcagttcagatgtgtaactcaaattattatgcctttcaggatgatggtagagcaatattaaacaagcttccactttaaaaaaaaaaaaaaaaaaaaaaaaaaaaaaaaaaaaaaaaaaaaaaaa

SEQ ID NO: 256 - DNA, 1716 bp, Homo sapiens
ggcttttgcaaaaagctatttaggtgacactatagaaggtacgcctgcaggtaccggtccggaattcccgggtcgacccacgcgtccgctaagataagggctttcttaagctttcaggtgtatgtatcctctagatgtagacaataatgtcccatttctaagtcttttccttttgcttctccttaaattgattgtacttccaaatttgctgttatgtttttttcctaatactgtgatctatctgatctgcagacaagaaccttgtctctgttgaagagcatcaaggggagattatgtacacattgaaactgaagtgtggtgttactgacggaatgtgcagtaactcctcagatatctgttaaggcatttcccagatgtgatgccagccttcttacctgtactgaaagatgcttagcttagaaaaaaacaaaacagatgcaaaatcagataattttattttgtttcatgggttttcttatttacttttaaacaaggaaggaatattagaaaatcacacaaggcctcacatacatgttatttaaagaatgaattgggacggatgtcttagacttcactttcctaggctttttagcaaaacctaaagggtggtatccatattttgcgtgaattatgggtgtaagaccttgcccacttaggttttctatctctgtccttgatcttctttgccaaaatgtgagtatacagaaattttctgtatatttcaacttaagacatttttagcatctgtatagtttgtattcaatttgagaccttttctatgggaagctcagtaatttttattaaaagattgccattgctattcatgtaaaacatggaaaaaaattgtgtagtgaagccaacagtggacttaggatgggattgaatgttcagtatagtgatctcacttaggagaatttgcaggagaaagtgatagtttattgttttttcctcgcccatattcagttttgttctacttcctccccttccttccagatgataacatcacatctctacagtaagtgcctctgccagcccaacccaggagcgcaagttgtctttgccatctggtctatagtacagtgcgcggcgttaggccacaactcaaaagcattatcttttttagggttagtagaaattggtttatgtgatgggaggttggttgattgtcaaaatgtacagcacaggcttttaatttgggaagcccctggtggcatttcaaaaggggacctcttacaggttggtaaaaaggtattaagattcttactaatctgtgggttgtgccttgccagacaggtcctaaattgtatattttttggaaaagtttatatactctcttaggaatcattgtgaaaagatcaagaaatcaggatggccatttatttaatatccatttcatttcatgttagtgggactatttaacttgtcaccaagcaggactctatttcaaacaaaatttaaaactgtttgtggcctatatgtgtttaatcctggttaaagataaagcttcataatgctgtttttattcaacacattaaccagctgtaaaacacagacctttatcaagagtaggcaaagattttcaggattcatatacagatagactataaagtcatgtaatttgaaaagcagtgtttcattatgaaagagctctcaagttgcttgtaaagctaatctaattaaaaagatgtataaatgttgttgaaaaaaaaaaaaaaa

SEQ ID NO: 257 - DNA, 788 bp, Homo sapiens
ccacgcgttcggaaggcctgccctcagagtgcagatccgtcacagactaaggagatggcaggcattgacagcttcactccatgaaggccatctctgtttctctcctccgcttaaccaagctgttgtggtttttcagcatagtgttgtatgttccattgctagctgtcctgctgtttaacacagtgttgtattttttttctaaatgtacataattagaaaagaaaataacaataggaagctatgtgtatcttctgtgtaaagcagtggcttcactggaaaaatggtgtggctagcatttccctttgagtcatgatgacagatggtgtgaaaaccatctaagtttgcttttgaccatcacctcccagtagcaatttgctttcataatccatttagcaatccaggcctctgttgaaaagataatatgagggagaagggaacacatttccttctgaacttacttccctaagtcactttccttatgtatcatctaatacaatgatggttgagtgaaaatacagaagggtgtttgagtattcagatttcataaaacacttccttggaatatagctgcattaacttggaaagaagcctgttgggccagaagacagaaactccaactggcaaaaaagcaagcatctaagaaaaaaaaccaccaaagttcttgaatttactatatttaaatgcattggttaagtttattttgctaaataaagtgaactgctttttgctctaaaatgatattctaaataaaaccttaactttttgttgaaaaaaaaaaaaaaaaaaaa

SEQ ID NO: 258 - DNA, 1611 bp, Homo sapiens
tcgacccacgcgtccgatacaacagttatcatatggcaagttgatccggatacacacctgctaaaactgcttaaaacattagaaggacatgcttatggcgtttcttatattgcatggagtccagatgacaactatcttgttgcttgtggcccagatgactgctctgagctttggctttggaatgtacaaacaggagaactaaggacaaaaatgagccagtctcatgaagacagtttgacaagtgtggcttggaatccagatgggaagcgctttgtgactggaggtcagcgtgggcagttctatcagtgtgacttagatggtaatctccttgactcctgggaaggggtaagagtgcaatgcctttggtgcttgagtgatggaaagactgttctggcatcagatacacaccagcgaattcggggctataacttcgaggaccttacagataggaacatagtacaagaagatcatcctattatgtcttttactatttcaaaaaatggccgattagctttgttaaatgtagcaactcagggagttcatttatgggacttgcaagacagagttttagtaagaaagtatcaaggtgttacacaagggttttatacaattcattcatgttttggaggccataatgaagacttcatcgctagtggcaggaagatcacaaggtttacatctggcacaaacgtagtgaactgccaattgcggagctgacagggcacacacgtacagtaaactgtgtgagctggaacccacagattccatccatgatggccagcgcctcagatgatggcactgttagaatatggggaccagcaccttttatagaccaccagaatattgaagaggaatgcagtagcatggatagttgatggtgaatttggagcagacgacttctgtttaacttaaaattagtcgtattttaatggcttgggatttggtgcaaacaaacatgattgatagctggacagacatgctcgtcatgaaaaaaaaaccatttctgaagcccgattggggcccaaacatttacaccttgcttcatagtaaccagttgagatgaagcacgtcgttagaacgttgttggacaccatgttgaattattcccccatcggttgtgaagaactgtgctacattcaggcttacccattgaactcagtatatatatttttttccttcctgtcttttgtctggcaggataccattcttgttgctcttctgtgtaatgaagtttaaatgcttgtttggaaaactttatttaacagtttagaaggcttgatagaaagagtgcattagtctgaagagtatacattggataggaaagaatttccttcttttgtttctccaaatctttccgccttatttagcttgagatctttgcagcttggttcatggattctagccttgcccgttgcgcagtatatactgatccagatgataaaccagtgaactatgtcaaaagcactctcaatattacatttgacaaaaagttttgtacttttcacatagcttgttgccccgtaaaagggttaacagcacaattttttaaaaataaattaagaagtatttataggaaaaaaaaaaaaaaaaaaaaaaaaaaaaaaaaagggc

SEQ ID NO: 259 - DNA, 626 bp, Homo sapiens
ccacgcgtccgatagacgagttgaagattttgtttttcatatacaattcagccagtcctagctaaaacgcaatcactggaaatttaaccttaaattcatttaaaactgaaaaaggtcttttgaaatcaaactaatgcagaaactgctttacccaaaattctgatccatggccctcattagacgacccatcaggacaaataaagtttagcttgtgaacaagtcccagttttgtcaaaaatataatttggattgaagtgtcttttagaaactgacacatttgtgttattatctcatgaccaaaattctaaaatgaaagctacagtgtcttatttgtgtgcgtatgtggttaatgtgtttatgcatatgtatgtgtatatgttgtatgttgttatctacatggtaaaatctggcatcatcaacaaaaaatctattaagggattctatctagattggcttagataaataagcattcataaaaaatatgtactaattaacccaaatgccttttagttcatgtgacttaagtatatctttaataaacaaatcagttttaaaattgttggtaaaataaaaatacaaatgttctcagaaaaaaaaaaaaaaaaaaaaaaaaaaaaaaaaaaaaa

SEQ ID NO: 260 - DNA, 1146 bp, Homo sapiens
  misc_feature (297)..(297): n equals a,t,g, or c
  misc_feature (489)..(489): n equals a,t,g, or c
ggtcttgatcttgttaccgaaatgcattctgtgtaatttcaacgtagactacgttcctgagtctgatgatgtcattgtaaataatcattcctcatgttgctctcacgggtttgacattggaggatagatgtgccatcaactttaaatagagtttccatcttttgtcagctctgcatgtcatacagcaagatggaacacaggttgcaagaaagaaccaacgttattcctgacattctattgatgtgttttgagcagcaatgtgtaaccaggtgtttctgcttctaatcttgattctgnctgatgaccatttttatactttatggcaaagcctcattgcctcagtttcctgtctggaaaatgagttcatcatctacctcttgggcaattgagagttttcattttgtgtcttttaaacatctggaaaatggaaaacactgagggctaaggataatgatattgttaatgtaatttgtcatcagaccggcctcntgctcactatttctttttttttagatgctgtttttttagaatattaaattaaaggagtgctgttaatatgtaatcttcaactagttccatggaggaaagtgatgttttatgaattagagcttaaattcctatctaatttctgaagactgcattcttttcaaagacttgaaattaaactcaggaggatacattttgtttgttctagggggaaacgtaatagaatggtatgagatgaattctatccttttacaataattattactataatattgaagtmttctatgcctttctgaaacactttattcagaaaagatcattttttggcttccttttaaaaataagcttgaagtagggaagcatttgcttcttagattttaaatgtagtcttattatgctgaggaaaatctttagttgaaaggataattcattacagatttttgatgaagggaagaaattaattatgttgctggaagactgtctacaaataatcaaaatatttaaatgtaatgtattcaagttgttattaaaaagttactgaatgttatctgaagatgtgaaatgtgtagtcaagtaaaaagttggcgtatactttcttgggctgcatatccaatttaattaaaaaattaaatctcaaaaaaaaaaaaaaagggcggccgc

SEQ ID NO: 261 - DNA, 2967 bp, Homo sapiens
ggggactcagtggagcagcggggagttgtgtccaccttgccgacgtcgctagccgtggggctgtcctgggaaggcggacggcgagcgcccggtgtccgcactcggccgcctgccgtgcccgtctgcgcccgtgtcatcctcactcgggacgcagggaccgtttttaaatcacaggggcgtgtgtcagcctgccctaggacttcatgtctatatatttccccattcactgccccgactatctgagatcggccaagatgactgaggtgatgatgaacacccagcccatggaggagatcggcctcagcccccgcaaggatggcctttcctaccagatcttcccagacccgtcarattttraccgctgctgcaaactgaaggaccgtctgccctccatagtggtggaacccacagaaggggaggtggagagcggggagctccggtggccccctgaggagttcctggtccaggaggatgagcargataactgcgaagagacagcgaaagaaaataaagagcagtagagtccctgtggactcccatgggtcataccagccagcatctgttcctgaactgtgtttttcccatcatgacggaagaagagagtgagccgcaattgttctgaaaatgtcaaacgaggcttctgttttgcacctgcagatcaccgagttggttttcttttcttttcttgcctttttttttttttgaaatttgccgagcagtggagccctctgacaatttgcaaggccctctgagaaaggaagctgcttagagccagggggttagtgggtgaggggagcgagtgctgtttttgagatcattatctgaactcaggcagcctagtagaggcagtggtgggattccaatgggtcttggtgggtgggaggtggggcatgtgcaaagcaagcaaggaacatttggggtaagaaaacaaacatgaggcaaaagaaaaaatacatgtttttaagaaaacattgagcagagaactgcagccaggatgcgctcagcagacattcactctggctgctgggacatcagaaaacaaagtcttcatctctctctccagtttcacccaccccaccctttgctttcatttcaggtgtgttggtctatatgacagggaggagagtaaaggagagcaggagcaattggctgcctgcaaagccagctggaggtgaagtgcaggaaaggaaaggtcaccccattctactccatggcctctctgctcccagctgtggtaggctcacatagccagtgtgatcggtttttaagaggcagtgcttttcagcttttctccctgatatatccattttgcttcccagcactttttaggagtagtgagagcacttcctgcccttgttggaagccccagggtggacactcagcacgaaggtctctcccttaactgctgcccttccaagacttgctcccgagatggagtgggcgtggtcttccaggctggcccttccttctcctcaccgccaccttccctgccccagccccagcagccatgggtacatgggtccccagctcacctatggattcccgccagtctgcccagctgcagtactcacgccccatgggggatcttggtctgtttttcttgtgggagcctagtggagagcagacgtggctttttatgtgtcttgttggggaggtgacttgcatggtggggacaaggctgtcgtggcaaccttgggatcgagtttgagactaaaggatgtcatgagatccctggcttctccccatgttgttcccggacaagggcagaagggaggcatggcaagggacctctgctgtccttactcaacagtggtcctcatccctccccacctcccactgcttcctgcaagggcaccagttgtatgagaaagttggcctttggacttaggatttcttattgtagctaagagccatctgaagcagcaggttgcaggacaaatgcttcagtccgccgagagcagtaccgtgtggccaagaggtggactcagagccttccttgagctaaactcggccaaccaaggcacgcagcatgtcccctcaggtctccagtcagtccaggttgaccctcagttctggacgtgtgtatatagctgtatttaatacctcaaggtcattgtggctctggggatgccggggcaggaggacgagggtgcgctgtggacacagcagtccgcggaattccgttctgggaagccaatggtcgccggcaccccttgcttcctccctctgttgtctgcctgtgtgacacacatcaatggcaataacttcttccaactcctcgcagaagtgggagaggccggcagcctgcaccgagaggggctttcctctctcttgctccccgcttcgttctgttttggctgcagagagtggttcatccatactctcattccctcgcctccccttgtggacgggggtcttgccttttcaattcctgtgttttggtgtcttcccttatctgctaccctgaatcacctgtcctggtcttgctgtgtgatgggaacatgcttgtaaactgcgtaacaaatctactttgtgtatgtgtctgtttatgggggtggtttattatttttgctggtccctagaccactttgtatgaccgtttgcagtctgagcaggccaggggctgacagctaatgtcaggaccctcagcggtggagcctgctggggggacccagctgctcttggacaagtggctgagctcctatctggcctcctctttttttttttttcaagtaatttgtgtgtatttctaactgattgtattgaaaaaattcctagtatttcagtaaaaatgcctgttgtgagatgaacctcctgtaacttctatctgttcttttttgaggctcagggagaaactagcatttttttttttccaaactactttttgtcactgtgacagttgtaaataaagtttgaaaatgctttccaaaaaaaaaaaaaaaaaaaaaaaaaaaaaaaaaaaaaaaa

SEQ ID NO: 262 - DNA, 752 bp, Homo sapiens
ccgcttaatacagtatcctttcgatagcatctaaattggtgttttgttttgttttgttttcaactgttattagtaggcaaagccttctttcaaaataaaatcgacatgaagcctgtgggatttagcagactgaggcaaagcttccctggttgctttggaatgggaggcctggacctgctggctctttgccctcctgacacatcatcccttgtttccacagcacactcagcattggaagcacactgcagacggtgtctcattaaagcagtagctcccttgaacccacaagttaaaacgccagacttttatttatttgtttattttttctgagttcttattggcagacttcagaatgaggtacctgaggaaatatagaaacctctgccttaaggttgattttactaaatgctctattttctggtgcagttattgactgtcttatctcttttgtcaggaatgtcttttttaattagaagacaggaagaaaacaaaaaccagactgtgtcccacaatcagaaacctccgttgtggcagaggggccttcaccgccaccagggtgtcccgccagacagggagagactccagccttctgaggccatcctgaggagttcctgtttgggggtgtgagggaaaatcagcgcggattttaaaaagatggctgtggcctgcccggcgtggtgggaggggagctggtttcctggtgaactttctaaaaggaaaaataattttaagtaaagaaaaaaaaaaaaaaa

SEQ ID NO: 263 - DNA, 640 bp, Homo sapiens
ccacgcgtccggttacaatttgggtcagaaacggagagatctgtgttaatttttgcagaacttactgatttttgttcttttattgctcttgtcattaggatgaaaaccaaaaaagtatcttcagaggaaaaaaatcaccttttaatattgctagttagaaaatgtcatgaacagtgtatcttagaaatataatattctacttatttacacatgtcaaaatttgtgtctcttccagtgttccttgcctgtatctccccttggttcaatagctaccagatttttggaagaggaggaactgaggtctcatcacattctagagcgcttggatgcccatattgaagaactaaaaagagagagtgaaaagacagtgagacaattcacagccttaaagtagcctcttaaaaaaatcacaatcttggaaataaaaataaacaccaaagagttactgtcatctgaagtagcagctctttaaaaacatgaagagataaaattataaaaatgatacatctaaagcagtggtgaagaaagctgaaaaactgatacttttgataggcattttctctgcactggtttgtttaaaggacttcttccagcaataagttgaaagaataaaccactttgctagaaaaaaaaaaaaaaa

SEQ ID NO: 264 - DNA, 1733 bp, Homo sapiens
  misc_feature (1730)..(1730): n equals a,t,g, or c
cccacgcgtccgccaggccttgagacccagaagggagcgaaggtttttgctgcgccaacgcagtgaccgaagctccgctcacgcccggcctgatcctgcctgaagatggtgccactggtggctgtggtatcagggccccgtgcccagctctttgcctgcctgctcaggctgggcactcagcaggtcggcccccttcagctgcacaccggggccagccatgcggccaggaaccattatgaggtgctggtgctgggtgggggcagtggcggaatcaccatggctgcccgcatgaagaggaaagtgggtgcagagaatgtggccattgttgagcccagtgagagacatttctaccagccaatctggacactggtgggtgctggtgccaaacaattgtcctcatctggtcgtcccacggcaagtgtgattccatctggtgtagaatggatcaaagctagagtgactgagttgaacccagacaagaactgcattcacacagatgacgacgagaagatctcctaccgatatcttattattgctctcggaatccagctggactatgagaagattaaaggcctacctgaaggtttcgctcatcccaaaatagggtcgaattattcagttaagactgtagagaagacatggaaagctctgcaggacttcaaagagggcaatgccatcttcaccttcccaaatactccagtgaagtgtgctggagcccctcagaagatcatgtacttatcagaagcctacttcaggaagacagggaagcgatccaaggccaatatcattttcaacacttctcttggagccattttcggggttaagaagtatgcagatgccctgcaggagatcatccaggagcggaacctcactgttaactacaagaaaaacctcattgaagtccgagccgataaacaagaggctgtatttgagaacctggacaaaccaggagagacccaagtgatttcatatgaaatgcttcatgtcacacctccaatgagcccaccagatgtcctcaagaccagtcctgtggctgatgctgctggttgggtggatgtggataaagaaactctgcaacacaggaggtacccaaatgtgtttgggattggggactgcaccaaccttcctacgtcaaagaccgctgctgcagtagctgcccagtcaggaatacttgataggacaatttctgtaattatgaagaatcaaacaccaacaaagaagtatgatggctacacatcatgtccactggtgaccggctacaaccgtgtgattcttgctgagtttgactacaaagcagagccgctagaaaccttcccctttgatcaaagcaaagagcgcctttccatgtatctcatgaaagctgacctgatgcctttcctgtattggaatatgatgctaaggggttactggggaggaccagcgtttctgcgcaagttgtttcatctaggtatgagttaaggatggctcagcacttgctcatcttggatggcttctgggccaaaactgcagtcactgaatgaccaagagcagcacgaaggacttggaacctatccttgtaaagagttccttgatgggtaatggtgaccaaatgcctcccttttcagtacctttgaacagcaaccatgtgggctactcatgatgggcttgattctttgggaataataaaatgaaataatacttttattttctgaataaaagtttgtcactgaaaaaaaaacctccgggggggnccg

SEQ ID NO: 265 - DNA, 1733 bp, Homo sapiens; identical to SEQ ID NO: 264
  misc_feature (1730)..(1730): n equals a,t,g, or c

SEQ ID NO: 266 - DNA, 1733 bp, Homo sapiens; identical to SEQ ID NO: 264
  misc_feature (1730)..(1730): n equals a,t,g, or c

SEQ ID NO: 267 - DNA, 1735 bp, Homo sapiens
cccacgcgtccgccaggccttgagacccagaagggagcgaaggtttttgctgcgccaacgcagtgaccgaaggctccgctcacgcccggcctgatcctgcctgaagatggtgccactggtggctgtggtatcagggccccgtgcccagctctttgcctgcctgctcaggctgggcactcagcaggtcggcccccttcagctgcacaccggggccagccatgcggccaggaaccattatgaggtgctggtgctgggtgggggcagtggcggaatcaccatggctgcccgcatgaagaggaaagtgggtgcagagaatgtggccattgttgagcccagtgagagacatttctaccagccaatctggacactggtgggtgctggtgccaaacaattgtcctcatctggtcgtcccacggcaagtgtgattccatctggtgtagaatggatcaaagctagagtgactgagttgaacccagacaagaactgcattcacacagatgacgacgagaagatctcctaccgatatcttattattgctctcggaatccagctggactatgagaagattaaaggcctacctgaaggtttcgctcatcccaaaatagggtcgaattattcagttaagactgtagagaagacatggaaagctctgcaggacttcaaagagggcaatgccatcttcaccttcccaaatactccagtgaagtgtgctggagcccctcagaagatcatgtacttatcagaagcctacttcaggaagacagggaagcgatccaaggccaatatcattttcaacacttctcttggagccattttcggggttaagaagtatgcagatgccctgcaggagatcatccaggagcggaacctcactgttaactacaagaaaaacctcattgaagtccgagccgataaacaagaggctgtatttgagaacctggacaaaccaggagagacccaagtgatttcatatgaaatgcttcatgtcacacctccaatgagcccaccagatgtcctcaagaccagtcctgtggctgatgctgctggttgggtggatgtggataaagaaactctgcaacacaggaggtacccaaatgtgtttgggattggggactgcaccaaccttcctacgtcaaagaccgctgctgcagtagctgcccagtcaggaatacttgataggacaatttctgtaattatgaagaatcaaacaccaacaaagaagtatgatggctacacatcatgtccactggtgaccggctacaaccgtgtgattcttgctgagtttgactacaaagcagagccgctagaaaccttcccctttgatcaaagcaaagagcgcctttccatgtatctcatgaaagctgacctgatgcctttcctgtattggaatatgatgctaaggggttactggggaggaccagcgtttctgcgcaagttgtttcatctaggtatgagttaaggatggctcagcacttgctcatcttggatggcttctgggccaaaactgcagtcactgaatgaccaagagcagcacgaaggacttggaacctatccttgtaaagagttccttgatgggtaatggtgaccaaatgcctcccttttcagtacctttgaacagcaaccatgtgggctactcatgatgggcttgattctttgggaataataaaatgaaataatacttttattttctgaataaaagtttgtcactgaaaaaaaaaaaaaaaaaaaactcgag

SEQ ID NO: 268 - DNA, 1301 bp, Homo sapiens
ggcacgagcccacggcaagtgtgattccatctggtgtagaatggatcaaagctagagtgactgagttgaacccagacaagaactgcattcacacagatgacgacgagaagatctcctaccgatatcttattattgctctcggaatccagctggactatgagaagattaaaggcctacctgaaggtttcgctcatcccaaaatagggtcgaattattcagttaagactgtagagaagacatggaaagctctgcaggacttcaaagagggcaatgccatcttcaccttcccaaatactccagtgaagtgtgctggagcccctcagaagatcatgtacttatcagaagcctacttcaggaagacagggaagcgatccaaggccaatatcattttcaacacttctcttggagccattttcggggttaagaagtatgcagatgccctgcaggagatcatccaggagcggaacctcactgttaactacaagaaaaacctcactgaagtccgagccgataaacaagaggctgtatttgagaacctggacaaaccaggagagacccaagtgatttcatatgaaatgcttcatgtcacacctccaatgagcccaccagatgtcctcaagaccagtcctgtggctgatgctgctggttgggtggatgtggataaagaaactctgcaacacaggaggtacccaaatgtgtttgggattggggactgcaccaaccttcctacgtcaaagaccgctgctgcagtagctgcccagtcaggaatacttgataggacaatttctgtaattatgaagaatcaaacaccaacaaagaagtatgatggctacacatcatgtccactggtgaccggctacaaccgtgtgattcttgctgagtttgactacaaagcagagccgctagaaaccttcccctttgatcaaagcaaagagcgcctttccatgtatctcatgaaagctgacctgatgcctttcctgtattggaatatgatgctaaggggttactggggaggaccagcgtttctgcgcaagttgtttcatctaggtatgagttaaggatggctcagcacttgctcatcttggatggcttctgggccaaaactgcagtcactgaatgaccaagagcagcacgaaggacttggaacctatccttgtaaagagttccttgatgggtaatggtgaccaaatgcctcccttttcagtacctttgaacagcaaccatgtgggctactcatgatgggcttgattctttgggaataataaaatgaaataatacttttattttctgaaaaaaaaaaa

SEQ ID NO: 269 - DNA, 443 bp, Homo sapiens
ggcacgagagcgcccatcctgcagctcaactgggagcatcattctcctgctttgtacatagggtgtggtcccctggcacgtggccaccatcatgtctaggcctatgctaggaggcaaatggccaggctctgcctgtgtttttctcaacactacttttctgatatgagggcagcacctgcctctgaatgggaaatcatgcaactactcagaatgtgtcctcctcatctaatgctcatctgtttaatggtgatgcctcgcgtacaggatctggttacctgtgcagttgtgaatacccagaggttgggcagatcagtgtctctagtcctacccagttttaaagttcatggtaagatttgacctcatctcccgcaaataaatgtattggtgatttgaaaaaaaaaaaaaaaaaaaaaaaaaaaaaaaaaaaaaaaaaaaaaaaaaaa

SEQ ID NO: 270 - DNA, 1190 bp, Homo sapiens
ggcacgagaacagatggaccattgacaatccatatatttagaaatgatcaaacctaatgttttccttttttaagatgaaagtaaacataaatagagatggtatttttttctgcaattctctttttatacatcttatatctctttgcagattacagttctatatttgacttcccataacatgtcacaggacatgtgctttaaatcccccacaagttgttctcttgtggatatagtctaggtcttctgggttgtcccaaaatatgatgtgcacagacacaaacatattctgtatattggttttggattaacacagaatgcagtgggatttccttcctattatcattatatttcccttaatgcagtccaagatatgtattagtgtctaaagaagtataccacatccttaggtcttttaaaaagtatcatctgcctcttgggactctgggctatctttactaatccatctcaagtattattttggtctctcctttccactaaaactaaatatcctccactctgctgtcctaccaaattaatgtatggccattggcagtaaactcctttatacttagtgctttctcaattttaaaatgtttgaatattacactgatgcagaagttatttcataagcatagctttttcttgtgtggggtggaaagggaagaggattaaatcactgcctcacttgagcacatacatagctggaaaatgtgtggaaagtttcttgatgttgagaaaaaaagacagtgtcttgttaatcaataaattccgtttatttttcttttactatgtcctttactatatcataactgtagccttgctatatcctgaactcctcacaaaggccttctctgagccaactaaattaatgataaagaattgtaattcttggctgggtgctgtagttcacgcctgtaatcccagcactttgggtcactgaggtgggcagatcacctgaggtcaggagttcaagaccagcctggccaacatggcgaaaccccatctctactaaaagtacaaacattagctgggcatggtggcatgcacttgtagtcccagctactcgggaggctaaggcaggagaatgacttgaaccctggaggcggaggttgcagtgagccaagattgcaccactgcactccagcctgggcaacagagcgagactccatctcaaaaaaaaaaaaaaaaaa

SEQ ID NO: 271 - DNA, 1204 bp, Homo sapiens
ggcacgagcccacgccaaacctctgggctggccaggctcactccagccccacagtcattgccaggactgcctttgaccttacacagaggaaacatcttccacctgtcgggagggagccgggggcggggatttccatggcaaaatttactgttctctggtgatagagttctttcagttttgctacatggtcttgtggcaaaggactgggtgcaggtgcagccttggttatttctggaaacacttctccttttcttttattttgccaggtctggctcatcagtcaccttcctctcagaaaggtgattttggctcctctgcccagaccatcaaacatttctggaggtgtcacaagcttccgtgaggttctggtctctgcgaattgcaggaagaatccaaacataggaaaggggtgatgtgtatcagggtgtccatcctcagctttgctccacaaagaccctcacacttgcacattgttttgttaacagtattatctctgagtagtgggtttattgtttttgcttacctgttttaaacacttcttcaacaaacttgctttactttccattttttaaaagtgtatttcaattttttattaataatgccattttactcctgcaaaatttctcactccttcaaagtctgtgtatggcaaagatcttcctaaccatcattcaagttagagcaactccatttctgtatcaaaaagaaatacctttagttattgtctgaacttgtcagaatttctgagaacgatgccagaaattctgtaattgttttgtcacattaattgaacaatgagagggcaccagcattcctcactcatgaggtagaagcaccacatctacatttctttttagctatgggtgatgtttttgcttttaaatcttagaaatctgttaataaacaaataacacaacaaagtttggggtacttccttgtggggactgggatgcttaagctaaaacaaagtttaaatttggactgtgtgtgttatgtttcgcagaatctatatgtttctcaaaagtgggtgtcaccctccttcctcccccaacacacccttcaggggtaagaggagaagtaatgtagaaaaattaactgtttctccactgtaaaagtagggtgtctttagaatgtttcatgttcaaaggaaagattgtgcttctcccaaggcaaggtgttcccttaaaaaaaaaaaaaaaaaaaa

SEQ ID NO: 272 - DNA, 2641 bp, Homo sapiens
gccttctccaaaattggcatctcttatagatggttcatctcctgttagtattttggtctggaccacacaaccttggacgattccagccaatgaagctgtttgctatatgcctgaatcaaagtatgctgttgtgaaatgttctaagtctggagacctctacgtactggcggcagataaagtagcatctgttgcttctactttggaaacaacatttgagactatttcaacactttcaggtgtagatttggaaaatggtacttgcagtcatccattaattcctgataaagcctctcctcttttacctgcaaatcatgtgaccatggcaaaaggaacgggattggttcacacagccccagctcatggtatggaagactacggtgtagcgtctcagcacaacctgcccatggattgtctagtggacgaagatggagttttcacagatgttgcaggtcctgaacttcaaaacaaggctgtccttgaagagggaactgatgtggttataaagatgcttcagactgcaaagaatttgttgaaagaggagaaattggtgcatagctatccgtatgactggaggaccaagaaacctgtggttattcgtgccagcaagcagtggtttataaacatcacggatcttaagactgcagccaaggaattgttaaaaaaggtgaaatttattcctggatcagcactgaatggcatggttgaaatgatggacaggcggccatattggtgtatatcaaggcaaagagtttggggtgttccaattcctgtgtttcatcataagaccaaggatgaatacttgatcaacagccaaaccactgagcatattgttaaactagtggaacaacacggcagtgatatctggtggactcttccccctgaacaacttcttccaaaagaagtcttatctgaggttggtggccctgatgccttggaatatgtgccaggtcaggatattttggacatctggtttgatagcggaacttcatggtcttatgttcttccaggtcctgaccaaagagcagatttgtacttggaaggaaaagaccagctcgggggttggtttcagtcatccttattaacaagtgtggcagcaaggaagagagcaccttataagacagtgattgttcatggatttacccttggagaaaagggagaaaagatgtccaagtctcttgggaatgtcattcatcctgatgttgtcgttaatggaggacaagatcaaagcaaagagcctccgtatggtgctgatgtccttcgctggtgggtagctgattccaatgtcttcaccgaagttgcaattggcccatccgtgctcaatgctgccagagatgatattagcaagcttaggaatacacttcgctttcttttgggaaatgtggctgatttcaacccagaaacagattccatccctgtaaacgatatgtatgtcatagaccagtacatgctacacttactgcaggatttggcaaacaagattaccgaattatacaaacaatatgattttggaaaagttgttcggctgttacggacgttttataccagagagctctctaacttttatttcagtataatcaaagataggctctattgtgaaaaggaaaatgaccccaaacgacgctcttgtcagactgcattagttgaaattttggatgtaatagttcgttcttttgctcccattcttcctcacctggctgaagaggtgttccagcacataccttatattaaagagcccaagagtgttttccgtactgggtggattagtactagttctatctggaaaaagcccgggttggaagaagctgtggagagtgcgtgtgcaatgcgagactcatttcttggaagcatccctggcaaaaatgcagctgagtacaaggttatcactgtgatagaacctggactgctttttgagataatagagatgctgcagtctgaagagacttccagcacctctcagttgaatgaattaatgatggcttctgagtcaactttactggctcaggaaccacgagagatgactgcagatgtaatcgagcttaaagggaaattcctcatcaacttagaaggtggtgatattcgtgaagagtcttcctataaagtaattgtcatgccgactacgaaagaaaaatgcccccgttgttggaagtatacagcggagtcttcagatacactgtgtcctcgatgtgcagaagttgtcagtggaaaatagtattaacagctcactcgagcaagaaccctcctgacagtactggctagaagtttggatggattatttacaatataggaaagaaagccaagatttaggtaatgagtggatgagtaaatggtggaggatgggagtcaaaatcagaattatagaagaagtatttcctgtaactatagaaagaattatgtatatatacatgcagaaatatatatgtgtgtgtgtatctgtggatggatatatgtatatctcttcctatatatatccatagtggacttattcagaacatagatatgtattcagcttgtcttcaaatacggccaagcagaaaatgttttatattttataaatcatcttttgactctgtatttaaattctatgatactgaaaataaaggcattctggaaaaatactgaaaaaaaaaaaaaaaaaaaaaaa

SEQ ID NO: 273 - DNA, 2836 bp, Homo sapiens
  misc_feature (152)..(153): n equals a,t,g, or c
aattcggcacagccgcggcagacggcgaggacggacaggacccgcacagcaagcacctgtacacggccgacatgttcacgcacgggatccagagcgccggcacttcgtcatgttcttcgcgccctggtgtggacactgccagcggtgcagcnnacttgggaatgacctgggagacaaatacaacagcatggaagatgccaaagtctatgtggctaaagtggactgcacggcccactccgacgtgtgctccgcccagggggtgcgaggataccccaccttaaagcttttcaagccaggccaagaagctgtgaagtaccagggtcctcgggacttccagacactggaaaactggatgctgcagacactgaacgaggagccagtgacaccagagccggaagtggaaccgcccagtgcccccgagctcaagcaagggctgtatgagctctcagcaagcaactttgagctgcacgttgcacaaggcgaccactttatcaagttcttcgctccgtggtgtggtcactgcaaagccctggctccaacctgggagcagctggctctgggccttgaacattccgaaactgtcaagattggcaaggttgattgtacacagcactatgaactctgctccggaaaccaggttcgtggctatcccactcttctctggttccgagatgggaaaaaggtggatcagtacaagggaaagcgggatttggagtcactgagggagtacgtggagtcgcagctgcagcgcacagagactggagcgacggagaccgtcacgccctcagaggccccggtgctggcagctgagcccgaggctgacaagggcactgtgttggcactcactgaaaataacttcgatgacaccattgcagaaggaataaccttcatcaagttttatgctccatggtgtggtcattgtaagactctggctcctacttgggaggaactctctaaaaaggaattccctggtctggcgggggtcaagatcgccgaagtagactgcactgctgaacggaatatctgcagcaagtattcggtacgaggctaccccacgttattgcttttccgaggagggaagaaagtcagtgagcacagtggaggcagagaccttgactcgttacaccgctttgtcctgagccaagcgaaagacgaactttaggaacacagttggaggtcacctctcctgcccagctcccgcaccctgcgtttaggagttcagtcccacagaggccactgggttcccagtggtggctgttcagaaagcagaacatactaagcgtgaggtatcttctttgtgtgtgtgttttccaagccaacacactctacagattctttattaagttaagtttctctaagtaaatgtgtaactcatggtcactgtgtaaacattttcagtggcgatatatcccctttgaccttctcttgatgaaatttacatggtttcctttgagactaaaatagcgttgagggaaatgaaattgctggactatttgtggctcctgagttgagtgattttggtgaaagaaagcacatccaaagcatagtttacctgcccacgagttctggaaaggtggccttgtggcagtattgacgttcctctgatcttaaggtcacagttgactcaatactgtgttggtccgtagcatggagcagattgaaatgcaaaaacccacacctctggaagataccttcacggccgctgctggagcttctgttgctgtgaatacttctctcagtgtgagaggttagccgtgatgaaagcagcgttacttctgaccgtgcctgagtaagagaatgctgatgccataactttatgtgtcgatacttgtcaaatcagttactgttcaggggatccttctgtttctcacggggtgaaacatgtctttagttcctcatgttaacacgaagccagagcccacatgaactgttggatgtcttccttagaaagggtaggcatggaaaattccacgaggctcattctcagtatctcattaactcattgaaagattccagttgtatttgtcacctggggtgacaagaccagacaggctttcccaggcctgggtatccagggaggctctgcagccctgctgaagggccctaactagagttctagagtttctgattctgtttctcagtagtccttttagaggcttgctatacttggtctgcttcaaggaggtcgaccttctaatgtatgaagaatgggatgcatttgatctcaagaccaaagacagatgtcagtgggctgctctggccctggtgtgcacggctgtggcagctgttgatgccagtgtcctctaactcatgctgtccttgtgattaaacacctctatctcccttgggaataagcacatacaggcttaagctctaagataggtgtttgtccttttaccatcgagctacttcccataataaccactttgcatccaacactcttcacccacctcccatacgcaaggggatgtggatacttggcccaaagtaactggtggtaggaatcttagaaacaagaccacttatactgtctgtctgaggcagaagataacagcagcatctcgaccagcctctgccttaaaggaaatctttattaatcacgtatggttcacagataattctttttttaaaaaaacccaacctcctagagaagcacaactgtcaagagtcttgtacacacaacttcagctttgcatcacgagtcttgtattccaagaaaatcaaagtggtacaatttgtttgtttacactatgatactttctaaataaactctttttttttaaaaaaagtcgacgcggccgmgaatttagtagtagtagtagtagtagkmggccgc

SEQ ID NO: 274 - DNA, 2276 bp, Homo sapiens
aaaccaggtcaaagcttctttggcattcagttttccccagagaacaatttaatgctgatacttaattttttcaagatagacaagagtcgggccacaaaaagttaaaaagtaccatccagagaagcacagaaacaggcatggcagctgaaatgagaaagatggtaaggcagccgagccgagagtctactgatggcagcatcaacagttacagctctgagggcaatttaatatttcctggagtgcgactgggagctgacagtcaattcagtgattttcttgatggattgggaccagcccagcttgttggccgccaaacccttgccacccctgcaatgggtgatatacaaataggaatggaggacaaaaagggccaattagaagtggaagtcattagagcacgaagcctcacacaaaagcctggttccaaatctacacctgctccatatgtcaaagtatatcttttggaaaatggggcctgtatagccaagaagaagacaagaattgcacgaaaaacccttgatcctttgtatcagcagtctctggtttttgatgaaagtccacagggtaaagttcttcaggtgattgtctggggagactatggcagaatggaccacaaatgctttatgggtgtggctcagatcttgttggaagaactcgacctgtccagcatggtgatcggatggtacaaattgttcccaccgtcctcactggtggatcccacactcactcccctcacccggcgggcttcccagtcatctctggaaagttcaactgggcctccctgtattcgatcatagtgaactcataccagagtcattccaataaaactctacttttcaggataataatctgaaccagatatttcatgatcgaaagcattgttggagacagacaatcaacttgtgttttgcctgtagtagtttttcaataatatgtcccaattgttatttaaaacatggcttcatatgacagaacaaggcaatctatcaaatttacaggaagaatcaacatgctggtgagagtcactgatgcttctaacaaatagaaaaagaggaaactttaaatccacgcatacacgtacacacacacatgcacacacacacacaccaaattgaacaaactggaaactctcactctgtgaaaagttgtattctacacatttctgcacagaccacaagcagtgttatttccctgatgtttgagttgttttgttcttttgtgtgttttgtttatttgtgtgttgtttgttggttttcgtttcttgagtttttgttttgttttcaccacatctgttatttccactagtttttttttggctgtgtcatgacaggcctcatgatgctaacagagattcttcccttcttttttccaaaagcaccaaaaaaaagggctgaagtagtctctgtagcatctccccaaagtgttaaacagctacataaggtgaagccaaggaagggtttcactagctttcattttataattatttaaagtcttatgtgtggatacccaagagacaaaaagttatcttccaaaataaataatcacagaagtacttttttaatgaagagcctatctgtttgcattctagaaaattaatttatggtttccattgttttgcatggaagacttttaaagaagtcaatctgcaactaatgctggggactaaaactaactgcataattgtactttgaaaacactccttgtaatgcctttttcttcctgatattaaaaaaatgctcatgtgtataaaccatactttgacttcccaaaaatggtgactaggaatggatttgagcctaagacactttgagctatgcccaggcttctcagccatgcctcagtgtagacacatccatctgccctggaaagagcatggtatgagctgktcaatattccactggaaattccagttgaaatattctgcactaaactattgtttttattgaattttagtttacatttctttgagattgatgcaagcacaaagcttgattttttaatgcaaagtatcttactttttggggggaaaataaacaaaatgaactttcaatttgcattttcatttagtttctcttggccttgaatttcccttgtgacattctgtacatgtgctacaaactgcagtctctgcaggtgcattgatatgttctccctccttttatgagtcactccacttttgtgattacacaaatagagcagcatgacttggaactgttcagagctgcatgcacattttgtaaaaaaaaaaaaaaaaaaaaaaaaaaaaaaaaaaaatt

SEQ ID NO: 275 - DNA, 1607 bp, Homo sapiens
ggcacgagcggcacgaggaagcagccacgcctggaaacaattaaccagcgtatttctggctttgtggatggatggatgatggcacccatatggagctttggacctaaactttatgtggataagagttggctttttggtcttcaagacccctggcctgcgtactccagcagcaggagagcggatttacaacatctcagggaatggcagccctcttgctgacagcaaagagatcttcctcactgtgccagtgggcggcggagagagcctgcgattattggccagtgacttgcagaggcacagtattgcccagctggatccagaggccttgggaaacattaagaagctctccaaccgtctcgcccaaatctgcagcagcatacggacccacaaatgagacaccaaagttgacaggatggacttttaatgggcacttctgggaccctgaagagacttcttcccttcaggcttattgtttgagtgtgaagttccagagcaaggagccatgttcctctaagggaattcaggaattcagacgtgctagtcccacaccagttaggtagagctgtctgttcaccctcccatcccagctgatcccagtcactgcttgctggggccatgccatggaagcttcccatcagtctcccagctgaatcctccctgctctctgagctgctgccttttgcctcctgcaactcaacatcctcttcaccctgccctgcctgcagttgagggggcgaagaagaaccctgtgttctcaggaagactgcctccaccaccgctacccagagaacctctgcatctggcatttctgctctctatgcttgagaccgggaggtttaggctcagataagtgagctctgggccatgagagggtaggtccagaaggtggggggaactgtacagatcagcagagcaggacagttggcagcagtgacctcagtagggaacatgtccgtctaccctctcgcactcatgacacctccccctaccagccctcctcttcctcctcctcctcctcctgtggaggtggtcagtgggacttagggatctttcacctgctgtgcccagtagttctgaagtctgcttgtggagcagtgttttatgtttatccctgtttactgaagaccaaatactggtttggagacaacttccatgtcttgctcttctacctccctagttagtggaaatttggataagggaactgtagggcccagattctggaggttttatgtcattggccacagaataactgtctctaagctatccatggtccagtggtccctgccaagtctgtagacttcagagagcacttctctcttatggggttcatgggaacaggggcgggtgtgacttgcttggtggcctcattccatgtgtgcctgtgcctggggcatggactttgttaagcagagtcagcagtgaggtcctcattctccagccagcctctctgccctggagaatcatgtgctatgttctaagaatttgagaactagagtcctcatccccaggcttgaaggcacatggctttctcatgtagggctctctgtggtatttgttattattttgcaacaagaccattttagtaaaacaaaaaaaaaaaaaaaaaa

SEQ ID NO: 276 - DNA, 1064 bp, Homo sapiens
ggcacgaggaagagtcagccttcttcttttcctggcctaggtagtagagctcatatagaaaaagtgagacaatattggtacaaaactacattatttattgcttccactgaaatgtcaagaggcagcaggtgaggcatgaggatgggcagttctcagaagttttcctgaacctacaggtttatgttaatttttttatgtataatttgtcttccttgtttatgatctcatttctagtctgccatgtaaccccttctcaaactttaaaaggacctcccttgagctggagctaacgagaccatttcttgtctgcttacaattttaaaaaaaaagctatttgcaagtaatttttctcattatgatgctgttatcataaagtgagattccagtagccagggtgtcaagggatggtatatggacagtgcaactttgacttactttactctacttagtcaaattttaactattttctggttcctttcatttgaatataatagttaaaataatgcagaccattcacagttcatatgttctccctttgtttttctctgactccacatgcactgacatgtatagtttctgctgaatttattaatttggtccagtttattcctgctgttaactttgatttcttttcctcctcttatctaatatttttcactatgatcagtatgttccatgaaatatatatattccttatttttctctcctaaagtataaacaaattgtcattgggaaaggagaacacttttctctgactcacataatgtagtagtaatcattcatattttacttatttgtggctgcataattgtaataggaagagtgtgtggccagggtgagcgaagccagaaaatatgttgctttggtagtttttccacattgctctcaaattttcatatattttgcttatttactggsccgtgtgtgacagtagtcacacaaatagtacctattattgtctaacttggggatgccatggggaaaggtgtarattttcttggcactggattctgcaacacttgattaatcttaattctatggcaaaaaaaaaaaaaaaaaaaaaa

SEQ ID NO: 277 - DNA, 1738 bp, Homo sapiens
ggcacgaggaaggcttaaattaagtatgttgacaataccccaaactactggatgatatttgtaatgaatttcaccctatatcagtacagaagggtgtcacagttcagcaaaacaaaagagaatacgctttgttaaacctctactttctgaattttaggacagtgaggaaatttaacattttcaatttttttttcttttcttgactgaaaagaaagtcaagccagcaatatgtttctgagagagcagtgatgcatttcacaacactgttaactgtctgcttggctttttgaggcttccagagttcagaattgtcttctcttgaataggtcagtgcatttttttccttcagtttttctccttaagcagcaaaacagaccatttaacttccaaatatttacagcttgcaaacagataaacttcccaaatctgttttttttttatgaaaaggaaaacgatcagccacaataatctataatatgatatatttgaatcaaagttattagatgccctagggtcttttcatggcagattttatatatcaccaccattaataaatctgttatcagaattatgtctttctctctgctgatagttatttttagactaacatattcatacctccttctgatgaaaaacattaaaatttgaataaggcatattagaaaaccctaaagctctgtatttacacaaaggagactcataaatattggtttttcagggtgaagcattgtgtgttattccattttgtaccacagggaaagcctagtcacacatggggcctcattaaaagaggatctaaagaaatatttaatggttgaaatataaggtcttattctgaatatctaccttcactttataataatagaaactgaactgaaaagattcagtaagtgatttagaacatccactcattttaaaagtaatgtctaggcctaggaaagtgacatcatgttccaaatgttacaaatccagcgtttttccttgatgtctttataaatacattgtttacagtttttattctcctccatatatgatgccccttttctaagattatttcgtaggtatatcctttaatgagagaacctcataaataaacttcctgaatttgaaaacgagtgagaggagacttcaagtttgtggactgagctaaacatgtgtctactctcccttcaaacatcccatggaaatggcagtaaagacagaacaaagagaatacatttctgaatatactgaggaacatatactccagagagcagaaacaggaagaggggcctctgctaaagctgaaggagtcttcaggaggtaacccagctgggctctgtgttctggttggcagatacagagagtagccaaggtcaaaagcagacaaacagaaagtgaggtgattggccacaggtttggaaatggctcaggtttgctctttccaaccccttgcatgtcactgcacatttacctccagaagtaaagcaggagaactctgcaaagggaaccaacaatctgcatgggagggcattgcctccaagtgtgtgggctggcgaccaagtgcagccctctgccctagttatgggagttggagagggacttactggtttgcatgttccatgcaagagctaaagcaaagcacatctcggagaagtgagccaggaaagtggatcaatccatgccaacaacctatattaattaacctgataattaatatgtatataaagtgaaaaaaaagaaaaaaaaaaaaaaaaaa

SEQ ID NO: 278 - DNA, 1772 bp, Homo sapiens
aattctaaaataccaatgtatttttaggttgtagctaatgttgtattcactttcaattctcagttgtccacactggtgatataagaggaacaaatcagaatcattaaatactttgtaatgccatcataaactcatatattcatcctcaaactcccttgtttaatgctaattggtggcctggaacttcactgagatgcaaaatcaagaactgaagcctagttgctagataacaaaaagctataaatgtttatgtatgtgaattttaaattagaataaccgtcttaaactcctacttgccatttctaaggcaaagcattcattttaatattgtactttgccttttcattcagttagtggagtaagtcatgaaacccttaggaagaaaaacaagttatgacttattcactaaaattgatgcaagacagttggttctagatgaccatggccatgtgttcatcatataaaaccttcagttctctctatggtgcttggctggagattgacatgtgaggatgtgccaatcatattaaatggatttggtctatgtgggtgatatgtggcctgaatgtaactgtgatagactgaaatttgttcttagctctcaaaatccactgaagaagtcaagtgaaggtgggtaaaatagggagattagtgacaactttgtgccaaattttttaaaaaatggaagcaggtagccaatattagaatgataatttaagggtgtggttgaattttagttagttgtcacatagttattgaacctcatatgctcagtgctgtgggaatcaaacatggaagaggtatggctcctgcccctaatgagaacaagggggaaaaatccagatataatctaaatgctaggttatgtcagggtataggaacacagagaatgggggacctgtaagaactggaagagtcagagagggctccattgaagaggtcaaacataattccggaaagaattaggtagtgaggagattgtgccaggaaaataagtgggaaaggccacagttatgtttcctttgaatggaagagagacaaagctatcagctatagatcattgttttcttaagacagccaaactggccctttgaaaccattcaaattaccccagtttagctccctaccttttagtctccgtgaggaagacaagctgttgcattatcatattcctctgtgctgagcagctcaagactcagccacaatatgcaaattgctttaatgccatattacggcagttgatttagacatttgccagtgcaccaaaccatgagagattgtcccgacctaatgccacctggcagatgtgtacccagagatttttctgtagctccatgtttcccataaagggcattggaaatgcacagatgaagatcttcctttggaaccaggcacatttggccccttctcagtgactgcactgtgggaactcttcttaagaaaatattgaaaacagcttaatgctttcatatagtgaccgacatttagttgaaaactactgctgcatagcaaatattgtgactcttcatgtgtccacaggagctcttgtgtgggtttaaagctatgaagtgtattcacattgtgaagttttaattatctttattgaaattaattgtgtaaaaatggtatgtgctctattaggtattcagtttgtatgtgaattctatatagaaagtggtttttgttctttgagtttgttttatttcttgaagattacaataaatatctaagagactatattcctgaaaaaaaaaaaaaaaaaactcgagggg

SEQ ID NO: 279 - DNA, 2048 bp, Homo sapiens
ggcacgagtcaaaggccacgggaacaaagtcctgtgcatggactggtgcaaagataagaggaggatcgtgagctcgtcacaggatgggaaggtgatcgtgtgggattccttcaccacaaacaaggagcacgcggtcaccatgccctgcacgtgggtgatggcatgtgcttatgccccatcgggatgtgccattgcttgtggtggtttggataataagtgttctgtgtaccccttgacgtttgacaaaaatgaaaacatggctgccaaaaagaagtctgttgctatgcacaccaactacctgtcggcctgcagcttcaccaactctgacatgcagatcctgacagcgagcggcgatggcacatgtgccctgtgggacgtggagagcgggcagctgctgcagagcttccacggacatggggctgacgtcctctgcttggacctggccccctcagaaactggaaacaccttcgtgtctgggggatgtgacaagaaagccatggtgtgggacatgcgctccggccagtgcgtgcaggcctttgaaacacatgaatctgacatcaacagtgtccggtactaccccagtggagatgcctttgcttcagggtcagatgacgctacgtgtcgcctctatgacctgcgggcagatagggaggttgccatctattccaaagaaagcatcatatttggagcatccagcgtggacttctccctcagtggtcgcctgctgtttgctggatacaatgattacactatcaacgtctgggatgttctcaaagggtcccgggtctccatcctgtttggacatgaaaaccgcgttagcactctacgagtttcccccgatgggactgctttctgctctggatcatgggatcataccctcagagtctgggcctaatcatcttctgacagtgcactcatgtatacctgagaatttgaaatcttcacatgtaaatagatattacttctagaggagcttagagtttattgcagtgtagcttaggggagcaacccatggctcacaggtcactaagcgtctccaatatgactattaaaactgtcacctctggaaatacactagtgtgagccttcagcactgcgagaataccttcaagtacagtatttttcttttggaacactttttaaaatgtatctgtttttaaggttattctaaattatagtagcctcaactcattctgtcaccagtagaattcagcagttaatatattccatattatttctttgaatcaattcattttcagagcactttaaagtctgatatttctcgatgtgcactgtgatgcctggaaccttcctctggaagtgctgattttatggactgaggactggtgactggtctgtgatagaagcaaattccaattccaaatgtaattagacaaaaatcatttttttagaatgtgtttttattgtaaaagtatctttttcagcttcctgttctattgtcttttttcagatacaacatttttgtctatggtgaactgctgtaaatgacgcagagaaatgcctaaaaaggacaggtggtttgactcatggatgatgatgatgtcactgtgccacttggacagggcgttttctctgaattgaagggaaagccaatggtgtttgtaaacaaatgcttctgagagcaaagaaaagtcttctgtgtgggaacacaagatagtaaacttatttaaaaacctattagtagaattagtggaaacacttaggttaaagtgaatcttgtccatataaattatattcatggccgggcgcggtggctcacgcttgtaatcccagcactttgggaggccgaggcgggcggatcacgaggtcaggagttcgagaccacggtgaaaccctgtctctactaaaaaatacaaaaattagccgggcgtggtggcgggcgcctgtagtcccagctactcggagaggctgaggcaggagaatggcgtgaacccgggaggtggagcttgcagtgagccgaggtcgagccactgcagcctgggtgacaaagcgagactccgtctcaaaaaaaaaaaaaaaaaaaaaaa

SEQ ID NO: 280 - DNA, 799 bp, Homo sapiens
tgctggtggtgttctgcttgctcgcaggcctggtgctggccgtagtatcacagtgctgagcggcgcggcctacctgcaagtgggcaggcttttgtgcaagagtgctggttatgcaaggcttggggcgctttggcgctgatcacgccccgcgttattacttctacttctctgcaggcttgctcacctatggcgtcacagcctttatcgcattaaacgtgatcatcaagaagggcaaacacttcttggatcgctcgccggcgccggccactcagatgctgctgtacctgacggttggttattggtagtgatcgtactgttcacgattccaagttccaagaaagcgcgttacattctttcgattacgccggcgatttcattattggccgcgtatatcttcgtggatcgcagtcagcgctttgcaagtacccgcgacaagttgctgaagttctgcctcaacttacctatggtcggcctgggcatgttgttacttgcctttatctatggcctgtatgcagcgacgccgctgcggcctaactatcttggcgcgtgtgccgggttgatcagccttattgccattcgctcttgggtgacgtcgcggtttcatgcacatccacaccgggagttcgtactgttgtgttttggtgctgccgccttcctggtcctggatatgtttttcttcaattcgattacttaccacctggaattggccgatgagccgacacccaagtttctgccttattggttctggtaggcgcgttctatcgcagttttaactttcgtttggcgacccacaaggcac

SEQ ID NO: 281 - DNA, 1396 bp, Homo sapiens
cctattctttctccagacttgatggacaacatggttatatgtcttttagaaatgacgatgtaacagggttttgccagcagagtcggggtccccagctttatgagaactgtaatgttgctttctcgtggcagagcaatctcaaaagcttctgaaggaaggaaggaaaatgaagtaagcaggatgatttaggtctgcaaactgctgtggtccccgaccccaatctggttcagagaggatgtcctctatgacaactttgttccttccctccttttctgagaagaagggtggtgcaaaatgacagttccgaccttagcaatgaaaaagaaccaggatgctgccagctggtcactgacatgtgtttcttgtttgcattattaatttttctacaaattgaaaacactataccacattctagatgtcttgagcagtatgctgttagatatcccatctgagcagtattaaataacaaccagagtaaccaccacaccttttctcaacatgacagtagaacaaagtctacacacagaaaccatccatcatagggagacacatttatctgcaaagagctgctgtcccttgccctgggtgctttatatgcccagcacatacacacatacacacgtacgtacatacatacatatgtatgtacgtatggtagtgggggctagaaaaacatttgcagaaattagatataatcatattgtatcaatgaacttggaaagttagagcaaaacaatgctattatctcagattggggtttagaaaaaacacctgagcaaacagtatcaagcaagtgaggtgggggttggttattaaacagaattgtacaaatgtcagagtagggctctggttcacaaacaagcccaatctccttcccatttgctttgcttgattgattaagtgctcttagaccaagaagggagagccactttctccttagctgacactgcccctgccctatcttggattctgattatgagtctccgggcagctgatggcctgggaacagcagatgatgggaagatcgtctgtaggtaaatcctgtggagggagcctaggggctcacagttcatgtagcaccatgttctggtacaaacagctggtagggatctgttatcgtgctggcacacaaatggtgcttgataaacagttagtgaatgaatagcaatctaatcagaagcttttgtttcccatctattcttttttccctccttgtaaaaatttatttttaaaaaatcaaccttattgacagtaatttacacacattaaaaaggactcactcattttgagagttttgacaaatgtatacactcatgtgaccaccacagtcaggatatacaaatattttcctcaccctcaaaagttcccggaattcgatatcaagcttatcgatacc

SEQ ID NO: 282 - DNA, 2945 bp, Homo sapiens
ggaattccaactatggcctgctgcctgtttttggctggtgagctaagaatgatttttacatttttaaattattggaaatatcaacaccggaattatatttcatgatatgtgaaaattacatgaagttcaaatctcagtgtctagaaataaagttttattcgcacacagcctgctcatttgtttacctattgtgcatggccactttcacattacagtggcagagttgaacagctgctgcagagactagccacaaaactaataacgtttactgcttggcccttacagaactttgccgagccctcatttaaagtaatagatttaaacagtctccataagcagctgctggctttgaaggtaggtgcagccactagtgcttttcttggcagattcattgccaaggaacagtttgttaagtaattcccttgttttgtgtgccaggctccataaagaaagggttctcacgctcaaatatatgggcaatacctcatgctatgtatgtatatgtgatttatttctctctagggaacaaacctgtataattgcttaatgtagtctccttaaaaggtagaaaagggctctttggtcaaataattgtaggaaaaagattgacaatcacagtgctgagaaggcctccaatagagaagttggtttagttgttcctcgatctcccacctcctccttttgagctcagccttttagaaattaatcattgcctcctcttcttgcccctgagtggaagggatgaggcccatgggctttgtatccctaggaggagaaagagccagtaagtgaggagcttttaaagccctttctttgtgggaggggccacaaggggccaggtctcttagggctgagaaagccaaggccagcatttctcagagtgctgtcaggactgtctgcctcagaatcatctaagggaccagctaaaacagactctggggccatttcagactcactgggcagtagagctcaggaatctgcatgatgttgctgacgaaagcttaggttggatttcctcttggtgtcccctcccaagagcttgaagatcctgtctccttcctcctctgtcccaacctggcttggatatttgttgaatgaataataacacctgccacttatcagtgtttattgggtgctgagctgatctcattggattttttttttttcttgagacagagtcttgctctgtcacccagtcacccaggctggattgcagtggtgtgatctctgctcactgcaccctctgcctcctgggttcaagtgattccttctgcctcagcctcccgaataggtggggctacagacacacgccaccatacctggccaatttttgtatttttatagagacggggtttcgccatgttggccagactggtctcgaactcctgacttcagctgatccacatgcctaggcctcacaaagtgctggaattataggtgtgagccaccgtgcccggcctgatctcatttggatctttgcagcaatttgatgaattgggtgttctcgttatccccaggtgacaggcaactgaggcccagaagaaggttggtaatatgttaatgagttaagacatagcgccagggttcatgtgggtgagggtctgacaccagacagatgaagggtcgtcggctacagtgacttgagtacccgagctgggccagatttggacccgatggtgtgaggaacctccacccctctaatgctggcagaaaggagtttggggagggcaggggctggaggaggatggtcttcgccttgttcaaggcaggcagcagccttttccctctcacggtgggcaagtttctctgctgcccgagtccctgggcctcggagcactaaggctggccacctgctaggtgggaaggccccaaacggcttctcatcctgcctgcctccactcctaccagaatgacctcacctggcagggagggtggccccagggccctgtcagctctgttcctgccagccaggagggtcctggagtccctcccaagcctgccgcaagcccagagggcacatccaagaggcaagtgtaagctcctgtttccttcatcctcagcagcacaaagctctggaggctggaaggcagcaggcagggccagaaggtattttcatctttcctggaactgcgttaaagggccctgggcagtgaaggagccagagccatttcctgcgtgcttacagcatgccaggtgcctggccacacactgcccacaggatcagcttgaaccctcagcagccccgcctggtagggccagccgtcctcccatttcacagatggagccgtaggggctctcctcaaaagtcacacagttaggagatagccaaattcaaatcgtggtgcatccatccccgtccagggctcgtttcttacctaccttgcccccctgctaactcggacacctcttgagtttggcatccaagagcagaacctggatcccgggggagggaggcacagggaggcgtgaaggatgggaaccagcctcccctgggctgcttgggccggcttcccccttgccagttctgctgcccttaactgcggccttgggcagggggcgtaacctttgcaggtgacgcttgggtctccctgttggaagaccggcaagatgccgtgtacttactttaagaagcaaatgaaggttgggcgcggtgctcacgcctgtaatcctagcactttgggaggccgaggtgggcggattacttgaggtcaggagttcaagacctgcccaaccaacatggtgaaaccctgtctccactaaaaacacgaaaattagctggatgtggtagtaggctcctgtagtcgcagctactcgggaggctgaggcaggagaatcacttgaacccgtgggggcagaggttgcagtgagccaagatcgtgccactgcactccagcctggatgacagagtgatactccatctcaaaaaaaaaaaaaaaaaaaaaaaa

SEQ ID NO: 283 - DNA, 1667 bp, Homo sapiens
ggagtcgagtgggagtcggccggccggcacgggcagcgccgggaccccgcgggggacactgcagccggagcccgggaggggccgcgccgccaccgtctgaactaggatgtcccgacatgaaggtgtcagctgtgatgcatgtttaaaaggaaattttcgaggtcgcagatataagtgtttaatttgctacgattacgatctttgtgcatcttgttatgaaagtggtgcaacaacaacaaggcatacaactgaccacccaatgcagtgcatattaacaagggtagattttgatttatactatggtggggaagctttctctgtagagcagccacagtcttttacttgtccctattgtggaaaaatgggctatacggagacatctcttcaagaacatgttacttctgaacatgcagaaacatcaacagaagtgatttgtccaatatgtgcagcgttacctggaggcgatcctaatcatgtcacggatgactttgcagctcatcttacacttgaacacagagcccctagagatttagatgaatcgagtggtgttcgacatgtacgtagaatgtttcaccctggccggggattaggaggtcctcgtgctcgtagatcaaacatgcactttactagcagttctactggtggactttcttcttctcagagttcatattctccaagcaatagggaagccatggatcctatagctgagcttttatctcagttatcaggagtgagacgttctgcaggaggacagcttaattcctctggcccttccgcttctcagttacaacaactgcagatgcagctgcagctagaacggcagcatgcccaggcagcacggcaacaactggagaccgcacgcaacgcaacccggcgtactaacacaagcagtgtcaccactacaatcacacaatccacagcaacaaccaacatagctaatacagaaagcagtcagcagactctacagaattcccagtttcttttaacaaggttgaatgatcctaaaatgtctgaaacggagcgccagtccatggaaagcgagcgtgcagaccgcagcctgtttgtccaagagctccttctgtccactttagtgcgtgaagagagctcatcctcagatgaggatgatcggggggagatggcagattttggtgctatgggctgtgtagatattatgcctttagatgttgctttagaaaacctaaatttaaaagagagtaataaaggaaatgagcctccaccacctcctctttgatgacatcccaattcgcagacaatgtcctctgtgctgtatttgccaatgaaagtggacaacaactatcttgggtttgtttggtgattgtaatttcaggtctgtcactcttgttacattgtgtacattcaaaaggaagagagaaaatatatatgataatcatttccacttaactaatttttacttctagcaggtaaatgtaggtagcagtgcaggggtgatctctgcttcctgtaccttgacatgcaaaaggctctcctaatactccacattcaaactgaagaggaaaattgaaatctctaatgaagctgctgtgtgtatttatgaatattaatgaataaaaactgcttggatggtttaccttaaaaaaaaaaaaaaggaattcgatatcaagcttatcgataccgtcgacctcgag

SEQ ID NO: 284 - DNA, 1724 bp, Homo sapiens
caaggaaggaaggaaaagagaagagagactgattggatgctgctgcagtggtccaggcaagtgattgtgctggcttggatgggtgttagcagtggaggcggtgagaagtgtcagggtctgttcatgtctagaaggcagaaccagcagggtttggtgatggattggatgtcaggagtgagaggaagaaaggagttaggacaactccaaaatttggggcctgaggagcaggtttggggacgagaaaataagaatttcctgtcaggagcacccagctcctgtgcatttgccattctgcagtccaccccatgcacaccgtaacacaccagcctaaggatgctcatgcccccacctctgggaaggccccccatcttttctgccctactccaggctctgtcccctgagagtcattttctctcactgatccttttctggcccttctgagaggtcactaaaatgtccaagtggaggatggctaacaccccttcttcatcactgccctcagatgctgtgagggcacacaatagaccccataaagctgataaagctactagggatagaaggggccccagttgcctcccagaggctgctggtctgtcttccccacccagccagtgccgcctgtgttttgttcttcctttgcggtcccccgcattccttgtagtgctgaaaataggacactgtgacttgctttctgcagggcaattgtcctggaaattgtagaatttctttttgtgttgctttcctactggtacctctttatattccacctctgtagccaagtaggatgagatttcaagcaagttgaagttatatataatgaatttaacacattggtaagcttctaagctaactgactttcaactggaagcaatactaagaacaacagatatttggtatactcaattttttttttctctcagatttgcattttgcaagctctactgtacccccagcaaagaggaaagaaaaatctagctctcccatggctctaaagtttctagaaatggaagctctcttactgagcctctgtttcttcccccacctctgccccaccccaggtgtggggcaaactggtacctggagcacctgataccatctgtaagtcctgacagcagtctggcaagaggcaaggacaggccagggatagagatggagtggggaacggagcacctgagctggggagccacacatccgggacactgggaaaggaaaggagggagatggtggcttgaaatacaaaattagccgggcgtggcacacacctgtaatcccagctactcaggacgctgaggcaggagaatcgcttgaacccgggaggcggaggttgcagtgagccaagatcgtgccactgccctccagcctgggtgactgtgcgggactccgtctcaaaaaaaaaatttttttttaaagcccaataaaagggctgggcgcggtgctcacgcctgtaatcccagcactttgggacgccaaggcaggtggatcagctgaggtcaggagtccaagaccagcctggccagcatagtgaaaccccatctctactaaaaacacaaaaattagccaggtgtggtggtgggcacctgtaatcccagctacacgggaggctgaggcaggagaatcacttgaacccaggaggcggaggttgcagtgagccaagattgtgccattgcactccaacactccagcctgggtgacagagcgagactctgtctaaaaaaaaaaaaaaa

SEQ ID NO: 285 - DNA, 2249 bp, Homo sapiens
ccgcagcacagtcacatcctactgaacatcatcctgttctctgggtggaatgtcaccatcgcccaggtggggatttttgtgtgttttgttcactgctgtacacccagcccccagcacagcgcctgtccaggacaagtgcccagtaaacacttgggaagcaatgcaagcgtcctcccagcagctcctgcaaacagacccccgacccaagcccttccttctgcctccactgccaccactgctgctcatctctgctggcacagaagtctcttccctggtcttccagaaatcccctctccacactcagccagagggagctattaaaactgcgggccagcccacatcagtccacagcaaagtcctctctaagggatctttgttgcttggagaataaaccctcggattccttccttggctctcggggcctcctctctgacctccctctgtctcctctcccagccttcctcctcactcaccctccagccatgctggcttcctccttgctcctgaaacagcctgaggcccacactgccccgggccctttgcactggctgtttcctctgcctggagcacttctcctaggcatccacagggctccctcccacaactccttcgggtgcccacatgggaagccatccctgaccacccccccgacttccttctgagcaaggtagggtctttctacctagtcatgagggcagggatttttgtctgttgtgttctctgtgtgcccccagtgccatcccagtgcctggcagatggtaagtgctcgacacacattggctgactgcctgaatgaacaactctatgagccgatggcagataaggacactgaggtcctctggggtaggtgaccagcccaaggccacacagctggtctgagattaggccaggagaggagcccgggttggtcacatcctggagttggcgtcttggaaactgcatcaggagaataacaaagatgagacgcaggctctaacaagtggataccagtgactctcgccccgccagccccagcctgcagccttgggcccttccaggagtcatggtctgcctgcctggggcattccaggcttcgacccaggtcctgcactttctattttgagcctcttagtcctgaggactgtgtgttcccagcaggcggcgcgggccagaggctgagcctgggtgtggctgtcaccctatctggggccagagacccagattcccgggcccttaacctgttggctgctgagggctctggcataagccctgttccctgcttgattgtctccccttcaagcccctgccctggtatcgtatcggcccatctcaccttggattatatccctgtttggccccatttgaatcctggctctgcccctttccagcaatgtgaccttgggcaagtcacttcatctctctgggtctcagtttcttcatctgggaaatggggacaataagagtacctgtctctggccatgtgtggtgactcatgcctgtaaccccagcgctttgggaagccgaggcgagagaattgcttgagaccaggagtttgagatcagccctgggcaacatagtgagacccctgtctctacaaaattctaaaaaaattagccgggtgtggtggtgtgtgcctgtagtcccagctattctagaggctgaggcgggaggattgctcgagcccaggagtttgaggctgcagtgagctgtgattatgcccctgcacatcagcctgggtgatagaattgaggccccatctctaaaaataacaatactaataataaataaaaatgaaaatgagtacctgtcttctggggttgcagaggagattcaatgtgatgaaattgatgagagtgccctgcagggagccggaaactcagggagcatcgataatgagtcccccaccatcagcagctggcttaaatataaaaactgtcatggcctctggagaaatgacaagaattcgaaggagcttccctgcattggccaccctacaccctacacccttacttcctcccctcaacttgcctggatttatcgacccccactaccccactggttgccttctctccacctggcacatttcgtatgaatttgcttgttggttcttgcctatctccccagtagaacattagctccttcaggacagggacttttgtctaccttatgcacctagtgcaatgcctggcacacagtcggtgcttaataaatgtttcttaaaagaaaaaaaaaaaaaggaattcgatatcaagcttatcgataccgtcgac

SEQ ID NO: 286 - DNA, 2205 bp, Homo sapiens
gtcgacggtatcgataagcttgatatcgaattccttttttttacaaggttttgtttacaaagccaagaaaagataaaacattttaagttggtactgccctcgaaaattatggtggatgtacacttggactttctaaaacaagatctgaataaaataagacacttaacatgaaaaactctatttaacacaatttaatctttctttgattcctgagtgggtaattcggcattttacagaactttggggtcaccattataaatatcagctgtcactgtactggtaaaatataaaatgtaccagttaataatagctttgcaattcacagaaaatcagataatggaggttttaccgtaactggaattatgatgttaaaagaatcaatgcacttttccaaaagagcctaaatcatttctaggaaataattcatgccttgtaagaatttacaaggaagtgcttgatactccctggaaaaaatcagtagttcttcattattaagttttcattttgcatgtgtacttcattgtattattattgtggttaatcctatgtccacggccctggcctcgaaccacacaggctcttcttaaataaagtggaagatttctttggcctgtcctaaatccaaggaacaatatgcaactctgcaagtgcatatcacaagaagtcttttcaaggtcgtgctcttggtgaccctttgtttaaaggaatttgggctggatttatagttgtcagttctgaagaatcaggaaagggcaggccgtgaaggggtgggggaggaaaagagaaggaaagagggagggagggagggaggcagaggctcataccacacagtactgagccaccaaggacagagtttctacactgtttcattagaacatgaaatctactctgttgtctatgcgtctgctgtgagctgaaaagaagtcagtttacttcctcagcatctggggtcccataattctgagtcgtggccacattacctctgctactgaaaaggcaagagctgggttgctcagacagccccgcagttcacactgcctgtgctgcaggcaggaaggtttccacccaaaggccggcagagggagggtgtgcccctggcgggtgggctggggctggggtgaggaggggcagggaagaaagggaaggagacttcctttttaatgctggttctcttctcagtccaatccaagtctctccatggaaggatggaaaattctgatttcctgtatctctttgaaaacaatgaaatccactctccccggagggcaggtttgctgaagctgttggctccggctggcatgcacagccttggctaagtagccacacagcacagcatagacatcccggcgaactgaaggctcacaaccaggagcctaccccatgcactccctccccagcaccgggtcaccgcagccagggttcctggggcctccggaatgtcagggagcccctcactgcctcttgggtggcaggaaatcactaagctatgaggataaagaccagccggggtctccatgcagctttagggctgatttctatttccccttgtggtggtgaagcagatttcaaactgcactcaatacagtccccagcacaggagaaatgaaaccctttaaatcttaggccttcacgcaggagcctcccctgcagctttcaaactcacagaagccttttgttacagtcctaggaatgtgtacttagcagagaaagcgtgcctttgtggtggctgtgaaagaatactgagggcggtggcgggggaagaagagacccgcctctggtaagatcctctcccgaagtctgatggcagccagtctcagaaaacaagaaaatccacccaaggacaaggtactcaaccacccccagggctctcccaaaagtgtcggagtgagaggaaggaaagcactaaatatatttgagtatgtgagtgagcgcagggggaggagtgagctaaaggggttttactgcattggttgctataatttgtggggggttcctaagaattattcccatatccttccccaagggaacctgtgaggaaactggcagctgcttattgtgatctagtgtaacagcacatagtacagccaaaatactgcaaggaattagaggcggaaggggcctcaggactgatcttcaccagttttctggtaagatttgtgcaaaactccagtgaagagtgtgcacgcggtcaatttctccaaaatg

SEQ ID NO: 287 - DNA, 3839 bp, Homo sapiens
ccacgcgtccgcccgctcgctgggagagaggtacctctccttttccctctccctttccctaagagttgtctgctggttctcagcttgaagaagattctgcagtccttattgatcctttttcttggcgttaccattttttgaagcaaagttaacctagctttctagtttgagctttctttttggccgtctttaaaaaaaattttttttttaatctataaaatagacaagagctagttctacaatgtccaagtcattccagcagtcatctctcagtagggactcacagggtcatgggcgtgacctgtctgcggcaggaataggccttcttgctgctgctacccagtctttaagtatgccagcatctcttggaaggatgaaccagggtactgcacgccttgctagtttaatgaatcttggaatgagttcttcattgaatcaacaaggagctcatagtgcactgtcttctgctagtacttcttcccataatttgcagtctatatttaacattggaagtagaggtccactccctttatcttctcaacaccgtggagatgcagaccaggccagtaacattttggccagctttggtctgtctgctagagacttagatgaactgagtcgttatccaggaggacaagattactcctgagaatttgccccaaatccttctacagcttaaaaggaggagaactgaagaaggccctaccttgagttatggtagagatggcagatctgctacacgggagccaccatacagagtacctagggatgattgggaagaaaaaaggcactttagaagagatagttttgatgatcgtggtcctagtctcaacccagtgcttgattatgaccatggaagtcgttctcaagaatctggttattatgacagaatggattatgaagatgacagattaagagatggagaaaggtgtagggatgattctttttttggtgagacctcgcataactatcataaatttgacagtgagtatgagagaatgggacgtggtcctggccccttacaagagagatctctctttgagaaaaagagaggcgctcctccaagtagcaatattgaagacttccatggactcttaccgaagggttatccccatctgtgctctatatgtgatttgccagttcattctaataaggagtggagtcaacatatcaatggagcaagtcacagtcgtcgatgccagcttcttcttgaaatctacccagaatggaatcctgacaatgatacaggacacacaatgggtgatccattcatgttgcagcagtctacaaatccagcaccaggaattctgggacctccacctccctcatttcatcttgggggaccagcagttggaccaagaggaaatctgggtgctggaaatgggaaacctgcaaggacctagacacctgcagaaaggcagagtggaaactagcagagttgttcacatcatggattttcaacgagggaaaaacttgagataccagctattacagctggtagaaccatttggagtcatttcaaatcatctgattctaaataaaattaatgaggcatttattgaaatggcaaccacagaggatgctcaggccgcagtggattattacacaaccacaccagcgttagtatttggcaagccagtgagagttcatttatcccagaagtataaaagaataaagaaacctgaaggaaagccagatcagaagtttgatcaaaagcaagagcttggacgtgtgatacatctcagcaatttgccgcattctggctattctgatagtgctgttctcaagcttgctgagccttatgggaaaataaagaattacatattgatgaggatgaaaagtcaggcttttattgagatggagacaagagaagatgcaatggcaatggttgaccattgtttgaaaaaagccctttggtttcaggggagatgtgtgaaggttgacctgtctgagaaatataaaaaactggttctgaggattccaaacagaggcattgatttactgaaaaaagataaatcccgaaaaagatcttactctccagatggcaaagaatctccaagtgataagaaatccaaaactgatggttcccagaagactgagagttcaaccgaaggtaaagaacaagaagagaagtccggtgaagatggtgagaaagacacaaaggatgaccagacagagcaggaacctaatatgcttcttgaatctgaagatgagctacttgtagatgaagaagaagcagcagcactgctagaaagtggcagttcagtgggagacgagaccgatcttgctaatttaggtgatgtggcttctgatgggaaaaaggaaccatcagataaagctgtgaaaaaagatggaagtgcttcagcagcagcaaagaaaaagcttaaaaagcgtcgttttccagggagtatggaaggttttgtcactctagatgaggttggtgatgaggaagattcggaacttcagaaacttcgtaaatcgggcatggcatttaaatctggtgacaaaaatgatgatggtttggttgaaattaaggtggacaagatcgaggaacttgatcaagaaaacgaagcagcgttgggaaatggaattaaaaatgaggaaaacccagaaccaggtgctgaatcttctgagaacgctgatgatcccaacaaagatacaagtgaaaacgcagatggtcaaagtgatgagaacaaggacgactatacaatcccagatgagtatagaattggaccatatcagcccaatgttcctgttggtgagatttaagtctttgttcttcaccttcctcactctcctcaaaacaaactcttaggttttaaaataagattttaaagttggtcttacataagctgtgatagcattttaaatttgctttgtttctatggggaacaatttataaatcttaattgatatattttcctctcatgcatgtctctgattttgtattattttctgttgttattccacaatgtgttcccttttttcgtaaaatttcttgcaagttacacgcttttgttttgcttttctgtgttgtttttctgtattatatttctttttttaagaatacagttaggtgagacctcaaacatcaattaggtaaaagcaaaatatggttcggtttttgttttttatcttaggctgtattggacttctcaaaaacatgttgtttcatttaaattatgttgacaggtgaaattgtgaatactaaataaaatcttcagtttaatttgtaagaatgtatgtttgtatttctaggtatagactatgtgatacctaaaacagggttttactgtaagctgtgttcactcttttatacaaatgaagaagttgcaaagaatactcattgcagcagccttcctcattatcagaaattaaagaaatttctgaataaattggcagaagaacgcagacagaagaaggaaacttaagatgtgcaaggagatttaatgatttcaaagaaaataatggttctttgtttttaatgttaaccttttttaaatacaatactgatagttagaagaaaactattgtactcttttgttttagtggagaaataatagatgtctgttcatgtgttaagtgttatagcaaaaaaaatacacatatggttaagttaatgaatagtttttgttttatcagaatggcaacagacagaagtactttgtagagattgacttcctaagctacttaagacaacttgcaccactaagaaaaaaatgtagaaccatttggaaaaatgaaatttagtagttccaagtttcaaagaaatgtcaacattttattccattcaataaagaacaaaaccaaaaaaaaaaaaaaaaaaaaaaaaaaaaagg

SEQ ID NO: 288 - DNA, 2000 bp, Homo sapiens
  misc_feature (99)..(99): n equals a,t,g, or c
  misc_feature (580)..(580): n equals a,t,g, or c
  misc_feature (1790)..(1790): n equals a,t,g, or c
  misc_feature (1858)..(1858): n equals a,t,g, or c
  misc_feature (1862)..(1862): n equals a,t,g, or c
  misc_feature (1904)..(1904): n equals a,t,g, or c
  misc_feature (1913)..(1913): n equals a,t,g, or c
  misc_feature (1951)..(1951): n equals a,t,g, or c
  misc_feature (1985)..(1985): n equals a,t,g, or c
cggcccaggccgcctggtctggcgctggaggccggagtcccgcggcctgtgctggatccgcgcacacccagtggcggcggatgggcggccggggcggcnggagcggcgggtcctgagcgcggcccgggctgtcagggctggctgctggcgggatggacaccctggaggaggtgacttgggccaatgggagcacagcgctacccccacccctggcaccaaacatcagtgtgcctcatcgctgcctgctgctgctctacgaagacattggcacctccagggtccggtactgggacctcttgctgctcatccccaatgtgctcttcctcatcttcctgctctggaagcttccatctgctcgggcgaagatccgcatcacctccagccccatttttatcaccttctacatcctggtgtttgtggtggcgctggtgggcattgcccgggccgtggtatccatgacggtgagcacctcgaacgctgcaactgttgctgataagatcctgtgggagatcacccgcttcttcctgctggccatcgagctgagtgtgatcatcctgggcctggcctttggcacgctggnagagtaagtccagcatcaagcgkgtgctggccatcaccacagtgctgtccctggcctactctgtcacccaggggaccctggagatcctgtaccctgatgcccatctctcagctgaggactttaatatctatggccatgggggccgccagttctggctggtcagctcctgcttcttcttcctggtctactctctggtggtcatccttcccaagaccccgctgaaggagcgcatctccctgccttctcggaggagcttctacgtgtatgcgggcatcctggcactgctcaacctactgcaggggctggggagtgtgctgctgtgcttcgacatcatcgaggggctctgctgtgtagatgccacaaccttcctgtacttcagcttcttcgctccgctcatctacgtggctttcctccggggcttcttcggctcggagcccaagatcctcttctcctacaaatgccaagtggacgagacagaggagccagatgtacacctaccccagccctacgctgtggcccggcgggagggcctggaggctgcaggggctgctggggcctcagctgccagctactcgagcacgcagttcgactctgccggcggggtggcctacctggatgacatcgcttccatgccctgccacactggcagcatcaacagcacagacagcgagcgctggaaggccatcaatgcctgagggcagctgccagggcctgtggaggacaggccagagaggaggccagcaggcccagagtccccaggggaggaggaccaggtcaagggacgttctgtgggcagtagccctgtgtggccctgttcccaccatgagtctggaggccccacctccctggggctcccaatcccctttgccatctctgctctcactggggaccctcctccccttcccacctgctctcatactgctcagtgacatggcccaggctttccttccagggccatgcttggcaaggttggctgagggcaccctccttctctgcacccttggcacgagggcagggctggctctcccaatgcctccatcccatccccatggtgctttggcctcctcaaagcatccaccatggtggatggactgaagtgtgtatattttcttgatctattttttaataaaaaggaaaaggagcaaaaaaaaaaaaaaaaaaaaaaaaaaaaaaaaaaaaaaaaaaaaaaaaaaaaaaaaagggcggccgntctagaggatccctcgaggggcccaagcttacgcgtgcatgcgacgtcataagctctctccctatagngagncgtattataagctaggcactggccgtcgttttacaacgtcgngactggganatctggtacttgggaactttgggaaggaaccttacttntggggggggacataaattggacaaactacctacngagatttaaaagctt

SEQ ID NO: 289 - DNA, 2709 bp, Homo sapiens
ccacgcgtccgcgcgtcctgtcccggcgccttccgcgcaccggccaccgccagtctccgagccccgtgacctgcaggtcctccggccgcgactccgggccggccctgcgtggtggctgtcggggggcgcgcggggaagcagcggaacttgcggtgtgaggggccggcggggcccggagcggtccccggcccgggaaacttggaccgagaccaggccggcgaccaccaggggcctgaggatgaagccaagtctgctgtgccggcccctgtcctgcttccttatgctgctgccctggcctctcgccaccctgacatcaacaaccctttggcagtgcccacctggggaggagcccgacctggacccagggcagggcacattatgcaggccctgccccccaggcaccttctcagctgcatggggctccagcccatgccagccccatgcccgttgcagcctttggaggaggctggaggcccaggtgggcatggcaactcgagatacactctgtggagactgctggcctgggtggtttgggccttggggggttccccgcgttccatgtcaaccatgttcctgggcacctctgggtactcatggctgtgatgagtgggggcggcgggcccgacgtggcgtggagtggcagcaggggccagcagcggtggtgagacacggcagcctgggaacggcacccgggcaggtggccaagaacagccgcccagtacgcggtcatcgccatcgtccctgtcttctgcctcatggggctgttgggcatcctggtgtgcaacctcctcaagcggaagggctaccactgcacggcgcacaaagagtcgggcccggccctggagtggaggcagtggaatcaaccctgcctaccggactgaggatgccaatgaggacaccattggggtcctggtgcgcttgatcacagaaaaaagagaatgctgcggccctggagagctgctgaaagaatacacagcaaacagctggtgcagacgagccacaggcctgtgtccaagctgccgccagcgcccccgaacgtgccacacatctgcccgcaccgccaccatctccacaccgtgcagggcctggcctcgctctctggcccctgctgctcccgctgtagccagaagaagtggcccgaggtgctgctgtcccctgaggctgtagccgccactactcctgttcccagccttctgcctaacccgaccagggttcccaaggccggggccaaggcaggcgtcagggcgagatcaccatcttgtctgtgggcaggttccgcgtggctcgaattcctgagcagcggacaagttcaatggtgtctgaggtgaagaccatcacggaggctgggccctcgtggggtgatctccctgactccccacagcctggcctcccccctgagcagcaggccctgctaggaagtggcggaagccgtacaaagtggctgaagcccccagcagagaacaaggccgaggagaaccgctatgtggtccggctaagtgagagcaacctggtcatctgaggggcggtctagtctaaggacactgcggccctgccctgggaggttccgaaggcttcctggaggaggtggagctgcagctgggactgtgaggaccgagaagcaatggcccagcagacgagacagcaaagaccaaggcctggaggtgggagcgtctgccccagtgaggaggcaggtggccggcgggcactgtgtacaggagcaggctgagccccgcccctggccctgctgccatgttgctcccctgaaggatgccccgacccccgtgcctgccctggctggatcctaggagcccacgggattctctgtatcatcagaggctgggcttggcagaggggaggggcctgtgcccgtcacccctggccccattccttggtaattagccacacccttgcctctgtacagggccctagagcagatgtgcgtccccctcctcttccagcaggtctataaagggaaggggtagcagaaagtcctgggctaggagagtgagtccctgggttctaatcttgggcacatctgtggccatcgctgggtccatttttctgactgtgaagtaaggagagacgtctcagtacccagggcctcttcagctctttgtaggttctgggctgggttgtgggggactggggagctgggctctaccatccctccattagtagctttatccagccccgtttttgctgctttcaggcctctgccttcaaggcccccatggggctgtccatccatggctctgcctacggaaggggcttaatgcatgtgcctgccctcccccagctgtttttaatgaaactgaaaaaatagacttgatcccggcaggactgtgatacagagccctagcctgcccagccagccccaagatctcaggagctttagggagaagacttggtggggctggagcacaccttgggcctcagtggtttctgtgtccctgtggtgccagtgcttctgggcagtgcaggcggctgccaggcccagccctgacttccactctggctcagcaacctggttatttatgtggggccgtgcaggcatgggcccactgcctgtccatcctgtttctcttatttattgaaactcaccattgccctatccttgtgtctccacccccttccatgtgttgaataataaaaggtgggaaagtgcaaaaaaaaaaaaaaaaaaaaaaaaaaaaaaaaaaaaaaaaaaaa

SEQ ID NO: 290 - DNA, 2556 bp, Homo sapiens
  misc_feature (1663)..(1663): n equals a,t,g, or c
  misc_feature (2553)..(2553): n equals a,t,g, or c
tcgacccacgcgtccgccgggctgcagccggcgcgtttctccgggctacagccggcgccgccgcccgctagtccgccgcccggcgccatggcgggctgcgcggcgcgrgctccgccgggctctgaggcgcgtctcagcctcgccaccttcctgctgggcgcctcggtgctcgcgctgccgctgctcacgcgcgccggcctgcagggccgcaccgggctggcgctctacgtggccgggctcaacgcgctgctgctgctgctctatcggccgcctcgctaccagatagccatccgagcttgtttcctggggtttgtgttcggctgcggcacgctgctaagttttagccagtcttcttggagtcactttggctggtacatgtgctccctgtcattgttccactattctgaatacttggtgacagcagtcaataatcccaaaagtctgtccttggattcctttctcctgaatcacagcctggagtatacagtagctgctctttcttcttggttagagttcacacttgaaaatatcttttggccagaactgaagcagattacctggctcagtgtcacagggctgctgatggtggtcttcggagaatgtctgaggaaggcggccatgtttacagctggctccaatttcaaccacgtggtacagaatgaaaaatcagatacacatactctggtgaccagtggagtgtacgcttggtttcggcatccttcttacgtcgggtggttttactggagtattggaactcaggtgatgctgtgtaaccccatctgcggcgtcaytatgccctgacagtgtggcgattcttccgcgatcgaacagaagaagaagaaatctcactaattcacttttttggagaggagtacctggagtataagaagagggtgcccacgggcctgcctttcataaagggggtcaaggtggacctgtgacgggcagtggccccggtgaccttggggcctccgaccctgtgcagcctgggacaaaactgtttccggttggccgctgccacatggattttcttaatcgttttatgtcattagtcactcttctggaatgtcactcaagaccaagcggtcagaaggcctgrggacccaaggccccactggagcagtctgtccttatgccgaatcaaggcggaacatgggtgaaagacgagtaaggggcaaatcacagcaatattccacagcgccctccagagttacctggggaggaccgaggccacacgccactgcccccgaggccagagtgtaagtaaaggataaccaggactcgctgggagagatggactctktcctcagcaacactccacagcagaaaggggtagcaggtaccccttcttatcagcggtaaaaatgcatttacaacctttcatttaaccgaaaaacacagaccgctttaacctctttatttctgtcccccactgcatgaacatctatacaattttaaaaatacttcctcataggatgctttggcccttcatctatttaatcatagctacatacctattttttataagtagcagtacacattcaaaggggtattcctagctcaatgcttggtgttctagttcaacttttatcctgcagcaagtaagcctagataactctacacgatttggctgagtggctttgtgtgaccgtggccccaggcnaaggggatcatggccctggctggctttcccgggggtctcagctcctgttgtcagtgataggcggctcaaaggagcatcagtttcttttgatccaagaagtgcttactgaatgcctgccctgtgcgtggccttaaacattgagaagtgctgctctccgtttatttgggatttgattctcattttaccatagcttatattctcaatttcaatgccagtctcagaactcttgttttctgtgttctgttctcaaaattacattgtccctcatgtcatttcaaactgttttccaaagggatttgagcatatacaactacaaatccaagcagattgactctcaaaaataatcttaaatactgcaaatagtcccaactaagattcagtcagtatgtttgttttgcaagtttgggagagtaagttggctttgagtcacacatcgaagctttaagaggtgagacgctggcttcattctggactagacaggaacttggcctcagcgtgagatcctgccatgcagtgttgcggtggcactgaagaagtgtgaatgtgaaggcggcgtcggcgcggggccagagcaccactctgctgccccaccacgcggcctgtgaggagccactaaacctttccgtgcctagacctccccatctgtggaatggggtcaataccacctacctcacaggggtgttgtgaggactgagaagaacaatgtcaaatgtttttaatactcagatgtgggagcgacatcaatgaaatctgtactgtatgaaagctacacaaaaatgggcagacatttggttaattgtgccagatacctaaaatgtatgttcagaaaagcattttatcaactcagaaatatgacttatttctagaaaaaaaaaaaaaaaaaaaatttnctc

SEQ ID NO: 291 - DNA, 1351 bp, Homo sapiens
  misc_feature (1009)..(1009): n equals a,t,g, or c
ggaaatcccctatagggaaagctggtacgcctgcaggtaccggtccggaattcccgggtcgacccacgcgtccgatcgggttgggcctgggagatgccaaggacatcacagtcaagggcctggaagttgttagacgctgcagtcgagtgtatctggaagcctacacctcagtcctaactgtagggaaggaagccttggaagagttttatggaagaaaattggttgttgctgatagagaagaagtggaacaagaagcagataatattttaaaggatgctgatatcagtgatgttgcattccttgtggttggtgatccatttggggccacaacacacagtgatcttgttctaagagcaacaaagctgggaattccttatagagttattcacaatgcctccataatgaatgctgtaggctgctgtggtttacagttatataagtttggagagacagtttctattgttttttggacagacacttggagaccagaaagcttctttgacaaagtgaagaagaacagacaaaatggcatgcacacattatgtttactagacatcaaagtaaaggagcagtctttggaaaatctaatcaagggaaggaagatctatgaacctccacggtatatgagtgtaaaccaagcagcccagcagcttctggagattgttcaaaatcaaagaatacgaggagaagaaccagcagttaccgaggagacactttgtgttggcttagccagggttggagccgacgaccagaaaattgcagcaggcactttaaggcaaatgtgcactgtggacttgggagaaccattgcattccttgatcatcacaggaggcagcatacatccaatggagatggagatgctaagtctgttttccataccagaaaatagctcagaatctcaaagcatcaatggactttgaacatagatatttaccattgtctgatgtaaatttcagccatatatggattgatatggtttggatgtatccccacccaagtctcatcttgnaattttaatcctcataattcccaggtgttgtggtaggtaattgaatcatgggggcagtttccctcatgctattctcatgatagtgagctttcatgagatctgatggttttataagtgcctggcatttcccctactggctctcattctcactcttgccgccctgtgaagaggtgccttccaccgtgattgttaagtttcctgaggccttcccagccatgtggaactgtgagtcgaaaattaaacctcttttataattaaaaaaaaaaaaaaaaaaaaaaaaaaaaaaaaaaaaaaaaaaaaaagggcggccgctctagaggatccaagcttacgtacgggtgc

SEQ ID NO: 292 - DNA, 2596 bp, Homo sapiens
aaaccctggagctccaccgcggtggcggccgctctagaactagtggattccccgggctgcaggaattcggcacgaggaccgcgcggctgctccgctctccccgctccaagcgccgatctgggcacccgccaccagcatggacgctcgccgcgtgccgcagaaagatctcagagtaaagaagaacttaaagaaattcagatatgtgaagttgatttccatggaaacctcgtcatcctctgatgacagttgtgacagctttgcttctgataattttgcaaacacgaggctgcagtcagttcgggaaggctgtaggacccgcagccagtgcaggcactctggacctctcagggtggcgatgaagtttccagcgcggagtaccaggggagcaaccaacaaaaaagcagagtcccgccagccctcagagaattctgtgactgattccaactccgattcagaagatgaaagtggaatgaattttttggagaaaagggctttaaatataaagcaaaacaaagcaatgcttgcaaaactcatgtctgaattagaaagcttccctggctcgttccgtggaagacatcccctcccaggctccgactcacaatcaaggagaccgcgaaggcgtacattcccgggtgttgcttccaggagaaaccctgaacggagagctcgtcctcttaccaggtcaaggtcccggatcctcgggtcccttgacgctctacccatggaggaggaggaggaagaggataagtacatgttggtgagaaagaggaagaccgtggatggctacatgaatgaagatgacctgcccagaagccgtcgctccagatcatccgtgacccttccgcatataattcgcccagtggaagaaattacagaggaggagttggagaacgtctgcagcaattctcgagagaagatatataaccgttcactgggctctacttgtcatcaatgccgtcagaagactattgataccaaaacaaactgcagaaacccagactgctggggcgttcgaggccagttctgtggcccctgccttcgaaaccgttatggtgaagaggtcagggatgctctgctggatccgaactggcattgcccgccttgtcgaggaatctgcaactgcagtttctgccggcagcgagatggacggtgtgcgactggggtccttgtgtatttagccaaatatcatggctttgggaatgtgcatgcctacttgaaaagcctgaacaggaatttgaaatgcaagcataatatctggaaaatttgctgcctgccttctacttctcaaatctttcttgtaaaagtttccaattttttcactgaaacctgagttaaaaatcttgatgatcagcctgtttcataagaaactccaatcaagttaatcttagcagacatgtgtttctggagcatcacagaaggtatattgctagttacactttgccctcctgcagtttcttctctgctcccaacccccatctcatagcatccccctctatttccaatgctcctctccaaccgcttagtttctgaatttcttttaaattacagttttatgaaagcatattttatttacttggtgttgaaatagccctcataaaacctaagcacttggaaacacaataatagtattaactaactagatctattgaatttcagagaagagccttctaacttgtttacacaaaaacgagtatgatttagcactcatactagttgaaatttttaatagaatcaaggcacaaaagtcttaaaaccatgtggaaaaattaggtaattattgcagattgatgtctctcaatcccatgtattgcgcttatgttacaagttgttgtcacagttgagacttaattcctcctaatttcttctgcccgaagggtaagtggtgcgtccagcttacacgatcataattcaaaggttggtgggcaatgtaatacttaattaaaataatgatggaagagctatctggagattatgagtaagctgatttgaattttcagtataaaactttagtataattgtagtttgcaaagtttatttcagttcacatgtaaggtattgcaaataaattcttggacaattttgtatggaaacttgatattaaaaactagtctgtggttctttgcagtttcttgtaaatttataaaccaggcacaaggttcaagtttagattttaagcacttttataacaatgataagtgcctttttggagatgtaacttttagcagtttgttaacctgacatctctgccagtctagtttctgggcaggtttcctgtgtcagtattccccctcctctttgcattaatcaaggtatttggtagaggtggaatctaagtgtttgtatgtccaatttacttgcatatgtaaaccattgctgtgccattcaatgtttgatgcataattggaccttgaatcgataagtgtaaatacagcttttgatctgtaatgcttttatacaaaagtttattttaataataaaatgtttgttctaacttgtctgcttttttaaaaataatcttactgtacttaattctaattttttcctcatatttaaataaaaggccatttccaccttttctaaaaaaaaaaaaaaaaaa

SEQ ID NO: 293 - DNA, 2288 bp, Homo sapiens
gcaaaggtgaccagaagtcagcagcttcccagaagccccgaagccggggcatcctccactcactcttctgctgtgtctgccgggatgatggggaggccctgcctgctcacagcggggcgcccctgcttgtggaggagaatggcgccatccctacagaccccagtccaatacctgctccctgaggccaaggcccaggactcagacaagatctgcgtggtcatcgacctggacgagaccctggtgcacagctccttcaagccagtgaacaacgcggacttcatcatccctgtggagattgatggggtggtccaccaggtctacgtgttgaagcgtcctcatgtggatgagttcctgcagcgaatgggcgagctctttgaatgtgtgctgttcactgctagcctcgccaagtacgcagacccagtagctgacctgctggacaaatggggggccttccgggcccggctgtttcgagagtcctgcgtcttccaccgggggaactacgtgaaggacctgagccggttgggtcgagacctgcggcgggtgctcatcctggacaattcacctgcctcctatgtcttccatccagacaatgctgtaccggtggcctcgtggtttgacaacatgagtgacacagagctccacgacctcctccccttcttcgagcaactcagccgtgtggacgacgtgtactcagtgctcaggcagccacggccagggagctagtgagggtgatggggccaggacctgcccctgaccaatgatacccacacctcctcccaggaagactgcccaggcctttgttaggaaaacccatgggccgccgccacactcagtgccatggggaagcgggcgtctcccccaccagccccaccaggcggtgtaggggcagcaggctgcactgaggaccgtgagctccaggccccgtgtcagtgccttcaaacctcctcccctattctcaggggacctggggggccctgcctgctgctccctttttctgtctctgtccatgctgccatgtttctctgctgccaaattgggccccttggccccttccggttctgcttcctgggggcagggttcctgccttggacccccagtctgggaacggtggacatcaagtgccttgcatagagccccctcttccccgcccagctttcccaggggcacagctctaggctgggaggggagaaccagcccctccccctgccccacctcctcccttgggactgagagggcccctaccaacctttgcctctgccttggagggaggggaggtctgttaccactggggaaggcagcaggattctgtccttcaggccccacagtgcagcttctccagggccgacagctgagggctgctccctgcatcatccaagcaatgacctcagacttctgccttaaccagccccggggcttggctcccccagctctgagcgtgggggcataggcaggaccccccttgtggtgccatataaatatgtacatgtgtatatagatttttaggggaaggagagagggaagggtcagggtagagacacccctcccttgcccctttcctgggcccagaagttggggggagggagggaaaggatttttacattttttaaactgctattttctgaatggaacaagctgggccaaggggcccaggccctgtcctctgtccctcacacccctttgctccgttcattcattcaaaaaaacatttcttgagcaccttctgtgcccagcatatgctaggcccaccagctaagtgtgtgtggggggtctctacgccagctcatcagtgcctccttgcccatccttcaccggtgcctttgggggatctgtaggaggtgggaccttctgtggggtttggggatctccaggaagcccgaccaagctgtccccttcccctgtgccaacccatctcctacagccccctgcctgatcccctgctggctgggggcagctcccaggatatcctgccttccaactgtttctgaagcccctcctcctaacatggcgattccggaggtcaaggccttgggctctccccagggtctaacggttaaggggacccacataccagtgccaagggggatgtcaagtggtgatgtcgttgtgctcccctcccccagagcgggtgggcggggggtgaatatggttggcctgcatcaggtggccttcccatttaagtgccttctctgtgactgagagccctagtgtgatgagaactaaagagaaagccagacccctaaaaaaaaaaaaaaaaaaaaaaaaaaaaaaaaaaaaaaaaaaaaaaattt

SEQ ID NO: 294 - DNA, 1224 bp, Homo sapiens
ggcacgagtatacatccatacacacacttgaatattttgtcaaaagaatgaaaacttcttataaccatgttttgaagatcttttatacctcatagaatctccccgtggctcttgttttcaacaaatgcctgtggattggttaaggttctactgaatcttaagtattatttacagcagagatggggccaggagtagaatattcactggacagatcccaagtctgtagtagaaaacagcttgttcattatcctctgaatttcctttgccagaagagttgtagggaagaaatggggtggtcctcccattggtctaacttcttgagtgtaaggctttggttctcaactttggctatatgttgaagccactcttgattcctaagtctaatccccagggtttctgatttaattggtgtagggtgtggccaggaccaaataattgtaatgtgtagccaagattgagaaccactgccttaggagatgacaacccccagtctcagttaagaaattagcaggcttattttgcttaactctaggtaatatacgtactgagaaggtctgggaaccatcccaatagtaatgaggatccatagctccctgatctttgtttcaaaggtctattctatacgaaaagataccagagatcctcagagaaatagctgtttttaggactggagcagggaaagaacaagatgtgcctggatatttcttgtcagaaagcaaagaaataatcagagattattgtcagaagaacataaaagtctgagggagttatgactggtcaaatctgggatttttttttttttcccccgagacagagcctggctctgtccctcaggctggagtgcagtggcacaatctcagctcactgcagcttggacctcctgggctcaagtgacccttccacctcagtctcccaaatagctgggactacaggtgcggaccatcaccctggctaattaaaaaaaaatttttctttttttggagagatgaggtctcattatgttgcccaggctgatctggaactcttgggctcaagcaatcctaccatgttggcctcccaaagtgctgggattacaggtgtgagctaccacgccaaatctgggaaaatctgagaatcaaaataaggaattatagtcatggattataactcattgaacaaagtaggaatcctttaatctgtactcatacaggtaaataaatgaaaaaaaaaaaaaaaaaaaaaaaa

SEQ ID NO: 295 - DNA, 2710 bp, Homo sapiens
ggggagaaatcagtgacagaggtgttttggttttattgttatgtgggttttcttttgtattttttttgtttgttttgtttttaaacattcaaaagcaattaaagatcagacataggagaaaccctgaatagaaacaaaacttttgaatgctggattcaaaaaaaaaaaaaagttatctggacagcttctttgagactatttaaaaactggtacaacaggtctctacaacgccaagatctaactaagctttaaaaggtcaagaagttttatggctgacaaaggactcgcgcaacgcagaaggcctttcccaccttaagcttccggggatctgggaattttacccccattctcttctgtttgtctgagtctcatctctctgcaagcaagggctgaaatcattttgtttggttgttttgagggagagaggcggggtgggggggtgcaaatctgccagcagctcttacgtaaggcatgttttattggggagggctgagcttttattttctcctctccagtggggttggcttttattgtttcttgtttgggtttggaatggaaatatggatagcagcataaagtacttttattttgacaaaattcatttttttcaacaatggagacatagatttgacccacaataacttctccccctctctttttactctgctcaaaaagcatctctcctcccattacccaaccttggtcataagtgtgcctggctggtttgcagatatttgttctgctttgtaaaaattggccattagtgcatttattgagatgatctctaaagagctatgccctgacctacccctgattctatgacattggggcccttcttttgctgaaactgccttacgtaatggttttactccttgaaagagatttgacggaatccattttatgccaagtgctgccctgcactgtttctgcaatatgtggtgtatgctgtggtgatcttgctgggaatgattataagtgtgtgtgtggtgggggagtgggtattacatgcattgctgaagagtcatcctggtgttcctcattcctcccaccttcccgtggtcattttaattacggggcagtgtcaccgcaaagggaggaaactcaaagccgaaagcaaaattccaggcctgattctggcttttgaggttcctggttcttgaagccaggcctgacccgactctcagatggggtcagtcccgtcgctttgcagactgaccctggaaatctacaaaatgcagattttcctgatttcctcttctcttgcccagtttttttttttttttttttttttaaagcctggattgtaaccagattttcttttttcccccttctcagctgtagatatgatatctcctttcagggccccagcttaagggcaaagtgagttaatgtgtagacaaaggcgagggacaagagagagttaacatctagacagtggaaaaagccatggtgtgtggtttctgggaaccaccaacacttgcaggtttagctttttcccagggttgactacaagaaagaaaaccatgtttttgcaagattaaaatgtggttgagtgtgcctaaattaaccatccccatttttatcatatttccaccatcacttcagggttttaagagtcagtgctcacctgggcggagctggtagtacattttgcttcttagaaagctaagtcctgggttccgtctgattttaggttccaggaacttcctgagaacacccgatcgcagagggtaattttctggagtttgttttgcagggatagctgggagtatggccaccctgctccacgatgcggtaatgaatccagcagaagtggtgaagcagcgcttgcagatgtacaactcgcagcaccggtcagcaatcagctgcatccggacggtgtggaggaccgaggggttgggggccttctaccggagctacaccacgcagctgaccatgaacatccccttccagtccatccacttcatcacctatgagttcctgcaggagcaggtcaacccccaccggacctacaacccgcagtcccacatcatctcaggcgggctggccggggccctcgccgcggccgccacgacccccctggacgtctgtaagacccttctgaacactcaggagaacgtggccctctcgctggccaacatcagcggccggctgtcgggtatggccaatgccttccggacggtgtaccagctcaacggcctggccggctacttcaaaggcatccaggcgcgtgtcatctaccagatgccctccaccgccatttcttggtctgtctatgagttcttcaagtactttctcaccaagcgccagctggaaaatcgagctccatactaaaggaagggatcatagaatcttttcttaaagtcattctctgcctgcatccagccccttgccctctcctcacacgtagatcatttttttttttgcagggtgctgcctatgggccctctgctccccaatgccttagagagaggaggggacggcacggccgctcaccggaaggctgtgtgcggggacatccgaggtggtggtggacaggaaggacttgggaaggggagcgagaaattgctttttctcttcctccctgggcagaatgtagcttttctgcttcactgtggcagcctcctccctggatccttagatcccagaggagggaagaaaatttgcagtgactgaaaacagtaaaaaaaaaaaaaaaaaaaaaaaaaaa

SEQ ID NO: 296 - DNA, 489 bp, Homo sapiens
  misc_feature (477)..(477): n equals a,t,g, or c
cggcacgagcttcctcaaaagtatataaaatttgaaaagacctagaagtgatctagtggaatgaagacgctgagataccattgaggttggggaaactactgggacgtgcttacaggataaactgcaaaacaaaagcacaagtttgtaatcatggaatgacatgccttattctgaaaacttaacgtttgtagcgtaccttataattcataagacatttaaaaatggtattgaatcccaataacctatgcgtagggttggatcttgttgttatccctgttttttaatggaaaatctgaggcctgaagatggtaggccatgtatatgcctgccccgccgttgagcctggctcctgctgttggagaaactttcccagtctgtagagagaggatgtggtcctggcaagcctggctcctgcctgattctgtatcttctggtaacacacagccgtcatttaaaaaaaaaaagacaaggtctttnccctcggacaga

SEQ ID NO: 297 - DNA, 2073 bp, Homo sapiens
ggcacgaggtgtgtctgtgtatatgtatatgtgtgtgtccttgcacatgtcatgtggctgtgcaagtgcatgtgtgtgtgcatgcatgtgtgtgtgtgttgtgtgtggtgggaggcagcctggggctgtcagaagagggcagaaggtgggatcaggcctagctggacctgaaccctgcttgtgccagctgggtaactttgaggcaagtcatttaagttctttctgcctgtttccccattcaaagaatggaccaaatattacttacgttgtgaagatgacaaatatgtgtgtaaaatccaggcacacacgatgtgcttaggacacagcagttatgatttatttgtgtgttgtctttgtggagtggggggaggatttgcagccttttaaggacttgggaatttcaggtcttgacagagccagtctggaaggcccatctggtgtggctgctctgagggactggggacattgcgcccgtgtttacagagacccatagtcagacatccatgggccaggcacagaggcaacacagcagtcctgcccgcagggcccccagtggacaggcagaggcgcagataatacagtggctgtcccagggtccacagctgggtgtggggggcttgagggttagaattggccgggccctatgcggggcatttgattctagttcgttctatttttatctttttcatcagatcagggcaccgtgccctctgggctcgctgcgtcttcctgcttcccagccccaatttcctcccctttcctacctccagcgcatcttgtgtgagacgcatggggacaggtgtgtgtacaccctggggaatgtgtggtgggttttcatttatctgtgtccatgtcgatcaagagcacatgctcatgctgcctgtcttagtctgttcaggttgtgataacaaataacaacaatcggggtacttagaacaacacacattcctttttcacagttcaggagggtggtaactccaagatgagagtggcagcaggggcgggctctgcagagggctgtcttccgggatgcagcctgccggtgtcctcactgtgtcctcgcaggcagaagttggcgtgccgagccagtgctctgctatcagggcttggagcccaattatgagcactcctccttcatggcctagtcacccccaaaaggccccacatcctgataccatcactatggaattaggacatcaacaggtacattttggggggataaatgcattcagaccatggcactggtttcagttgtcatgtaagtcaccactcgtatatcaaggctaactcatgaccctagatctacatggggtctgccctctacctcacagcagagatggacacccacaccaccatcttccccgtgtctcaccacctgcaccccaattacggacacctatgcctctgtcttccctgcgtctctcagcactctacagcgagtgacacacacaccttcatctttcttccatgcttcatgttgcagtggagaggctggggattgggaggaggtgctgctggggtatggggagtgagatctgtgccgcagtggggtgggattcaggagaaaaccaggcagtgtcccaccagttcacttgcttgtaacacagaaacctcttcaatggaaatggaaccctgtctagaatgccagactctctgctgaccattctctctggtcagaactggatcactttatttgatgtaaattgtatttgatttatttttttcttttttaagagatgaagtctcactatgctgcccaggctggtctcaaactcctgggctcgagtggcccttccgcctcagcgtcccaaagtgctgggattacacgtgtgagccacagcactggccataaattgtatttgatttttacagctacctgtatttagccatgtgaaagtgattttccacttatgtcagaatacaaagtttcgtttagggataaattgtaaaaaagaatataggcctgggtggtggctcatgcttttaattcccatactcagcttgagtaccggaaccaagactagtcgaggcaacatagtgaacctcatttctttaaaaaaaaaaaaaaaaaaa

SEQ ID NO: 298 - DNA, 1442 bp, Homo sapiens
  misc_feature (126)..(126): n equals a,t,g, or c
  misc_feature (148)..(148): n equals a,t,g, or c
aattcggcagagctgggtttcccctaggctgtcccttcaccctggcagacctccctgcgcccttccagcccctctagttcttccccaggctccagtccagcacccacctagtgtgggcatctgctncacagtctcctgcgcgcgcatncaacagaggtggtctgtaccacctggtggcatcagctaggctttggtgccctccttccaactccctgaaccccctccaactgttggggagacaggacccaggctgttaccttccttgtgggtgagcttctcccccccagactcgtgagttttgaccgcaggtcggacgccatgacgtaacctttcttctccttgtccaccatcaacatggctagaagaatttctttctttgggtcttcttgttttatttgcatgtgcataatggtcagaaaagtggagagaatccagctctccatttccgtctaggaaacccgcaaacacagcagagtgagcagagggaaaaagactcctaggaagccagctggcctcctgctggacctgcacagccggttcaaggtcaactgaccagggaatgccaggatgtggcagtggtcacagtgaagaggatgcatcccctcccaccgagttcccacgacaggcccctcactggactggacattcttcatttcagcaacgtcctcagtgacgatgcttatcatcaccccaaagctcaagaaagtgggttcccaaccacagatggaggactgggctcctctgctcccttctagcgcttccctcctgccctgaactggagggaaacaggtccatgtgtgcattccacctttgacagccaccacagtacatcttaccaggatggatcagcacccccacctggggtctcaagcctcagtcgcaggctgggctgctcacctgccttcccctcactgcagtctccatcccagcccctcctccacgggccctggctgggatgtaactgcaggaaatcaaaacttccctggactacaacttcctgtttggaggggacagaaatcaaggaaaccaccacccctttggagctggacatgggggatctcaggtatcagaccactgagcaacccaccgccaggctgcaggctttcagaggcccacctgggcccagcgtggcctgccccagggtgggctcccagcgcaactgcaggcatcctctagtggggcctctggtaaccctagcagatggtggtgacccccctgagatgaggaagctggtgacctgagactgagcagcagcctatgggctccgggtcaagtgctattcccagcggatgcccttcccctgcgccagtccctccttcctgagtgtccagcccccaatgcaaacagcaaccccaggctctgaaactactttttttcttagaaaaagcaaaacaaaacataaaacttgtttctgattatgaaaaaaaaaaaaaaaaaaaaaa

SEQ ID NO: 299 - DNA, 1436 bp, Homo sapiens
  misc_feature (640)..(640): n equals a,t,g, or c
gagcagaggtaattaataggcagttacaatgtggaagattctggaaagtagagttctgttgtctgaaatttagtctgacagaggaatattagcaagataaatgtatttggaccaagcactcccgagaggaagggcatgctcaaattgtttctgtaaaaagtctctggcggtgtttggctcccttctgcgtccttcatgaaacagttctccttgagtattacggttggcaagcatgtgggtgggggagatgtcacacgcacccgctccagctgtacaagcaagccactgcgaggattagacgcttgttagttatgaacttaggtgtctggtctgtttctttgcctttcaaaggcacttcctggcagagaggtacaatggtgctttgcaggaaaccctgtgcccacagcatctgttctgcagcttggcagaccgcagctggccctgagcatggcctactaattctctgggtcaggtgtggctgtggtgagatggatctcagccaggtaagaccctctaatctctgtwttctttctcctgccatagatacactgatgattggagggtatgacaggaattcttgcctgcctttgggtcgtgagggaaacagaaacagcgtaatggctttttggagtgccaggancaaaatccccagagttcattcttagaaaactatgaagctgttctttgaactccaactttttctcctatattcattcagggctctttcctctacaaccccctcattcttgctgttgatagatgcctctttcctactctctaaatgtccaattttatcttcctttggaatgccatcaaattcttcctccctttttctgtaccccacctccaaaaataatcccaacacccacctcgtcagaktgtccatttatttcctcagggctaatcccagaaggagcatacaagttggtgaactcatactaatatgtgaatgattgttgcccttggatggttagaaaatcaaggtagttgtccactgtagaagattgtttaaagccaagtggttaagaatattctatatccttccttttgcatatattatctcgttcatccttgtgaagcagataatctcaccatctcaatgtacagaaaaggaaactgaggctcagaacattttgagtagcctacttaaatagtctaggcagagattgaacccccacgtctctggccccaagaggtcttgataattccctcacaactgctgcctaacagcagataaaatatatttggattcttctcacctttaagaaaacctagtaagttaatctctaaaaatcagcaatctgctcaggggatacagggagaactaggactattgtcccaaatgtgtagtcatatttatctgcttaccaaatgaccatgtgttgaatccctgaaaaccatgggagaaataccaaaaaaaaaaaaaaaaaactcga

SEQ ID NO: 300 - DNA, 728 bp, Homo sapiens
ggcacgagagacaccagtctgcagtctgtgagcttggtggttatttgtacataatcggaggtgcagaatcttggaattgtctgaacacagtagaacgatacaatcctgaaaataatacctggactttaattgcacccatgaatgtggctaggcgaggagctggagtggctgttcttaatggaaaactgtttgtatgtggtggctttgatggttctcatgccatcagttgtgtggaaatgtatgatccaactagaaatgaatggaagatgatgggaaatatgacttcaccaaggagcaatgctgggattgcaactgtagggaacaccatttatgcagtgggaggattcgatggcaatgaatttctgaatacggtggaagtctataaccttgagtcaaatgaatggagcccctatacaaagattttccagttttaacaaatttaagaccctctcaaactaacaggcttagtgatgtaattatggttagtagaggtacacttgtgaataaagagggtgggtgggtatagatgttgctaacagcaacacaaagcttttgcatattgcatactattaaacatgctgtacatactttttgggtttatttggaaaggaatgcaaagatgaaggtctgttttgtgtacttttaagactttggttattttactttttggaaaagaataaaccaagaattgattgggcacatcaaaaaaaaaaaaaaaaaaaaaaaaa

SEQ ID NO: 301 - DNA, 915 bp, Homo sapiens
ggcacgagtgtacacattttatttccttttcatgtcttgttgcactagctagaactttcagtattgaaagtagtaaaagaagccatgcttgccttggtcctttgtcttagtgggaaagcttccagtttctcaccaacatgatgttagctgtagtttctttgtagatgttctttaagcagttgaggaagttcctctttattttcagtctttggagagtttttatttttatcccatacttcatttcaaaatgctgagaggtttctttgttgttttgttttgtttgatcatgaatgggtgttggattttgtcacatgctcgttcagcatctattggtatgatcatgtgatatttctttagtctgttgatgcgatggattgcattaattgatttttcaaatattgagtctgccttggttgtggtatataattctttttattaaattgttgcattccgtttgctaatattttgaggatttttacatctttatttatgacagatactttaatatccataggatttgcagtgatgcctgctctttcatttcttactttttttttttgagatggaatctggagcccaggctggagtgctgtggcgaaatctcggctcactgcaacctccgccttccggttcaagtgattctcttgcctcagcttcccaagtagctggaactacaggtgtgtgccactacgcccagctattttttattcttttttgagacagagtctcgctctgtctcccaggctggagtgctgtggggcaatctcggctcactgcaacctccacctcccaggttccagcgattctcctgcctcagcctcccgagtagctgggactacaagcgcccaccaccacgcccggctaatttttgtattttcagtagagacggggtttcaccatattggcctggatggt

SEQ ID NO: 302 - DNA, 1156 bp, Homo sapiens
gaattcggcacgagtgcggtccaagcccatggggccacctcttaattccagcttccttgcctactatgacagggaaagaaacatggcaacatgcgcacagctcttaaggcttgtrctggaggcggaacacatcgcccctgcagcctggcactggccatgggacatgggaggtagggggaggcgtgttccagcctatgttggccggtgggcaggtgctcagactcagcaagctccttggggtcattcatcacccctccacccattcatcctcaaacacctgcagagggcttcctctgccaggctgtcaggcgccaagggcacagaaatgagaactgacagtccactgggggagacggtcttcgcatggtcttgccctcagtgtaaggcacaagagtggtgcaggggggcctaaccaggcccccakggtaaatacsggttggggggctgtctgggggaatggggaagaagagcattctgggctgggggctccacaggctcaacacagctggagtkarccacaacagtgaatcacgagaaatgaggctggaaaggccagtgggaaccatggtcctggaggtgggcattgggtggggakctktgcttcaagctgagggcaggattttcagcacagatgactgtgttctgaaagatccctgtgggaagaktgaggagaggggtgagcagcagccaagactggaggcaggaggaccaagcagcgggttgtggccacgtttcaggtctggagtcacccaggagagattctgatcatatgggtctatggtgtgacgtgggaggtggaaggttccaggacaactcccaggctcctcaaaataacaacttttttttttttttgagacagagtctcgctgtgtcacccagactggagtgtagtggcgcgatcttagctcactgcaagctccgcctcccaggttcacgccattctcctgcctcagcctctggagtagctgggactacaggtgcccgccaccacgcccagataattttttttttttttgtattttttagtagagatggggtttcaccgtgttagccaggatggtctcaatctcctgaccttgtgatccacccgcctcagcctcccaaagtgctgggattacaggcgagagccaccgcgcctggcccaaaatcggcacga

SEQ ID NO: 303 - DNA, 636 bp, Homo sapiens
ggcacgagtagcatagtgcctgacatatagcagtttcttaataaatgaagtcattggtctattactattattgctactattgtgcaataataatagacaaaagcaacgtagaggtgaaagtgcagacgcctggcctttgccctggggtttcccctctgctgaggaatctgtggctgctcagctttaagggtgcagggaggtggccacattcctcaggccccagccctggcctcaggcatgaggcaacaaggaaagcaggtttaccttcagggcaatccttgggaaaagaataattttagggacaactagaaggctccatggtctctcaaatatctctcctaaggcctggatgctgcctaaaactcatttcagggtagccacaccactcatcctgctaggacagtaagaaagctcaaatacgccaatacccaggaaagggtacacagaatgtgagtatagttcaggcaaacagcataaaatgatatgagatcttaagagctgtgacactagagacttttctctttttaaaaatttttttatttccataggtttttggggaacaggtggtgtttgtggtgtttggttacatgagtaggttctttagtggtgatttgtgagactgtggtgcgcccatca

SEQ ID NO: 304 - DNA, 1045 bp, Homo sapiens
  misc_feature (607)..(607): n equals a,t,g, or c
ggcagagcctgaacacatgcatgaccatctccatctccggcactgaccccagctgcaggtgagctgcgtccgtgtgagggcactcagcccggtgagaacagggagggcccacgagagggtcccaagaaggcagggccctgatgcagggaaacagtcagagatggagagacaggaaagacatggaccggggtaagcgccactgcctgcccaagtgtgagtgcctgctgccttggtttacctatctggattgtgggcaagtcaaagagagcttggtgcctgcccaccccacctgactcctccaggytcaagcccaggccacatgaggcctgtcccacccgttctcccatggcacagaccgcacccccaccatcccacaaagtctgaatgagatgcgctctctcttctttctaccgtgacgtggctgttccttcccctgcacctgtgtctcgggtaaccccacgtctctctcacgggccagactgggtgtcaccaacctggagtggcccccacaaaccccaggctgggtcagggacctccatggagctcccgcakcccctcaagtgcccaaaacagggctgtgtttgctggcagtgtgagactgaakgangtcgccctttgcaaggcgaagaatcccctccttggagatggcaggccagggcccctktcgcgagmatccctgatcagcacggggctggcccacgaggctggggttctgcccattcccagytctgcacctgcatctctgagcctcagtttcctcacctgtgggatggggcaatggcgtccgcccctcccacccacccccaccgcagcccacctgctgccacttacccagcaggctctgccgctcctctttcttccgggccttctgcttggcctccagctgtaccacagacagggatggacccaccgtggggctggggagggcgctggcggcgaagcgtgccakcaggcccakcccactctcctccaggcccggtgacagggcccgctcccgggcacccagcctgtagccaccaccgctggcctcgtcctcctcctcgta

SEQ ID NO: 305 - DNA, 1425 bp, Homo sapiens
gaattcggcacgagctgtaccaaggcttcagagtgagcagggggacatctggataggttagccagggccacagagagaagagctgcttacacctgaattgtttcacccttttcaagaacagggttgtccttctccccatctggatccttgggctagatctctgccgaggggctccgtcaagtcccgcaaggctagagaagggagccccacatcatttccactttcaaagagggaagatgctcgtcattcaaattacttctgttgatttccatggtatccccctgtccgtcccacaatctcttaccaggcgtcaatgcacatgcaggggatggaaagaggatgagccgatgagcagactttgcattaatcaaggagaaagaaaaagcagatggaaggaggtaggtagatggagaaagcaacagctccttttagcccttgatgacggccctgaaggcctgtctcttttagtgactcctctttgggtcctcttcccctacctctcagtgactaggttcctcatattaattccctgctgtgagtttggctccttgtgctgggcaattcagtcatcctcagaaagagcaaagttggtcttggaattaaggtgcaggtggggaaaaagagggactcagctagacacgaagaaaggctctcttcccagtctaagcccttytaccgtaaggggcattttatcaagacagccacccaactccccatcccatctcccctcctttgtagaaacagcatttgactcaccaagcctttctctccctttccgtgtgtcttgcttagtttctggattgagagaatttctatccttgctccctcgaactctaaaagagcttcttttgaaaactggggagtatcaggcctacctctacatgtgcaacagtgccaggattcaaaggaaaagctcattccagcctctgcctcttgggagatggttcagagtgccacatagggactgaaagagggtgtctgaatccttcaggaatgctttaagtgacattgttgaaaagagataaagaaaaggaaaacaatggaattgggtttctaaggtccctggaaatatcctgggggtctaattgagaaagaaaataagaggaaatttgaagactcacttcttccttcatctgaatccactcagatggcaactgatctctgtcccaaggaccctctaccccacccaattcataatcatctcagattagaaaaggcagaattccttcccattctcaaatcagcatttgggttaggggcccctaagttacgtgagcatgttagaaatgtgaccccaggcctcaagagagaggctctgccacatgagaggagataggaatcatgactgaaaggggattagcacagaacagagaaaactgatttgatagacaaatcaaatagaaaaaaaaaaaaaaaaactcgtag

SEQ ID NO: 306 - DNA, 1002 bp, Homo sapiens
ggcacgaggccaacatggaagccacagggtctctcgtgccctgatctgggaagtggcaggccgccaccaacactgctgctgttgttgttcatgctaagtcttggcaagccactgggtcgcacgtagggcatgtctccattcaggccagccgcatttcgagccacacgtggttcgtggcaactgttggacagcacagatgtagggcatcaaaagcctatgaccgtatgcaacctggtgcttctgagatgctcacgtggtccatgggtagaagttgttcacctgaggtcttggctacctggcattagcccacacacagatattagtgtgcccacctagtgtgcagagtagcttaggggtgcatccctctgtttctgccctagctgataattctcttgaccacaggatcccagtttcccttcctttatatgtaagacactttgttcagtgtctttatttcataatcactgtcgagaaatggaggtaaagtagtatcagttgtctgtagacttagtggcagattgtgggggaggctgcatcccaaagctgggctggccctggaggacaggctcagggacagctccatgtcccctctcatgggtgccaaaccattctgtgagtgcctgtgcttcaaaggtgagcccggagagctctgtactcggccccctctggccttgagggaacgggggctgggaggtttctggctggaccctgaggggctgcttgcgggctctgggtctttggacttggcaccgttgccttggcatttgttggcttgggagttgttgctgctgctttttcccagatgcatgggcctgctaatgtcagtgtttgacaaaccaaggagaggacactttcctgagctcttgaagtccatgctttatcgtttttgccttcagatttcagagcgacctagcagccgtgtgtaacaaacacgtcacttgtccctgtggagattggcccaccagcctccactggcaccctgtccactttaacaagcacact

SEQ ID NO: 307 - DNA, 1103 bp, Homo sapiens
ggcacgagcggcacgagtgccaatacaactgctgtcgccctcaatgcgccagcccaccctgcaaggctcctaccacctggacccgcagtagccctcctactgctccgggggagctgcagtctctgttgctgccaccaaccgcataaggcgagctgcaaagccatgccatctgcaggctccaatgtaccatagatgactcctcctcttcctcctcctccagcctggcttggagcagctagatgggcaaagctagaaaagcctaaaacgggatgcagggagtggtagcattagagcctcaccttgtcacgctggccactgggtggcagggaccagtttcagcaaaggcactcacacccaccctccaaagtccagcctctccttctggcaaaagctggccaggaactggggcccagggtgagtgtgtgtgcctttgctgaaaccagccctaggtcaggtcctgctggacagaaattgctgggtccaccagggctgcactcctcagggagcaggagtaggagaaactcaggcccagccagccctgcccacccaagttctggttcccgttcctgatgcctccacccacagtgccctatccccccacccccaccacagtggtgcccactactccctgcccagtagtcccaggttgtctctgcaacacagagcatgagagcatgggccagggaaccacggtgggtgtgggggccctgtcatactcaagattgtgcaaggaggaggagatcactctctagagtctggaattggggaagaggagaacggtcccttccttggagaccacctgaaggaggaaggaggccactgctgtcactgccacctccgcagcctgccaacgccactagcagtgtagcccctgatagcacccctaacctgctgcctgctgcctgccaccaacagtgtagcccctggatagcacaccaaacaaaccccgcaccagctgcagggtgtgtaaccccaatatcccccccaaagcaccctccctcccccagagcaggcagtgtagcacccaatagtgcccacaacctgacccagccatgggtgttgctgcactagatagcacccgaaacctgcccccccaaccccac

SEQ ID NO: 308 - DNA, 1029 bp, Homo sapiens
ctggagccaccatggagagtgtgtcatggggctctctcttaagtcaaattctgcacatggcatgtgaccatcctcgtgggctcactgttggtgcctgaggttccttgaaggtggtatcaggatctcaaggtcacctcctggacacagcatggatagaaaggggcagggttcatgccctggaggtggaaaggcaagcagctcatttctgagaagcagtgtggcctggggggctcataacaccaatggccccacatggtgtctccaattaacctactgtgagcaccattacctccccacactatccaggatgtcagaaacctaaggccacggagaaacttcccagcaatctttctttagaacagaaggtggcctgagttaaacatcggtgccagcacttcttgggtggagatgagaaggggctgcgaaatctcagcccagaagggacaagcatckgggccaagtttttacaatagccccytgggctcttgcatcaagagccttgacaattgccatggggcatccagcaagtctcctgatgtggatgagccctccttcccacaatggaacccagattggtgggggcagggacccaggagacagaaaagagtccatgtaactagaaccccctaaacaagatgccccacattgccaaggggggaacatgtgagcagagtggtagtgcctgggcaatctcttcccttgagcctcctctgtcatgcaggaaactcattgaaggcaaagagcagccaaggggattgtccccagaccaaagagaggacagatgagtgggggtaaccaggggtcttgagtccccagggcctgcgtggtcaggactcccagtctaccctccccctgtgtggacgcatcatcttgggtagtagtcatcggggacacccgttaggttccgccctttgagggctgcatccaccatcttgatgtaggcagagatggtcttctgcatgtccgcagtataggggtcatactcgagggggggcccggtacccaatcgccctgatagtgagtcgtatt

SEQ ID NO: 309 - DNA, 585 bp, Homo sapiens
ggcacgaggagagaggtaactcttacatgagcggacaggggaaggcagagagggcagaaaaggcctctgagctcacgattttgcttggcggtaggaaagttaaacttatctagcgaattctctcgtttttcaaactcagatttaagctttggtgagttagattctttgaaactgcccctgcaaatggctcccgctccctgctccgcctccccacgtcctgcggggggacgggacggtggcggtgctcctgagctgtccttcttgttatctgttcttgtctgacctgtggcatggtgccgcccagtgcccgctttcccaggcagcttcctggctttgggagcccatatggagtcaggcttctcacccagtccacctgcccaccttgttggcagctgtcccactgagcccatcctttcccagcccctccagcctctgagacttgagccctagttaagctctcagataatttctgccatcctttctgtatccgtgggtcacacacaaattccactacagctgtaaggaaaagtcagggctgatccaagaccttcgttcctcactcttcaaagaagcctccatggttat

SEQ ID NO: 310 - DNA, 541 bp, Homo sapiens
ggcacgagttgttgaccctacaactaatcctctttctcagctgcaactggctgtcttgatttgctgtgtgcatcgggtaatggacaaactggttgcacaaactcctgcccatggctcctgtgaccacagcaacttctccatcctcgtatcatctccccatgatcctgctctttttgccccatgttgctgctctttttgctcaaccttctccctgttcctcaggcactcccagctctttcctggccttgggtctttgtgatagccattcctcttctagggagcacggttctcccagatctttgcaaggcaggctccctcttttccttctcttttgctctgatgcctttgcctcagagctgccattgtgccaccccagtgaaagcctaacttccttgtacccacgttcacacagcacccacctttcattctctgcatggcatgtcccgcatcctgttcttcctcttcattgggatttgcagcctgggcgcggtggctcatgcctgtaatcccagcactttgggaggctgaggtgggaggatca

SEQ ID NO: 311 - DNA, 1195 bp, Homo sapiens
ggcacgagcgcatgggcagggaaagtgttttattgttatggactaataatttagaggctagggaaggaacggccttgtgtgctggcctcgttgtaacaatttttctcatgtgtcttccagcctgttcatctgtcgcgtttatttctaaaaagtcctctcacctgccctctgctgtcctcagatcccatccacggccctcacctccctcatccttctctgtaacctctgacaattctggatgacctggtccccgccatgcactttgggcttgcccctgccctgtgagtagcctgacaaccctgcacacacccctggggtggtgccagtgcctgctcctcctcctggcctccctgccacccagcccaggcatgaagctgaacatcgagtgggccccaggagagaggctgagttggtatggccaggactctcccttggcccagtgggaaggtgcacctgcccacttgggagcaggcctcagcacccctcaccagtttcaggttgcccactctcaacagcagctaagtcagagctccgagggctgctccccacccaccttcagcctcccaggcctccccttgcccgcctgggccctggagacacatgcttcagccacaggcaagtctgtttcccttccatggggttttctccacaccacagcagtggtacctctgggcttctctccctggcccctgccccaaggagcccagatccagtgtggtgcttcttagactgtggtctgaggcctcctgcttatagaacaggcagattcccagacattgcctctcccctaaccaaagtttattgattctgagtctctagggctgtggcctatatttgcatttttaacaatctccctcgggactttttatgcactgagatttgaggccagggttgttctaggctgtaccggcaggtggactggaggccacagagaagaggcagagtgaaattgtgccgggcctggcttggagcacccaccagcccccggaagacaagtctcacccagagctctccggttaagcctgccgagagagaggcaccaggaggcaatctccacactctcagacaccagccgtacccaaagattgatgatttcagacaccggcctcccggccacatcctcactgcctcactcacgcgtcacaccatagctcttggtttgatgtgtttgtctcactggttacacgtgtgtccc

SEQ ID NO: 312 - DNA, 1047 bp, Homo sapiens
  misc_feature (5)..(5): n equals a,t,g, or c
ggcanagactcaggaggctgaagcgagaggatcgcttgagcccaggagttcaaggctgcagcaagctatgattgcaccactgcactccagcctgggtgacggcaagaccctgactctaaggaaacaaaaacaaaaacaaaagtgggtataaatatgactgcaaaactgctctgagctgctcctctctgcctatgcggtagccctgctctgcaggagcggtcacagagcagtaatactggctctctaataaagctgttttcttctgcctccggtttgcccttgaattctttcttgcacaaagccaagaaccctcctgaactaagccccactgtggggcttacctgccctgcatgaggtaagtatcaactatggctcaaaaggcaggtcaaaggcagcttttcaagtatatttgtgtcacagaaactcccactgtaacatcaaaaaatgaatgattttttcaattccctttattagggtttctttccctgcccccctcatttctccacttctttctcttctctccgtaggtatatagttatactctcccctcacacactcattttgtgtatgttcaaaaatattttggttatcttttatttctggtaactgctttttcatcctgcatgagcagccaagaaaagaattaatttagactttctgcaatgtcagggcctctcattcaattactctccttgtctcttggaagctctggtaacttagtttaatgacctctcacaccttacatccttaaaaaatgccccgtgtgtctcctggctcgggcagtcttaattatgttggcagctttaggtttccttattaccagcactccaggacctcatccccaccctgtccccatcttcatcttcacccagagcttcccatctccccacctcccttatcgccaatttctgtctgcactttatccacgatattcccatgttttctgctcttactagaaacattattttacccagcactgcatttttaaactgaaagaagatggtgattattatgcccttatcgaaatccattacttgaaaagctcga

SEQ ID NO: 313 - DNA, 1246 bp, Homo sapiens
  misc_feature (746)..(746): n equals a,t,g, or c
ggcacgagggccaccaggcacatctgctccactgagctggtgcagtgcactgccttgtccagcaggtggtggtactccaggtcctctgtcagccgctggagcatggacaggggctcattgaagttcacctgtgggtggacaggtgggtggtcaggctgggcaccagcccggcttggcatggtgcccttgcttttctcggatgttcagggacatccctgstcagacagcaccttcacagtgaggctcctcagatggccctgtccaacagtgtggcccccaagccatcacctccctggcccctcctgggctgttttctccacagcccttcccactttctggtctgctgcatcctacacacttttatcatgttcactgttgctctcctctgctcggatggacacccamcaaggccaggggttctgcctggcccactgctgtatcttgagtgcagaatcttaggaagcagtgactgaatgggcacatgagtctgtgggtggaggaagtgggtcttccccatgttgcgagctgtgatggggcccggcacaggatgggttaggcccaakgcccctatcycggtgtcacatakggcagggtcactctccccaccatgatgccatcgggtacgagtctcagcttcctcgtgttatcttgctccatcctcccagacactgaagaggacgctgtgtttctccccaccctacacatgtggacacagaggctggagatgtgaaggaacttgktctggntcacacagcagaaccktctggcctagtggagatgccatgtagccaggtggcatgaggatccaagctctgagcctgcatttcctggggatggcaccagggatggctgccagctgaaggagggcccacccctccacacacagccccatcytgccactccccatctacagatcggkacagctgggacatggtaaggtcctgtgagatccagaggtgctctggggctccccaggttgctgatccatgcagagcttctccctggctcctcctgtcagagcccaaagatccctgtactttggaagattgggcaatgcctatgtgcacgattagataattagttacatgctcctcaggtgccgttaagaaaatgacactccaaggctgtgtgtacttcacacaggccattactgctcatccatgcacaggaaagcagccccagaggacctgtcggggctgccctgcccgagccacccaccgaaaaaaaaaaaaaaaaaaaaactcga

SEQ ID NO: 314 - DNA, 1048 bp, Homo sapiens
tgcaggaattcggcacgagccaccaccccagcccattatctctattgatcctcactccaaccttgcaaaataggtagcgtattccagtggagaaactgaggcacaaagaggtgaaagacctttcctgtcacagttaggaaagtggcagaagccgtatttgaaccccagcaggtctccctctgaagtccacacacgtcagcgcctctgtgttgtctctttgccagcacagggctccctggagcccagagatgggggtggtgacttgaaggggttggcaagcctgggctcctccagcgaaaattcccttggccctgggcattcctaagcgagaagaggctcaatcctattttcttctcctaattggatgccttttattcctccttcctaattgaagtctggtcattgctggttgccatggcagcagccaaagcgctcatctcactgtggcttgtctctgcctgcggccaatgggaaacctcctttcccatatacggtggggacatggagtgtcaggctgtcgtattctggtggctggaggaggagaggaagtgagatgggaggaaaaaggcctgtcctctcccacgcagagactccggacagcaggatgtgtggaatccccagtctgttttcagccaggcagcaacagcatctgtactgagttgagtctatgtgtctaccagtgggctaagaacttcatgtgcagtatctcatttaatcttcgtgatggccccaggaagataagggatcaaggcccagaaaggctaagtaagctgccaggtcatccaaggagaaaatggcaaagcctggatttgaacagagactccagcttccttatgtgtagccatctcaccatgctacttctcagggggttactatgagtgtctctcatgtccccagacccagattacaggtttggaggaatacacagcccaccttcccaatatcgcaggcaacagttccaccaaatgccctgcatggcatcacagggagcctagttgcccactgctctactgctgagctcaatgccacccagcccgggctctctcga

SEQ ID NO: 315 - DNA, 1530 bp, Homo sapiens
gaggggcactctcccagctgagcccggatatgaggtgtggggagcccagcatgggagcagggctgagcccagataccactgcctgcaagcctcagtggcttgcggccactgccctgtctgcgcctcagtgtccctatctttaaaattcagagattgaattgggggctctagcaaacacagtggacctggtgatggctgggctggcccgggccgaaggatgtttcccgcccggctgtgcctcctctgtccccatccctccctcggaagcccagagtgcagttttccaatataccccagcctcatgtgggggcactgggcacaacacacagggaggcaaggccctgtcccttccaccagtctctcccactgtggctgcccgagtctgtcctggaactggcagaggaagacattagggcagacgtcgagggcgggggggtcaccgtccactgtcatggcccctctccccacccccctcactgctctgggggcctcacaccttcccttccgctgcctctcctgcctggatgcctgcctcttcctgtggggttatctaaactctgcccaccctataggggccagctagacccctcctcctcagccccaaagaggagcttgggtccggctcacaggcgaggggagcctggaagccgtgagtcctgaggaactaactgctgggcagaagggaggcaaccggggctgagtaaccgagatcctgagactccagggtctcccaccacagaacagccccaggagtcctagccatgtgggtggggtagagctatgtggaccagcctccatggctcagtttccccactggctcctgtgcacccccatggcccggagcagggagcggaggagtggtcctctctgcctcagtttccccaccggctcctgggcacccctcatggcccagagcagggagcagaggagtggtcctctctgcctgactcagtttccccactggctcctgtgcacccctcgcggcccggagcagggagcagagcagtggtcctccgccgccccctctgaaggtccctcaagccctgctggaccccctcctgcctcagcctgggttccagctcttctccaagaccaagaccccagctgccccaggacagctctacaggtgtggaggcctggtccagccacagctccagcttacttgctgtgtgacctcgggcgatgctggacccttctggaaaatggaccggctggaccatcttcaggggctggaccggctgatctccgagggaaaggaggcacatttatttgtgagaccattgtctttccatctggggatgccagctccaaggcagccaggctcctctgggctttgtcccaggctccaggtagggcacacagttggcccttgtctgccatcagcgctcccagggtggtctctcacctcccgccctccctccccaggaggctggaagaggtgggacagaaccaggtctcaatccaccagccttgggaaagggacatccggggcagggcgcggggagggggggcacggtgctgcctcgaggg

SEQ ID NO: 316 - DNA, 1178 bp, Homo sapiens
  misc_feature (138)..(138): n equals a,t,g, or c
gaaagcaggctcatttggggactgattcaagcagggttctgaagaaagagctagcccactgcgcagtggcccacctggagaggtagcagtctcctttcctgatgccagatccaagcagaggctaatgctggagaccangatgcccgtgggagaatccctgtagctagagggaattatctggaagtaatttatccctgtaccgccttgtggggttgggtgtttcttgcccactgcatgagttggtattactctaagagcgacagatacatgttttcacatgctttccatgtactagacactttctaggcatcagttctcaacatgacaaagagatccttctcagggaaatcagatccctcttccactgctgaaaaaccccacagtggctcccatttcacttggcataaacaccagtggccttgcagtggctgccaaggtcaaaccatctgcctttctgcttcctgctcacccttttccttcatcttctcaycttttctgtcttctccatagctcacactcccctagccacactgttctccttcctacaatgcagcacactgggcatgcttctaccccaggscccttgcaccagccgmaccatctggttgacatgcttctcccacagattcttgcttggctaactccgttgtgctctggtttttgtcaagcagtcaccttctccatgaggcccacctgggccaccatatttaacactgcagtctacactgcctctcctcccaccacccagcactcccaggccctcactctgcttcctttattttttccatttcgccagccatcttccaacacatgggaccacatccttatttattgagtgtcttgttgcaggtctctaagactgtgcctgccttgttcactgatgtatctctagcgcctacaacagggtcgggcacagagtaggagctcagtaaatacttgtggaatgaatgaatgagctcattttacctcaatcacaactccaggggtagacatggtgatttcactccattttatggttgaagctcagaagcttacggaacttgcccaaggtcacatagttagtaagtggctgagtgacgcatcaacccaaagcctgtcttactctggggtcctggatcttaaccaaaacactaagctcttccctcctccaggtgagcccctggtcctgatgcctcgag

SEQ ID NO: 317 - DNA, 825 bp, Homo sapiens
tgcaggaattcggcacgagccagagcagccctcaaagcctgggctgttgagagtgcacatcctggcctgcggtgacagccgtcagatggtgaggggccccaggcgactgccccagcagcagggcctgggagctgcacaggggagaactcgataaggagcatcatgagcatagtgggtccattgacaacatgcagtccccacggtggtgcctaatgacaaaatgacatcatgccacctgcaaaaaaagtaaaaatgatcagaggcgagcttgtcagagaagctttgaactaggtgactgcatgaaacatctcagaggcggaagagtgcctccccctccccgggactcccacctggtgccctgagctcatcatcccttctcttgtagcatatgctgtcaatacccagggccttttcgaaacggcaatgggtccgaaggcctcgggaccacctttcacacctcccctttatgcagtgtccatacctccttggtgctcagctgctggtcagctccatatgccctgtggtccctgccctcccaaggcctgtgaacaaatgcttagtcccagattagagtctacgtcaatctgggatgtgagctgagtggcacctgtcgtgaaccaggccagagtctacgcaatctggggtgtgagctgagtggcacctgtcgtgaacgtgcatgcacatgggcattttgtcagtctgcaccggtgaataaatgtcgctgcatttgccagctgagtgtcaccaggttccaggtcccattacacatcaggaattgtgtccgactcttctggatccgctgattggacctgagggatccctgac

SEQ ID NO: 318 - DNA, 853 bp, Homo sapiens
  misc_feature (20)..(20): n equals a,t,g, or c
  misc_feature (40)..(40): n equals a,t,g, or c
aattcctaacgcaaaagcanccctggggaagaacacaganacaggtgacacgtgtcagactgggcccatgtcaggtacatgtatttcccttcacctcaccctgaaatgtgccatttcagaaagtggtgcatttaccagacaatttgggttgatcatcatgttagccacttggcatctcagtcaccatcttggtcacctggtcaacatagcaaccacatctcttggtcagctagctttatttgcaccttgatcactaagatagatgtcatctgcaaagctgtttaataatcttaataatggtctttattatttccagatccctagagtaaccttagaacagcaagaactattcattcatccataaattccagcaaggtgctatagaaagcactatggaaaaaagaggaaaagagagggagaacatattgtaaaagtagacagggattctgctactgagaaattcaacacctggcaagggggatgaacaggaaagagaggtgctggcagaataaaatcactccccagctccccacacaatgagcaatgagtatgctatttctattttgtgtccatgtgtccttgctcatattcttaatctgcagcccaatgctctacctctgagctataccccctcctccttgctcatactcttacttgtgacttgaagtgacttcctgctcctgcctattgtcacctcccccatgaaggcttccccaattatcctgaagcagagacagtccatccctccctcccctgtgcaaccagggcccctgggctgacctcaagcttctcacacttggccataactagcttttaggtatttatctcccacactagactctgagctcctcga

SEQ ID NO: 319 - DNA, 573 bp, Homo sapiens
  misc_feature (3)..(3): n equals a,t,g, or c
  misc_feature (35)..(35): n equals a,t,g, or c
ggngcttcagggaattcggcacgagctcgtgccgncagaatctccagctcttatatccagagtggcatccgtgtgacatagtcattctttgtatgtgtgcctttagcctatgggtcattgtcagaatttagaaattcaaggtgcagccagttacattgctagagagatggaatatttcagagtctctgcagcttcctttaagaaaaatgtcttcttttggaaagccattcagaaaacatactcagtaggacagtttcaacttattaaactttcaggaaatttttttaattgtctcacactgtctcttttgctgtataaattttaacagcagggtaaagagagaagcgttcttgaatttcactagctgcggagaaaatatttctcactgccctgggatacataggaaatcacagtcgttagtttcagatgtttagtttgggatattcaggtgcattcacaataccttttgattcattattactttaaaccatttgtggtttgatcctacaaattgaggacttttctccagatgtgaaaaatacaataaaattttctaacaaaggggatctcgta

SEQ ID NO: 320 - DNA, 903 bp, Homo sapiens
  misc_feature (18)..(18): n equals a,t,g, or c
  misc_feature (27)..(27): n equals a,t,g, or c
  misc_feature (56)..(56): n equals a,t,g, or c
  misc_feature (94)..(94): n equals a,t,g, or c
  misc_feature (889)..(889): n equals a,t,g, or c
  misc_feature (898)..(898): n equals a,t,g, or c
  misc_feature (900)..(900): n equals a,t,g, or c
tgttaccggttcgccggnagccggaancggaccgaaccgcaagcgaattcattgancgaggaaccggaaggagcgcccaaatacgcaaaccgcntcttccccgcgcgttgccgattcattaatgcagctggcacgacaggtttcccgactggaaagcgggcagtgagcgcaacgcaattaatgtgagttagctcactcattaggcaccccaggctttacactttatgcttccggctcgtatgttgtgtggaattgtgagcggataacaatttcacacaggaaacagctatgaccatgattacgccaagctcgaaattaaccctcactaaagggaacaaaagctggagctccaccgcggtggcggccgctctagaactagtggatcccccgggctgcaggaattcggcacgagacgacacgataaataaaagcagatgttcaaatgggagacacctgaagagacaagttagtccaatggataggagcgaaggaaactgcccctttgtaaagattgaggaaaagagtgtaaaattatgctctcattacactcatgctgttactaaggcctacagagagaaggtattgagaggtgacaacatgctggcagccctcgcttgctcttggcgcctcctcagcctcggtgcccactctggccgtgcttgaggagcccttcagcccgccgcttcactgtgggagtccctctctgggctggccgaggtcaaagccagctccctctgcttgcagggaggtgtggagggagaggtgcgggcaggaactggggctgcgcgcggcacttgtgggccagctcgarggggggcccggtacccaattcgccctatagtgagtagtattacaattcactggccgtcgttttacaacgtcgtgactnggaaaaccngnaaa

SEQ ID NO: 321 - DNA, 909 bp, Homo sapiens
ggcacgagccagaagagggattgctgggtcatatggtagtttaatttttttcagcaatctttgtattgttttccataatggctacaccaatttacattctcattaacagtgcaaaagggtttttgtttctctataccttgccaacttgttatctattgactttttgataataggctttgcatttgcctgatgattaatgatattgaacacattttcatatacctgttggccactttttatgtcttcttttgggaaatgtttgtttattctggtacttggcctattttttaattgggtttttgtttttttctttgctattgattttcttaaatttttggatagtaacctgttatcagatatgtggttcacaaatattttctcctactctgtagattgccttttcattttatcgattatttcctttgctctgtagaagcttttcagtgtgatgtagtcctacttgtttgttcttgctttcattgcctgtcctatcagaaaaatcattgccaaggccaatatgtatcagcttctttcctatgttttctcctaggtgttttacagattcaagtcttatgtttaggtctttaatctgttttgagttgacttttgctcttggtgtaagataagggtccaatttcatccttttgcatgtggatatccagttttcccaacactagatatgaaagagactaaactttacccattgtgtcttcttggtgcctttgtctaagacacttctatgacagttgtttctcagatgggtacttgtttacgtgattcacaacagtgaatggaaatgtttaccactcatcactccatctaacacaccttgttaagacacatgtaaaaactgttctaatagtaccagttgcaactataactgaaaatagtattattttaggaactagt

SEQ ID NO: 322 - DNA, 901 bp, Homo sapiens
gctcgtgccgcacgggaggcagaggttgcaatgagtcgagatcgtgccattgcactccagcctgggcagcagagcgagactccggctcaaaataataataataaattagagatggggtctcactattttgcccaggctggttttgaactcctgagctcaagggatcctctcgcctcagcctcccaaagcactgggatcacaggtgtgaggtgccatgcctggcccacaccagctgtgtttaatcaatgctgggcagccctgcagcttggtgacatcagtgggccactggctactgggtgttttttccatcctgccctgttccctgctggcaccaggggaaaaaggcccatacaggagtctgttccaggtcaccagatcctggggtggcccgtaaggatttgaaggggacaggaggcgcccctttgccgaggcccttcactgtgtcaggcacattgctggctgccgtgggtgcacaatcttagggaaccctcctgcctcctccgccttgctgcttccttgcaaagaaaatttcccactgcagagggcagcttaattgctcagcagtggctcttcagaatctcacagatgggccaggcgtggtggctcatgcctgtaatcccagcactttgggaggccgaggcgggcagatcatgaggtcaggacatcgagaccatcctggctaacatggtgaaaccccatgtctactaaaaatacaaaaaaattagccaggcgtggtggtgggtgcctgtagttccagctactctggaggctgaggcaggaggatcacttgagcccaggaggctgaggttgcagtgagctgtgactgcaccactgcactccagcctgggcaacagagcaagaccctatctcaaaaaaaaaaaaaaaaaaaaaaaaactcgag

SEQ ID NO: 323 - DNA, 790 bp, Homo sapiens
  misc_feature (5)..(5): n equals a,t,g, or c
  misc_feature (9)..(9): n equals a,t,g, or c
  misc_feature (11)..(11): n equals a,t,g, or c
  misc_feature (18)..(18): n equals a,t,g, or c
  misc_feature (92)..(92): n equals a,t,g, or c
  misc_feature (756)..(756): n equals a,t,g, or c
  misc_feature (764)..(764): n equals a,t,g, or c
  misc_feature (771)..(771): n equals a,t,g, or c
ggggncggnanatggaanggaaccctcactattgggttcaaaagctggagctccaccgcggtggcggccgctctagaactagtggatccccngggctgcaggaattcggcacgagatttttttcttgaaacacaaaaatgcatgttatgccagggaaggaagaggagaaatttctcctcctcatcaccatcatgactacctcctctcttgcggttggctgcttcggatggttgaggctcctgctgcattttttagatccgggcaattatagccaccaagatgatatggaccaaagtacagtgttcaaacatgactgatagataaatgaccatttatcatcatcgttttgttaaaaaaccttttttcttataaagttaacaaaccaaggctgttgatccctgaattagaaagttgatttgcttgattattttccaaagtgtgaggcgggcaataagaagggaggagcctttagtgcttttgtgtaagttgctgatcctccagtttggcaacatcttgggagcatcttctggcctagtgatgtggcattttgtgaatctaagtatcagcccatggctctgatgctggctgcttatggctcaaaggggaagagggtcagccccctccccctggatgtttcagtctggcccagtggtggacacagagccctggacagcttccccaggagcaactgtctcttcctgtgaaggtgactcttcctcagcttgtcctcgagggggggamcgrtacccaattcgncctatagngagcgantacaattcacttggccgcg

SEQ ID NO: 324 - DNA, 1959 bp, Homo sapiens
ccacgcgtccgattgctctttatttccctatctagattttctaagtatcttagctttcttaatataagtttaacttggtacttactgaaaatgcctttttacccctgttaacggtattttgagcttttgaaaagaacttggttgacactgcttttattgtggataaaggagagatggtcagtaattaatggcttgaagtattattggagtggtttatcatttctgaaactaatcgtgtcagaattgactttgaaaagcattgctttttacagaaatatattaactttttaggagtaatttctagtttggattgtaatatgaaataatttaaaagggcttcgctcatatataggaaaatcgcatatggtcctagtattaaattcttattgcttactgatttttttgagttaagagttgttatatgctagaatatgaggatgtgaatataaataagagaagaaaaaagaataaagtagattgagtctccaattttatgtaagcttcagaagaactggtttgtttacatgcaagcttatagttgaaatatttttcaggaattacatgaatgacagtcttcgaaccaatgtgtttgttcgatttcaaccagagactatagcatgtgcttgcatctaccttgcagctagagcacttcagattccgttgccaactcgtccccattggtttcttctttttggtactacagaagaggaaatccaggaaatctgcataaaacacttaggctttataccagaaaaaagccaaactatgaattactggaaaaagaagtagaaaaaagaaaagtagccttacaagaagccaaattaaaagcaaagggattgaatccggatggaactccagccctttcaaccctgggtggattttctccagcctcaagccatcatcaccaagagaagtaaaagctgaagagaaatcaccaatctccattaatgtgaagacagtcaaaaaagaacctgaggatagacaacaggcttcaaaagcccttacaatggtgtaagaaaagacagcaagagaagtagaaatagcagaagtgcaagtcgatcgaggtcaagaacacgatcacgttctagatcacatactccaagaagacactattaataataggcggagtcgatctggaacatacagtcgagatcaagaagcaggtcccgcagtcacagtggaaagccctgaagacatataatcatggtctcttaccttaaggccaagctaccgagatgatttaaaagttcaacgacatggtcataaaggaaaaaattcgtctcgatctcagagcaagttcgggatcactcagatgcagccaagaaccaggcatgaaaggggcatcatagggacaggcgtgaacgatctcgctcctttgagaggtcccataaaagcaagcaccatggtggcagtcgctcaggacatggcaggcacaggcgctgactttctcttcctttgagcctgcatcagttcttggttttgcctatctacagtgtgatgtatggactcaatcaaaacattaaacgcaaactgattaggatttgatttcttgaaaccctctaggtctctagaacactgaggacagtttcttttgaaaagaactatgttaatttttttgcacattaaaatgccctagcagtatctaattaaaaaccatggtcaggttcaattgtactttattatagttgtgtattgtttattgctataagaactggagcgtgaattctgtaaaaatgtatcttatttttatacagataaaattgcagacactgttctatttaagtggttatttgtttaaatgatggtgaatactttcttaacactggtttgtctgcatgtgtaaagatttttacaaggaaataaaatacaaatcttgttttttctaaactgcttcaaataccttatttaaataaattattaaaaaggaaaattttaatagcaaaaaaaaaaaaaaaaaaa

SEQ ID NO: 325 - DNA, 922 bp, Homo sapiens
tgcctttcaggctcttagaagccatagatttggacaagcccagcaagatgggtgtccttccaggcctcttcccctttcctccatctctggcaacagttcttggggtttggcaattgtttggattttttttctttctgcagttgtgtgtatgtgtgtttgtgtgaagaaaaacagactctgtccaggtagaaatggtgaggagggggaagagaattacatttccagggtcagaaacttggcaacagttttcctagagtgactcagacacaccacagtaacaactctcgctgcaattttattttaatttgagaaataaagatttcctccaagccacatgaggactctggcacccacccacaaagcaagacctgtatttataagccgagggctcagggagcctaactgcgggacccgtcagggccccgtgacccatccccgtccccacccccccctccaccgctgggcccatcagtgtgtgttggggggatgcttggcagctgggggtgaggagacaacaaacctcgggaactggagccagagctgcggcctgactgacgccttttgatgctcacgggaaatttctgcccaggatctcagccccaggctggttgtttctacaaatctctctcaaatgtattattttggtgacaaaaatgaaggagctttgtaaatttttttaaaattatgaatcatatcaagtagttgtttacatttcttgaaaaaataggaactcgggcagcagaatcagattggcagaatctttagactacacaggcaataatcaagtctgctgttttggcctttcgtagtagaagtggttgtagtgtttagatatctgtttggtcttgcttcttgtattgcatttttttcaataaacaacaacaaaaagaaaaaaaaaaaaaaaaaaaaaaaaaaaaaaaaa

SEQ ID NO: 326 - DNA, 927 bp, Homo sapiens
  misc_feature (883)..(883): n equals a,t,g, or c
  misc_feature (912)..(912): n equals a,t,g, or c
gcttcatcggtgaacaagggtgtttactgaatgtggagaagtcagtgaaatctccacagtgacagatgcactctggagatggggctgaggctaggtgtgcacctcccctgccagccatcagcagcctgcccacgtctgtcgcgttatgagttgttgatcttaaatttctgcaaatgtttcttgttacagagtatggtgtttgcraaaacttgcggaagctggagatcacaggcgtgtcttgtcgggacgtctatgcgaagcgtattaaaccctcgcgtgaagtcgggacgttttgtgaaaattctccctgattatgagcacatggcgtacagagacgtttacacctgcctgcttcaccgatatagacacattttgggattgtggcagccagatatcgggccatacggaggactgctgaacgtggtggtggacggcctgttcatcatcgtaatgaggcgtgcgccgccaatatgcactgtacattccacaagcattgccttcttattttacttcttttagctgtttaactttgtaagatgcaaagaggttggatcaagtttaaatgactgtgctgcccctttcacatcaaagaactactgacaacgaaggccgcgcctgcctttcccatctatctatctggctggcagggaaggaaagaacttgcatgttggtgaaggaagaagtggggtggaagaagtggggtgggacgacagtgaaatctagagtaaaaccaagctggcccaaggtgtcctgcaggctgtaatgcagtttaatcagagtgccatttttttttttgttcaaatgattttaattattggaatgcacaatttttttaatatgcaaataaaaagtttaaaaacttaaaaaaaaaaaaaaaaaaaanccccggggggggccccggwaccaatttcnccccaaaagggagcc

SEQ ID NO: 327 - DNA, 929 bp, Homo sapiens
  misc_feature (904)..(904): n equals a,t,g, or c
  misc_feature (906)..(906): n equals a,t,g, or c
  misc_feature (914)..(914): n equals a,t,g, or c
gcttcatcggtgaacaagggtgtttactgaatgtggagaagtcagtgaaatctccacagtgacagatgcactctggagatggggctgaggctaggtgtgcacctcccctgccagccatcagcagcctgcccacgtctgtcgcgttatgagttgttgatcttaaatttctgcaaatgtttcttgttacagagtatggtgtttgcgaaaacttgcggaagctggagatcacaggcgtgtcttgtcgggacgtctatgcgaagcgtattaaaccctcgcgtgaagtcgggacgttttgtgaaaattctccctgattatgagcacatggcgtacagagacgtttacacctgcctgcttcaccgatatagacacattttgggattgtggcagccagatatcgggccatacggaggactgctgaacgtggtggtggacggcctgttcatcatcgggtrratgaggcgtgcgccgccaatatgcactgtacattccacaagcattgccttcttattttacttcttttagctgtttaactttgtaagatgcaaagaggttggatcaagtttaaatgactgtgctgcccctttcacatcaaagaactactgacaacgaaggccgcgcctgcctttcccatctatctatctggctggcagggaaggaaagaacttgcatgttggtgaaggaagaagtggggtggaagaagtggggtgggacgacagtgaaatctagagtaaaaccaagctggcccaaggtgtcctgcaggctgtaatgcagtttaatcagagtgccatttttttttttgttcaaatgattttaattattggaatgcacaatttttttaatatgcaaataaaaagtttaaaaacttaaaaaaaaaaaaaaaaaaaaccccggggggggccccggnanccaattcnccccaaaagggagcc

SEQ ID NO: 328 - DNA, 1298 bp, Homo sapiens
  misc_feature (237)..(237): n equals a,t,g, or c
  misc_feature (1291)..(1291): n equals a,t,g, or c
gagctcccttcctcgtgctcggcgttragctcctgcagccgccgccgctgcagtggtcgtccctgccctccccggccccggggtgcaccccgcaaggctcccgctggtgtccctggagcatgggaggctgctgagcgtgagtggcggtgtctggcaggagctgcgtggcagggagggcgtccatggctgcagccaacaagggcaacaagcccagagtccggagtatccgctttgcgncaggccacgatgcagaaggatcccacagccacgtccactttgatgagaagctgcatgactcggtggtcatggtcacccaggagagtgacagcagctttctggtcaaggttggcttcctgaagatcctgcacaggtatgagattaccttcactctgcccccagtgcacaggctgagcaaggatgtccgcgaggcacctgtccccagcctgcacctcaagctcctcagcgtggtgcccgtccctgaaggttatagtgtcaagtgtgagtactcggcgcacaaagagggcgtcctcaaagaggagatactgctagcctgcgaaggtggcactggcacctgtgtgcgcgtgacggtgcaggcccgcgtcatggaccggcaccacggcacgcccatgctgctggatggtgtcaagtgtgtgggcgccgagctggaatacgactcagagcacagcgactggcacggctttgactgaggcccgaggccccgcctgccccgggcccctcagccttaaaccccgccttgtccccccgacatgctgcgtgatggtgtggcttcctcgcccctctctggggtgggtgtgggggtggagtggccttgcccacgcctctcacctctgccttcatttgtgctgccaccctgcccctccctcgtcctcctctcccacttcctcctctctgtgtgcctcagtctcctgccggaagaaatgggttgagcccgaaaggaggctgtctgaggaagggagagggagggcctggggtgggtcccccactccccaccccaagccacagggrctcccaccagggtctgggagaggacggagctggctctgtggcgtcgtggccccattactgctgccttgcttcagccacctctcctgcccctccctagtccccactgctgtccaccatgagtaggagggaggtgcagtccccagcccccacccctcaggtctgtgttacttggtttttaagcgactggttgggatagaaccctaaagaaataaacttccagtggataccggaaaaaaaaaaaaaaaaaaaaaacttgggggggggnccccgta

SEQ ID NO: 329 - DNA, 900 bp, Homo sapiens
ggcacgagctcatcttaatgaattaagtctgggaatataattatgtctgggaatataatagagaagactctatttcctgtgttctgggtgagtatgaacttttgggggatactaacttactatatactcactaggttaatctatgctaaatacccaacaggaaggcagctgtagggaaaagcaagagtatgaaacctggaaaaacaattgccagactctgctgcttgtgggtatgtggccgtgggtaaggtagttgctctgtgctttcagcttcctcatgtacaaaattgagataataatgatgcccactttgtggaattcttgtaaagatgaaaagattccaaatatgtaaagtgcatagaacaatccccagcaaaaagtggaacatgttagtgataattgctgtcatagtcggtcttcttgcttagtaggcctgagataaaactttctcctatttcatccctcctcctccctcttcctgattttacatgttatttagttgtttctccctctcactataattatttgtgagaagttacaagagttatactatggtagagcagacaggctttgcacaccttcagggtcagttctggaccaaaccactcagaaaccactgcacggatgaatggctggagattgtggggcctattgtgtctccaggtggctgtggttacatgggatccctggaatgttaattaattttcatatttccctttaaggtacttctgtggctcaaacaatgaatttctgagttaggtcccaaagtggcatttttgtttgccaacaccctcataggaaactgtattagaagctttcttgtaatatttaagagcctttaaaagagcgagactccgtctccaaaaaaaaaaaaaaaaaaaaaaaaaaaaaaaaaaaaaa

SEQ ID NO: 330 - DNA, 604 bp, Homo sapiens
  misc_feature (152)..(152): n equals a,t,g, or c
ggctgcaggattcggcacgagaatcatcagagatgaaactgtttgagagactcatgtgaccttacgaaaattacaacagcagtcttaaagtatgaaaaagatgcatcacagcagagacattatggcccagttgatatcaaatgtaaaatgtnaatgcatgtaaatgcacacttcattttatgtattatttagtaatttgcagtggtatgtgtttaatatttttgctacctacacattaggcaaaaaaaagatgtaaataatttgggagaaaaagaggaagaacagtgtaaaataaaactttctataagtactccatttcaatgtgttcaacatcatcctaaaaggcaagattttcccacgcaggtgacaaggtggtttatgtactatttaagggcggaaggtgcgtgcccgttcaataagcatgttttttgccaggtaggaaatatgttccatatctttacttatcattgcatttcagatgggaactagaaaaactggagagaaaaatgtaatgaaactgctgctgtaaattattccttttagcatgtattcacttgctaaatacacatttcttcaaaataaaaaaaaaaaaaaaaaactcgta

SEQ ID NO: 331 - DNA, 1119 bp, Homo sapiens
ggcacgagccttgatagcttttctagtaccatgtggatttctagagaagggaatattcccagaggaaacaggggcaccaaacaacaaatatcaagtatacatgttaagacaggtttttttcttcccgctatgtttagggccagtaagaggtctcttaaggacagtcagtgtgattgaagggttatacagttttcagctttgaacagtattggatcaaaattgattttgcttttaatattgacatctattattgctcagtgatggatatactgcgttggtgggtatattgtagcagatactgttatttcttctttttatatgtttaaagtatttcataattttaataaaatagaaaattaactttgctttgatttaagttggtgaataataacaaatatttgggttataattyccctttagtattaagttagctgtagaaatggtgttgtatctgacctagtaacccatttgactttttaaagatgaattactaaatttttttaatgatatgaaaaaatgtaatttgctccctttacctcttatcaatatatttatgataccataggtacctgcaaggtgtggagttacagtccgagacagtctaaagaaagcactgatgatgagaggtctaatcccagagtgctgtgctgtttacagaattcaggatgggtatggtttgtatgtgrcgtgaaattttgtttaaaaagaaaatcacacattaaactttgaagttttcttaggatctttaccaaaacctagggaattgaaagtgtactttaggaaaaagtattaaaataatactaagttagcctgaagaaatactgtaggccatatgaggagttaaataattgtatatgactgtagggtttgttactttgatcaaatgattttatttggaatttgagattcttacaatttttgaaccattcagagtgtgatttatttggataatagactcttacccccctcccatttttaatacaaactcatagtttcacaaaaggtatatcaaaattaacattttatattgacctacttttctttcagaaagtgtctaacattgttccaagaccctcacattttgaatcctctttaaaaaaaaaaaaaaagggcggccgc

SEQ ID NO: 332 - DNA, 927 bp, Homo sapiens
ggaattcggcacgagcacttttagtacagcatttccaggaactatgtatcagcatataaaaatgcacagaaggattctcggacatctatctgctgtttactgtgtagcatttgataggacaggacatagaatctttacaggttcagatgactgtttggtaaagatttggtcaacacataatggccgcttgttatctacattaagaggtcattctgcagaaatttcagatatggcagtaaactatgagaatacaatgattgctgcggggagctgtgattaaaattattagagtgtggtgcttgagaacttgtgccccagttgctgtgctccaaggacacacaggatcaattacatctttacaggtaaacttgtagcttagtgggcacattccctatatgtattttcacctttttctttaaaacagtttctttgggaattgagaaatagtaagatgtgtattagttatgttttaagtaagagaagtgataatcattcatacaaatcatacaaatcatggaaggctgatgaaatgaagatctaatgcatatttacatgaaggcttattgatattttggggttatggttgaactggatgagtgtcaattagaaactggtgatagattaattatttttcaactttaaaacttgtggattttgctaagttgattttttttttttttttgagactgagtcttgttctgttgcccaggctggagtgcagtggtgtgatctcagctcgctgcaacctctgcctcctgggttcaagcgattcttgtgcctcagcctcccgagtagtctcggtactcctgaggttgagggaggattgcttgagccaggaggttgaggctgcagtgagccgttatcgcaccagtgcattccagcctgggtgacaaagtgagactgcctcaaaaaaaaaaaaaaaaaaac

SEQ ID NO: 333 - DNA, 2218 bp, Homo sapiens
aattcggcacgagctcagccacccgctgggaatcgtgcagggattcttcgcccaaaatggagttaatcctgactgggagaagaaagtaattgagtattttaaggaaaagtgaaggaaaataatgctcctaagtgggtaccatcactgaacgaattccccttcattatttgaaacctaatagttttgtgaaatttcgttgcatgattcargatatgtttgaccctgagttttacatgggagtttatgaaacggttaaccaaaacacaaaagcacatgttcttcattttggaaaatatagagatgtagcagagtgtgggcctcaacaagaacttratttaaactctccacgaaataccactttggaaagacagactttctattgtgttccggtgcctggggaatctacgtgggtaaaagaagcctatgttaatgcaaaccaagctcgagtcagtccctcaacatcctacactcctagtcgccacaagaggagttatgaagatgatgacgatatggacctacagcccaataagcagaaagaccaacatgcaggtgccagacaagcagggagtgttggtggtcttcaatggtgtggagagccaaaacgtttagaaactgaagcttctactgggcaacagctgaactctctgaacttgtcttctccttttgatttgaattttccattgccaggagagaagggccctgcatgccttgtgaaggtttatgaagattgggattgtttcaaagtaaatgacattcttgagctatatggcatactgtctgtggatcctgtgctgagtatactgaataatgatgaaagggatgcctctgcactgctggatccgatggagtgcacagacacagcagaggagcagagagtacacagtcctcctgcttcattagtgccgagaattcatgtgatcttagcccagaagttgcaacacatcaacccattattgcctgcctgccttaacaaagaggagagcaaaacctgtaagtttgtttcaagtttcatgtccgaattgtctccagtcagagcagaacttcttgggttccttactcatgcccttctgggggatagtttggctgctgaataccttatattacatctcatctccacagtatatacaagaagagatgtccttccactaggaaaatttacagttaacttgagtggttgcccacggaatagtaccttcacagaacacttgtatcgaattattcaacatcttgttccagcatcttttcgtctgcagatgactatagagaacatgaaccatttgaaattcattccccacaaagactacacagccaatcgcttggtcagtgggctcctccagctgcccagcaatacttcccttgtaatcgatgagactctcctggaacaggggcagctggataccccaggtgttcataatgtgacagccctgagcaacctcataacgtggcagaaggtggattatgacttcagctaccatcagatggaattcccctgcaatattaacgttttcattacttcggaggggaggtcactcctcccggcagactgccagattcacttacagccccagctaattccaccaaacatggaggagtacatgaacagccttctctcagcggtgctgccttccgtgctgaacaaattccgcatttatctaactcttttgagattcttggaatatagcatatctgatgaaataaccaaggcagttgaagatgactttgtggaaatgcggaagaacgaccctcagagcatcactgctgatgatcttcaccagctgctcgtggtggctcggtgtctgtctctcagtgctggtcagacaacgctgtcaagagaacgatggctgagagcaaagcagctagagtctttaagaagaacgaggcttcagcagcaaaaatgtgtgaatggaaatgaactttaaagatgtaatacctatgaagagtaatgggcaaactgtagccacataattgtaaaattcagatattcatttataccacattgttttataggtaatttctatcacaaaccagtgacatttcctgaaatcaagcctggtaacacctgatgtttatatgatattcagtaaggacttttaccttactgatttcatggagcttttgaagtttgttttataataattatataaattagtaatgatgtaaaaaaagtatttgatattaaaagtttaatattgaaaaaaaaaaaaaaaaaaaaattgcg

SEQ ID NO: 334 - DNA, 1356 bp, Homo sapiens
cccacgcgtccgctctgcgasccttgaccgcagcttggcatgtggaatggaccccttcacggcctcgacacccctggggccgctggactttggcaacgtggtggccacactggacccgggggctgcccgtcacctcacccttgcctgccattacgactccaagctcttcccatctgggtcgactccctttgtgggggccacggattcggctgtgccttgtgccctgctgctggagctggcccaggccctcgacagggagctgagtagagccaaggagcaggaggccccggtgactctgcagctgctcttcttggacggtgaagaggccctgaaggagtgggggccccaggactccctctatggctcccggcacctggcccagctcatggagtctgccccccacagcccaggccccaccaggatccaggctatcgagctcttcatgsttctcgatctcctgggcgcccctaatccgaacttctacagtcatttccctcacacagcccgctggttccatcgcctgcggacatcgagaagcgactgcaccgcctaaacctgctacagtctcatccccaggaagtgatgtatttccagccgggggagccccctggctccgtagaagatgaccacatccccttcctccgtcgaggggtcccagtgctccacctcatctccatgcccttccccgacgtgtggcacacaccccacgactctgaggccaacctgsacccccccacagtgcacaacctcagccgcatcctcgccgtgttcctggctgagtatctggggctctascctccacggctgacgctkgaggagaggagcccggccaggacgtgccaaggacacgtggaaccaatggacctcaggccaggccgcccctcggtatgctggcttatccttttatttggcatgggttctacttgtgctatgatttgaagaccctctttcctctgtctcaaaccaccattctttaaagacatggaggagtcaagaccactgtggggttggcagccaaaggctcttctcagtttcatggtcggcataccctgggctggcatctggaccggtcacagcaccccaccaaatgaattctctgcggcttgtgkttttatgtccatggactgccgtgtgggggtccacaggggatgtgcttggacgcaggaacagaggaggtggaagccaatatttgggaactcgagtcggccagacccaagggcaacagaccaatgtttctgtgaaacatattctacagattagcattacaaggtgttgcatgaaaaaggggatcgaagacacgggatgagacattaaatgagtttcttcattgcaaaaaaaaaaaaaaagggcggccgc

SEQ ID NO: 335 - DNA, 1036 bp, Homo sapiens
  misc_feature (869)..(869): n equals a,t,g, or c
  misc_feature (894)..(894): n equals a,t,g, or c
  misc_feature (915)..(915): n equals a,t,g, or c
tcgacccacgcgtccgtgaaattcagacacaacagcaagaggaatggagcactaccggaaagctggctctgtggaactcccagcaccttctccgatgccgcggctacctcctgataccctggagatgcgggtccgagatggcagcaaaatccgcaacctactggggctggcactgggtcgattggaggtggtggtgcacggcatgtggtgttctcaggttctggtcgggctgcagggaaggcagtcagctgtgctgagattgtcaagcggcgtgtaccgggcctgcaccagcttaccaagctgcgcttcctgcagaccgaggacagctgggtgccagtctcacctgacacaggcctggatcccctcacggtacgccgccatgtacctgcagtgtgggtactgctcagccgggaccccttggaccccaatgagtgtggctaccagcctccaggagcaccccctggcctgggccccacatcaagctccagctgtggtccacgaccccgaagaagggttcgagacacctggtcctaaagatgtgccaagcaagctgttttccacgcatgaatgtctaggatggctttgcctcctcaggaaagcctcttgtaactgttcaacatccccaacaagacttgaattcacagcctccctgtcctgcttccttctttctgcagtgtgaaaagggactgctatgaagagttaaaaggtgtgcggtctcagctggggtctggattgcttaagaagggtttacttggcattctacctactgtgcctctgtcctttcttctgacagagatccagggagtgggttaggaaataaacgttctgcccatttgttaaaaaaaaaaaaaaaaaaaaaaaaaattaanaaaaaaaaaaaaaaaaaaaaaaaanaaaaaaaaaaaaaaaaaaaanaaaaaaaaaaaaaaaaaaaaaaaaaaaaaaaaaaaaaaaaaaaaaaaaaaaaaaaaaaaaaaaaaaaaaaaaaaaaaaaaaaaaaaaaaaaaaaaaaaaaaaaaaaaaaaaaaaaaaaaaa

SEQ ID NO: 336 - DNA, 1365 bp, Homo sapiens
ccacgcgtccggtgacagaatacatgttagaaagactgactgctctgcaactccttattaacgttaagtattgatgggtcaagacaatggtctgaccctcctgagaccctgaagcaccttctcgtgttcagtaatcctagcattcctccccaagcagacccctcgcaggcctctgcattaggctctggctctggtgcttggcattgccctggggtcacttcccctgcatatgtgttggtatgtcatctccaggcctctttggctcaacaggctctgcatgtcctccaggctttttgtgttgccacagccctctgtattgatcactctcagacctgcagcctcagtgggctttttgcctgtgggagaacatatctctaggctctaagtcaagccagctgcctgcccagctgagctctctgcagctcttcccattccagctagtttgggctgtaggaatcaactgagaggtgtccctttcctgaagctacatgcggaaatcatttccttgtcttacacttggcagtccttgcatcactgttttctgcagtcctgatgtagtctgtttctagaattctcaagcatttttagaaaaatatttttatagaaaaatactcaggctaacctagtggatataatcttggagcttccagattacccacttaaagatcaaagtattatatgctgtgtgctttttagctgttagtgctatgaaagcaaaaatgctttctgcgttgtccttcctgatctactggacaccaacgagcatgtgcttaacgctgtggaagtaggctcaaaggtctccccttatatagcatgttaagtgtttgtacaggtttgctaaaaccctttctatataaataagtttattaggttttctgttacgtagggtctctagttccttcctcctctcaaaatctccctacgaagatggtgttccactgagcgagctcagcgcaagtaggagagagcagacagctttactggtcacatgtatgctttgatttagcacaatgtttcatagaaagtactgaccaggaaacacaggtgtcacatctctagaaagaaagtacgtagtatttcaattcccagtgtgtaccttctgtgttttttgtaagtaaaagtaagactctatactgatctcagtcacccattctggttttcaagtatgagctatataggctatgcgtgacgcttattaaatacttttgtaccatgagtaaacttggaggtctgttgcaagaaccatgaaaaaaaaaaaaaaaaaaaaaaaaaaaaaaaaaaaaaaaaaaaaaaaaaaaaaaaaaaaaaaaaaaaaaaaaaaaaaaaaaaaaaaaaaaaaaaaaaaaaaaaaaaaaaaaaaaaaaa

SEQ ID NO: 337 - DNA, 1478 bp, Homo sapiens
  misc_feature (2)..(2): n equals a,t,g, or c
  misc_feature (42)..(42): n equals a,t,g, or c
  misc_feature (46)..(46): n equals a,t,g, or c
  misc_feature (49)..(49): n equals a,t,g, or c
cnccggggaccgatccagcctccgggactctagcttagcccncggncgnataccaatttcacacaggaaccagctatgccactaggcttttgcaaaaagctatttaggtgacactatagaaggtacgcctgcaggtaccggtccggaattcccgggtcgacccacgcgtccgattagaaattagtgctagaggatttaattagccagctcacaggatgcagtccctttaatttaggatttccctttgagaaaattatggagttgaaaaggaatatgatatttcatacaagtttccatcttgggcccttatgttgtttgttctgctgatctggaaattgtacatgatttacattaaaactttttgtttttaatatcgattattgtagtgtggggtgttagattatgtgcaatagttctcagagttgggaaaggtaaaagggtttttttgggcaatgattaactcatctactttaccagggttacataatcaagtattagttactatacatttagctaatgcagtgggtttagttaagcaatgaatacattatcawgggagcattaacacttttgcatttttagacttgcctttaaaaaaattacagaaaaactcctcacaacccttgccaccctttcagccataacattacattgccttggtttctgcctttaatttccctgggggttctttttatttaggaaaagggtgaaagatgtatttgtgtaagtactacaccagtgcttctgttaaattctttttcaacaaagaatatgttacttgggtgccttgtacacagggcgcatatttttttggaaataatgtgccatgaaagcagtagtttttagtgtgcatgtttatttcatgtctgccagtttattttagcttagaaatttcctaatgctttgagtttataacagtctttcagtttataacagtctttcagttaactgagtgcatatacataatatgcacaaaatggccaacttttagaaattgtgtattttaaaatcccttttttttcagtckgatatcatgtgtctccttgttccctttaatatgcaactaaaatttamcctaagatatgaaaaatatgttaagaaagcttaatttcttaagcttaatttggaacgtcaatgaagaattaaacatttgctttctagaaaccttaatctttgttaatgtgaaattaacatagatgatttgaatatgtgttcatgtgtgaggactttgccccttcagtgtttctctactgagtctttttgacctactataagagctaagtgcaaataatgccacatcaatatggcgtagagaagagttctttcttccgcctgttggcagtgcattataagagcagttcttcaactttctggtatcactcttaataatggaagtgcccatagcgcttttgcttatgagaattatatctagtgatatttactatgtttgaaattaaaaaaaaaaaaaaagggcggcc

SEQ ID NO: 338 - DNA, 1125 bp, Homo sapiens
cggcacgaggtgatgatggcctgttttggagtgtgtctgagactgggattgcatttggggtttcccgtgtgcttgggatgctagagggtcacctgcaggaggcctggggccggcgagaaatctcctgtgatgccctgtgaaatggcttgtctcctcccccatcagggcccaccgaaagctcaggggagcacagaagcccatggaagcccagggagatgtccctggggcagacactaaggcaggtgttgaagacaagctgcttgtcaagaagcatttcccggcaagagaggggcaagtcgggggctccaactgggtacagcctgggtgcagttataagcccctttggcttacttggtagaagatggctacttggatgtacctcacttaaagatgttttgtaccacactaggtctctgggcccttgtgcttcctgtgggtggggtgagggccaaaggctatggtttcctgcctccaggagaatggagagaaagggcttccaggcccctccaagcctggggaaggacgtggcatccaagctgagccagagggaactgctgctggcctcccttcatttctgtggaccttggaggctttggctttgtggcagggcctccccaggcagctctgggacctaggagtttgcttctgatagggtcagctttcccatttcccttcaatgcttgggaaccttctcccttagcttcacacttgccatttcaagccctgctgggaccttgtggcttggctggaatccaggactgtattttcatggagaagaacctgcagattcttccatcctcagctggccatggcccacagctctgcatctgcatctgagcttctcaggactcctggagcatggggggaatggggcggggccactgctctgtgctgacgggctccgtctcggagattcttgtcctgtttttttttctgttgtttttttttggctggtgctggggacaagcctgtgcctgccaaagctcccaggccaagtttgggggctggtgtttggggttgggtttggggttcaggatgctgcagtctgtgcaataataaacccgcatctgctcaaaaaaaaaaaaaaaaaaaaaaaaaaaaaaaaaaaaaaaaaaaaaaaaaaaa

SEQ ID NO: 339 - DNA, 1157 bp, Homo sapiens
cccccgggctgcaggaattcggcacgagaatgtggctcctgtgtgtggcgttggcggtcttggcatggggcttcctctgggtttgggactcctcagaacgaatgaagagtcgggagcagggaggacggctgggagccgaaagccggaccctgctggtcatagcgcaccctgatgatgaagccatgttttttgctcccacagtgctaggcttggcccgcctaaggcactgggtgtacctgctttgcttctctgcaggaaattactacaatcaaggagagactcgtaagaaagaacttttgcagagctgtgatgttttggggattccactctccagtgtaatgattattgacaacagggatttcccagatgacccaggcatgcagtgggacacagagcacgtggccagagtcctccttcagcacatagaagtgaatggcatcaatctggtggtgactttcgatgcagggggagtaagtggccacagcaatcacattgctctgtatgcagctgtgagggccctgcactcagaagggaagttacctaaagggtgctctgtgctcacgcttcagtctgtgaatgtgctgcgcaagtacatctcccttctggatctgcccttgtctctgcttcatacgcaggatgtcctcttcgtgctcaacagcaaagaagtggcacaggccaagaaagccatgtcctgccaccgcagccagctcctctggttccgccgcctctacattatcttctcccggtacatgagaatcaactcactgagcttcctctgaagccttgaagggttttcagatccaaggaacaaaggggaaaatagacaaaggagtgcagaggacctggcctggcactggcttatttacctgagctcaaggagatccccgctggagcagcctctgcaaaagggagcccatgtaggccaggggctgtccaaactccagcttcttcccctgggaaaaaacccaaagaaccaaaaacaaaccaccccaaggataataatagctacactgctagcttctcaagttcttgtgaaaaacaatttacataatgacacagtagatgtggaacacctagcccagtgcctgggcaggtccctattatcataaatgaacataaaagtgctctaaaaacaaaaaaaaaaaaaaaaaactcga

SEQ ID NO: 340 - DNA, 902 bp, Homo sapiens
ggcacgagctctgaaatatgaaatgcagctattggatgaactcccaatgatatacagctgttgcatatttgtgtactgcatgtttgaatgtttcaagatcaagaactcagtaaactaccatctgctttttaccttagttctattcagtttaatagtaaccacagtttaccttaaggtaaaagagccaatattccatcaggtaactgctacgtgagcttcaggtataaaattttaaacaccgtatcctccagaaagactttctactgtgtcatgtatggaatgttggtctttacattagtacttcgatctatttatattgttacatgggtttatccatggcttagaggactgggttatacatcattgggtatatttttattgggatttttattttggaatatagataacatattttgtgagtcactgaggaactttcgaaagaaggtaccacctatcataggtattaccacacaatttcatgcatggtggcatattttaactggccttggttcctatcttcacatccttttcagtttgtatacaagaacactttacctgagatataggccaaaagtgaagtttctctttggaatctggccagtgatcctgtttgagcctctcaggaagcattgatgaatcattccaccaagaaaacaaacaagcacctaccatagacctggcagaataaataaggaaatccttaaagatctacaagttcaaatatgtcatgaccatcacagcagaggagtgactttctgactaatgctgccacccacacagagaataaggagtagggcctgctgggtgtttagctcatggctttatcttatttgtccccctcctcctttcacgctccagtttataaagaaacagagatgaaaaaaaaaaaaaaaaaaaaaaaa

SEQ ID NO: 341 - DNA, 1552 bp, Homo sapiens
ggcacgagaaacagaaatgatactaatatcggtgattccttccttttttcctgtaataagtgctgtgcagacaacatatgagcagtgctgataaatgtaaatgtatttttcatagctcattaagaatcagtttcagaaagagatgtctgcttattttgctacttgaagaatccctgtcaaacagtccttttgaggaagtacaagaggctgtctctattgtgacctcaggaatggctgtgacagtgtcgtgagcagtccttttcctgtggcacagatctgaactttgtgttgcagaaaaatcttggcttcaagtgagccaagatgccccctgagcatcagcatcacaacttcatcctcctatcttgaagttcatgttatagtgactttaatgaaatcatagaacactgtttcttcgtgaacaatgacgagggagaggaaaaaactttattgaaaaataaaaaggcaggtaatttagatgaaaatatgttacccatgaggttttgtttttgctttttgtttttgtttttgagaaacagaatctcgctctgtcgtccaggctggagtgcatcggcatgatcttggctcactgcaacctccgcctcccgggttcaagcgattctcctcagcttcccaagtgttggtactacaggcatgcgccaccacaaccagctaatttttgtatttttagtagagatggggtttcactatacgttggccaggctggtctcaaactcctgacctaaggtgatccttctgccttgggctcccaaagtgctgggattacaggcatgagccaccttgcctggccctacccatgagccttgactaaaacattcttctatctgtagaaaagcccaaaagaacttttccagattcaaaaaacttggcactttgtaatggtaatgtttacattaagtaaaaaaaaaaaaaaaaaacctggcgagaagggaacggagttttcatcaggtagattggtttttgtgcggccgtcctccaccgtttcctccaggacagcacctagtcgtggccggaggagtctcagagctgtcagaaagaataagactgattttatgggaaaattaagcagatgctccagtttgagaaacctggatctgcgatctgtttgtggtaccagcatcaagatgatttatggtaataagatataaaaccaaggaaaataacctaaagtctgaaaaagaccagaatcgaagtttcctgattcatattttaatgttttgaaatttatactccaggctgggtgcagtggcttgtgcctgtaatcccagcactttgggaggccgaggcggccggattgcctgaagtcagaagttcgagaccagcctgaccaacatggtgaaaccctgtctctacttaaaaatacaaaagagctgggcatggaggtggtgcgcgcctgtaaccctagctactcgggaggctgaggcctaagattcttgaacccaggaggcagaggttgtagtgagccgggatcacgccactgcatctagcctgggcgacagagagagagactgtctaaaaaaaaaaaaaaaagaaa

SEQ ID NO: 342 - DNA, 897 bp, Homo sapiens
ggcacgagggacaatgaagagtatgaaattgaagtttttctccattgaaaacattcagggaggactttgattaaaactttttgtaaaaagtttcagtagtgttgacttgaggatgatacaaagctgtatactatgttagttagatccttgcttctcaggtctgggaaacatcttcatacatcttccatgcacaggtgtactcatgtgcgtgtttgtatatgagcttatgcttctctctctggtgtttcttcctcattggtctttaccttctcttccttacttttcctttgcccttcatagcaatactgttaagccagatatttacttcttatgtggatcaaatagtcttatatttcctgtggacaagagatatgttttctactcatttatttctctaattgtgaataggaaacagctagaaaattggaataccttcagcttatgtggctgttgattgactttgtgattcagtgggccttgatatattagaaaaaagtcttttcttttctcttaaaattagtataaaggaacgcatgaactcagtatatgaccttagagacagaaagaaaaaaaaattatgtaacagccctttgagagtgaggaaacattggcactgaaggtaaaagcaacttgtctggagccatataacaagtggcagagccaatagtagaactccagccttctggagagttcttgctcccagatcttgctctctacatgagatgtggactatgtgtctcttcaggttgtcacctggttctttcaagttgctgagttcttccttggggaagtgcagaagggaattaatagagaggatccatttcgtagtctctgccactttttgtgcttatctccctctcatttcagtgtgtcttatttggcaaaaaaaaaaaaaaa

SEQ ID NO: 343 - DNA, 1767 bp, Homo sapiens
cggcacgagcgcggtcgcgtcataggccgaacaaccaaacagaaaagtttaataaacagcggacggaggggccggcggtggcggagcggagcaagcaggggttcggcggcattacctgtacccattcaccggcggctaccggcggcggcgcgcagctgtcaggcggagagacccgccgccaggaatgaatctgaagtctgctgcagtaaaacacagaaggctttaaaatgttttcttgcataaaattcaaaacttttaagtagctgcttatgagaatagggaaggcagaaagctaatgtctgtctcaagatacaggacagctgtttgctcatcaacctcaactgtgtgtgcaactgaggaacatggctcaagaaactaatcacagccaagtgcctatgctttgttccactggctgtggattttatggaaaccctcgtacaaatggcatgtgttcagtatgctataaagaacatcttcaaagacagaatagtagtaatggtagaataagcccacctgcaacctctgtcagtagtctgtctgaatctttaccagttcaatgcacagatggcagtgtgccagaagcccagtcagcattagactctacatcttcatctatgcagcccagccctgtatcaaatcagtcacttttatcagaatctgtagcatcttctcaattggacagtacatctgtggacaaagcagtacctgaaacagaagatgtgcaggcttcagtatcagacacagcacagcagccatctgaagagcaaagcaagtctcttgaaaaaccgaaacaaaaaaagaatcgctgtttcatgtgcaggaagaaagtgggacttactgggtttgaatgccggtgtggaaatgtttactgtggtgtacaccgttactcagatgtacacaattgctcttacaattacaaagccgatgctgctgagaaaatcagaaaagaaaatccagtagttgttggtgaaaagatccaaaagatttgaactcctgctggaatacaaaattcttgagcatctgcaaactaaaaattgacttgaggttttttttttcctagtcattgggaatgtagagcagtgtatcttgcatgtcatcggaagaatagatttttgttttggttttgttttgaaaatgactctgaacatttatttccattgcaatttctgtggctgaggagacttaaactttacaagtattatccttttaagatcattttaattttagttgagtgcagagggcttttataacaaacgtgcagaaattttggagggctgtgatttttccagtattaaacatgcatgcattaatcttgcagtttattttctcattgtgtatgtatatatcgcttttctctgcagcacgatttctcttttgataatgccctttagggcacaactagttatcagtaactgaatgtatcttaatcattatggctgcttctgttttttcattaacaaaggttattcatatgttagcatatagtttctttgcacccactatttatgtctgaatcatttgtcacaagagagtgtgtgctgatgagattgtaagtttgtgtgtttaaacttttttttgagcgagggaagaaaaagctgtatgcatttcattgctgtctacaggtttctttcagattatgttcatgggtttgtgtgtatacaatatgaagaatgatctgaagtaattgtgctgtatttatgtttattcaccagtctttgattaaataaaaaggaaaaccagaaaaaaaaaaaaaaaaaaaaaaaaaaa

SEQ ID NO: 344 - DNA, 1129 bp, Homo sapiens
ggcacgagcctaaatatacgcacacctgaggttgtctttataggagctttatggttgcaagttttgtgtataatctttaatcattttgagttgattattgtgtatctagtaccataagagtcctgtattattcttttgcatatggatatctagttttggaaatcttccccgttgtgtcattttggtggtgttttgaaaaatgtgttcattccatataaatttttgtttattatcgagcacattcattttgctcactggtctgtgtttctctgtgtacgccagtaacatatgggtttgttaactacagattttcatttaattagaactcagggaatgtgacacatcccatatggtttgtatttctcagaataactttggaaattcagggtgtttcacatttccacataaattttggcattgttctttatatttcttaaaacactatttgtcatatactaaatgtatacaattaaaaggtacaaggaagattttgatacgtgtatatgttgagtaatgataaaatcaggttatttagcatctcttcatctcatatagttattatttttgagtggtaacaacattcagaatctttccttctagttactttgaaacatatggtacatttgtgttaaggctagtcaccctgctgtggaatagaaggccagaattgatcagtctcatctgagagtaactttgtacccatcactgattccttctgagactgcctccacttccccagcagcctctggtttcttcatgtggctgcagatggcaggatttcccaaaggtttctggctgaaacatattccgtggtgtatctgtacagcagtttcctcatccctgcagctgtgtttgaacaggttcaacagtatggctccaaaggatgaaatttcattctgattttctggctgaagactattctctttgtgtatgtccaccacagttactttatcccttcatctgtggatgggcagtctcgctgtattgcccaggctggagtgcagtggcatgatctcagctcactgcaagctctgcttcctgggttcacgccattctcctgcctcagcctcctgagtagctgggattacaggcacccgccaccacgcccaggaaaaaaaaaaaaaaaaaa

SEQ ID NO: 345 - DNA, 1284 bp, Homo sapiens
ggcacgagactcgtgccgaattcggcacgagcaacagcaaaagcctagtgcattgggagatgtgcaacctccctgaaaatcttttctgtttctggagtacttcaggggtggcctctggccccagagcctttgccacagtgctcccaccagcccccacctcatccgtctgtttgcagagcctcatctacaggtccccacgctgccttctttactcactctgcgcttggccgttttgttatttggcttagtctacattgggcggaagtctgtgtgcacagagtgggtgttccttcgagccccttccactcagagggccacacccagcgatgccagtgaaggtggcacagcctctcttcagtttctcctgactgtgatctcactggggtagaattcccctgagagaatccctcactcacggctccctttgccagagtcagttcaatcaggtctgatgtgagcaatttacacacttgtctcagaaagtccctcagggtttgtagaggactgcaggggggcatccgctgcagactcagcctttctctgcagccatcctgcagtgggggtgagcgggcacaggctgagaactgctcttgggtggtggaagcaggtgtcacggtgcaagtctccccctgcacccctcccccagcttgagccgtgtcacccccctctccctccagcatgggcctgtgtctcaggctctctggaaggtggccctgccccggaccctcttgcaggtgtcctggtttgacttggaactagatggccatctttccaggctttggtggcccaagagcagtctgggtggatggaagtggctgtcccctcctctccagcccctgcccacccactggtggaggtgctaactagcagggacgtggcataggatgggagctgggcgtgaggtgcttggggtccattctttgtccctcagcttctcagagtccggccagcccttgtgttcccgtgccccacactttcctcctccccactgcagtgagtcaatagtccagggtggggcctggcctccctgccctgattggggactcaggaggtgaggcctgcggggcttcctgccccctccttgcccacctgcctgcccccgggcagcacgggagggagagcagggtgagcacgcttgttggtttcagatgcactttctgcttgccattgmccgtatctgtgcgttccttcatcctggtcctggctttatggaacaccatgtttttagcatgtttttaaataaaaacggataaagtgtcaaaaaaaaaaaaaaaaaaaaaaaaa

SEQ ID NO: 346 - DNA, 1911 bp, Homo sapiens
ggcacgagcggcacgagcggatcctcacacgactgtgatccgattctttccagcggcttctgcaaccaagcgggtcttacccccggtcctccgcgtctccagtcctcgcacctggaaccccaacgtccccgagagtccccgaatccccgctcccaggctacctaagaggatgagcggtgctccgacggccggggcagccctgatgctctgcgccgccaccgccgtgctactgagcgctcagggcggacccgtgcagtccaagtcgccgcgctttgcgtcctgggacgagatgaatgtcctggcgcacggactcctgcagctcggccaggggctgcgcgaacacgcggaggcacccgcagtcagctgagcgcgctggagcggcgcctgagcgcgtgcgggtccgctgtcaggaaccgaggggtccaccgacctcccgttagcccctgagagccgggtggaccctgaggtccttcacagcctgcagacacaactcaaggctcagaacagcaggatccatcaactcttccacaaggtggcccagcagcagcggcacctggagaagcagcacctgcgaattcagcatctgcaaagccagtttggcctcctggaccacaagcacctagaccatgaggtggccaagcctgcccgaagaaagaggctgcccgagatggcccagccagttgacccggctcacaatgtcagccgcctgcaccggctgcccagggattgccaggagctgttccaggttggggagaggcagagtggactatttgaaatccagcctcaggggtctccgccatttttggtgaactgcaagatgacctcagatggaggctggacagtaattcagaggcgccacgatggctcagtggacttcaaccggccctgggaagcctacaaggcggggtttggggatccccacggcgagttctggctgggtctggagaaggtgcatagcatcatgggggaccgcaacagccgcctggccgtgcagctgcgggactgggatggcaacgccgagttgctgcagttctccgtgcacctgggtggcgaggacacggcctatagcctgcagctcactgcacccgtggccggccagctgggcgccaccaccgtcccacccagcggcctctccgtacccttctccacttgggaccaggatcacgacctccgcagggacaagaactgcgccaagagcctctctggaggctggtggtttggcacctgcagccattccaacctcaacggccagtacttccgctccatcccacagcagcggcagaagcttaagaagggaatcttctggaagacctggcggggccgctactacccgctgcaggccaccaccatgttgatccagcccatggcagcagaggcagcctcctagcgtcctggctgggcctggtcccaggcccacgaaagacggtgactcttggctctgcccgaggatgtggccgttccctgcctgggcaggggctccaaggaggggccatctggaaacttgtggacagagaagaagaccacgactggagaagccccctttctgagtgcaggggggctgcatgcgttgcctcctgagatcgaggctgcaggatatgctcagactctagaggcgtggaccaaggggcatggagcttcactccttgctggccagggagttggggactcagagggaccacttggggccagccagactggcctcaatggcggactcagtcacattgactgacggggaccagggcttgtgtgggtcgagagcgccctcatggtgctggtgctgttgtgtgtaggtcccctggggacacaagcaggcgccaatggtatctgggcggagctcacagagttcttggaataaaagcaacctcagaacacttaaaaaaaaaaaaaaaaaaaaaaaaaaaaaaaaaaaaa

SEQ ID NO: 347 - DNA, 833 bp, Homo sapiens
  misc_feature (793)..(793): n equals a,t,g, or c
  misc_feature (798)..(798): n equals a,t,g, or c
gggcctgcagggaattgggcagagcagccatcaggtaggctgcgttgaggatctttgctcttccatccgcctttgatcgtcttcctcttcagccatcaggtaagccaagatgggtgcatacaagtacatccaggagctatggagaaagaagcagtctgatgtcatgcgctttcttctgagggtccgctgctggcagtaccgccagctctctgctctccacagggctccccgccccacccggcctgataaagcgcgccgactgggctacaaggccaagcaaggttacgttatatataggattcgtgttcgccgtggtggccgaaaacgcccagttcctaagggtgcaacttacggcaagcctgtccatcatggtgttaaccagctaaagtttgctcgaagccttcagtccgttgcagaggagcgagctggacgccactgtggggctctgagagtcctgaattcttactgggttggtgaagattccacatacaaattttttgaggttatcctcattgatccattccataaagctatcagaagaaatcctgacacccagtggatcaccaaaccagtccacaagcacagggagatgcgtgggctgacatctgcaggccgaaagagccgtggccttggaaagggccacaagttccaccacactattggtggctctcgccgggcagcttggagaaggcgcaatactctccagctccaccgttaccgctaatataagtaaagtttgtaaaattcatacttaataaacaatttaggacagtcaaaaaaaaaaaaaaaaaanctcgnggggggggcccggtmcccatttscccccaaaaggg

SEQ ID NO: 348 - DNA, 2927 bp, Homo sapiens
gctttttcataatctttccagagtcatcttagtgggatttggggaagcaacagggctgtgtggggtaacctgccacctttaagtggaarkcagaaatggagcaagagccacaaaatggagaacctgctgaaattaagatcatcagagaagcatataagaaggcctttttatttgttaacaaaggtctgaatacagatgaattaggtcagaaggaagaagcaaagaactactataagcaaggaataggacacctgctcagagggatcagcatttcatcaaaagagtctgaacacacaggtcctgggtgggaatctgctagacagatgcaacagaaaatgaaagaaactctacagaatgtacgcaccaggctggaaattctagagaagggtcttgccacttctctgcagaatgatcttcaggaggtgcccaagttatatccagaatttccacctaaagacatgtgtgaaaaattaccagagcctcagtcttttagttcagctcctcagcatgctgaagtaaatggaaacacctcaactccaagtgcaggggcagttgctgcacctgcttctctgtctttaccatcacaaagttgtccagcagaagctcctcctgcttatactcctcaagctgctgaaggtcactacactgtatcctatggaacagattctggggagttttcatcagttggagaggagttttataggaatcattctcagccaccgcctcttgagaccttagggctggatgcagatgaattgattttgataccaaatggagtacagattttttttgtaaatcctgcaggggaggttagtgcaccttcgtatcctgggtaccttcgaattgtgaggtttttggataattctctcgatacggttctaaaccgtcctcccgggtttcttcaggtttgtgactggttatatcctctagttcctgatagatctccggttctgaaatgtactgcgggagcctacatgtttcctgatacaatgctacaagcagcaggatgctttgtgggggtcgtcctgtcctctgagttaccagaggatgatagagagctctttgaggatctgttaaggcaaatgtctgaccttcggctccaggccaactggaacagagcagaagaagaaaatgaattccaaatccctggaagaactagaccctcctctgaccaactaaaagaagcctctggcactgatgtgaaacagttggaccaaggcaataaggatgtacgtcataaaggaaaacgtggaaaaagggctaaagatacttcaagtgaagaagttaacctgagtcacattgtaccatgtgagccagttccagaagaaaagccaaaagaattacctgaatggagtgaaaaagtggctcacaacattttgtcaggtgcttcctgggtgagttggggtttagtcaaaggtgctgagattactggtaaggcaatccagaaaggtgcttctaaactccgagagcggattcaaccagaagaaaaacccgtggaagttagtccagctgtcaccaagggactttatatagcgaagcaagctacaggaggagcagcaaaagtcagtcagttcctggttgatggagtttgcactgtagcaaattgcgttggaaaagaactagctccacatgtcaagaagcatggaagcaaacttgttccagaatctcttaaaaaagacaaagatgggaaatctcctctggatggtgctatggttgtagcagcaagtagtgttcaaggattttcaactgtctggcaaggattggaatgtgcagctaaatgcatcgttaacaatgtttcagcagaaactgtacaaactgtcagatacaaatacggatataatgcaggagaagctacccaccatgcggtggattctgcggtcaatgttggcgtaactgcctacaatattaacaacattggtatcaaagcaatggtgaagaaaactgcaacacaaacaggacacactctccttgaggactatcagatagttgataattctcagagggaaaatcaagaaggagcagcaaatgtcaacgtgagaggggagaaggatgagcagacgaaggaagtaaaggaggcaaagaagaaagataaatgatgaagtgctgggaatcacttataccaaagccttatgaaatggatgaaattttgttaaataggcaaatgtggaattcctcacagattaaccagtattttttaaatgtattcattcctacaaattaactttcataaattttatggcatgtcttctatttaaaaggaaaagaataagtattcttgcatctggccttagaaatgtgaagttatattctcaagtttatttttttccaagtgtagctaaaatatttttgcaggtaaaataaagctgatagtacatgtgttgttcaaaccttgttaaacctaatattgaactatttttatatctgctgtctttcagaaggcaaataggaaactatatatttgcttaaaaattggcatttagtaaccttaattctttttatagaaggaatgacttaaagtattgtcccctctttttgcactaattgtggatttttttagatgcttctcaaaattttcagtgtgtaagctaaacaaaaactaaaactaagaattctcaaaaaaacttgttcaaaacagggaaagactgatgaaaagtaaaatggactacttttgtaacttacctgtttgttaggaaatggaatggtctctttgatttaaaatgaataaaaatagattattacgtcttttgtattgagactgtattgttatgagcctaggaaatttgggaacatgattgtattgtattaaaattcgaagtgattattatcagcttaattggattaaaaaagtacttcaagaaattaaaaaaaaaaaaaaaaaaaaaaaaaaaaaaaaaaaaaaaaaaaaaaaaaaaaaaaagggggggggc

SEQ ID NO: 349 - DNA, 1249 bp, Homo sapiens
  misc_feature (1138)..(1138): n equals a,t,g, or c
  misc_feature (1196)..(1196): n equals a,t,g, or c
  misc_feature (1202)..(1202): n equals a,t,g, or c
  misc_feature (1225)..(1225): n equals a,t,g, or c
acgtcccgcgcgtcggcggccgcggagcagcgcagggagccaggcgggctgccggcgggtgtgaagaaaaaaatgacactccaatgggctgcagtggcaacctttctttatgccgaaataggactcattttaatcttctgcctaccttttattcctcctcagagatggcagaagattttttcatttaatgtctggggtaaaattgcaactttttggaacaaggctttccttaccattatcatcctattgattgttctatttctagatgctgtgagagaagtaaggaaatattcctcagttcataccattgagaagagctccaccagcagacctgatgcctatgaacacacacagatgaaactttttaggtctcaaagaaatctttacatttctggattttccctatttttttggctagttttgagacgtctggttacgcttattactcaactggcaaaagaactgtcaaacaaaggtgtacttaaaactcaagcagaaaatactaacaaggctgccaaaaaatttatggaagaaaacgaaaaactaaaaaggattttgaaaagccatggtaaagatgaagaatgtgttttggaagcagaaaataaaaaactagtagaagaccaggagaaactgaaaactgaattaaggaagacttcagatgccctttctaaggcacaaaatgatgtgatggaaatgaagatgcagtcagagagactttcgaaagaatatgatcaactcctgaaagaacactctgaacttcaggatcgtttagaaagaggcaacaagaaaagactgtgaactttataaaagacacttgcaatatactgtgtcaaaatgataattttgttatgttagcctctagaaaatttaagttcagaaaaatgcactatgaccggttcgtaatttttttaatgccacacataggttgtattgtaatggcattatcaaaatatttgatgatgtttcagatatattgcaaagtctgtattccagctcttaagaaaaatataagcatgttaaataccatatttacatattgataatgtcattggtatatggtggctgtttaccaataaaaggaaaaaattcattaaccggttgcttccaaaattaggaagwtytamgttgcatgaaaccnttaataggccttggaaagctttggattaaggttttccaggtaattaataacccctttnaattcnggatggatggtgtgtttggaaanaggtgttccatttccggccaattt

SEQ ID NO: 350 - DNA, 1129 bp, Homo sapiens
  misc_feature (564)..(564): n equals a,t,g, or c
gggtcgacccacgcgtccgcaaaggttcatgctattcgatagatgctttcaaaatgatgagtgggaaatgtaactttgtcatcttgcagagcctacaatgcaaacattttttccgccccatgtacagtttcatttacatagtgttgtcaaggaataagtgatttgtttcacttaagtgatttttccaggtaattgaagcttacctctttgtgcacacattattctttgcttaaactttctttgatgaaaacatggcacakggttctttcctttttttttgcttggtacatataaatgtggctacatcttttcttgacttggggttatcatgataaagattgctttgttctgtgccgtaatcctgttattgacagctgaattgtgtgggattgagagcctgtatgtgaatagtcacagatccatattcttttagagttaccattattactaataatatagcycctctgagtcattagcaaatcccaggcaggatgctaagaattcatatacattataatcttggctaaaccatccaccccactccaagaaatgatcattattatncctcctactttacaggtaaaaattgaagtttaagggataagtagtaagtggtagagttgagatttgcatccatgtctctctaactgcaagatgcctgttgccagttatacttcttctatttctcctctctgcccctctttgggtatttctgtctgtccggttgctttaaaagcctttgcccaggtaagggcccgagattaggtctgtgcctattttgtggaaattattggtatgtttttcgttaagtggagttctgaaggcatttttgctgatttctgggttcccagacatctgcacggttgccgtttctagaagtctaacctgtgaattcatcactgtgtatgctaaggctttgggagggattataggattttctgcattatgattaagcagcataatcaagaaacttgcagtcagaggaaagcgtggcaattctgtaatgcagaagttggcagaycttttctgtggagggccagatactaaacgtcttagttcattttgtgttgctataaaggtatacctgaggctgggtaatttattaaaaaaaaaaaaaaagggcggccgc

SEQ ID NO: 351 - DNA, 2587 bp, Homo sapiens
  misc_feature (1765)..(1765): n equals a,t,g, or c
  misc_feature (1821)..(1821): n equals a,t,g, or c
ggtctttgccctctcaagttgctcttgaatgttgattcaactcattaggacatacttggatgatgaattagaaggagcatctttgccctctacttacagatcctaggaacaatttgtggaattatcagtaagcaatatctgtaacagataaaatgtctgctttccctttgcccctcttagcctatgacatgccacatccaatttgtcttcgttccaactgtgagaggtcttaatttcatcattctggccttttgcagttaaatattctccaagggatatgatctatggggagaggactgatagtggaactaatctttcaaggttctgcttaagcaattgtagataacataggagaagaaactctggaaacaattatgattatcctagttctgcccctgtggaaattcaatccgaaacccttcatgtttttgcttctctcttctctacatggatggaatatgttatacttttttgagctgaaaaatctaaataattagaaaaagacaaagttgtaatgagttttctgtttaaacttataggaccctttctaataaaagtgttattttaatcattgaatcgttagttaactgctttgtatggttatgtcttgtctctctttaatccagggactgcaagcaactaggcaaaaaactaacaaaaaaaccaatgttttataagagtggttctcaaactttaaagtgctgattaaagcacagattgcccaggcctcaccctcagtagatgggtatggggcccaagaactttcaacaggagatgctgctgstgcagcttgtctaagaactacacttggaaaattactaatttgtgtaataaatacctgaccatttggaatccttagaggatggaaatattttgtaatgctgtgtgcaagatttgatatagaaaaacttgggttcaagtggcaattcagcagattacaagaggtgaaacaactgagtttctgagactcagttttattatctgaaagtcaggaatgaaaataatgcctatgtggcagaactgctataaagatcagacaaggtcgtgtatgggaaaggccttggtaaatggaaaagcacaatctaagtgtaacttattctagatgtgctttcaataggcaagttttatatacctaagactaaaagcttgcattttaatccctgggattgaaatctttcaccatcatccccatgatggtaataacaacaataacaatactagtgcactatttattgtattttctgcaatgggcacttaatatgttttgattatatatttcaaaaacctcataaaatctattttatcatgtatattatttgcttacctaagagtgtactggacagaatttaaatttttcttgagggcttagggcagtgcagttcttagggtgtgtgatgtctctgtctatatagatgatttgatttaaaaatgtgttatatgtgatacatttataacggaatattttttgctaaaaagaaatgagctaccaagctataaaaagatatagaggaaccttggatgcmtttttcyaagttaaagaagccaatctgaaaaggctataaaactgtatgatttccaccatatgacactctggaaaaggcaaaactatggagatattaaaaagatcagtgkttktcaggggttaaaggggaggaagggataaatagscagagcacagatgtttaggscagtgaattattctgtatgattcatattggtggatccatggtcattatacatttgtcaaaactcatagagtgtgcancatcaagagtgaactctaatgtaaactatggactatgggtgataatgatgtgtcancataggtacattaattataacaaatataccactctggtgcccagtgttaatactgggggaactgatgtgtgtagaggacaatggtatatgggaactttctgtaattttgggaactgaaaactgctcttaaaagaataaagtgtattaaaaaggatcacaccaaaaaatgaattgcaaaattcatgacctcatgtgaaagatagtgactgtggtagatagaataatggcccctaaagatgaccacatcctagtccttggaacctgtgaatctgctactttacttggtaaaaggggctctacagatatgattaagttaaggattttgagatgggaaggtcatcctggattrtctragtgggtgcagtgtaatcacagggtcctttaaagatggaggcagactgtcagaggaattggcacaaaagcagaggtcacacacacacacggggggatagagagagagagagagagaggaagatgttacactgctggctttaaagatggaggaagtggctattaagtcaagcaaggcatgcaacctcaaaagctccaaaaaacaaggaaatgaccttcagaaggaattcaaccttatattccttgctgacccattttagacttttgactatctgaactttaagttaataaagtgctgttgttttaagccaataaattggtggttatttgttacatcagcaataggaaactgggataatgatttttcaatgaaaatttagacaagattagaaaaaaaaaaaaaaaaaaactcgag

SEQ ID NO: 352 - DNA, 3097 bp, Homo sapiens
ccagcttgctcgcactcggctgtgcggcggggcaggcatgggagccgcgcgctctctcccggcgcccacacctgtctgagcggcgcagcgagccgcggcccgggcgggctgctcggcgcggaacagtgctcggcatggcagggattccagggctcctcttccttctcttctttctgctctgtgctgttgggcaagtgagcccttacagtgccccctggaaacccacttggcctgcataccgcctccctgtcgtcttgccccagtctaccctcaatttagccaagccagactttggagccgaagccaaattagaagtatcttcttcatgtggaccccagtgtcataagggaactccactgcccacttacgaagaggccaagcaatatctgtcttatgaaacttgctctaccagcaatgcgatgcccagccaggggccagcgggtctggggtctatgtgaggatgtggaagagacagcagcagaagtgggagcgaaaaattattggcattttttcagggcaccagtgggtggacatgaatggttccccacaggatttcaacgtggctgtcagaatcactcctctcaaatatgcccagatttgctattggattaaaggaaactacctggattgtagggaggggtgacacagtgttccctcctggcagcaattaagggtcttcatgttcttattttaggagaggccaaattgttttttgtcattggcgtgcacacgtgtgtgtgtgtgtgtgtgtgtgtgtaaggtgtcttataatcttttacctatttcttacaattgcaagatgactggctttactatttgaaaactggtttgtgtatcatatcatatatcatttaagcagtttgaaggcatacttttgcatagaaataaaaaaaatactgatttggggcaatgaggaatatttgacaattaagttaatcttcacgtttttgcaaactttgatttttatttcatctgaacttgtttcaaagatttatattaaatatttggcatacaagagatatgaattcttatatgtgtgcatgtgtgttttcttctgagattcatcttggtggtgggtttttttgtttttttaattcagtgcctgatctttaatgcttccataaggcagtgttcccatttaggaactttgacagcatttgttaggcagaatattttggatttggaggcatttgcatggtagtctttgaacagtaaaatgatgtgttgactatactgatacacatataaaactataccttatagtaaaccagtatcccaagctgcttttagttccaaaaatagtttcttttccaaaggttgttgctctactttgtaggaagtctttgcatatggccctcccaactttaaagtcataccagagtggccaagagtgtttatcccaacccttccatttaacaggatttcactcacatttctggaactagctatttttcagaagacaataatcagggcttaattagaacaggctgtatttcctcccagcaaacagttgtggccacactaaaaacaatcatagcattttacccctggattatagcacatctcatgttttatcatttggatggagtaatttaaaatgaattaaattccagagaacaatggaagcattgcctgtcagatgtcacaacagaataaccacttgtttggagcctggcacagtcctccagcctgatcaaaaattattctgcatagttttcagtgtgctttctgggagctatgtacttcttcaatttggaaacttttctctctcatttatagtgaaaatacttggaagttactttaagaaaaccagtgtggcctttttccctctagctttaaaagggccgcttttgctggaatgctctaggttatagataaacaattaggtataatagcaaaaatgaaaattggaagaatgcaaaatggatcagaatcatgccttccaataaaggcctttacacatgttttatcaatatgattatcaaatcacagcatatacagaaaatacttggacttattgtatgtttttattttatggctctcggcctaagcacttttttctaaatgtatcggagaaaaaatcaaatggactacaagcacgtgtttgctgtgcttgcaccccaggtaaacctgcattgtagcaatttgtaaggatattcagatggagcactgtcacttagacattctctgggggattttctgcttgtctttcttgagctttttggaaggataattctgataaggcactcaagaaacgtacaaccacagtgctttcttcaaatcatatgagaaatactatgcatagcaaggagatgcagagccgccaggaaaattctgagttccagcacaattttctttggaatctaacaggaatctagcctgaggaagaagggaggtctccatttctatgtctggtatttgggggttttgtttgtttttgctttagcttggtgaaaaaaagttcactgaacaccaagaccagaatggatttttttaaaaaaatagatgttccttttgtgaagcaccttgattccttgattttgattttttgcaaagttagacaatggcacaaagtcaaaatgaaatcaatgtttagttcacaagtagatgtaatttactaaagaatgatacacccatatgctatatacagcttaactcacagaactgtaaaagaaaattataaaataattcaacatgtccatctttttagtgataataaaagaaagcatggtattaaactatcatagaagtagacagaaaaagaaaaaaggactcatggcattattaatataattagtgctttacatgtgttagttatacatattagaagcatatttgcctagtaaggctagtagaaccacatttcccaaagtgtgctccttaaacactcatgccttatgattttctaccaaaagtaaaaagggttgtattaagtcagaggaagatgcctctccattttccctctctttatcagaggttcacatgcctgtctgcacattaaaagctctgggaagacctgttgtaaagggacaagttgaggttgtaaaatctgcatttaaataaacatctttgatcacaaaaaaaaaaaaaaaaaaaa

SEQ ID NO: 353 - DNA, 582 bp, Homo sapiens
  misc_feature (575)..(575): n equals a,t,g, or c
attcggcacgagtcggtgctcgctccatcgggtctggcggggctggcagcggcgaggacccgggtctggcgctgtgggccgggagccgtggggcggcatggaggggctggttgtcgccgccggcggggacgtctccstgcacaacttcagcgcgaggctgtgggagcagctggtccacttccacgtcatgcggctgacggactcgctgttcctgtgggtgggggccacgccgcacctgcgcaacctcgccgtggccatgtgcagccgctacgactccatccccgtgtctacctccctccttggagacacttccgacacgacctctactggccttgcccagcgcctagccaggaagaccaacaaacaggtgtttgtcagctataaccttcagaacacagacagtaacttcgcattacttgtagaaaacaggatcaaggaagagatggaggctttccccgaaaagttctagctgagtggcagaagtgagaatttgtaaacttatgtacaatgtacgtgtaaataaatggattgaattcaaaaaaaaaaaaaaaaaaaaaaaaaaaaaaaaaaaaaanactcgag

SEQ ID NO: 354 - DNA, 835 bp, Homo sapiens
ccaccagggacgaccgctactgaggaactagtggaycccccgggrctkgmagggaatycggcagaggtttattgagaggttttagcatgaaggctgttgaatatagttgaaggccttttctgcatctattgagataaacgtggtttttgtcattggttctgcttgtgtgatggattacgtttattgatttgcatatgtttaaccagccttgcatccctgggatgaaactgacttgatcgtggtggataagctttttgatgtgctgctggattcggtttgccagtattttattgaggattttcacaccaatgttcatcagggatattggcctgaaattttgtttttttgttgtgtctctgccaagttttgttatcaggatgatgctggcctcatgagttaaggaggattccctctttttctatcgtttggaatagtttcagaaggaatggtacaatctcctctttgtacctctggtggaattcagctgtgaatctgtctggtcctggactttttttggttggtaagctattaattgctgcctcaatttcagaacttgttactggtctattcagggattcaacttcttcctgctttagtcttgggtgtatgtgtccaggaacttatccatttattctggattttctagtttatttgcatagaggtgtttatggcattctctgatgatagtttgtatttctgtgggatcagtggtggtatcccctttatcattttttttattgcacctatttgattcttctttcttttcttctgtattagtctggctagtggtctattttgttgatcttttccaaaaaaaaaaaaaaaaaaactcgag

SEQ ID NO: 355 - DNA, 879 bp, Homo sapiens
ggcacgagaaactacaaattttaaatagtatatttccagggataggttgtcctgttcctcgaattccagctgaggccaatcctttagcagatcatgtctctgctactcgaatcttgtgtggagcccttgtctttcctactattgctacaatagttggtaaattgatgttcagtagtgttaactctaatttacaaaggacaatcttgggtggaattgcgtttgttgccataaaaggagcatttaaagtttacttcaaacagcagcaatatttacgacaggcacaccgcaaaattctgaattatccagaacaagaagaagcataaaactgacttctggttgttctgcagttctctcatccttatgaatctgttgtgttgttttgattccatcattaatgcacttgtggagacttgtgataagctgctgctcctatattttttaagaaatataataaagcacttagggcaggggaaatcatctcggtaatcatggaacctaaggatgtgatttgttttcattgtttgtatgtactacttttatggcagtcatatgaaccattatcttagcatggtaaacctgggttttgttcatattttctccagacagaaatgcaaagatcaaactgtgcaaatattaaaaaaatgcacatgctgttttattcaaatgcctcttttgtacatgttcatgtttagtgttttctcagaatcagcaactcaaggtactatgaggatttttctcactgacataatttgattacatactaaataagaggatatgttaatatgaggaaatgtaaattaaattagttataaataaataaccaaaaatgtatgtaaacattcaaatgattatctgaaaaaaaaaaaaaaaaaaaaaaaa

SEQ ID NO: 356 - DNA, 352 bp, Homo sapiens
ggcacgagcaaggactggcagcagggaagccctgtgcatgtgtgccctgggaaagctctgcttgattctgcaaagctggcatcctctttaaggaagccctaggacaggccaaatggagctcttgtccaaggggtcatttctgtcttgacagatcgaaggtgccttggaatatggaatcacaagtgatgacatcttctggctgaaggaatcccctggaaaaacgtaaggcctgcgcgtgcttggtggggtcctctttttgttcaccagagtgagcactggacccttagagcctgtgctggtgctgggctcctggggctttctttccggtttacccaaaaaaaaaaaaaaaaaa

SEQ ID NO: 357 - DNA, 919 bp, Homo sapiens
ggcacagagaaaagctagccactggtattttgttttgtttaaaaaaaaaaagaaagaaagaaagaaagaaaaacggaaaggaacctagctgcctgtatctttcatttttaaaatagcacttgagttattttctgagtaatccaataaagaacttttgatgacagccagaatgtgttagaactctggctgaacatttcatctcctgtgagtcagaagggctttatttctccctttgatggggccccttcttctttctggtgctctggaarttgtttagrggaaagaattctaattttaattaattgcgcrtgagttaatctcactcgcttttctgcttccaggcatcttaggaaaaacmaatggttttagtaggcatcccttatctactaatgcttttttaaaacaaacagggacatttttattatagatttgatttttttaatgaatgtttttaaaaatatataaataggacaccaaagcggcagggttttttttggggggagggggtttgtttyccaactcaagatggcacattagtggccagcaatattttttaactcattccaaccaggaagcttttttatacattgcctaaatctacgccaaccagaaaatagtctcatctctttttttctcaaatgagatccgtgttttattttagcattaaattagttacactgtgatgactggcctattacctgactcagctccctctaccttgaaattgacatttttaaaaaatgcaactaagtggttaatagtgtgtgacgctcaaagttaatgtaaactggaaaggttgtgtgtcgttgctttttgtgttttggttaggcttggttttgttttttaatttttatactttctaataaatttgcagtttcattctttcaaaaaaaaaaaaaaaaaaaaaaaaaaactcgag

SEQ ID NO: 358 - DNA, 2793 bp, Homo sapiens
  misc_feature (2762)..(2762): n equals a,t,g, or c
aatttgtaggcaggagtaaacgttaactgacggtgggttagtgccctgcatcttgcatatttgaactgtctagagttcctgccattgctgggtataaaacgaggagctctctgttgacctgtaaatcattaatacttcttgacttagagtgtcacttcactttatagatgacattttcctctttccccttgatattttctatgttgtgttagataattggtagatatrtagttgtggtttagtacatttagggcttctatttatttagattttgtttgttggagtctgtttccaaaagggaatgtgccatttagtctgcatctgtatctttgtggacttgatgatcactggtttgattttgaaaaatgtcttttccagcttttagttactctcatcaaatgtcacatatttctaatcacatgcactcctttaccacagaggcacataatcatttggcctcatagcagttatccatggccgtactgtagtaaagttccttagaactttgccaggagtgaactagaaaaaagtgcttactagggcctaagagttgctttgtgccgtgtagtccggcctttgcactagtagatcattgctgacataggtcagtttagagacctttctgtgttaatgcctcctggtactgtcttaagatacgtacagtgtctgtttttagatctatgcatatgtcatgaagctccttgtgggctctgcatgaagctgctgctttgtttttgggttaacagatgtgcctgtcaactagcatgtgtattgtccaaattccataaacttaaggtttttaagggctgtgtggtttctgagctctatgtgtctttcctatccttgtaccttcaaagggtgagaaatgagatttatacatccaaagttagtctgataaatatggctttttgtttctccatgtaacctagactgtcaaaaataagtgatggtgataagtaggcctggagcctcagcttctgtaaatctcattcctaaaattttgctagactcgtgttggcaaaaacaaatacctgtggattgtccttaaggcttttaatcagatacctgtgttgctgttagctgaactgtagtgaagcatcgatccaaatcggtcttctgaagtatcagttatgcttttgagtttagaaaatacttaggtgttagtctagtcttcccattcatgaatcagtgtatgtccatatcagagagcctcaacttcttttttcttcctttttaaaaatgattttagtgttttgatttagtgtatactacatagttcagtattattggctttaccagtgttgacagaaaaattttaaatctccagttgcaaacagcaatggattaggatatggaaataaaatcatggtgacatcactgctgagttatcttaaacctctgctacttaattctccatattgaaatgcatactcctccacatacatggcttccaagtaaaggcaattgtagaggggccctgtctatcccagtatggttggattttaaacatatctgtgtttccgttattttgggaactgattaatatttacaattttttttgtttatgagttattttgatactaagaaaagagagaatctagaacatcttgmagttgaaatacaaattttattcttttggtcttgggagaatttaagcagtctatgcaactcatcaaatggtgagaaatagccctccgaggttccagtaagctttcagtgactttgatacctccccaagtttcttgagttgctgcttgttaacacccagcttttaactgagtgtttgctcctgatggtttaggagattttcatgttgtatcacactgtcaagttttattttgtctttttatccctccgtggatgtgagtttgaaacaagcacggtacagtaatcctgcctgatagagtagtctggaatgagaattactttttgggtgagagagttctccattttaatgtttctaaagtttttcatatgaacttggcattggaaaagggaggtaaagaaaaaggacgtttactaaaagcagtgtctactcttcccctttgtgagtgtttattcatggctaatgaaaaaaagagaaggactcttgggttttgtgttgccatgttaagcatggagagggatgcttgacagcatgctaattgaagccagagcaagtatgtccttcatcaggtaatcaggaactcttcagttgaagctgaggaactaactgattagttgttgatcataatataattggttacaaagtggaagtgccagctggcttaagtacccaaagaaaagaatgcagcagcctaacttagtgttaccatatgttactgaatttgaaactgaccttttttcccaccctacttcacacacctaaaactcttttcttgtcagaccaaagagcgaaaagaaaaaaaaaaagtaaaacactttaccaatctgtcactcaggtacaattttgtggtgagatttttgtctgttctctttgtattgctcttaagagtcctttctcagcatattattctgccattgcctctgtcttccttggggcacctcagctctggatgctacccctgggatatctactgctgttatgtgaatgataggaggtaagtgaccattatagtaagggctctttgtaaaaaaattcaaaaaatttaaaaaggatgtatacattttatagtctggctatcagtttgatatcttgctgtcaagtatgtttctcaatctgtatttatccatcccatcaataaatgttaatggtaaaacancaaaaaaaaaaaaaaaaaaaaaaaaaaaaaa

SEQ ID NO: 359 - DNA, 2795 bp, Homo sapiens
aatttgtaggcaggagtaaacgttaactgacggtgggttagtgccctgcatcttgcatatttgaactgtctagagttcctgccattgctgggtataaaacgaggagctctctgttgacctgtaaatcattaatacttcttgacttagagtgtcacttcactttatagatgacattttcctctttccccttgatattttctatgttgtgttagataattggtagatatrtagttgtggtttagtacatttagggcttctatttatttagattttgtttgttggagtctgtttccaaaagggaatgtgccatttagtctgcatctgtatctttgtggacttgatgatcactggtttgattttgaaaaatgtcttttccagcttttagttactctcatcaaatgtcacatatttyctaatcacatgcactcctttaccacagaggcacataatcatttggcctcatagcagttatccatggccgtactgtagtaaagttccttagaactttgccaggagtgaactagaaaaaagtgcttactagggcctaagagttgctttgtgccgtgtagtccggcctttgcactagtagatcattgctgacataggtcagtttagagacctttctgtgttaatgcctcctggtactgtcttaagatacgtacagtgtctgtttttagatctatgcatatgtcatgaagctccttgtgggctctgcatgaagctgctgctttgtttttgggttaacagatgtgcctgtcaactagcatgtgtattgtccaaattccataaacttaaggtttttaagggctgtgtggtttctgagctctatgtgtctttcctatccttgtaccttcaaagggtgagaaatgagatttatacatccaaagttagtctgataaatatggctttttgtttctccatgtaacctagactgtcaaaaataagtgatggtgataagtaggcctggagcctcagcttctgtaaatctcattcctaaaattttgctagactcgtgttggcaaaaacaaatacctgtggattgtccttaaggcttttaatcagatacctgtgttgctgttagctgaactgtagtgaagcatcgatccaaatcggtcttctgaagtatcagttatgcttttgagtttagaaaatacttaggtgttagtctagtcttcccattcatgaatcagtgtatgtccatatcagagagcctcaacttcttttttcttcctttttaaaaatgattttagtgttttgatttagtgtatactacatagttcagtattattggctttaccagtgttgacagaaaaattttaaatctccagttgcaaacagcaatggattaggatatggaaataaaatcatggtgacatcactgctgagttatcttaaacctctgctacttaattctccatattgaaatgcatactcctccacatacatggcttccaagtaaaggcaattgtagaggggccctgtctatcccagtatggttggattttaaacatatctgtgtttccgttattttgggaactgattaatatttacaattttttttgtttatgagttattttgatactaagaaaagagagaatctagaacatcttgmagttgaaatacaaattttattcttttggtcttgggagaatttaagcagtctatgcaactcatcaaatggtgagaaatagccctccgaggttccagtaagctttcagtgactttgatacctccccaagtttcttgagttgctgcttgttaacacccagcttttaactgagtgtttgctcctgatggtttaggagattttcatgttgtatcacactgtcaagttttattttgtctttttatccctccgtggatgtgagtttgaaacaagcacggtacagtaatcctgcctgatagagtagtctggaatgagaattactttttgggtgagagagttctccattttaatgtttctaaagtttttcatatgaacttggcattggaaaagggaggtaaagaaaaaggacgtttactaaaagcagtgtctactcttcccctttgtgagtgtttattcatggctaatgaaaaaaagagaaggactcttgggttttgtgttgccatgttaagcatggagagggatgcttgacagcatgctaattgaagccagagcaagtatgtccttcatcaggtaatcaggaactcttcagttgaagctgaggaactaactgattagttgttgatcataatataattggttacaaagtggaagtgccagctggcttaagtacccaaagaaaagaatgcagcagcctaacttagtgttaccatatgttactgaatttgaaactgaccttttttcccaccctacttcacacacctaaaactcttttcttgtcagaccaaagagcgaaaagaaaaaaaaaaagtaaaacactttaccaatctgtcactcaggtacaattttgtggtgagatttttgtctgttctctttgtattgctcttaagagtcctttctcagcatattattctgccattgcctctgtcttccttggggcacctcagctctggatgctacccctgggatatctactgctgttatgtgaatgataggaggtaagtgaccattatagtaagggctctttgtaaaaaaattcaaaaaatttaaaaaggatgtatacattttatagtctggctatcagtttgatatcttgctgtcaagtatgtttctcaatctgtatttatccatcccatcaataaatgttaatggtaaaacactcaaaaaaaaaaaaaaaaaaaaaaaaaaaaaa

SEQ ID NO: 360 - DNA, 575 bp, Homo sapiens
ggcacgaggcttttttagctcaagagtttgttattaccccccttctgaagcttacttccatcaattcctcaaactcattctgtgtccatttttgtgcccttactagagaggatctgggataatttggaggagaagaggcattctggttttttaaattttcagcatttttgcacggttttttcctcatcttagtggatttatctacctttgtactttgaggctgatgacctgtggatgagattctgtgtgggggtcctttttgtcgatgttgatgttattgctttctgtttgttaggtattctaacaggcaggcccctctgctgcaggtctgctgcagtttgctggaggtccactgcagaccctatttgcctgggtatcaccagcagaggctgcagaacagcaaagattgctgcctgctccttcctctggaagtttcgtcccagaggggcatggacctgatgccagctggagctctcctgtataggtgtctgtcaactcctgttgggaggtctctcccaatcaggaggcatggaggtcagggacccacttgaggagcagtctgtctcttagcagag

SEQ ID NO: 361 - DNA, 1165 bp, Homo sapiens
ggcacgagattttttcctttatttttgtcaaatgagtttatttgaagaaccagcctttgagctctgagattatgtcctcagtttggtctgttctgctgttaatgctaccaactgaattatgaagttcttatagtgaactttccaattccagaagttcagtttgattttttcttaaaatggctatttcttatgtcagctcttggatcattttactggattacttgggttccaaggatgggtttcaactttttcctgaatcttgatgaacttctttgtcattcagactctgaattccatttctgtcgttttaatcatttcagtctagttaagaattattgctggggagctactgggctcatttggaggtaaggggtactctggcttttagaattgccagaattcttgagctgattctttctcatctgtgtggattgatattccattaacttttgaaattgatattcttcagatggagcttttagctgttatgtttttttaatgctgttaagagtttgactgtggtataccttgggcttagttgattgtctttgtttctgacactgatgctttcagaggaacaaagctcagttcagcctccctaggcagaattctttaactctggggtactgggactgggaacacagctttattctctgtccccttaagatcaagcatttgctgcactgggggtgtgggaggatatggtgctcccagcctgctggcaacagtgctctgttggaggtttccagcagaagcactgttggggctgttgagtggccttgaacaaaacctctctgatgggtgtctgccagcaaaagcactccagtgggatggcaggggtggccaatgagagagctatggtggtggctctggtaaaagcactaacagcaggttgggtttgggttgctgcaagcaagtgtgcttcagtcaggcagcgggcaggcacaggcaaaagtgctctggcatggtggctgaggattcatggacgaaaggactccagcaggttggcagggtggccatgggtgaaagatctccattgcagcagcagggacactgcagatactctggtgtgagtaagcactctggcagggcagtggataggttccaggcaaaagcactctgatatgggtcccctatttctttgcagtaaacatttaaaaaaaaa

SEQ ID NO: 362 - DNA, 454 bp, Homo sapiens
ggcacgaggcttgtgagctcaccaaacaaggatttcagtgtagattttgtctttcttgaacttaaagaaacaaatgacaaagtttgaatggaaaagcctgctgttgttccacatctcgttgctgtttacattcctttgtggagcctacatcttcctaagctttttagcaggtatatgttgaacacttctgtttcatggttgagacagaatcagaggccatggatactgacaactgatttgtctgttttttttctctgtctttttccatgactcttatatactgcctcatcttgatttataagcaaaacctggaaaacctacaaaataagtgttgtggtttatctagaaaaatatggaaaatattgctgttatttttggtgaagaaaatcaattttgtatagtttatttcaatctaaataaaatgtgaattttgtttaaaaaaaaaaaaaaaaaa

SEQ ID NO: 363 - DNA, 788 bp, Homo sapiens
ggcacgagccttcatccaggtgagaatgtgctgcagctggtttctttgggaagcctgtgggttaaagtaagcgatagtctatatgccgtgtggccatctacgaataagggctgggattgctggtggctctggtgcagcacagtcactgctttttccatacttggagagcctatgggagtgcgattttgatagggcttgaattgcaggaagagcccatggctcccaaggtggggcttgcatttctatcaagtagctgttaataatggggcagttgctgggcaactgtgtgctcagcagctgggcttttccctcagcccctctactaacctgctgtgaggcaagacaagggcaggacactaacgttcctgtctcctgattctttttctttaccattccttaagagaaggaaagcagagacggtccagtcctgtgatttctcagtgcttgttctaatcatatgtgctgatttcctgttgaatgaagatgaaggccgggtgcggtggctcaggcctgtaagcccagcactttgggaggccaaggtgggtggatcacctgaggtttggagtttgagaccagcctggccaacatggtgaaaccccatctctactaaaaatacaaaaattagctgggcatggtaagtgggcgcctgtaatcccagctacttgagaggctgaggcaggagaattgcttgaacccaggaggcagaggctgcagtgagccgagatcgcgccatcgcactccagcctgggcgacaacactgtctcaaaaaaaaaaaaaaaaaaaaaaaa

SEQ ID NO: 364 - DNA, 908 bp, Homo sapiens
ggcacgaggtaatggctgaggcacaaggagcgagtattttaaatcaggcttatgaatgtgctctgtggatacggtttgcccatagggaggtggttttgggggttgcgaatcatactcaagctgtccctgaccgactcaccagtattctacaaacttactacaaacctctcaaaggaccatcttggaagacactagcaagggcgtgcacaatcccctctgacgttgctggctggtggtggaggccacggagcctccctgtgtgagactgtactatgtggtcactagaatgttttgaaagacagttctctgcaggcccggcaccgtggctcacgtctgtaatcccagcattttgggaggctgaggcgggtggatcacgaggtcaagagatcgagatcaccctggccaacatggtgaaaccctgtctctactaaaaatacaaaaattagccgggcgtggtggcgggcacctgtagtcctagctactcaggaggctgaggcaggagaatggcgtgaacccgggaggcggagcttgcagtgagctgagattgcgcaactgcacttcagcctggcgatagagcgagactccatctcaaaaaaaaaaaaaaaaaaaaatagggacttactgggccggtcggggagggggaggcgggatgggacacccaacactttttccatttcttcagagggaaactcagatgtccaaactaattttaacaaacgcattaagaggtttatttgggtacatggcccgcagtggcttttgccccagaaaggggaaaggaacacgcgggtagatgatttctagcaggcaggaagtcctgtgcggtgtcaccatgagcacctccagctgtactagtgccattggaataataaatttgataaggtggtgaaaaaaaaaaaaaaaaaaaa

SEQ ID NO: 365 - DNA, 1891 bp, Homo sapiens
ggcacgagtgcacctgcaagcatgggggtggcaggagccacagagctggctgctgagaggagctgcagatctggagaagacagcctaggtaaaggtggacagtgtgagagctgctgatgagatagctgctgaataaaactacattttacctgcctatggcccgccaggttttctttcagctatcgcccatccacccagtcccctcgaacctcagcatgggctggaacctgaccctgggcatgacatttggcatagttgtggacctgacacctgtgtttgtcctagtcctgtttctccctgccttcctgttcctctcgctgccctcatggtcactcccaagggatccaacccatgttaagtatgggctggaggactgcatgaatgcctcatgatcttcccagaggcaaaggcacctactgccttccaaggtcagtgggaggttgggatcaacactgtttattatgcttaggacaaaaaagatagggagaaagatgtgcaccttacagtcatctttctgggatagaacacaatgggtcttctcctgcctcctggatatgttagtcaaggccagtccatgctacacatctagtctgacttctaaaatagaagcaccagatgaattcagccctgagagaattttcagcagctgtgggggcgctggaggaaacactattaaatagttttgcacctgagacagatagcctcactcgcctcaccctagtcctggtggcatttgtctcaggtgcaaaatttaagaaagaaaccttggagtgctcaccctgtggctgggtagatggtcctaaagtggtggttttcaagcctgagtgtgtatcaggatcatcaggggagcttgctaaagagcagttcctgcggtcagaccctcatgcattttgagcaggtgtggggactgggaaactgcatctgtaacctgctgtaatctaacgcttatctaaatactactgtgctcacacagagaacaccgcaaaagtagaggtgttcctccagagggcaggtgagcagatggcacagtctgcttggaattcagtcaggtgatgagagatgagatgaggcactcctagctttgggaagagggagctgaaagatgaacctttgcaggtgcccacggtcaaagtggtggtttaatgccatgccatgcccattttctgttggccttggcagggagttacagccctaccttaggacctggctccttatttctgctgtaggctctttcctgccctggccgagatggagtggaatgagacctagaaacatcaagctaaatacatgtcctcagaaagataaaggtttacattttcacccccatcaaatctgaaagctctctgcctgtgtttttctaagggatagggacatcattactcagtccacaacctggactcatgtagggtcccctgtcagtaaaggagtcagtcaagcccaccaggtataccaaggactcttaccctcagcccctactccttggaaagctgccccttggcctaatattggtgtttagcttgagcctgactccttctcaacactaagagctgatgaagtcctgaagcagaaagagctctgacctgagagtcaaacatccttattctgatctcagctcagcccctgatttgttgtgtgaccctggatatgtcacttcctgtctttttgactttttaaaatgaagggtagactagaggagagcttctaaaactttaatgtggtcaacgaaatggaataggaaattccacaagtctgtccttccacaaaagcagcaaataaggtggcaaaaactcaaatttatgggaactctggaaacgaattgaaagtttacagcaatcaggtgaatacctaagaataaaagctggatttagtaagaaaaaaaaaaaaaaaaaaa

SEQ ID NO: 366 - DNA, 1157 bp, Homo sapiens
  misc_feature (826)..(826): n equals a,t,g, or c
caaggtcgccggtatcgataagctttgatatcgaattcaaccaatcactgttatcagggcagtcatccctttgtccagccatgctcctgtatcagagaagcactgccatgacagatattgggcaaactgatatatgacccccaatactgggtttggtgctcattctcgttaatgcatgtgttaagggtttcattctaatcatctgcaaaaaagtgattgttgtctttaaaatgttaccaaaactagtcttttagcaagaatcttactagaataaaatggctcttgctacctgtatttttaatcagcctatgtatattgatcccattcctgatattatcaccttaatatataacagccccaattcctcttattgagcattggttgctagggaaagcaaaaagttaagagaaaactactgagattttctctctaatttgcctctgtctgcctctaactagcttagagatcttggacaagtcctttaacagttctctgtcagctgcttggactgtgaaatagagataaaagtacctgtctawttcaggccgggcacggtggctcacgcctgtaatcccagcactttgggaggcccaggagggtgggtcacgaggtcaggagattgagaccatcctggctaatgcagtgaaaccccgtttctactaaaaatacaaaaaaattagccgggggtggtggtgggcacctgtagtcccagctacctgggaggctgaggcaggagaatggcatgaaacccggaggcggagcttgcagtgagccgagatcacgccacggcattgcagcctgagtgacagagtgagacyccstctcnaaaaaataaacctttaaaaaaaaaaaaaaacaactgtctatttcatagaggtattgtgaggattaaatgagataatgttgatgaagtaattttgaaaagcatatcaatgtgcagctgtaaagttttattcatatttaccagccaggcaagtagtattagctgttataagtaaaggtaaacatccaagtgcatatgttcagatgattatttttaatatacattttctcctgatatatattcttctagttgcagatctgattggttgaattcgatatcaagcttatcgataccgtcgacctcgagggggggcccggtacccaattggccctag

SEQ ID NO: 367 - DNA, 1158 bp, Homo sapiens
  misc_feature (826)..(826): n equals a,t,g, or c
  misc_feature (842)..(842): n equals a,t,g, or c
caaggtcgccggtatcgataagctttgatatcgaattcaaccaatcactgttatcagggcagtcatccctttgtccagccatgctcctgtatcagagaagcactgccatgacagatattgggcaaactgatatatgacccccaatactgggtttggtgctcattctcgttaatgcatgtgttaagggtttcattctaatcatctgcaaaaaagtgattgttgtctttaaaatgttaccaaaactagtcttttagcaagaatcttactagaataaaatggctcttgctacctgtatttttaatcagcctatgtatattgatcccattcctgatattatcaccttaatatataacagccccaattcctcttattgagcattggttgctagggaaagcaaaaagttaagagaaaactactgagattttctctctaatttgcctctgtctgcctctaactagcttagagatcttggacaagtcctttaacagttctctgtcagctgcttggactgtgaaatagagataaaagtacctgtctawttcaggccgggcacggtggctcacgcctgtaatcccagcactttgggaggcccaggagggtgggtcacgaggtcaggagattgagaccatcctggctaatgcagtgaaaccccgtttctactaaaaatacaaaaaaattagccgggggtggtggtgggcacctgtagtcccagctacctgggaggctgaggcaggagaatggcatgaaacccggaggcggagcttgcagtgagccgagatcacgccacggcattgcagcctgagtgacagagtgagacyccstctcnaaaaaatwaaaccttnaaaaaaaaaaaaaaacaactgtctatttcatagaggtattgtgaggattaaatgagataatgttgatgaagtaattttgaaaagcatatcaatgtgcagctgtaaagttttattcatatttaccagccaggcaagtagtattagctgttataagtaaaggtaaacatccaagtgcatatgttcagatgattatttttaatatacattttctcctgatatatattcttctagttgcagatctgattggttgaattcgatatcaagcttatcgataccgtcgacctcgagggggggcccggtacccaattggccctag

SEQ ID NO: 368 - DNA, 2267 bp, Homo sapiens
aaccaatcacaaagtgtgggcattatttaaatcttgattcaaataaacaaactgaaatatataaatgacacttatgaaacaaaaatgtggccactgattgggtatttgactaaatcactgctcaattttattttgtgcgtgataatagcaatgtgcttatgtgttttatcttctagtgatacatactgaaatatttacagatggaaataatataatgccaattattttcttggaaattaatgtgggatgtgggaaagtagacagagatagagatttaacaagatggattatgagctgataattgttgaagttgagtgacaggcacataggggtttattataatatcccgtcttcttttgcatatgtttaattttccataataattttttaatgttctaaaaatttaaactttattttccaatcaaatggaagtctttagagattttattttgcaagtggcaatatgattaaaagggaaataggaaagataaattaagcaatgatttgcacattaattggcagttggggaagactaaagaccaggagattagttaagagtctcttacagcatccctatctacattggaaaaagtctgactgaggtaacattaatagaaatgaaaaggaaaaagtgacaggaatgattttgaggagcatcaaagttcgctgctacttgaatatgaaacactaagcagagaaagattaaaagaggacacaaaaatctcaaacctggcatattttaaaaatagttatgtcatgaataaatataggccagtcaagatgacaaattgttgggtgatgaggtaacaaatttacttctagacatcaagtttgagaggatgaagtgaccacttgctattaaagtaaattattgtttacctacacatgcattaaaaaaaatcctttgtgctgtctcctgaaatgtgattatgtgtttaaaaatacagtgtcataaattaaacttagcataataaaataattgaataaaataaaactataagtcaaatttccttgttactaatattaaaatagcccaaacccttctttgataaaattctacttttttgtcatgttttaccatttgtttacattatttccctgcaaaaaatgttccttgatatcataagtagatctgtatatgtacttattttatatcactttccctgtctctatacatctaaacatataaagcaatgaacacatcataggtgcccaataaataccaagttttctggccaatatgctcacttattgcaagcagtactgagaagaataagattgtaacgctgccagataatttggaaagtcttctgaagcttccttaagtaagataacatcattattttattaagtagtatcattaattatcttaagtaacatcatcaatactgaaataatttcttctagtgacaaactacggaaatacatatagtagaaactgtgtctaagtcagacttttgaatttcatttaagacaaacttagttgtacactattaaaagtctataataaccacaatactgatcagtgcttagcatgtccatacccaaaagtttggaatttgtcatttttaatccctagcatcatacattcccatatcctttaccttagtaagtgattccttgtgaccaagtgaaccactctaattacctccataaaaagaaattgagaagatgtctcaaaaacaataaaaagcagaaatatattgttctctaaaccctctgattcttgacagtttttgcttcctagatccaccagttcagcatgctacccaatactgacaactaatcccagactttctttgctacttgaagccaaggcaacatccaactacatcatctctcgctgtttgcttgaaaacaaatgtgaaactatttcattcgtttgcttgaacttaccaataaatacatggctagaggtcatttagtttggcagtattctgattcagcaaagcaataaaaccaacccaaactatttgaaatcccaatgtccaggaccctggagcaccatgtctcttgctgtcatagcacctgactgtgagtgtgtttcctcactcgcctctgaaagctggcggcaagacccttgaccatcaaacaggagaaaaatcctcatcatctatcaagggggccatagttggaatctttctctgttatgcacatagaatgttcctgcagaaacaaagatctttccatgaacagtaataagttccctcttgtttcaacaatgattggttgaattcgatatcaagcttatcgataccgtcgacctc

SEQ ID NO: 369 - DNA, 434 bp, Homo sapiens
tatagcattgtacatatgacaagtcttttgcaaaactgtgtgatctttgtgaaagtagtacagtatatgacctttaatttctttttttttttttttttttttttttttttttttttttggtagttgataataagcgaaggctttaaaattttttatttgaaagaatttgttaaattctactatgggtcttggaaataacccatagtagaatttaaaactaagagcatactttccaaaatatggtctgaagaaaacctctatcatatggcaaatgaagcaaactgagaaagcatgaaaatagaaatcacagaataagaatgatttgcacacaccaagagtttgagaaacatgctctaatgatggaggctggcttaataagatttggggttttcaatgctatagaattcgatatcaagcttatcgataccgtcgac

SEQ ID NO: 370 - DNA, 1673 bp, Homo sapiens
  misc_feature (515)..(515): n equals a,t,g, or c
tctccggataactgtgctcctgacatccttccttatggttttgggaactggtctaagatgcatacctatatcagacttaatccttaaaagaagattaattcatggaggacagatgttaaatggattggcaggtccaactgtaatgaatgcagcaccatttctctctacgacgtggttttctgcagatgaaagggccacagccacagctattgcatcaatgctcagttatcttgggggagcatgtgcatttttagttggaccacttgttgttccagctcccaatggacatcacctcttcttgctgcagagagcagcagggcgcatattaaagatcgcatagaggctgtgttatatgcagaatttggagttgtctgcttaatattttctgcaacactagcttatttcccaccccgacctcctcttcctcccagtgttgctgcagctagccagcgtgagttatcggagaagcgtttgtagattattaagcaattttcgatttttgatgattgctttanatatgccataccacttgggtatttgctggctggtctggagttctggacttaattttaacaccagcgcatgtcagccaagtagatgctggctggattggattttggtccatagttggaggctgtgttgttggaatagctatggcaaggtttgcagattttatcaggggtatgctgaaactaattcttctcctcctgttttcgggagctacactgtcatccacgtggttcaccctgaactgtttgaacagcatcacacacctacctttaaccacagtgacattgtatgcctcctgtattctcctgggagtgttcttgaatagcagcgtgcctatattttttgagctttttgtggaaactgtctacccagttccagaaggaattacttgtggagttgtcacttttttaagtaatatgtttatgggagtacttttattttttctcacattttatcatacagagttgtcttggttcaactggtgccttcccgggtcgtgtttgctcagtctcctcctcattctgtgcttcagggaatcctatgacagactctatcttgatgtggttgtctccgtttaatagcacagacttgaaggagtttaaaaggaggctggaaatcaatactgcacactgcacatttgctcagaattgcacatctaacaggaaaagagggagaagaaagaaacttcattcagaggttttgttaggttacagattatcacattaatttaattactactaggtaataataatgggagacttgagtgataataggggattttaaaactctacagatggcatacctgtgcctgcttctggggttggaagtgtgacttcttacacataaagcactacctaagtaattctctctctgttttgtgccagtgctaaactactgattacttgtaattatgaaaagaaataaagggtgtctatcatatgaagataacgccttccctaagtcacatatcagaataggaagatatgccactaacttctaaagaagttcaaaccctgtatccaattttaatgataaaatagccaagaggtatatcgatgatggaaattagccacatgtacactacattttttctaataaagccatttcttatatgaaaaaaaaaaaaaaaaaaaaaaaaaaaaaaaaaaaaaaaaaaaaaaaaa

SEQ ID NO: 371 - DNA, 2805 bp, Homo sapiens
cggacgcgtgtttaggttacaggcatatactagtgtctcaaaggcttcacttggccttgcagatcacagagaacttggaaagatgatgaatacaataatttttcatacaaaaatggtagattccttggtggaaatgttggtggaaacatcagatctctccatattttgtttttatagtcgtgcttttgagaagatgtttcaacagtgtttggagttaccctctcaatcaagatactcaattgcatttccactactttgcactcattttatgagttgcacgcatgaactatgtccagaagagcgacatcatattggagatcgcagtctttccttatgtaatatgttcctagatgaaatggccaaacaagctcgaaatctcatcactgatatgtgcacagaacagtgtacccttagtgaccagttgctacccaagcattgtgccaaaactatccagtcaagcagtgaataagaaatcaaaaaagcagactggtaagaaaggggaacctgaaagggagaaaccaggtgttgagagcatgaggaaaaacaggctggttgtgaccaaccttgataaattgcacactgcactttctgagttatgcttctctataaattatgtaccaaacatggtggtatgggaacatacctttaccccacgagaatatttgacttctcatctggaaatacgctttaccaagtcaattgttgggatgactatgtataatcaagccacacaggaaattgcaaaaccttcagaacttctaacaagtgtaagagcatacatgaccgtactccagtcaatagaaaactatgtgcagattgatattacaagagtatttaataatgtgcttcttcaacaaacacaacatttagacagtcatggagagccaaccattacaagtctatacacaaattggtatttggaaactttgttacgacaagtcagcaatggccatatagcatattttcctgcaatgaaagcgtttgtgaacttacctacagaaaatggattaacattcaatggcagaggaatattctgacatatcagaaatgaggtcattatcagaactactaggcccatatggtatgaagtttctaagtgaaagccttatgtggcatatttcatcacaagttgctgaacttaagaaacttgtggtggagaatgttgatgtgttaacacaaatgaggaccagctttgacaaaccagaccagatggctgcactgtttaaaagattatcatctgttgacagtgtcttgaagaggatgacaataattggtgtaattttatccttccgatcattggcacaagaagcacttagagatgtcttatcctaccacattccttttcttgtaagttcaattgaagattttaaggatcacattccaagggaaactgatatgaaggttgcaatgaatgtgtatgagttatcatcagctgccggattaccttgtgagattgatcctgcattggtcgtagctctttcttcacaaaaatcggaaaacattagtccagaagaagagtataaaattgcctgccttctcatggtgtttgtggcagtttctttgccaacactggccagtaatgtgatgtctcagtacagccctgctatagaagggcattgcaacaacatacattgcttggccaaagccatcaaccagattgctgcagctttgtttacaattcacaaaggaagcattgaagaccgtcttaaagaatttctggcgcttgcatcctccagtctactgaaaattggccaggagacagataaaactacaacaagaaatagagaatctgtttatttactgctagatatgattgtacaagaatctccattccttacaatggatcttttggaatcttgttttccttatgtcttgctgagaaatgcataccatgctgtctacaaacaaagtgttacatcttctgcataaaattacctacttaatcaagataagcacgcatttttgttgccttggttttacctgtagactgtggaactattttaccttaagacctgaaaaagttttgtggattataaatttctttcatacggttgtattttctgatcattggtttcttaatatggttgtactacagtatacttggttgatttaggttgcacattcactgaattcactgagattattcctataattttaaagtatcatttatttgaaaaacatacattatcaacatgtttttgatatttgataatgaaaaaaatctttgcttgtttatttctgaaaaagaactgtatttagtgattattttagatagtgatattatagcattcatctgtgtgtaaattatttcatatagggaagagttctgatctgtacctatggttcttattgaaaacaacattggatgtgcatttctgtgatgttatgaatacatttctactttattttgaaacatttgccaaactaaatactgtaacactgtataacatttaaaaatgttaaagaactgcttagtattagaagcagatcatttcccaaaattctaagagcagcagcatatgttgttgcttgtataaagcctagcgataatttttagactaacttccatggtgccctgttggcattagcactaccattgtaccctgctgtataataaacaatcttagacatttatcaactgttgatacaaatgttagtccctaaccactttttatatatgttttaaatttttgaaattcaagtgtaccttccataacataaaataaacactagactgtaaaaaaaaaaaaaaaaaaaaaaaaaaaaaaaactcgagggggggcccgtaccctaatcgcctgtatt

SEQ ID NO: 372 - DNA, 709 bp, Homo sapiens
caagatccgactccctgcacagccgtcctggtatgtacagtccttcctgtttagtttatgccaggaaattaatcgggttggaggccatgccttgccaaaggtgacattacaggagatgctgaaaagctgtatggttcaagtagtagctgcctatgagaaactctccgaagaaaaacagattaagaaagaaggtgcatttccagtcacccagaaccgggcgctgcagctgctttatgatctgcgttacctcaaacagcaaccttcatcgcctgggtgcagcgaacttcttgttcctgttttgggattggtgactggtacagagaatcagctcgccccccggagcagtacgttcaactcccaagaaccccataacatcctgccactggcatccagtcagatcaggtttggacttctcccactgagcatgacaagcactcgaaaggctaaatcaaccagaaacatcgaaacaaaagctcaggttgtccccccggcacgctccacagctggtgacccgacagttcctggctccttgttcagacagcttgtcagtgaagaagacaacacgtctgcaccttcattattcaaacttggctggctctctagtatgactaagtaacatggcaacacatctgtctctccctaaataaatactaccacattatttcttctaaaaaaaaaaaaaaaaaaaaaaaaaaaaaaaaaaaaaaaa

SEQ ID NO: 373 - DNA, 1760 bp, Homo sapiens
ggaggagctcaacagcgggaaggtgatgtacgccttctgcagagtgaaggaccccaactctggactgcccaaatttgtcctcatcaactggacaggcgaggacgtgggaccccaggccccagtgggctctgtgtaccagaagaccaatgccgtgtctgagattaaaagggttggtaaagacagcttctgggccaaagcagagaaggaggaggagaaccgtcggctggaggaaaagcggcgggccgaggaggcacagcggcagctggagcaggagcgccgggagcgtgagctgcgtgaggctgcacgccgggagcagcgctatcaggagcagggtggcgaggccagcccccagaggacgtgggagcagcagcaagaagtggtttcaaggaaccgaaatgagcaggagtctgccgtgcacccgagggagattttcaagcagaaggagagggccatgtccaccacctccatctccagtcctcagcctggcaagctgaggagccccttcctgcagaagcagctcacccaaccagagacccactttggcagagagccagctgctgccatctcaaggcccagggcagatctccctgctgaggagccggcgcccagcactcctccatgtctggtgcaggcagaagaggaggctgtgtatgaggaacctccagagcaggagaccttctacgagcagcccccactggtgcagcagcaaggtgctggctctgagcacattgaccaccacattcagggccaggggctcagtgggcaagggctctgtgcccgtgccctgtacgactaccaggcagccgacgacacagagatctcctttgaccccgagaacctcatcacgggcatcgaggtgatcgacgaaggctggtggcgtggctatgggccggatggccattttggcatgttccctgccaactacgtggagctcattgagtgaggctgagggcacatcttgcccttcccctctcagacatggcttccttattgctggaagaggaggcctgggagttgacattcagcactcttccaggaataggacccccagtgaggatgaggcctcagggctccctccggcttggcagactcagcctgtcaccccaaatgcagcaatggcctggtgattcccacacatccttcctgcatcccccgaccctcccagacagcttggctcttgcccctgacaggatactgagccaagccctgcctgtggccaagccctgagtggccactgccaagctgcggggaagggtcctgagcaggggcatctgggaggctctggctgccttctgcatttatttgccttttttctttttctcttgcttctaaggggtggtggccaccactgtttagaatgacccttgggaacagtgaacgtagagaattgtttttagcagagtttgtgaccaaagtcagagtggatcatggtggtttggcagcagggaatttgtcttgttggagcctgctctgtgctccccactccatttctctgtccctctgcctgggctatgggaagtggggatgcagatggccaagctcccaccctgggtattcaaaaacggcagacacaacatgttcctccacgcggctcactcgatgcctgcaggccccagtgtgtgcctcaactgattctgacttcaggaaaagtaacacagagtggccttggcctgttgtcttcccctattttctgtcccagctcatccgtgtctctgaagaacaaatatgcttttggaccacgaaaaaaaaaaaaaaaaaaa

SEQ ID NO: 374 - DNA, 325 bp, Homo sapiens
gcacgggaactattgatacatgcaataacctaggtggatctcaaagtcattctgctgagtgaatgattccagttacatagcattctggaaaaggcaaaactgtggtgaccaggtaacaagcatgattgccaggggttggtggtggggaaagcgtgtgactaccatggggtagtatgaggtgatttttgaggagatgaaactgttctgtgtcctcattgtggtagtggttacatgagttagtacatgtgttaaaactcatagataatacgcttccccaaggaatccatttactatacattaatttgttaaaaaaaaaaaaaaaaaa

SEQ ID NO: 375 - DNA, 878 bp, Homo sapiens
  misc_feature (219)..(219): n equals a,t,g, or c
  misc_feature (222)..(222): n equals a,t,g, or c
  misc_feature (862)..(862): n equals a,t,g, or c
ctattatatcgcggcctctcgacttttgagactcgcgtttccttggccagyggtaacacaggacgtgtgtgcgcatgtgcaagtgtggatgtatgtgtgtgcgtgtgttttgctcatttctttagggaacttgggagtcggggttggaggtgctgggcaatggaacttcaaattcaatgtcgcccagcagtgaggggagtcgggaggtgaggcctgtangcnaaccaattggtggagtctcagcgatacccaggtgagaagtggttcacccagagggcagggtgggggcctcgggcagatctgtccctcttggcccctctgtcctcaaatgtccaaaatgttggaggacctctgttcatatcccacgcctgggctcttgccagcagtggagttactgtagagggatgtcccaagcttgttttccaatcagtgttaagctgtttgaaactctcctgtgtctgtgttttgtttgtgcgtgtgtgtgagagcacatcagtgtgtgcaggctgtgtttccccatttctctcctcccttcagacccatcattgagaacaaatgtaagaaatcccttcccaccaccctccctgcctcccaggccctctgcgggggaaacaagatcacccagcatccttccccaccccagctgtgtatttatatagatggaaatatactttatattttgtatcatcgtgcctatagccgctgccaccgtgtataaatcctggtgtmtgctccttatcctggacatgaatgtattgtacactgacgcgtccccactcctgtacagctgctttgtttctttgcaatgcattgtatggctttataaatgataaagttaaagaaaaaaaaaaaaaaaaagggnggccgctctaaggggt

SEQ ID NO: 376 - DNA, 1496 bp, Homo sapiens
ccacgcgtccgcggacgcgtgggctagctttgtcttcaatggctttctggacttcatcctccgacctgatgatccccgggcccaaaccctccgtcgcctcttcgtctttaagctgattcccatgttgaaccccgatggtgtggtccggggacactaccgcacagactcacgtggagtgaatctgaaccgtcagtacctgaagcctgatgccgtcctgcacccggccatctatggggccaaagctgtgcttctctaccaccatgtgcactctcgtctgaactcccagagttcctctgagcaccagcccagttcctgtctccctcctgatgctcctgtttctgacctggagaaagccaacaatctccaaaatgaagctcagtgtgggcactcagctgacaggcataacgctgaagcctggaaacaaacagagccagcagaacagaagctcaacagtgtgtggattatgccacaacagtctgcggggcttgaagagtcagcccctgataccatcccccccaaagagagtggcgttgcttactatgtggacctgcatggacatgcttccaaaaggggctgcttcatgtacggaaacagctttagtgatgagagcacccaggtggaaaacatgctatatccaaagctcatctccttgaattcagcccacttcgacttccagggctgcaatttctcagagaagaatatgtatgcccgagaccgtagagatggccagtctaaagagggaagcggccgtgttgcaatctacaaagcctcagggataatccacagctacacacttgaatgcaactacaacactggacgctcagtaaacagcatccctgctgcctgccatgacaatgggcgtgccagcccccctcccccgccggctttcccctccagatacactgtggaactatttgagcaggtgggacgagctatggccattgcagccctggacatggcggaatgtaatccgtggccccgaattgtactgtcagagcacagcagccttactaatctacgggcctggatgctgaaacatgtacgcaacagccgaggcctaagcagcactctgaatgtgggtgtcaacaagaagaggggccttcgaactccacccaaaagtcacaatgggttgcctgtctcctgctccgaaaacaccttgagtcgggcacgaagttttagcaccggcacaagtgccggtggtagcagcagcagccaacaaaattctccacagatgaagaattcccccagctttccttttcatggcagtcggcctgcagggctgccaggcctgggctctagtacccaaaaggtcacccaccgggtgctgggccccgtcagaggtaagccagtctgggagcccctgcaacatgtgttcggttgtctggggcattgctgggggaagtaagagcttgaagatatactgttggcccaggaccaaggggtgaatcaataaaattagtttgtagcagaaaaaaaaaaaaaaaaaaaaaaaaaaa

SEQ ID NO: 377 - DNA, 1135 bp, Homo sapiens
ccacgcgtccgcttttgtatctcaagaattgagggttttgttttctgatctcaggttttattattggtgggagcctgtgtttcttcctgggtagaattgaataagattttccaggaaaggcatttgtgtagctaattacagattatggtgcaaagtatgtctcatattcctccccctaaccccagctaattgctgtatacttgacagtttatttcaatattgtattaagacattggttttgtgctggacagagtaaaagggagatggtatttttttttaaaagaacaatttatttcataattaagtatctaaatacttggttgggaataaatgactaattagaacagtacctttaggtattctgatacctctacttagaaatgccttttcttttcttgcaaaaattacttggcagatttgatgaaaaagaaaatgtgtccaactgcatccagttgaaaacttcagttattaagggtattaagaatcaattgatagagcaatttccaggtattgaaccatggcttaatcaaatcatgcctaagaaagatcctgtcaaaatagtccgatgccatgaacatatagaaatccttacagtaaatggagaatactctttttagacaaagagaagggctttttatccaaccctaagattacttcacaaatatcctttatcctgccacaccagcaggttgataaaggagccatcaaatttgtactcagtggagcaaatatcatgtgtccaggcttaacttctcctggagctaagctttaccctgctgcagtagataccattgttgctatcatggcagaaggaaaacagcatgctctatgtgttggagtcatgaagatgtctgcagaagacattgagaaagtcaacaaaggaattggcattgaaaatatccattatttaaatgatgggctgtggcatatgaagacatataaatgagcctcagaaggaatgcacttgggctaaatatggatattggctgtatctgtgtttgtgtctgtgtgtgacagcatgaagataatgcctgtggtatgctgaataaattcaccagatgctaaaattcaaaaaaaaaaaaaaaaaaaaaaaaaaaaaaaaaaaaaaaaaaaaaaaaaaaaaaaaaaaaaaaaa

SEQ ID NO: 378 - DNA, 2704 bp, Homo sapiens
ccacgcgtccgcttcttcagctatgctgaggtgctgaagcgggagccgggggccctgggagcacgctgctggtcactctatggccgctgctacctccgccacttcaacgagctggagcacgagctgcagtcccgcctcaaccgtggctacaagcccgcctccaagtacatgaattgcttcttgtcacctcttttgacactgctggccaagaatggagccttcttcgctggctccatcctggctgtgcttattgccctcaccatttatgacgaagatgtgttggctgtggaacatgtgctgaccaccgtcacactcctgggggtcaccgtgaccgtgtgcaggtcctttatcccggaccagcacatggtgttctgccctgagcagctgctccgcgtgatcctcgctcacatccactacatgcctgaccactggcagggtaatgcccaccgctcgcagacccgggacgagtttgcccagctcttccagtacaaggcagtgttcattttggaagagttgctgagccccattgtcacacccctcatcctcatcttctgcctgcgcccacgggccctggagattatagacttcttccgaaacttcaccgtggaggtcgttggtgtgggagatacctgctcctttgctcagatggatgttcgccagcatggtcatccccagaggctatctgctgggcagacagaggcctcagtgtaccagcaagctgaggatggaaagacagagttgtcactcatgcactttgccatcaccaaccctggctggcagccaccacgtgagagcacagccttcctaggcttctcaaggagcaggttcagcgggatggagcagctgctagcctcgcccaagggggtctgctccctgaaaatgccctctttacgtctatccagtccttacaatctgagtctgagcccctgagccttatcgcaaatgtgggagctggctcatcctgccggggccctccactgcccagagacctgcagggctccaggcacagggctgaagtcgcctctgccctgcgctccttctccccgctgcaacccgggcaggcgcccacaggccgggctcacagcaccatgacaggctctggggtggatgccaggacagccagctccgggagcagcgtgtgggaaggacagctgcagagcctggtgctgtcagaatatgcatccacagagatgagcctgcatgccctctatatgcaccagctccacaagcagcaggcccaggctgaacctgagcggcatgtatggcaccgccgggagagtgatgagagtggagaaagcgcccctgatgaagggggagagggcgcccgggccccccagtctatccctcgctctgctagctatccctgtgcagcaccccggctctggagctcctgagaccaccgccctgcatgggggcttccataggctctacggtggcatcacagatcctggcacagtgcccagggttccctctcatttctctcggctgcctcttggagggtgggcagaagatgggcagtcggcatcaaggcaccctgagcccgtgcccgaagagggctcggaggatgagctaccccctcaggtgcacaaggtatagacaaggctgagcagggttcctgtggcccaggatggaggccaccgctgccctgccatcccgtctgcctgccatgggacggctcctctgagtgttccctggccccacgtgtgtggtgtttgtgtgtctgtgcctggccaagggaggtgccaacactgggcttgccacagccccaggagaggaatttggggcctaggaaccgagggcacacgggactctagcctcatccccaggacccccttggctcagagtgtggtgctagaaactggtccccagcccagccccagtactgccacctttacacctacccctgcaagtccccagagggctgcccacgatagaagctgccaagcagggagaacctgtgccaactgtggagtggggaggttgggcctggaccctcaacccctgcaaccttccctagccccctcaatagatgagcaggtcaggctgtggcccttacctcacccgcagttctcgcccagtgctgcagccggctcacctctctccgcttcttgcacatcactggcctgtgtgtgctgcttgctcctgttctgttcgcttgctcccgttccgttcggcttttgctttgcgttagggtgaagaccctagcgtccagctcccctcaacgctatattttgacactaaaaaagaaggtttctaaattgtaggagcaggatggaaatactttgctgcccttgccatcttttaggatgggcccccaggagactgaggtcttcctgggccctcattgctgcttatcgtaccccccatcacctgcacatgggacagaccgggctggagggtgaccttggctgtgtacgtcccagcaaaagagctctggcccgcatctcgctgtgccctgaagggggatgaagggcgatgcctcgcccgaggctttgggctgctgcactgcatgctgggactgctcctactctctgtcccacccctcacccagctgtggtccggctttgggagagtggtgaattgcgctgcccgaactcggagcggagcagggtagggaccgtgtacagcttgataacccttaataaaaagggagtttgaccagaaaaaaaaaaaaaaaaaaaaaaaaaaaaaaaaaaaaaaaaaa

SEQ ID NO: 379 - DNA, 1225 bp, Homo sapiens
  misc_feature (1214)..(1214): n equals a,t,g, or c
ggcacgagccgggtcggcgctcctgcctccctgcagggagctgcttatgggacaccgcttcctgcgcggcctcttaacgctgctgctgccgccgccacccctgtatacccggcaccgcatgctcggtccagagtccgtcccgcccccaaaacgatcccgcagcaaactcatggcaccgccccgaatcgggacgcacaatggcaccttccactgcgacgaggcactggcatgcgcactgcttcgcctcctgccggagtaccgggatgcagagattgtgcggacccgggatcccgaaaaactcgcttcctgtgacatcgtggtggacgtggggggcgagtacgaccctcggagacaccgatatgaccatcaccagaggtctttcacagagaccatgagctccctgtcccctgggaagccgtggcagaccaagctgagcagtgcgggactcatctatctgcacttcgggcacaagctgctggcccagttgctgggcactagtgaagaggacagcatggtgggcaccctctatgacaagatgtatgagaactttgtggaggaggtggatgctgtggacaatgggatctcccagtgggcagagggggagcctcgatatgcactgaccactaccctgagtgcacgagttgctcgacttaatcctacctggaaccaccccgaccaagacactgaggcagggttcaagcgtgcaatggatctggttcaagaggagtttctgcagagattagatttctaccaacacagctggctgccagcccgggccttggtggaagaggcccttgcccagcgattccaggtggacccaagtggagagattgtggaactggcgaaaggtgcatgtccctggaaggagcatctctaccacctggaatctgggctgtcccctccagtggccatcttctttgttatctacactgaccaggctggacagtggcgaatacagtgtgtgcccaaggagccccactcattccaaagccggctgcccctgccagagccatggcggggtcttcgggacgaggccctggaccaggtcagtgggatccctggctgcatcttcgtccatgcaagcggcttcattggcggtcamcgcacccgagagggtgccttgagcatggcccgtgccaccttggcccagcgctcatacctcccacaaatctcctagtctaataaaaccttccatctcataaaaaaaaaaaaanaaaaaacttga

SEQ ID NO: 380 - DNA, 1324 bp, Homo sapiens
  misc_feature (3)..(4): n equals a,t,g, or c
  misc_feature (1241)..(1241): n equals a,t,g, or c
  misc_feature (1288)..(1288): n equals a,t,g, or c
  misc_feature (1323)..(1323): n equals a,t,g, or c
gcnncccggaattcccgggtcgacccacgcgttcgcccacgcgtccgttcacaggtacagtctctataactataaaatccaggaaatgagagtcccattagggtttaaatcactatttgattaaatgtttcaatcaaacccattttgtaatgttttatatgcacacttacctaaaatgtagtattattcaagagctatgattgctgtatgtaatgtaatttagttaaaatggatgcaaattcatatgattccagttacatatgaacttaaaattagatgtctgctgctttttgtatcattttccagaaaaatgagtcaacaaccaattaggaaactgtaccagtcaactcttgattacaaattgacagaaaccattaataacaaagcaacacagtatgagtataatacaccaaaaggaacataggtagtgtactactgggcttgtttttcagctgaggcctcaatggaactttgtgagtctcctcctctacttcacttcctttgccttcagtttgaatctcactgggtcagagtcagggatttgaacccctcgtggccctcctgaatcaggttgcagtataatttcgttgacactttctcccaatccccaagtatagcaataactctactttcccccaagaggaacaagaaaacacaataacacattaacaacagtgacaatctttttatttccctgkttacttacggcattaaaactccaaactcgtacagccttaatttccaartcaatgcaatattactgtgtctcttggtagagaattccccttttcttggtgctatgctatcagagtccaaaatcaaaaggacagaaagcagacaattagaatgtgtcaataagtgtaatctcaaaggcttgcatcccagtttccagtcctaggactccagacgcatatattttagctaagggggtaaaagaatgccatgtggtagtcacttattcagaacataaactgtattctgcaggacagtacctcaaatttgcaagctattgactctgaatgaagctcatctgagttttcatggagtatgcaatacccacaaatcccttgaacattagctcattgctttgtttctctataaagttatttcctttaaactgaagcaactttgtgtgggataccatgcccttgcatatggtagacaatctatagatagagcaaggacagagaaaaatgatcaaaaaaaaaaaaaaaaaaaaaaaaaaaaaaaaaagggcggcnactatagaggatccctcgaggggcccaagcttacgcgtgcatgcggngtgtttacctcaaatcaactatagagagtgtcccnt

SEQ ID NO: 381 - DNA, 1500 bp, Homo sapiens
atggactgccgtgagcccagaccttaaacgtaaacattcagcttcgcaggtactttgggctgcacacgcttctccggacccaaaagatgcacatgcttttcagaaaccgtaagtttacctggggctgtaaaaccgcacatcgcgactttgcaccgtgcacacgcttgccccgatgtgagatttcccctgggttcgcgctcgggtccgcttcttaaatacactgcctcagcggtgtggatggcacagagctgtggcagccctactgaaaccttaaacaggcttcctggggtcataaacatggataccgagacttagatcacctcccacaacttaaacgtaccccttcactccactgccttcgccccttcctgcagcattcgcatctagttgttcaaaagtgctttccgggtcctcagacatgcaccccaaggttttaaacctcacgtgcaagtactagatgggcttccctgtgcaatagggatgtcaggcgcgcagttttgcacacgattgccaagatgtgagatttactttaggttgcaccttaaccgtcgtttttaaatatgatcgtcccatcttgatgtgctgctcctgctgtggaaggtatccctgggttttaggcaagcatatgtgttctttactatggctccagatcccagcatatttgaagtcctgagtcaacctgctctcctagacaagcagacattaagtatgtcgcttgggctcttaagtgcgttctcctgacttttacccatctttgtggcagtaaatgcatacgtgtcactgtatatgcggactagatacctcaggtcccagcgccataaacaacttgtatgttgtaagtgtaccctcatctcgaaagtcacctccagctgtgcgttttaactcatctcagatgctggatgtccggtgtggtgcctgaagcccccggggcaacatccactctctgtccaactcattctaacgccaagatactcaggttttctatctgatcttctgacgactgcccaaaagtcagaatcacctgcgtgggtgaagaatcacctgcgtgggtggagaatcacctgcgtgggtggagagcaagtttgttcaggtttttctctttttaagcactcacaaaataaaattttttgtgtttgctagtattctggaaggaaagatctccttgtgcttcatagaaaatttggaaaatacctgtttgtaataagataaaaataaatcacccttataatttgttttcccccgcctggaggcgcctattacggggaaactctcgtgggtttcctgctgccaggctgtttgcggagctttcccttgtttgctttgagatgtttttggttttaaaaaacaataagtgaggtcaggcttggtggccctcgtctgtaatcccagcactttgggaggccgaggcgggcggatcacttgaggtcaggagttcgagaccagtctggccaacatggtgaaaccccatctctactaaaaaaaaaaaaaaaaaaaactcga

SEQ ID NO: 382 - DNA, 776 bp, Homo sapiens
ggcacgagtgaagtagaacatgcatgagaaagaatgcagaaatcatgaataaacagctccagaaagggatcacgcccaactaaccagcacccgaattcagagcccaccagcccccgggatcccggccacgtccactctgaccccatgcctgcaaggatagggtctctatcgtgacttctaaccccaccaggtacttttgcctctttttagaaatggaatcatacagtctgtactcttttgtgcctggtttgttttggttaacattgcgtctgggagttttatctctgtccagggttggcgaaccccagcttacaagccaaatctggtcctttgcctgttttcatatggcctgtgagctaaggatggattttatgtttttaaatagttgcgggggggggcgggggggggaggaaagaatgatattttgtgacgcgtgaaaattatatgaaattcaaatttgtgtccacaaattgactgggcatggtggctcatgcctgtaatcccagcactttgtggggccgaggtgggtgggtcacttggggccagaagtttgctaccagcctgaccaacatggttgaaaccccatctctactaaaaggtacaaaaaaatagctgggtgtggtggttgatgcctgtaatcccagctactcaggtggctgaggcaggagaatcacttgaacccgggaggcagagattgcactgagccaagattgtgccactgtacttcagcctggatgacagagtaacactgtatctcaaaaaaaaaaaaaaaaaaa

SEQ ID NO: 383 - DNA, 543 bp, Homo sapiens
ggcacgagctaagccctgcatccatgatgaggccggggcaggtctccctcctgggtcctgatgctgtttctgtgctcggctctggcttgggcctcagccctggcaccagctctggccgcaaccctgaccctggctctgggccgggcactctgccggatcccagctccaaacccctccccggctccagatccacccccagccctactcctgtggaatcttctgacccaaaggctgggcacgacgctggtcccgaccttgtgcccagcccagaccttgatcctgtgcccagcccagaccctgatcctgtgcccagccctgatcccaaccctgtgtcctgccctgacccctgttctcccactcgtggcactgtcagcccagccctccctaccggcgagagtccagagtgggtacaggagcaaggggcactgctggggcctgatggctgaaggagacgccggcatcctcgggggcctggggaagttgtgtgttgtgcagtcagtaaaatcctcccactgccaaaaaaaaaaaaaaaaaaaaaaaaaa

SEQ ID NO: 384 - DNA, 1681 bp, Homo sapiens
gtcagaatcaccatggccagctatccttaccggcagggctgcccaggagctgcaggacaagcaccaggagcccctccgggtagctactaccctggaccccccaatagtggagggcagtatggtagtgggctaccccctggtggtggttatgggggtcctgcccctggagggccttatggaccaccagctggtggagggccctatggacaccccaatcctgggatgttcccctctggaactccaggaggaccatatggcggtgcagctcccgggggcccctatggtcagccacctccaagttcctacggtgcccagcagcctgggctttatggacagggtggcgcccctcccaatgtggatcctgaggcctactcctggttccagtcggtggactcagatcacagtggctatatctccatgaaggagctaaagcaggccctggtcaactgcaattggtcttcattcaatgatgagacctgcctcatgatgataaacatgtttgacaagaccaagtcaggccgcatcgatgtctacggcttctcagccctgtggaaattcatccagcagtggaagaacctcttccagcagtatgaccgggaccgctcgggctccattagctacacagagctgcagcaagctctgtcccaaatgggctacaacctgagcccccagttcacccagcttctggtctcccgctactgcccacgctctgccaatcctgccatgcagcttgaccgcttcatccaggtgtgcacccagctgcaggtgctgacagaggccttccgggagaaggacacagctgtacaaggcaacatycggctcagcttcgaggacttcgtcaccatgacagcttctcggatgctatgacccaaccatctgtggagagtggagtgcaccagggacctttcctggcttcttagagtgagagaagtatgtggacatctcttcttttcctgtccctctagaagaacattctcccttgcttgatgcaacactgttccaaaagagggtggagagtcctgcatcatagccaccaaatagtgaggaccggggctgaggccacacagataggggcctgatggaggagaggatagaagttgaatgtcctgatggccatgagcagttgagtggcacagcctggcaccaggagcaggtccttgtaatggagttagtgtccagtcagctgagctccaccctgatgccagtggtgagtgttcatcggcctgttaccgttagtacctgtgttccctcaccaggccatcctgtcaaacgagcccattttctccaaagtggaatctgaccaagcatgagagagatctgtctatgggaccagtggcttggattctgccacacccataaatccttgtgtgttaacttctagctgcctggggctggccctgctcagacaaatctgctccctgggcatctttggccaggcttctgccctctgcagctgggacccctcacttgcctgccatgctctgctcggcttcagtctccaggagacagtggtcacctctccctgccaatactttttttaatttgcattttttttcatttggggccaaaagtccagtgaaattgtaagcttcaataaaaggatgaaactctggaaaaaaaaaaaaaaaaaaaaaaaaaaaaaaaaaactcgtagggggggcccgtacccaatcgcctcatc

SEQ ID NO: 385 - DNA, 728 bp, Homo sapiens
ggcacgagaataaaaaaaaattagtcgtggtgccacttgcctgtggtccccactgcttgggaggctgaggtgggagaattgcttaagcctgagagttggaggctcagtgagccatgatcatgccactgcactccagcctgggtggccattgaattctgcgtggattgcctcagtttgccttgtcagccaacttccactggctgccttggcactgccatgacagcacagctccacaccagagctggggtttctcttcagtcctgggtaccccttggcagagggatttgctgaggaaaattaggtatccttcctagccctccacacacttccaaaccagggctgcggatctgatggatgccaggaagacagccttgggctgagagtgacatcactgcaagagttgagagccagcgtctaaagtgtccacggcatcctgggaggttttatccttggtgactctaatggtagatttttgtccaccttgttctatttgcttttgtttgtttttgatttttctgttttaaaattttaaggagagatggggtttcaccgtgttgcccaggctggtctcaaactcctgagctcaagcgatctgcccaccttggcctcccaaagtgctgggattataggtgtgagccaccgcatccagcccacattgttctatttgtatttcatgaaagcagttctgaatgagagtaaatcaaaaaaaaaaaaaaaaaaaaaaaaaa

SEQ ID NO: 386 - DNA, 2301 bp, Homo sapiens
  misc_feature (36)..(36): n equals a,t,g, or c
  misc_feature (237)..(237): n equals a,t,g, or c
  misc_feature (250)..(250): n equals a,t,g, or c
aattcggcacagagaatagccaggcaggacagaggnaaactccaccagtattgagcccaggcttctgtgggagaragtggagaagctggtgcccagacctggcagtggcagctcctcagggtccagcaactcaggatcccagcccgggtctcaccctgggtctcaragtggctccggggaacgcttcaaagtgagatcatcatccaagtctgaaggctctccatctcagcgcctggnaaaatgcagtganaaaaacctgaagataaaaaggaagttttcagacccctcaagcctgctggcgaagtggatctgaccgcactggccaaagagcttcgagcagtggaagatgtacggccacctcacaawgtaacggactaytcctcatccagtgaggagtcggggacgacggatgaggaggacgacgatgtggagcaggaaggggctgacgagtccacctcaggaccagaggacaccagagcagcgtcatctctgaatttgagcaatggtgaaacggaatctgtgaaaaccatgattgtccatgaygatgtagaaagtgagccggccatgaccccatccaaggagggcactctaatcgtccgccagagtacagttgaccaaaagcgtgccagccatcatgagagcaatggctttgccggtcgcattcacctcttgccagatctcttacagcaaagccattcctcctccacttcctccacctcctcctccccatcctccagccagccgacacccaccatgtccccacagacaccccaggacaagctcactgctaatgagactcagtccgctagtagcacactccagaaacacaaatcttcctcctcctttacaccttttatagaccccagattactacagatttctccatctagcggaacaacagtgacatctgtggtgggattttcctgtgatgggatgagaccagaagccataaggcaagatcctacccggaaaggctcagtggtcaatgtgaatcctaccaacactaggccacagagtgacaccccggagattcgtaaatacaagaagaggtttaactctgagattctgtgtgctgccttatggggagtgaatttgctagtgggtacagagagtggcctgatgctgctggacagaagtggccaagggaaggtctatcctcttatcaaccgaagacgatttcaacaaatggacgtacttgagggcttgaatgtcttggtgacaatatctggcaaaaaggataagttacgtgtctactatttgtcctggttaagaaataaaatacttcacaatgatccagaagttgagaagaagcagggatggacaaccgtaggggatttggaaggatgtgtacattataaagttgtaaaatatgaaagaatcaaatttctggtgattgctttgaagagttctgtggaagtctatgcgtgggcaccaaagccatatcacaaatttatggcctttaagtcatttggagaattggtacataagccattactggtggatctcactgttgaggaaggccagaggttgaaagtgatctatggatcctgtgctggattccatgctgttgatgtggattcaggatcagtctatgacatttatctaccaacacatgtaagaaagaacccacactctatgatccagtgtagcatcaaaccccatgcaatcatcatcctccccaatacagatggaatggagcttctggtgtgctatgaagatgagggggtttatgtaaacacatatggaaggatcaccaaggatgtagttctacagtggggagagatgcctacatcagtagcatatattcgatccaatcagacaatgggctggggagagaaggccatagagatccgatctgtggaaactggtcacttggatggtgtgttcatgcacaaaagggctcaaagactaaaattcttgtgtgaacgcaatgacaaggtgttctttgcctctgttcggtctggtggcagcagtcaggtttatttcatgaccttaggcaggacttctcttctgagctggtagaagcagtgtgatccagggattactggcctccagagtcttcaagatcctgagaacttggaattccttgtaactggagctcggagctgcaccgagggcaaccaggacagctgtgtgtgcagacctcatgtgttgggttctctcccctccttcctgttcctcttatataccagtttatccccattctttttttttttcttactccaaaataaatcaaggstgcaatgcagctggtgctgttcagattctaaaaaaaaaaaaaaaaaaaaaaaaaaaaaaaaa

SEQ ID NO: 387 - DNA, 281 bp, Homo sapiens
ggcacgaggggagtgggaatatgcgtgtgtgggtgggaatcggtaagaaatgcacctagcttttcatattgtgtttattctccaggctattgcttgcttcagctgcagcctgcctgtgctggctgctggggtcgataggcttttgtcgtaataggcagagatgacttgcatcccagctttccaccaaccaaattcaaacattcactgcttatttgttacagactgtaattattaaagtccctgagagctgttttctcccgttaaaaaaaaaaaaaaaaaaa

SEQ ID NO: 388 - DNA, 1061 bp, Homo sapiens
ggcacgagggacattgcccccccgcctgctgaggctgttccttcctgctgcacttgagcagcctcatcttccttcatctcctctcatgttcacttctctttgcctggaccaatggggaaaaaagtgcacagaatgagattatgtgactacagcaattctgagttagctttgattgctctgcagtaaaattaagggaccatatctttctcatgcacatgatatatagtttcaaatatagatctgtacatacgtgatgatgaaaagttcttcaggatgaggatgtatcagagagtgtgaattgaggccagtcttctgtttcctcccaaactcttaacagattgcatatcttcatgcaaatcttttcatgtattccttgtatactacctatagaaaggtgggacttgggagggtcacttacaactcctgtgatcttattttctcctccaggggctccttgaatagagttttcccccattttactggccaaggctgcagttagagctgtggtttgtcctgcaggggatatttgtcagtgtctggagaaatttaggttaacgcgactggagaagtgctattggcatctagtgagtggaggccagggatgctgctaaacaccccgcggtacacagcagaccaaagaatgatctagccccagatgccagtagtgctgargttggaaaactcttaagttagtaaatatacaactgataggaaaaacatgaagtttcaataattaaaaagctttgcacgaaagtttattacagggctgggcatggtggcttaggcctgtaaatcccarcactttggggggccgaggtgagaggatcacttgagcttaggaatttgagacctgtgttggcaacatagtgagaccccatctctaatatatatatatctgggcatggtggctcctgcctgtagtcccagctacttgggagggttgaagtgggagaatggcttgagtccaggaggttgaggctgcagtgagccatgattgcatcactgtactccagcctgggcgacagagcaagaccctgtctccaaaaaaaaaaaaaaaaaaa

SEQ ID NO: 389 - DNA, 595 bp, Homo sapiens
cacgagcggcacgagagcaagcaagacacaactgagacagatgtaccaggtgaaaaaaatcttcagtatggatacacatgggtattctgaaggctacaatgaatggtttagtctttgacataaggaggatgaacatattatttatactgtgtaatctaatctggcttctatggggaaagcaacatgtacataagtgaattttctacatgaagtgggctacttctgattttaatcaaagctataaaatagattgtatatttcactagcttcttaaagtaactcttccattttcatttatctctaaaaacagttaacttcctgtgctctaggaaatgcaccaataccaaaggtcaatgtggaaatatgggcatgtttgcccctatgctgtgtggtctctagatttctatatttgctttgcttttgtctgctctagtaatctccctccttttgatctgtggcctgggaaaatgtggtttctttgtatttcaaataaaagtaaaatagttttttgagtggttcactcaagagtaaaaaaaaaaaaaaaaaaaaaaaaaaaaaaaaaaaaaaaaaaaaaaaaaaaaaaaaaaaaaaaaaa

SEQ ID NO: 390 - DNA, 349 bp, Homo sapiens
ggcacgaggtcaaaactaagaaattactactgctgtaagactgctaactaaactatgcatattcgaattgcaccagtttttccattaatgtccttttgctgttctaggacagcatattgagtttagtgcaacttgcctttatgctttattttaatgcccttgaattctcatctgttattagtgagtctcttatttatctctttgttttgagcttccttctctgctgttggtatgttgctttaatggagaggttgcatcaaccttcatttttttttttgagacagcctgggcaacagagggagacttcatctcaaaaaaaaaaaaaaaaaaaaaaaaaaaaaaactcgag

SEQ ID NO: 391 - DNA, 1019 bp, Homo sapiens
  misc_feature (1)..(1): n equals a,t,g, or c
ntggtgggatttttgtataaagtaagagataaggatccagtttcattcttctacatgtggcttgccagttttcctagcaccatttattgaatagggtgtcctttccccactgtatgtttttgtatgctttgtcaaagatcagttggctataagtatttggctttatttctgggttgtctgttctgttccattggtctatgtacctgttgttatactagccccatgctattttggtaactatagcattgtagtatattttgaagttgaataatgtgatgcccccagatttgtyctttttgcttagtactgctttggctatttgggctcttttttggtgccatatggattttaggattgtttctgattgacaaaggtattttgatgggagttctgtgaagagtgatggtggtatcttgataagaactgcattgaatctgtagcttgctttaggcagtatggtcattttcacaatattgattctacccatccatgagcatgggatatgtttccatttgttkgtgtcatctatgatttctttcaatagtgttttatagtttttcttgtagagctattttacctccttggttaagtataaccataagtattttattttattttttttgcagctgttataaaaggaatggaattgttgatttgattcttagcttggccgttgttggtgtatagcagtgctactgatttgtgtacattgattttctatctggagaatttactgaattcatttattagatctaagagctttttggatgagtctttagagttttctaggtaaatggtcatatcattggtggacagtgacagtttgacctccttttttccaatttggatgccctttcttttctgtctgattgctgtggctaggacttccattactatgttgaatagaagtggtgaaagtgggtaaccttgtcttgttccagttttcaggggcgtaggcaaagaattcatgactaagaacccaaaagcaaatgcaacaaaaaaaaaaaaaaaaaactcga

SEQ ID NO: 392 - DNA, 214 bp, Homo sapiens
ggcacgagctcgtgccgaattcggcacgagaggacggaggcttttggaccctcggaccccatcccactcagccaagtgtctttctgtgtctggggggaggaggggatgatatccgtgtggttcgatgtattatttttaagctccgtgagtgcgtgggtcagtgtctgcatgaagtggaataaactgcccaccgccaaaaaaaaaaaaaaaaaaa

SEQ ID NO: 393 - DNA, 554 bp, Homo sapiens
  misc_feature (16)..(16): n equals a,t,g, or c
  misc_feature (26)..(26): n equals a,t,g, or c
  misc_feature (94)..(94): n equals a,t,g, or c
aggtcactcattaggnacccccaggntttacattttatgcttccggctggaatggtgtgggaattgtgagcggataacaatttcacacaggaancagctatgaccatgattacgccaaagctcgaaattaaccctcactaaagggaacaaaagctggagctccaccgcggtggcggccagctctagaactagtggatcccccgggctgcaggaattcggcacgagctactaataattattacattttgactaccacaactcaacggctacatagaaaaatccaccccttacgagtgcggcttcgaccctatatcccccgcccgcgtccctttctccataaaattcttcttagtagctattaccttcttattatttgatctagaaattgccctccttttacccctaccatgagccctacaaacaactaacctgccactaatagttatgtcatccctcttattaatcatcatcctagccctaagtctggcctataaaaaaaaaaaaaaaaaactcgagggggggcccggkacccattsgccaaakgggggggttta

SEQ ID NO: 394 - DNA, 1273 bp, Homo sapiens
  misc_feature (37)..(37): n equals a,t,g, or c
  misc_feature (45)..(45): n equals a,t,g, or c
  misc_feature (338)..(338): n equals a,t,g, or c
  misc_feature (820)..(820): n equals a,t,g, or c
ctcgagttttttttttttttttttgttattgcaggtnagcatgtnacattatttgtgtgttgccttccctactagaacatcagctccacaagggcaggaatttttgcctgttgtcaccacgatgtccctggcacccagtatgttcttggtgtctccattgatgatgcagggatgtgtggatatggggcagtggactgtgagcatgtgatgagcatgtgacccagcccctagtgaccgcaccacatggcacaggttgcttataaaaaccattttaaattaaaaaagggaggaagcatcagtgcacacagatggggacacaggggcagagggccagcccnaagtacagtgtggtcaccccacagcccagtggrcccagggcagactcccctcgcagcacagacagctgaggcccgggtgctggttcctctaggtacagctttggtccttgtgggctcagaggtctgcctttcggaaacttgctctgttcaaggagttcctgaggccgggtggggtgggtgccatcagctggggcaggcgctgggtaagcaggggctgcagagcctcccgcaggcggcagtagttgcgctccagctcacggtggtactccttctggtccggcccaatcagggcyttatttttccgcagcgcatcctcacatttcttgcagaagtccttgaagcagagccgcaatttgttgtgatgccggaagarcttggggtcttccgggatctctgctaaaaacacctgggccacctccactggcgtyagcaccgtctcctcccggtggcacacacggatgcgagtcttgatgtaggggaangcktggtcggtgctgaagcagcgtcttacgcttgtgttgctcgggcagctccccgtgtgcgcgcccatccggcgtgaacggcgtgcagaacaggaatgtgcgaagcccatagttgcggtcaaagtaggtcacccggtccttgagctcgtaggtatcaaagtacggttccacatacgtgatctggatgtaggccttttgtgagtcaagcttggacttgtccacagggttagagtctttgataatctcaacgacgtcgtcgccaaatctctccgtgtagaactcctccagccggtgtgagatctctgccagcttcgtgatcgatggctccttgtacacaaactcctgctcatccaggtcaccgaagtgggcgccgtagaagcccacgcggaaatacgtcccgaacacgcgctcccagccggaactctggtgcatgatcttggtgaaggctgtgcc

SEQ ID NO: 395 - DNA, 882 bp, Homo sapiens
  misc_feature (17)..(17): n equals a,t,g, or c
  misc_feature (24)..(24): n equals a,t,g, or c
  misc_feature (36)..(36): n equals a,t,g, or c
  misc_feature (40)..(40): n equals a,t,g, or c
  misc_feature (880)..(880): n equals a,t,g, or c
tggtaaatattgcaaantactccnttactaattggnaacnaaagctggagctccaccgcggtggcggccgctctagaactagtggatcccccgggctgcaggaattcggcacgagcccccttcctgcctcgggctgtgcatctctctctggaacgttctttgcggtctcctcaccgccacttttcttcacacctcaacataaatgccacccccttggaggggccttcctggtttggctgagcctggtcccatgtgggctctgcatgggcccctggatgttaccttggttgtagctgagtgcggatgtggcttgtccacaggaggctgatgtccctgragctgtgacttggtctacctgggcctggacccacgtggccggcccggggcctgtgcgtggccagctcttgcacactgccttagagctggtgtggcttgttgaaccccgttgcagacgcacacgcacgtgggtccccatggctcctcgggacatggaggctgcccrsgctcagggaagagtccttgttgggacctccaggactcttcccagcccccgcctccctcctggggcctccagggcagaaagcccctttcccgggcaggaggacagggtgtggatatacaggctgggagggtctgtgggcagcagccgaggcccaggttgggggagcctcacctaggatgaggctagggctggcagaagatccccacagaggagccaggaggaccccacagtcactctagctcccagggcctggaggtgcaggcgagccccgtggtctccgggcagccggccctgccccactcacctctcctgcccttcccgctgcaaaaaaaaaaaaaaaaaactcgagggggggcccggtacccaattcgargttcnct

SEQ ID NO: 396 - DNA, 1648 bp, Homo sapiens
ggcacgaggtgacgggagcaattagagagcagtagcttctgatgacccacgtgtaggaatgaaggatggggagaactcggcccttacctccttcctgcttccatccatggggcttggagggtctggagagcttcatggtgggcttatttccatttgtgcagaggtggctgggaagctcaggaaccacaggcttttgttttgagtcaattggctttctctctctcttgcagggaagtactacatggccactatgaccatggtcacattctcaacagcactcaccatccttatcatgaacctgcattactgtggtcccagtgtccgcccagtgccagcctgggctagggccctcctgctgggacacctggcacggggcctgtgcgtgcgggaaagaggggagccctgtgggcagtccaggccacctgagttatctcctagcccccagtcgcctgaaggaggggctggccccccagcgggcccttgccacgagccacgatgtctgtgccgccagaagccctactgcaccacgtagccaccattgccaataccttccgcagccaccgagctgcccagcgctgccatgaggactggaagcgcctggcccgtgtgatggaccgcttcttcctggccatcttcttctccatggccctggtcatgagcctcctggtgctggtgcaggccctgtgagggctgggactaagtcacagggatctgctgcagccacagctcctccagaaagggacagccacggccaagtggttgctggtctttgggccagccagtctctccccactgctcctaagatcctgagacacttgacttcacaatccacaagggagcactcattgtctacacaccctaactaaaggaagtccagagcctgccactcccctaattccaaaaaaaagaggaactctacaaaggccaagatcacagagtacagtcttggagggacagaattgtttgtgctgggtattggagctctcagtggggagcacatgggttataatgagaaactgaactgtactgctgcatttcctgtcttccttcctaggtggctgctttgcagggctttggctgttacctttccctgctgaggggctcagggaaaagggtcggggattctcagtcgagtttccagagcaggaggccctacagacatttggccccaaatccctgactcaataaagtaagcgtgtacctagcacctcctcgatgccctgtgttacccatgaggtctgtggtagtggaagctgggggtccaggtctgtctacttcaggtctcatggccgctggcgcaagtccaagttcaaagcctgagaacctgaagttctaatgtccaatggtaagagaaggatgtcccagctccaggaaagagtgtgaatttgcctttcccttatttttttgtcctctccatgccctcccacattgagagtggaacttgccactgagtccaccaactcacacgccaatctcctgctgcaaaccctcacagacacatccagaaataatgctttcccagctgtctgggtattgctggtgtccatggtggtgggttatcagaacttattaatgtcactgtcactaaagttggtatataaccccccactgctaaatttgactagcttaaaaaaaaaaaaaaaaaaaa

SEQ ID NO: 397 - DNA, 762 bp, Homo sapiens
ggcacgaggtgacttcgctcatcacggtcagtcattccttctcctttccagggtgctgggggctggggttccctggcccaagggtccagcctcctctcaccccattccaggtggcatactgcagtctggctctttctcccctccctccccacccaagcctcacctccccaccccttgaacccccatgcaatgagcttctaactcagagctgatgaacaaaagcccccccacccccaatgcctgcctcctcactcctccgtcgctgcccttcacaccttttggtgctacccctccccagagttaagcatggatgtctcctgatcccaggctgggacccctacccccaccccctttgatcctttctacttccacggtgaaaggactgaggtcggactacagagggaagagggacttcccttgactgggttgtgtttcttttcctgcctcagcccagctctgcaaatcccctccccctgcccctcacctccccaggctcaccttgccatgccaggtggtttggggaccaagatgttgggggggtgaatcaggatcctaatggtgctgccctatttatacctgggtctgtattaaaagggaaagtcccccctgttgtagatttcatctgcttcctccttagggaaggctgggatatgatgagagattccagcccaagcccggccccccaccgccaggccatagggcataatttgcatctcaaatctgagaataaactgatgaactgtgaaaaaaaaaaaaaaaaaa

SEQ ID NO: 398 - DNA, 1474 bp, Homo sapiens
  misc_feature (1452)..(1453): n equals a,t,g, or c
  misc_feature (1460)..(1460): n equals a,t,g, or c
  misc_feature (1463)..(1463): n equals a,t,g, or c
gggttcgacccacgcgtccgggtttccaaattatgtttactttgatttgattatatgttggtatctcccaaatataggttaacttagctatttaaatggtatcttttgacatttaaaaagaattaagtacctgtcaaatctwgcattgaggttgcagttgaataagataaaagcttaggatgtcaaaaaataatatagagaaatattataagattttatgattattcttgamgtttttgatgcaaaaggaaaatatgctgaatagttcttccaaaaaatattatttccctcaatattttatttgtagccatgtaatttaaagagaacagaaaataactgcaatcaaaagtatggtttaatatcaatcaaagtggcacaacagaattgataagatctttataacaatcaattggctgatattaaaatattgattttaattgatcttttcaattaaaatctttagggcctgtaactcataaaatcagcatccaccacaatatatggtcattattggtttgtaagcatagatcaccattgactcctacctggagagacatgtctatttctaaaaatccagtagtttctttgcattctcagtagtacacgttgtatatatatatatgtaacaaatttggtagttttcagtatgtgtgatgtcctttgggggttatttatcttgctggtccataggaggggtacactaccccaagaatcaagacatctgagttctagttctagttctagctctgccactgaagagccaccttacctggggcaagttagccattgtctcccagtcatgtttaccacccatgaaaggactcgtcggtttgatgtttccattaagctcaatgagtaactctaatagttactcttgaatctggattgaaaaacaccatgcatctgatgagataattcataaatgttgccccttttttaaatgatacaaccctaaaagtgactgaattgcccaagtgcttgaacatggcagaggtagttactcytattttgcagtttgtgcacttaaaaattcctacagtgattgttactttactggggaaaaaagatgaggtgaaacttcctcccaaggaattaaaatatctgtagaagccatggcttgcttttataatgtggaaatcatttgatttgctgtaattcacgcagatccctccttttgtcagggggaaatgatttgcatcatgttcttttttcataatgcttttacttcctgtttggatcagttgtatgtaaatgtacatttttgttactttgctgtgcccgttagaatttatcttccataaagtatttctcccattgagtctaatgatgtatactttgcctaggtctttccaaaattaaatttatgtaaatgtctattttatataaaatatgattaaaataaaaaaaaaaaaaaaaaaaaaaactcgagggggggcccggtacccaattcgnnctatagncanacggggttaca

SEQ ID NO: 399 - DNA, 655 bp, Homo sapiens
  misc_feature (16)..(16): n equals a,t,g, or c
  misc_feature (20)..(20): n equals a,t,g, or c
  misc_feature (100)..(100): n equals a,t,g, or c
  misc_feature (142)..(142): n equals a,t,g, or c
ctgaaaacggccagtnagcncaacgcaattaatgtgagtagctcactcattaggcaccccaggctttacactttatgcttccggctcgtatgttgtgtgnaattgtgagcggataccaatttcacacaggaaccagctatgnccatgattacgccaagctcgaaattaaccctcactaaagggaacaaaagctggagctccaccgcggtggcggccgctctagaactagtggatcccccgggctgcaggaattcggcacgagggattgtttttgaacatcacaaatttgttcttggatagaattttatacattgcttttcatcatatatttgctcagttactctaagaagcaaggaactgatcactagttgggaatctatatgggcctaaacttgagtgtattgatttattattacatctactaccaacattttcttaagcatagccttctaaattttttcaggagattagaataaaggtatacatgctactcggtcttctggtaattctagtgataaacctttggatgagacaggtcctaatcagcactgaattcttcaataggaggctgtgttacaggagctacagatttttccctggawtagcttaggtcattgcctttactttaaaaaaaaaaaaaaaaaaactcgagggg

SEQ ID NO: 400 - DNA, 1286 bp, Homo sapiens
  misc_feature (1232)..(1232): n equals a,t,g, or c
  misc_feature (1241)..(1241): n equals a,t,g, or c
  misc_feature (1263)..(1263): n equals a,t,g, or c
tatagtggaggggaggaaaggggggtgataccttgcagtaagtaagtcgaaatagcatgcctgaaaatttgaaacagaccattctaacacccaaggcttgtttataaaatacttgagaattacattaatgtggaatcaacagatgcagaagaatataacataacttttaaaagctttcataaataccagcagcaattgtaagcaaatctacaaaggttcttgaacctttctattatatacaaaactgaaaagtcattaaggagttcaactaatcaggaattaaatggtcatttatttcatgcagtatgatttaaggtatttcttgagattctggtcaaatgtcataatcagcaaacgggattaaaaaaaaaactccaaaatcactaaataattatctaaataatggtattggagaacttgtttcctgctatttggaagagattgttgcttcattgctagtttgtatttctaacttctacagttatagactccactgtgctttgtgtctgaatttctcagtatagacattttgtttactgtatgcttgcatatttattttcaactttgyytgtctttaaaattgcttgaggaaaaatggttgtaattaatttctgctacagaaaagccacctggtacgttttgtctcatcaggattgttttaaattctaaactataagtttgttcagaggggcttttgcaatgatagcagaaaactgtacaaatgtacagttagttatagaggttcttgttgaaatgaacttaccatctgatgatatgtatgtacagctgtgtacttgagtcttttttagtttacttagaaagactagcagtttgacctgttaaacaggactagttcaagtcaagaaactaaggttgttgtatacacctggaggcatctgttattcagcttatcctttgagtgggtatttggcacaatgaggataaacttatgtgacccacttgaatggctgatctaataatgttgacattatgcattctgtacttagtgaaatgtcagatgaaaataactgatgaataatttttttgtattaaagggatgggaaaagaacacatgaatttgttaataaagcactatgatctgcaaacgatggaatgtttcataaagatctaaagaaataaaggaaactttaaaacaaaaaaaaaaaaaaaaacycgagggggggcccggtacccaattcgccctatagtgagtcgtattacaattcactggncgtcgtttnacaacgtcgtgactgggaaaancctggcgttacccaacttaatcg

SEQ ID NO: 401 - DNA, 626 bp, Homo sapiens
  misc_feature (15)..(15): n equals a,t,g, or c
  misc_feature (37)..(37): n equals a,t,g, or c
  misc_feature (57)..(58): n equals a,t,g, or c
ccgctctgactgtgntccccggcgcagattcgcacgngggaaaccctgtctctmccnnaaatacaaaaaaattagctgagattacaggtgtgagccaccacccccagcggtcccaatccatttttagttgctaattggattgaggagatcagaccccaacaatggaaaaggcagactctctagaggaaaatactatcaatcatcttaagtctcttttgttcttgtatacacagttggcatacagtcaaacgttatatgaaatgcagagaaactggaagattactgataatcaagggaacaaataggtaataggagcaaactcagatgatccacatgttgcagttagtagtcaaggattttaacataagtattataaatgtcttgaaaaaaagaaaaatgaacagatagaaaattttgacagagaattggagtctataattaaaaggaatcaaatagatattctagaactgaaaaatatatttgaaattaacattggatgggcttaacagcaggctgaacactgaattagtgaactaatgagaagacagaattagtgaacttgaaaaaagatcagtagaaaatattcaaactgaagcacagagaaaaaaaaaaaaaaaaaactcgta

SEQ ID NO: 402 - DNA, 2186 bp, Homo sapiens
  misc_feature (174)..(174): n equals a,t,g, or c
cgcccggtgcactgtggacgatgagtcagggttaggggcgccaggacgcgggcgtgcaggacgccagagctgggtcagagctcgagccagcggcgcccggagagattcggagatgcaggcggctcggatggccgcgagcttggggcggcagctgctgaggctcgggggcggaanctcgcggctcacggcgctcctggggcagccccggcccggccctgcccggcggccctatgccgggggtgccgctcagctggctctggacaagtcagattcccacccctctgacgctctgaccaggaaaaaaccggccaaggcggaatctaagtcctttgctgtgggaatgttcaaaggccagctcaccacagatcaggtgttcccatacccgtccgtgctcaacgaagagcagacacagtttcttaaagagctggtggagcctgtgtcccgtttcttcgaggaagtgaacgatcccgccaagaatgacgctctggagatggtggaggagaccacttggcagggcctcaaggagctgggggcctttggtctgcaagtgcccagtgagctgggtggtgtgggcctttgcaacacccagtacgcccgtttggtggagatcgtgggcatgcatgaccttggcgtgggcattaccctgggggcccatcagagcatcggtttcaaaggcatcctgctctttggcacaaaggcccagaaagaaaaatacctccccaagctggcatctggggagactgtggccgctttctgtctaaccgagccctcaagcgggtcagatgcagcctccatccgaacctctgctgtgcccagcccctgtggaaaatactataccctcaatggaagcaagctttggatcagtaatgggggcctagcagacatcttcacggtctttgccaagacaccagttacagatccagccacaggagccgtgaaggagaagatcacagcttttgtggtggagaggggcttcgggggcattacccatgggccccctgagaagaagatgggcatcaaggcttcaaacacagcagaggtgttctttgatggagtacgggtgccatcggagaacgtgctgggtgaggttgggagtggcttcaaggttgccatgcacatcctcaacaatggaaggtttggcatggctgcggccctggcaggtaccatgagaggcatcattgctaaggcggtagatcatgccactaatcgtacccagtttggggagaaaattcacaactttgggctgatccaggagaagctggcacggatggttatgctgcagtatgtaactgagtccatggcttacatggtgagtgctaacatggaccagggagccacggacttccagatagaggccgccatcagcaaaatctttggctcggaggcagcctggaaggtgacagatgaatgcatccaaatcatggggggtatgggcttcatgaaggaacctggagtagagcgtgtgctccgagatcttcgcatcttccggatctttgaggggacaaatgacattcttcggctgtttgtggctctgcagggctgtatggcgggcagggctgggcagcggcctgagtctcagcggacttgtccacccggagttgagtcggagtggcgagctggcagtacgggctctggagcagtttgccactgtggtggaggccaagctgataaaacacaagaaggggattgtcaatgaacagtttctgctgcagcggctggcagacggggccatcgacctctatgccatggtggtggttctctcgagggcctcaagatccctgagtgagggccaccccacggcccagcatgagaaaatgctctgtgacacctggtgtatcgaggctgcagctcggatccgagagggcatggccgccctgcagtctgacccctggcagcaagagctctaccgcaacttcaaaagcatctccaaggccttggtggagcggggtggtgtggtcaccagcaacccacttggcttctgaatactcccggccagggcctgtcccagttatgtgccttccctcaagccaaagccgaagcccctttccttaaggccctggtttgtcccgaaggggcctagtgttcccagcactgtgcctgctctcaagagcacttactgcctcgcaaataataaaaatttctagccagtcaaaaaaaaaaaaaaaaaaaaaaaaaaaaaaaaaaag

SEQ ID NO: 403 - DNA, 721 bp, Homo sapiens
  misc_feature (673)..(673): n equals a,t,g, or c
gtcctcacccagtatactcctctttttactcagcttgataggaatctttccagtcctctctgcatttatatgtatacatcattcgtattcgtgaccctaataatgatacccagtcagctcacaccagcaagaaaaagtatttttcaagccctctggaagcattggaagctccaagtgagcataagtgaaaataccctaagagatacttccaggttctagatccaggtgtttcattttccccttgttttcccactacattgtcatctctccaaccttatctttagttttgtttttttcatggaagaccagaaagcccctttccccaaagtgttaaaatctggggtgaaggcaactgacctcattgcatactttggcaattcaaagttataaaatgttagccgggcacggtggttcacgcctgtaatcccaacactttgggaggccaaggcgggcggatcacttgaggtcaggagtccgacaccagccggrccaacatggtgaaaccccatctctactaaaaatacgraaattaatcaggkgagatggcgcacacctataatcccagctamttgggaggctgaggcatgagaatcgcttgaacccaggaggcagaggttgcagtgagtgagcagagatcgtgccactgccctccagcctgggtgacagagcaagnctgtctcaaaaaaaaaaaaaaaaaaaaaaaaaaaaaaaaaaactcgag

SEQ ID NO: 404 - DNA, 1024 bp, Homo sapiens
ctgcaggaattcggcacgagcttattttacctgtgagttaactaagatttagaaaaaaattcaaggtcacataatatgtgtgactctcataaagactgtcaagccaaagcatgcttttaacctccatgccttaaatctgaaacaccgttagttgacatctctcactgaaaataatcacaacatcgacttcttagaaagataagatacatttgtctttcctgaatatatgatttgcttttgctgttttgtggagatgttccttgttctttgtatgtgtcttctcatgtgtgtctctgtactcacattgctagctgtgcggtctttgtctcccttcctctcatgccagctagtggcatgatggagagactgtggtctagactgaggattatgacagcatacaaaactgactcaacacttacaggtaaataaaatgagcagtggtttcctttatttatttctgttatccactacatagattccatgtggatttaagaaactcaaattcaagtagaaatatctattaatagctattaaccaatcatgcatctcatgtcttaggagattctatcctgtagataaaatgaggaaatcatttattgactgcctttttgggaaataactctatggtctctagaagacatcttcgtttacttcaagtgccatggctttgagtttcattcaggaagatggtccaaaatatgagaatgtgtttattcttttaagatatgtaaattgtttatatcaatatcaacttatcctttttgggagagaaatacataagtagtacttcactttcattagttatttaacattcaaaatctctcaagtcatttaaccaggtgcaatggctcatgcctataatcccagcactttaggaggctgaggcaggaggattgcttgggcccaggagtacgagaccatcctaggcacacagtgagacctcaatctctacaaaawaaaaaaaaaaaaactcgctcgtgccgaaggggggtcccgtacccaatcgccctcacatgcatcgtat

SEQ ID NO: 405 - DNA, 1210 bp, Homo sapiens
  misc_feature (1204)..(1205): n equals a,t,g, or c
  misc_feature (1209)..(1209): n equals a,t,g, or c
ggcacgagcgacaaagcctttgaccgcatcaccacgaggagtgagaagccactgcggacatcaagcgcatcttccacactgtcaccaccacagacgaccctgtcatccgcaagctggcaaaaactcaggggaatgtgtttgccactgatgccatcctggccacgctgatgagctgtacccgctcagtgtattcctgggatattgtcgtccagagagttgggtccaaactcttctttgacaagagagacaactctgactttgacctcctgacagtgagtgagactgccaatgagccccctcaagatgaaggtaattccttcaattcaccccgcaacctggccatggaggcaacctacatcaaccacaatttctcccagcagtgcttgagaatggggaaggaaagatacaacttccccaacccaaacccgtttgtggaggacgacatggataagaatgaaatcgcctctgttgcgtaccgttaccgcagtggaagcttggagatgatattgaccttattgtccgttgtgagcacgatggcgtcatgactggagccaacggggaagtgtccttcatcaacatcaagacactcaatgagtgggattccaggcactgtaatggcgttgactggcgtcagaagctggactctcagcgaggggctgtcattgccacggagctgaagaacaacagctacaagttggcccggtggacctgctgtgctttgctggctggatctgagtacctcaagcttggttatgtgtctcggtaccacgtgaaagactcctcacgccacgtcatcctaggcacccagcagttcaagcctaatgagtttgccagccagatcaacctgagcgtggagaatgcctggggcattttacgctgcgtcattgacatctgcatgaagctggaggagggcaaatacctcatcctcaaggaccccaacaagcaggtcatccgtgtctacagcctccctgatggcaccttcagctctgatgaagatgaggaggaagaggaggaggaagaagaggaagaagaagaggaagaaacttaaaccagtgatgtggagctggagtttgtccttccaccgagactacgagggcctttgatgcttagtggaatgtgtgtctaacttgctctctgacatttagcagatgaaataaaatatatatctgtttagtctttcaaaaaaaaaaaaaaaaaaaaaaannaaana

SEQ ID NO: 406 - DNA, 1445 bp, Homo sapiens
  misc_feature (1017)..(1017): n equals a,t,g, or c
  misc_feature (1441)..(1441): n equals a,t,g, or c
acagttcgcgtgcgtttccttcgcctacttggcctacatgccttctgcccgtgaagcgatgtttcccctcgaaaggccgtaggctacgccgtcagaatcggtttttcagtgagttttgacccctccgacgctccgtcgcctgacagaatcgcggcgttcttcgtaccgcccatcctccgcggacgcccgctgccatggcgactctgctgcgccctgtcctccgtcggctctgcgggctcccgggcctacagcggcctgcggcagaaatgcccctccgggctaggagcgacggcgccggcccgctatactcgcaccacctccccacctccccgctgcagaaagcgctgttggccgccggctccgcggcgatggcgctctataacccctaccgccacgacatggtcgcagttctaggggagaccacaggacaccgcaccctgaaggtcctcagggaccagatgaggagggatccagagggtgcccagatcctgcaggagcgtccccggatttcgacatccaccctcgacctgggcaagctccagagcctgccggaaggctccctcggtcgcgagtatctccgtttcctggatgtgaacagggtctccccagacacccgagcacccacccgcttcgtggatgatgaggagctagcgtatgtrattcagcggtaccgggaggtgcacgacatgcttcacaccctgctggggatgcccaccaacatcctgggggagatcgtggtgaaatggtttgaggctgtccagactggcctgcccatgtgcatcctgggtgcattctttggaccgatccgacttggcgctcagagcctgcaagtgctggtctcggagttgatcccatgggccgttcagaacgggcgcagagccccatgtgtcctcaacctgtactatgagcggcgctgggagcagtccctgagggctctgcgggaggagctgggcattacagcaccacccatgcacgtccagggcttggcctgagctcctgagccagcggggcctggcntacctcccccatcccctgcttcccttggaggcagagggctcccttgactacctttgttcctcttctttgaacactgacccttggacaacatttatcataatttgtcataaccactgctgagtggccttgaggacgaaccccgcagggagcaagcagtacagtggcattcccagggggaccagcagctacccaaggagaaccatgcatgaacagtatcagtcgtctgggctcatgctgggatgtcgcagtgctcctgttgcaactcctcccagccagccaggtttgctgggggccaggctgggtgtcctcacaggagtgagggctacacccaattccaaaagcctgagaagagagaagtggagggggaggcgagtgtgtgaataaaggctcccatcaggtcaaaaaaaaaaaaaaaaaaaaaaanaaaa

SEQ ID NO: 407 - DNA, 1633 bp, Homo sapiens
  misc_feature (1599)..(1599): n equals a,t,g, or c
aattcggcagagcatagtctttcaaatttggacatttaaaaaagaaacttttactgtagtcatgaagtagtatcaaagtttaccacaagtttgtattgagagaagaacaaacaatatatgctaatatgaaaaacagctctacttagaaagctactgcttgggttttcttattaggcatagttctccagactgagttggttttactcatctacatgatttttccttgccttatggaacagaaattcaggcccactcgaattcagttattttagggctctttaaaatccagtatttgtgatttaaatgatgcggagggactttcattacctgtgtctttgcttatttctctctggccctcagaacaccccaccctgacctttaggggaaattgacagaggcagagggtttcacctgcctcaattgtcaccagccctgttacattcttccttccaagccttagcctcacagggaccttctcattattgaacaawtgccttcaaagcagtagaatagcccaattgttatggagattaaagataccgattgcaaaactcctgtaaataaaatcttcactgacaaacccagtttcttttcataggcttttcttctgtaatctctttctggcagaacatctcatgttttgatgttagagattcagttaccaaccacagtaaataaagcaaaataataatagaaaaatagtatagaactcaccctaaaaacaaacattggccaaccatgtttattttttgtctctctttgcactcctgagaattgataggggaagaatgtaccacctctaattcaggtgatttctgattagcaagctatggaaagtcttcaggttgagttttagccagttcacgctcccctaaatggcatggaatagactattttctgttttaagaaaaaatagaacaatggcactaaatgcttgactgaatgtttgactaaatgttgactgaatcatggataggaaagattgggcagaaaagacagccactgcctccagacacaggatgccacaatcctgggcaccatcattattccatacaaccttagggtcatttttagggtttagaactttctcaatagggtttcaagattttgaaaagtgtcttccaattctgatctccgtagatcctgttatgggaattaacctttttggaaggggattcttgttcttaaagatgaaattccctactttctttcctggagggaatcagtatgggcagagggaagaggagatggcgattctgacctgtgtgtctcatgtcacctaacacctatggggtggcatgaaacttgagctttaaaacacaccaggggccaggcacagtggctcatgctggtaatcccagcactttgggagaccgaggtgggtggatcacctgaggtcaggagttcgagaccagcctgccaacatggcaaaaccccgtctctactaaaaatacaaaaatcagctgggtgtggtggcgggcacctgtaatcccagctacttgggaggctgaggcaggagaatcgcttgaacctgggaggcagaggttgcagtgagccgagatcaggccattgtactctagcctgggtgacaagagtganactccatctgaaaaaaaaaaaaaaaaaactcgag

SEQ ID NO: 408 - DNA, 1406 bp, Homo sapiens
  misc_feature (294)..(294): n equals a,t,g, or c
  misc_feature (1336)..(1336): n equals a,t,g, or c
gaagaaatgtagattgaaagtagaggttgactccagccaggaccaaaataatatagttattttttaggggaactataaaaagaacaacagtttttcctagcatttggcataagacctaggattttaatgaaagttgaaattcaaatgcctgagactgccccatactgtgagggtcttattagccttgtytttggaaggagacttactgtctctcttcctaaatttaaatggcttgttttccctacctatattatggcaggcagagtgggatatttaaggtattgtctattccanatctctgcccttctcattttctagggrttgccctgcattccatttacactgttacacttagacgtgtgaatttgacctgtctcccgggcatttggaaacggggtatgattctactcctagtctgtctctgaagcaggggaggtgtaaatcctggtgacgtatgaactagaggggttggcctgcagtgagggaagcatgatggagttgggtgcgtggagaagggaaaaaaatcaagagatatgctcaagttcctctgtgtagccctccagttcccagagaccccggtgtacttacaacaaatgaaaagggggtgtgttcatattttccttaaattttctcaaggggttttgggaacgttcaaccaaaggtaccctaatatagtggtaaaaaagaagcctgagatttctagagctgctgtgaagamctattagaaggsggartataagattctaagtacgggactaagttactgaaaatgtggccccatagagaaagctgctctacccttcccttagtgcagacattgaggttggggttcattctgtgacgtcatagccttgctttgaactagaaggagaagcatttgttagataccaggttgggttgggataaaacaaacagaatgttgcttctcagtacagctgcctgtttgcagggctaattctctaagggtctcaggatactcagaggcatagcagacttgggcccagagcacagggataggcaaaacttttctgttaagggctacttagtaaatattttaagctttgcaggtcctatggtctctgacattactactcaactgtcccatggtaagataaaagtcacagacaatatgtaaacaaaatggacatagctgtgttccagtgcaacttttttttttgagacagtcttgctctgcctccaggctagagagcagtggcgtgatcttggctcactgcaacttccgcctcccaagttaagcgattctcctgtagtcccagctactcaggaggctgaggcaggaaaacagcttgaaccagggggtcagaggttgcagtgnactacggtgcactccagcctggcaacagagtgagactccatctcaagaaaaaaaaaaaaaaaaactcgta

SEQ ID NO: 409 - DNA, 1282 bp, Homo sapiens
ggcacgagatttttaatttttgttaatatcaacagcaaaagcctagtgcattgggagatgtgcaacctccctgaaaatcttttctgtttctggagtacttcaggggtggcctctggccccagagcctttgccacagtgctcccaccagcccccacctcatccgtctgtttgcagagcctcatctacaggtccccacgctgccttctttactcactctgcgcttggccgttttgttatttggcttagtctacattgggcggaagtctgtgtgcacagagtgggtgttccttcgagccccttccactcagagggccacacccagcgatgccagtgaaggtggcacagcctctcttcagtttctcctgactgtgatctcactggggtagaattcccctgagagaattccctcactcacggctccctttgccagagtcagttcaatcaggtctgatgtgagcaatttacacacttgtctcagaaagtccctcagggtttgtagaggactgcaggggggcatccgctgcagactcagcctttctctgcagccatcctgcagtgggggtgagcgggcacaggctgagaactgctcttgggtggtggaagcaggtgtcacggtgcaagtctccccctgcacccctcccccagcttgagccgtgtcacccccctctccctccagcatgggcctgtgtctcaggctctctggaaggtggccctgccccggaccctcttgcaggtgtcctggtttgacttggaactagatggccatctttccaggctttggtggcccaagagcagtctgggtggatggaagtggctgtcccctcctctccagcccctgcccacccactggtggaggtgctaactagcagggacgtggcataggatgggagctgggcgtgaggtgcttggggtccattctttgtccctcagcttctcagagtccggccagcccttgtgttcccgtgccccacactttcctcctccccactgcagtgagtcaatagtccagggtggggcctggcctccctgccctgattggggactcaggaggtgaggcctggggggcttcctgccccctccttgcccacctgcctgcccccgggcagcacgggagggagagcagggtgagcacgcttgttggtttcagatgcactttctgcttgcattgccgtatctgtgcgttccttcatcctggtcctggctttatggaacaccatgtttttagcatgtttttaaataaaaacggataaagtgtcaaaagcaaaaaaaaaaaaaaaaaaaa

SEQ ID NO: 410 - DNA, 1053 bp, Homo sapiens
ggcacgagcccggatggaagctccggccgcggagtgatggtggcctcagcgaagatgggccgggcagggaccatggcggtggcagcagagcttcgagagctgtgcccaggagtgaacaaccagccctacctctgtgagagtggtcactgctgcggggagactggctgctgcacctactactatgagctctggtggttctggctgctctggactgtcctcatcctctttagctgctgttgcgccttccgccaccgacgagctaaactcaggctgcaacaacagcagcggcagcgtcgaaatcaacttgttggcctatcatggggcatgccatggggctggtcctttccctaccggttcactgcttgaccttcgcttcctcagcaccttcaagcccccagcctacgaggatgtggttcaccgcccaggcacaccaccccccccttatactgtggccccaggccgccccttgactgcttccagtgaacaaacctgctgttcctcctcatccagctgccctgcccactttgaaggaacaaatgtggaaggtgtttcctcccaccagagtgcccccccccatcaggagggtgagcccggggcaggggtgacccctgcctccacacccccctcctgccgctatcgccgtttaactggcgactccggtattgagctctgcccttgtcctgcctccggtgagggtgagccagtcaaggaggtgagggttagtgccaccctgccagatctggaggactactccccgtgtgcactacccccagagtctgtaccgcagatctttcccatggggctgtcttccagtgaaggggacatcccataagtagttttgagagggtggatgggttacttgcccaccagaaacagccctagtcccaactccttgcgttcctttggcccctccctgcctacctagaatctgcctgaaagggctggagaggggcagtattgggggactgtgctagctttacccccgcaggacatacacaggagcctttgatctcattaaagagatgtgaaccagctaaaaaaaaaaaaaaaaaa

SEQ ID NO: 411 - DNA, 1238 bp, Homo sapiens
  misc_feature (19)..(19): n equals a,t,g, or c
gctgcagaagacgacagangggtacggctgcgagaagacgacagaaggggggattggccggaagcaggcgccgcttcgaggcccgcggaaaacgcgcgccgagacccgctcctgcagtattagttcttgcagctggtggtggcggctgaggcggcatggatctcagcgagctggagagagacaatacaggccgctgtcgcctgagttcgcctgtgcccgcggtgtgccgcaaggagccttgcgtcctgggcgtcgatgaggcgggcaggggccccgtgctgggccccatggtctacgccatctgttattgtcccctgcctcgcctggcagatctggaggcgctgaaagtggcagactcaaagaccctattggagagcgagcgggaaaggctgtttgcgaaaatggaggacacggactttgtcggctgggcgctggatgtgctgtctccaaacctcatctctaccagcatgcttgggcgggtcaaatacaacctgaactccctgtcacatgatacagccactgggcttatacagtatgcattggaccagggcgtgaacgtcacccaggtattcgtggacaccgtaggatgccagagacataccaggcgcggctgcagcaaagttttcccgggattgaggtgacggtcaaggccaaagcagatgccctctacccggtggttagtgctgccagcatctgtgccaaggtggcccgggaccaggccgtgaagaaatggcagttcgtggagaaactgcaggacttggatactgattatggctcaggctaccccaatgatcccaagacaaaagcgtggttgaaggagcacgtggagcctgtgttcggcttcccccagtttgtccggttcagctggcgcacggcccagaccatcctggagaaagaggcggaagatgttatatgggaggactcagcatccgagaatcaggagggactcaggaagatcacatcctacttcctcaatgaagggtcccaagcccgtccccgttcttcccaccgatatttcctggaacgcggcctggagtcagcaaccagcctctagcagctgcctctacgcgctctacctgcttccccaacccagacattaaaattgtttaaggagaaccacacgtaggggatgtacttttgggacagaagcaaggtgggagtgtstctgcagccgggtccagctacttccttttggaaccttaaatagaatgggtgttggttgattaattttaaaaaaa

SEQ ID NO: 412 - DNA, 1954 bp, Homo sapiens
ggcacgagcggcacgagcttgagttagaagaacctcagctctgtagtgatcttattttactgttttcccaggatagaatgcccttggtaccacatactgtatgcagagtatttatgattgcttgagtacagttccttggaaaggacacaaggggtttcataaagcggtactaaaaatctgcttttctccctagcatttaccaacaaccttgcgatccgatggcttgaaataatggtcagagtgcatgttacccaacttctcctggctgctcctactctgtcacactgcacacagatcatgcccgccaccaccctacactccccgacctcacccaccagtcagacagtttaagtcctgctgacgcaccaggcgtgtgttggctcgtggttgtacttttcatgagtagcagggaagatacactccaggaaggygggatacaaattattgaactgtgtgacttaaaagctccagtgagtttcgtcggaagtataggagtttgaaagtgctccccagtcaaacccagaactacatagggtcagccgtggttgagctaatttctgcttacacatgtgtggagggtgtcattttctgactacgcctaggcctgagtggacagccgattaaaagatgtaaattcgtggattgtatcaaggagagcgggttccatctttgtggtcaggagggggcccactcttttgttccgcaaagggtttatctggatgttccttgctggaagttgcttttccagtttggatcaaaccacttaagtggagctccagcctcagtccttgcaataaaaaaaaaaaagtcctggaaagccagaattttgctaatatcttacatagaatctcaatgatgggaattgggagtagaaggcagagagtggtgcttggctgatggaagttaaaagttgggttaataataaactacatttatatatcagttaacagcttgctaagtgcccacatattatttgagcttcatacttgcttgctgagaaagaatggctattattatcattatcatcattaccactttccattttatagataacaaaattgaggctctgagaatttaaagagattttccccaaatcattaaacggtgacttctgaatctggatatatgacaagacctctgtccccagtccccttgctttcacctctataatatatagtagctaagctcagctttctgagaacttccctgkcttatgtcatatttgacattataggagaattgaagatgttttgtaagtacatactttgtttactacctcagtagccagtataacaaatggcactgaagttttatgctttgcttgctaaaaccagcaccatttgtgaaacaggtcttggctccgagttacccttaaatgtaactcctttattataaaatcatttgcaargagctgcagagawcaaggaatasactcttcccacttccctaatgccaggtagtactatgacaggacttcatagtaccacttcttcaacaaaataagtgtctgcagtgaaatatttgttaaaatgcacatttctcagtgaatatatttcttttaaaactgaaaaaaatagtacctaacggaaattttatcattgctttaaaatgtattttaatgaagatattaaaaaatacctttgatggattcttcaatattgtcgaactgctcaaaatgattatactgttatatgaagtctaaaatctttcatgcaacttacaagaatatttttgttgtatgcaacacagttggaaaattctagtgggaccatgtccatgcaattactgattatgtaatgctgtaaatttttgataagcatgttccaagttttcctgttctaaaaacaaaaacattaaaatcacccactgttgaagacaaaagatcattactttattaggagatattattagatatgtttagaactagttaaaaaaaaaaaaaaaaaaactcgag

SEQ ID NO: 413 - DNA, 874 bp, Homo sapiens
  misc_feature (79)..(79): n equals a,t,g, or c
gccttctgaaaaaggtgcttgcttcctcttcaccttctgccacgattgtaagtttcctgaggcctccccagccatgcanaactcacgcactcctggctttaaagtttatacttgcatttgccatacctgataagccacggcatatccagatgaaactagccagactggaatttgagtctttggaggcactcaagcagcagcaaatgaagctcgtgaccgagaacctgaaggaggaaccaatggaaagcgggaaggagaaggcaacctgagtgcccagcgtgcccagctgccctgttggcagaggcctgtgtctgtgccacacctgccacggtggcaggggggtaccggggcagcatcgtggctcctgaacccagacccaatgcttagccaaacgaatggctcccatgtggcaagcacccttctcagtttcgcagtggcttggctcgggatccttggcagttcccccagccccaccctgtctgctccttcccagttccttcccgggccccacacgctgctccagctgccaactttgctgcagagccactgccgcccttgagcctctcaccatgagtgagccaccagctctccacgttcccctcatagcagtgtcactcccaaccccaccatggcccagggacccgtggacaggttggggatggggtgtgtgcccactgtgctcatcacaggagcctcagttgagagtgagcggggtacagtaaggcagtgcttcccacactggacctctttcctggttctcttttgcaatacattaacagaccctttatcaacataaacaatagtaactgagctattaaaggcaacctctctgacwaaaaaaaaaaaaaaaaaaaaaaaaaaaaagggcggccgc

SEQ ID NO: 414 - DNA, 2206 bp, Homo sapiens
ggcacgagctggactccctgagtttgttaaaatagtagaagttgggcctagggatggattgcagaatgaaaaggttatagttcctacagatataaaaattgaatttatcaatcgactttcccaaactggcttgtctgtaatagaagtgactagctttgtgtcttccagatgggtaccacagatggctgatcacactgaagtaatgaaaggcattcatcaatatccaggagttcgctatcctgtccttactcctaatcttcagggttttcaccatgctgttgctgctggagctactgagatatcagtttttggagctgcatctgaatcctttagcaagaagaatattaactgttccattgaagaaagtatgggaaaatttgaggaggttgttaagtctgcaagacacatgaatattccagcacgagggtatgtgtcttgtgctctgggctgtccatatgaaggaagtattacaccgcaaaaagtgacagaagtgtctaagaaattgtacggcatgggttgttatgagatctctctaggagacacaattggagtgggaactccaggaagtatgaaaagaatgttggaaagtgtgatgaaagaaatcccaccaggtgctcttgctgttcactgtcatgacacatacggacaagccttagcaaatatccttacggcccttcagatgggaattaatgtggtggactccgcagtatccggattaggtggctgcccttatgcaaaaggtgcttctgggaatgtagccactgaggatttgatatatatgcttaatggcctggggctcaatacaggtgtgaatctatacaaagtgatggaagctggtgactttatttgcaaagctgtgaataaaaccacaaactctaaagtagcacaagcctccttcaatgcttgacttgaatggatttatgacgtaccgttgagaagatcaatttcagctacaatactcatctgaaaatcattaatgccaacttgctctgatatgtgaagtaatggacaagaatgggaaaaaagagatccttttcaaaaagattataactggatagattaagtcaacaaaatgcaatatcagtcatcaggtaaattgcaagctgaggataaataataaaacttgtcataattttgaacttggaaaaaagtttcttttgctctcatagaaataactttttaatttagtagatgggaaaattgacttcgtatttccccaagtatcaaatactgtgttaatacttaatcaagcaggcttaacactgtgtacatattgtcagtagtttatgagctcctgcatagtatgcagagtgtgtggcctcaatattatacattatgcctctggatctcaactactcatttgccaagtcagttatgttatggaccaaaagccaaatctccatctgaccctacataattttagcaatagaacttttatatttcaagtatggctaacatctgttaactatttcagtgactttatctggttccaagaggctgtggccaatggcaagatgccatatcctggaaacatattacgacctcccatgtttgttacatgcatccagtttaccacactttacctgtcatcagttatagtaaaaaccagcatggtgttactcaactattgagaaattgtaagctattttttttgtcctgatgtctaaattgcagtgataagaataggttgatacatgtatcataatctacctttataattttcagatcactttcaaattgcccaaggaaatattgtgatcctaagaatattaagataattttaggttaatgaaatacccattttccttttattcatggtgctttgcttacccacattattttttggtgtattttttagtggttattttagaagttgaagtggctgaaattttgtctattgtcttagaattgattgccagaaattgcaagatgtaatatatcaaagtcagggatgaggagcaggaggactattcaagataaacttctgtaacctatgcatattttatgggggcagtattattacaaatggatctgaaatgtcagttctagtatttagagagacttctctaataataccgggtgatattatctttgagtaaatttgaatataaattgaaacataaaaatgagtattgtgaactttctcggaaatattcattaaaaccattgaaataaaaataaattcaagaaaaaaaaaaaaaaaaaa

SEQ ID NO: 415 - DNA, 956 bp, Homo sapiens
aatttcccccaggtccctgcaggtaatccagggaccccatagggagaacaggctgactggggcattaggaatgtttgtacctctctgcttccctggcagcctggggaagggtgcagggctcagtgcgctaaaccatggtaaacatcttcaatagaactaccctagaatttagtgagtgtgagactgagatattgctcagaataaatttattccatagccatttaggattgcatgttctggacaaaccttgtccagtatgttttctgtttgagctttttcattcttttgttaagccaacaagttgagaatttggccctgctgggatccatgtagtgggcactagctgctctttggccaaggccttcataaatgattcagtctctcattatctgtcctctagccccacaccctgatttagaccgtggcaaaggaagaacttgaggtcaagaccaaccaaatctgtgaattaaagctgttatttttttctctgcaagggcgctttgcttcaggtctgggctatgtgcagaacctaagcaggctgtgagagttagaagaggcagtattacatgttaggcccagaacaccatgggaaaaggtttatgtagtgtatcttagtggcctgcctagctgcctctggggccaggctgacttctgatgtccacattagctcgtacctgaaccctgttgctgaatgccagccctgttctcctgtaactattatatacgccatggcctggggggcattgaaggaagtaagctctcagagatcctaacactggctgggaacctctgactcagagcatgtctttaaagagtccacatctggccaggcgcggtggcacatgcctgtaatcccagcactttgggaggccgaggcgggtggatcacgaggtcaggagtttgagaccagcctggcaacatagtgaaaccccatctctaataaaaaaaaaaaaaaa

SEQ ID NO: 416 - DNA, 1198 bp, Homo sapiens
  misc_feature (362)..(362): n equals a,t,g, or c
  misc_feature (1081)..(1081): n equals a,t,g, or c
aattccccgggtctagttcatttccactcatatctatttctgctaatagattgacagcaacctttggtttaatgctgtgttctctagctacaccaacaagttatatattcctttccaatattaaccaagtatttattttatgttagcctatgactgagttttatctatgcttgcacatatatagaatgtaaaaatataattctccatgtttaatgtatccatataaaaatgaaaatacccattttctgcattcttaaagggttaagaaaagtaacatgtaataagcacatggaggactttagaccatttcttgtgttagaggagactttatacatttgtgaggttttctgtcttttggtccntttatgktcttagtccattycattattgttttaatatttctaccaggratgaccargaaargrgaaaggaggaaaaaaatgtgttaatcattttcttttaatggtatgtcagcagaaggggttctgactgtaagctaatgtgcacttgtgcctgtcccctttgtcttaaactaaagttggtggtatgaatcgaaaaatgtgtattggkttaaaaagcmgtttatgatwtgaaacagtcttccagtttttatatcaactcctttgctttcaacagtcagttcaaagcaccatttattgatggtttactgtatgccagacactgtatttttyctttasgtattaccctacttaatcctcaacacaatttwatgaagtagtwattgttagcctgaaactggcatttctccayccttttatggtgctgtctttgaaaagtctcagatgtgtaacatgtcctagaagtagataattatcaaaggaagactgcaactgcaactcacttccctctgagaaaaaatatccctgactagattacatatctagttccagaccagaacctggtggtattaaaagtgttttggttgactattgtataccataatgagtacctacattcccaaattgcctgcctggttgttgtacagacttaaaaatctagcctgccttgatttttacttttcagatacacatgtttaaagagatctttgctggtcacagtngctcacacctgtattcccagaactttgggaggccaaggtgggaggattgcttgagcccaggagtttgttcaagatcagcctgggtctctacttaaaaaaaaaaaaaaaaaactcgag

SEQ ID NO: 417 - DNA, 2174 bp, Homo sapiens
ggaattccccgggggaatgggccactgattcatttcgtggttaactggaatactgctttttaattgatacccagctgtatctaaatcattacaatactggacagatagtgtagtgcagagtatttgaaatgcagtgctttgtttggcaaagatttatttaatggtttcattttctctgcaagaagaaaaaaagcagatcatcgaagctcttattatttgcactgtggcagattcacttgagttcagaagcctagggaaaaggtgggacttttgaaactagggcagtaggtaaatgtggacacaccttcgtttgtatttgattagggatctgacagcgtgcatatgtgtacaggtttgcacgtgtgcatacacacatatacaaatcatagaaaaccataggtgttctgtgagagagaaaattttgctacttaaatacagcgtgaattctcatcctgatagttgcagaaaatatttcttttaaaatggagattaatgtctaattccatataaagaagattataggaaaggtgatttaaactgtaagtagctttgttcactaaaacgctagatttatttgaaacagtgttttatttcttttggaaggcagacaactagtttaatagtgtacatatgaaacgctaatttggcttgttaattggatgcaattaaattgaggttattttatactgcttaattgttagaaaattacatgcgttgccatgcctgtgtaatgtgaagcaaaagcgaagggtatagcaggagtgggggtgggagggacgcaagatctagtcctgtctttgcaattaactttctgtgaaaacttggaaacaagtcatcgaagctctttggacctcatttggaaatggaagagattggaacagatggctcctaaagcttcttccagctcatattctatcagtttataaattctactttgtagttgtagagaatgcaatgtcattatattctgtaattatggtattacaaggatgaactaaacacttaaaaaaatcagcacagtgccaatttagcaaatccgttagaaggaaggcaatttaggcttaaagagcactcacctgtgccaggctccatcccaggctctctctccacattacgtcacttagccctcacaaccaacctgagaagatttagttttttatcttgatgtgtatacttaaagaaacttccattcggaaaggttttgtggggatgctttgctagtcattggtgaagcaggattcgaactcagggttctttggctccgaaaatgctttgtctttttacccatttcacgcagtataagcaattgtttacacatcaaaattatttcaaatatttaaaaaaggccaaccatatttatcacttagcacaatgtttccccttagtagtatatggataaacaggtagcccacgggattaagaacctcgatttgaagtcagacagaatagggcaaattccagctccaccaccacctgggggaatttgggtatgttacttaacctccctgaggttacaaaatgaggataatacccattcaagagtcattgggaaatttttatgagaatgtttgtacccatctcaatgagcacatagtaaacgtttaatacctggtagctatgggttattattaacaaggtattagactataagaaaaacataggacaattcaaattgttgtgacagtaaaatattaaatattttcaaatggtccattaaactcttgactgaaatggtttaagaaacaatgttagaatgacatggtttcacatttaacagttaacaaatggaaatatcaattaaaatctggggtgtttctcactgagctcagccagtgctatgccaatgaagtgaactaaattctctggttctttgtggaaaatcattctgaagtttttgctctaaaaatagcttttggggcctgaattaccccttaccccactcgaacttctgtgcaagagccagaggaccagtgattactcgtggggcccttgggcctacttaagagactcaacttgggtgttcacaggactgttgactttaattctaaaaaaatttattaattcaacagagatttattaagcacctgctctgggaaagggctgttctagacactggagatccatcaatagacaaaaatagtaaaaaaaaaaaaaaaaaactcgagggggggccc

SEQ ID NO: 418 - DNA, 1764 bp, Homo sapiens
cccgggtttttctgttgctctccgagactggggggggattgtttcttcttttccttgtctttgaacttccttggaggagagcttgggagacgtcccggggccaggctacggacttgcggacgagccccccagtcctgggagccggccgccctcggtctggtgtaagcacacatgcacgattaaagaggagacgccgggaccccctgcccgatcgcgcgcggcctccgccaccgctcctgccgcaaggggcctggactgcaggcctgacctgctccctgctccgtgtctgtcctaggacgtcccctcccgctccccgatggtggcgtggacatggttatttatctctgctccttcttgcctggaggagggcagtgccagccctggggttctgggattccagccctcctggagccttttgttccccatgtggtctcagtgacccgtccccctgacagtgggctcggggagctgcatcacccagccttccccttctccgactgcagggtctgatgtcatcattgacagcctttgcttcgtgggggcctggcagggcccctgcctccccgacccccgacccactgcaaatccccgttcccctgcactcctcttctcccagcccatccctccggcccctgtgcctctgcggccccagcccagctcccagggccgtcacctgcttggccctggcccagctccctgccctgagtcctgagccagtgcctggtgtttcctgggctcggtactgggcccccaggccatccaggctttgccacggccagttggtcctccctggggaactgggtgcgggtggagtactgggaggcaggaggtggcccggggaggccttgtggctcctcccctcgctcctcgccctgggcctcagcttcctcatcaatagaaaggatgtgttcggggtgggggcgtcaggtgagaacgtttgctgggaaggagaggacttggggcatggcctctggggccacccttcctggaactcagagaggaaggtccgggccctcgggaagccttggacagaaccctccaccccgcagaccaggcgtcgtgtgtgtgtgggagagaaggaggcccgtgttgagctcagggagaccccggtgtgtccgttctttagcaatataacctacccagtgcgtgccgagcaggcttggtggggaagggacttgagctgggcaagtcctggcctggcacccgcagccgtctcccttccgtggcccagggaggtgtttgctgtccgaaggacctgggccggcccatgggagcctggggttctgtccagataggaccagggggtctcactttggccaccagttcttcggccagcacctctgccctccagaacctgcagcctggaggggtgaggggacaaccacccctctttcctccaggttggcaggggaccctcttctcccgtctgcctgcgggttgcccgcctcctccagagacttgcccaagggcccatcaccactggcctctgggcacttgtgctgagactctgggacccaggcagctgccaccttgtcaccatgagagaatttggggagtgcttgcatgctagccagcaggctcctgtctgggtgccacggggccagcattttggagggagcttccttccttccttcctggacaggtcgtcatgatggatgcactgactgaccgtctggggctcaggctggtgtgggatgcagccggccgatgagaaaataaagccatattgaatgatcaaaaaaaaaaaaaaaaaaaaaaaaaaaa

SEQ ID NO: 419 - DNA, 682 bp, Homo sapiens
  misc_feature (665)..(665): n equals a,t,g, or c
  misc_feature (673)..(673): n equals a,t,g, or c
  misc_feature (677)..(677): n equals a,t,g, or c
gagtcaatattttttggctttgtagataaagacttaaatttttgtgcaacatagtggtgttaaagcacacatccattggactatgcaaatcaatttctactagcagcactgagcaactgggcacgtgctagtacgcaccccctcctactctaactgtgctagctcttgggttgaggaatggaatgggtagccttctgcttactggagatgcacagagaaacatggctgaaaacagctttaaaaagaacatgtctttgggttcatgtgtggtgctgctgcccgggtgtaaactatccccacccagggccagccattatcaccagacctcttctgggcctggctgtgaagccctgtttttggtattcagaatggatctttaaggctcagatgggctcaaattgaaaccttgtgttttataaaatggatgtttagtaaaggaactggttctcagttatgtttacagcacttggaattgtgtgttcttgtacattttgtattttaaaaccttttatgggagtgcagtgctccttacacaaatacaaagggaagaagagccagcagttgaggctcctcagttttagtgctgaaataataaacagtgacaggtcaacagtaaaaaaaaaaaaaaaaaaamctcgagggggggggcccgggtaccccaaatncgccctanaagngaggc

SEQ ID NO: 420 - DNA, 1743 bp, Homo sapiens
ggagaagagagaggcaagggcaggagtgaaggagagagctgaagcctggggctccgagatggtcagaggatgggagacggggcagtgaaacaaggcttcttgtatcttcagcagcagcagacgtttggaaagaaatggcgccgcttcggcgcctcactgtatggagggtcggactgcgccttggcccggctggagctgcaggagggcccggagaagcctcgtcggtgtgaggctgcccggaaggtcatccgcctcagtgactgcctgcgggtggccgaggccggcggagaggccagcagcccccgggacaccagtgccttcttcctggagaccaaggagcgcctgtacctcctggcggcccctgcagcggagcgcggcgactgggtgcaggccatctgcctcctggccttccccgggcagaggaaggagctctcggggccagagggaaagcagagccggcccttcatggggaaatctaattgtacagcttgcgcagtcacagtcggcccccacaaggaatttgctgtgaccatgagacctacagaagccagtgaaaggtgccacctgcgggggtcctataccctccgggctggggaaagtgccctggagctgtggggtgggcccaagccagggacccagctgtacgactggccctacaggtttctgcggcgctttgggcgggacaaggccgtcgctgcgtctctggagagggcaactttgagttcgaaacccggcaaggcaatgagatcttcttggccctggaagaggccatctctgcccagaagaatgctgcacccgctacaccccaaccgcagccagccacaatccccgcctcgctgccccggcctgatagcccctactctcggccgcatgactcactgccgccgccttcacccaccacaccggtgcctgctccacggcctcggggccaggagggggagtatgccgtgcccttcgatgcggtggcccgttccttggggaagaacttcaggggcatcttggcagtccctcctcagctcctggccgacccttctgtacgacagcattgaggagaccctgccccctcgacctgaccacatatacgatgagcccgagggagtggctgccctgtccctctatgacagcccgcaggagccccggggtgaggcatggaggaggcaggcgacagctgacagggaccctgctggcctccagcatgtccagccagctgggcaggatttctctgcttctggctggcagccaggaactgagtatgacaatgttgtactaaagaaaggcccaaagtgacagaggcagcagagggatggtccaccgccccttggcttctgctggtgactcctcctggccactgcatcagaagaacctcctctgccccttctggagcccgaggcctggcctgtcttcgttggggctgataaattgcctctcccagggcctgctgggtgagtcaccatcccaaagcaggaagggtgccctggagagaaccaccctcctcctactctttttccacttcctcctctttctttccccagctgaggaggaacctggggcatttagggcagaggacaaaaggatgtcagcaattgcttgggctgcttggctatgcaagcctcctgcctgctgatggccacttcagggacagcctgggcccaggcacccagggggatggcggcagcttcctgcacctttcagatttcttggtggcaattaaagcattttcagaacaaaaaaaaaaaaaaaaaa

SEQ ID NO: 421 - DNA, 1623 bp, Homo sapiens
ggcacgagctttattatggatgagtagggccttgagtttctggtcagcctagcggggacagtaacaggatcattgctcccctaggtgtgtgaccatgagctccagtgtcaatgtgaggaaggatggatccctcccgactgcgatgactcctcagtggtcttccgtagtaacattacacatctaacctgagaaaattgctctcctcttccaagcctttattttgtattatatgagatttcactgcttcttttctctgttcttgaaatttctgttctgttgatgtgaatccacaatatttatcccccaaatctccttaataccttttaattatattttccgtgtcttcattttcactgcacatgcaaaaaaatttcctcaacctttatatttgtaatcttattttaatttcacaaattttcttactttaggactcttccattttcatagcagcctcaagttaatggaaaaatgtaatatcctcaaaactctctaagaatatgacctattattttgtatgttcagttctattctttgaattatctgtttcttttgagttggtttgttctgttgtcaccacgtcacttgtattctgttgtactagttttcttcaggatatgtgatccttagttcaatgtggaattggtagagctggattagttcacacgggatgtctctgcatttgtgtgtgctgttgtacctactgatatttctcttgatgggggaatctggctgggagctctatgggcaggtaggcaggtctgcctataggtcttcagggtgggaaggagccagagtggggacccacctccagttgttacgaggaacattttaccctgaggagggagctcatcaccacattttctcctgagagagctgctttttctcatcatcatctcattgacgctcccctctctgtctgatatagtgtaggtatctagaggaagcctctgtcctcctgttcatgttcctgcatcctctgtttgcagaaacggagaaattcttaggattttgatctcaggtgatgagccaatcttgttctatatacacaggagatgaagtagacctcagtgagatatctgccccaaattcagattgttagacttttcaagagagaacatttatttctgatgtttagtctatatttattgtttccatccacataaatcccttaacttcctatctttctgaagatttttaaaattattttttctagtgccctatgattttattatatacacatgtatttgtcatgtattttgaaaggggcatgaacataatcaactgttttaattagaaaactctttaatggtttcaatgctcactaaaaatccttttaaactatgactttcttgactgctttattttgacatatctattgatttgctaagtcacctctatgactaatttcttcctggtgtaacaatgcatccacataaaactttctaagttgtacttatgagaatgtatttctgttgccaaatatttttaatatttcaattaatattctatatcatagcatgcatagcaggtttgattgaatttgattttttaaatcataattttgcattcataactctgttaaagtagatgtttatatttaatgtcaaaaaaaaaaaaaaaaaa

SEQ ID NO: 422 - DNA, 825 bp, Homo sapiens
ccacgcgtccgtgctgaggtagaggcagcgcaagaagaggcctttgccgctggtcgggattgggatgtcgaagaacacagtgtgcgtcggcccgcttccggaaggtggacgtggatgaatatgacgagaacaagttcgtggacgaagaagatgggggcgacggccaggccgggcccgacgaggggtaggtgggactcctgcctgcggcaatgatccttgcattcaccgccctccccaccccagcccagcccagcccgcccttctcctggggacccgggagcctgcaggatccgcggggcaccggcgcggagctgccctctcaacctgcggcttaacctgtctctttgggatcgcccgctctgaaaaggcaagggggaatcccccgtttcctacccagtcggcaggaaacgcgaaggtcccactcttggaaacctgccctcccccgcgcgccttccacgcccccagattcctcaggttggacccgaatgcctgcctgcctcgggaactggtcccgccggccgcgccctcgcggcgctttggggaagcggtcccttgctggtggggaaggctggtgccgaacgccttagtttttcttcctagaactctgatttcctggggtcacattagctccagaaatttctgattgtggggaacctgcatctttccttagtggttttgttttttgttgtgtttttgttattggtagcgttaacgtagtttattccttaccggggggcggggggagatgggactgttcgaaaattgagggtccctgtgctttcagcccattggcctttttaaaaaaaaaaaaaaaaaaaaaaaaaa

SEQ ID NO: 423 - DNA, 2221 bp, Homo sapiens
ccttgtcctcggcttggaacatagcttctcttttatatggttaacaaatgcctatttgtttggtggcctggcaaacgaaagcgaagattcaaacaataatgttcccagatatttaaatgatttttatgagttggagctacagcatggctctggtgttgtgggttggagcattccagtgactaaaggggttgtgccttctccaagagaatcccacacagctgttatatattgcaaaaaagattctggaagtcctaaaatgtatgtttttggtggaatgtgtggtgctcgcctggatgacctatggcagcttgacttagaaactatgtcatggtcaaaaccagaaactaaagggacagtgccacttccacgaagccttcatacagmcagtgttataggaaacaagatgtacatttttggtggatgggtcccacataagggggaaaatactgagacttcacctcatgattgtgaatggagatgtaccagttcattttcttacctaaatctggatacaacagagtggaccaccctagtatcagattctcaggaagataaaaaaaattcaagaccaagaccaagagctggccactgtgctgttgcaatcggcactcgattgtatttttggagtggaagagatggctacaaaaaagcactgaatagtcaagtttgctgcaaggatctttggtatcttgatactgagaaaccaccggcaccatctcaagtacagctgatcaaagccactaccaactcctttcatgtcaagtgggatgaagtgtctacagttgagggctatcttttgcagttgagtacagacttgccataccaagctgcatcatcagattcttcagcagcaccaaatatgcaaggagtcaggatggaccctcacagacaaggcagtaataacatcgttcctaacagtatcaatgatacaataaacagcacaaaaactgaacagccagccacaaaagaaacttcaatgaaaaacaaaccagactttaaagcactgacggattctaatgccattttatatccatctttggcatcaaatgcttctaatcataatagtcatgtggtggatatgctaaggaaaaatgaaggtcctcacacttcagcaaatgtaggtgttctaagtagttgcctggatgtaagaacagtaattcctgaaacatctgtatccagtactgtttccagcacacaaactatggtaacccagcagaccattaaaactgaatcatccagtacaaatggggcagttgttaaagatgaaacttcactaacaacattcagtaccaaatctgaagttgatgaaacatatgcactgcctgcaacgaagatcagccgtgtagagacacatgctacagcaacgccgttttctaaagagactccttcaaatccagtggccacagtgaaagcgggagaacgacaatggtgtgatgtgggaatttttaaaaataatacagctttggtgagccagttttatttgctgccaaaagggaagcaaagcatctcaaaggtaggaaatgcagatgtacctgactacagcttgcttaagaaacaagatcttgktccaggcacaggatacagattcagggttgctgcaatcaatggttgtgggataggtcctttcagcaaaatcagtgaatttaaaacttgtattcctggttttcctggagctccttctgcagtcagaatttcaaagaatgttgaaggtatccacctttcctgggaacctccaacctcaccttctggaaatattttggaatattcagcctacttggctatccgcacagcacagatacaagataatccaagtcaacttgtgttcatgaggatttattgtggtcttaagacatcatgtatagtaactgctgggcaacttgcaaatgcacatattgattatacatccaggcctgccattgtgttcaggatatcagcaaagaatgaaaagggatatggaccagctacacaagttcggtggcttcaaggtaacaataagaaagcacctttaaattgaattggtttttttactgaagctattgtgatgatgattatttattagtaactggttatgaagatttgtcatttaaaagagtattctctggctgtatttccagcagttatgaacttgagtttgtaaattgttcttaaaatgtatttgctgaattatagatccaaataaaagaaaagaagcaaagacaaaaaaaaaaaaaaaaaactcgag

SEQ ID NO: 424 - DNA, 1662 bp, Homo sapiens
  misc_feature (382)..(382): n equals a,t,g, or c
gcgcgttcctgcaaaggtagaggcacgggctgggggcgaccaggacggtgcccgcccacaagtacgtcttggctgtcggcagctccgtcttctatgccatgttctacggagacctggcggaagtcaaatctgaaattcacattccagacgtggagcccgcagcctttctgatcctcttaaagtacatgtacagtgatgagatcgatctggaagccgacacggtgctggccactctgtacgctgctaagaagtacatcgtcccagcattggcaaaagcctgtgtcaactttctggagacaagtttggaagccaagaacgcctgcttcctgctgtcccagagccggctgtttgaggagcccgagctgacgcagcgctgctgggnaggtcattgacgcacaggccgagatggccctacggtccgaagcttctgtgagatagaccggcagacgctggagatcattgtcactcgggaggccctcaacaccaaagaggcggtggtcttcgaggccgtcctgaactgggccgaggcggagtgcaagaggcaggggctgccaatyaccccacgaaacaagaggcatgttctggggcgagccctctatctggtccgaattccaaccatgaccctagaggagtttgccaacggsgctgcccagtcagacatcctgactctggaggagacccacagcatcttcctgtggtacacggccaccaacaagccccgcctggactttcccctgaccaagaggaagggcctcgccccgcagaggtgccaccgattccagtcttctgcctaccgcagcaaccagtggcggtaccgcgggcgctgcgacagcatccagtttgcagtggacagaagggtatttattgcagggctgggcctgtatggctccagctctgggaaggctgagtacagcgtgaagattgagctcaagcggctcggggtggttctggctcagaacttgaccaagttcatgtcagacggatccagtaacaccttcccggtctggtttgaacacccggtccaggttgaacaagacaccttctacacggccagtgccgtcctggacggcagcgaactcagctactttgggcaggaggggatgacggaagtgcagtgtggaaaggtggccttccagttccagtgctcctcggacagcaccaacgggactggggtccagggtgggcagatccctgagctcattttctatgcctgaggtgcccggggaggctgcagcaggtcagcgagtgagtggaggggaagtcaagatgctaactgcttcttgacaccatgaaaggctgctcttaactttgtctctctttgacatgtagtcagctgaagcttgactgtgtagagacattttccacacagccagaacccagggattggagtcttaggcatctctggtacagtggggtgcacgtctcaggtggaggaagatttacggctcaagacaggccccagatcccctcccagtggcacccaygccacctgctttgaggggttggatcttcctgctaccctcttggattctaagtggttccaagcttaacttgagaccttcccttcaaatctaaaattggcaaaaagtcacttaaaatagtggacttctgtaataaaggttgcctaaaataaaaaaaaaaaaaaaaaaactcgaggggggg

SEQ ID NO: 425 - DNA, 2055 bp, Homo sapiens
ggcacgagtttcccacctcggctgcacctgggcactggaggctgaagagcatgccccctagcttcggtactctgacaccttctcttgcacttgcggatgatgaactggaataacgatgaaagaaagcacatccgatctcaacattcacgtcctgccctataaccgattaattaattgatccccagctagactagtgttggagaaatcagcatgttaaaacaactgttgatgatagctgttggagtaaagttgcagtggaagctatggctgcaaaatcgttaaaatcttcaaggtgaactggcacaaaggttaatctcaagatgccgctagtgaaaagaaacatcgatcctaggcacttgtgccacacagcactgcctagaggcattaagaatgaactggaatgtgtaaccaatatttccttggcaaatataattagacaactaagtagcctaagtaaatatgctgaagatatatttggagaattattcaatgaagcacatagtttttccttcagagtcaactcattgcaagaacgtgtggaccgtttatctgttagtgttacacagcttgatccaaaggaagaagaattgtctttgcaagatataacaatgaggaaagctttccgaagttctacaattcaagaccagcagcttttcgatcgcaagactttgcctattccattacaggagacgtacgatgtttgtgaacagcctccacctctcaatatactcactccttatagagatgatggtaaagaaggtctgaagttttataccaatccttcgtatttctttgatctatggaaagaaaaaatgttgcaagatacagaggataagaggaaggaaaagaggaagcagaagcagaaaaatctagatcgtcctcatgaaccagaaaaagtgccaagagcacctcatgacaggcggcgagaatggcagaagctggcccaaggtccagagctggctgaagatgatgctaatctcttacataagcatattgaagttgctaatggcccagcctctcattttgaaacaagacctcagacatacgtggatcatatggatggatcttactcactttctgccttgccatttagtcagatgaggtgagcttctgactagagctgaggaaagggtattagtcagaccacatgaaccacctccacctccaccaatgcatggagcaggagatgcaaaaccgatacccacctgtatcagttctgctacaggtttgatagaaaatcgccctcagtcaccagctacaggcagaacacctgtgtttgtgagccccactcccccacctcctccaccacctcttccatctgccttgtcaacttcctcattaagagcttcaatgacttcaactcctccccctccagtacctcccccacctccacctccagccactgctttgcaagctccagcagtaccaccacctccagctcctcttcagattgcccctggagttcttcacccagctcctcctccaattgcacctcctctagtacagccctctccaccagtagctagagctgccccagtatgtgagactgtaccagttcatccactcccacaaggtgaagttcaggggctgcctccacccccaccaccgcctcctctgcctccacctggcattcgaccatcatcacctgtcacagttacagctcttgctcatcctccctctgggctacatccaactccatctactgccccaggtccccatgttccattaatgcctccatctcctccatcacaagttatacctgcttctgagccaaagcgccatccatcaaccctacctgtaatcagtgatgccaggagtgtgctactggaagcaatacgaaaaggtattcagctacgcaaagtagaagagcagcgtgaacaggaagctaagcatgaacgcattgaaaacgatgttgccaccatcctgtctcgccgtattgctgttgaatatagtgattcggaagatgattcagaatttgatgaagtagattggttggagtaagaaaaatgcattgataaatattacaaaactgaaaaaaaaaaaaaaaaaaaaaaa

SEQ ID NO: 426 - DNA, 829 bp, Homo sapiens
  misc_feature (8)..(8): n equals a,t,g, or c
cggggctncaggaattcggcacgaggcaaacttgagtttcccatgctctgtggctgagcaagtcacttcaccattctcaggatggaagtggggatggaggtggcatcggcctcatttgaaccacatggactaagaggggctatgggagtattccccaaaggaagactgaggggcgttactagaaaatgggagaatggaagcagagtgggcaaaaccaacagatgttccctatagtaaataaaaaatttggacaattattagtgagcaagtacttataacatatatggcacatgggattgtgactcaccagtgtgttagcacaatatggtcaaaaacctctgatccaattcaacctactcatcttaacgattttatcagcatttaataagtttgttttggccatcatgtgttatagttttgtttgtggttttgacacctcattagaggtttcatcagtgtaaggagccaacctaagagctcttctcacaagtttcccaagagagaaattgcccctccaaatgtgaggagtctcactttatatagatagcatccacacttcttgcagtggaaaacaaaccttataaaatgtaatacgtttggtttcctaactttttcatgaccctggggtggtagaaggaagtgcaagttttatcacttggatttagagacaaggaaattgaaatggagagagaattgggctcacatgcaggcagcatgtctagctgcctccatcgtgtgatctgaggcaccccatgaggcctatgattactgtaaacctctaaaataaataaaaaataaaacaataaaaaaaaaaaaaaaaaaactcgag

SEQ ID NO: 427 - DNA, 1247 bp, Homo sapiens
aattcggcacgagagtccacacagcaatctcctttcctcttcagtgagaacacctctcctttgatcaacattatttattcggcttagtttaaaattcctcttgaggagaagtttctgggactaaacatttgaaaatatttgaaataaaaaaattacctgtttttaagtgacaaaaattattaatttataagttacttaggaatgttctcaggtgcaagtaacagatgacacaaacacagcagattgaatcggcgatggtacaattttctcatgtaacataaatgcagcagctgcatttgttgggtggctcagtggccttttgggcttttccttcatggttgcaagatggcactactccaactcaagcatcatgtttgtattcaagacagaaggaaagggagacggtttgtatcagtcactctgacccttttatcagaattgcataagtgctcttagaagcagtctgcttctccctaagatctttgctcagatgttattgggcagagcttttttgtgtgtgtagtgtctaatggttgcaagggaggttgggaaaaatgattcttttttttctggcttttatagtggaagcaggcaaaagattagttgggtgtagttgttgggttagccggtcatcatgctctgcccctaagtgctcagaatactgaagactaaagatgcaatgacaaacaagatagtccttattgtttttgtttgtttgtttgttttttgtttttagatacagctataattttattacaaaactgttcttttggcattagttagttacagtgatagcaagataatgtgagtgtgcagactggctctgatggaaccactgtattccctgcttactgaaccaaacttcagctacctcatatccattacatacaagtgacctgcagttattactgctacaaatcttgacgcgtgtaccgctgagggaggagctgatgctaagggatttgattacatgttgataagactacaaaagttcgtttatgggactttttcttcctcttcccatgcaatgactttgctttagaacaatcacatggcttagagctagtctgagtagcagcagcacccaaggagcgtcagttcttgttaaaaagcaatacctgtgtgatgcatttttacgccacaggcaaagggaaggatcaccctcattttaaactcctgcagagtcccttaataaaatatcaaagcattccaaaaaaaaaaaaaaaaaaaaactcgagggggggccc

SEQ ID NO: 428 - DNA, 1587 bp, Homo sapiens
aattcggcacgaggtcgactggaatacttgggagatgagatgacaggtctggtcatgaccaagacaaaaactcagcgtggcctcatggagcccatcactcacatcaggaagccccactccatccgggtggagacaggattaccagcccagagggacgcttcataccgctacacctgggatcggagtctgtttctgatctaccgacgcaaggagctgcagagaatcatggaagagctggatttcagccagcaggatattgatggcctggaggtggtgggcaaagggtggcccttctcggctgttactgtggaagactacacagtgtttgaaagaagtcagggaagctcctctgaagacacaacatacttaggcacattggccagttcctctgatgtctccatgcctattctcggcccttctctgctgttctgtgggaagccagcttgctggatcagaggcagtaatccacaggacaagaggcaggttgggattgctgctcacttgacctttgaaaccctagaaggcgagaaaacctcctcagaactgactgtggtcaataatggcaccgtggccatttggtatgactggcgacggcagcaccagccggacactttccaagaccttaagaaaaacaggatgcagcgattttactttgacaaccgggaaggtgtgattctgcctggagaaattaaaacatttaccttcttcttcaagtctttgactgctggggtcttcagggaattttgggagtttcgaacccatcctactctattaggaggtgctatactgcaggtcaatctccacgcggtctccctgacccaggacgtttttgaggatgagaggaaagtactggagagcaagctgactgcccatgaggcagtcaccgtcgttcgcgaagtgctgcaggagctgctgatgggggtcttgaccccggagcgcacaccatcacctgtggatgcctatctcaccgaggaagacttgttccggcacagaaatcctccgctgcattatggagcaccaagtggtgcaaagccctgcaccaactgtggcgccagtacatgaccctgcccgccaaggctgaggaggccaggccaggggacaaggagcacgtcagccccatagccacagagaaggcctctgtgaatgctgagctgttaccacgctttaggagccccatctccgaaactcaagtgccccggcctgagaacgaggccctcagggaatccgggtcccagaaggccagagtggggaccaagagtcctcagtggaagagcatcatggaggagatcctggtggaggaaagcccagatgtggacagcaccaagagcccctgggagccggatggccttcccctgctggagtggaacctctgcttggaggacttcagaaaggtccgtgggctgctggacaccctggtgaccgacctgatggtcctggctgatgagctcagccccataaagaatgtcgaggaggctttgcgcctctgcaggtgactctcgggcccaagcaaccttctggaaaacgggttaataaataaatcaataaagaaccttcaagtttctactaaaaaaaaaaaaaaaaaaaaac

SEQ ID NO: 429 - DNA, 2179 bp, Homo sapiens
ggaattcggcacgaggatctgtcttcctcctatttgcttgagcagacccgccctgagtctaattgacacaccaggtgggtttatgggcttctccttcctcccaagcatcccacagccacgttgcctattgtctttgtggcaagtcttgcccggcagcctagcttcagagcaatgtaagtggttgctgttatacccttctacccaccatgtgctggaaagaggagcatcatgactaaaaggcatgactcatgttctaatccatggcactactgatcctacttttctgcattttaaagtacaaacagctggatattgctgaagatggctcagggggtcaaggacaaatttcacaaatgtgacctcattctccaggctgcctgtttatcctggaggttgatcttggacttggggaccatttaaggttgcctatcttcaaagtgctcagcttggctttttaattctatactcctaaatctttgacagctgtgcatcaacaagctttcaaggtaactgaagcctagggcagctttctgccctctgttactggtgaatgtttttgcctgttggaaggacgttgcagctacaggcagactcccaccatccaccaacggccttattgtcaatccatagtcgtgtgctgactgcaaagtggcctgagttttttgcatatcttgtgagatcactatgggaacgcagtcattataatacagcagttcctgtcttgaggacttttgatagttttatttcttacagtttcatttcctattgatacaaaagagactcttggtaaccaaaaataaatgtaaccagaaatgtcggattctttgtttcatatatgaacatgattttgtaatgtaaattgaataagcccagatctattatgcaactatatactctcgtaacaagtgagtcacagaagcctccgtcaacactgacatattgatgaccttaagaagttagtgattacctatgatgtacaacaaacaaggctggtagctgccagcagaaactaggcataactacttctagtaagtactactactagttctaaaatttaaattaaatcagctcacaccttattttgtgctgctaccactaaaatccaagccaccatgacattatcactaacctggactactaactcatctttccgctttcactctgaccccctccattcattttccctggtgaagctagtgtcatcttataagtaaatcagatcatgtcattcatctcacaactcatctgctttccatctcaccgcaggatagaatccaaactcatcaccatggtccgtgagaccccctgtgatctggcctgcctgactctccgatctcatggcattaccactcccttccctcttgtgatgatctgtccgcaacgactttgctgtttctcatgcctggcccactatgtgcagacatgcaggttgtacaatgcataactccaagagaggcattcagtaggctgcagggtgaatgatgcccttggaagtatgtagtgtggtgaccctggtcacacgcacagctctttcctaccacaaagccttggcacttgctggcctttctgcctggacatccatctgaagattttttgcacagctggctccttcttgtcattcccttgacaaatattccaccaaacactactccataccagggaggctccataccaggcaggaccagctatatactttgcaggtcccagtgcaaaatgaaaaccagggccccttgttcaaaaagtattaagaatttcaagacggtgacagcagaacattaaactaagcatggggcccttctcagtgcggggccctgtgggacaacataggtcacacctccatcaagatggtaagggtttcacatgtattcatgaactcaattgtattttaaagtttagtagaaattgcacaattaataactggttagtgtatatttacctctgcctttggaagttaaagttttttttttttgaactaaaaattccttaagtgtaatttcatccttgaaaagtcaaagatttgttgttttggcatattgtcaagtttttaaaatttaaaatacagttagttcaaaatatattcacagctttcattcatgagacatttataaatattgggttataaagttccacatttagtatttaactcaaaaaaaaaaaaaaaaaactcgagggggggccc

SEQ ID NO: 430 - DNA, 2167 bp, Homo sapiens
aattcggcacagggatctgtcttcctcctatttgcttgagcagacccgccctgagtctaattgacacaccaggtgggtttatgggcttctccttcctcccaagcatcccacagccacgttgcctattgtctttgtggcaagtcttgcccggcagcctagcttcagagcaatgtaagtggttgctgttatacccttctacccaccatgtgctggaaagaggagcatcatgactaaaaggcatgactcatgttctaatccatggcactactgatcctacttttctgcattttaaagtacaaacagctggatattgctgaagatggctcagggggtcaaggacaaatttcacaaatgtgacctcattctccaggctgcctgtttatcctggaggttgatcttggacttgggaccatttaaggttgcctatcttcaaagtgctcagcttggctttttaattctatactcctaaatctttgacagctgtgcatcaacaagctttcaaggtaactgaagcctagggcagctttctgccctctgttactggtgaatgtttttgcctgttggaaggacgttgcagctacaggcagactcccaccatccaccaacggccttattgtcaatccatagtcgtgtgctgactgcaaagtggcctgagttttttgcatatcttgtgagatcactatgggaacgcagtcattataatacagcagttcctgtcttgaggacttttgatagttttatttcttacagtttcatttcctattgatacaaaagagactcttggtaaccaaaaataaatgtaaccagaaatgtcggattctttgkttcatatatgaacatgattttgtaatgtaaattgaataagcccagatctattatgcaactatatactctcgtaacaagtgagtcacagaagcctccgtcaacactgacatattgatgaccttaagaagttagtgattacctatgatgtacaacaaacaaggctggwagctgccagcagaaactaggcataactacttctagtaagtactactactagttctaaaatttaaattaaatcagctcacaccttattttgtgctgctaccactaaaatccaagccaccatgacattatcactaacctggactactaactcatctttccgctttcactctgaccccctccattcattttccctggtgaagctagtgtcatcttataagtaaatcagatcatgtcattcatctcacaactcatctgctttccatctcaccgcaggatagaatccaaactcatcaccatggtccgtgagaccccctgtgatctggcctgcctgactctccgatctcatggcattaccactcccttccctcttgtgatgatctgtccgcaacgactttgctgtttctcatgcctggcccactatgtgcagacatgcaggttgtacaatgcataactccaagagaggcattcagtaggctgcagggtgaatgatgcccttggaagtatgtagtgtggtgaccctggtcacacgcacagctctttcctaccacaaagccttggcacttgctggcctttctgcctggacatccatctgaagattttttgcacagctggctccttcttgtcattcccttgacaaatattccaccaaacactactccataccagggaggctccataccaggcaggaccagctatatactttgcaggtcccagtgcaaaatgaaarccagggscccttgttcaaaaagtattaagaatttcaagacggtgacagcagaacattaaactaagcatggggcccttctcagtgcggggccctgtgggacaacataggtcacacctccatcaagatggtaagggtttcacatgtattcatgaactcaattgtattttaaagtttagtagaaattgcacaattaataactggttagtgtatatttacctctgcctttggaagttaaagttttttttttttgaactaaaaattccttaagtgtaatttcatccttgaaaagtcaaagatttgttgttttggcatattgtcaagtttttaaaatttaaaatacagttagttcaaaatatattcacagctttcattcatgagacatttataaatattgggttataaagttccacatttagtatttaactcaaaaaaaaaaaaaaaaaactcgag

SEQ ID NO: 431 - DNA, 1015 bp, Homo sapiens
  misc_feature (995)..(995): n equals a,t,g, or c
acgaaagcggccaagtagagctccgtcctgacgcgccgcctcccgtgggctccggccggctaagccgcggcggacaactatgctgaaagccaagatcctcttcgtggggccttgcgagagtggaaaaactgttttggccaactttctgacagaatcttctgacatcactgaatacagcccaacccaaggagtgaggatcctagaatttgagaacccgcatgttaccagcaacaacaaaggcacgggctgtgaattcgagctatgggactgtggtggcgatgctaagtttgagtcctgctggccggccctgatgaaggatgctcatggagtggtgatcgtcttcaatgctgacatcccaagccaccggaaggaaatggagatgtggtattcctgctttgtccaacagccgtccttacaggacacacagtgtatgctaattgcacaccacaaaccaggctctggagatgataaaggaagcctgtctttgtcgccacccttgaacaagctgaagctggtgcactcaaacctggaagatgaccctgaggagatccggatggaattcataaagtatttaaaaagcataatcaactccatgtctgagagcagagacagggaggagatgtcaattatgacctagccagccttcacctgggactgccacatccccagtgaaatcagcatgtttctcggtgcagatctgaaatcacatccagctcctgatgttttcttctccctctgactgcagaggaagtgttcctacctgcaggaaggcacctgtcacrcagggcgttcactcagaccatctgtgctctgccctgagttcagttgagaaaatcctattatcaaatttggatttcctggccccagaacttcccaaagacctgtaaaatggagggatttaccacctcacatatgtccagttaaacagtttgtggacttgtaaccgtcgcagcccaatgatacaacagtagtttaatcacgtgtattgggcttgnaatgtgatttccatcccttg

SEQ ID NO: 432 - DNA, 1273 bp, Homo sapiens
acgaaagcggccaagtagagctccgtcctgacgcgccgcctcccgtgggctccggccggctaagccgcggcggacaactatgctgaaagccaagatcctcttcgtggggccttgcgagagtggaaaaactgttttggccaactttctgacagaatcttctgacatcactgaatacagcccaacccaaggagtgaggatcctagaatttgagaacccgcatgttaccagcaacaacaaaggcacgggctgtgaattcgagctatgggactgtggtggcgatgctaagtttgagtcctgctggccggccctgatgaaggatgctcatggagtggtgatcgtcttcaatgctgacatcccaagccaccggaaggaaatggagatgtggtattcctgctttgtccaacagccgtccttacaggacacacagtgtatgctaattgcacaccacaaaccaggctctggagatgataaaggaagcctgtctttgtcgccacccttgaacaagctgaagctggtgcactcaaacctggaagatgaccctgaggagatccggatggaattcataaagtatttaaaaagcataatcaactccatgtctgagagcagagacagggaggagatgtcaattatgacctagccagccttcacctgggactgccacatccccagtgaaatcagcatgtttctcggtgcagatctgaaatcacatccagctcctgatgttttcttctccctctgactgcagaggaagtgttcctacctgcaggaaggcacctgtcacacagggcgttcactcagaccatctgtgctctgccctgagttcagttgagaaaatcctattatcaaatttggatttcctggccccagaacttcccaaagacctgtaaaatggagggatttaccacctcacatatgtccagttaaacagtttgtggacttgtaaccgtcgcagcccaatgatacaacagtagtttaatcacgtgtattggcttgaatgtgattttcattccttgattcacccaacaaataccgactggctgagcacctgctgtgtgtgcactgctgttctagctgctgaccatagacagcataaatgaaaaagacagaaattcccaccttcgtggaactctccattttcctaaatgttaggttggtgcaaaactaatcgtggtttttgccatttttaatttttaatggcaaaagccactattacttttgcaccaacctaataggccgattcagaaacttgagtgcaatgtcttggatatgcaaa

SEQ ID NO: 433 - DNA, 1282 bp, Homo sapiens
  misc_feature (907)..(907): n equals a,t,g, or c
ggcacgagccttacccctctgctggcaagaggggacctgattcatcctcacgctaaacactcattctacccaactgattgagacagaacagaagataaactgaaacttctctgccttcccgctgcaagagtgaatgagcgatccctctcaactgactcaaaatgtttgcctcacccaggagatggagctctcgaaggccttctctggccagcggacactcctatctgccatcctcagcatgctatcactcagcttctccacaacatccctgctcagcaactactggtttgtgggcacacagaaggtgcccaagcccctgtgcgagaaaggtctggcagccaagtgctttgacatgccagtgtccctggatggagataccaacacatccacccaggaggtggtacaatacaactgggagactggggatgaccggttctccttccggagcttccggagtggcatgtggctatcctgtgaggaaactgtggaagaaccaggggagaggtgccgaagtttcattgaacttacaccaccagccaagagagaaaatcctatggttatccctgggaacgcagatcacctacatcggacttcaattcatcagcttcctcctgctactaacagacttgctactcactgggaaccctgcctgtgggctcaaactgagcgcctttgctgctgtttcctctgtcctgtcaggtctcctggggatgtggcccacatgatgtattcacaagtcttccaagcgactgtcaayttgggtccagaagactggagaccacatgtttggaattatggctgggccttctacatggcytgctctccttcamctgctgcatggcgtcggctgtcaccamcttcaacamgtacaccaggatggtgctggagttcaagtgcaagcatagtnaagagcttcaaggaaaacccgaactgcctaccacatcaccatcagtgtttccctcggcggctgtcaagtgcagcccccaccgtgggtcctttgaccagctaccaccagtatcataatcagcccatccactctgtctctgagggagtcgacttctactccgagctgcggaacaagggatttcaaagaggggccagccaggagctgaaagaagcagttaggtcatctgtagaggaagagcagtgttaggagttaagcgggtttggggagtaggcttgagccctaccttacacgtctgctgattatcaacatgtgcttaagccaaaaaaaaaaaaaaaaaaaaaaaaaaaaaactcgagggggggcccggtacccaat

SEQ ID NO: 434 - DNA, 806 bp, Homo sapiens
  misc_feature (25)..(25): n equals a,t,g, or c
  misc_feature (29)..(29): n equals a,t,g, or c
  misc_feature (37)..(37): n equals a,t,g, or c
  misc_feature (44)..(44): n equals a,t,g, or c
  misc_feature (143)..(143): n equals a,t,g, or c
ttttgacccggattaacaaattttnaccnccaggaancaggctnttgaccaatgatttaccgccaagctcgaaatttaccccttcactaaggggaacaaaagctggagttccaccgcgttggcggccgctctagaactagtgnatcccccgggctgcaggaattcggcacgagcggcacgagcgcaaagccatcgtggacaagtttggcggggcagcttccggccccacggccttgttccgcaacactaaggcagccggggcagccattggtggtgtcaagaacatgctcttggagtggtgccgagccatgacaaaaaaatacgagcatgtggacatccagaacttctcctccagctggagcagtggtatggccttctgtgccctcatccacaagttcttccctgacgcctttgactacgcagagctggatcccgcaaagcgccggcacaacttcaccctggccttctccacagcagagaaactggctgactgtgctcagctgctggacgtggatgacatggtgcggttggctgtgcccgactccaagtgcgtctacacatacatccaggaactgtaccgcagccttgtgcagaaaggactggtgaagaccaagaagaagtgaggaggtgactggctctgtgggcagagatgggcagggtgcccagctcagcagccacggcccgggggttcccttctgctccatggaggcaccagagccaggggcttaggcaagggtgtgtggcgttggttttaactgcattaaaagtacttttgtaaaaaaaaaaaaaaaaaaaaaaaactcgag

SEQ ID NO: 435 - DNA, 981 bp, Homo sapiens
ggcacgagctcgtgccggtgctctccagacctcctctctaaactgcttcattgacctaagtcactctcttcaatcccacctttgttacgttgaaatccctcatttattttcttctcaaaatgcccattatccaaatgcagaacctctgcatctccaagccagttatgctgaatttgtcaaacttagacacccttgacaactgcactcctactgtaggctcctgtgcatactgtcgtcttctgtgggggatggagaggttagtgtgatgaggtggtgtctgcccaggaggtttctttcaaacatcatggcctcccatccaatcaacatcatcaaattacatgtgtaatcaaggctctgtgccatgggggaaatgaatcatttagctaggccaggatctagtgaaagccacagagtttaaaaccatgaaagaagttgaaggcagcattcctcagctctgtgacttgtgaccctatttgaagtttcaggatttgggtgtcacaaaggattgtccctaatccttggccctggggtcttccgagtgagctggtttaatactctgagaatgagcagggagatccagagaatgaatccctgaccgcatcacctaaactgtcttccaaacatgagacaaagctgactgttcacactgattgcccagcacataccgtcttgccagtttcttcttttctcccagtctcctgttcatccattctgttctcccttggggtgggaatctatgatggaggttactggggaaacagctcagcagatttttggagaccaaaccaaaggtctcactaggaaatttatctgttttaaaacattgcttccttcctggctctgctaaattgaatgctcattgtttgttgttgttgttttttaattctaatgttcaaaatcctgcgtgctgtatgaatctagaaagccttaatttactaccaagaaataaagcaatatgttcgtaaaaaaaaaaaaaaaaaa

SEQ ID NO: 436 - DNA, 1402 bp, Homo sapiens
ggggaaggccccggacccgcaggacccccaggacgcggagtccgactctgccaccggatcgcagaggcagtccgtcatccagcagcctgccccggacaggggcacggcgaaactgggaaccaagaggccgcaccccgaggatggggacgggcagagcctcgagggcgtctctagctccggcgacagcgcagggctggaggccggcagggccctggggctgacgagccgggcttgtcccgcgggaagccctatgcctgcggcgagtgcggggaggccttcgcgtggctctcgcacctgatggagcaccacagcagccatggcggccggaagcgctacgcctgtcagggctgctggaaraccttscacttcagcctggccctagccgagcaccagaagacccacgagaaggagaaaagctacgcgctggggggcgcccggggcccccaaccgtccacccgcgaatcccaggcgggggctarggcgggcggtcccccaragarcgtggagggcgaggctccccccgcacccccagaggcgcagaggtgagccgctgtgctgtcccgttccggaggggccgctttgccggccgtgaatcccagacgaggcattgggcctttccacgcccctgggtggcggcttcctgtggtgtttgtggacgtcctctgcctgtgccctgaatccgctcctgaggctaagcgctcccaacgagaagggtccacgggaagccctcacctctgtaaacacaccctgggccagcgctcgcatccgaggggagccgccggatgtggaagaagactcggctttcctgcagccatttagtgccgccccatgctaggttatttgacattgtgcagtgtagagttgccttaaagtgcgtgatctgccagtgctttcttcaagtcacccttgccccgattcctcctgtttgcgctccccagggttgctcaagtggaaattttgtcagctgtttagccttttcgtacttggcgtgatgtcaacttcacttctaatctgcaaaagcagaagctgtttcctagtttacctcgcgtgtgtttacctatatggagtagctcgcagagatcacagaaatgcttgcagcctaaggcagggttttcagaccgtgggtcccagcccatttagtaaaatgggaaatcaattagcaagtggtcaccagcattacacagcaatgaagcagaataaagtaggccagaatgcatcatgtagtaaaggcaaatactgttttgtgaaacttttcacccatacatctaaatgtgagaactggttgcaatgtaagacatttcttgctgggaagttgtgagcaaaataagttgaaaacactaataaagatctgtctgtctgagcaaaggagactaaactccttgggctacataaaaaaaaaaaa

SEQ ID NO: 437 - DNA, 1523 bp, Homo sapiens
ggcacgaggttgtcttccatggcctgtttctcctgctgtctgggtgagtgagcctgcaacgcaatgcccatgagagtaaatgcctcctgacctaccctgctcagcactgttctagtgtcttggccttgaaagaaaagcctgacttcctgctgacacatgtggtaggggcatggcagctatgaggcacctcctacgtctgttttctggctgtggtgacttgggatttttaaccttatatatctttttcctttactcaaaacaaaacaatttttagcacactgaaaaaaaaaaaaagccaaatgttttgtgcctttctaaggcagcactgtatcccaggctgcattttaggacttaatatggaaataccagagtctgagctcctctaccttgagtttcattagtccttagtgtctaggagacaggaaagaatgctctctgtgactggagaggtgacatgcaggtgcagtgtgtctggagtccctttcccctgctgtgagacttcagtggaggagagaagcattgtaccctgggatcatttggttggttccaatcacaagcttagttatcaggttgcatgccttgtctcctgcaaaagacagaatgtttcacaattcccaggtaaactctggaccattccaagtgtcctagccttctgatgacattaattacctagttgtgtcgaggagtataggatggactctcctgagaaggggaggttggtggctttgtcttttctttttgctggatcctgaactggtctagacctcctgcccccaccccccagcccccatcagatgtggctggcctttcatttgaaggcttcagacttaaagcattaagcagctagtgccctctgcagggcctggtttccccagggaagggcagcaaggaacatgggaccagaagcctgtcctcagtaatgtgactatagtgagctttagcaaaagtttttctatataatgacatcttacttatcttttaccctttcctcagttttcccctgcctttaactaataaagaattgggagacagaaattttaaagtcctccttattcaagattttgaaattcttagcctgggagtgctggagagaacctgatgctttctccagaatgaagagtcccaatttgtatatcagtgttaagaagaaaacaaaacaaacacataggtgagattttcgtggactattttaaaaatgtgtcattaatataaaaaatttatattagcagtatttaatcattctcacctgtaaagaataagaaaaacagaaggtaaatattcttacagagaatagcagagctttaagattcattttcattttaagtccattttattttgccagtgtattaatgtttagaagtctgttttactaatgttatttattaattttttttcatttccatacacagttagttaactaaagagctttttcaagcacccatgtctgtaaaaaaatatttttaaataaagtttcttttgttgtagcagaaaaaaaaaaaaaaaaaaaaaaaaaaaaaaaaaaa

SEQ ID NO: 438 - DNA, 1324 bp, Homo sapiens
ggcagagtgcagctggaggccaattatcgtaaacgaattagtgcaggaaccagaataccaaataccatgtgttctcacttaccttacccctaaaagttagatgcccttcctccatactcccacagtaccctctatatttttacgagtcattatattcctctttactttgtgagccccttaaaagcagagaccgggtctgttttactcactggtatgtcactacagtgccaggctcattgtttgcattcaggtggttgttgaatgaacaaactcaaatgtaactgcctatttacttgtctgtctttcctcaacaggctgtatgttccttggtggatggatctgtggtttattaagctttgtttcttttagcatttagcactcagcatgaagacctagcacacagaagtttattgaataaataaatttgtcaggattaataattaatctttaaaatacagtatatagcattgaagaatatatagaaagtattctcaagatacagagagacatgggttgytcaggwttattcctykgygkttcacttataggaaagatctcatactacagactacaaatgccaaatgacctactgtgctcataccacccttaacctagaaataaaatagaaacaattcctaaagaaacagtcttaaaaataaccagctaaaattttatcaacaacaacaaaaaagtagttggggtttctgctcattaaattagtttgtatrggtaagcaccacctaagtttcttgattcatggcatgtgttcttaaaccaatttactatccactaaaaataaatggtgatcattatataaaaagcagttgtatttsttgacactagcaatgaaccatctgaaaatgaaattaagaacacaattscacttacagtagcatcaaaaagaataaaatatttagaaataaattaaaccaaagaagtgtaagacatgtcactgaaaactaaaaaacacagttaaaagaatggaaagatagcctatgttcatggattggaagactgaatattgctcagatggcagtactccccaaattgatctacagattcaatgcaattcctatcaaaattccatcttcctctttgkagaaatggacaactggtcctaaaattcatatggaaacttaagggaccccaaataatgaacaaatgttggaaaagaagaacaaagttcatgggttcacactttgacttcaaaatttactacataatcaagacagtgtggtatggtctgtcataggacagacatatagaccagtggaataaaattgagtccagaaataaaaaaaaaaaaaaaaaaactcgagggggg

SEQ ID NO: 439 - DNA, 2116 bp, Homo sapiens
ggcacgagcctgattctacactgggaagttaggggtagaagcacacaggagcccagcacttacagccagtggccctgggggtctcctccagctccacctcatgacaccccgtgctgctgcgtgactgctcctggtgccaaggccaccgctgccatgagtctgaatggctaatgctgagattagcagggcctcccttctactggcctgtcctcctggctctcctcccttttgcctcttctggatttcaggtcagtttgaaagtgggtggctgtctcagctccctgtgagcttccatttccagtctacgctacggaagtcagagagctcagacacaaatccctcccaatggcaaaggtgctatagctgcaacttcctctgcagtgacccggtgggcagtaatctgtattagcagaattcctctcatgccagcaccagctgggggaggagagggtagtgcctgggcattctgctttgggaagaaaaaggacaatcaaaaccaagtgaaatccaaccaccatggtgtacccaacaggtggagtgggctgcaaagtccttaaacatctcaacaggagaagtagctccattttgcgggcaattattttctgcttgaaattagctgttctcaccaagaatggactgcatactaaatcaattgctccactgaggctgccataagcttcatgaagcaaagaatgattcattcttctaaagctgtgatttcctatttgctcacaagccattgcaggggaaatcctcatctttcccactcactgctacactcactgtgatgtgtttatagaccttcggggaccacacctcctccagctgtctgccttactcgaaaattagacccagcttgtccctgacttctagtagccagaaagtcttccacaagatccagccgcatgatacggagtacacacataaatgtgaaaacaaacccctccatcctttcccactgtaaatcaacagcacatgccctctgtgtctgacaattcctctcaaagacagtggctccagcagaggaaattaaggctggtgcaggtgccccagaagctgagtcatccgggatgactggtggccctgaagtcccgcccacagaaggacggccatgggagcctggcacactgccccttggtggcacaaatcctgagcaagccatgccctaaccttaaacaaggacctaggactgttttctctcccacagcctctgagaacttgccctttctctcccaatgtgatttgtaaacaattctcctacccagcctcaagtaaatatcagagttaagctggtttcatacaccatgttgacagtaaacatcttagaggacactttcaatccacccacactgcagctcagtccatctgcacaaagagaagaccccccccccacccccatcgcggtccaacttgggggtacatagatggaaaggcagcagtagtcagcaggtcaactctgtctgaaagaggtccatggcaatgtaaataccaatctactggcaaccacaaagcacccacatagacaggcactgcaaggaatggagggtttgaagaagcaggtcttgatggagttttaaagacacaaaacctccttcctttcagggtcaagggtttgttgattccgctactctgatgtggaattcaaagagatggataattatcatcctttctaagtgctgttttccataatcaggtccccgtgcttatccacatccacactccccttctctcacaaagtcctacttgtctcctgggagcccctgcacgcctcccctctctgaatctctgcgaattttcacttataaaacagtaacaactctctcaaggtcatcaaaaatggcagaacagtgttcccccatctctgaaaaatatgaatgtgagaaacggtttcatactgctgagagaatttataagacttaagcagaagaatcttcagatcccccatcccccagagatttttgcaaatgagccagcccagccacaaaaatgtatgcaaacttgaagataaaatggaattaaaatatgttttaaagagaagcaggctttggaaaaatgaggattttaataaaaacagaaattacgacaatatttctaccacaaaaaaaaaaaaaaaaaa

SEQ ID NO: 440 - DNA, 1768 bp, Homo sapiens
cgcggtcccaacccttccccatggccgaccctgaggagttgcaggtttcttcgccgcccccgccgcctccctcttctccctcctcttcagacgcctctgcagcatcttccccgggcggcccagtgagtttgggctggccagttccgagcaggagcagcggcccaacggtggaccagctggaggaagtggagctgcagatcggagacgcagccttttcattaaccaaacttcttgaagccacatctgcagtatcagctcaagtggaagaacttgccttcaaatgtacagaaaatgcacgtttccttaaaacgtggcgggacctcttgaaagaaggctatgattctttgaaacctgatgactgatttggcatacttcgttgtttaataatgactgcaataattcatacttcttatgtcatattttgtacatgtaccacacatataggatgacctctgtccagcagttctgtatatactcagaatgaaatttttcttggttttcttggtttttgtgaaagcagaataccgatgctatttttgttgcggaccagtacttgtttgtccttaaatactttatgcctctgaactttcatagaatcctttatgaaagttaacttcatcaatagacggttaatattaatagagccacagtgctaccagtagcaaactaggtagaccattatttgttttgcaacaagatgctaagcatggcagactttgaagttgcgtttcatcttaaggaccaagggaggtaactttaaggttgccagtggtggatccagctccgttaggctaagttgtctacagctaatgattgtgtctttattctatatccccagcacctaaaacagggtcacacaacattcactaaatgtttgttgaataaaagagttaacaaacataattgaaagctttttttcttcctatatttagcatgaagactgtcattgtttctctaggaaatgtatgaatctgaacttttttgacttgaagaaaaacattctttttttacagagatttggactttgatgataggttttaaaaatatatgataaatattttttgtacttgtttgatttttttttaaagactttacttcagaaagggaaagactgtttagaaagaatgcatattttttccctatttatttctgtggttactgcttttgcagtttaacagtgtttgtatttgatatttgtatatgtttgattgctatctttaaagtgccttatcagatttatggctctgtgctattactttttgagctttgcaagttgtgtacataataattctaaagaagttactttgtttgcaatgcatcaaatttaaatgatgtgattttttttgtattatttgatcttagtgacagtgttctattttgcatcctgtatcttatgttgcttttggtgttttgtgttgtgtgtcaacgattaagccaactaattctctaccatatataacttctggacatttttgatacaacatcttaattctttgtagatatggagataggtacagaactatattctaatgccccacaatggggctatgagaggggacagatggatgggcaaagaatagttttgtttaacatattaggtcatagttcttgattagtttttttagttaaagataaacacatagggtgtgatttctataccaaagatatgcttatttcagtattagaaaaatattcttcttacatctcctgaaaattgcaatttttaaaatgtgtaaaaataaattattattaaaagcaaaaaaaaaaa

SEQ ID NO: 441 - DNA, 1591 bp, Homo sapiens
ggcacgaggcggaacggcgtttgcaatggctgctactgtgaacttggaacttgatcccatttttttgaaagcactaggtttcttgcattcaaagagtaaagattctgctgaaaagctaaaagcactgcttgatgaatctttggctcggggcattgattccagttaccgtccatctcaaaaggatgtggagccacccaaaatttcaagcacaaaaaacatttccattaagcaagagcccaaaatatcatccagtcttccttctggtaataataatggcaaggtcctcacaactgaaaaggtaaagaaggaagctgaaaagagacctgctgataaaatgaaatcagacatcactgaaggagttgatattccaaagaaacctagattggagaaaccagaaacacagtcatctcccattactgtccaaagtagcaaggatttacctatggctgacctttccagttttgaggagaccagtgctgatgattttgccatggagatgggattggcctgcgttgtttgtaggcaaatgatggtggcatctggcaatcaattagtagaatgtcaggagtgccataatctctaccaccgagattgtcataaaccccaggtgacagacaaggaagcgaatgaccctcgcctggtgtggtattgtgcccgatgtaccagacaaatgaaaagaatggctcaaaaaactcagaaaccaccgcagaaaccagcccctgcagttgtttctgtaactccagctgtcaaagatccattggttaagaaaccagaaactaaactgaaacaagagacaacttttctagcgtttaagagaacagaagtcaagacatccacagttatttcaggaaattcttctagtgccagcgtttcctcgtcagtaactagtggcttaactggatgggcagcttttgcagccaaaacttcctctgctggtccttcaacagcaaaattgagttcaacaacacaaaacaatactgggaaacctgctacttcgtcagctaaccagaaacctgtgggtttgactggtctggcaacatcatccaaaggtggaataggttccaaaataggttccaataacagcactacgcccactgtacctttaaaaccacctccacctctaaccttgggtaaaactggccttagtcgctcagttagttgtgacaatgtcagcaaagtaggtcttcctagtccaagtagtttagttccaggaagcagcagccaactaagtgggaatggaaatagtggaacatcaggacctagtggaagtactaccagcaaaactacttcagaatccagcagctctccctcagcatcccttaaaggcccaacttcacaagaatcacagctcaatgctatgaagcgattacagatggtcaagaagaaagctgcccaaaagaaactcaagaagtaatgtggccaagtaggtttttgtatcatattagcctaaagatgaaaggcttattattatgatataatctgtaatacactgtaatttaataaaagtcttcataatcaaaaaaaaaaaaaaaaaaaaaaaaaaaaaaaaaaaaaaaaaaaaaaaaaaaaaaaaaaaaaaaaaaaaaaaaaa

SEQ ID NO: 442 - DNA, 3016 bp, Homo sapiens
gacagattaatgtccctgtaaatctgataatgataaatatagcataaaggtgttatattcaaatggattttaatttttctccaaactaatatttacataaatgtatgtaaactatttgagttatgtggagttccagttagttttcttttgtgtatgtctcaacaaatgtttagtgttaatgcttgtcagctcacattttcttttcctttgttttgtaagattactttcttcccttcctctcttccttacctccattaccttcctttactccccttcctccccttctcttttcctctctctctattccttctcttacccttccttctcccctttgtccttccttcccctgyctctgatctcattccctcctcccatgccctcctcactattccccttcccctgcttctttcctcagcctctctttcttttttaatattgcctccctccctcccttcccttccttccttccttcctttttcctcttctctttccacccacctttttattttttcagactggcttaatgaacagtctagtgatagaaagtggtaaaaataagttatagtagatctatatagctatataatccagtatatccaatataatagaatattatgcaataattacaaactatgctttttgtgcttcttcatatctacctcatgcccctcatatttttcatcttcatattctgtcatttaccaaatcctatgaaaataatctctcaaattcatcctttcctatctccttcatcttcacatcctgcatttgctaaatcctagaatttttcaaattcattcttttcatttctcctaccatcccccmatttccccttamcagamctattaaaatagctgccctgagttggtcttgactattcttctatttagccmataggctatggscatattttaatcgtcctaaagcccagktctcatcagattacyacctgcttaaacctttctgttactggctgcccatttcctaccaacttaatataataccgtagtcttcagtgacttgcagattatggctctaacctgcttttttagttctctcaagctccattttacccttaacttccagtggaacttgctttctgcttccatgtcttttttcccactatttgctttgcctggagtacttaacttcttagtctgccctttagaacctacctccttcgaggcccaattcagatgccacctttccattttctctattattatctaagtgtctcttctcccccttatctatgttataaattccttaagttcagagactgtgtcttgaaattctctgaatttttaacacagtgccttgctattataaatatttggtagttttaattgtgcagtaaacacttccatttatgaaaatttctgttttcttgtctctagttaaagaagagtgtaagagtcctaaagctgagtgttggtcccaaaaaatgtccaataagcagcctaactctggaattgagaactttttagcatctttgaatatctccaaagaaaatgaagtacagtcatctcatcatggggagcctccaagtgaagagcatttgtcaccacagtcatttgccatgaagggaacacggatgcttaaagaaattctaaaaattgatggctctaacactgtggaccataagaatgaaatcaaacagattgctaatgaaatccctgtttcctctaacagaagagatgaatatggattaccctctcagcctaaacaaaataagaaattagcatcttatatgaacaagcctcacagtgctaatgagtaccataatgttcagtctatggacaatatgtgttggcctgcccccagccagatccctcctgtatccacaccagtaactgaactttctcgaatttgttcccttgttggaatgccacaacctgatttctcctttcttaggatgccacagggctccttaggcatgaatttccctttgccttcacaagtatttgcaaattatccttcagctgtaccacctggaaccattcctccagcctttcccccacctactgctaatataatgccttcgtcgtctcatctctttggctcaatgccatggggaccatcggtgccagttcctgggaagcccttccatcatactttatattctgggaccatgcccatggctgggggaataccagggggtgtgcacaatcagtttatacctctgcaggttactaaaaaaagggttgcaaacaaaaagaactttgagaataaggaagcccagagttctcaagccactccagttcagactagccagccagattcttccaacattgtcaaagtaagtccacgggagagctcatcagcttctttgaagtcctctccgattgctcaacctgcatcttcttttcaagttgaaactgcctctcaaggccatagtatatctcaccataagtcaacaccaatctcttcttcaagaagaaaatcaagaaaactggctgttaattttggtgtttctaaaccttctgagtaaatttggctcttagaattaagttaatttcttctctttccatctacctttttataaatacatatctatgtctcataaaaattagaatgtactattttaaaataatatgtgtaaattgaaatttttttcatttttaagttatcaggcacttttcatgctgtttaaaagactgtgtatcaaattgtgcactttaagtatgtgcagtttgttgtatgtcaattatacctcaataaatctgtaataaaaaactaaattaaaccttgcattaaaataatatcacagtatcagtggactaaacattaaaatgtaccactctaatcattggcctcatgattgaagcatcctgaactatgaattagacatcagttagcaataataagcattttttacactatcattgaggrataattacatggagcatgaaatttgggcctccagtgataacttactgaatgtggattttatttctctttttaatgatgtagaaaatgcaggagaatggctcttattttatgtgtggtttttaac

SEQ ID NO: 443 - DNA, 623 bp, Homo sapiens
tcgacccacgcgtccgttttttttttttttttttttaggcccatttragtagttaggaactgcccaggttttttttgttttttaagcattgatttaaaagatgcacggaaagttatcttacagcaaactgtagtttgcctccaagacaccattgtctccctttaatcttctcttttgtatacatttgttacccatggtgttctttgttccttttcataagctaataccactgtagggattttgttttgaacgcatattgacagcacgctttacttagtagccggttcccatttgccatacaatgtaggttctgcttaatgtaacttcttttttgcttaagcatttgcatgactattagtgcttcaaagtcaatttttaaaaatgcacaagttataaatacagaagaaagagcaacccaccaaacctaacaaggacccccgaacactttcatactaagactgtaagtagatctcagttctgcgtttattgtaagttgataaaaacatctggaagaaaatgactaaaactgtttgcatctttgtatgtatttattacttgatgtaataaagcttattttcattaacaatttgtattaaaaaaaaaaaaaaaaaaaaaaaaaaaaa

SEQ ID NO: 444 - DNA, 1092 bp, Homo sapiens
ggcacgaggccgctttccccaccattgtctctttagggcctggtgtctgcccccgccctgggtgcacccatttactagcacggggccacctggttggtggggggcagaaacaaggcatggaaaaacatgacacaaatcacgtctggtaccatgctgaacctgtccatccaaaatgcctcaggcttctactcacattaaagctccccctcctcccagcccagagcctggcaattaaagtgaacatcacgtacgaagaaacatgcacgtgcgggcagctgataaatcaggaccggctctgccaattaactggtcttacatcttctgctgagagttcagaatatgtccgtgtcagccaagccccagcccaggccacagcatgtggctcgggttcacgagaaggaggggatactgctccttggggacctaagcaaatacaagaagccatcttaacttgctaatgattactaagtgctccaaagctaagaggcagaaagagcagaccagaggagagggaagagaagagggaggaggagtgaggatggcacccgaatctggaaccctttagtgagtaaaatcagtcaggtacacttggctcttgcagaccctttgtgtgtaaataaatctggatgtgggcaggcgccaagtatgatctgaaacaggcccaatcccaccctgcgagggaggtgtatgcaccctgatccctggccgcagagcgcaggggctggcggggagagtggcactgcgtgcgccgtagccggcctgcaggaggattgccttacacagctctgaactttgcgtcttttaaaataccaaggggcagtcgtttacacgtgaggctgactgcccagaatgggagattcaccttgactatatggaggtgattctgctagttttccgaggcaaggggaacccaaaatgacagtttaaagcacaaacatggccatttgtcacagcttcgggaagaaatggggaaaggtgctgagagaaaatccgtttcttacaggagacaaacaccgtttggggatgccaagcatggtttcccaggggcttcccctttctagaagagttcaccttgtacctaaaaaaaaaaaa

SEQ ID NO: 445 - DNA, 2101 bp, Homo sapiens
agccggcctcgcacttccggtggggagattccggcctggagctcccagggccgagcagaccttgggacctgtgagcgctgcatccaattaaccatgggaagggtcagcaccagccaccagccccttaggtgaggactctgcctggggctctgctgatggttccgaatcatggagctgcagagagctcctccagcctggagacgttcttggtgaaagctgtggtctaactccaccggctcttcctgcacattgtattcaagaggggtgcctgcccccgctgactcaggagctccggtgctgcagccgccacgaatggggaggtgggccctcgatgtggcctttttgtggaaggcggtgttgaccctggggctggtgcttctctactactgcttctccatcggcatcaccttctacaacaagtggctgacaaagagcttccatttccccctcttcatgacgatgctgcacctggccgtgatcttcctcttctccgccctgtccagggcgctggttcagtgctccagccacagggcccgtgtggtgctgagctgggccgactacctcagaagagtggctcccacagctctggcgacggcgcttgacgtgggcttgtccaactggagcttcctgtatgtcaccgtctcgctgtacacaatgaccaaatcctcagctgtcctcttcatcttgatcttctctctgatcttcaagctggaggagctgcgcgcggcactggtcctggtggtcctcctcatcgccgggggtctcttcatgttcacctacaagtccacacagttcaacgtggagggcttcgcttggtgctgggggcctcgttcatcggtggcattcgctggaccctcacccagatgctcctgcagaaggctgaactcggcctccagaatcccatcgacaccatgttccacctgcagccactcatgttcctggggctcttccctctctttgctgtatttgaaggtctccatttgtccacatctgagaaaatcttccgtttccaggacacagggctgctcctgcgggtacttgggagcctcttccttggcgggattctcgcctttggtttgggcttctctgagttcctcctggtctccagaacctccagcctcactctctccattgccggcatttttaaggaagtctgcactttgctgttggcagctcatctgctgggcgatcagatcagcctcctgaactggctgggcttcgcctctgcctctcgggaatatccctccacgttgccctcaaagccctgcattccagargtgatggtggccccaaggccttgaaggggctgggctccagccccgacctggagctgctgctccggagcagccagcgggaggaaggtgacaatgaggaggaggagtactttgtggcccaggggcagcagtgaccagccagggcaaatggcttagaagcaggccactccccagcctgctgccagcactcactgtgctcaagccgccagggctcatcatggtagctgggagctgtggacgggagtcaccaggtggtggggccaagccagggactcatgacttttgcccctcccttcagagcctggtcacacaaggggcgagcaccaggccagcctgggactggccagagctgggcccaagctgcgctggaatcgcagcaggagaggggagtgggctggttcttcccaccacttcccaggctctgacagccgagactcatttccaaggcacagcagctttctaaagggactgagtttggactgggttttggacctccaggggctggagcttcatcacctgggcagtgtcttttctcagagagcaggtttctttatagtttggaaataaatggttcacggtccactggccgccttgtgttgctggagacgtgggggcagggaggggacagtgtgggcctggcctctcctttcctttccctgcctggagccttcttcaaatgtctggtcttaagccaggcctccttcattttctcgctcctgttagaacaccagtcccctycccagtggggccccactgcacctgctggcaggaaataaatgaatgtttactgagwaaaaaaaaaaaaaaaaaaaaaaaaaaaaaaaaaa

SEQ ID NO: 446 - DNA, 1444 bp, Homo sapiens
  misc_feature (444)..(444): n equals a,t,g, or c
  misc_feature (739)..(739): n equals a,t,g, or c
  misc_feature (758)..(758): n equals a,t,g, or c
  misc_feature (949)..(949): n equals a,t,g, or c
  misc_feature (959)..(959): n equals a,t,g, or c
ggcacgaggtggcttggagccagcccaccctcttatgaagtaccagtttcctcatcttcaagacagaaacagtaataggacttagcccatgaggttgctgttgattcggtgaaatgatattcataaaggtctgagcacagtggctgggacataagcactcaaacatcagctgctatcactatcgtgtccttccagtaccttttgaaaccttgtgctgatgaattcagaaagcagccctaaggctccctttccctgtgctgctctagccagtcccctcccaggcaggcaaggaagcttctccaccaatgagcctctttatgcactcatggttccatgtccaggcaggcttgggcagctggagtacagagaagcgtarggtgccttcacatacctgggatgcaaaccctgggggccagcatctcgggccgcagtggagagctgcangggccgaccctgtgactgykcacagygtwkatggggttccgcaggatggagctcacagtggtgctgggggtcaaactccggggaacagtgcctagaaatgggcttggtgagaaaagacgccccaaaggacccagccagcccaggactwacacaagcctttcccctgtatcccaggacscasccgcagtcttttgggaaaaggacttgggagatgagttttaaccaccaattcacaatgtggctgtggctcctggcctgtctccatttgtaaaaaggggggaagtctctttcatgnttcctatttcccaggttgntatggggagaaagcatgttgacaagctaagacatgtcatggatataagacaaaccatcccagacaggacagcatttcccarttctctggacctcagggctgaaaacacatggcagctctctgaaatgctgcctcccctctccctggagaytaggcatcccgaktttacaccgaccttcagcccccagcccntggctggctnactcacccacagacggcctgctagggtatagcggggggttgctgtgccggctggaatgcccaggcgagtaaggtgcccactcctggagctccggggagagttctccactggccgggacacacttctgttcctgcagatgcaagggcaagagtgtctgctagaaagagtggagtgtggccaggcgcagtggctcacacctataatcccagcactctgggaggccgaggcgggcagatcacctaaggtcaggagttcaagaccaccctggccaacatggcgaaatcccgtctctaccaaaaatacaaaaattagctgggcatggtagtgggtgcctgtaatcccagctacttgggaggctgaggcaggagaatcgcttgaactcgggaggcagaagttgcagtgagccaagactgcaccactgtactccagcctgggtgacagagtgagactccatcttagggaaaaaaaaaaaaaaaaaactcgag

SEQ ID NO: 447 - DNA, 1374 bp, Homo sapiens
aggaattcggcacgagtgtggtcgatttgcttcaggaattaacagatatagacaccctccatgagagtgaagagggagcagaagtgctcatcgatgctctggtggatgggcaggtggtagcactgctggtacagaatctggagcgcctggatgagtctgtgaaagaggaggcagatggcgtccacaacactctggctattgtggaaaacatggctgagttccggcctgagatgtgtacagagggtgcccagcagggtcttctacagtggctgttgaagaggctgaaggcaaagatgccttttgatgccaacaaactgtattgcagtgaagtgctggccatattgctccaggacaatgatgaaaacagggaattgcttggggagctggatggaatcgatgtgcttcttcagcagttatccgtgtttaaaagacacaatcccagcacggctgaggagcaggagatgatggagaatctgtttgattccctctgctcctgtctaatgcttagttccaatcgtgagcgcttcctgaagggcgagggtcttcagctgatgaatctcatgctcagggaaaagaagatctcccggagcagtgccctgaaagtgctggaccatgccatgattggccccgaaggcacagacaactgccataagtttgttgacattcttggcttacgaaccatctttcccctctttatgaaatctcccaggaagatcaagaaagtgggaaccactgagaaggaacatgaagagcatgtctgttcgatcctggcttccctcctgcggaacctgagagggcagcagcggacccggcttctgaataaattcactgaaaatgacagtgagaaggttgacagactaatggagttgcattttaaatatctgggtgcaatgcaggtggcggacaagaagattgaaggggaaaaacacgacatggtccggcgaggagagatcatcgacaatgacaccgaggaggagttctacctccggcgcctggatgcggggctctttgttctccagcacatctgctacatcatggccgagatctgcaatgccaatgtcccccagattcgccagagggttcaccagatcctaaacatgcgaggaagctccatcaaaattgtcaggcatatcatcaaggagtatgcagagaacatcggggacggccggagcccggagttccgggagaacgagcaaaagcgcatcctgggcttgctggagaacttctagaggcaccttggccctgcgcatcatggactctctcagcttccctcccaggatcagtttctacacaactctgtgtggcttttggacaaattaaagctagttttggtaaaaaaaaaaaaaaaaaaaaaaaaaaaaaaaaaaaaaaaaa

SEQ ID NO: 448 - DNA, 1318 bp, Homo sapiens
  misc_feature (557)..(557): n equals a,t,g, or c
ggcacgagaattaattgccagccttggttcacactgatgagtgtgctcattggagagactcagcatgcaaaagaaaagactcatcaatttgcagttatttaatttcacgaactgccggatggtggagtcagtagcagcggctgggccgcaacatggcgcctcccacctagacttccggtcaggaaacttccaccttcctccgatttacgtgggcctgcatgagcctacttctcttcttattctagtgccagtggcctctgggagtcttggtccttcttactggaatagccctcctctcctgttacagaggcaataattctccagccttccggtcgccgccaaagcctcctgcctaatcacttcctgtattgtctccctgcggctctttgcacagaccttgggctccgtcgtctctggattcttactgatctcttcctcttctcccaaccgccttgtcatgtctctttgagctatgtcaggaggaacggaagggcactttcttactacttttgttagccaaacggacaaactgtcccctcccctttgttgtaaccacncattcaaggcttccttcagtccagccccatctcccttttcgttgcctccctttcactactccaaatgagcttgccatactttaaacgggtcttgtactttcttatcccttctctggaatgtcatttctactgaagaaaatcctactcttccctcaagacccttctttaatcccctcttgccatggaaacttgagattttcattgaggagctaagttggaaaatataaactagagctgagtctctaccctggcactattgacatttggggccagattattcttggttggggagactgttctgtgcactgtaggatgtggaacagcctcccaggcctctacctgccaaaagcacactcccctttccccaagtggtgacaaccaactgtttccagacattgccagatgtcctgaggtgggagtgagggtgaacagaattgcctcccagctgggggctgctggactaatcaacaagaagtggcaaggactgcaggcaaattgcctcagcacttagatttagcactgcaaggccacttcgacaggtggtagtgatttgtgcgtctcatttcctattcttgattgtgacaaggttctggaggatggagacagctacccctgccacagttcccacaggctatgttgtacatagggcttcatatttaacatgtgagtgaatgaaacacatgagcccgagtgctcttcaggacggcaaggcctacatcaagatggtaaaccttcagttcttaaaaaaaaaaaaaaaaaaa

SEQ ID NO: 449 - DNA, 1260 bp, Homo sapiens
  misc_feature (1203)..(1203): n equals a,t,g, or c
  misc_feature (1235)..(1235): n equals a,t,g, or c
  misc_feature (1241)..(1241): n equals a,t,g, or c
  misc_feature (1246)..(1246): n equals a,t,g, or c
ggcacgaggggaagatggggcaaggaggggtgggaaaataggtaattcatggctgcttctctaagatgtgcctgcctagccccagtaaacctacctccctccatccctgccaggccatggtggcgtgttacccaggcaacgggctcgggtacgtaaggcacgttgacaatccccacggcgatgggcgctgcatcacctgtatctattacctgaatcagaactgggacgttaaggtgcatggcggcctgctgcagatcttccctgagggccggcccgtggtagccaacatcgagccactctttgaccggttgctcattttctggtctgaccggcggaacccccacgaggtgaagccagcctatgccaccaggtacgccatcactgtctggtattttgatgccaaggagcgggcagcagccaaagacaagtatcagctagcatcaggacagaaaggtgtccaagtacctgtatcacagccgcctacgcccacctagtggccagtcccagagccgcatggcagacagcttaaatgacttcaggagagccctgggcctgtgctggctgctccttccctgccaccgctgctgcttctgactttgcctctgtcctgcctggtgtggagggctctgtctgttgctgaggaccaaggaggagaagagacctttgctgccccatcatgggggctggggttgtcacctggacagggggcagccgtggaggccaccgttaccaactgaagctgggggcctgggtcctaccctgtctggtcatgaccccattaggtatggagagctgggaggaggcattgtcacttcccaccaggatgcaggacttggggttgaggtgagtcatggcctcttgctggcaatggggtgggaggagtacccccaagtcctctcactcctccagcctggaatgtgaagtgactccccaacccctttggccatggcaggcaccttttggactgggctgccactgcttgggcagagtaaaaggtgccaggaggagcatgggtgtggaagtcctgtcagccaagaaataaaagtttacctcagagctgcamaaaaaaaaaaaaaaaaaaaaaaaaaaaaaaaaaaaaaaagggcggccgctcttagaggatccctcgagggggcccaagctttacgcgtggcatgcgacgttcatagctcttcttcccttaaagttgaattcgttatttanaaagcttaggcattgggccgtcctttttttanaacgtncgtgnactgggggaaattt

SEQ ID NO: 450 - DNA, 1915 bp, Homo sapiens
  misc_feature (490)..(490): n equals a,t,g, or c
  misc_feature (1899)..(1899): n equals a,t,g, or c
ggcgaagaggggcgsaackcrttgcgttttgagtctcgggacccctgttggagagactatggcgctcaacaagaatcactcggagggcggcggagtgatcgtcaataacaccgagagcatcctaatgtcctatgatcacgtggaactcacattcaatgacatgaagaacgtgccagaagccttcaaagggaccaagaaaggcactgtctaccttaccccttaccgggtcatctttctgtccaagggcaaggatgccatgcagtccttcatgatgccattttatctcatgaaagactgtgagatcaagcagcccgtatttggtgcaaactacatcaagggaacagtgaaggcggaagcgggaggtggctgggaaggctctgcttcctacaagttgactttcacggcagggggcgccattgagttcggacagcggatgctccaggtggcatctcaagcctccagaggtgaagtccccagtggagcctatggntactcttacatgcccagcgggscytatgtctatcccccgccagtcgccaatggaatgtacccctgccctcctggctacccctatccaccgcccccacctgagttctatccaggaccccccatgatggacggggccatgggatacgtgcagcccccaccaccgccctaccctgggcccatggaacctccggtcagcggccccgatgtcccctccactcctgcagccgaagccaaggccgcagaagcagccgccagcgcctattacaacccaggcaatcctcacaacgtctacatgcccacgagccagccgccgccacctccctactacccaccggaagataagaagacccagtaggccctcctgcctccctgcctcccaccctcatctctctaccctacccctcccatcggggctgtgctggggcttggggaggggagggggcgccttgttctccctccaggtctgatcataaacaattaccaggaactagcattgtgggacattagggcccccggcctcgggagaggtgccgcccagcttcccatgccagcccggagcccacagtgctgcccagcgtacctccctcaccgtctggggctcttctgggagcacggagcatcccctgttcctgtttcactctcagcttctcccctcgaagggactctctggccacctcctccaccgcagtccagctccctcagtctggcacccactgctacactcagcctcatgagccacttcagaccagccaggtgtcttcccgggccctgccagaccctgctcacattccctctgctggtctgtgctggtctcagaaggccaccgcgcccgcattccactcagccagggtccagctgcagcccccgccacccttccttcccttccctgtcctgggtcatgttgttgccaccctgtgtgacttttgaagctgtaaaatgagcttccagggcttgggtggcgtcggggcagggccgccgaggctgggaggaagcccttctgccttttgctggtgtttctggaatttgctttccctcacctctcacttccttctagaaggagcttcctgactggaaccagagaatgcatgtctgtccacttggtggctgctgggtggggccgggaacaagggcccctgaccctgtgtgctggccgggacctgccaccagccccccagcctgcttcttccccttaagctttgtgcccctggatgcgctaacattcactcttgtttgtccctggactggccatgaagtgaggagatggttatttaaagagaattccctatttatttgacaaaaaatccagttaatatattaatgtgaaataaaccctgtttgcacctcgatttgtttgctgaaaatgtgaaatagtaaaaatgaaataactggaaaaaaaaaaaaaaaaaaacncaagggggggcccggt

SEQ ID NO: 451 - DNA, 1070 bp, Homo sapiens
ggcacgagcagtgacgagggaaacctctcgctgagggttggggcaaagtcacccctggaaatcgaaggggccgctggtggtctcttgaggtccaccagcctcaaatgcatctcttcagacggtgttgggggcacaaccctactccccgaaaagtcgaaaacccgattcagttcctgcgagtccctcttagaatccagaccgagcatggggagaaaactgagctctccgaccacacccagggacatgctgttgtcgcccacactgcgtcctcggaggcggtgtctggagtcctctgtggacgatgcgggctgtccagaccttggaaaggagccgcttgttttccagaaccgccagtttgcccacctgatggaggaacctctaggcagtgacccattcagctggaaactcccaagcctcgactacgaacgcaagaccaaagtggacttcgatgacttcctcccagctatccggaagccccagacacctacctccttggctggatcagccaaaggtgggcaagacggttcacagcgttcaagcatccactttgaaacggaagargctaaccgttcctttctctcggggatcaagaccattttgaagaagagcccggagcccaaggaggatcccgctcacctgtctgactcgtcctcatcctccggctccatcgtgtccttcaaaagtgctgacagcatcaaaagtcgaccaggaatcccacgacttgcgggtgacggtggcgagcgaacgtcccccgagcggagagagccagggacggggaggaaagacgacgatgttgcgagcataatgaagaaatacctccagaagtaggaaccagttcagcctccttgaagctgcccttgaagacttcccgactctacaataacttggagacagagagactggccaggcctccccggtggccakagccagccagcatggccaccctcaagaggcgagatgagcccacagaggcatatcctgcggggatgctgggctcccagtgtggttggcctgaacaaaataaagtgttgactcctgggaaaaaaaaaaaaaaaaaaaaaaaactcgta

SEQ ID NO: 452 - DNA, 1160 bp, Homo sapiens
aattcggcacgaggatttttgtcttcagccgtgcaactatgttggggtcatcttattcctccttttcggcggtggacacagtcaaaaacattttaatacaatggaagtgcatcccctggcagccctgcggcagtcacagcctccttattggcaaggctgaagtcaaagccttgggctgcccagcctgaatgacactggcttcctgggatggttgttgctgtgtcagggacatttctgggtctctgccactgctactggtgctcttggtggagaaggccacagggtgttgctggggaggtggtgagccagaggtttctgggtctgcaccactgctgctgttgctctgggtataggggtaggccacagggtcatgctgggcggcttgttgagcctgggatgtttctgggtctccaccactgctgctggtgctctgggtggagaagaaggccacaggctgatactggaaggcttgttgagccagggacgtttctgggactccaccactgctacaggtgctctgggtggaggggaagccatggggtcatgctgggggccttgttgagccagggaggtttctgggtctgcactactgttgctggtgctctgcgtggagggggaagacacaggtcatgctggaagcttgttgagccaaggacatttctgggtgtatccagttgtgcaggtctcctcctcttgcatactctgttactaaataaataacagggtgatgctcaggggcttgttgagccagggatgtttctgggtcttcaccactgctgctgttgctctgggtggagggggaggccacagggtctttatgtatttaagcataaaggcaaggcttggcgcggtggctcatgcctgtcatcctagcactttgggaggctgaggcgggtggattgcttgatcccaggagttcaagaccagcctgggtaacatggcaaaacctcatctctatagaaaatacagaaattagccagctgcagtgcatgcctgtggtcccatctactcggagggctgaggtgggaggatcgcctgaacctggaaggtcaaggctgcagtgagccaagattgtgtcactgtactctagcctgggttagagagccagacactatctcaaaataaaataaaaaaaaaaaaaaaaaaaaaaaaaaaaaaaa

SEQ ID NO: 453 - DNA, 1159 bp, Homo sapiens
  misc_feature (584)..(584): n equals a,t,g, or c
ggtgctggccgctctagaactagtggatcccccgggctgcaggaattcggcacgagctgaagccggggacccggggggctgaggaatgctgaggcaaagtctgagcggctgcccatgccctgccctcccgtcctgcctgctgcccctatgtcagtgccctcctgggttaggagacccggaccggagacaagccaggccctgcagaccccagagcggctgggaacagtgtctggaatggggccttttgcactcgcccggccaagcctctccaaaatggattccactggtgtgggctgggacctggagcaaggtgccgccggacgcccccacagggttcccatgtttcaggctcctgccctggcctttctttctggactgcagctcagctttgttgcctgttcaatctactgatttgtttctctggaatttggggtccaaggccctgactatgaccaggatgccccagtcccttgctctaacccggctacagaagtgaaccacaggsccacaagaaccacagacagggacccttcamccccacggttagcccaggggctctagagctcactagcccaatagagggnctagacaagattcttttccaaatatcaaaactcctggcagttcctcagggacaggctctgagcagcagtgaatcagatgggggaatttggggggctcacaaagggacaggtacaaacaattcgcctgggggtcagaggaggcaattctcagctgagcccaggcctgagacccttggtgtcttaactccaccactcaaggcttttcgtgatctgacttctctcttcctcccatcttctcactgctccctgaacaagcaaaacacattcctgtctccaagctttgccctgtgttctccagcaccctccctgcttctgtctgcctatcaaacaccccacttttaaagtccccgttcaaaaaatctcctacccacgtggtttcctcattctcttccaccaacctctgtcttgccactttcaggcagggctgaagtcttccttttcacaaaacaattattaaaccatcttaagtctactgaacgttgcccctgctctagtgtctagcaccagaccagtaggtgcttaataaatgttaatggattcaatttaaaaaaaaaaaaaaaaaactcgtagggggg

SEQ ID NO: 454 - DNA, 2377 bp, Homo sapiens
agctgtcgcgrgcggcgcccggccttgctcaacgcccagcagtccccaccgtcgctgccgccgccaccgccctcggccgctgccgaggcctcctgcagccatcatgtccgccagcgccgtctacgtgctggacctgaagggcaaggtgctcatctgccggaactaccgtggcgacgtggacatgtcagaggtggagcacttcatgcccatcctgatggagaaggaggaggaggggatgctgtcgcccatcctggcccacgggggggtccgtttcatgtggatcaaacacaacaacctgtatctggttgccacatccaagaagaacgcgtgcgtgtcgctggtcttttctttcctctataaggtggtgcaggtgttttccgagtacttcaaggagctggaggaggagagcatccgggacaactttgttatcatctacgagctgctggacgagctcatggacttcggctacccccagaccaccgacagcaagatcctgcaggagtacatcactcaggaaggccacaagctggaaacaggggccccgcggccaccagccaccgtcaccaacgcggtgtcctggcggtccgaaggcatcaagtatcggaagaatgaggtgttcttggacgtcatcgagtctgtcaacctcttggtcagcgccaacggcaatgtcctgcgcagagatcgtgggctccatcaagatgcgagtyttcctctcgggcatgcccgagctgcgcctgggcctcaacgacaaggtcctctttgacaacacgggccgcggcaaaagcaaatccgtggagctggaggatgtgaagttccaccagtgtgtgcggctatcacgcttcgagaatgaccgcaccatctccttcatcccacccgacggcgagttcgagctcatgtcctaccgtctcaacacccacgtcaagcctttgatatggatcgagtcggtgatcgagaagcactcccacagccgcatcgagtacatgatcaaggccaaaagccagttcaagcggcggtcaacagccaacaacgtggagatccacattcccgtgcccaatgatgccgactcacccaagttcaagacgacggtggggagcgttaagtgggtccccgagaacagcgagatygtgtggtccatcaagtccttcccgggcggcaaggagtacctgatgcgggcccacttcggcctgcctagtgtggaggccgaagacaaggagggcaagcccccgatcagtgtcaagttcgagatcccttacttcactacctccggcatccaggtgcgctacctgaagatcattgagaagagtgggtaccaggccctgccctgggtgcgttatatcacgcagaatggagattaccagctccggacccagtgaggggctgtcgcagccaacaccccggcctcggggctcctggtggcagcaccaggggacacacctgccaaacccaccagatggaggggccctccctggtctctggccaccctcccagcctctgcccagggacccctgccttccccaggccatctgctctgccgtcgacactcgtctcagaagcccctttcccagaagaggctggtcttcaagaagtctcgtttctttgcccctgaagtcagtttcaggggaaggatgtgaaatttttccgtgtagaggttacagccttttatgctgttgagctcccaggtaccaaaaagcttggccaacgcttgccagccagccagctgcaggtggcatctgccacgaaggaagcgccagcytcgccaggccagcaggggcgtcgttttgttgccattttgttgaacgttatgggtttatgggtgttcctggaacttgtctttgtgcattcgttgctgtttgtgttaccctcactgtccccatgtcccacccacgtcctacggcactcaggaagcacttggtgaggacgagccctcacccttcttgtcttccttcccagcagcgcccgcagcgggccatttacacgtcgaggctggcacctggcgcgctcgggggccactgtagcgtctgcctgctccctggactcgcaggcctgcctgtggcgccttcccagggccagcctgggtcacgagatgctgtcactcagccagatcagtattgacccaccaggggaggtggggtttggtgagagacgccagcctcagactttttcccactgagggtccagagagcggggccacgtgtcacccacgtctgcgcttggtcacccgtcctccccaccctgtgtgtgtttatgtcatagttacattaaattccattcattgaataaaaaaaaaaaaaaaaaaaaaaaaaaaaaaaaaaaaaaaaaaaaaaaaaaaaaaaaaaaaaaaaagaaaaaaaataaaaaaaaaaaaaaaaaaactcga

SEQ ID NO: 455 - DNA, 1968 bp, Homo sapiens
  misc_feature (19)..(19): n equals a,t,g, or c
  misc_feature (291)..(291): n equals a,t,g, or c
  misc_feature (303)..(303): n equals a,t,g, or c
  misc_feature (308)..(308): n equals a,t,g, or c
gccgtgtaaatgacgtttnaaggcgagtgcggaaagtggcctggggagcctcggggagcggacgccctccgccctggtgctgacctgcctccctgccccttstgcctcctgtmagcagaggcctcggctccgcaactgccactcctcctcggggtgttgcacaagtttcgaggtcaccggcgaccccccctagcagcgcgcctggctctggcccccgcgaaggaggacggagtttgtgtgttgcatactttctaaggcggcggctgcagcagcggctccatccagcccgtnagctcctcctgnaaggnatggctggctacctgagtgaatcggactttgtgatggtggaggagggttmagtacccgagacctgctgaaggaactcactctgggggcctcacaggccaccacggacgaggtagctgccttcttcgtggctgacctgggtgccatagtgaggaagcacttttgctttctgaagtgcctgccacgagtccggcccttttatgctgtcaagtgcaacagcagcccaggtgtgctgaaggttctggcccagctggggctgggctttagctgtgccaacaaggcagagatggagttggtccagcatattggaatccctgccagtaagatcatctgcgccaacccctgtaagcaaattgcacagatcaaatatgctgccaagcatgggatccagctgctgagctttgacaatgagatggagctggcaaaggtggtaaagagccaccccagtgccaagatggttctgtgcattgctaccgatgactcccactccctgagctgcctgagcctaaagtttggagtgtcactgaaatcctgcagacacctgcttgaaaatgcgaagaagcaccatgtggaggtggtgggtgtgagttttcacattggcagtggctgtcctgaccctcaggcctatgctcagtccatcgcagacgcccggctcgtgtttgaaatgggcaccgagctgggtcacaagatgcacgttctggaccttggtggtggcttccctggcacagaaggggccaaagtgagatttgaagagattgcttccgtgatcaactcagccttggacctgtacttcccagagggctgtggcgtggacatctttgctgagctggggcgctactacgtgacctcggccttcactgtggcagtcagcatcattgccaagaaggaggttctgctagaccagcctggcagggaggaggaaaatggttccacctccaagaccatcgtgtaccaccttgatgagggcgtgtatgggatcttcaactcagtcctgtttgacaacatctgccctacccccatcctgcagaagaaaccatycacggagcagcccctgtacagcagcagcctgtggggcccggcggttgatggctgtgattgcgtggctgagggcctgtggctgccgcaactacacgtaggggactggctggtctttgacaacatgggcgcctacactgtgggcatgggttcccccttttgggggacccaggcctgccacatcacctatgccatgtcccgggtggcctgggaagcgctgcgaaggcagctgatggctgcagaacaggaggatgacgtggagggtgtgtgcaagcctctgtcctgcggctgggagatcacagacaccctgtgcgtgggccctgtcttcaccccagcgagcatcatgtgagtgggcctcgttccccccggagaatcccagcggggcctcagagatgcatctgggagaggtggggaagatggcaggcaagggtacccttggccaggactctggtgcccaccctgccacccccgcgctccacctgcagtgtttctgccctgtaaataggaccagtcttacactcgctgtagttcaagtatgcaacataaatcctgttccttccaaaaaaaaaaaaaaaaaaaaaaaaaaaaaaaaaaaaaaaaaaaaaaaaaaaaaaaaaaaaactcgag

SEQ ID NO: 456 - DNA, 1100 bp, Homo sapiens
agagcacgccctctgagccgcwcggtggacaccaggcactctagtaggcctggcctacccagaaacagcaggagagagaagaaacaggccagctgtgagaagccaaggacaccgagtcagtcatggcacctaaggcggcaaagggggccaagccagagccagcaccagctccacctccacccggggccaaacccgaggaagacaagaaggacggtaaggagccatcggacaaacctcaaaaggcggtgcaggaccataaggagccatcggacaaacctcaaaaggcggtgcagcccaagcacgaagtgggcacgaggagggggtgtcgccgctaccggtgggaattaaaagacagcaataaagagttctggctcttggggcacgctgagatcaagattcggagtttgggctgcctaatagctgcaatgatactgttgtcctcactcaccgtgcaccccatcttgaggcttatcatcaccatggagatatccttcttcagcttcttcatcttactgtacagctttgccattcatagatacatacccttcatcctgtggcccatttctgacctcttcaacgacctgattgcttgtgcgttccttgtgggagccgtggtctttgctgtgagaagtcggcgatccatgaatctccactacttacttgctgtgatccttattggtgcggctggagtttttgcttttatcgatgtgtgtcttcaaagaaaccacttcagaggcaagaaggccaaaaagcatatgctggttcctcctccaggaaaggaaaaaggaccccagcagggcaagggaccagaacccgccaagccaccagaacctggcaagccaccagggccagcaaagggaaagaaatgacttggaggaggctcctggtgtctgaaacggcagtgtattttacagcaatatgtttccactctcttccttgtcttctttctggaatggttttcttttccattttcattaccacctttgcttggaaaagaatggattaatggattctaaaagccwaaaaaaaaaaaaaaaaaaaaaaaaaaaaaaaaaaaaaaaaaaaaaaaaaaaaaaaaaaaaaaaaaaaaaaaactcgag

SEQ ID NO: 457 - DNA, 1081 bp, Homo sapiens
  misc_feature (1076)..(1076): n equals a,t,g, or c
  misc_feature (1078)..(1078): n equals a,t,g, or c
gctgagcacgccctctgagccgctcggtggacaccaggcactctagtaggcctggcctacccagaaacagcaggagagagaagaaacaggccagctgtgagaagccaaggacaccgagtcagtcatggcacctaaggcggcaaagggggccaagccagagccagcaccagctccacctccacccggggccaaacccgaggaagacaagaaggacggtaaggagccatcggacaaacctcaaaaggcggtgcaggaccataaggagccatcggacaaacctcaaaaggcggtgcagcccaagcacgaagtgggcacgaggagggggtgtcgccgctaccggtgggaattaaaagacagcaataaagagttctggctcttggggcacgctgagatcaagattcggagtttgggctgcctaatagctgcaatgatactgttgtcctcactcaccgtgcaccccatcttgaggcttatcatcaccatggagatatccttcttcagcttcttcatcttactgtacagctttgccattcatagatacatacccttcatcctgtggcccatttctgacctcttcaacgacctgattgcttgtgcgttccttgtgggagccgtggtctttgctgtgagaagtcggcgatccatgaatctccactacttacttgctgtgatccttattggtgcggctggagtttttgcttttatcgatgtgtgtcttcaaagaaaccacttcagaggcaagaaggccaaaaagcatatgctggttcctcctccaggaaaggaaaaaggaccccagcagggcaagggaccagaacccgccaagccaccagaacctggcaagccaccagggccagcaaagggaaagaaatgacttggaggaggctcctggtgtctgaaacggcagtgtattttacagcaatatgtttccactctcttccttgtcttctttctggaatggttttcttttccattttcattaccacctttgcttggaaaagaatggattaatggattctaaaagcctaaaaaaaaaaaaaaaaaaaaaaaaaaaaaaaaaaaaaaaaaaaaaaaacagnanccc

SEQ ID NO: 458 - DNA, 1044 bp, Homo sapiens
gctgagcacgccctctgagccgctcggtggacaccaggcactctagtaggcctggcctacccagaaacagcaggagagagaagaaacaggccagctgtgagaagccaaggacaccgagtcagtcatggcacctaaggcggcaaagggggccaagccagagccagcaccagctccacctccacccggggccaaacccgaggaagacaagaaggacggtaaggagccatcggacaaacctcaaaaggcggtgcaggaccataaggagccatcggacaaacctcaaaaggcggtgcagcccaagcacgaagtgggcacgaggagggggtgtcgccgctaccggtgggaattaaaagacagcaataaagagttctggctcttggggcacgctgagatcaagattcggagtttgggctgcctaatagctgcaatgatactgttgtcctcactcaccgtgcaccccatcttgaggcttatcatcaccatggagatatccttcttcagcttcttcatcttactgtacagctttgccattcatagatacatacccttcatcctgtggcccatttctgacctcttcaacgacctgattgcttgtgcgttccttgtgggagccgtggtctttgctgtgagaagtcggcgatccatgaatctccactacttacttgctgtgatccttattggtgcggctggagtttttgcttttatcgatgtgtgtcttcaaagaaaccacttcagaggcaagaaggccaaaaagcatatgctggttcctcctccaggaaaggaaaaaggaccccagcagggcaagggaccagaacccgccaagccaccagaacctggcaagccaccagggccagcaaagggaaagaaatgacttggaggaggctcctggtgtctgaaacggcagtgtattttacagcaatatgtttccactctcttccttgtcttctttctggaatggttttcttttccattttcattaccacctttgcttggaaaagaatggattaatggattctaaaagcctaaaaaaaaaaaaaaaaaaaa

SEQ ID NO: 459 - DNA, 1081 bp, Homo sapiens; identical to SEQ ID NO: 457
  misc_feature (1076)..(1076): n equals a,t,g, or c
  misc_feature (1078)..(1078): n equals a,t,g, or c

SEQ ID NO: 460 - DNA, 1081 bp, Homo sapiens; identical to SEQ ID NO: 457
  misc_feature (1076)..(1076): n equals a,t,g, or c
  misc_feature (1078)..(1078): n equals a,t,g, or c

SEQ ID NO: 461 - DNA, 1081 bp, Homo sapiens; identical to SEQ ID NO: 457
  misc_feature (1076)..(1076): n equals a,t,g, or c
  misc_feature (1078)..(1078): n equals a,t,g, or c

SEQ ID NO: 462 - DNA, 1006 bp, Homo sapiens
ggcacgaggcgatctgtccacctcggcctccaaaatgctggggttacaggcatgagccactgtgcctggcctttgtatttttgtcatacattttatttcccagtattatagactccagaatatgttgttgttattgttttaaaagtcagttatcttcttagttttctttcagaaaaattaaatggtgagtttttttgtttgtttgtttgtttgttttgcatggcccatgtatttaccattcctggtgctcttccttcttttgtgtggattcagttttccatctagtatcattttcgttctggtaaaagcatgtttgacatttcctgtagtatgcttgctggtgacacattcttcctcagcttttgtctgaaatgcctttatttcaccatcatttttgaaggatgtttttgctgggtatagaattctaggttggtagtttttgttatttttcagcatttttaaggtgacatttggcttgtacatgttgttcttgagaattctgcagttattctttgttccactgtatgtaataatatatgtttttctcctttctctgattttaaggtttttctctttgttgctgatattctgaaactgactatgatgtgtctttgtgtggttttctttgtggtttttttcctgtggaatttattcaacttctgggatctgtaggttatagttttcacaaattggaaatttttgacattacttcttcagacactttttctgtcttcccctccatcattctgggatttgaattacatgtatacagtaactgttgttgtttcataggtgactaactgggtaggggaatgtctggttcccttactatccggtgaagtagcagaaccaccttttgtaggaatcagttatcaggccctttactttcccttgaactctaggctagttccagaacctttggtggactggaaagaggaaatagttatgccacaatttttagtacatgcaaatgtacatgtaatgtttaaaaaaaaaaaaaaaaaaa

SEQ ID NO: 463 - DNA, 1160 bp, Homo sapiens
ggttgggtcaaggtaactctgggctacagagtccttgctgggggttcggggagcgcttggaccccggcttctgggacgcgtcaggagaagggagcactggctttgctttcatcaggccaaagatgcctttytttgggaatacgttcagtccgaagaagacacctcctcggaagtcggcatctctctccaacctgcattctttggatcgatcaacccgggaggtggagctgggcttggaatacggatccccgactatgaacctggcagggcaaagcctgaagtttgaaaatggccagtggatagcagagacaggggttagtggcggtgtggaccggagggaggttcagcgccttcgcaggcggaaccagcagttggaggaagagaacaatctcttgcggctgaaagtggacatcttattagacatgctttcagagtccactgctgaatcccacttaatggagaaggaactggatgaactgaggatcagccggaagagaaaatgaagaccccagagacatttattggggagtaggatgtggctgagtgctttttttttggccagactagcggattcagtcctggaagagagtatcatataatgagacccacaggcactggcacccttgggttggcaatagaaggtgacatggaatggagaaaaccaagattccagatggggatagtaactagaaggtgcttcagatgcactgcctgcgggtgccagtctgaaaaccagaccgcacagaggcctggggctgctgatgagctttttggtgctctccacacacaagctcgcaaacacacatgtcccagaatagctctgttgggttgtgttgggagaagcggctggagttcattctctcacccccttatgttggtgtttggcgtgtgacagcagttctacagagctctgtgttggggtcatggatgagcggctctcttggctcttaaaggcaggcctctctcttcttgcctttaaagaatcctccttcctcacacctggcctcctctggcttcagcttctcagcagcaagcaccagccttccacaacaacactatatttttatgctactttcctgtttgcactactacttttttattaaacgatgttaaataaaaaaaaaaaaaaaaaaaaaaaaaaaaaaaaaaaaaaaaaaaaa

SEQ ID NO: 464 - DNA, 1258 bp, Homo sapiens
  misc_feature (161)..(161): n equals a,t,g, or c
  misc_feature (245)..(245): n equals a,t,g, or c
  misc_feature (364)..(364): n equals a,t,g, or c
  misc_feature (408)..(408): n equals a,t,g, or c
  misc_feature (440)..(440): n equals a,t,g, or c
  misc_feature (1210)..(1210): n equals a,t,g, or c
gttctgggaaggggtgtgatgcattaaggagatggtgtctgcatggtgccaccgcaggscatggccagctggatctgtgtcttctgcaccagcccatctggatgcagtgcaacctgtctggtctgctatcctgcgttcccctaactggcaccctcctgggnccagccagcagcaggacatagaccaaggccaacctcctccacacccagggcctctgccttctaccctctgtggagtctccattnaacttgggcattgacagggctgcttgactcaaaacaaccccagccctgccctgaagccatctcgccagtcagtcagagctcaagaytytctctttctctggagaagagcaggaaagtantcccagctaaccctcatgcagccaccactctgtgtcagaatctnttctaggccattgcattgaataagtcatttantccatataaacctgcaaggagtaggtgatattgttaaccccattttataggcgagaaactgaggcatggtgagttaagtgaccagcaagtggaaatctgaggtttgacccatctcctggtgtggagtccagttctctcagcttcactgatccttcctgatttgtgctgagttaggaccccttgggaacccccatgggcagggggtgctggtgctagcatttcctgtggattatgggagggggatgtgtggaggacctgtgtctactgttcctctagcctctgggggatttggagaacccactctgcccagagatgtaagtcatcttkggawatagatgagacttkttccccctccccctkaatcccrgggcacagctctatggaataagctctagctggaacttgtaaagtttggcccasccctccctgggaggctaggagktgggraagagccaggagactcraagtggtggtggtagttaatgtctatgtggttagacgttaaccagttactctgtggtgccaggcactgtcctaggcacgctatagttatcattgtctcctttggtgcccccagacagcccagggtcaagacaggtagcctcagtttacagatgcagcagtggaggcttgcacaatgagtaggtggctttgttcaaatcacagacctaggccaggtataaaagcctaagtgtggtgtaattccagcactttgggaggccaaggcggggagattgcttgagtccaggagtttgacaccagcctgggcnacatagtgagaccctgtctctacaaaaaaaaaaaaaaaaaaactcgag

SEQ ID NO: 465 - DNA, 1200 bp, Homo sapiens
ggcacgagaaaaaatgtaagctgaaatgatgacgtgttcttttagaaggtttatcatagcaactactataggcagtgattctaagaagatgctattctttttttccattgctttgtctagttttttttttttaaatctgtttttgtgcctttgtaattctagggttattggtatagttctcaccatatcttgaatacagatgctttttcctttggaaataatttctcataaagcacattgcttatagctgcttcccttttcccagagtagtaaaagttgtgatacaagacagtgatatcagctgggcgtggtggcacacgcctgtaatcccagcacgttgggaggccaaggcaggcagatcacttgaggccaggagttcgagaccagcctggccaacatggtgaatccccgtctctactaaaaatacacacaaaaaattagctgggtgtggtggtttgtgcctgtagtcccagctactcgggaggctgaggcacgagaattgcttgaaccagggaggtggaggttgcagtaagctgagattgcaccactacactccagcctgggtgacagaacgagactctgtctcagaaaaaaaaaaaaagagacaatgatatgaaaaggtcttacatgaatgagttttacgcatgattcaatctgtaagtcctataaattatttttgatggatggtatctattttcttcctattagtagttttgggcaaaaataaatttaactgaatgtaaaaatattcagctctatggggagctgagaagaactaaatattttcagacacttgttatgtgcaggttgtttggcatatatttttaaaaatctttataataccattttgaattaaattctatccccatttaacaaatgaggaggtggtttctattcttaagtaactttcccaaaatcactcaattaagtggcaagggtgggatttaaatcgaagcctatactctttcacttgtttccaaagatgccaaactcaaaatgtggctaaacagtaaatcttgagcaaagaaatgatttactaggaagcagcacaatagaacatactggatgtaggaaatgttatatatcttgatctcattggtggtaacacaagtatatacatatgaaaaagttagttttatccttactgttagtactcagtgctcttattattcctcaaaaatgaaaaaaaaaaaaaaaaaa

SEQ ID NO: 466 - DNA, 1652 bp, Homo sapiens
aaaaaaagaaaatacagtaagtagccacataaaccgcttctagctgggtccactggtccccctgcttcttgtttattaacggaatctgttcaggggctctagggctcagagctttaggggagtctgagcccttctccagccctggggtgatgggtcttgattgatccaggtcaaattctccacagatttaattctggccaatgaatatgagaagaaatgagaaggtggaaaggtgtcttagtctactttttgctgctataataaaaataccaatacatggggtaaattataatgaagagaaatttatctcatggagttctggaggctggggagtcccaaaatcaaggtgttggcatctggtgaggagcttcttgctgtccaccccatggtggagggtggaagggcagaaagagagagagggctggaggccaataggtggctgaactcatttttttatgaggaacccactcccataataacagcattaatccactcatgagagcagagcccccatgacccaaccatttcccattaggtcctacctccccacacccactgcactggggatcaagtttccaacacatggaactttgggagacacattcacgacatagcagaggaccactggagaaaggaaggtttttaaagattttttttaggacactatggaagtgatagccattggacatggatggtgtttttgtttttggcatgggaaaaggcttatacaactctggtcaacttggcaacactaatcaaaagtcaaaatctcctttgaccctagggatcccctactattaacagtattatatcttatagaacctaggtatttaggaaagaaaaaaatgttcaaagatgtattgacatttaataaaagcaaataactggacataacccagctatccaaatacaggctatcaggaaacactgtgaaggactttgaaataggtcttgcccactgcccccacccctgcctccaattactgagtgttctgtctaatctagcccaccyttctgagttgattccctttcatttcactgcctttgagctactttacaattacgtaaattaagggaaactgataatgcagatgattctkgttcatagaaatgcaaattgtgaccaatggaatataactgattattgttctgcaggtatcagccaattttgccagttttgtaactacgaagcaaactcatttcagcattcctgctaggcttataattatttgttctttggattctcctttgagccaattaaagtgtcctactggttctctcaataattaacaagttaaatacaatcatctttaacatgttacttttatatttgtatgagtcataattttaacttctaaaaaaattatcctttaacaaggtagttaagtaaatttaatgttcatgtggtataatttacttagcagccctcttaaaacagttataaaaaccatatggcaacagggacaaatactcctgataaaaatggcaagtggggaaaaaagcagaaatgcaaaatttgtactacgttgtgattaaagctaaacgttgtaagtgcttagggcaagaaataggaaggagaaaaaaaattgaagttggatttgtttgttagggtggtaggatcctggattaaaaaaaaaaaaaaaaaactcgag

SEQ ID NO: 467 - DNA, 1981 bp, Homo sapiens
ggcacgagtcacccaacaatgtttttttcatgttgatcactttactaaagcgaacaattggggttttaccaaaattgtgaaggattttattcttccatacttatgtctgtgttcagggtcatacagattctactttttccttttagtttaaggtattctcttggagatttaatgtacttaaatttgaccacaatttattgagagcatattctgtgtcagacattgcactctgcactagatattcaggaatttctaaaaagaatgttaacattgctgttacatagtcagttactgatcacattcttttcctctcaacttttttcaaaataggaatctgcggtatgttttcacgtatggagttcaggtcaggcttaggggtccctgacaatgtgaatagttttaagctgggcctcaattcgtggtacccttatactaatttaacaagccgtggactctaggttccaccaaaaatattttgttccatcctctctggtttcagtccatggtggtacagaaagaaaactaaggaacttcagccccaaattgtcaaattttgctacttaagaaacagaagatttaaatctatcattttgtcttatattccagagttgactggttcctcctgtctttaacttcttgtccttgaagggtattctaattttcattcagaaatatgacttctcatagggtttgtgttagatattttcagggccagatggatatgatgttcccatttctgttttattgttaaactactattccttttgagctgtaatgaacaattcattctgagaggcaatatatgttttccagtaattgacttgaataaaagtaaatgttaaacatggagttactaaagttaatacagtgggtattagtactaatttgttcaaattaagatagaattcttaatttgataaatagaattcttatattacagcatcagtccaattggattgatagtttgtaaaaggtaatttcttacatgaagaaagacaggttttctttctcttagcaaggtattaatgcaaaaatgaactcttcatttcctaccagcttccgaaggaaatgctggttaggagtaaattcaatttactctaccaaccaacttcacatctgttatgctgaagtcagagtttatctttcttgttatgtggaacctagaaatataccatgaggaatactgaaaataaactagcagaaattttgcgtgatgctgaggatttttagatggctgcaaaatgggtgaaagtaatataaacttaacaaagaatgttgtcacaactctctggaacttagtactgtttttcaactacaaatggaagatttgtgagactaggtcgacttaatgtgatttcaatgcagtaattactgtgtggcatgggcatggtaagagataggccttttctagaaatattctcatctctgttttttttagttgctcttacttagatttatattaactcagcttcacattttcatttctttttattttattttaaacaatgagaaaaatactccacgatgtcactgatttagttatcagatttgctttatttctgtatataataggtaatgtgagtacaggaaatatatctgaaaaggttacttgtacctaaattttaagttagatcatttaaaaattacttataagtctcttgagtgttttatatagtagggcagatggaaaaacttatttgatattcatttttggtacctcttaggaaaataattgggaatgtattcagttggaaaaaatgttgagaagagtgttttatataatgattatttagtaaaacattaaaaataatttcttattctggaggtttatagacatcaaaattgacaaagattacatggattatacatttgcattcaaggtacctttaagcgattttttaaaaaaaattctgactctaacaatgcatgctcattgtagagcgttaaaaatacaaaaacatgcaaaaaaaaaaaaaaaaaa

SEQ ID NO: 468 - DNA, 1640 bp, Homo sapiens
  misc_feature (1639)..(1639): n equals a,t,g, or c
ggcacgagctgacttacagctcttataaactagtggcaatttctgaacccagccggctccatctcagcttctggtttctaagtccatgtgccaaaggctgccaggaaggagacgccttcctgagtcctggatctttcttccttctggaaatctttgactgtgggtagttatttatttctgaataagagcgtccacgcatcatggacctcgcgggactgctgaagtctcagttcctgtgccacctggtcttctgctacgtctttattgcctcagggctaatcatcaacaccattcagctcttcactctcctcctctggcccattaacaagcagctcttccggaagatcaactgcagactgtcctattgcatctcaagccggctccaaggtcctggccaagaaagagctggcctatgtcccaattatcggctggatgtggtacttcaccgagatggtcttctgttcgcgcaagtgggagcaggatcgcaagacggttgccaccagtttgcagcacctccgggactaccccgagaagtattttttcctgattcactgtgagggcacacggttcacggagaagaagcatgagatcagcatgcaggtggcccgggccaaggggctgcctcgcctcaagcatcacctgttgccacgaaccaagggcttcgccatcaccgtgaggagcttgagaaatgtagtttcagctgtatatgactgtacactcaatttcagaaataatgaaaatccaacactgctgggagtcctaaacggaaagaaataccatgcagatttgtatgttaggaggatcccactggaagacatccctgaagacgatgacgagtgctcggcctggctgcacaagctctaccaggagaaggatgcctttcaggaggagtactacaggacgggcaccttcccagagacgcccatggtgcccccccggcggccctggaccctcgtgaactggctgttttgggcctcgctggtgctctaccctttcttccagttcctggtcagcatgatcaggagcgggtcttccctgacgctggccagcttcatcctcgtcttctttgtggcctccgtgggagttcgatggatgattggtgtgacggaaattgacaagggctcttcctacggcaactctgacagcaagcagaaactgaatgactgactcagggaggtgtcaccatccgaagggaaccttggggaactggtggcctctgcatatcctccttagtgggacacggtgacaaaggctgggtgagcccctgctgggcacggcggaagtcacgacctctccagccagggagtctggtctcaaggccggatggggaggaagatgttttgtaatctttttttccccatgtgctttagtgggctttggttttctttttgtgcgagtgtgtgtgagaatggctgtgtggtgagtgtgaactttgttctgtgatcatagaaagggtattttaggctgcaggggagggcagggctggggaccgaaggggacaagttcccctttcatcctttggtgctgagttttctgtaacccttggttgccagagataaagtgaaaagtgctttaggtgagatgactaaattatgcctccaagaaaaaaaaattaaagtgctaaaaaaaaaaaaaaaana

SEQ ID NO: 469 - DNA, 776 bp, Homo sapiens
  misc_feature (501)..(501): n equals a,t,g, or c
  misc_feature (763)..(763): n equals a,t,g, or c
  misc_feature (767)..(767): n equals a,t,g, or c
  misc_feature (772)..(772): n equals a,t,g, or c
gtcatgtttaagtggggataatgacattggcatacctgcttgctagagttaatgtgtgggtcatgagataacgaatataacaaatatttggaaaagtactatgtygaaatattttaaaataaamtttaaatccctcttmattyagaaaggatttgaggcagctaaatgcagaggtgtaagatggttttttggttaggattgtttctgagctgtgactctgtagtcactttcttactcagccctgccactcagctgtattcctctgtagctctgggcagacgactctgaacayggcttcatattggccttccatgagtgggtgaagggcatagtcatctggcagttttacctgctgttctatgcatgtctctccagcgcttgcttattttccccttctgcaaacattccattcatgccatgggcattcagtacagtcctgtaagcaagggtaggggcggcacaccaggtggatttaagcgcaaagacaggacgactgctttnccacaggcgcctttacagccagcagtgaacagttagacatattcaccttcctctaggtggaaaacagtcctcttctcagtagccctctcatgttcttgagacccatttgatataaataacartgttgcaggaaatttcctgaaggaactgaaatgaaccatagaaacgagatcgttcttttcctaccacacagctgggattagactgcttagtttgtacttgcagcacttttgcagtatgggccgtattaaaaaaaaaaaanaaanactcngaag

SEQ ID NO: 470 - DNA, 727 bp, Homo sapiens
  misc_feature (713)..(713): n equals a,t,g, or c
ttttcacgtgtcctattttcttgataataggtaccccggattccatcagtcttaaattatgacttccaaagaggtcttcactggattcagcacctgtcgtaactgactgtatacccagttctcagaaatgacttgtgtytagtctagtttttagtgtaggtaaggaaaaaaactgagatatctctttctaggactgctgtataaataagtactcacatataagtacaatgttcagtagaactgaaaacagaagagtggggcaaaaaggagataggataccaacaggaccacgtctctgtaccttaaagtttttaaaggaaatcttttcaagaagccacatactaaaaaactgatttttcatagtccaacaaattactgcttaaaaatgctggacaatggaaatcaaatataatcagagcaaaatgaagactctcaccatatattacttcttgccgtttgaccacatctttcttttgctgttttagaaacttgctgtctattatccgactccaagactctgcttccagctgtttggactcaatctcaaagtctcccagtagttgtccttcaktcatgtctgtacmtactcctcartatatcaaaaaatcaatatcagaatcaggtttgtgacctgtaaaataagcctatgttggactttcctcaagatgatagttgatttcataagaccatgaatacagggggatatcccaganatcatattctagta

SEQ ID NO: 471 - DNA, 1860 bp, Homo sapiens
  misc_feature (821)..(821): n equals a,t,g, or c
ggcacgaggtcccccactaaaattaaaactaaactgctacttctgtccattctccctggccggtgttcttgctgctgtgtggcttctgttagaagttcggaaacgaatttttggagaggaaagtcagactaatccttcaagtcttttgagaaacaggtcttctgcattagctgaggggcaggagttctgggcttgccatgtggtgtctgagccatctctctctctctctctctctctctcatctctctttggccaggcgggcaggaagacctatgccatggtgtccagccactcagctggtcattctctggcttcagaactggtggagtcccatgatggacatgaggagatcattaaggtaagcttagttcacctccaacttttctccctgtcctcttcctccctgcacgtatatgagaaggagcagttgatgttgttgccaaagggagcttgtggtttgatggaaggaaccagacctgagctgctagttcctggcaatctcctagaaatatcttaattaataccaggagactacagtctgcctgttagcaactttggtgcagcctggccccaggcaaggggatggactggatgaccttactaggggcctatccactgaccatgttttgctgctaaaggttgtggagacaggtaggaggtgtgtttatggaaaaccatttgagtatgacaactatagcatgaaacatctaaggtttgaaagcattttacaagaaaaaaaaataattcagatcacatgtggagattaccattctcttgcactctcaaaaggtaatttttctgtaatattaatagttttgtanaagtaatacctgtgtgtatatgtggagccagtagaatgtctatatttcacttgtaacaggacagaaatacagttttgaatttgatatggttccgagtacgattcttaaagtaaatacataatgagagaattcttggatctgtaaaatgttcaggtttccaaaattactattcctaaatttggtttcatgtttttatttttcaagtacgaaacagtgaaaattttctgaataatcaaaactgttttctctacatctgatccaggcctggggccacccttttccagaaactgcttcccttttcctaacacctttccaacttccactcttccggctcagaatccccttttgtggccaggctgcagacctctgatacgttttaacattgcttttgaattcaaggatctccctagccctgtagtatttcccattttctatcagacactgtcatggtgggaaatggaagcagtgaatatgaattattttcctaaagaaacttgactatgaggccaggcttggtggctaatgcctataatcccaaagtgctgggattacaggcgtgagccactgcgcccggccacattcagttcttatcaaagaaataacccagacttaatcttgaatgatacgattatgcccaatattaagtaaaaaatataagaaaaggttatcttaaatagatcttaggcaaaataccagctgatgaaggcatctgatgccttcatctgttcagtcatctccaaaaacagtaaaaataaccactttttgttgggcaatatgaaatttttaaaggagtagaataccaaatgatagaaacagactgcctgaattgagaattttgattttttaaagtgtgtttctttctaaattgctgttccttaatttgattaatttaattcatgtattatgattaaatctgaggcagatgagcttacaagtattgaaataattactaattaatcacaaatgtgaagttatgcatgatgtaaaaaatacaaacattctaattaaaggctttgcaacacaaaaaaaaaaaaaaaaa

SEQ ID NO: 472 - DNA, 1854 bp, Homo sapiens
  misc_feature (1280)..(1280): n equals a,t,g, or c
  misc_feature (1826)..(1826): n equals a,t,g, or c
  misc_feature (1835)..(1835): n equals a,t,g, or c
  misc_feature (1852)..(1853): n equals a,t,g, or c
agatcttgccatcatactccagcytgggcaacaagagtgaactccatctcacacaaaaaaaagaatgttgaatattggcccgcactctcttctggcttgtagtgtttccgcagagaaatccactgttagtctgatgggcttccctttgtggataacccgacctttctctctggctgcccttaacgtttttttcattcctttcaaccttggtgaatctgatgattacgtgtcttggggctgctcttctcgagaagtatctttgtggtggtctctgtctttcctgaacttgaatgttggtctgtcttgctaggttggggaagttctcctggataatatcctgaagagtgttttccaacttggttccattctccccatcattttcaggtacaccagtcaaacataggtttggtcttctcacatagtcccatatttcttggaggctttgttcattccttttcattcatttttctctaatcttgtcttcatgctttatttcattaagttgatcttcaatctctgatatccttttttccacttgatcgatttggctattgatacttgtgtatgcttcacaaagttcttgtgctgtgtttttcagctccatcaggtcattgatgattttctctagactggttattctagttagcaattcttctaaccttctttcaaggttcttagtttccttgcagtgggttagaatgtgctcctttagctcggaggagttacccaccttccgaagcctacttctgtcaattcgtcaaactcattttccatccagttttgtttccttgctggcgaggagttatgatcccttggaggagaagaggtgttctggtttttggaattttcagccttcttgtgctggtttttcctcatctccctggatttatctgcctttggtctttgatgttggtgacctttggatggggtttttgtgtggacatcgtttttgttgatgttgatgctattcctttctgttttttagtttttctcctaacaggcaggcttctctcctgcaggcctgctggagtttgctggaggtccactccagaccctgtttgcctgagtatcactagcagacactgcagaacagcaagattgctgcctgctccttcctctggaagtttcgtcccagaggggcacccgccagatgctagtggagctctcctgtatgaggtgtctgttgacccctgctgggaggtgtctcccagtcaggaggcacaggggtcagggacccacttraggaggcagtctgtcccttagcagagtttgagtgctgngctgggagattcgctgctctcttcagagctggcaggcaggaacatttacgtctgctgaagctgcacccacagccgcctcttccgccaggtcctctgtcccagagaggtgggagttttatctgttagcccctgactggggctgctgcctttctttcagagatgccctgtccagagaggaggaatctagagaggcagtctggctatggcagctttgcagagctgtggtgggctctgccaattcgaacttcccagaagctttgtttatactgtgaggggaaaaccacctactcaagcctcagtaatggtggacgcttctccccacaccaagcttgagagtcccaggtcgacttcagactgctgtgctggcagcaagaatttcaagccagtggattttagcttgctgggctctgtggcggtgggatccactgatccacttggctccctggcttcagttccctttccaggagagtgaacagttctgtcgctggcctttccaggtgtcactggggtatggaaaaaaaaaaaaaaaaaamtcgggggggcccntacccattngccttagggggcgtttnna

SEQ ID NO: 473 - DNA, 1947 bp, Homo sapiens
ggtggcacatgcctgtaatcccaactacttgggaggctgaggcaggagaatcgcttgaacccaggaggtcaggttgcggtgagccgagatcttgccatcatactccagcctgggcaacaagagtgaaactccatctcacacaaaaaaaagaatgttgaatattggcccgcactctcttctggcttgtagtgtttccgcagagaaatccactgttagtctgatgggcttccctttgtggataacccgacctttctctctggctgcccttaacgtttttttcattcctttcaaccttggtgaatctgatgattacgtgtcttggggctgctcttctcgagaagtatctttgtggtggtctctgtctttcctgaacttgaatgttggtctgtcttgctaggttggggaagttctcctggataatatcctgaagagtgttttccaacttggttccattctccccatcattttcaggtacaccagtcaaacataggtttggtcttctcacatagtcccatatttcttggaggctttgttcattccttttcattcatttttctctaatcttgtcttcatgctttatttcattaagttgatcttcaatctctgaatatccttttttccacttgatcgatttggctattgatacttgtgtatgtgctcacaaagttcttgtgctgtgtttttcagctccatcaggtcattgatgattttctctagactggttattctagttagcaattcttctaaccttctttcaaggttcttagtttcccttgcagtgggttagaatgtgctcctttagctcggaggagttacccaccttccgaagcctacttctgtcaattcgtcaaactcattttccatccagttttgtttccttgctggcgaggagttatgatcccttggaggagaagaggtgttctggtttttggaattttcagccttcttgtgctggtttttcctcatctccctggatttatctgcctttggtctttgatgttggtgacctttggatggggtttttgtgtggacatcgtttttgttgatgttgatgctattcctttctgttttttagtttttctcctaacaggcaggcttctctcctgcaggcctgctggagtttgctggaggtccactccagaccctgtttgcctgagtatcactagcagacactgcagaacagcaagattgctgcctgctccttcctctggaagtttcgtcccagaggggcacccgccagatgctagtggagctctcctgtatgaggtgtctgttgacccctgctgggaggtgtctcccagtcaggaggcacaggggtcagggacccacttgaggaggcagtctgtcccttagcagagtttgagtgctgtgctgggagattcgctgctctcttcagagctggcaggcaggaacatttacgtctgctgaagctgcacccacagccgcctcttccgccaggtcctctgtcccagagaggtgggagttttatctgttagcccctgactggggctgctgcctttctttcagagatgccctgtccagagaggaggaatctagagaggcagtctggctatggcagctttgcagagctgtggtgggctctgccaattcgaacttcccagaagctttgtttatactgtgaggggaaaaccacctactcaagcctcagtaatggtggacgcttctccccacaccaagcttgagagtcccaggtcgacttcagactgctgtgctggcagcaagaatttcaagccagtggattttagcttgctgggctctgtggcggtgggatccactgatccacttggctccctggcttcagttccctttccaggagagtgaacagttctgtcgctggccttccaggtgtcactggggtatggaaaaaaaaaaaaaaaaaactcgagggggggcccgtacccaattcgcccctaagtgatcgtacac

SEQ ID NO: 474 - DNA, 2078 bp, Homo sapiens
aattcggcacgagcccacacctgctgcccaccaccccggcagcacctttccctgcccaggcttcagagtgccctgttgctgctgccactgccccccacactccagggccatgtcagagctcccatctaccctccaccagcatgccgctcctgaagatgcccccaccattctcggggtgcagccacccctgcagcgggcactgtggtgggcactgcagtgggcctctcctcccacccccgagctctcagccactccctagcactcacagggatcccgggtgcaaggggcacaagtttgcacacagtggcctggcttgccagctgccccagccctgcgaggcagatgaggggctgggtgaggaagaggatagcagctctgagcgaagtcctgcacctcatcctccacccaccagagagatgggaagttctgtgactgctgctactgtgagttcttcggccacaatgcggaaaaggagaaggcccagttggcagcagaagctctaaagcaggcaaatcgtgtttctggaagccgggagccaaggcctgccagggagaggctcttggaagtggcccgaaccgggaactggatcgggtcaacagcttcctgagcagccgtctgcaggagatcaaaaacactgtcaaagactccatccgtgccagcttcagtgtgtgtgagctcagcatggacagcaatggcttctctaaggagggggctgctgagcctgagcctcagagtctacccccctcaaacctcagtggctcctcagagcagcagcctgacatcaaccttgacctgtcccctttgactttgggctcccctcagaaccacacgttacaagctccaggcgagccagccccaccatgggcagaaatgagaggcccccacccaccatggacagaggtgagggggccccctcccggtatcgtccccgagaacgggctcgtgaggagactcaacaccgtgcccaacctatcccgggtgatctgggtcaagacacccaagccgggctaccccagctccgaggagccaagctcaaaggaagttcccagttgcaagcaggagctgcctgagcctgtgtcctcaggtgggaagccacagaagggcaagaggcagggcagtcaggccaagaagagcgaggcaagcccagccccccggcccccagccagcctagaggttcccagtgccaagggccaggtcgctggccccaagcagccaggcagggtcctagagcttcccaaagtaggcagctgtgctgaggcttggaagaggggaagccgggggaagccggccaggaccaggttgggctggcagtcccaaaactgagaaggagaagggcagctcctggcgaaactggccaggcgaggccaaggcacgggcctcaggagcaggagtctgtgcagcccccaggcccagcaaggccacagagcttgccccagggcaagggccgcagccgccggagccgcaacaagcaggagaagccagcctcctccttggacgatgtgttcctgcccaaggacatggacggggtggagatggatgagactgaccgagaggtggagtactttaagaggttctgtttggattctgcaaagcagactcgtcagaaagttgctgtgaactggaccaacttcagcctcaagaaaaccactcctagcacagctcagtgaggccctgcccaggctgagctgcttcagggcatcctgaggccctgactgccagctgaaggcgtataatttttccctccgtgtgccccacctacccgtccaagaccctctgtgctccccaccatcctggaccaaccaaaagctgaacggatgccacactgtgctggggccccttgacctcagcagagccgcttcctggtgctacgcagcctccacactcagagcccgtggactgggctggcctaagggccagggctgatggtactgctggcccaacactgctctctttgtgtttggtttttttgtttttgtttttattttgtttttttccaattctttacttttgatactgtgaagatctttcgtgccgaaagataaagcaacatttggacacagaaaaaaaaaaaaaaaaaa

SEQ ID NO: 475 - DNA, 1257 bp, Homo sapiens
ggcagagtgggggttggcgtataggtgtaggggcccatgttggtttgggagtratgacagttcacgcctgtgggtttgcggacaaagataccatgccccatccctgtctccctgtcagcacgcacttggaagggcgctgggggtgttaatcagctttgctagcctggggtgtgccagcctgggcaggtgtgctctggtgatggacagagcgcctgaggttccatagagggagggtgttgctatgacatctgagatgtcaccagcatgcccctgatgtgtgctccttgcatgtccccaggtgtgctaggcatgttctgtgtgtcctggcatgttaacctggcagtatcagggtgcatgttccatgtgtggcacggtgggcacatgtttgaggattgccctcactgaggtgggccttggcacacccccctgcctcgtgggcccttctcccaggtggtggacatcatgagggtgaacgtggacaagtycttggagcgagaccagaagctgtcggagctggacgaccgtgcacatgcactccaggcgggggcctcccagtttgaaacaagcgcagccaagctcaagcgcaaatactggtggaaaaacctcaaggtaagggtggggacaggaaggaggacaggtgggtgaatggggtatcatagtttgtcttactgatcctcgcctctcacccccagatgatgatcatcttgggagtgatttgcgccatcatcctcatcatcatcataggtgagtagggtgagaatggccggggccctttccctggagaggtttccccagtggattctaggttttgaaggtcattaatctagtttttactcttcagccaaaaacacatatagctgctaatggcaattctgattcatctararccaaaaactttgatgttatttagcctgcattttgcctarttcttggcagtcttgttaacatttggaaataaggaaagctggtgtwtccattgargaccctttaggcctaagagcccagtctgagaaccctggaattgaggagtgggagaaaggaaaggaccaggggcttgagacatgactagccccaagtcccttcatttgcatctgctatgcaatagtccctctcctttccttcttcttccctcagatttagctgatccttcctcccaccctggccttcctttcctctttcctcctcactctccccgtcatgctccctctgccccgccctcaaaaaaaaaaaaaaaaaaaaaaaaaaaaaaaaaaaaaa

SEQ ID NO: 476 - DNA, 1504 bp, Homo sapiens
ggcacgagcataactggcccctaacaatgggggccatctgcacgctgttgtatgcagatttggatgtgttttctagcacttacatgcagatagtgaagctcctgggactggatgtgccatctctgtgcttggcagaactggtgaagacctattgcagcagcttcaaactgttccaagcttcaccttctgtgccagccaaatacgtggaagacaaagagaagatgctgtctcgaacaatgcagttggtggagctggcaaatgagacgtggctggtgaccgggaggcatcccttgcccgtcatcactgctgcgactttcctggcttggcagtcgctgcagcctgcagatcggctttcatgttcccttgcccgattttgtaaattggcaaatgtggacctgccctacccggcgtcctcccgcctgcaggagctgctggctgtgctgctgcggatggctgagcagctggcctggttacgagttctgagacttgacaaacggtctgtggtgaagcacatcggtgaccttctccagcaccgccagtcactggtccgctctgcctttcgggatgggacagcagaagtggagacccgagagaaggagccaccggagtggggacaggggcaaggagaaggggaggtgggaaataattccttaggtttaccccaggggaagcggccggccagtcctgcccttctcttgccaccctgcatgttgaagtccccgaagcggatctgccctgtaccccctgtctccactgtcactggagatgagaacatttctgatagtgaaatagaacagtatttgcgtacccctcaggaagttagggactttcagagagcccaggctgctagacaggctgccacgagtgtccctaaccctccctgatggatatccactgggagcacttcatcctgttctgacagcttgataacattcctgttataaccaaggatggaagtgtacaccagtccgtaggtattgcttttcttgtttgaaggaaccaagaggggctctgccattagttggaccctgggtcctggagtaaagtcaggagtgcagggatgactataggtaggagagattcccatcccttggtgtgggagagcaagttgcctatgtccatgttctgtgagatggctttcctcatagatggatgggaaaatgtcaggctctttgctgctggtttgaattggacacactgctgcggctcctcctgcaggcctgagggggcttccctctgcttgtggagtggttggcattcccagcagtatcaaccctcagaggagcgggaactggggaattctggccctacgtgcattcacaggcaatgatgggtttgtgtgtatggtgtcatgagatcctctacctcataacaaaaggacagtgggtagactaaggcagtagctcaaagggctttgcaaaattttaatatattaaaacaagaggcatctgctagaaaacattctattgtataaaacccgagttcttaaaaaaaaaaaaaaaaa

SEQ ID NO: 477 - DNA, 1973 bp, Homo sapiens
ggcacgagcgtcacttccggcttccttcagtccgctggtcccgagcacgagctgtgaggggattcacttgtgtgcggaactcctcggaaccatggcgtccctttcccttgcacctgttaacatctttaaggcaggagctgatgaagagagagcagagacagctcgtctgacttcttttattggtgccatcgccattggagacttggtaaagagcaccttgggacccaaaggcatggacaaaattcttctaagcagtggacgagatgcctctcttatggtaaccaatgatggtgccactattctaaaaaacattggtgttgacaatccagcagctaaagttttagttgatatgtcaagggttcaagatgatgaagttggtgatggcactacctctgttaccgttttagcagcagaattattaagggaagcagaatctttaattgcaaaaaagattcatccacagaccatcatagcgggttggagagaagccacgaaggctgcaagagaggcgctgttgagttctgcagttgatcatggttccgatgaagttaaattccgtcaagatttaatgaatattgcgggcacaacattatcctcaaaacttcttactcatcacaaagaccactttacaaagttagctgtagaagcagttctcagactgaaaggctctggcaacctggaggcaattcatattatcaagaagctaggaggaagtttggcagattcctatttagatgaaggcttcctgttggataaaaaaattggagtaaatcaaccaaaacgaattgaaaatgctaaaattcttattgcaaatactggtatggatacagacaaaataaagatatttggttcccgggtaagagttgactctacagcaaaggttgcagaaatagaacatgcggaaaaggaaaaaatgaaggagaaagttgaacgtattcttaagcatggaataaattgctttattaacaggcaattaatttataattatcctgaacagctctttggtgctgctggtgtcatggctattgagcatgcagattttgcaggtgtggaacgcctagctcttgtcacaggtggtgaaattgcctctacctttgatcacccagaactggtgaagcttggaagttgcaaacttatcgaggaagtcatgattggagaagacaaactcattcacttttctggggttgcccttggtgaggcttgtaccattgttttgcgtggtgccactcaacaaattttagatgaagcagaaagatcattgcatgatgctctttgtgttcttgcgcaaactgtaaaggactctagaacagtttatggaggaggctgttctgagatgttgatggctcatgctgtgacacagcttgccaatagaacaccaggcaaagaagctgttgcaatggagtcttatgctaaagcactgagaatgttgccaaccatcatagctgacaatgcaggctatgacagtgcagacctggtggcacagctcagggctgctcacagtgaaggcaataccactgctggattggatatgagggaaggcaccattggagatatggctatcctgggtataacagaaagttttcaagtgaagcgacaggttcttctgagtgcagctgaagcagcagaggtgattctgcgtgtggacaacatcatcaaagcggcacccaggaaacgtgtccctgatcaccacccctgttaagcattcccacgtgctgtcgatctttggaccagtttctagcaaagttgtgtttgaaagatactctattaaagaagactgtggaatctgtttatcggtgcccattatatccttaagtttggatatttagctgaccttcgctttaacataggtctaatttatttgccgtgtcattttccatacaaatcagttgatttaaaaaagttcatttctcatactgtgcattaaaataaaaatttgaacaattaaaaaaaaaaaaaaaaaaaaaaaaaaaaaa

SEQ ID NO: 478 - DNA, 1880 bp, Homo sapiens
  misc_feature (642)..(642): n equals a,t,g, or c
  misc_feature (655)..(655): n equals a,t,g, or c
ggcacgagcagaaactcattctgaaatacaaggaggcaatgagcaacaaggcgtgcaggtattttgatgaaggacgtgggagctgcccatttggagggaactgtttttacaagcatgcgtaccctgatggccgtagagaggagccacagagacagaaagtgggaacatcaagcagataccgggcccaacgaaggaaccacttctgggaactcattgaggaaagagagaacagcaacccctttgacaacgatgaagaagaggttgtcacctttgagctgggcgagatgttgcttatgcttttggctgcagtggggacgacgaactaacagactctgaagatgagtgggacttgtttcatgatgagctggaagatttttatgacttggatctatagcaaccttgcgtggcgtgtgaactggtctgctgacctcagacagcagctgtcccctgtggtggtgtggcatgcctgtgttctctcctaggcagctctcaactccaggtgctgtcctaagaatttttacccagggcctgtcttctcaacccctcacctttccctagaggagtgtgttgttttccctgtggaaaaaagttacaaaaataaatcttaaagttagtttttggtaacacaaatttaactgtcanacagttagtgtangtgtgttgcgtcacctgtttccaaccaaatggcatttatggactttccacacactcattttgaggaccccaggttcaaaagtaaaagcagtggccctgctttggggtccaagaataggagtgatgggtgaagggacctaagctggccaatagccctctgccccagacatgggatgtggatccttgaggtttctggtgaaatctgcacatctgtgtttttatatctgttccctaccctgtaatccctaccacgtgcacttgttctgtggttttggtctcttgtttaattgcacacaagtaatactactgggtaaccagaatcaggtgtgaatgtgttgagattttttactgttttgcatgataggaaaattgagaaagaatacgtataaaagatagagaggcataacatcaatgcagagttggaagttggctcccaagggctgacatggtgtgagtgtgtgggtgtgtgataagcttctcatccctgcatagatgcagtattcttagccttagtagaaaaacctggtttagtggtttaagccttgtgtggcagatagatcttaaagggcaaagcagtatattggtagttgtcaatatagcagtgctagctctgtctatataaatagagaaatggggttagccatagaggttaaaactacctggttatcccatataataacacaaactgggtcttggatacacagttgtatttaatgttttacgatctagcctttccagtacaggcactttctgagaaacctttgtcctcacttgaggcattttgttgtcgggtttttgtgtttgtttttgtgggtatttgcctcattccacccctgagctttcaggtagacagacgtgattcaaaactctgttctaaggtgtttattgtagtggagtaatgggtttgcagtgataagtcatacttttccaccgaaagggagggcttgggaatccctgagattagctaaagttaagttgttggaagaattccttgattggaaattgtacctttgtgttttgttgctctgtttcctgaaaataactcggggatgctcctggtttgtccatctactgctttgattccttggatcccacccattctttcactttaagaaaaaacaaataattgttgcagaggtctctgtattttgcagctgcccttttgtaagaagcacttttcccaaataaaacaattaaaaaaaaaaaaaaaaaaaaaaaaaaaaaaa

SEQ ID NO: 479 - DNA, 1361 bp, Homo sapiens
  misc_feature (903)..(903): n equals a,t,g, or c
  misc_feature (1031)..(1031): n equals a,t,g, or c
  misc_feature (1264)..(1264): n equals a,t,g, or c
gattcaaggctcactccagtccacgtttctagcttccgtcttccctcccctgcacatactactgcatgtacctccacagtcttcccttttgctttgctggcatctcatgtctttgttgcctatccaagctccctgttgaaattctatccatacttataattaacatgtcccttgattcatacagactttatcagcctgcccttagtttctgtcagacagaattaagtcctctgttcccatataaagcagatctttatagctgttttagtagatattgtttatatatctctctctttcacagccccttgtaacccatctcattcccatattctctttcaacccccatctctggattacagatagaaagggtgataagtttgtgggctgtgtctctttaatcttgtacctccacagcatctaggacagtgtcttgcctaaagcaaggatggaattaacatttgttaatacacgcttatctgtcagtcttactatcctcaccctgcttcataaggaaatwatattttattwatattttatttcaaatcagtaatactgcctgtcacatcactaaaacctcaaaaaacagaaatgtttgaaataagaattttcaggtttgccttgtgataactgtatactaactagttgaaagtatggattcagtatcttcaaagtgttctgatttgctaggactcactgttttcttgtgtttaatcttcagtttgtgaggtcatttaatttgtagcatttgcaaatgttatactgaaaaactctgagaatgaaataagtcactatactacgtatttttataaataaggaagtgcacaattatgtgacttcacatttcttgcttgcttgctttttttggggtggggacggagtgttgctctgtcacccaggctcgantgtggggtggtgtgatctctgctcactgcaacctcctattcccaggctccagtgatccttctgcctcagctgggactacaggtgtgcaccaccatactggctaagttttatattttttgttgagatgnaagtttcactgtgttgtccaggctggtcttgaactcctgggcttaagtgatccacctacttcagccttccaaagtgctgggattacaggcaggagccactgtgtccagcttacattttttgtataatcaacattagccagagtaaccacactttagatctgttggtcttcaggaaaagcaatatgtgtctggatgtggtggctcacacctgtaatcccaacactttgggaggnccgaggtcggaggatcacctgaggtcaggagtttgaagccagcctggccaacatggtggaactccatctctactaaaaaaaaaaaaaaagggcggcc

SEQ ID NO: 480 - DNA, 1921 bp, Homo sapiens
  misc_feature (1876)..(1877): n equals a,t,g, or c
  misc_feature (1897)..(1897): n equals a,t,g, or c
  misc_feature (1916)..(1916): n equals a,t,g, or c
  misc_feature (1919)..(1919): n equals a,t,g, or c
  misc_feature (1921)..(1921): n equals a,t,g, or c
ggcacgagagaggagtgggcaccattttcatccagaggcccgtcctgagaggcaagtgaggctgtgctctgtgcctgggctcccccaggtggcacctgtcggtctgtggacctggttgaggcaaggatgcccatctggacatggagccgacacaggtagtcagggggccagcgggacgcttaccaacagctgtcttttccccacctcagaatagcattcctttcgaacaccacggcaagtagctgctcgtctcccatcggaaggcagcactgggtgagtgtgcgcgtggcgggcgccaggcagcagcgccaggtgggtgggagccaccatgccccacccatgggagcttgcaggtgggctgggcttgcatgccaggtgctggaggtagartgaggcttcttctgctctgttcttcttgtggggtgcagagcggcggcagtccgctgcccagtcttggggggargctgtccacagagagctttggaacagagtgaccccaggagaccatcctgttggcctgtsgcctcccsgtgactgcgttccgtgtgccgttgctctcctcctgtcctgggtgcccacccgtgaggcaggagtggcaaggcgggtgccccgagcacttgagttgccttgtctgcggtcggccgtgcctggaggggcgtctgtgtcctgctcagctgggtggctccacgcttggtgttgggggctcctaagctcttgctgcgccacactctgggcagtctctgccatgccagcttttctagtcgcctctctcttcctgtctcatttatctctgtccttgttttgtgtttcttttcacacttggtctctgcccagccgtcttgtccacgcagcttcgtctgtattaactcctccagccgcagcccactcactccccgccgtcggtgcatggccggcgtccacgctgtgctccctcctcggcggccacgcgcgctcggcggctccttccagcaggggcttgcgcttctgtcgggtctgtgccgctgggagacccgctgcagttttcacactgtgcacactctggaaatgtgttgacaggaactgcttttcatgtcttccctgagaggggtacccattttcaaacaccaggttcctttccaggaagggaggcaggagcacccgtctycgctccactcggatccttcgaccctgccgagcccggctccgcgggcaccttgcttgcatgcctcttcctccttcccgtcttcctgtcactcgttctgctgagcacgtgtcccagccacagaggcccctgtgcgtggcgggggacgcaggcgtctagactggggctaggcggtggcggtgcgtcccctccctgcccagcaccgtcactgtggtatctgcctggccggctcccccagccccatgctgaccttctcctgtgctttggctccgacagattcctggtcgggtggcttccagtggtcttcagtctgtcgtgcaccgatgagaactctccttattgctgtgaagggcagacaatgcatggctgatctactctgttaccaatggctttactagtgacacgtcccccggtctaggatcgaaatgttaacaccgggagctctccaggccactcacccagcgacgctcgtgggggaaacatactaaacggacagactccaagagctgccaccgctggggctgcactgcggccccccacgtgaactcggttgtaacggggctgggaagaaaagcagagagagaattgcagagaatcagactccttttccagggcctcagctccctccagtggtggccgccctgtactccctgacgattccactgtaactaccaatcttctacttggttaagacagttttgtatcattttgctaaaaattattggcttaaatctnngaaaaraaaaaaaaaaaaanacgcgagggggggcccggnacnan

SEQ ID NO: 481 - DNA, 1211 bp, Homo sapiens
ggcacgagctcatgcacagaacactatgcattttgaaacttgttcatcctggatttttttaaatcatttttatctcagaacttaaacaaaaattagatgtcgtgcacggactgtgtgaaagaagatgctttgcatatttgctgcactgcatcagtatcttactaaaaatgtgaaatgaaaggactattgtacactgaaatgcttaaatgtatctgaaagcacaaggtgatactcatttttatggtcttcccatttgtgctggtttttgcctctttgacatctgtcatcagtatttagagggtgagaagtgaatgtaacaggtataaataacatttttaaaaacaataactttgctataatcacagttgttccagagcactgtcagatacattctaatgaccagaactggtttaaaaaaagaaaatacaaccatgggaaggaaatcttaaatgaaaaacgcatctcattgtaggcatttttgcctcatattttactgggccatgtttgtttcctggtactcatgtattttttttttccagatctctttccccaagttgctattgtaagagtattctgctgcgtgtggatgcagttatacacattaaagcagatctggagtctgaagtagctataaagcagctataaaacagaaatacatgcatagctgcagaaaccatgataggtagaggacttttcttttggttttgttttgttttgttttgttttgtttttggttttacagagaagagatttttattacaaagaaaaaaattccagtgaattgtgcagaaatgctggtttttacaccatcctaaagaaaaactttacaagggtgttttggagtagaaaaaaggttataaagttggaatcttaaattgtaaaattaaccattgagtgtcaaagttctaaaagcagaactcattttgtgcaatgaacataaggaaagactactgtataggtttttttttttttctccttttaaatgaagaaaagctttgcttaagggttgcatacttttattggagtaaatctgaatgatcctactcctttggagtaaaactagtgcttaccagtttccaattgtatttagcttctggttggaatttgaaaaaaaaagaaaaaaaaaaaaaaaaaacctaaataaaataggtgaaagttccctgactattcaggtgaatacacaaaaaaaaaaaaaaaaaaaaaaaaaaaaa

SEQ ID NO: 482 - DNA, 820 bp, Homo sapiens
ggtctgcgccggaagtgcatgagctgccgatgtggtgcttagtgattgcggtttcggtcgctctcccgtgtttcccgggctgggtatttgcctcgcaccatggcgcccaagggcaaagcgggcacgagagggaagaagcagatatttgaagagaacagagagactctgaagttctacctgcggatcatactgggggccaatgccatttactgccttgtgacgttggtcttcttttactcatctgcctcattttgggcctggttggccctgggctttagtctggcagtgtatggggccagctaccactctatgagctcgatggcacgagcagcgttctctgaggatggggccctgatggatggtggcatggacctcaacatggagcagggcatggcagagcaccttaaggatgtgatcctactgacagccatcgtgcaggtgctcagctgcttctctctctatgtctggtccttctggcttctggctccaggccgggccctttacctcctgtgggtgaatgtgctgggcccctggttcactgcagacagtggcaccccagcaccagagcacaatgagaaacggcagcgccgacaggagcggcggcagatgaagcggttatagccattgacattgtggccacaggccactggccctgggtggctctgtcagggtgcacagcccctcatgcctggagcaatgagggtctagtccaggggccaaaagcagtctgaggtattgggtatacttatactctatagggtcgttgaataaatggcttagaatgtgaaaaaaaaaaaaaaaaaaaaaaaaaaaaaaaaaa

SEQ ID NO: 483 - DNA, 1441 bp, Homo sapiens
  misc_feature (269)..(269): n equals a,t,g, or c
  misc_feature (420)..(421): n equals a,t,g, or c
  misc_feature (1439)..(1439): n equals a,t,g, or c
ccggggtcccagttctaaagtccccaskcacccacccggactcagawtctccycagacgccgagatgcgggtcayggcgccccgaaccstcctcctgctgctctsgggrgcmstggccctgaccgagacctgggccggctcccactccatgaggtatttctacaccgccrtgtcccggcccggccgcggggagccccgcttcatcgcagtgggctacgtggacgacacscagttcgtgmggttcgacagcgacgcgcgagtccgagganggagccscgggcgcctacgacggcaaggattacatcgccctgaacgaggacctgmgctcctggaccgcsgcggacacsgcggctcagatcacccagcgcaagtgggaggcggcccgtgwggcggagcagckgagagcctacctggagggcnngtgcgtggagtggctccgcagatacctggagaacgggaaggagacgctgcagcgcgcggaccccccaaagacacacgtgacccaccaccccrtctctgaccatgaggccaccctgaggtgctgggccctgggcttctaccctgcggagatcacactgacctggcagcgggatggcgaggaccaaactcaggacacygagcttgtggagaccagaccagcaggagatagaaccttccagaagtgggcagctgtggtggtgccttctggagaagagcagagatacacatgccatgtacagcatgaggggctgccgaagcccctcaccctgagatgggagccrtcttcccagtccaccrtccccatcgtgggcattgttgctggcctggctgtcctagcagttgtggtcatcggagctgtggtcgctrctgtgatgtgtaggaggaagagctcaggtggaaaaggagggagctactctcaggctgcgtscagcgacagtgcccagggctctgatgtgtctctcacagcttgaaaagcctgagacagctgtcttgtgagggactgagatgcaggatttcttcacgcctcccctttgtgacttcaagagcctctggcatctctttctgcaaaggcacctgaatgtgtctgcgtycctgttagcataatgtgaggaggtggagagacagcccacccyygtgtccacygtgacccctgtycccayrctgacctgtgttycctccccrrtcatctttcytgttccagagaggtggggctggatgtctccatctctgtctcaactttaygtgcactgagctgcaacttcttacttccctactgaaaataagaatctgaatataaatttgttttctcaaatatttgctatgagaggttgatggattaattaaataagtcaattcctggaakttgagagagcaaataaagacctgagaaccttccagaaaaaaaaaaaaaaaaaactcgggggtwyttttgggggggccgggggccctggtttttcccncc

SEQ ID NO: 484 - DNA, 1140 bp, Homo sapiens
ggcacgagcggactgttcctgcgccatgttcctggatggctgcgcccacttttgcgcccattggcttggctggtgctccgggcaccaagagggggtgcccagacacccctgtattgtgctctacaagagggcatcgagcccctcagtgggagatattttgccaactgccatgtggaagaggtgcctccagctgcccgagacgaccgggcagcccatcggctatgggaggccagcaagaggctggcagggcttgggcctggggaggatgctgaacccgatgaagacccccagtctgaggactcagaggccccatcttctctaagcaccccccaccctgaggagcccacagtttctcaaccttaccccagccctcagagctcaccagatttgtctaagatgacgcaccgaattcaggctaaagttgagcctgagatccagctctcctaaccctcaggccaggatgcttgccatggcacttcatggtccttgaaaacctcggatgtgtgcgaggccatgccctggacactgacgggtttgtgatcttgactccgtggttactttctggggcccccaagctgtgccctggacatctcttttcctggttgaaggaataatgggtgattatttcttcctgagagtgacagtacccccagatggagagataggggtatgctagacactgtgcttctcggaaatttggatgtagtattttcaggccccacccttattgattctgatcagctctggagcagaggcagggagtttgcaatgtgatgcactgccaacattgagaattagtgaactgacccctttgcaaccgtctagctaggtagttaaattacccccatgttaatgaagcggaattaggctcccgagctaagggactcgcctagggtctcacagtgagtaggaggagggcctgggatctgaacccaagggtctgaggccagggccgactgccgtaagatgggtgctgagaagtgagtcagggcagggcagctggtatcgaggtgccccatgggagtaaggggacgccttccgggcggatgcagggctggggtcatctgtatctgaagcccctcggaataaagcgcgttgaccgcccaaaaaaaaaaaaaaaaaaaaaaaaaaaaaaaaaaa

SEQ ID NO: 485 - DNA, 1162 bp, Homo sapiens
  misc_feature (1144)..(1144): n equals a,t,g, or c
ggcacgagcctgcattcctctcctctcttctttcctctctgtcccttctctttcccctctcaaccaggagaccatcatgtctctctgccttcctcctctcccctccaggggagtcaggctgactgtgaaagccatgagcttctctccctctcccactcctcctctcctactttcagatggatttattccttttttaaacaatgaacatcggaaatgagactgtggggtgtggtttctctctctcttttttttttaattttctttgttgggtttttgagcaacctcatgtccccttcccagggagccttttaatttacctcttagaactcaagtggatgggaagtagagcactatgtgtcagtatgctttgttttctgacacgattacacagcgaggctttaatgccatttgggtaggtgagcttctgcacttctgttgtgctgaactgtattttcttctctcatctcctctttgtctttttctcttttcctctccttcctgccttcttctgctggcctccttttctctttctttaccttccttggattatccttccaggttttcataataaatttatattttgtaaaaggattttgttgtaccaggttttgcatcctcactgaatctgactggctttattttcctctccaaaatcaggttttgttctcaacactttcccatcatgtctagtcactgttttggttttggcaccatcagtatcaaatgtacaaacggttcttgctaaccaacaccaggtatatctgatgttcagatgagttccaataaaaataatttttttttttttcaaaaggtgtctttttcttgagtgctggagggcttccaagcaagtccagacagctctgtgtggccccacactagtctagctctcatctggccaaagctgttatctcatttgtgtaatgggagtccttaaggtaaatttggggtccaaacttggagggctttgggggcaagaaagttggtgtgtgagttctgaggttggaaatgagttcaggtgtcttcttccaggggcagcatggtccagtgagcacatgtaagtttgggcagtagatcctctgagcctactttctcttctactcagtgaggatgctgctttctgggcaggtgattgtgatgtgaaggntagtaagtcatagacgtt

SEQ ID NO: 486 - DNA, 989 bp, Homo sapiens
gacctctctgcccccatttccactcctgctcttgggacacaggagactggttagatgagagtagaaagtttatttttgaacacccaggtgtggggtggctgggcgagaccatctgatggctttgggagccaggccgcagggtttagcttggatctgttgagtaggagacccttaaacatggccaccctgagcttaagagctggtcttggattttgctttcttttgggattaaccgagtattttgtgggattccatttgatcccttaactggctgaccagctataactcctggttatgttgttttagtgttgctccaggtgtcgttggaggagaagttgaaggtacaaggagtttgcaggagggaaggtggcagttaatgagccttcctggtgggaccggatggtgagggcaggggcatctggcccagcgtggactcgggccatagatgggaagtggtcatttggaggtcaccatctctctgacaccctgaccatagcacctgcacccctgtgctgagctgccaggtccccggcaccagcgtctgtgcagctcaggtgttgctgagccgtggcctccgcagctctccatcaggatttctcaagcttcattatgaattatctctgtgtgagctcacaacggtgactgcagagtcccaggtcatctctcagatcttctgaatcaaacatatggtctgcagttgccgcgcatgtctttggccgattttctgacaatcaaagtgaagaagttctgagctacgggaagttgggttgaaggcatgatggggaaaacatgattagttgacagcttttcccagagagtttttagacaaactcaaccttggtaaccttctcagtgggcttatgataagaaccttcaatgtgccaaaaaataaaaaaagcagcactccaggtagttaatctttgtttaaaaaacccttccccccacccagtcctgcaaacaaacaaacaaacaaaaaaaaaaaaaaaaaa

SEQ ID NO: 487 - DNA, 1861 bp, Homo sapiens
ggcacgagcttctttggtttaatgcaggatcaccagactctgtggcccaagacctgtttttgtgtagcccataagacatacctttctaagtactatagctgaaaaacatcaaaagagtagtaatattttgtgacatgtgaaaattatatgaaattcaaatttctgtctgtaaacctcactggaacacagccatgctcattcgtttgtatatggtctgtggctgctttctccctacaacggtagaattgaacagttgcatcagagaccttatggcctgctaggccagaaatgttaagccctttacagagaaagcttgctggctcctgtttaatgctttaactgccctactgaaaggcaggaggttgaaaaaatgatggtagtcaaaaggaatgcatgaaatcctgttatcttctgttagctgattgcaagtagtacacaggatatatttgagacatctcttttcctatctcccaccaaaggataattcaggcggatctcagtgcacaggcacaggcatttgcctcattcttgttttgtctgttttgaatttagttatgggaatattttaatatctctcaaaaatagggtatctggtgtgagtcagaatgattatagaacatgcttgcctggagaacaggaaatgcgggatccactcctggtgtgctgttagctgaaggacgtcagaactgtcctttaacctccctgcaggtctctaaatggtaggattgtttggggattacactagatcatctctaggcaccgttcagctcagtagagacattgctgcatggtggaaggagtgacctcagtgtgaatcctggttctgtccctttctgcccaggagaccttgagcagcttatctaaatgctgtgtgcctttgttagctcatctgaaaatgtggctgtaagaatgacctcatgagaatggactgagatcatattcttaaaactcttggcactaataggtatttaatctactataactgtgaaaattatgtctgtgaactcttttttttttttttttttgagacagagcaagactccgcctcaaaaaaaaaaaaaaaaagtaccttggggatttttctgtttttgtacttacaggcctatctcatactttttaatggctgcttagtatgccatagaatagagaaaacacagtttatttaactaatcctactaaatggacatttatttctaattttcactctaatagtcaaaaaatgaatttagaaaatgcaaataatttgtgtttttagggtctttcatttcttatttagttatataattattctagcttttaaaaaagcttattagggtgggaagtgcctcactgatactgtaatgttagaactacactgaaaactttgtttcagaagaaaaagttgaatgtaagttctctgtgactgcggacttcattagcattgtgtcttcagggctttctttttaggtatgattataaaccaaaagcactataagtggttacataattttcttacagtttgtatacctcattcaaaagaagcatacatctctaaggattagaactagaaccataagccaggtgtggtggctcacacttgtaatcccagcactttggtaggctgaggtgggaggatcatttgcacccaggagtcagagaccagcctgggtaacatagggagaccccatctctacaaaaaaaaaatacaaaaattagccgggcatgctggctcatggctgtggtcccagctacttgggaggctgcggtgggaggattgcttgagcctgggaggtcaaggctgcagtgagctgtgattgtgccactgcactccagcccaggtaatagagcgagaccctatctcaaaaaaaaaaaaaaaaaaaaa

SEQ ID NO: 488 - DNA, 1187 bp, Homo sapiens
gagatgggtctcctggtattagaaaggagagcagacgcctagagttctgacctcttgggcctcccctaaacaaaaagcatagccccttcactaccctagtaacaagtatgacctgttgcctgttgaggtcaggtgtacctgtgtgtctctctctgtgatgtatgtgggcttggtgtccacatcaatgtgcgtgaatactcctacccacagactgctactgtgccaatatagaggytcataagaaagataaaagagaaccagcagaaccccaggttctgcctctccttcctccctttgcccagataaaggtgtacagtgtttgtggtgaggctgctggacactgctgttttgggctttctagagagaatgcaaacatgcaaaaacagtgtggtagtgtaggcagaacaagatctagaatcagaagacctggagtcgaatctcagctccaacacccactggatgaacgtggacaagctgcttgatctctcagatcctcgatttcttcatctgtaagatggaaacaatatgtgtcttttctaaggggaaagatcaaatgacatcatgtatgtgaaaatgcttagaaatgggtgatgatgatgatgatgatactgattattagggtatctaataaagttggggaaagaacaaaatccccccctcacaccctattgcaccaccagccttctccctccctgctcaattatacccatgttatagggaaggaaatagggaagaaacttgtctaaggtcacatggatgttcgcaacaattgggatgcagaacttgatctgactcccaggccaggtttgattttgatttgcagtggcagagaggactaattttttactaggttctgagccctgtactgaactctggattgccctgtacttggtggtggtatacagttcagcagtttttagcatatacacgaatttgtgcagccayaaccactatctaattctagaacatttttatcacccccaaaagaaatcatgtacccatttgcagtcacttgccattccctcttctccccagccctgggaaaccactgacctaccttatatctctatgaatttgcctaatctggacatttcatataaatgcaattgtacatgtgaaaaaaaaaaaaaaaaaaactcgagggggggcccgagtacccaattggccctacgaagaggcgaacagag

SEQ ID NO: 489 - DNA, 884 bp, Homo sapiens
  misc_feature (873)..(873): n equals a,t,g, or c
ggccgacgcctggggtgtggagctgccccaccgccaccccgtgggcgagtggatcaagaagaaaaaacctggcccgagagtcgaagggccgccccaggccaacagaaatcacccggccttacctctgtccccacccttaccttcccccacataccgccccctgcttgggttcccaccccagcgcttgccgctgctcccgctcctgtccccacagcctcctcctcccattctccatcaccagggaatgccccggttcccacagggtcccccagatgcctgtttttcctcagaccatactttccagtcggatcaattctattgccattcagatgtcccctcatcagcccatgcaggtttcttcgtcgaagacaattttatggttggtcctcagctgcctatgcccttcttccccacaccccgttatcagcggcctgccccagtggtacataggggttttggcaggtatcgtccccgtggcccctatacgccctggggacagcggcctcgaccttcaaagagaagggccccagccaatcctgagccaaggcctcaatagacggacctaggccttatttcctctttatgaacatggattggacagatctgacacttcctttccattgcttggcctgaacagactgaccttgttaacttaagcctggagtccatgcctcgtcttccttttgttcattgctgttaccaagaaagccaaggaagagcagcctgactcattcttcttggctgcagcctcttccccacttcctgggagtgacccagcgttattcctgcctcctcactcctattctctttgcctttgtgtaaaaataaaatggaaataaacaagttgcacagaaaaaaaaaaaaaaaaaaaancccaagggggg

SEQ ID NO: 490 - DNA, 1652 bp, Homo sapiens
gggcagcttctggggacagccacaaggagggtaccaggggtcccccgccgctgcctacagacatgcgccagatcagccaggactttagcgagctaagcacccagctgacgggtgtggcccgggacctgcaggaggagatgctgccaggaagctctgaggattggctggaacccccaggggcagttgggcgaccagccacagagccccccagggagggcacaaccgagggggatgaggaggatgccacggaggcatggcgcctgcaccagaagcatgtctttgtgctgagtgaggcagggaagcctgtgtactcccgctatgggtctgaggaggcactttccagcactatgggtgttatggtggccctggtgtccttcctggaggcagacaagaacgccatccgctccatccatgcagatggctacaaggtagtattcgtgcgccggagcccgctggtgctagtggcggtggctcgtacgcggcagtcggcacaagagctggcgcaggagctgctctacatctactaccagatcctaagccttcttaccggtgcgcagctgagccacatcttccagcagaagcagaactatgatttgcggcgcctactctcgggctcagagcgcatcaccgacaacctgctgcagctcatggcacgagaccccagcttcctgatgggggcggcacggtgcctgcccctggcggcggccgtgcgcgacactgtgagcgccagcctgcagcaggcgcgtgcgcgcagcctggtcttctccatcctgctggcccgcaaccagctcgtggcactcgtgcgccgaaaggaccaatttctgcaccccatcgacctgcacctgctcttcaacctcattagttcctcctcgtcctttcgcgagggcgaggcctggacgcccgtgtgcctgcccaaattcaacgcagccggcttcttccacgcacacatctcttacctagagcctgacactgacctctgcctgctgcttgtctccactgaccgtgaggacttctttgcagtctctgactgccgccgccgcttccaggagcgccttcgcaagcgcggagcccacctggccctgcgagaggcactgcgcacaccctactacagcgttgcccaagtgggcatccctgacctgcgtcacttcctctataagtcaaagagctcgggactcttcaccagccctgagattgaggccccatacaccagtgaagaggagcaggagcggctgctgggcctctaccagtacttgcacagtcgtgcccacaatgcctctcgcccactcaagaccatttactacacgggccccaacgagaacctcctggcctgggtgacaggcgcctttgagctctacatgtgttacagccccctggggaccaaggcgtcagccgtcagtgccatccataagctgatgcgctggatccgcaaagaggaagaccgcctcttcattctcacgcccctcacctattgatgggaatgtgtgcgggctcagccttcctggacacactaggtgtgggaagccataggagcctccagatgggggctggcctctcttgcccagccagcgggcagggactgtgggttggtgaatgcattaaagtgctttggggaagacaaaaaaaaaaaaaaaaaaaaaaaaaaaaaaaaaaaa

SEQ ID NO: 491 - DNA, 1460 bp, Homo sapiens
acgcgtccgcgcagaaccaggaaagtaacggctacagacagtgagaaatagtttcgctcgccggctagaaaaactctgtcggtaccaaccccagagcgttgagagcagcccacctccacgcttccttaacggagaggtgcaggactcagacttcaccagcccactcggtcccagccttgtacgcaaagagacgtcaaggacgcgctctcccgcgtccaggcagccccagcttgctggcttgcctgcccgcctgcgtgcagcactcggccggcgtgcagcatgaccctgtggaacggcgtactgcctttttacccccagccccggcatgccgcaggcttcagcgttccactgctcatcgttattctagtgtttttggctctagcagcaagcttcctgctcatcttgccggggatccgtggccactcgcgctggttttggttggtgagagttcttctcagtctgttcataggcgcagaaattgtggctgtgcacttcagtgcagaatggttcgtgggtacagtgaacaccaacacatcctacaaagccttcagcgcagcgcgcgttacagcccgtgtcggtctgctcgtgggcctggagggcattaatattacactcacagggaccccagtgcatcagctgaacgagaccattgactacaacgagcagttcacctggcgtctgaaagagaattacgccgcggagtacgcgaacgcactggagaaggggctgccggacccagtgctctacctggcggagaagttcacaccgagtagcccttgcggcctgtaccaccagtaccacctggcgggacactacgcctcggccacgctatgggtggcgttctgcttctggctcctctccaacgtgctgctctccacgccggccccgctctacggaggcctggcactgctgaccaccggagccttcgcgctcttcggggtcttcgccttggcctccatctctagcgtgccgctctgcccgctccgcctaggctcctccgcgctcaccactcagtacggcgccgccttctgggtcacgctggcaaccggcgtcctgtgcctcttcctcccaggggccgtggtgagtctccagtatgttcggcccagcgctcttcgcacccttctggaccaaagcgccaaggactgcaagccagaagagggggggctcacctcttatcctggggacccactgcacaagcaggccgctttcccagactttaaaatgtatcaccactaacctgtgagggggacccaatctggactccttccccgccttgggacatcgcaggccgggaagcagtgcccgccaggcctgggccaggagagctccaggaagggcactgagcgctgctggcgcgaggcctcggacatccgcaggcaccagggaaagtctcctggggcgatctgtaaataaacctttttttcttttgttttttaaaaaaaaaaaaaaaaaaaaaaaaa

SEQ ID NO: 492 - DNA, 2069 bp, Homo sapiens
ggcacgagaggaggccaacttactgcttcctgaactgggcagtgccttctatgacatggccaggtgagttcaaccagcaaggccaggagggaggtgggaggaggtcagagggaaagggcatctgtgtggacagtcaccaggccctgctcccaacccctgcccttcttggcctcagccaagaaaaggagatacaggtatggttaacaaggaaaatgactcactgctccaaatcccagatgccttcaggtaatccctacccctatcttatcaatgcactcagaggtcctgcctttaactggcttctatgttgttctagcaccatcttctgcagagcccaaattgccctgcttcccctctctcctgcctctaccccttccccaaccaccaggtaggtacctagggtcctccggggaggaagggaggtgaccatggcccccagggataggagcagagagaagactgggatccagcatccatctggctacaactgaaatgctttccctcttccctgacttccctgggtaacccttagggaagggaacctatagaggtgggggtttcaggtatcagattgtccccttctgccttcccttttattcccaggttcaagggggcaggcacagggaagagagatttgatcatctagtcccggttttgcctggatgtgagatgggctcagggcagggagggggtgatgctgtcatccttctcggctggagcaggaagatgaaggacgatgtcagactcattttcagcctcattaggcagcagacggagatggagggaggagagcaggaggctgggggatgggctctgcactgcagagaccagcagggactaaagaagagaggacatggggaactggaaaaataagccttccaggattgtggggagaaagacgctgtgggagaggccaggatgctgcattaggcacaggataacctgggaacccaggcacatgggtcctgctctccgaagtctgcaagtcaagaagggaacagagcacgccgaccctctccctttcccctctgtctctcttagtggctttacagtgggtaccctgtcagaaaccagcactgggggccctgccacccccacatggaaggagtgtcctatctgtaaggagcgctttcctgctgagagtgacaaggatgccctggaggaccacatggatggacacttctttttcagcacccaggaccccttcacctttgagtgatcttactccctcgtacatgcacaaatacacactcatgcacacacacactcacacacatgcatacacttaggtttcatgcccattttctatcacactgggctccatgatattctgttccctaagaactgcttctgtgtgccctgttttcatcccaagatttctcacttcatcctctcctacctggctcttttgtcccagggaggggtcctgttcggaagcagtggctgaatttatcccctgaaagtggttttggaggaaccgggatggaggaggccttcccctgtgggaatagaatcgtccactcctagccctggttgcttctgatacacagccactgcacacacacactcacactcacactcccttgtctgatgccccaaagccaattcctggggcaccctaccctctcttatttggagtttccgttggtttacctgagttttctctggggtctgcacagaggcagcagcatggacatcatggcctctcaggtcccttttggttctcagtttcattggttcctctttctgttcccccattgacttctgtgccccaccctagccttttccataaccttaggtattcagtttggaggggttttttgtatttttgaggattcctgtattctgtatcctctcctcgcatctcctcacatggaaagaaataatgtatttgtgccttctgtgaggaatggggggaacaagtggtcccaggtatccccatttccaaggcccccctccctctccaggtccccccacagcaataaaagcttccccctgatatccatccctttgtagtttgaacaaatatatttatatgatatgtaaaaaaaaaaaaaaaaaaaaaaaaa

SEQ ID NO: 493 - DNA, 1105 bp, Homo sapiens
ggcacgagcaaaggttctttgtaatttgaagaaaaattttgttttagttatctgctaagagggcatgggtttctttgtacttctcttccctacgtccagattagcttaagcaatagaaggaactgaaaagagcagaaacagttaagtgttaattaagaagcacttacagtcttaagaagttactcggggacttaacgtaaagttctatgatacatgctattaggaacttattttaaggtgtaccttatattcaagtgtttttacattttcttatataaaagtaggaagatgcatttccatttacaaaaaagctgaccaaaagacataataaaaatcatctcatatgaccataaaccttttaaaattagaatttaaaagagtaactgtttttcagaggtattttggatactttggatagaatttcatgggtaaattctgtgcggagtatccaatggttttaaaaatctagaagagaaggattttccaaaagggtaccagccctgccctccaggatatggtggccaggatatggtgggttggccaaattatccattaggctccaaattccttaaaacctggaattagttttttgggtttgttgccaaaagatttgaccagaggcagaactttcctttggaagaacaaagaacaggttttctgtagctgagtagggaagaggaaatagcaacattgactttactgagacactggaacttgaatagagtgtaagtgtaaaatattaagatgtatttaagaaaataattctcaaggctcgttgcatagagaagagggtaagggcttgggaatcttaaattaatggtcttttaccatcatacttaccgatgtgttccttgatacacacaattgtggacttatttttaaagtttacacactgttagcatttaatcttaggtcctatatctacagataggtatgaggctacatatctgccattgttagtcccaagaatgctctaaagcagggctgtcccaatgttttggcttccctgggccactttggaggaagaataattgtcttgggccacacaaaaattcgctaacacaaacaatatagctaatgaactttaaaaaaaaaaaaaaaaaaa

SEQ ID NO: 494 - DNA, 1435 bp, Homo sapiens
gcaatttatttaacaaatacttatctagtactatgtgcccggcgctgtagacactgccatgttttatctcattcaatattcacagtgactgcccagtgaatggtattgcctccatcctctgagaaggtaaagagcctatcccagaccccacgagtggaggcgtcagggaggggttcttggcaggagatgggtcttgtagaaaggcttctgytttgctttactcacggcctgtggcagtttgctcagacagctcccatcaggacaccattggcagcttttgcatgaccctgcctcccagggtcttcctgcgtttttccttaagttgccttattctttggttgtttccctacttgtttttgttagactgtgggaggaagaaatccatttcaaatctgctgaaacctgttaccaagcaacagcagtgattaaaagcaacctgatgagtgagtaaagaattagggtttcagacctgtagttaatgatggtctctgtctccctgctgccctgcattcccttcccttccgttcactgctgggtgaaggagggcttgctgcattttggaagttaagggaaccaataaggtgactcttttgcagattggaatatggtgctcagccagccatatggaagcactgtcctggcgtgatctgccctgggctgttggctctctgagtgctgtcttgggaggagcactgcccttcagaacagaagagatggcttccagtcccctctcccccttctcccagtctctctgaggctgcttgttgggtattgggcgtgctgtgtactaactcactcccgtctcttgtctcattatctgaaatgcatccccttttgcagaaagggctcaaacggagccttcagttctgctcctctgcatagccgtagctcagatcctagctcargatgtcttgtctgggaagggcaaaacatggtccccagtgtagcattttcactgggttgattatctcagtggtggatcatctatcacccttgtgtggtgactttgtgaattatctgcctgagtgccacttcccttccaccctaatcactgcaggctcagggagcaagaaataaaatcatgaaatgcattccaaataaaattaccttttggctgggtgcagtggctcacacctgtaatctgagcactttgggaggctgaggtgggtggatcgcttgaggtcaggagttcaagaccagcctggccaacatggcaaaaccccatctctacaaaaaatacaacagcaaaaaaatcagccaggctagctggtgtgcgcctataatcccagctacttgggagggaggctgaggcacaagaattgcttgaacccaggaggtggaagttcagtgagccgagatcgcacccctgcactccagcctgagcaacagagtgagactctgtctcaaaaataaaaaaaaaaaaaaaaaactcgag

SEQ ID NO: 495 - DNA, 3342 bp, Homo sapiens
  misc_feature (2005)..(2005): n equals a,t,g, or c
gcggctgtgtgtcgccggagccgaagcgcgcaggcccgtcccggtggccggggagcgggcgggtgggggcgccatgtggttcatgtacctgctgagctggctgtcgctcttcatccaggtggccttcatcacgctggctgtcgcggctggactctattacctggcagaactgatagaagaatacacagtggccaccagcaggatcataaaatacatgatctggttctccaccgctgtactgattggcctctacgtctttgagcgcttccccaccagcatgattggagtgggcctattcaccaacctcgtctactttggcctcctccagaccttccccttcatcatgctgacctcgcctaacttcatcctgtcgtgtggactagtggtggtgaatcattacctagcatttcagttttttgcagaagaatattatcccttctcagaggtcctggcctatttcactttctgcctgtggataattccgtttgcgttttttgtgtcactttcggccggggagaacgtcctgccctctaccatgcagccaggagatgatgtcgtctccaattatttcaccaaaggcaagcggggcaaacgcttagggatcctggttgtcttctccttcatcaaagaggccattctacccagtcgtcagaagatatactgacccccatgcaggcaggatgtggggggcaagatcaggagagtcaggcccctgggcctctatgccaggtggggaccagaagtcgggaaggcacctaccacctgccctggctttcttcccctcaactctggagccccatccccaccctccttggggggctcagcttggctcagatctgatgcttcaagaggctgtaacctcagagggcaccaaggagggtggcagagcctgcttagccaggaggccgaggtccctcagtcctcccctgtcccttccaaggtgggtcaggaggttctggccccgctggggcaggcagggcagggtctgtgaagcttaagagcagatggtgacaagttctctgggcaggtggccatggggaggggccatggcttggcatgtccaacagaaatagtttttgctgttgaacggtgatttctgtccaagtgcagatttccgtttgaataaagcttcgcttctaggtggcactgtttgccttaataccctgacagttcatcttcctttcttcctgctaaccttctgctctggactggactcacttttctgctccagggactccttttctgggtttgggtcttgcccttcccaagggactgttcttgtggcccttaatgggaagggggcaggggtgaggagctgagcctgctcaaggagtgggaagtggggctataggcagcctctctgatgcactctcttccatctctttccccaaggctccgtgactgacaaactgggagtaggagaggggacaatttaggactgggctagattttcagaagaacatctacaatatcctatttataaatcttcctctgggaaaaggagtggtttctggctgaatactatcttaggctcaaggagaaacaaaataaaaattagcttccaggcagcctgtttttaaagaaatgggactaatgggagaagctgtttgtcactctaagagcatccaagccctggcccgtctgtgcactcttggctcctggggagatatatctgccttctaagaaggcaggccaggtcttgggcacagacctgcatttgttgaccttgcactccaactatagtgccttgcaagtgctcaacagtacatatttggaatgaagtccctatgagagccatttctggccatgttctatacctcaaagtgaggctggcaggtacagagatgaactgtacacatgtgatacatttaagccactggaaaaacccctgtgcttgamaatatttcctctatatcatgcctggagttccatcatagcccttcatttccttggctttagcatttaccttctcttaagaataccagctttcccctttccctgaganggaagagcacatgttggtctcctcttagtgtgaacgagattgccaggcccttttctcctatgcacaccaggatagacaaggcaggggatactggcagcctgcatcatcctcccattgggctgacagctggccctactttcctccctctgctgcttggtccctcaccttgatgatgtggcttcgccccctccactctactgccagtgttctcccaggggttgctaaatccagcagacccctttcctgtcttactagatctgggcagcatttgacatggctgatcaccccttgcttcttggatggcacttccctggcacctctgtggctagttgtcctacctccctggctgttcctttcaggcttccgtgcaggcttctccacttgcccatgcacagtagggtctttcagggttctgctgtgggctccctagggaagcccatccatctggatggtttcaaggatggtgaggaatttagagttgacctccagccccaacatccttcctgatcacctgaaccacagttttgctgccctctaggtgcacagacaattcaggtccatggcccagatggtacttgctgtcttctgcaaacctgccccttctgggtacttcccttgaccccgagatcactcaggagccagacaggaaacttattctattcctgttttctctttctgcccaccacatccaatctctcaaaacggtcaggtctaccttaacatctcttgatttgagccactcccactgtcatcagctttcacctggattatcgtgacagcctcctactgcttctctatcatgtggccagagctatcttcctaaaatgcattgcatagttgatcaagtcactctctggcctaaaaccttccttggctccctgctgccctcaggataaagtctggacccctcagcatggcttgtgagactcatggtgtccttgtccctgctcacctctctggtctcatcacttgccttcttgcattctgggtcccagcctcctgtatccagagatgcagtggctctccattgccactctgattcctcctttcttttggtcacagagaaagggtactttctctgtcaaatctcaacttagacttgacttcctccaaggagctttggctatactctctcctcccgacccccaccctggcatactacacagatcactctgggctcacttgcctgcctaatggtcatctccccagtagactgtaagctccttgagggcaaggattgtgttggaatttttgtattaacagtgcctggcttggtgcctggcacctagaaagcactcaataaatgtttgtttaatgaaaaaaaaaaaaaaaaaaaa

SEQ ID NO: 496 - DNA, 1008 bp, Homo sapiens
  misc_feature (21)..(21): n equals a,t,g, or c
  misc_feature (895)..(895): n equals a,t,g, or c
  misc_feature (928)..(928): n equals a,t,g, or c
  misc_feature (960)..(960): n equals a,t,g, or c
gaaaccgacctaaggggattntcccatttggcccgtcctaccctaaagtcaccacctgctgcttttttggagcgcttaccagtgaccaagaggaacagaacacagagcagcctggcagtgtccaagcaacaagcctccgctcctccttcctgcaccctggggctcctgaaactcacatgggtaaaaaagatacagtaaagacataaataccacatttgacaaatggaaaaaaaggagtgtccagaaaagagtagcagcagtgaggaagagctgccgagacgggtatacagggagctaccctgtgtttctgagaccctctgtgacatctcacattttttccaagaagatgatgagacagaggcagagccattattgttccgtgctgttcctgagtgtcaactatctrggggggacattcccagtgtatcagaagagcaggaatcttcagagggacaagattcaggagacatttgctcagaagagaatcaaatagtttcctcttatgcttctaaagtctgttttgagatcgargaagattataaaaatcgtcagtttctggggcctgaaggaaatgtggatgtygagttgattgataagagcacaaacagatacagcgtttggttccccactgctggctggtatctgtggtcagccacaggcctcggcttcctggtaagggatgaggtcacagtgacgattgcgtttggttcctggagtcagcacctggccctggacctgcagcaccatgaacagtggctggtgggcggcccyttgtttgatgtcactgcagagccagaggaggctgtcgccgaaatccacctcccccacttcatctccctccaagcaggtgaggtggacgtctcctggtttctcgttgcccattttaagaatgaanggatggtcctggagcatccagcccgggtggagnctttctatgctgtcctggaaaagccccagctnctctctgatgggcatcctggctgcggatcgccatgggactcggctctc

SEQ ID NO: 497 - DNA, 1054 bp, Homo sapiens
  misc_feature (89)..(89): n equals a,t,g, or c
  misc_feature (149)..(149): n equals a,t,g, or c
cgcaattaatgtgagttagcttcactcattaggcaccccaggcctttacactttatgcttccggctcgtatgttgtgtggaattgtgancggataacaatttcacacaggaaacagctatgaccatgattacgccaagctctaatacgnctcactatagggaaagctggtacgcctgcaggtaccggtccggaattcccgggtcgacccacgcgtccgagtgacactactgacttggctctaccacctgaaatgccgattttgattgatttccatgctctgaaagacatccttgggcccccgatgtatgaaatggaggtgattcattctttttatttctttttgctccagtcaatgaaaggaacactttattgaggccccagggccgtagggcctgggcaggaggctgccctttggggaaggaatagccttattcgaccttctttttgggacgcaggttgttggtgtggccgcacttcttgcagcagttgactgcatgggggcgcaggcgagcacagctcttgtggcacatcatcttcttgcagttgtatttctgggcaaggtggcagagggaaggctccgtaatgccacctcacaggcacagcatcaggcgcagggtggactctttctggatgttgtagtctaagagtgtgtggccatccttcagctgtttgccctcaaatatcagacactgctggtcaggtaagatgccctacctgtcttgaattttggctttgacattctcagtggcatcactgggctcgacctcaagggtgatggtctggcctgtgagggtcttcacaaagatccacatctcagcgtctgcagcttggccagtctcactccattctcatttttttgttggtactcactggtgtactcaggtggttgcttaacagagaagtaaaattggatgtttccagaggctgaattttgccttaagatggaamctttatttctaaaaaaaaaaaaaaaaaaaaaaaaagggcggccgctctagaggatccaagcttacgtacgcgtgcatgcgaagtcataactcgtctataggaatg

SEQ ID NO: 498 - DNA, 876 bp, Homo sapiens
cccgggtcgacccacgcgtccgcccacgcgtccgcggacgcgtgggcttctgttacatggagctcaatggacgtgcccaggaatgcttttggctgttattttgcagttaatacctcctgtaactaaagcatttgtttatgagttgacttgagagaagggctgatctcagagccgctttgagctaagttggattagtcacactaggaagttaattccacacctttcgtctaagtctcagtattgaggcctctccagttctcatgcaccctgatcttagggttagaatacttgaccctgatacctgcaccatgcttcatggttcctgagctctttctcctgtttcatttgagcctccaaactacatatttggtcatattgcctgcctaccccatgcctgctgcagaaatattcatccaggttaaccttgatatacacagagatggtcttggagaattgtgaatgtatgtactgtattgtcatcaaggatactgtcccttatttgaaggcatctaaagagaaactgttttcagatccaagtgctcagatctaaagcctctgcaacaagtcaggtggtggtcatgtttcccttctagttttggctgacaggaagctcagttcagtaccataactacagaacctgtcatctgtattttttgttctcaccccgtttttgttattttgtttctggttttttatattgaggtatgttttagatatagtttacaaaaataaaacgcacagattttaaaaaaaaaaaaaaaaaaaaaaaaaaaaaaaattaaaaaaaaaaaaaaaaaaaaaaaaaaaaaaaaaaaaaaaaaaaaaccaaaaaaaaaaaaaaaaaaaaaaaaaaaaaaaaaaaaaagggcggccgct

SEQ ID NO: 499 - DNA, 1827 bp, Homo sapiens
  misc_feature (601)..(601): n equals a,t,g, or c
  misc_feature (918)..(918): n equals a,t,g, or c
  misc_feature (1825)..(1825): n equals a,t,g, or c
gaattcggcacgagatttattattatttaactcctgcagtgagcaaatgtgagtaacatttgaatgaaaataaattttcagcttatttacatgaggtaataaacttgactttatcaagtaattgtgggagtggggaataaacctcatctggggatgggaaataaacaccactataaagaaaccactaagatttgaatgccttgcttgttttaagtttgttgatgcaggtattgcattgattatgcatcagggaactggaaaccaaggcattcgttcttttaagaaaatagattcttaagcataggagtctcatgttttaagaactatttctaagttcaactaagatcgagtttttctgtctctattggcaaktwtyaagaggcataaactttaaagaaaaagggaaaatgtgataaattaatggaatagactccataggcttttattccaacttttatatgatgcaagtctatgtgcttctgtctgactcacttatttctgtwatcaagatgaactagtgaagggaatttctctctcaatgctaaattaattacatgcattggggatagtcatccagagagagggaaggtgaccttctgangttgtcacycagwaaataattgcctgagctgagaatggcatgtgggtcacagaattggtgtttctggatttaggaaatacttcctattttttttccactcctgctggctaagccaagaatggcaaatatgtgttcatgctgctgcattcccttccaggcccataaggacgttggcaatccttcatagccttctcacaggcggaacctggattaatttaagaacccttttgtgcctggcttttcaggaagccagtaccaatcaattggtgctggcatgaagcatgaaactatttgccatctctgagttatgccagtanaattggcatgcttctggtttccatgcataccactacctttcatgggttttattgtgcacaaactttgcatgcctttagaatgatatacctacgcaggtatataatttgtcaccctgatccaaaaagggkaagawgccmagaccatagtgagcctcttattagaaagctcttggcttcagtttttgacacttccctgactctttatattcacgttatcataagctgccaaattcttgactctataaattgccctttaacagcttattaggaattccaactactgtattctagcaccaactacagcatattcagagcctctgcaattcctaaaagtacacttaaaccaaatacatgggccagcctgcatcttttaaaatacattttatgcctttacacttcgtattaagttgggtgagaattatgttttaatctacactctatcttgaattgtcttacattttattctgcttaccagggttcaggttcttatccaaaatgaagttaaatttttttctcttagatagttgcattcctgaagcaattagaacagcatgatcccttggtgtttattgacattctcatcattgtctcattggctttaggtttaacatgcctcatgatgacaacaacaaatgtaaagaagaaggagttaagagtccccagcatgtcatggctccaacactgaacttctacaccaacccctggatgtggtcaaagtgtagtcgaaaatatatcactgagtttttagagtaagacttgaacattcttttagcacaaacttctagtgcctggcctacatgtagtgaactaattgtgggaaagacaatatgaagtcaaacattccttttgagttatttttgttgacattccttggagaaggcaaaaaaaaaaaaaaaaaaaaactcgnag

SEQ ID NO: 500 - DNA, 3303 bp, Homo sapiens
  misc_feature (2355)..(2355): n equals a,t,g, or c
gggcctggcctctggagctccttttactctggaaagaacatgacagacatcctctgcccttcagcctgtgccccagaatgagagacccatgggacagactcaagctgtaccctgaagcagagctgcccagttgactgcagacctgttagctttatacgtctacgaatatttactgcacgtaggagcacagaaatctgcacagaccttcttatcggagattcgatgggaaaaaaacatcacgttgggagaaccgcctgggtttttgcactcgtggtggtgtgtattttgggacctttactgtgcagctcctgaaaggagagacacttgtgaacattcaagtgaagcaaaagcctttcatgattatagtgcagcagctgccccgagccccgtgcttggcaacattccccccaacgatgggatgccgggaggccccatcccgccaggtttctttcagggtcctccggggtcacagccctcgccgcacgcacagcctccacctcacaatcctagcagcatgatgggaccccacagtcagccttttatgtcaccgcgatacgcaggcggccccaggcccccgatcagaatgggaaaccagcctccgggaggagttcctgggacacagccattgctgcccaattctatggatcccacacgacaacaaggccaccccaacatgggaggatcaatgcagagaatgaaccctccccgaggcatggggcccatgggtcccggcccacagaattacggcagcggcatgagaccaccacccaactccctcggccccgccatgcccgggattaacatgggcccgggagctggcagaccctggcccaatcctaacagtgctaactcaattccatactcctcctcatcacctggtacctatgtgggaccccctggtggtggcggtcctccaggaacacccattatgcccagtcccgcagattcaacaaattccagtgacaacatctacacaatgattaatccagtgccgcctggaggcagccggtccaacttcccgatgggtcccggctcggacggtccgatgggcggcatgggtggcatggagccacaccacatgaatggatcattagggtcaggcgacatagacggacttccaaaaaattctcctaacaacataagtggcattagcaatcctccaggcacccctcgagatgacggcgagctaggagggaacttcctccactcctttcagaacgacaattattctccaagcatgacgatgagtgtgtgatccccccttctccgagacgctgagagagcaggcattgcaggcgggaagatgccagaaattatgcaagaagtgaggtgtcattatccaggagctggtggggagggcatctccctgctcccctcaaccccctcccaccccatccacgccccctacctttcccaattttagtttcatgcaataaaaaggccaaactttttattccataaaacaagaaggacaaaactctcaaaaatgtatttcaagtcagtgaccagaaaaatcccaccccttgccctttccccaaaggaccttttctgtacatgacacttttttgttgttttttgtttggggttttaccattgttgggatttttttatttgttttcaggggggttttttgggggaaaatttttttaaatggaagcttctagcaagccccccaccccaatcaacctctatgctttcttcttaaaaaaaaaaaaaaaggaaaaaggaaaaaaaaaaaaggaaaaccagaagccctgctgtctgtctgtgcccaagcccttccaccagaaaagctagtctaggtgtgagagcccacattgtctgtagccatcaaaaataataataataaactggacagtttacaatcgttggtttctttcaaaaggccttttttggaaagaagaaaaggcagtcaccgttttccacttggggttttggtttgtgcaacaggcaggggaggagtggggacgcgtttgttctagcttgatttccatggcaacagcagcggcacgtttgggaccccagaacccagcaccctcatcctgtggccagaggggccggaccactgacccctttcaggattccaccacagcccagaccgtcaccgtgacccggtggcatgcactgttcccaggacaccytcctcctcctctcctggacctcccttccgtcctggcctccctgcctctccagcccctcctctgcccccaccccagtcttcccagtgagaatcctgccagctgggtggtggcctggcgcagagtgggagaggctgccactgacaggatggctatgacctgggacatggaaacagtgacctccgcgttctggtcccgagatcctcgcatcagcgtncatcgtgtgcaccggcttggggggctggagttccggttttctttgtttttttctttattcgtcctttctcaaagatgggatactgatcagaattgctctgtatatgcttgggactggatggaaagactttggagcagctgtggggggtggggggacaccgacaaccaaacagacgtgctggctccagtcctgtttttactttcaaaaaccaacaagcccgacagtggagcctgtcccctcccgggagggtgctcatggccccactcacctcatcaccccacggaaacctttgtgtcttgccctggaagacacccgaattctttgtacattgacatgcccttctccttcctccctcccctgtagctggtctttgttttactccctccctttctgatccatgtatatcatattatgtgagatatcatctgcctgaaaaaagactttgtgcggattattgggaacattgtagctgtttctgtgttttttcttaccttgtagtctggttctgaattaagagaggaaaaaaaagtaattatgatacattgtagtttgtgtacgatatatgttgataacgttttattaaagggacatcttttttccgcagcccttcctgacatgtttggggaatgtgggttggagtttattacactgattacaaaatgcaaggtgacttcttgggcacagtttttgttcctggtgcataacaagatgttttgtgtttgaggcgtctgcsttcttttcctgggcctgcaagttctgtgttcttgtggagtcgcgatggccttggcggaaggtgggttgggagggaaggtatccatctcactttaaatatttgggggccgtctaaaagccattttccatttcttgtcttgcaaacacattttggtccgctggaatgtcttttatttttctggaagtagaaaaaggttcctcctggtgccctctgtt

SEQ ID NO: 501 - DNA, 1948 bp, Homo sapiens
gatttgtaaccaggctgtcattccatgtttgtttggaagcttagagataacatttatgaactttgtgacacatagtagttgctcaataaatgttaactgtagaaacacattgattagtttcacttcagaaatagacacttagagttcaaaattcccatctgcctagctcctgaggcccactttcttaccagaatctttcctgataccctctcctgcataaaatggttcctcttttgagactttgtagctcttttgtacttctcttattctgttacgttactgcaaaaaaaaaaaaaaagaaagaaaagaaaagtgccaattgtgtacatgctttcctccctgctggaatgtaaactttgtaaaggcatgatccatagcagatacttcttattacaaactacctggcagaatttctttctaaagaacctactcagtaagcctgttggtgaactgagcaacatttggacaattatggcatctcttacaattttcagctattgsttttcacttgtttagaaatgtaaaactttgcaaggacttttataaaagcaaatttcagaatagttattcactaagcttttttatgctaatgatgtcatgctatcaaaaattagctagagtaaatggactgtaatgaggatggtttgtaatctagattatatgttccacatgtaacatcgaaatgaaatataaaattgagttgttggcatgtggttgtggtgagcagaagcagttattatacattacttggtaaaattcatattcatatcttgtcagtttacagtgagccagagattaaaaataacatttgtttctgttttagtaactgcttaaaaatatccaaaatcattttattttctttagcctgacttctagtagtgttttgaatatgtggcctttcaagcagtaatgaaatgcatcaatgcgacttggcagtgcctcacaggacatgcttctaggatcatttttaatgattaaaagtcaaattgagttctaaaaaactgacccaaaatatagatgagccaagtaaaaacggaaggaaatctgaataaaatcttggttcttggtcctctgcatgtatcctccacatctgttttctccagatctcttttttcttgcttgktgatagcacagaggaagatcgcagagagtaatgtactgtatatgkttcacatcccccttcctctttagtgatagtttggagagtatactgcagtcaccatggttttcagtttggagaktacaaggatcagatctgtattttctagasccagcttttgtggcattctggagaggtgattggagaaccatgagagcaggcagacatctgggtgagagggcacgaggggtgagtgacggcagagccagrcttgctggagaggcagaaagggaaggattcaagtagcataaccaggaaatagaattgataggatttggtccctgctgacctgtggaataagggggaaggcagaggagttgattctagtatttctaagttggsccacttagtgatattggggtaccaggaacaggcttagtggacccacagaagtgaccagacccaggagtctctctgagcgcccaccctggcttctctgtgttggcttaccctttcttggttgggggtcatggggtggtcagcttcagtggtgtggtctgaggtgacaggtgctcaggagtgaggacagggagtagacatcaccaatgtgaatgtggaggtaggcaacaagagttattctagaactgacaaatttaatatattttgctgactgctgagttccatttggacaaatacctaatgcatttggggcttaaaacctagatgacgggttgaagggtacaacaaaccaccgtgatacatgtatacttatgtaacaaacctgcacgttctgcacatttgtcccagaacttaaagtaaaaaaaaaaaaaaaaaaaaaagggcggccgc

SEQ ID NO: 502 - DNA, 1008 bp, Homo sapiens
ccacgcgtccgagctatcagagtcatatcaagactgatcagtattaattatctgcatttggaagaagaggaaggaatatagacagtaaaatattatatttctatttgtgcttaggacacgtttagaatagagtttttgtttatcagctttcctaatggtgagatttggatcaaaatgcctttgcttttcctaaggctgcccaaccgtaaagggagctgtccctaaggagacgtcaggccagaagtgaaatttggctgaaagtaatttgtttatggattttaaaagttgactgttgggcaatcatttggggttaaggtttaatcattctttctcgtaatggtaatgacagtacattggactcttagaagacttttaaaatgaatataaaatgctttgttatgtgtggtggcctttatctggccagcatccttgtgacgtggagagagcatggctctcctcactttctggatgaacacacaaatgtgctgagaaaatgcatgattggttcaaagttgcaaaatcacctcccatcaagaatcattcctataatatgtacagcctctccaggagccaatggcttcatccaaagaggatccactgagctctgggttatacgaaggcagtatcctagagtgagagtcttcccttaggatgaaaagacctttagaaggtgataagaaccagaatccactcaatccccttgatgtaagaaatgggaattgtgctcagttctctctgcaggccttgctggacccaggttcagtcatgttctgtctctcaggtcccagtctgaattcctgttctgtgtgtgctctgccaaaaactttgttcaaaagtttgggaaagggctgggtgcagtggctcaggacagtaagcccagcactttggaagacctagagggagaatcgcttgagcccaggagtttaaggctgcagcaagcggtaatcatgccactgcactcctgcctgggtgatagacggacaccctgtttctaaaaaaaaaaaaaaa

SEQ ID NO: 503 - DNA, 2085 bp, Homo sapiens
ccacgcgtccgggggacagagccatcctcctttgacacctggtcttcagttctgtgcccaacgtatatagttttgacaatgaccaggttggactgtttaatgtctttcaacttaccacgtaatcctcttgtagggatcacatctttctttatgatattgtatttctctacctctaacagtaaaaattccattcaacccttaaagctcacttcaaattcttctttgagaagtttttcctttctccgcaaccagatgtacatatttgaactctctttgtacttggagggcacttctttcgtggtagttcttttatttttattaatctctgtatccttagatagtcctccaacaaccaaaggttggggactctgtcttacatatctgggtgccctcatagtgcagtaataagtaagttgattatatacgagctatgtaacttatattttttaatggttggatatcactgagtttttttttttaagaatttttttattgaggtaaacttcacataacataaaattaactattttaaagtgagaagttcagtgccacttagtattgttaacaatgttgcataaccaccacctttatttaaagttccaaaaaaaatgttctcctctaaaaggaaaccccatcccattaagcagatactctccattccttccttcctccagcccccagcaaccaccaatctgctttctgtctctatggttttatctattcttgctattttatataaatcgaattgtatgagaccttttgtgtctggcttctttcacttagtacaagtttttgagatttatttacatagtagcatgtatcaacacttcatttttatggccaaataaaattgtattatgtgtttataacacaatttatttatccactcattcattgatggactttgggttgtttctgacttttggctattgggaatagtgctgctatgaatgtttgtgtacctgtatttgtttgaatgcctattttgcattctcttggatatatatctaggagtggaactgctgggtcatatgttaattctatgtttagctttttgaggaacagacaaactgttttccacagcagttgaaccattccacattcccaccagcaatgtatgagaattccaatttctgtccacttcctcaccaacacttattattttccttttcctttttttaaaaaaaataagttatggccatcttagtgggtgtgaagtggtatctcattgtgttttttatttgcatttcctatgtaatgagctagaaactaaagtacaaactagatgggacatccagtccctttgatagataatgctgagtaaaaaatgagatgaaagacatttgtttgtttttagaacatgagtgacagtttgttaaaaagctttagaggaggaatgaaaacaaagtgaagtacacttagaaaagggccaagtggacatcttggatgtcaagtgcctagttcagtatcttttttttttttttttttttttttgagacagtgcctcactctgtcacccaggctggagtgtagtggcatgatctgggctcactgcaacctcctcctcctggattcaagcaattctcttgcttcagcctcccaagtagctgagactacaagcacccaccaccacacccggctaattttgtatttttcagtagagacggggtttcgccacattggccgtgttggtcttgaactcctggcctcaagcaatccgcctacctcagcctcccaaagtgctaggattacaggcataagccactgagcccagccctagttcagtatcttttatgtaaattataaacatctgcaacattatgtatcatatgcagatacttattgcatttcttttattagtggtgaaagtgttctatgcatttattggctcttgaatttcctcatctatgaattgtcattcacacacctacttttctgcttcgtttttacatatgtctttgcctattaaagatattatccctctgttttatattttctctcattcttgtattgccttttaaattttgttatgatgtttcattaataaacagtgttttgttttcctctataaaaaaaaaaaaaaaa

SEQ ID NO: 504 - DNA, 1497 bp, Homo sapiens
ccacgcgtccggatcctgagaaagtgactttatctctcagagccatcgtttccttatgtgtaaaacagagatgaagaatgaccacctggaaggattgtcccatgtgaaagtgcctgcctcttccagcagctgacaggtagtaggaactcactgtgggtagtagctgatggcggtggcaccagcttatgtaagcccacaagactcaagcaggattctctttttacagaggaaactccaggctacgttcatttcttactgtccctcatgtagaaaggtaaacttgggtcatacctggatactgtctctcatctttttcttttgctctgagcaagtagctcccatgtatccaatatgaatcttggtccataaattcaagcatttgagaaataaaatttcaaatatatacttgaaatgcttcaagtgtatctgagaaattcttggtatgtccacacagtgaaatattactcagtcataaaaaggagtaagtactgtacatactacgacatggatgaacctagaaaacatgcactaagtgaaacaaaccagatgcaaaagaccacatatcataagacttcatttatatgaattgtccagaataagcaaacccataaagacaaaaagtagatgactggttgccagaggataaggggagggagaatggagagtgattgctaataggtatagggtttctttttggagcgatgaaaatattctgggatcagatagttgtgatggttacatacttagtgagtatagtaaaagccgctgaagggtattctttaaaatgttgagtttacgttacatgaattacagctcaagaaaaaaagtaaaaatcactgccaaacctatggacattgaaaagataataaaggaatattatgaacaactctatgcccaccaatttgctaacttagatgaaatggaataatttcttatttctattaaaactcatacaaatagaagaccctatggagctttaatttattaatgcaaacagtacctaacaaacccacaggtcctaaactaccaaactgcattaaaaatttcggttggggcgacctcggagcagaacccaacctccgagcagtacatgctaagacttcaccagtcaaagcgaactactatactcaattgatccaataacttgaccaacggaacaagttaccctagggataacagcgcaatcctattctagagtccatatcaccaatagggtttacgacctcgatgttggatcaggacatcccgatggtgcagccgctattaaaggttcgtttgttcaacgattaaagtcctacgtgatctgagttcagaccggagtaatccaggtcggtttctatctacttcaaattcctccctgtacgaaaggacaagagaaataaggcctacttcacaaagcgccttcccccgtaaatgatatcatctcaacttagtattatacccacacccacccaagaacagggtttaacaaaaaaaaaaaaaaaaaaaaaaaaaaaa

SEQ ID NO: 505 - DNA, 1958 bp, Homo sapiens
  misc_feature (374)..(374): n equals a,t,g, or c
  misc_feature (377)..(377): n equals a,t,g, or c
  misc_feature (1244)..(1244): n equals a,t,g, or c
  misc_feature (1300)..(1300): n equals a,t,g, or c
  misc_feature (1311)..(1311): n equals a,t,g, or c
  misc_feature (1327)..(1327): n equals a,t,g, or c
aattcccgggtcgacccacgcgtccgcagctccctctctccctctggcccagtcccttccgcttgtgtccgggaagctgtgggcggtgatttaacatgactcacttgggggcataggcgctatgaagttcagtggctgggtgccaggtggcgccaatgacaccctttttctcagagcccgggctgaatggacacctccctcaaagccttccagacccagggttacggccgttcccagagacatgttcccgtgctgctgggcacacctgcagaggggagggaaggtcctgtgtttgctggtgctgctcgtcctctcacttcctaccgagcatcatgttgcaaacaaatgaccttggcaccaccgttttgcaaatngtnctttcttgggctttactttttggtctatgtgagcaaaatgaactgaagtcaaggtacgactcccaataacctgctgtgggatgagagggctttgtcattatgcatctgattagttatccacgcccagagctacactttctcgatgcttctcagctctgactctcacagggccagggagaaatttttgtgccccctaaatcatgtagttggatacaaaacattccctggaggcctaccattctcaaatccccgtgcagggctctgtggggtgcaacatgaaactcgctctaactccctacgtggaggacagacagacccatcctaactccaaagccagacacaagggacaaaggtaccaaaaaggtgcaaggtgcaagaatggacgacgctggtcttccaatttgctggaatatctgtgcggctagaatggtgtcttgtcagcatatatcaagcatcttgcccttgctctgtcctgcctggccacaaaggacactcagacaacaccggcctcataaatgctgcctggagaaaagcctagctaggtacggagggtcagggtatttcagaaaagagaaactgcttcagccaatgctcatgagatttaccagggaatagcaaacaagtctagtgcaagccagggttgggggagtgggagggtgattagcagagatcaatctagaaaggaggtcaaggttctgtaggtggggaaagagggtgcttgtgtattaaaacttgttttccagcagtttggagatttctcacagaactaaaaatagaactaccattcatcccagcaatcccattactaggtatatactcaaaggaaaacaaattgttctatcaaaaagacacctgtactcctatgtntatcgcagcactattcacaatagcaaagacatggagtaaacccaggtgcccatcancggtgaactgnataaagaaaatgtagncatatgcctaccatggaatactacgcagctgtaaagaggaaagaaatcatgtcctttgcaacaacatggatacagctggaggccattatgctaagtgaattaatgcagaaacagaaaactaaatatcacatgttcttatttgtaagcagaagctaaatattgggtgcacacaggcacaaagatgggagcaataaacactggggattccacaaagggagcaggcagagggaagggttgaaaaactacctatcaggtcctctgtgcactacttgtgagacagaatcattagaagcccaaacctcagcatcacacaatatacttatataacaaacctgcacattgacccctgaacctaaaaaaaaaaaaaaaaaaaaaaaaaaaaaaaaaaaaaaaaaaaaaaaggggggggggggggggaagaagtggggtgggacgacagtgaaatctagagtaaaatcaagctggcccaaggtgtcctgcaggctgtaatgcagtttaatcagagtgccatttttttttttgttcaaatgattttaattattggaatgcacaatttttttaatatgcaaataaaaagtttaaaaacttaaaaaaaaaaaaaaaaaaaaaaagggcggccgctctagaggat

SEQ ID NO: 506 - DNA, 1147 bp, Homo sapiens
  misc_feature (5)..(6): n equals a,t,g, or c
  misc_feature (11)..(12): n equals a,t,g, or c
  misc_feature (19)..(19): n equals a,t,g, or c
  misc_feature (1145)..(1145): n equals a,t,g, or c
cgcannccacnnggtggangccgctctagaatatggatcccccgggactgcagggagtccaaggtacagtcgccgcgtgcggagcttgttactggttacttggcctcatggcggtccgagcttcgttcgagaacaactgtgagatcggctgctttgccaagctcaccaacacctactgtctggtagcgatcggaggctcagagaacttctacagtgtgttcgagggcgagctctccgataccatccccgtggtgcacgcgtctatcgccggctgccgcatcatcgggcgcatgtgtgtggggaacaggcacggtctcctggtacccaacaataccaccgaccaggagctgcaacacattcgcaacagcctcccagacacagtgcagattaggcgggtggaggagcggctctcagccttgggcaatgtcaccacctgcaatgactacgtggccttggtccacccagacttggacagggagacagaagaaattctggcagatgtgctcaaggtggaagtcttcagacagacagtggccgaccaggtgctagtaggaagctactgtgtcttcagcaatcagggagggctggtgcatcccaagacttcaattgaagaccaggatgagctgtcctctcttcttcaagtcccccttgtggcggggactgtgaaccgaggcagtgaggtgattgctgctgggatggtggtgaatgactggtgtgccttctgtggcctggacacaaccagcacagagctgtcagtggtggagagtgtcttcaagctgaatgaagcccagcctagcaccattgccaccagcatgcgggattccctcattgacagcctcacctgagtcaccttccaagttgttccatgggctcctggctctggactgtggccaaccttctccacattccgcccaatctgtaccggatgctggcagggaggtggcagagagctcactgggactgaggggctgggcacccaacccttttccacctgtgcttatcgcctggatctatcattactgcaaaaacctgctctgttgtgctggctggcaggccctgtggctgctggctgagggttctgctgtcctgtgccaccccattaaagtgcagttccctccggaaaaaaaaaaaaaaaaagggcggcnac

SEQ ID NO: 507 - DNA, 781 bp, Homo sapiens
  misc_feature (34)..(34): n equals a,t,g, or c
  misc_feature (751)..(751): n equals a,t,g, or c
  misc_feature (762)..(762): n equals a,t,g, or c
  misc_feature (764)..(764): n equals a,t,g, or c
cccggaattcccgggtcgacccacgcgttcggcncagtgacagaggcacccagggctcagcaagctcatggcccagcttgttggactcagagggcagaagaatcacattctaaacatgataaggtatagccagcaggaggcagattcccagattgattctccagagccttgtaggtcccaagggtgcctatgacaccaatgggaatctgaaccaacacagacagcacagtcttcttaggagaccctagtgcagcagcgctggcctcctcctgagcgtgcacgcttatatggcttctgagctggccaggctacttcatgcatttggtttaatgggtcctcgtaaggcaggagaatcttcttgaacttggagttgggtctgtggtccattggtcagtactttgttcagaggcactgagggtgggaaggctcatggagctggattctgctgctgggaagctgggtgggccttgtttgtgggcctcaggttcaggactgaatgagagtcctcttgttgcgagttgagggtgtactctgggcatgccatgccctttttttgtactaagagggtagaaaagcaaagaccagactagttggcaaattggaacccaactacccagtttatttatttcttargcgtagaaggaataatttagggggaactgaagagccaacctaaaggaaaaaaaaaaaaaaagggcggccctatagaggatccctcgaggggcccaagcttacgcgtgcatgcgggcgngttacctcaantnaaatatagagagttccc

SEQ ID NO: 508 - DNA, 1346 bp, Homo sapiens
  misc_feature (291)..(291): n equals a,t,g, or c
  misc_feature (421)..(421): n equals a,t,g, or c
  misc_feature (423)..(423): n equals a,t,g, or c
  misc_feature (425)..(425): n equals a,t,g, or c
ccacgcgtccgctagaatgggcacgagctctgccctcatcacagtccaaaagtgagcacctgcctggagctgcccagaaacagccttgtggggtggggttggtgtctgacctccctccccgggggccttcgcaggcttctctgctggtgcttctgtgcctgtaggtctggattcctccagggcctgatcctgggtgcagatgcagctggaagccctgaacctgctgcacacactagtctgggcacggagtctctgccgtgccggagctgtgcagacacaggagcggctgtnaggcagtgccagccctgagcaagtgccagctggtgagtgctgtgctctgcaggagtatgaggccgccgttggagcagctcaagagcgagcagatccgggcgcaggctgaggagaggaggaagaccctgancnangagacccggcagcaccaggccagggcccagtatcaagacaagctggcccggcagcgctacgaggaccaactgaagcagcagcaacttctcaatgaggagaatttacggaagcaggaggagtccgtgcagaagcaggaaaccatgcggcgagccaccgtggaaccggagatggagctgcggcacaagaattgagattgctgccgatggagaccgatgcccgggcgcgcgccaaggccgagcgggagaatgcagacatcatccgcgagcagatccgcctgaaggcgtccgagcaccgtcagaccgtcttggagtccatcaggacggctggcaccttgtttggggaaggattccgtgcctttgtgacagaccgggacaaagtgacagccacggtaaacatattcataaaacagggctggcaggtggctgagaggcagcatgtgggggcctcctggagccccaggtcctgtccctgccggctctgcacagccctgtagctctcccagcacagagcaaacccacgttgtacctgctgggctcggctgctcctccctccttgagctgggagaaaaaaatgcagttgccagcctgggccacacggtgagaccccatctctacgaagaataaaacattagctgggtgtgatggtggcgcctgtggtcctgctactcgagaggctgaggtaggaggatcacttaagcccaggaggtttgggctgcagtgagccaacattgcaccactgcactccattcttggcgagagaataagaccttgtctcaagaaaaaaatggccaggcggtagtggctcaggcctgtaatcccagcattttcggaggcggaggtgggcggatcacgaggtccggagatcgagatcatcctggtaagagtgaaaccctgtctctaccaaaaaaaaaaaaaaaaaaa

SEQ ID NO: 509 - DNA, 1338 bp, Homo sapiens
ggcacgagggaagaggaaggtgctcagtcaggaaactggkgctgctgggggcccccttcccccagtcctatctcacctctgtgcagggagagctctgtgggtggcccgaggcctggggycactctsctccctgcctgatggctacccaggttcaccaggggccactggggctcccaccagcccctgaccctgtggrcctgtggcyttgcaggagaacgtcagctgcctcaacaccagcctggtgatcctgatgctggcccgacggaaagagcggctgcccctgtacctgcggctgctgcagcggatggagcacagcaagaagtaccccggcttcctgctcaacaacttccacaacctgctgcgcttctggcagcagcactacctgcacaaggacaaggacagcacctgcctagagaacagctcctgcatcagcttctcatactggaaggagacagtgtccatcctgttgaacccggaccggcagtcaccctctgctctcgttagctacattgaggagccctacatggacatagacagggacttcactgaggagtgaccttgggccaggcctcgggaggctgctgggccagtgtgggtgagcgtgggtacgatgccacacgccctgccctgttcccgttcctccctgctgctctctgcctgccccaggtctttgggtacaggcttggtgggagggaagtcctagaagcccttggtccccctgggtctgagggccctaggtcatggagagcctcagtccccataatgaggacagggtaccatgcccacctttccttcagaaccctggggcccagggccacccagaggtaagaggacatttagcattagctctgtgtgagctcctgccggtttcttggctgtcagtcagtcccagagtggggaggaagatatgggtgacccccaccccccatctgtgagccaagcctcccttgtccctggcctttggacccaggcaaaggcttctgagccctgggcaggggtggtgggtaccagagaatgctgccttcccccaagcctgcccctctgcctcattttcctgtagctcctctggttctgtttgctcattggcygctgtgttcatccaagggggttctcccagaagtgaggggcctttccctccatcccttggggcacggggcagctgtgcctgccctgcctytgcctgaggcagccgctcctgcctgagcctggacatggggcccttccttgtgttgccaatttattaacagcaaataaaccaattaaatggagactattaaataactttattttaaaaatgaaaaaaaaaaaaaaaaaaaaaaaaaaaaaaaaaaaaaaaaa

SEQ ID NO: 510 - DNA, 1478 bp, Homo sapiens
  misc_feature (1385)..(1385): n equals a,t,g, or c
  misc_feature (1390)..(1390): n equals a,t,g, or c
  misc_feature (1468)..(1468): n equals a,t,g, or c
gctggaggtccttctttctgccacagtcagctttcgttgaagctgttttgatgatgagctcccagcttcagagtcaggacccaagcggggctccamgaaaggcctgggcgacccagccactgggcctaagcctgacctgctgcacccctgcctccctccacagttgccgaggtactgtctgaatgccgcctgctcgcctacatatcccaggtgcccacgcagatgtccttcctcttccgcctcatcaacatcatccacgtgcagacgctgacccaggagaacgtcagctgcctcaacaccagcctggtgatcctgatgctggcccgacggaaagagcggctgcccctgtacctgcggctgctgcagcggatggagcacagcaagaagtaccccggcttcctgctcaacaacttccacaacctgctgcgcttctggcagcagcactacctgcacaaggacaaggacagcacctgcctagagaacagctcctgcatcagcttctcatactggaaggagacagtgtccatcctgttgaacccggaccggcagtcaccctctgctctcgttagctacattgaggagccctacatggacatagacagggacttcactgaggagtgaccttgggccaggcctcgggaggctgctgggccagtgtgggtgagcgtgggtacgatgccacacgccctgccctgttcccgttcctccctgctgctctctgcctgccccaggtctttgggtacaggcttggtgggagggaagtcctagaagcccttggtccccctgggtctgagggccctaggtcatggagagcctcagtccccataatgaggacagggtaccatgcccacctttccttcagaaccctggggcccagggccacccagaggtaagaggacatttagcattagctctgtgtgagctcctgccggtttcttggctgtcagtcagtcccagagtggggaggaagatatgggtgacccccaccccccatctgtgagccaagcctcccttgtccctggcctttggacccaggcaaaggcttctgagccctgggcaggggtggtgggtaccagagaatgctgccttcccccaagcctgcccctctgcctcattttcctgtagctcctctggttctgtttgctcattggcygctgtgttcatccaagggggttctcccagaagtgaggggcctttccctccatcccttgrggcacggggcagctgtgcctgccctgcctctgcctgaggcagccgctcctgcctgagcctggacatggggcccttccttgtgttgccaatttattaacagcaaataaaccaattaaatggagactattaaataactttattttaaaaatgaaaaaaaaaaaaaaggcgggcgntctanaggaaccaagttacgtacgcgtgcatgcgacgcatactcttctatagggcacctaaatcaattactggccgccgttanaacgtctgat

SEQ ID NO: 511 - DNA, 1256 bp, Homo sapiens
ggcacgagcattaaccaaaaaatgtgcaaacacactactatgatttaccaaaagactctctgcaagtggtaaatcattagctctagtgttgctctttgtaacctcaggtctttggggaatggtgcagaattagtattgcttccttctttctgtgtgtgataatggtgggggaaggctagtaccatctctgtcatacatcaaattcccatatgtgaataaatttatgtatttttactgcactctttttataggtttatcattcctgcaccaacaacgaatgccattattaaaactttatagaaagtctcaatatatggcacagtgcttcatttctttttttcatctagagtgccttagccattcttggctttctgccgttccacaaatagcaatgtaaatttgtcagtataatagagaatccacttatatttcttcaacagctattgggaatatggttgggattacttcaactctatgtatcaatttgaggagaattgatatctttataagattaatccaaatcacagcatgtcaaaatttccttattagggtagttttaatgtccttcaaaaacactgtattttcttcatatagatctaagaaaactttggtgtttattcctaagaaatttatagttcttgttttgtaaatgatatctattcttaagttacacttaaacttatttgttgctgtatatagaaatggaattgacttctatgtacagcagttgcaaactgatattcatatgcagaaagtgaaactagacccctaatggataaaagacttaaatgtaagacctgaaagtatgaaactactagaagaaaacatatgggaaacacttcagtatcctggcctgggtgaagattttatggagaaaacctcaaaagcataggcaacaaaagcaaaaatggacaaataggattatatcaaactaaaaagattcagcacagtaaaataaataatcwatagagtgaagagacaaccttcagaagatatttgcaaactattcatctgacaagggattaatatttagaacatacaaggacctcaaacaactgagcaacaacaacaaaaatatccaattttaaaaatgggcgaaagagccaaataaacatctctgaaaaccagacgcaagtggccaacaggtatatgaaaaaaaaaaatgctgaacaccgctaatcatcagggaaatgcaaaccaataccacaatgagatattatctcattwtggctattatcaaaaaaaaaaaaaaaaaa

SEQ ID NO: 512 - DNA, 1760 bp, Homo sapiens
  misc_feature (129)..(129): n equals a,t,g, or c
  misc_feature (132)..(132): n equals a,t,g, or c
  misc_feature (179)..(179): n equals a,t,g, or c
tggtgaacagcctgtttgctggaatggacctgacgagccttcagaatctccagaatctccagtcgctccagctggcaggcctcatgggcttccctccaggactggcaacagctgccaccgccggagtgncgnaagaaccctgctgctgtgctgcccctgatgctgccaggaatggcggngcctgcccaacgtgttgggcttgggcgggctgttgaataaccctctgtcagctgctactggaaacaccactactgcttctagtcaaggagaaccggaagacagcacttcaaaaggagaggagaaaggaaatgagaatgaagacgagaacaaagactctgagaaaagcacagatgctgtttcggctgctgactctgcgaatggatctgttggtgctgctactgccccggctggattgccctcaaacccgctagccttcaaccctttcctcctgtccacaatggccccgggcctcttctacccatccatgtttctacctccaggactggggggattgacgctgcctgggttcccagcattggcaggacttcagaatgccgtgggctccagcgaagaaaaggctgctgacaaggctgagggaggaccctttaaagatggagagacccttgaaggcagcgatgccgagggagagcctggataagactgcagagtcctccctcttagaagacgaaatagcacagggtgaagagctagactcacttgatgggggggatgaaatagaaaacaatgaaaatgatgaataaccagtaccagttccagttcaagtgtttaaaacttttgacaagtggtagtcctactgtttacactcacagttaatgttcatacctagttttataagctgttctgtaacatagtgtagcaaaaaaaaaagttcaagtcatgttatacaggtgtgtcaaaaggtatcttggtcattaagtattgtgcagtgcattatttattatccctaggagagatgraatttgagaggtgatcatgtytttttaaggraacttamataatgctctgcttttttttttytcttggtaccattggtattataataaagagcaatttgtaactgagtggcactaatggaagaaagtgctgctcaaaggaagtatgaagttatatatttaattttttaattttaatttttaatttttttgctgtgaaggtcaagctgaaatttaccatacatatcatacttgctcatttgtttccctttttgactgtatgggggttcccacactcgtgcatacacacacatccatacactctgacaatctccacgctagtgtgaacgcctctgtcccgaggcgcagcaataataaggcagctgttgaatgtgaagggtccctttggaaaattaacctactgggagggttcttgccagacagaactacagttccattgtctcgtggtcttgtaatgcactggtaaaaacaaaataaatagatgaataaataaagagtgagagaagagagaatcaggtaccttttttaaattaaaggactttgttactttagccacaaagctaaaacagcattacctcagctctaaactagccttgaagtttacagacatgactttgtaaatgtattgtttttctttgttgtgatgtccttttatttttttctttgaaaactgctatcatgtaagataaaatgtaaattgctgccaactgtagtaatgatgcttttaataaaagtgacccatgataaaaaaaaaaaaaaaaaaaaaaaaaaaaaaaaaactcgkag

SEQ ID NO: 513 - DNA, 1529 bp, Homo sapiens
ggcacgagagtgtgtcaggcgggcagcttgccccgccgccccaccggagcgcggaatctgggcgtccccaccagtgcggggagccggaaggaggagccatagcttggagtaggtttggctttggttgaaataagaatttagcctgtatgtactgctttaactcctggaagaatgacagatgacaaagatgtgcttcgagatgtgtggtttggacgaattccaacttgtttcacgctatatcaggatgagataactgaaagggaagcagaaccatactatttgcttttgccaagagtaagttatttgacgttggtaactgacaaagtgaaaaagcactttcagaaggttatgagacaagaagacattagtgagatatggtttgaatatgaaggcacaccactgaaatggcattatccaattggtttgctatttgatcttcttgcatcaagttcagctcttccttggaacatcacagtacattttaagagttttccagaaaaagaccttctgcactgtccatctaaggatgcaattgaagctcattttatgtcatgtatgaaagaagctgatgctttaaaacataaaagtcaagtaatcaatgaaatgcagaaaaaagatcacaagcaactctggatgggattgcaaaatgacagatttgaccagttttgggccatcaatcggaaactcatggaatatcctgcagaagaaaatggatttcgttatatcccctttagaatatatcagacaacgactgaaagacctttcattcagaagctgtttcgtcctgtggctgcagatggacagttgcacacactaggagatctcctcaaagaagtttgtccttctgctattgatcctgaagatggggaaaaaaagaatcaagtgatgattcatggaattgagccaatgttggaaacacctctgcagtggctgagtgaacatctgagctacccggataattttcttcatattagtatcatcccacagccaacagattgaaggatcaactatttgcctgaacagaatcatccttaaatgggatttatcagagcatgtcacccttttgcttcaatcaggtttggtggaggcaacctgaccagaaacacttcgctgctgcaagccagacaggaaaaagattccatgtcagataaggcaactgggctggtcttactttgcatcacctctgctttcctccactgccatcattaaacctcagctgtgacatgaaagacttaccggaccactgaaggtcttctgtaaaatataatgaagctgaaacctttggcctaagaagaaaatggaagtatgtgccactcgatttgtatttctgattaacaaataaacaggggtatttcctaaggtgaccatggttgaactttcgctcatgaaagtggaaacattggtttaattttcaagagaattaagaaagtaaaagagaaattctgttatcaatacttgcaagtaattttttgtaaaagattgaattacagtaaacccatctttccttaacgaaaaaaaaaaaaaaaaaa

SEQ ID NO: 514 - DNA, 2114 bp, Homo sapiens
ggcacgagggacgccgggcgcgcagtcggtgctgattatcacaactgtttggtgacctacttcactgacctaatggaaacagactgtaatcccatggagctaagcagtatgtcaggatttgaagaaggttcagagctgaacggttttgaaggaactgacatgaaagacatgaggctcgaagctgaagcagttgtaaatgatgttctctttgctgttaacaacatgtttgtctcgaaaagcctgcggtgtgcggatgatgtggcctatatcaatgtggaaacaaaggaaagaaacagatattgcctagaactcactgaagcagggctcaaggtggtaggctatgcttttgaccaggtagatgatcatttacagactccctaccatgaaacagtctactccttgttggatacactcagccccgcctaccgagaagcatttggaaacgcactgcttcaaagactggaagctttgaaaagagatggacagtcatgactacactttctcctttcagaggggctggtgctggtacagaatgtagatacaaagcttaaaattcttgcatatggtcatagaaaatgcatctttggttttgtgtttttatcacttgcttccaacttaggcttttggctcagaagattattgaataatgatttgtcttagtttctgtttcagtaagggaattctgaggccgttgctatgataccatcattaagacattcacatgtcttcatataatatctcttcatttcaaatcctaatcactatttcatactattacagggctttgatgctgccagcactgtcttttacataggaaattctagatttgcacagtaatagaggaattagaagtacctaactatacactttgattcagcctgctaaatcaggggttcaatactagcttggacaaactttgtagtaattaattgctaccagccttattggaaacaaattatcaactagtttcccctgcacaaattttgaaattcactgcttcacttaatctatttatattactaataatggattaataaagatgaattaattatatattacttaactagtattaaatgaaaaacagggactgaaatagttctgtattccgtgtttgcaacagccagccaactaagcagaggataaaccgttagcaaatgaatgtaataattactcatttccaagatatctaagcacataagcaaatacaggaacagacttcattctttttcttaacaaaaaagcatcttcagtgtgtgatttaaaagaaagaagattctggtttcctagaaaacaatattttggcctgtgttgattcttattctgaatgtgtgtttacataatgtacagtatatattcagaaagtatttttgcttcaacgtttactttctatgatgtagtgctttggtattcctacagcaccccaccttccccaacagatgtacagtgttctgtctccattcgaaatctacaatgtaatatgagtgcattgtatgggtttgaaaccaaaggatgaatgaagcattcagagacttaatatttgaaaaaggaatagtcagtattttatattttattacaggtactgatatttataaatttaataaactgtaccatgctgctgcatgttttcaagtacatgttgaacagtaaggattggggagttgttttttaatggtcacctaaagcagctgctatagaaatgttgaactaaaattttgcatctggtcataccttcatgcatttatcatttgcagatatttttccatcattattaaaaaacaggaacttttaggctctgaagatcatgtggaccagagcaaattaaagttcagtttgtgacacaattcattgccagacttcattggaatgctttgtttgatgatgtatgttcattctcagctttattttcagatgcttaactgggcaatgaagtctaacttcaggttgaactttctcatgtttaatctcaggctaaatgtaaatgatatttgtaaagtttgaataaaattctgtttactcattttgagttagtatgaaaaaaagtgattgtatgtttaagaattgaaattgttcattttgtgataaatgattaattccaaaaaaaaaaaaaaaaaaaa

SEQ ID NO: 515 - DNA, 2158 bp, Homo sapiens
gaattcggcacgagtgctgattatcacaactgtttggtgacctacttcactgacctgtgaggattccttcccttcaagtactggattcttgatctttctgcatcatcaagaatggaaacagactgtaatcccatggagctaagcagtatgtcaggatttgaagaaggttcagagctgaacggttttgaaggaactgacatgaaagacatgaggctcgaagctgaagcagttgtaaatgatgttctctttgctgttaacaacatgtttgtctcgaaaagcctgcggtgtgcggatgatgtggcctatatcaatgtggaaacaaaggaaagaaacagatattgcctagaactcactgaagcagggctcaaggtggtaggctatgcttttgaccaggtagatgatcatttacagactccctaccatgaaacagtctactccttgttggatacactcagccccgcctaccgagaagcatttggaaacgcactgcttcaaagactggaagctttgaaaagagatggacagtcatgactacactttttcctttcagaggggctggtgctggtacagaatgttgatayaaagcttaaaattcttgcatatggtcatagaaaatgcatctttggttttgtgtttttatcacttgcttccaacttaggcttttggctcagaagattattgaataatgatttgtcttagtttctgtttcagtaagggaattctgaggccgttgctatgataccatcattaagacattcacatgtcttcatataatatctcttcatttcaaatcctaatcactatttcatactattacagggctttgatgctgccagcactgtcttttacataggaaattctagatttgcacagtaatagaggaattagaagtacctaactatacactttgattcagcctgctaaatcaggggttcaatactagcttggacaaactttgtagtaattaattgctaccagccttattggaaacaaattatcaactagtttcccctgcacaaattttgaaattcactgcttcacttaatctatttatattactaataatggattaataaagatgaattaattatatattacttaactagtattaaatgaaaaacagggactgaaatagttctgtattccgtgtttgcaacagccagccaactaagcagaggataaaccgttagcaaatgaatgtaataattactcatttccaagatatctaagcacataagcaaatacaggaacagacttcattctttttcttaacaaaaaagcatcttcagtgtgtgatttaaaagaaagaagattctggtttcctagaaaacaatattttggcctgtgttgattcttattctgaatgtgtgtttacataatgtacagtatatattcagaaagtatttttgcttcaacgtttactttctatgatgtagtgctttggtattcctacagcaccccaccttccccaacagatgtacagtgttctgtctccattcgaaatctacaatgtaatatgagtgcattgtatgggtttgaaaccaaaggatgaatgaagcattcagagacttaatatttgaaaaaggaatagtcagtattttatattttattacaggtactgatatttataaatttaataaactgtaccatgctgctgcatgttttcaagtacatgttgaacagtaaggattggggagttgttttttaatggtcacctaaagcagctgctatagaaatgttgaactaaaattttgcatctggtcataccttcatgcatttatcatttgcagatatttttccatcattattaaaaaacaggaacttttaggctctgaagatcatgtggaccagagcaaattaaagttcagtttgtgtcacaattcattgccagacttcattggaatgctttgtttgatgatgtatgttcattctcagctttattttcagatgcttaactgggcaatgaagtctaacttcaggttgaactttctcatgtttaatctcaggctaaatgtaaatgatatttgtaaagtttgaataaaattctgtttactcattttgagttagtatgaaaaaaagtgattgtatgtttaagaattgaaattgttcattttgtgataaatgattaattccaaaaaaaaaaaaaaaaaaaactcga

SEQ ID NO: 516 - DNA, 443 bp, Homo sapiens
ggcacgagtgcacgcccaatcagaccgagcacttgtgacactaccccaacacctctcccagggctgaatgaggaacgcgccactggacacatgaggaagaggctgccctgggagctactgatgctgtgacctcacctctctggctttgggcggcaggtccctgcacctaggatgcctgcctggaaatgtccttgcattcgtggcctccttcacagcctcctcctcagagaagcctctgcgagtgcacagggagtgtgtgcagccttgtgaagggctgggaccacttgcccagactggggcccctcaggcacaggcgtggggtcctactgacctgtctccccagctcccacacagaaagcatctaaaataaacacacgtggatggaaagcgttaaaaaaaaaaaaaaaaaaaaaaaaaaaaaaaaaaaaaaaaaaaaaaaaaaa

SEQ ID NO: 517 - DNA, 1315 bp, Homo sapiens
  misc_feature (38)..(38): n equals a,t,g, or c
acccacctttcaagggccaataattgaaggcccaaacnggaggtggctgggaaacgtgtcaaagaatgacccccaggttacctctcttctcttcaaacacccaagccaaaagctactttgagcctcctgcagctgggccttgatgagcacaacagagtgaaggtgtatcgcttctgaggccctgagcaggggcttggggcagcccagcctctcctccacccagaccaagtgcctgaggagctgcctgccttcttccatctgagaaagcaccctccttccccctttgacttgcaggagccaccagggaccagggggttgagtggaacagtaaagccacacattctgtgactatataacctatctcaggctaaaatgtgtggacttgtacgagctcttgtcattgacatggcaagctgatggcgtgcggtggctgcggggtatcagggccgggagccctttggraggaagggaaggcgttaraggagctgccttcggaggctcagggagtccctttggagctggttgtttccttggccctgcagcgcactgctcggggctcccaaggaggttgtgtgtatggttcttaattcatcaggacaaagacccccagcatgtgtgtaccctgggacccgatttctctgggcccacatctatctccaatacctcagcctcagatcagaccctttcttttttgtctttcttctcttaatttttaaatgcctcttttcttgagcattccatctctctttttgaccctctcaggactgggcttagctgtccagagccctgccggarggtgctgggggctgtccctctgcaggcactgtgttttcctcaggggctgtcctcagaacacccctcctgctccctggggctcctcagggagccatttcagctggagtctcaggtctcaaaaacaacttctccaggaggccaaaaaaagactgggttggcttctggtcctcatgatggcttttatcctcctgggacactttgggtatattcatgggcattgtttccatctgtcttttctacctgtgccacccctgccctgattccacggctgcctcaggcaggcaggcaaggagctaggccggtgccyggccctggcagcaaggggtctttgtgcagttggagatgctgccgttgtggcagagcgtcctgcagccccgcttccatcagcaggctctggggtgggggctttgcaggggatgctctctgatgtttgttccgttgtttaaataaaatgcacttatttttgtttttttttttgcaaaaaaaaaaaaaaaaaaaaaaaaaaaaaaaaaaaaaaagt

SEQ ID NO: 518 - DNA, 1174 bp, Homo sapiens
ggcacgagcccaccctccaactttgcgacggaaatgtgtcatcgaaagccaggtacaccaggggttggaaaaaccacactaggcaaagaacttgcgtcaaaatcaggactgaaatacattaatgtgggtgatttagctcgagaagtctgatcatcggatatcatggagtctggcaagacggcttctcccaagagcatgccgaaagatgcacagatgatggcacaaatcctgaaggatatggggattacagaatatgagccaagagttataaatcagatgttggagtttgccttccgatatgtgaccacaattctagatgatgcaaaaatttattcaagccatgctaagaaagctactgttgatgcagatgatgtgcgattggcaatccagtgccgcgctgatcagtcttttacctctcctcccccaagagattttttattagatattgcaaggcaaagaaatcaaacccctttgccattgatcaagccatattcaggtcctaggttgccacctgatagatactgcttaacagctccaaactataggctgaaatctttacagaaaaaggcatcaacttctgcgggaagaataacagtcccgcggttaagtgttggttcagttactagcagaccaagtactcccacactaggcacaccaaccccacagaccatgtctgtttcaactaaagtagggactcccatgtccctcacaggtcaaaggtttacagtacagatgcctacttctcagtctccagctgtaaaagcttcaattcctgcaacctcagcagttcagaatgttctgattaatccatcattaatcgggtccaaaaacattcttattaccactaatatgatgtcatcacaaaatactgccaatgaatcatcaaatgcattgaaaagaaaacgtgaagatgatgatgatgacgatgatgatgatgatgactatgataatctgtaatctagccttgctgaatgtaacatgtatacttggtcttgaattcattgtactgatattaaacatgcatgctggatgttttcaagttgtgttttagaaaactaataataatgagtaaacacagttaccatacttttcaattgaaatgaaggtttttcatcagccttaaaagtgtaagaaaaataaagttgtcattcattcgaaaaaaaaaaaaaaaaaa

SEQ ID NO: 519 - DNA, 916 bp, Homo sapiens
gttttgttttcttcactatgtaaatattatttgggcaaacattacaaaaagggatccaaacaatttgagtttcagtatttttttctccctaggcatgtgcttcaatttcaaatatttttttctgtgtggaaaatgccatgtaactattgcactaccttctgtgtggactgtgttggtattggttctttctgtatatcaaaagtcagggtgtttataactgcaaagtttgtataagtggctttattcctcttctagaagatttatgaggagcctaggaagcactattggtacaggaggaaaaaagaatggaaaacatgtttacagactctagctttccttattagcttaaactggggccctcaaagagcagcctgttgatcttttggccaaatgacttgagcataagtcttttatttctttttaaggttaaatcgtaaactgtatacctttactactgaaaacaaaactatagggcatcatactaattgaaaatcaatagtaatgggttccatccattagctttttaaatgaatagatctggtattgatttccttcctgtttttttgaggcacattcctttacaaccagtgtttaaaccaccacgtaatcatcttctgcaaacaaggggtgccagtgttgcctaacagaagataatctttaataaagcaaatcctctgcttcaaaggtttttgaaataattggatccctttttgaaaaggaagatgagtttaactgtgtccaggtggagtaatagtactgctgttgcatgaatagatgatacaaagcaagtgatgaggttggtatgacttctttagtgaccttttagggtttgcttttattttcctctcttttttgtattatttctttcaaacatagtaaatatatgattttacagccaaaaaaaaaaaaaaaaaaa

SEQ ID NO: 520 - DNA, 1228 bp, Homo sapiens
ggcacgaggaaccctgaggtgtgcacagcgctgggatgccaggttcggcctcgaagcggaggatccctgtgtcccagccgggcatggccgacccccaccagcttttcgatgacacaagttcagcccagagccggggctatggggcccagcgggcacctggtggcctgagttatcctgcagcctctcccacgccccatgcagccttcctggctgacccggtgtccaacatggccatggcctatgggagcagcctggccgcgcagggcaaggagctggtggataagaacatcgaccgcttcatccccatcaccaagctcaagtattactttgctgtggacaccatgtatgtgggcagaaagctgggcctgctgttcttcccctacctacaccaggactgggaagtgcagtaccaacaggacaccccggtggccccccgctttgacgtcaatgccccggacctctacattccagcaatgggctttcatcacctacgttttggtggctggtcttgcgctggggacccaggataggttctccccagacctcctggggctgcaagcgagctcagccctggcctggctgaccctggaggtgctggccatcctgctcagcctctatctggtcactgtcaacaccgacctcaccaccatcgacctggtggccttcttgggctacaaatatgtcgggatgattggcggggtcctcatgggcctgctcttcgggaagattggctactacctggtgctgggctggtgctgcgtagccatctttgtgttcatgatccggacgctgcggctgaagatcttggcagacgcagcagctgagggggtcccggtgcgtggggcccggaaccagctgcgcatgtacctgaccatggcggtggcggcggcgcagcctatgctcatgtactggctcaccttccacctggtgcggtgagcgcgcccgctgaacctcccgctgctgctgctgctgctgggggccactgtggccgccgaactcatctcctgcctgcaggccccaaggtccaccctgtctggccacaggcaccgcctccatcccatgtcccgcccagccccgcccccaacccaaggtgctgagagatctccagctgcacaggccaccgccccagggcgtggccgctgttacagaaacaataaaccctgatgggcaaaaaaaaaaaaaaaaaaaaaaaaaaaaaaaaaaaaaaaaaaaaaaaaaaaaaaaaaaa

SEQ ID NO: 521 - DNA, 1960 bp, Homo sapiens
  misc_feature (13)..(13): n equals a,t,g, or c
  misc_feature (23)..(23): n equals a,t,g, or c
  misc_feature (25)..(26): n equals a,t,g, or c
  misc_feature (37)..(37): n equals a,t,g, or c
  misc_feature (1094)..(1094): n equals a,t,g, or c
  misc_feature (1952)..(1952): n equals a,t,g, or c
  misc_feature (1956)..(1956): n equals a,t,g, or c
gggggggggggtntaaatcgttncnntacttccacanattgctttgagggcccggaattataaatatatattatatttwaattgtttgagattattttgacacatttctttgatacgtagagtgttttgtttttaatttaaatctgtcctcatgcaaccctccatgaggggcagcgagcggcagggagcagactggctttgtaggttcagcactcggccccccactgcgggagaggcggaacccacttgcatgtcagcgtttttgattcgagaaaagaaatactctcaacgttttaccaagtgattttacctccacctttactaaagtctttacctaaaacatggcagtcgctggacacaggaaagcccaccttttgtttggccttttcgaaaggtgacccatattgcacagcagaacatcacagctgtggtcccagatgagacactgacatgcgagtgaaggcctctcctcctgggccccgggctgcgcaggctcctcactctgggcggtgtttcctgtctcagaattgacacggtgaatgcttagtgtctggattttcttgtrccagtgtttacatatctgacatcgagctcctctaagaggccacgttcaagcttgtgtgtccctgacccaagatagccagtgctgctcccaggtggtacttctggtaccgtgttgagacacttgggattctcagactgtggacaggagtgtttgtcatttttcatactgttttcttaataagcgctcaggcctaaggtgtgacaggaagtcgcacgcgcttggccagagcacagtgaagcaaaggactgggtgctgatggatggagccacggcggcatctgcccacccggccgcagcccccagtgcctctcctggtggtcctcccagtctagagggtcacggcccccccgccctcctccgtctctggcaagctgaccttgactaacccaggaatacagggtcatcctcattcctaagtaagtcaaacagcaagacatggtttgcgcgggtctttgccggaagccggtcctgctggccaggtgttttacgtcagcagggaaatgtggcacacgccctcgaggcattttaanactgcgcttcaggaaatctcaagttccatcttgtgttagtaacgtacccacattttgctggagttagtttattaaagatgcctamggtgaactctctggcgcaggttaaatgcagttttgaaaacccaggaccctggctcgtgagtgcgtctgggtcaggaagagacctctctgtgcgtctcaggctgagatgcagatttctgttttctaaaactggaagcgaccttgacgtgtattgaaggtgtgtgtgcccmaccccacccagcacgcactcattcagtccattgccttaacacaagcctgatggggctgttttctcacaatataaacgaataaagtgtcttctggcctacttctgaawtacttctcaactgtatggtttggggaagggagggaaacctaaaatcccgtccaaataagtgaaattcctgaagaagtggctgagtcctaccaggttggggttagggaaatgttctgggttcaggcgcccctcccagggctgagaaagcgcagccagggacagctttctgttctctcccagggtggctaggttagtatcttacatgacaaaaaactgagagtgttctaacttctgtgcaagcaaggttaatcctgagactaaatcttggcgttcagactcccgtagaggtcatctgtgtccaggcccacccgggcgccggctcagcggtagtgccgaaggtagatgagcttctggggagggaacttctcccggcagaggggacactccgccttgctgctgcaccacgcggtgatgcactcccagcagaacaggtggccgcagggcgtggctgttgggtgcctgcgctcctccaggcacagggtgcacagggtgtccancgtnccgc

SEQ ID NO: 522 - DNA, 1425 bp, Homo sapiens
gaattcggcacgagttttagtagagacagggtttcaccatcttggccaggctggtcttgaagttctggcctcaggtgatccaccctcctcggcctcccaaagtgctggaattacaggcatgagccactgtggccagcctaacttatcattttcttaaatgtgacttaaatgcagttgaaaacttgtattatgactgagtcgttttatcccctgaatcagagaaagcaaaatgaaaatccctctgctgtgctaatgcacctctttcttttttcagtgaccatgcagcaggtggccaggacagtggctaaagtggagctctcagaccacgtgtgtgatgtggtgtttgcactctttgactgtgatggcaatggcgaactgagcaataaggaatttgtttccatcatgaagcaacggctgatgagaggcctggaaaagcccaaagacatgggtttcactcgcctcatgcaggccatgtggaaatgtgcacaggaaactgcctgggacttcgctttacccaaacagtaaccccacactgcaagaggggacccctccacccccagtaccctggaccccctccgcagagtctcggcagagccctttgtgctgctgcttctggaagtagtcycccttcctcccgggatgacctcaggactctgtcggtttcccctctttacccttccccgtccccgtgttctgctgggctctgattctgcccaatgagtatccccataggttctcaaaaacatgaacaagtctgtaaagctcagacatttgtcagcctcaacagcaccacccattcaagcatcctgtggataaagaattcagggaaccatccacacacctgccaaccctgggaagcatccagttctcaaatcgtttttgctatggatttatactaacaagaacattccttgacttccctcctgctggtgttttaaagccacaagtagggaagatatctggcaggcagaaagaagtctgtgatgataaacaatgatgaggatgacctaggcaccctacgctagtgtgagaagcctgcgccccaggaaggatctgtgttagtccctgggatggctccaaggcctgctctaggaaggcagcatgctcagtgggaacacagcaagattcagaatttaaagtagttgcttcatggctctgtgcactcccttttcttcctcgcagcctccctaagatgactccagtgtgaccctgtgcttagtgagcaatagtgattgagctcatgttccctgcaagtgccatttcctctccaggatgggcctctaaagctgaggcctggctcagagcctgtttgccctctgtcttaaacaattgtaaatatcacttaaattataaccatttgcaataaacatccccaaagttaaaaaaaaaaaaaaaaaaaaaaaaaaaaaawaaaaaaaaaaaaaa

SEQ ID NO: 523 - DNA, 951 bp, Homo sapiens
ggcacgagccaaggtctaccttctctaccggcctggacactacgatatcctctacaaatagggctggctccagcccgctgctgccctgctgcccccctctgccaggcgctagacatgtacagaggtttttctgtggttgtaaatggtcctatttcacccccttcttcctgtcacatgacccccccccatgttttattaaagggggtgctggtggtgagccgtgtgtgcgtgtccctgctctgctgcccgcctggctgctctgtctgctgccccctccccccaggtgggtccccctgcttttcacctatctactcctgagcttccccaacaggagcaggtttgaggggccaggcctcttggaggcccctcctgcttcgttgggttctgcttccttcccttcttagctggctcaggggcttctatgggatcctggaagttccttagggacttgcccagggtcccagggccacccacacttcatctgctccctcataggccccacctccacgtcccggctgggccccagaccccagcttcctgccctccaccgggagtctgcatggttgggagtcctgggtggaggggcctttgtgaggctggacccggctcagggcaggtggaggagctgggcctcccacagggtgcccgggcagtgccatcctggtgggggagggcagccttcaaacgtgtggggtctacagtcctcaggtctaggcagggctgccggttctccacctccccatccgccccaggccccctgcctgtgcctgccttgcaccccctctgcttgggccacggtgtctctgcattgcctgcctttttgccttcacctcttttcttccccgccccctgcacattcggggtctcagcccccaggctgtgagctccttgggggcaggccctcaataaatgtgaactgctgctgccgcaaaaaaaaaaaaaaaaaaaaaa

SEQ ID NO: 524 - DNA, 229 bp, Homo sapiens
ggcttgttgtggggcaccagcagagggcaaagtcatactcctgcactgacagtgttcgtgaagagaatgaaatatgaagaaagctatgaatagttggaaattcggggggctgtgcttactcctgattatttcagtttggctaaaacagagctggcatcaaggaagggtttgttgtgatgattccagagagggtgactctcagggagttgcccaccaggcccacgaagcc

SEQ ID NO: 525 - DNA, 508 bp, Homo sapiens
ggcttgccaccaacgtgttcatcctgagactgtgcatgattaaggttattctccctctctcgcctctcgccaagtttatgcactcttcccctgtggaccatctctttcgacaaatccagcaaaaccccacccccatcctggaaaatttcttcttcaatcggggttaagtcggggatctagagaggtcgggtgtgaaaggaaaggaccttcgggcgggaaccaataccaagctaccctcctggttttcgttgtttatatacatgggagggggaaaatggtctgtatttttaaaacagaagatgtcctgccgtttctgcttctgtttttccttttttcttttttttttttttaacagccaattcttttgaagggagatagccagccaattttccatttctccttgcctacggagctcatgcaaacttccctacgctagccggctggccctgtgcaaccttcactaccacctcccgccaaccccctcctctactccttcctccctaagccg

SEQ ID NO: 526 - DNA, 1099 bp, Homo sapiens
ctctataggttaaagttggtacgcctgcaggtaccggtccggaattcccgggtcgacccacgcgtccgaaatgcttcagtccgccgagagcagtaccgtgtggccaagaggtggactcagagccttccttgagctaaactcggccaaccaaggcacgcagcatgtcccctcaggtctccagtcagtccaggttgaccctcagttctggacgtgtgtatatagctgtatttaatacctcaaggtcattgtggctctggggatgccggggcaggaggacgagggtgcgctgtggacacagcagtccgcggaattccgttctgggaagccaatggtcgccggcaccccttgcttcctccctctgttgtctgcctgtgtgacacacatcaatggcaataacttcttccaactcctcgcagaagtgggagaggccggcagcctgcaccgagaggggctttcctctctcttgctccccgcttcgttctgttttggctgcagagagtggttcatccatactctcattccctcgcctccccttgtggacgggggtcttgccttttcaattcctgtgttttggtgtcttcccttatctgctaccctgaatcacctgtcctggtcttgctgtgtgatgggaacatgcttgtaaactgcgtaacaaatctactttgtgtatgtgtctgtttatgggggtggtttattatttttgctggtccctagaccactttgtatgaccgtttgcagtctgagcaggccaggggctgacagctaatgtcaggaccctcagcggtggagcctgctggggggacccagctgctcttggacaagtggctgagctcctatctggcctcctctttttttttttttcaagtaatttgtgtgtatttctaactgattgtattgaaaaaattcctagtatttcagtaaaaatgcctgttgtgagatgaacctcctgtaacttctatctgttcttttttgaggctcagggagaaactagcatttttttttttccaaactactttttgtcactgtgacagttgtaaataaagtttgaaaatgctttccaaaaaaaaaaaaaaaaaaaaaaaaaaaaaaaaaaaaaaaa

SEQ ID NO: 527 - DNA, 990 bp, Homo sapiens
  misc_feature (948)..(948): n equals a,t,g, or c
  misc_feature (954)..(954): n equals a,t,g, or c
ctccaaccctgtggctgcccttcacacttacaggcctaaccccagcaggacctgccagctgcttcatgaacaagtccctgcctcatgttaattgcaagcactcatttcactctccctgtgtgccaggcaatagcataagcactggaagaatacagatgttatagtgagtcctacaatagccctggaaggcaagagctgtttccttkccatttctacaatgagtcaattgcagatgatgctataacacttccagtgtttctgacacttccctgaagctatacctgctaccttcatgggccgagcttgcccttatgaggcccacaggtggcagtgggcagaggggaccccgctataccacctcgctgctgttccactgtctgctcccgtgttctgaccacagctctggtgccgtttctcaagcctgggcttcattcaacattttctatctagctcttcatggtgctgctcctgctatggttccacagggcttcttctcgcaggtcagctccttagagaggtctcccagattccccgtaaagcagccctgcagcctctgcctctctcagccgcatcaccctgttgcttccttcacagcatgtctcaccatctgcaaccatctttctgtttgtcgtcttgttgatttgctgcctccacactgtcagctccttgggaacagagattggtttgtttactgtgcatccctggtgcccagaacagggcatggcatattgttggtgcataataaatattgtggaaataaaaaaaaaaaaaaaaaactcgagggggggcccggtacccaattcgccctatagtgagtcgtattacaattcactggccgtcgttttacaacgtcgtgactgggaaaaccctggcgttacccaacttaatcgccttgcagcacatccccctttcgccagctggcgtaatagcgaagaggcccgcaccgancgcccntcccaacagttgcgcacctgaatggcgaatggcaaa

SEQ ID NO: 528 - DNA, 3152 bp, Homo sapiens
  misc_feature (361)..(361): n equals a,t,g, or c
ggcacgagcccggcttctcctgtctgacatgtggtccagcaaggaactgcagggtgtcctcagacagcaaggtttcgataggaacatgctgggaaccttagctggggccaacagcctcaggaacttcacctcccgattctaagaagagactgtccaagcaagttaggcttgcaggaagatatgacccagctgagaagccctcaggcctcgctggatggggttttctgtccatcctgtgcagtatttgggaaagttcacaagaaactgagaagaaacctaaaaactgtggatagtggaaagatttttagattttttttttccttggggaaactggcaggcaatgggggttagggaggttggngcsgggggggctttcttgagttaaagggcttatatgtgatgtcaatatttcttcctctgagaaatggtatatatatgtgtctaatgtaagtgtgtgcatgcatgtgcgcgtgcatgtgtgtgtgtgtgagtgtcttaaagcataaccacaaactgcaaaaagctaggtaagctattttgttgcagctcataaggtggtgaaaaggactctcctgtgtttcttactcataggcaaggacaacatgtgctttttggtgagctgctcataattcctgaaatgtgtggtgccagggcaagggggccatcactgcagtcaggccctcagaggagtcctgcaggcttcctaccagtggtctccaagggtgcaggagtaactggggctgggccagcctccccccttacaaggctgctttccaggaagggaggtctggtgtatctcatgggagaatctggggtgtctgtagtgtcacccctccagcagcgccacaaggactgaggttgggtaggtgtgrggttccagaggacagcaggacactctcgcatactttgccaaatgaggcctgctcagaggagtaggagctgaaagatggtgccttccaccctcttgggctgtgtgcccatcagagcaggctcagcctgcaaagkccctgcattcagaggtcttgtaatctacttgttgcaggagaaagaaggtaaaaaatgatctttttaagaaaagctattttattgcagctctttcccaagagctgttctgggaatggctggtcttcatattcccagtggagaggggaacaagtggggctgggcatatacctattccggcttctagtgggatggagttggggtatagaaattaaccaggaagatgtttccaccaagcctgctgtgagtcaattgagggagtgtttggggtcccaggagacttggacggggggagtttgggtagactaggaaaggaaagtgccatatcagggtaccggtaccggcaagctcacatctcagccaggggccatgccccacttcccctgaccccagctgtcttgtctccactctgtgaaacccacaggggatgtgataaacagggctattaggggtatcagccacgtcgagcccccagactctgtgcacttcagaccagcagcagcaggagggctcccgagggccttatgagaaaacctgtgtggacatcccttggtgtacactaagacagagcagagcccagcgctcccaagccttcctccttccagcttctacctccatgctagcattgctggtgttagagaggaattaacttcctggtctgtgcccttctctagaagaatataagatgctcctcctcctcaccccttctcagcctcctcccaagtcttcctcttctgcaccacccccgagtccaaacccacctcttgccccagcattcaggctggaaaacactgatgtggactcagtatgacaactgagatgggggaagccagacatgtgaggacgctgtcctccgagaggtgtccccggctgttagccagctgtgctgtggtgctgtgggtctgtcataccctcccttgcttctgttcacactgggaggcccactcctggctcacctctccctctcagggacccacgtgggagcctggatccctggactgtcctgggcataggtttcaggggcctcctttgttgtcatcagaacccagaggaattcttctcctaaaaaatacgtatggcataccaatctgtgcggggcagtgtcctaagcacttagactacatcagggaagaacacagaccacatccctgtcctcatgcggcttatgttttctggaggaaagtggagacacaagtccttggctttagggctcccccggctgggggctgtgcagtccggtcagggcgggaggggaaatgcaccgctgcatgtgaaccttaccagcccaggcggatgccccttccccttagcactaccctggcctcctgcatcccctcgcctcatgttcctcccaccttcaaagaatgaagagccccatgggcccagcccctgccctgggaaccaggcagccttccagacctcaggggctgaggcagactattagggcagggctgactttggtgacactgcccattccctctcaggccagctcaggtcacccgggcctctgacccaggcctgtcactttgagaggggcaaaactgagaggggcttttcctagagaaagagaacaaggagcttgccaggcttcatgtagccgacacacgtctcaggattttaagtccacattggcctcacactaccagggccaatgcccaaaataaggagttccaatttggggccaaatgaggaaggacacagactctgccctgggatctcctgtgctagcggccaatgacaaatccagtcattggccaccagccacctctgcagtggggaccacactagcagccctgactccacactcctcctggggacccaagaggcagtgttgctgtctgcrtgtccaccttggaatctggctgaactggctggsaggaccaagactgcggctggggtgggcagggaagggaagccgggggctgctgtgagggatcttggagcttccctgtagcccaccttccccttgcttcatgtttgtagaggaaccttgtgccggccaggcccagtttccttgtgtgatacactaatgtatttgctttttttggaaatagagaaaatcaataaattgctagtgtttctttgaaaaaaaaaaaaaaaaaaaaaaaaaaaaaaaaaaaaaaaaaaaaaaaaaaaaaaaaaaactcgag

SEQ ID NO: 529 - DNA, 1402 bp, Homo sapiens
ggcacgagtcaccctcttctttcgtcacccgtccccgaccccacccgagcccggcgcctcagctgcccccggccatggcgtgcggaccactctgaaaaggactctggatttcgacccgctgttgagcccggcgtccccgaagcgcaggcgatgtgcgccattgtcggcgcccacctcggccgctgcctccccgttgtcggcggccgcggccaccgccgcctccttctccgctgcggccgcctcgccgcagaagtatctccgaatggagccatcccccttcggcgacgtctcctcccgcctcaccacagaacaaattctgtacaacataaaacaagagtataaacgaatgcagaagagaagacatttagaaacgagtttccaacagacagatccgtgttgtacttctgatgcacagccacatgcatttctcctcagtggaccagcttcaccagggacttcatctgcagcatcctcaccattaaaaaaagaacagcccttatttactctacggcaggttgggatgatctgtgaacgtttgttgaaagaacgtgaagagaaagttcgagaagaatatgaagaaatattgaacacaaaacttgcagaacaatatgatgcgtttgtgaagtttacgcatgatcaaataatgcgacgatatggagaacagcctgctagctatgtttcatgaatcacgtatcctgcatttgtgggctgccttgttccttgttgagttgttgcaagaggtcccaattatgacatgcagcaatgccaataccccttctgtgaatacaggttatttcaagctttcgtcagtggcaaccactcttaggcagcagcaactggttttggaaatttccctgatgtcagtaccacctggatgtggacctttgctacctgtattaataccagtggcctcattttgctgtatcattacaatttggcttcttatattaatgtttgaaaaggattaaagctggtattctagaacatgcccttcactggttgtgtaaataaaactgtagaatgacacttcagatgaagttagtgtgattttaattgtgcactacaaccgagctgtaaccagttactaattttagaatgtaatcccaggacaatattaagcaaatagcctgcagtgcttcctgtgaaatagtgaaggaggagggcatttctgtattccaggacttcttggggtttcagaatgggtttgtatgatttttttttttttttgtagttttatttattctatcagtctttttaacaaatgtttattgctgcattttttttttttccagtgtatcattgttttactgcccttgtagtactggaatttagttggaagaataaaacatttacttctaaaaaaaaaaaaaaaaaaaaaaaaaaaaaaaaaaaaaaaaaaaaa

SEQ ID NO: 530 - DNA, 841 bp, Homo sapiens
  misc_feature (23)..(23): n equals a,t,g, or c
  misc_feature (45)..(45): n equals a,t,g, or c
  misc_feature (69)..(69): n equals a,t,g, or c
  misc_feature (84)..(84): n equals a,t,g, or c
  misc_feature (762)..(762): n equals a,t,g, or c
  misc_feature (767)..(767): n equals a,t,g, or c
  misc_feature (782)..(782): n equals a,t,g, or c
  misc_feature (789)..(789): n equals a,t,g, or c
atttttgggaatttggcggttanatttacccggaacggttttccnttgttccgcaagtcgaattacctncctaagggaacaaangtggagttcaccgggttgcggccggttttaaactagtggacccccggggctgcaggaattcggcacgagatcctgacccaagctcaggcacacccaaggcacctgcctctctgagtcttgggtctcagttcctaatatcccgctccttgctgagaccatctcctggggcagggtccttttcttcccaggtcctcagcgctgcctctgctggtgccttctcccccactactactggagcgtgcccttgctggggacgtggctgtgccctcagttgcccccagggctgggtgcccaccatgccccttcctctttctcctcctacctctgccctgtgagcccatccataaggctctcagatgggacattgtgggaaaggctttggccatggtctgggggcagagaacaaggggggagacacaagtagacctcaggtagaacgacactgggcggagccaccccagggcctgctcccagggagtgctcgaggcgcatcaggcccgttttttaccagtttatatcacggtcttcatttttaaaagtaacgctaactttgtagggacgatgtctcatggattaaataatattctttatggcagtaaaaaaaaaaaaaaaaaaaaaaaaaaaaaaaaaaaaactcgagggggggcccggtacccaatkcgccctrkagkgmktcgnattanaattcactggccgtngttttanaaattcgtgaatggggaaaaccctggggttacccaacttaaacgccttgcag

SEQ ID NO: 531 - DNA, 966 bp, Homo sapiens
  misc_feature (130)..(130): n equals a,t,g, or c
gcgaatgacttttttaagctctttaagggttaagtatattagccatttgtgctatgaatcacaaatatttttctccaacctcgttttctttttctttttttgccatgggagtattttttatattacgtantttaacctctcagtgctttctttcatggtttctggggtttgtatccgcagaaagttttgagcagtggtccatatctgggagttagaaagagcccaagagtgctgatatgaggcagaccaatggagtgagacgagtctgggggaccccgggttctagttcaagtagttcagacaccagtgtgaagacagtgaatcatggatctgagcagtgattaaaaaagcctaacctctggtgggggggagtgggtggtggccaggagagaagaggagtcacctctgggtgccaagaatgctggaggcagggtccggcctctgcactcaggccccttgctccctgcccctgcccaatccaggaggagctggagttctgtgaaaagctgctacagacctgtttctccagcccagcggacgacagcatggatcggtgaaaccaggtggcttcttgcccccttctccgtgggaaccccaggcctcttgcctccctccccacctacaaggccctctcccaagggatcgcagggcctaggtgcctggacccagggtgtgccagcccgtctctgtgcagtccctggaaggggcgctgagaaaggcaccagctccttggaccccacctcccatgctctcactctcatccccgttctcttgtccacacagctcttccaataaaggtgtttctcttcctccttctcctccttcactgccgcctttgtcatctcctttggagggtgcatgggggacgggaggaggggcacgggtttaagggacttggggagccactggaagaataataaaagtgttgctctttatcatctaaaaaaaaaaaaaaaaaactcgaag

SEQ ID NO: 532 - DNA, 1005 bp, Homo sapiens
  misc_feature (883)..(883): n equals a,t,g, or c
gagtgcctttaccttggtgctaagagtccctccagattagtggctttcccgtgccctttctcttctctgggctgctaatgccttccttccccttattagtaatattactgataaacaaattgtacattctctgatctcayttcagaggctgtttctgtgcactgaagatgtacacacagtcttaattcaaaagagatagcatttatgtgctgccacattraacagattgcaacagtattactattgagtttgtgttggctctgtgcaaccctcatggtgcccaggaacagatgaaaccaccagagacttggagcctcaggttcattcaatggtgtcccagggaacggggttggagggcttattcccagaaggcctctgaaatgtaagagctattaacaaggagttataagtcatttttggtagctataggcccaggcaatgggtagagatcaagatgggataaatggtaagatcagtagagtattgctcagataaatatgtaagctattttactggcacactgtatctagtgatattaacatgataagctataggtaggataatttctcatcagattgcagaaatacatttatagcctatttcctgttatataatgaaaagctactaatggggtagtagacaatgatatgggtaatagcttaracagccttcgttgtcacttacctgaattcaggaatgwcaggtttctttcatgcatgaggtactggatacattaaacacacacacacacacacacacacacacacacacatatggcattgagttctagtcatatcctaaagaaaaactatggtgcgctatgttatttatagtactatactctgtgtgagtgactctgtgtgtatgtgtgttggtggaggtncagggatgacttgtttgtaatataccttaaggaagtctgtccgaatttgcccttcaaatactaaataaattcatctctcacctcaaaaaaaaaaaaaaaaaaaaaaaaaaaaaaaaactcga

SEQ ID NO: 533 - DNA, 464 bp, Homo sapiens
ccacgcgtccggagaccactgtcggctagcagcggctctcagggaaggcctggtctccaccctcccagcctagcctcgcggaccctcgtcctccccacatcggacctgctcacctgcctggaccctgggctgccagatgcaggaagcatcaaaccccccagcctcgtgggtgcggggcagggcgcaggcagcacagcttagatgccctggtttgtccctcttgtctcctgggaagagcttgctcccgcccagctctcctgccactggcctttcagggttgggctgggcccagagtgccttttagtcgcttctcacggtggcctgatggctcaacccagtcccaaacgggcccagtgacactgccgactgcaccccagctcaggcccccactgcaccagcaatgctagaaaaccaagccaataaaagtgatttcttttttcattaaaaaaaaaaaaaaaaaaaaa

SEQ ID NO: 534 - DNA, 839 bp, Homo sapiens
  misc_feature (823)..(823): n equals a,t,g, or c
gaatatatttgtggtttccttcagctcgatgtctgaagattctcacaggttcagggactattccaagtttgcaacctgtgtgtggattttgaaacaaatacagacaacttatgagacggtttctttgctgggcttcttgcttgacacagttttctgaaacatggctctggcaggcttttttcttccatggacacattgctgccgtttatcactgaagttcctctgtggagttaccaggagctaatatttggatgatgtacttttcttgcagaaaatattagcaaatgttgcagaaactgtgctttaaaacttttaaaaggggaatggattcccagtttaaaaataagcmaaagaaaggataaacatgatttcattgatggtgtgcaactgctttagaacatcagatattttgtgatgtgaaatgggatgatactctattttacaaaatgtgtactgcttatagaaaatgtatttactgtaccactaagccaaacttaggtgttgctttgtttccttaaaatattttttgagtcgctgtggctgccccacagatgatgggggagtaggcattctttctgcccagagcacttgttctcttcctccacccttttggttgttattgtagcatcttgactttcagcttaacacatcccaacttaagcagaagcccttttgccttctctctctttaaaactagatccatagaaattatttttattacagtaatagggcaagatagttttatgtcatatataaactggaattatgtagtgttagtagtagttatgtctcctgaaaggaaccagttgattataaaaaaaanaaaaaagggcggccgc

SEQ ID NO: 535 - DNA, 1102 bp, Homo sapiens
cccacgcgtccgcaaagttgcattgctcttcaggaggctgagacgaatgcctgcctcccagggtcattgcaaaggttaaatgggtattaaattggtgaggtgccaaaacagggccctgcctgcgatgagagctcaagatatgctcatcgttttacttattaatttgtcctctgaaccatcgtgttaggattttaaaaaggagcatttgttctcatgtggaggctttagtttcatgccgcgacctctgagctggcatgggtgtgagttaggggcagacggtgtggagggcgttccctctcaccatttcttatgtgttctgtgcgcagctcttgtcctcaaacgatgccacgacaacgacacccagcctgcagcctgggaaactgatactcttgaggtcaaaggacttcctcaaggccaagcatctgggatgtgggagagctgaacgtaaaagcattctgttgggcactttggccaagccatttccattgcacggtgtggttctcaagtccacagcttagcgggggcctattctgaatactggcacaggttcgaaaaatttcattcgtatgcatgtgtatatgtatacacagagacacataaaaatacacatataaattatatatattcatatatatatatatacacacctacacatatatatacaatgtgtatgtacaccgatatgtatttgtgtgtctgtgcccctgtatttttattcaattattttactttatttttagctctttaatgtgtattcatttttttaaaagtacaggaaatggccagacgtggtggctcacgcctgtaatcccagcactttgggaggccgaggtgggcagatcacaaggtcaagagatcgagtgagaccatcctggctaacacagtgaaaccctgtctctactaaaaaaatacaaaaaaattagccaggcatggtggcgggcgcatgtaatcccagctactcgggaggctgatgcaggagaatggtgtgaacccgggaagtggagcttgcagtgagctgagaccgcaccactgcactccagcctgggtgacagagcgagactccgtctcaaaaaaaaaaaaaaaaaaaaaaaaaaaaaaaaaa

SEQ ID NO: 536 - DNA, 1112 bp, Homo sapiens
gatttggattacagcagcatttcctaatctaaactatcctgcatatcaagcaaagtatttcaatttctccaccatgagccaggcacagtggcttacacctataatcctagcactttgggaggctgagggaggaggacagctcaaactctttgcctcaagcaatcctcccaccttggcctcttaaaatgctgggattataggcatgagccaccacacctggctatgatggttaattttatatgtcaacctgactgggtcatagggtaaccacatatttggtcttactctgggtgtatctatcaggatatttctgggcctcattcaacccattgaaggcctgtacagaacaggaaggctgattaagagagaatctctgtctttgaggtggaaaatcagtcttctgccttgtraacgtggactcagactggaactcataccgtcagctctcttggttttcaggcctttggaattggcctggaactataccattggctcttctgggtcctcagcttatcacctgcagatcttgggacttctcagcctccagaaccatagaagccaattccatatagtaaagctctgtctctcatctatatatcttatcggttctgttyctctggagaacagactaatgcatccatattgacaggaaaatagttcattcattgtaattgctgtatactatgccactgaatgagcatatcaatttgttccattaccctagtgaagcattattgggttgttcccacttttcccctcttataaatcaatagcaatgcagtgagtattttgtatgtttacttgggcctatgtgttagtttctccaaaggaggaaatatcactggtatttagctttaccagttgttaagttgcttttccgaagtggttatgtgaatttcactttcaccagcatttccctattctgttggtgttgagtggttctattaattttaatttacatatcattgatatctgataaggttgaggacttttttttattgatttattggccattagtatgtttaccctctgggattttcctatttatatccttccctccatctcaaaaaaaaaaaaaaaaaaaaaaaaaaaaaaaaaaaaagggcggccgc

SEQ ID NO: 537 - DNA, 2531 bp, Homo sapiens
atttttataccattttacaggtgaggaaatttaccaagtttaaataatttacccacagtcacagtaaagtccccaacctcaggtagtttataatgaagtggaggagacaagatgcataaagaagtgactattaatagtaattttaaaacagctattacaaatcagcataaaattatatgccatgcagttaacgaatgtcctgaattaaaaagagtgtctctactgctggaggcttcaataattaaacaaaataatgtatgttaatttgaacacagtgcatgatgcgttattatatttacttctattattattaattatggataagatgtggatgggtgcagagagagagtaggaagaggtacctcgtatatagaatctggaaaaaaaaggtagaattgtggacgacagtaggggtggccagaatatagtttgtatagcatagtgataggagataagattagactggtagattgtagctttatcttagaaggctttgtatgtcatgctgaaatataactgagccttccacaggctaaatggctaaattcgttgtgcggcattccatcctctgcttaagtggcttctggtgacagggctctcacagaaagcctcattaggaacagatttttttcctttggaggatttttttatattaggaatcaccttttattgaagcaaatccatctcactgtagatttcactccttgaaattaggcaaacaatgtagttacatagagtgaatctgcaggtcagacatttgaggatggctgtcatgcttctctaggttttttcataacctgggctactattaccagttccttcacccaaactatattaagcttgacactgaattcctctcttttaagtcagtttgtctggcagctctcctggaattaaattttgattctttcagatgactacacattaaatggtgatggattgggttttgttatttccagactatatatttttgtttcatctataattcctagcattgcttggtcataattttttttcttagaaccgtgattatatacattattaattagttttaaaaatcaaatccgcaagggtaatttaatcccagaatgaaaatgacctctatataagtatttcaaaaatcatttatttgtaatgagtaaaaatgttgaaaataaggcttacttttattatttgaatatggtaattatgtaattatccttttaatatgttaaggttatattctgtgccttagagtatgctaagcactttatacataattatcttatttaagcctcgtagaaatcttatgagcaaaatgttactcggtacacttaaagtacaggtaactgaggcttagagatgtaaaataatttgtccaccacagtgcttttaaaagatgctcgtaaccactatattgtaatttcaaaccctgattccattaatgctttttgttgtgttgcctttactgataattgtgttcaatattcccatgagggaggcagtctttgactttttatttatgataaagattattaaagtgcttaaagttttttattgtatagcgtgttttatcatcaaacaggttttagttttttaagttaaactgatcaaaaataataaaagctgatggctctatgacacttgcatttgagagaacaagaatagggagcaatatttcaagaaaatcattcttactgtttttcaaaactgtttagtgtcagagatgccccaagaccactcctaggtttattgtttcgatagaaggacttacaggattagtatatagttgcactcctgactaagatttattatagcaaaagaatacacagcaagattagcaaaggaaaaaggtgcatgggaccaagtctggaggaaatgagtctcgaactcctgacctcaggtgatctgccagccttggcctcccaaagtgctgggattacaggcatgtgccactgcacccagcctggaagtattacttttaagaattgttattatactttacttgaaagaaataaccactgctatagtattatatcataccaaagcatatattttataatttgggctacctagaattattattttttttttggaaatgatgttatatgtagttataaatcacaaatgacttggtaataaaggccatatgatcttcaaaaccaaactggaactagcatagataagacctgctgtttaaacaggtaactcttggttgagagaagataatggcagtcttgtctcttttttccctttattatgaatgcataacactgggtgttctgttaggcaagggttgtttcttgtttattgttttgtggccagtgcatagcacaaccaacgtttggcatatagtaggtgcttaaatatttatgaatgagtgagtatgtgagtagaaggagtaactgggctgggaatgatggctcacacctgtaatcccagtgctttcggaaactgaagtgggatgattgcttgaggccaggagttcaagaccagcctgaggagcatagtgagacccctgtgtctacaaaaaaaaaaaaaaaagggcggcc

SEQ ID NO: 538 - DNA, 954 bp, Homo sapiens
ccacgcgtccggttttgattcatcatttttatttgactcactagcagccatctgttagttacaatttaactttcaaggatctgcgtaatttgttttttgttaatgaagtgctataaacagcattatgaaggttttctcttttaatcttgaaaggaaaaaaatccgtctctaaaaaagcaatcacaaagaagaggaaaactgtcataaagtcacctactgtaccagagtttcaggtaaatgtttcaactttgtctcgaaatttttcaattttttgtttcagtgttcatatcattcctcgagagtttggctgaattccaagaaactgtagcacacttacttgtaatgaaatgtttctgacagtgacttttctccctgcaagtgcagatgtaaccaagatttaatctgctagtatttcgtaatttttacctctatttttgtcttttaataataaaaacccttttttatatcttaatctctactagtacatttcctagaagcagtttaatagaaatagtatatatatactatatagtatatgtgtgtgtgtgtgtatgtatatatatataatacataaaagcaaatgtgtgaatgaaactcttccaagaacaaatcataatttggagatggtaatagtgcctagatagttcgttttcatttatttgggcactgtagaaataaatggtagatttattaacttggaaaacaaatctttcaactcttagctgtatatgatcttcagagagaatattaagtaaaggttaattgaaatggtctttaaacatttctgtggaaagaaaaagtaattatctgtactgccatatgattaagtgaagagttttttatttgtagctaatactaagcagagaatctcaccctaattaatgcttttattttctattttataaaagatgtattttcttcaataaacactttctttaaaaaaaaaaaaaaaaa

SEQ ID NO: 539 - DNA, 3342 bp, Homo sapiens
ccacgcgtccgctgaaccggaccttccccgacaacgtgaagttccggaagaccacggacccctgcttacagaggaccctgtacaatgtgctgctggcatatgggcaccataaccagggagtgggctactgccagggaatgaattttatagcaggatatctgattcttataacaaataatgaagaagaatctttttggctgttagatgctcttgttggaagaatactaccagattactacagcccggccatgctgggcctgaagaccgaccaggaggtcctcggggagctggtgcgggcgaagctgccggctgtgggggccctgatggagcgtctcggtgtgctgtggacgctgctggtgtcccgctggttcatctgcctgtttgtggacatcttgcccgtggagacagtgcttcggatctgggactgtttgtttaacgaaggctcgaagattatcttccgggtggccctgaccttaattaagcagcaccaggagttgattttggaagccaccagcgttccagacatttgcgataagtttaagcagataaccaaagggagtttcgtgatggagtgtcacacgtttatgcaggtgtgtggggctgcacgtggctcagtcccctcccagggggccccgcctcacctgcagcccgggggctgctctgaccacccggagggtgcacaggacgggcaccagtgggcatagggcacaggatgagcctccagctctgtcctgcatctgccccctgcgcctggcctccgagggctttcctgtctatggcggccctgtcttcttggccctggcactgcggacgctgctcctggtcctaatggctgtactcatctgctgtgtgtggtgccagaagtgtggcttcccgaggcccggcctccccactgggtcctggacctggcgcaggccgtatagactcaggtcctgatgagggcgttgtgggagctgtacctgacaggccttctgaggaagccaagacgccaggagaggctcaggcctgggagtcagtagtttcctaagagggagtggaggctcggggccactctgggtgcagcatggcaaacgtgggcggtatttcagcagctgggccttcatcaaagagaagaccatgttggccgggcgcggtggctcacgcctgcagtcccagcactttgggaggccaaggcgtgtggatcacctgaggtcaggagttcaagaccagcctggccaacacggtgaaaccccgtctctactaaaaaatacaaaaattagccaggtgtggtggctcacgcttatgtagtcccagttactcgggaggctgaggcacgagaatcacttgaacctgggaggcggaggttgcagtgagccgagatcgcgccactgcactccagcctgggcaacagagtgagactctgtctcaaaaaaaaaaaaaaagtctaatggaagcagatggccttttcttccaccgtttgattcatttaacatttctgagcagcaaagctgcagtcctaggccccagggcaggagtgagatggtgacaatctgtgggtcaccccagaagcccttggatgtggactgctcctccctcacctcacacgaggcctgtctgtctgcctgccagtctgggagagctaacgtagaaatgggttgttgggtttgtttttaaactaactgtttgccttccagaaaatattttcagaacctggaagcttatccatggccaccgtcgccaagctccgcgagagctgcagggcccggctgctggcacaggggtgagcgtgcctgtcccctgcgttgctcgtctctacactgacgatgcccctttccagagttgacactggaccaactttcactgctttcctttttagtgttgtaaatacttgacatcactacactttagttgtgaattttttaaaagagcagtttaaaatcaggtcattctaccagcttttgatgattagctatgaagtcatactttttaaagaaaacttatttttacctgagagatcaataatatataaaatgtgagtgtgggtttgtatctaataaagtatgccaacacctgtgtttgtgatcagtttctcagctgactggaaattaacatagtgagtggtcactgaggtcttacagcggcagtgtcaatattccattcctttctgtgacagagcgtgcagtttatgtgaggcttctgcacgtagtaggtgatttctctttagaaagatcattttctcccttcaacttttaacttctgggtacaggtggagggtgtacaggtctgttgcacaggtaaacgtgtgccgtggtgatgtgctgcacagaccatcctgtcacctaggtatgaagccagcatcccttagctattcttcctgatgctctccctgcccccgacccaacgggccccagtgtgtgatgttcccctccttgtgtccatgtgttctcatcagaagctcccacttacaagtgagaacaagtggtgtctggttttctgctcctgtgttagtttgctgagaataatggcttccagctctatccgtgtccctgcaggggacaagatctcatacctctttatggctgcatagtattccatggtatctgtatgaaaggtaatttttttaatgatttaaaaattatcatgttacatgaatgaaccagacaactgtgccaggcactcgggccactcccaacaccattccctacgtctggcaccaagaccaccctcaccccccgtttccctgacacccttctctctgcaccgagaccaccctcaaccccgtttccctgacgtccttctctcatgagctcccattttagctgacagaaggacaaggcccaccccaaaaagaaagaggctttttattacattgttacaggcaatgcattacgtgagctggtcccgtgtacaatccccaagccacggcaaaacatcaggagaacgcaccgatctcacattgtacacagcgcagaacaggatcaccccgaatgtcaacagaagaccaaaaatcactttacaaaaaaaaataaaaataacacccatttttatatttaaaaaagtgccagcccttgagctgcagacattagagacgcccaaggacgtgccgccactggaacgaggccgccagccacgtgtggcccgtcctggcctttaaagctgaactgaagcgctccagacactcatctctggagttcctctgtcttaggattttccctctctactgttgtaatgtgtgagcatgtcagcctcaccacgagtgaccttcatgcgtcctacgtgtgacggccagaggctttccctttgtaaggcttaaatctgagtgcagtaaagaatgaagaaaccaaaaaaaaaaaaaaaaaaagg

SEQ ID NO: 540 - DNA, 620 bp, Homo sapiens
ccacgcgtccgcggacgcttgggtggccaccactcactcccacaacacagccaccatttcccacccagaatttcctgtgaaatgtgctcattttaaaacagcacacatcctgagaattgcaaagttgggcatagagatcaatacaaattagacttctttttagatacgctctacgctctgcagagccctctggggtctccaagggctgggacctgctggataaaactggatgaaactaagttgctgcttctttggtgcccttgaatggactttcttggctgcagtgacgttaggtccgcttcctagccgcgtgctgctctgccatcggggatgctaaagtcggggagggccaggaagcctttctttgcttggaagtttttgtttctccttcgcctgctaggttgggataatccgttgggaagtctctgagcgtctttaaacataaaatctagtttcaaaggtttaaattcccaagttgccccctaagttacatgttgcttaggcttggttgctatctgtatggtataaataattccatttagaaattaagaaattatgggctgcatttttgatgccagtggctctgtagtatcccccaaccaccaaaaaaaaaaaaaaaa

SEQ ID NO: 541 - DNA, 830 bp, Homo sapiens
  misc_feature (814)..(814): n equals a,t,g, or c
gagcttctactcctactcccaaactctagcaaaccactgatttgttttttgtacctatagttttgctaaaatatcatacaaatgaaatcaaacagcatgtagcctttttagtatggcttctttcacttgktataaaataataaaaattcatttatgttgctatgtgttttaatagttcattgctttctatttctgaatagtcttgcattgtatggatgtcctacggttgtttatccattagccagttgaagaacatttggttgttgccagtttgggtgattataaacccactctaaacattcatattcaagtttttgtatgagcatttaagttttcatttctttgatgtaaaatcctaggaatgggatcgtgggctctatatgataagtttattttaactttataattaaccaccaaatttttccaaagtgaaatattatcttgtactgccattgacaatgtatgagagtccttactgctccacatctttgttagtacttagtattgtcagtttttgttttgcttttagacattttaatagatgtctggtattaactcatttgcactttcttaatgactaataatgttgaatatgtgcttatttaccatccatacgtcttcttttataaaatatctattcaactcttttgaccatttttaactgtattgtttttcttattgttgagttttgagagtttggatatgtcctagatatgagtcctttgtcagaaatgtgttttgtaaatattttctgccaggctgtagcttgcattttcagtctcttaacagtgtctttcacagaacaaaaaaaaanaaaaaagggcggccgc

SEQ ID NO: 542 - DNA, 4054 bp, Homo sapiens
acgcgtccgagagggtagaggaggagagggaggaggaggagggaggtggcggctcctgctcctccaggcgctgcccagccccttgtcagccagggctgaacccccgcaggataaggaagcctgtgtgggtaccaacaatcaaagctacatctgtgacacaggacactgctgtggacagtctcagtgctgcaactactactatgaactctggtggttctggctggtgtggaccatcatcatcatcctgagctgctgctgtgtttgccaccaccgccgagccaagcaccgccttcaggcccagcagcggcaacatgaaatcaacctgatcgcttaccgagaagcccacaattactcagcgctgccattttatttcaggtttttgccaaactatttactacctcctttatgaggaagtggtgaaccgacctccaactcctcccccaccatacagtgccttccagctacagcagcagcagctgctgcctccacagtgtggccctgcaggtggcagtcccccgggcatcgatcccaccaggggatcccagggggcacagagcagccccttgtctgagcccagcagaagcagcacaagacccccaagcatcgctgaccctgatccctctgacctaccagttgaccgagcagccaccaaagccccagggatggagcccagtggctctgtggctggcctgggggagctggacccgggggccttcctggacaaagatgcagaatgtagggaggagctgctgaaagatgacagctctgaacacggcgcacccgacagcaaagagaagacgcctgggagacatcgccgcttcacaggtgactcgggcattgaagtgtgtgtgtgcaaccggggccaccatgacgatgacctcaaagagttcaacacactcatcgatgatgctctggatgggcccctggacttctgcgacagctgccatgtgcggccccctggtgatgaggaggaaggcctctgtcagtcctctgaggagcaggctcgagagcctgggcacccggacctgccacggccgcccgcatgcctgctgctgaacaccatcaacgagcaggactctcccaactcccagagcagcagctcccccagctagagcaggtcctgccagcacccagcaacttggcaaagcaaccagggtaggggagaaccacgagagaagcattaagtgactttcaaagactttcagagtacagccacttggttcctttttgtttgttttccttctcctctcctgcattttcctccatctccaggtacagttcggggtgtggatgcctcttcctccacaagggcacagtgttgtggagggctaagttggttctgtgactcattcctcataccctaactccatctcctttctttaaagtcaaatctcacctacctgtttgggtcagagagatgtgttttaaaagcccccaaggaaggaggctgggactgtgccctgacatgattcttggtgatggaataggtttgtgctctgattctagtttaagagaacgttgctgtatctcagtccaggagaggcagcccatcttggccctggatgaagaaggaaacccacagaggcccagggcttgtcattgggctgccagtgtctgccaagccagcattgagctaatcctgtgggaggatgagagctactgggccgttgtatgataggttggtagggcttgttgatctgtcaaattccaggtgacaagatctatgcaccccatgcgtccttgaggggccttttccccgcaggctctggctggccgcaggctggttctggtgtgaaaggttatactgccttttctttgtttgtttgtttttttctctaaaaacaaacagcaaaagacagctgaaaacaagaacttcaccggtgggcaggcaagaattctcttctggaaaatgacgtttgtggctctttcccaagttggccttcaaagagcctgcctgctgttgagccagaagatgtctcgtgtgaaggctggggtggcggctgtcttggaacctctgtgagcaggaggccctaagccgcaccagtggatagaggtgcagctctctgcctctctgccctttggtctgtgttcacaggtgaccccgtgtcagcctgcatcgcaagcacacaccctgcgggccttcaagtctcactgttccgtatgaggaaccagacagcggactgaggaagcgatggccccagagaaagggcccctgtagcctggctctcacacagtattttatctttgattctgaataaatattttttgtggggttttttttttttttttggtggcagttgtttgttttaaactgaccacttggaagaaacaccttggttatctgtggttttcatgccttgtccctgcctctacccccaccccttttgagtcgggtgactcatttttctgtgtagagactcggtggcccaggcaggaggtgaaagcagccatccggaaggccctggggacccttgtgcctgttgctcgccttcaggtcaccagctgagctgcgataggaaaatctgaatggaggcagcaaacagccaaaacaaacattccccacccggccctgtgcatatgaagtctttcttcccccaactcttgaacgatgatgatattcagacgaagcattgatgttatggaagaaagaaagaaacaaacaaaatatatatatatatgtccaaaaacagacaaatccaagggtgtgaggtaaacgagtgtctgcatttagattccacaaaaccaaaatccatgttgaacaaagttaagtccgtacacagtgactttttgggtgagccgtgtgtgtctgtctgttgtgtgtgtgcctcaagccctgttttcctgtgaagatactttgagtggcagccattctctccacgtgaaccacacgtctggagcacagacaggcctctcaaggtcattgatcttacgcatttactgtttaccgaacaaatgtctgactgtgtactcgggtgtactccgcagcattgtcgactgcagtcccctgtgtttgccagagatactgtgctcgaagtagaggttttactctactcatcactgcgatttgcacattgctccgtggacactcggaggcctgcgttctgttccctataaatggaagcgtgctctgagcctgtctgcctccctcggctgctgctggtcctcagtaccagcgcccgggggtgtccacaaccacttgggacagaagaaggtggaatttcagacagaagcttgactgggtcttcaatgacaggcttggactagctgtggcccagacatcggccctgcccagaattgccaggaggaggctttgcaggctctagaggagccgcagggcctgcctgcctctggtgagtccaacaggcacaagcaagctggcgtgtggccagaggtagccggagtgtgtcacagcccctcagatgcctttccttccacctttttttattttttaagaatcccaaataactcactgaagtgtctcaaaggcgaacaagttttaccaaaatgaatcctttttcagttaacagatcaaatggatgagttctgagcctctcaagttcctttccccagttagagtggggaactgggcaagtgttaactgtgggactcactgcagcgtcctatcctaaaggcacgaaaagacggaaatgcaacctgcggagctgggcttggttccccaggtcacagtttggcccccgctacaggatgctgccctgctcagagagagatttaatagggagctgaaggaatcgttagggggccagggagatgtgactgaggctggctttccacgtgaatgagacggggtcggtggagggtttggtgctacagccagtcagaagatttgcaaatgcgaacacattcctgtgtgaggcacgttaccctttgtcagttattgtgaatatgtgtattttaagcaataagattcagctggtcagacttttctgggcagtctcagtgacgcatttcctgtgctgtgattgttctgaagacagagtggctctaaccactgtgagaagcccaaataaaaattgatcccaaaaaaaaaaaaaaa

SEQ ID NO: 543 - DNA, 452 bp, Homo sapiens
gataaaataagattttcatacattaaacaaggtaggatttttctatctgggacggaactttcaacacttggaggggttgtagttatttctcctcaaagatggcaaacatgagtgccccgagttatccctcctctctgttcaagttcgctaactaatcacccagtatccatgctatcgctggcccttctgtggcctatttttatactgttcactgttcagtgtcacttgtttggtaacactcaacatcaacgtgtgctaccaaattgacaccagaggacaaaaaagaatcaagatatgtacagcctgctttgtactgagccagctgccactagatgttttttgtgataatgaacacgtgaggccatgtggacgcgagagatggctccgggttccctcagacggctcacagccagctggtctgcagtgcggytttagayyccgatgtgggaacc

SEQ ID NO: 544 - DNA, 625 bp, Homo sapiens
gataaaataagattttcatacattaaacaaggtaggatttttctatctgggacggaactttcaacacttggaggggttgtagttatttctcctcaaagatggcaaacatgagtgccccgagttatccctcctctctgttcaagttcgctaactaatcacccagtatccatgctatcgctggcccttctgtggcctatttttatactgttcactgttcagtgtcacttgtttggtaacactcaacatcaacgtgtgctaccaaattgacaccagaggacaaaaaagaatcaagatatgtacagcctgctttgtactgagccagctgccactagatgttttttgtgataatgaacacgtgaggccatgtggacgcgagagatggctccgggttccctcagacggctcacagccagctggtctgcagtgcggttttagattccgatgtgggaaccccataaaaaagaatatgcaggccaggcgtggtggctcatgcctgtaatcccagcaatttgggagcctgaggcgggtggatcacctgaggtcaggagttcgagaccagcctcgccaacatggtgaaatcctgcctctactaaaaataaaaaaaaaaaaaaaaaagggcggccgc

SEQ ID NO: 545 - DNA, 1193 bp, Homo sapiens
aagctctaatacgactcactatagggaaagctggtacgcctgcaggtaccggtccggaattcccgggtcgacccacgcgtccggattttctacatgaacttttttctaggactttggttactatacatattgtatattttaagaattctttatacaattttaatatactgcaatactgcagtttttgacaatttggattccatttggtatatgaatttttgcattcattattgaataactcttttaatatttttgagcaatgattatactgctttaccttgtgtcactttttttttttttaggaaaaactcatgttccagtatatttctcttacagagtgaagtcattacagcactgtatttctgtgttgacatttgttggcagtgtgctaagtaatgttttttaaagcacaggcttgaggactatggtttacatcctgttggaaacattccaaatgggacttgtgtattatacccaggaggctctcatatataccatcttggcatctgtactgatgaataagttataatgaacagttaaaaatgctcattgaaaattaaataaaacaaaaaggcagttatttcatgcttggtcaaaaacatcaatacctttccaattaacactgagaaattaaggttaagattctccttttgtactgggaaacaggctggaggactatggtcctcaagtttagaccaagaggactatggtctcaaggttcaccatgagaaatgtgttgaacattttagtatgctctattgtataatttttttggagggggggatggagtttcgctgttgttgcccaggctggagtgcaatagcaccatcttggctcaccgcaacctctgcctaccgggttcaagtaattcttgtgcctcagcctcctgagtagctgggattataggcatgcaccaccatgcccagctaattttgtatttttattagagacagggtttctccgtgttggtcaggctggtctcaaactcctgacctcaggtgatctgcctgtcttgcctccggcgtaacactttttaagaccagtgtaacagaaagagaatgtagccattctagccaccgttaaaagatacacagtgaggtgttgtgttttgtttttttaatgatgaaaagttacacattttttggagagaaaagtcttagctgaaggtaaatcaatggaaaaaaaaaaaaaaa

SEQ ID NO: 546 - DNA, 1594 bp, Homo sapiens
gctcccagagtgtgccggggaggagatgaggcagagaagacagctggctcatctcctcccagagtgtgccggggcaggtaacttagttgttctgagagaggtgaccccctctcagtgtccatgagtcccagatgaattggccaagtcctagaaatagaggggctgcagagcggrgaggaagaggtcccaatgaccagcccttgactgccaccgtttgtcactggccccctggccctgttcccgtgatcccagtcagatgccacatttttataataaaactagggctgagcaggaargcgctggcarragttcattaccttgcttattttcaaactcttcctaacccttctgtcctggttgttgtttgacctgaaagatgaagagaacactgctgtcttctgtcatctgtctttctgcttcacctgcacagggccaagccccgtggcagtgcccagcggtcactggggacagtgctgaggttacttatcctgagaaacccttgcacggcctgtcccgcagagaaaagacagcccttccgggtccctggtttggtctgmgtcgtgggaaaggaccctagggcatcacaatcgcagccatgtaccctgcagctcacagagtcaatcagtttggttttatttgcatttgaacagaaaccttgagaaaaagaaagccaatttgtttatcttctaggggataaaaataggcaagtgtggcagccctgtggccacgcaggtcagacactgcagcagtgacactggggttttattaatcaataggatgtagctcacttgttctgtccttttaaaaaaaaaagcccaccctggagaagagatgcttggcccagctcctacacaagggcagcagtcatctccggtccagggagctcttctggaggtttttgcaagtagattctagagaactgagagaacaagaagtcttccccactctgggcacatggaatcttcattcaaagagtttggtttgaattgagagctctcagttttgcatatcaggtaactatgatgtgaaaagatgaagcggcctctttacctctcagagtcagcccagaccctcttcgcctcccctcctctcagagaagctccctcgtccctttctcctccttttgactagagctagtgggtggagagagtaactgaacgggaatttcttagtgttattctctatcaataatattttaattgtcagtgctatagactgggtggctgggggttgggagctggtggctcttgaaaatcaccaagtggcagaaaggaagttataggaagaacataaaggcttagtgccagtggtgtcaggtaatgcatattgatacctcaactaaaagaacatttggggctttattaaaattgactaattcttccaaagatagcagctaaaggaggacttagatgaatagaggagggaggaggcttgcaggacggtgaagccctttgcttccagctctctgcctgctcagccattgctccgtccctctgcagttagattattccttgcagatagcaatcaactggaaggaagtgtctgtgtctaatttgcatgagattatttaaaacaacaaaaaaagggcggccgc

SEQ ID NO: 547 - DNA, 1762 bp, Homo sapiens
  misc_feature (10)..(10): n equals a,t,g, or c
  misc_feature (41)..(41): n equals a,t,g, or c
  misc_feature (1748)..(1748): n equals a,t,g, or c
  misc_feature (1752)..(1752): n equals a,t,g, or c
  misc_feature (1756)..(1756): n equals a,t,g, or c
  misc_feature (1760)..(1760): n equals a,t,g, or c
  misc_feature (1762)..(1762): n equals a,t,g, or c
gcgccccccnaaaaggccttcctaaaattaccggcctcccncttattaaggggaaaaagcttggttaccgcccttgccaaggtacccgggttccgggaattttccccggggtcgaaccccacgcggtcccggttaaaaattattttttgccatatgtaattttgtgttgcaggctgtcgagagataaaaatgattttaaatctgtgtactgatgattctttcggtgttaagaaacacagggttgtgtacttccctttttatgggcttatggattctatttatattaagacctgtttataattgttttctgccaaagggaattgtctaacttcagatttctacattgggttcatacttactgttttatatcagaaataaaaaaatagcttctgctttttcatatgaaatcttggtacatcagaaagaattcctgaaaatttataatagaatgaattttattaatgcagaaaaataccccagggtgttaaaatatatgaagtgtgggatatattcttatagtttgtaaaatgtagtcaaccaatactgtcttctaatttggtaatttatttataaaattacttaaacattaggtaattatatttgttaggatttgaaattatttgtagttaaattgtcatgctgtttgaaataattgatacttgtctacgtaatacattttactgtatgttttgaagatggttataatttcactttcaaaatttaaaaaatcaattttaaatgttttaaaaacatatagcttagggatttttttaaaaaaggttttcttagtaaaaacataaatttaaaagcccctgagttctaggagagggcttattgaattgctataagaaagctggagttactttgataagtaataaattataaatagcactgatctataatgctttatttctatcggaaggtactttttcttctttcatcatcagttttagccagttagtaaatgggaatactcagttttagggatttgatttttgtttggtttaattttctttcaaaaattaaaagtatatttctaaaagttttccccagaggccagatacagtggctcatgcctataatcccagcactttgggagcctgagataggagtattgcttgaggctaggagtttgagmccaacmwggcaacatggcaagaccctatctctacaaaaattttaaaacttagccaggtgtggtagtgcacctgtagtcccagctagtcagtaggctgaggtgggagtattgcttgaggctgcagtgaggtgtgatcacgccactgcactccggcctgacagaatgagatcctgtctcaaaaagaaaattccccagaagaagaattctaattttatcaagctgaattaaagtttgagagtcttttttttaaaatcttactgtgtcaaaagaggcattatgttgcttgtgtgatatagtgaatagtgtccctccaaatttcatgtacacctggaatgtcacaatgtgacttaacagtagccacccctcacccccgcccttatctgtggtggatacatttgcaagatccccagtggatgcctgaaaccgcagatagtactgaaccttatatatactgtttgttttcctatgcatacatatccctatgataaagtttatgaatttggcacttaacagcagaactaataagatgaaagagttgtaacaatatactctaataaaagttatttaaaatgtaaaaaaaaaaaaaaaaagggcggccgctctagagganccangctnacgnan

SEQ ID NO: 548 - DNA, 1042 bp, Homo sapiens
ccacgcgtccgtaagaccaacacatgggactgctatacatggttcttctcaaatccattgttttcttttctggtgtaagtgaagaattgaaggcttatggggtcggtctacagaccgttattgagttcctacagaatacccggttctgggcttggcgctggatcagtcaggccctgttgggtcttgcactcaaatgacaaacgtacaaggcttacaccgtgtgtcagatggcaatggtgaagcagcatcagggagttggggaggagaggtggactgctttttttattggagggaggtcaagaaggatgcctgaataaggtaacatttgagcagagtcctaaagacagtgaggggacaatcatcagactagcaggggaaaaagaactccaggtggggggaacagcaacggcaaaggctgtgaggtagaaacgcaataacgtgtttgaggaataaggaggccaggtggctggaatggaggttagcaagggaatgaggtaggggcagttctgcgggctttgttaggattctcttggaggaaagcttattaccacagcgactgagagtgctgccattagcctatgaccctcagctgtcagcttgttcagaggtggcttagctgcagatggctggcttcccacatccgatgactgaccacagtagggatatgagggtctgaccatttctgcccaatgctgtccaactctgatgggccattccagttccaaggctcctgcgggactgatggaggctgttcatgggactgtatccctccctggcttctccctctgcccagttctcatgcctttccttcctttccactggtattgatcccaagggtacatgcttagtgccatctcaggactcagtttctccatttagtgtgattgaactacgtgcatttgccagccctgtagtcccagctactaaagaggattgcttgagcccaggagttcgaggctggaatgagctatgattgcaccactggactccagcctgggcaacatagcaagactccgtctctctaaaaaaaaaaaaaaaaaaa

SEQ ID NO: 549 - DNA, 855 bp, Homo sapiens
ggcacgagctcaggcataccaggttatagctccaagttccacaggtctgctaccacaggccatcaaaatataagtttccaggctttgcagaagaccttgtctccttagaaatgccccagaaattttccacaccctcctcggtatccatggagagcctggggccagatatctggctcatctctggcattgcttcctctccttccttcctgcatgtgttggtggtggttgtggtgggggaatgtggatgggggatgtcctggctgatgcctgccaaaatttcatcccaccctccttgcttatcgtccctgttttgagggctawgacttgagtttttgtttcccatgttctctatagacttgggaccttcctgaacttggggcctatcactccccacagtggatgccttagaagggagagggaaggagggaggcaggcatagcatctgaacccagtgtgggggcattcactagaatcttcaatcaacctgggctctccccaccccaccccagataacctcctcagttccctagggtctcttcttgcttgactcaatctacccagagatgccccttagcacacctagagggcagggaccataggacccaggttccaaccccattgtcagcaccccagccatgcggccaccccttagcacacctgctcgtcccatttagcttaccctcccagttggccagaatctgaggggagagcccccagagagcccccttccccatcagaagactgttgactgctttgcattttgggctcttctatatattttgtaaagtaagaaatataccagatctaataaaacacaatggctatgcaaaaaaaaaaaaaaaaaaacctcgtgcc

SEQ ID NO: 550 - DNA, 1120 bp, Homo sapiens
cccacgcgtccggattttggacactgccgtgattaatttgaaaggacgatactttgcctggacttgttaaaagaaaatgtgaatttaaaagatgttaaattttaattaaggttgtttttaattgttttgaagcaacatagtcttcattaataataaaattgctggacagaatgatttttaaaagacagcctatcagttttaatgaagtatctagtttttaaaatgggtgcgttagtagagcttttatatatttttcccttcctccttccttcctttctttctgaaaagttactagaaaagaaataatagtgaacaaaactgatctagaagaaaagatggaaggacataaaacactaggaatgaaataaggcataattataactatgccaggagctcgtgtatcacaagaacaggtgcagctttagtgcactaagtttgaaaagctgaatgaagcttactatagtaaaataccagttattaaaattggcttgcagaaattcgtccaatataagtaaacaaccaatagcaaccaggtgtaaatagttttataggctaatactaccaaacctttaaggaacatataatttctgtgttctagaacttgggaaaagatggagagttcaaaactcacaccgtatgcctagtataacctcaatgccaaaccagacgtggcacgcacagaaaaataaaatcagaccaaagtcatttgaaaaaaaaattcctatatttatgattcaaaactcagttattttataaaataataatattaagtggataaagaaacgccagttgtactatcagctaaacattagaaaccttctcatcaggccaggtgaggtggctcatgcctgtaatcccagcactttgggaggccaaggcgggcggatcacctgaggttgggagttcaagaccagcctggccaacatggagaaaccctgtctctactaaaaatacaaaattagccaggcatggtggcacatgtctgtaaacccagctactcaggaaggctcaggcaggagaattgcttgaacccggaaggcggaggttgcggtgagccgagatcacgccattgcactgggcaacaagagcgaaactccgtctcaaaaaaaaaaaaaaaaaa

SEQ ID NO: 551 - DNA, 1278 bp, Homo sapiens
  misc_feature (20)..(20): n equals a,t,g, or c
gcctcaaggtcccggtccgnaattcccgggtcgacccacgcgtccggccgcagccacagcttgcacgttgcgccgggtgtgtctgtgcgtgccagctgcatctttgcgtrccatgtgtgcaaggctgtgtttggctgagtgttcatgtggsccgtgattgtgggcatgtttctgagtgtctgagtgatgcctgctggtgtgggctggtgggtgtgtctgcatgtgcgtgtgtgtctggggagtttcaaaggagaaagagggactcaccatcacgctggctcagccttaaaaaggtaggacatcctgacacgtgctgcaacatggatggaccttaaggacattgtgctgagtgaaacaagccagaggcaaaggaacaaacatgtgatttctcccagatgaggtttctggaggaggcagatctgtatggacagaaggtagcatggtggttgccggggcagggggaggagagaatggagaattagtgtttaatggggacagagtttcagttggggaaggtgaaaaggttctggagctggatgatggtgatggttggacaacactgtgcatgcacttaataccmctgagctggacacctaaaaatgcttacaatggtaaatttcakgtatattttactacaatttttaaaaaattggctgggcgtggtggcttatgcctgtaatcccaacactttgggaggccaaggcgggaggattgcttgagctcaggagttcaacaccagcctgggcaatatggtgaaaccccgactctacgaaatatacaaaaattagcctggtgtggtggcttgcacctctaatcccacctactcagtaggctaaggcacaagaatctcttgaacctgggaggtggaggttgcagtaagccgagatcatgccactgcaacccagtctgggcgacagagcaagactctgtctcaaaaaataaaagataaataaaaaaattagaggccaggtgtggctcacacctgtactctcaacactttgggaggctgaggtgggaggatcgcttgaagtcaggcatttaagacatgcctaggcaacatagtgagaccttgactctacaaaaaaattcaaaagttaatgagacatggtggtgcacacctgtactaacagctacgagagaggctaaggtgggaggatcacctgagcccgggaggttgaggctgcagtgagccatgattgcaccactgcactctagcctgggcgatacagcaagaccctatctcaaaaaaaaaaaaaaaaaaaaaaaaagggcggccgc

SEQ ID NO: 552 - DNA, 742 bp, Homo sapiens
ccacgcgtccgggatcaacaactgcgtgggaagccggaattattggttcttcttcagcactgtggcctcggccacagctggcatgctctgcctgatcgccatcctgctgtatgtcctcgtccagtacctcgtgaaccccggggtgctccgcacggaccccaggtatgaagcagcgccaggaccctgaccaggaggacctgggccagagaagcccctcggggtgcaggacaagactgccagtctcagccccaggcatggctgcacccgcactgcacacagcccgggtggcgagacagggaggacttgcctgcccttgttccagaacattccggagccaacacggtgtgacatttttttcaaggatgagctttgccagctccacgtggaagtccctaaagctcctccttccacttcgaagcgtgactgatgcctccagggcctcacagccgcttctgaagcacttcctgaaagccagctccaccctggcgaggccctgacctcagcggacccaagcccaggacgatgcctgttgcgttcttctcccccagtagcaagtcaccttccccagcagcctccatgttgtctgggctctccctgtgggggatgccaggggagagtgagagagcagaggtggccaagatggcatgtgctgccttctctcctggaacatgctgcttccacagggcaaaaaaaaaaaaaaaaaaaaaaaaaaaaaaaaaaaaaaaaaaaaaaaaaaaaaaaa

SEQ ID NO: 553 - DNA, 1033 bp, Homo sapiens
  misc_feature (928)..(928): n equals a,t,g, or c
  misc_feature (958)..(958): n equals a,t,g, or c
  misc_feature (977)..(977): n equals a,t,g, or c
  misc_feature (1005)..(1005): n equals a,t,g, or c
ggcaagtgcagtagagaaatgggccaagttctctggacacgtgtggatgtgtatattgtgttatacacaaggccccaaattcctgcaactatttatacatgcaattgttctgttgtttgctgagatggaaatcatatacacagagttacaaattcctgaaatgttccatctatatttgatataaacagacatacagtagctgagaaagtaacacagcttgactattgctctgtttaccttctattggaaaaaataattgtatccagaacaccatatcagccttatagcacgactgaatatcatgttgcaattaattaacaacctgatatctatttgggagcaaatttaagggaagactggaggcctaggaaatagaatacaaaatctcaaaactttttaaaaagaagtaattcctgaaagaacaaagcaaactcattccttcataccatgcttctgaaagctattccagcagcccytcccccaaacaggcatgtaatttatggatcttttacaaggtaataaaccacagtaattacctccctgcatcccaaactaagaggacaaattaagtcagaacttgaaaataatttaaaagagttttcccttgtttcaaataggaaaaggaaacgccaagacatagaaaaccacgcttttcccgtaggaagaaccgatgatgagccctgatgaaagaaggaagaagacccgctgtctgcgaaggcctaaaggttagaaatacagcaatttttctcatgccgaaggaaaggcaaaatggtctaagaaactgcaagagtgtgatacaagttttcctcaacagcgagctgggactggcgacaatttcttaactcacagcctccgcagtcgccttagtcgacaaagagagcagcccacgcagcggccgccggcccgttgcccgtggcctttttatttnctttttgccctgaaagtttcagttttagtnggttttttttgggggtttncagggaaggaaacaaacacatttccctntttgatttttccaaaaccctttttttgc

SEQ ID NO: 554 - DNA, 1913 bp, Homo sapiens
  misc_feature (12)..(12): n equals a,t,g, or c
  misc_feature (14)..(14): n equals a,t,g, or c
  misc_feature (398)..(398): n equals a,t,g, or c
ctcgcaagagantntttgtgtttctaatacaggatctggaagtagtgctttctaatcctcatttcctgtaggatgttcctgcactataacaagattatgttttcttccttctgcagcagctttctgcttcttgggtactactagctattgttcaattcaggtgaggcctgtgatgacatatatgtagcatgtgctctgcgctccctgcaagctgagcagatacaaccaatgcatcactgtatactcttgctgagaatgtggatgcagcctcacagatctttgcaacactccaaccagccaggaccagttgatcagaactgatcttattggtctgataaccaatcttatttgtgaactgattcatatctgtctttccactcttggttctcttgccgtangaacaaaaacagtttaggaagcataattacgaacatttaggaaccaatatgtataagtaattcggagactccaattcacctgcccctcccccatcccaggttgtggaggctcgaggaagctgacttcttaggctaaaggacaaaaaaatctctttacctccttggccattttcatgttctctgccaattactataggcagtcttcattttgcagaggtgaggtaagacttcatcttattcttcatgtaatcccaccttctaacaaaaaataaataaatatttaaattccaaggagaagtgttctttgtgtatttctagcagaaaacagatgcttaagcctaagaaggaagatccgtccatgacaaaggaaagtggaaaactgaaccagttatctgaatacttcatgccaggacagttgctattagcaactgttttgcaccttcagggctttaaaatgggctctgcagacagcatttgcatatgcaagactcagtagccaagcctccactgccaattgttgaaggcagtttcagatcgccaccttttgaggtacatttctttaagcacaagagaagtagaaatggcctttgccttgtctccagtggtttgtccctctggtgcctcagcagataccagagcttattcttatgaccatttggaagtagtcctcaaagtaaagatcaagaaaaaattggattctttttccattttctcataatagtagcctagtcaacacaagactcccataaaatatgactcactattgggagccatactattttataagcttacttcctgctgacaaaactagctttcctcaaggaaatataaaggaggggaaagtcacatagtgttaggaaaacattcctgtgttttgaatacgatgaatccataggatagagaaaaatctgcttgttctattctgagagttctctgagatatcccttcactctgcttggcatttggccattgatattcaacaggtcactgaccaagcttttctaaatttttcagagagagttacttaccaataaggtctgttcttaaacctacctagttgattttcatatctttccataaagtgtcatgattctatcatagaccctgacttaacattgtaaggactatgagtcctcccattttttaattaatttttttttagcaaattaggacttcggcaggttttcctctcctaaactcattctttcctccacaggattgctttgtccatctcctgctttcatttcaagtgcataaacaaaacctcaaagggcctgggaaggtgaggcaggccagagtctgtgttctgtgttgagtgtcaagctatttgttaagaaggtctgcaacaggcctttggtgtggctctgccagagactgttctgaacactttgcttgagatccgtgccctgtaaaatggatatgatgttttactgatgtctgtaatacatttgtaaacttccaataaaatttgaataaaaaaaaaaaaaaaaaaaaaaaaaaaaaaaaaaactcgag

SEQ ID NO: 555 - DNA, 1992 bp, Homo sapiens
  misc_feature (1950)..(1950): n equals a,t,g, or c
ggcacgagccgctcctrctctgggggttgggactacctccttttccgcgggccccgcccaggcggctgcccgtgacctgcctgggcgcggggaactgaaagccggaaggggcaagacgggttcagttcgtcatggggctgtttggaaagacccaggagaagccgcccaaagaactggtcaatgagtggtcattgaagataagaaaggaaatgagagttgttgacaggcaaataagggatatccaaagagaagaagaaaaagtgaaacgattctgtgaaagatgctgccaagaagggccagaaggatgtctgcatagttctggccaaggagatgatcaggtcaaggaaggctgtgagcaagctgtatgcatccaaagcacacatgaactcagtgctcatggggatgaagaaccagctcgcggtcttgcgagtggctggttccctgcagaagagcacagaagtgatgaaggccatgcaaagtcttgtgaagattccagagattcaggccaccatgagggagttgtccaaagaaatgatgaaggctgggatcatagaggagatgttagaggacacttttgaaagcatggacgatcaggaagaaatggaggaagaagcagaaatggaaattgacagaattctctttgaaattacagcaggggccttgggcaaagcacccagtaaagtgactgatgcccttccagagccagaacctccaggagcgatggctgcctcagaggatgaggaggaggaggaagaggctctggaggccatgcagtcccggctggccacactccgcagctaggggctgcctaccccgctgggtgtgcacacactcctctcaagagctgccattttatgtgtctcttgcactacacctctgttgtgaggactaccattttggagaaggttctgtttgtctcttttcattctctgcccaggttttgggatcgcaaagggattgttcttataaaagtggcataaataaatgcatcatttttaggagtatagacagatatatcttattgtggggaggggaaagaaatccatctgctcatgaagcacttctgaaaatataggtgattgcctgaatgtcgaagctctacttttgtctataaaacactatataaatgaattttaataaatttttgcttyagcacttggccccattgtagattgccctgtgcagtaaactttcaaggtgtcrgctgccccagattgcttcatttgctgggtgtggaaagagttgctatggccaggcatatgggatttggaagctcagcagaagtgacttctgctctgtggttgctgctccccggctttcacagacatggtatggcagccattcttttatctatttaaccaagaggatgctggggaattgtgctgcttgtcctgttggctggtggctgcattatgtcctggggtgtgcatgtgggtctatttagagcttctgtcccttccttcccattgcaagttgcacccagatgagacagctgtagtactaggtctctttcacctctcattgcctgtccctgcttcgagctggttgtcttgtgcgtgggacatgggccttcctatctgtgttttctcaaagtcaggagctgaccaggagcacactaaggtgtggtcatgcatcataaccaacattcactcatctgggacattcttaagatacatttataaatcatttcagcagtagtactttgtatgtgttgagagtttacagagctctttgacatacgcgatcttagtctttacaaataaggaaaacagctcagtttgggaagtatcagagatgggattcaaacccagatcctctggtccaagttgtatgtgcactgaactaatcaggcaggaaaaaagcccagccactgtctcacagattgttttttgtatattgtagcaaaatcctgaaacaatggggtccttccagtctcatccatacaaaaantgggcaatcttgggctggggtgcggtgggtttccatggccct

SEQ ID NO: 556 - DNA, 1386 bp, Homo sapiens
ttgagggaatctgcccctcgagcctaagattccgccccggggtttgaaattacagcaggggccttgggcaaagcacccagtaaagtgactgatgcccttccagagccagaacctccaggagcgatggctgcctcagaggatgaggaggaggaggaagaggctctggaggccatgcagtcccggctggccacactccgcagctaggggctgcctaccccgctgggtgtgcacacactcctctcaagagctgccattttatgtgtctcttgcactacacctctgttgtgaggactaccattttggagaaggttctgtttgtctcttttcattctctgcccaggttttgggatcgcaaagggattgttcttataaaagtggcataaataaatgcatcatttttaggagtatagacagatatatcttattgtggggaggggaaagaaatccatctgctcatgaagcacttctgaaaatataggtgattgcctgaatgtcgaagactctacttttgtctataaaacactatataaatgaattttaataaatttttgcttyagcacttggccccattgtagattgccctgtgcagtaaactttcaaggtgtcrgctgccccagattgcttcatttgctgggtgtggaaagagttgctatggccaggcatatgggatttggaagctcagcagaagtgacttctgctctgtggttgctgctccccggctttcacagacatggtatggcagccattcttttatctatttaaccaagaggatgctggggaattgtgctgcttgtcctgttggctggtggctgcattatgtcctggggtgtgcatgtgggtctatttagagcttctgtcccttccttcccattgcaagttgcacccagatgagacagctgtagtactaggtctctttcacctctcattgcctgtccctgcttcgagctggttgtcttgtgcgtgggacatgggccttcctatctgtgttttctcaaagtcaggagctgaccaggagcacactaaggtgtggtcatgcatcataaccaacattcactcatctgggacattcttaagatacatttataaatcatttcagcagtagtactttgtatgtgttgagagtttacagagctctttgacatacgcgatcttagtctttacaaataaggaaaacagctcagtttgggaagtatcagagatgggattcaaacccagatcctctggtccaagttgtatgtgcactgaactaatcaggcaggaaaaaagcccagccactgtctcacagattgttttttgtatattgtagcaaaatcctgaaacaatggggtccttccagtctcatcatacaaaatggcaatcttggctgggtgcggtggttcatgccct

SEQ ID NO: 557 - DNA, 1733 bp, Homo sapiens
  misc_feature (893)..(893): n equals a,t,g, or c
ggcacgaggagatccgggatttgtatgttaacatccagcctgttcaagaacctaaagaccaagcatttggcaatggaaatggaataataattattgctgagacctccactggctgtttgtttgctggatcatcgcttggtaaacgaggtgtaaatgcagacaaagttggaattgaagctgccgaaatgctattagcaaatcttagacatggtggtactgtggatgagtatctgcaagaccagctgattgttttcatggcattagccaatggagtttccagaataaaaacaggaccagttacactccatacgcaaaccgcgatacattttgctgaacaaatagcaaaggctaaatttattgtgaagaaatcagaagatgaagaagacgccgctaaagatacttatattattgaatgccaaggaattgggatgacaaatccaaatctatagagtatttgcctcttaaatgatacctcattgatatattgcactatttcataaatactataaaataatgactaggaagtaacttattaaaggctatgacttaaatttgaagatgaagtacagtgttctaggtttgctgagaaggctcattaaattaatctcactttgaatatctcctgagagatggacaatgaaatatcagttggtggatatgtgtgatagctgatttcaatattgaagtattgaaataaaatattctttacacctgaagtaaatacatttttcttttttatgtaattaattaaatcagggatatagatttgatctgtaatttgggtataattctaatctttgctgaaatcacatctcaagtataatgaggcaactttatgcaaatgtacttgttgtgacaacaataacattttcctttttttttttttttttganacagtctcgttctgtcacccaggctggggtgctgtggtgtgatcttggctcactgcaacctctgcctcccgggttcaagcaattctactgcctcagcttcctgagtagttggtattacaccaccatgcccagctaatttttgtatttttagtaaagacagggtttcaccatattggtcaggctggtttcgaactcctgacctcgtgatctgcccgcctcggcctcccaaagtggtgggattacaggcgtgagccagcgcacccggcaacaataacatttaataggcattgtctcattctaatgatatataccttctacctagtgggcactttgtacatatttattttttattttatttattcattttttttgagacagagtctcactctgtcaccaagttggagtgcagtggcacaatctcagctcactgcaacctccgccttccaggttgaagtgattctccagcctcagcctcccgagtagctgggactccaggcacgtaccaccatacccagataatttttgcatttttagtagagacggggtttcaccatgttggctaggatggtctccatctcctgacctcgtgatccgcccaccttggcctcccaaagtgctgggattacaggcatgagccaccacagctggccgtaaatattttttgaatttgaatctgttttggaagccaaatatgttttggaagccaaacaattaagagaagtaaaattttaaccctagtaggtttcgcagattcatccccagatatgtttttgtttggcttgtgttattaacaaataaatgagtgtctttcaaatggaaaaaaaaaaaaaaaaaaaaaaa

SEQ ID NO: 558 - DNA, 2722 bp, Homo sapiens
tttgaaaaaaaagatgcttactgtatacttgttttcaagcatcctctaaaatcaaaggttttgatcacaatatgcagatttctcttgatagatacttaaataggctatttctctcctcttcttgggcaatgccttgttttctcctctgaatatttgcatttgaaaggattgcttcctgttctgctcattgatcaaaggtagggccaattaaggattctaaccctaacccagcaccacaaagcccccctggagcatcttcccggctggcaggaccatgccatctctgtggagaaggtgctggggagggaagtccttccagtgccacatggagtgaggccctgcccatgctggggactttggggaggaatttggtattctggtggccttgctcagctctcattgagatcttttcctatcagaatgttagtgaatatacttcgcagctctttgttcagcaataaggaatattctttcaattcctgctcttcaagccaatttactacacccagttgtctttccagaagttcatcccagcggtaatatgttggtgtttgttcttctttggatttcacatctgttttctggtagaagtgagcactgttcacttgtgcagtcgtcttattttccttcttcctagatgactcagctctttgtaaatgttgtgctcaacttctaggggccagttctagactttggagatgcagtgtctcccaggtgtgcacggacacctggtccgtggaaacaggtgtgatgggcacaggctgctgcccttctgtctggtcgggggattcctcttcttcaagctgctcagctaacccagaagaggggagagagtactccggtggttcccagagcccctcccgttgtgccgcttcgacctgacacctgctcgatgctgacttaggcttcctgccaccaagcaggaaactagaaagagaacatttcagtgtaaggtctgttcccgacagcatggattagcttccgtgttctgaagttgttcttttcatggtgtctgacaccgagggcgttgttcgtccatcaggcgggattggatggagtcttggtgttttgccttctcagggaccaaaaatgtatcattgactccttaacagtgaccttcctcccaaggacatatccgtgttcatttttcataggttttactcatattcataggtagattctgttaatgtgagttggaaagaaaagaccaatttgtacaccagtcacaccacaagacagtttatcatataaaatacctcaattttttgtattcctcatttccacctcacaattgtactggtgatgaattttaagggtctgtcctttagcttataggtgatgtttcacatctggccagattcttatacctccattgtatacttgaaaaggttcagaattacaggaacagcagtgagaatttggcccactaccacgactcatttgtttcattcacattcctcacgtgcaacaacataattatattttaagaaaatgtaactttgttacatcaaaatatgttgtctagtaaaaagttgatattcagtagaacaaggatcatgtaaataaacatctatttcacatgtacccaaaagcatttaaaaagcagaatccagggcccagagcatgagccagggaggaggatgtttttcttcytttctctatttttccctaaattgtgcaaacataggtgagtctcttaacctttctgtgcctcagtttttctacctctaaaggggtgggatggttcttcaaattgtttctaaaacaccggcactttcagcagtgttctggtggcctgagatgagagcaccgtgttcagaagtgcctgggagtggcacagtggaaactccgcttgcacggaccatggagtctgctcaggaccatgctgtaggacacacagcctcatgcgctgagaaagcaaaggaagtgctgggtgtaaagtttgcatgattccatgaagctttagttttcctttttttgttttaaaagaaagggttttatatgttctattgtaaaatatggaaattaaacagggacttcagaaagccgcacagaaagatcaccttcygatggtgtgatgtgctcctgacattcggccgaggtctgtattctgaaaaagatttaatggcctgtgaaacacgtggattctgttgcactggatttgtaataaatgacgctgaacttcctgcttccaagcagctcaaccctgatgctgaactgacaccaggcgaatgtcagggctcccaaaccactagtgccaaagggtcatgttgaaaagttcagaatatttatttgtcagaatataataattgccccccaccttagtatttttgcactttacagaaatttagatactgtttttcagtggcttgagcgttttgccttttcaaaggataactattattttcttgaaaatggaatataatcatgagaggaagaagatgtaaaaaatgtcaaatgttgattggttgtgtaaaagttttgtcatagacatgtattggggagcttccaattagcatacatagacacatgtgtcagtggccaagacctgcttatattttgctttatagatgtagtcatagcatgttgttattgcctcatgtaaataaaaaggctattaagttttccagtaatatttattaatctgtatgtgttttaaaataaaataacttatttctagctgaaaaaaaaaaaaaaaaaaaaaaaaaaaaaaaaactcgta

SEQ ID NO: 559 - DNA, 1094 bp, Homo sapiens
  misc_feature (470)..(470): n equals a,t,g, or c
ggcacgagtacttgcatatggtgaattactactgttgacagtttccgcagaaatcctatttcagtggaccaacattgtggcatggcagcaaatgccaacattttgtggaatagcagcaaatctacaagagaccctggttggtttttcgttttgttttctttgttttttcccccttctcctgaatcagcagggatggaaggagggtagggaagttacgaattactccttccaatagtagctctgaagtgtcacatttaatatcagttttttttaaacatgattctagttaaatgtagaagagagaagaaagaggaagtgttcacttttttaatacactgatttagaaatttgatgtcttatatcaagtagttctgaggtattgatagcttgctttatttctgcctttacgttgacagtgttgaagcagggtgaataactagggcatatattttttttttttgtaagctgtntcatgatgttttctttggaatttccggataagttcaggaaaacattctgcatgttgtatctagtctgatgtacttatccatctcattacaaacaaaaacacacagactgcatttgtagctctgtaatccttgaatacggaagtaaattttcttctttcctgactttgacattgtagctatactgtttccatttttgtttttacaaatcctttgggtctaattctgtgagcctacctatagcactggattaaaatgtctgcatcatttctttagttatccagttaactttaaaactgttgtaaaagtgtaaaccagcccatgacaggtttttgtacatgttaaagaacttcattgttcagttttcatgattattgtgtaaggaagactgatgtagatgttctgtgctgtcctggaccatgttaattacacttacgacgtattttagttccacatcacaatgatttgtccccagtgacccttttatcctttctaggcacatttcttgttgttgttgttgttgcagttcccctttgcattgtattgctttgacaactgtaatttgaatcagatctgaaagaggtccagaataaaatatattttgatattaaaaaaaaaaaaaaaaaa

SEQ ID NO: 560 - DNA, 1839 bp, Homo sapiens
aattcggcacgagtgggcagtgaaatctagctagatgaccataatatgtctgcttttcttgactttattattattactttttaagggcattgttcaatcctcgattttgtatctatggcagcaggtgaaggtctctagatgagcgttcacatacacgatgacaaatggttaaggaattttgaggctaaaatctttactgcttagatgtcatgtactttataggcatagcatttctagatttaataggaaggatctctgctctgtatgtgcttttatgtgacttgcaaaggaactattccatttaaatagatttcaattaggataatgggtttgagacatttcacaatggtatattttctagactcttaagatagaattgtcaaattatagcaaatagagttagaaattattttgcaattttctcagcagattgtaatttctcctgccatacatgtagtcattgtaaaaataatagtgtaagggtaccttttataaaactgattattttccaaatagactggtaccttttggtttagaaaaaaaatgatggaagaagattgtagttcaggagagcaagcagaaagcagtcatttttcagcctttcattttattgtacctttggtcacatttttgaagaaaggcccaaaattgccatatgtatgaaagaatattggtaatggggtagagttggaatgaaagtgagattttcagagtaacaaggtcactttcttctgtggcttgtagaaacagatatgtgatcacaacaggtccagcagccagggttggggggagtagagagttcatgtaatttgtatcatgcttaaatttccatatttgaaaaagcaactagagaacaggattttgtcaaaacaaagagaaaaaaataatttttttaaacaggagggggaaatgtacgtgttattcttacaggatgttgaaaaatgtttaaatagctgcgatacagtttgttgagggggcaggggacagtgggaacagtgactaaagggttacattttgatgtagaaatgcctagttgaagaaaaaagcttgcctgggaggaaagtttctgtggagatgtaccctgcatttggagtgatgtactgaagcatcaaagactcagcattaattttgatctttcttgggaagctggagaaaataatgcatttctgagaaaaaatagtaacttatgaaatgtcaaagcctgctctggacaatgtcaacatccatgagtgcgaggcaaattcaagaatccaaaccctaagtgaagaccttcctgacctgctgtctagacgtcaggggctgtttgagcggtgaggtccagcgggttaggcattccaaagatacgagaggcccacacccacatcaggattgtgtgttagttctcaggcttcctaggatttttcttgggaaaaggtttttgaccccaagtggctcccagcttgacagaaatctttagaggcagctcagaaaaactttggtttcccaaaataatccaaaggctaaagttctgccaccctttaaaagagtagtgttttggctgggcgcggtggttcacacttgtaatcccagcactttgggaaaccgaggcgggcggatcacgaggtcaggagttcgagaccaacctggccaacatggtgaaaccccgtctctactgaaaatacaaaagttagctgagcatggtggtgcatgcctgtagtcccagctacttgggaggctgaggcaggagaatcgcttgaacccgggaggtggaggttgtagtgagccgagatcccaccactgcactccaacctgggcagcagagtgagactccatctcaaaaaaaaaaaaaaaaaactcgag

SEQ ID NO: 561 - DNA, 1964 bp, Homo sapiens
ggcacgagaaaagattcatttattgatttgtgcttcaggtttaatttgaaaacaaaaacaataggagaattggaggaaaggaatgggaggacagagtacatgtgttggcatacctttgcttagctctagaggataatgatgcagatttagatcaattatgtagctgtgctgaaatttccctcatttgagcacctttaatgtgaattattatgtgttcttgctggacttacactgttacatcattgtcaacttgcttagtgtgctcagaaataaaattttcatagctttcctctggaccttgttttaaagggtaatatattgatccacttggagacaagaggctggtaatagaaatttggtacttggtaacaaaattgctgaatgtgtgaaataagctttgaaaaatatatgttatggttaaaatgttggaagggcctcagaattttcacagcagttatttgtgtattttctttctaggtgcatgctattatgatgctaatcagtctatgtatgtgtttggaggctgtacccagagcagctgcaatgctgctttcaatgacctctggagacttgacctaaacagcaaagagtggatccgacctttggcttcaggtaagagatgaaatgctgatctttgcctccttaccaggtgactcccttggcatggaaactctacctgatcatttttggtgttggtctcaaggataggttactgggactcaggtccttaagtttaatgtgccatgtaaatgataatagtaatatgcttgtgtaagtctttgttttttgttaaattatactttatcattagtaatggtgccctgccaaaattgctgtactgctgtgtgaattcatttgcatggttttctcaagtatactcatacaggtgtgatacatcatttggtaggaggttgaagtaagaacagaaacacagagtcgtgagaactgtagttgactgacagaagctattgtcctagggctaaggtctctgaatatctgttgttgttgccagctcagatatttggggagtgtatgggacgtgcctctgctagttactcttaacaacccaggggtgtgggaagattctacagtaggtacattcctacccagtcccactatgccagaaatctggcagaaagaaactagattattttcttatttttgacctaacctctcctgggggaaaaaataaaaacaatggtttttgcactcatgaggcagggcaatttgaggaggcatagattggaggggttggtgtgatggagaaatagtgtccactgagtataaagtattctgctaggttttttggcaagcttttcccaaaacattcatttggctttttagtattaggactcagtcttaggactaaggacatttgggtttccattgggcaagttccttatttatttaggccttgccttactactttgattaccagataggaggcatcattgtatattagaaagggcactggactaagagtgaggggacatgagtttcatttcctggcatagtcaccaattctccatgtaactataaataagttattgcacttctctgggagaaatgtggagtagtactaaatgactatttttaaatgggctaaaaaggctagtttatgtttccctttctataaccgctactgtgaatgtctaggccagggacttaaacctgtttatgagaagaagctgcattttgcttccctaaaacttaagttcctgttctttccgcctacattaggcaaatataggaggagcctactgagtggataccatgggtggagctgggctttgtgtagatgaagttctttattaaaattattggcatttggagggtaggagggtggtggtccagtctgcagatggccacaccaggaggaggagctattatatccccttctcttccacttcctgtcacaaccaataaaggccgtttgtgccattcataaaaaaaaaaaaaaaaaa

SEQ ID NO: 562 - DNA, 1330 bp, Homo sapiens
ggcacgagcctgcagctatcattcatccagttaagaatttgaagaagtgtgtgcacaaagtatcacaggcaccggaaaatatgcacatgatgctggagcattagaatgcaacagaaagagccctgggcttggagtatgcagaactggttcttgttacaactcctcttactagtgggctctggaagaaaacacattgaattcatgatcatggttaacctttggagagagagaggagaccaggatgaaggagccagtcgaagatcctgttcaagtgtacactgagccagcaggttcaccagaaagctattgagcgtttgctggaacacattatgcagggtgaatttctcctggaatgttgccaaggattttttatgcttctgtggcaggcatttcttgaacattgtcatttagccaagcaaagaagattttcttaaaggatagaaaatgtttaaaaatttttgtttgtttgaagataggttaaatggctatatgatctcaggataagacagagaaaatcacttatttctctaagtgatctgattaggttagtgatgttttgcctttaaacagattcatcattattcctaaagtattgctgtattaatactgtctctagaaagtatccaccagtgcctacttttcttcgatatcattagctgtttttcgaaactgaatttgctcttcagagatttctcatatgtttgcgtataaggaactactggtaatagccaagaaaatttggaggtgcagagaacatgctgaaacagaatttcactttcaattctagaactatgccataaaaaaaaaggaaaatgtaaaaatgtctttatattagagcagatattttaaaagtattgcaaattcaatgataaattctaaggttaaaattggacacataaaaaatacaatatataaatatctccccagaaattattatctaatgaatagtaaaagctgactacaaaccatgtcattttaacaagggtttaaatagtaccaagattctcatcatatgctctgggatacccagtgatgtacaagggttctctctaaacatggggaggaaaaatttcaaatataaagatttgaatcttgtctttgccattcactagctgtgtgatcttgggtaagttacctggtttctctgagcttcagtgtcatctgtaaaacaggaataataatacctagctcagaggtgggtgtggtggctcacgcctgtaatcccagcactttgggaggccaaggcaggtggatcactaggtcaggagtttgagaccagcctggccaagatggtgaaatcctgtctctacttaaaaaaaaaaaaaaaaaa

SEQ ID NO: 563 - DNA, 1504 bp, Homo sapiens
  misc_feature (1120)..(1120): n equals a,t,g, or c
gctcctctgatccaggagcattggcaggtttgtgttgggactgctggttaagttggagctgtgtaactacttagtttttggtagccaatcagaacgcatgccccacatattccagctcggtacatgttgataaacagactcatccaaactttcaaaatggattcgtactaaacatgctcaggttttaaattttggtttgcttttgagcttttcctctttatgtggctcttaataataagtagttagaatgaaccaagccatcccagttattccaagcaggctctcaaatgacctttgagcacccttcacctggctggtccccagkccagggtccacagccctgctcccttctcagcaaggagggtggcctgtctgacagtgcagttgaacctttgctccctactctgcaacttttgaagacttcaggctaatcaaaattacttataattagaatcaagtgcctttattcttgttttttatttttattttatttatttatttttttagatggagttttgcccttgttgcccaggctggagtgcaatggcatgatctcagctcactgcaacctctgcctcccgggttcaagcgattctcctgcctcagcctgctgggtagctgggattacaggcatctgccaccacgcccggctaattttgtgtgtgtgtatatgtctatgtgtgtgtgtgtatgtatatatcttttttttttttttttagtagagatggtgtttcaccatattggccaggctggtctcaaactcctgaactcatgtgatccgcctgccttggcccctcaaagtgctgggattacaggcatgagccaccacacccggcctattcttggtattctttattcttggttttctagcctttagaaaaaaaaaatctagtcttggtaaagaaaatgttcattttaatcaagctccagtacagcttgtgtcaagacctagtaagaccacctttaatgtgttcctggatatgacattaaaaactaacttgaaaattgttaggatatttccttgttccctacttttattgtaaaatctactacattcttaagaattaaaaaatgccatttcagaagagatgatagttttatcttggccaaggaattatcnttcttagtagcctatattggcttattccaaaaaaggcgttaacctccatcaaaacatcttctgcgcctctctctcagcatatgctttgatatttgaagtgtgtaatagattggagctatcagtcacttatttctaaaaaatgtattcttttttcttcatagctgtgaagagggataccaaggaaagttctttctgctgtctttctctttggtaatgcttatcttatgaacactcaactgaaaaaacactccacctaaaagcaggaaagatggcaattctaaatagcagctattatccccgggtataaactatttttgttgttggcttggggctttgctgcaggtattaatagtttaaaaaaaaaaaaaaaaaaaaaaactcgag

SEQ ID NO: 564 - DNA, 1828 bp, Homo sapiens
ggcaacctctgcctccagggttcaagcaattctcctgcctcagcctcccgagtagctgggattacagatatgttcctgacccttccttcttgaagggacagctgtgtaaccattcaaccatctggccatcagtttccacatctgtgaaatcaacttctgcctcatggagccatgagttcccaagcagtgaaggcagtgaggggctgtggtgtgatccaggaggctgagaattatgcagtgggtgctgtcaccttgaagacatcagcgtgatcaggcagatcatcatggtactgcatttcctggacacgatcttaattttcttaatacctccaccgacatttcaaatagcgtctctaatgccccagagacttttatgcccctaaggtagttttctttcttttgtgaagcagaagaagggaaattgttaaagggaatattttaactaaatttatttccataaaactatctttgtctttatatctcatagaaagtgttaggtagcctcaggattatatctccgttggaaaactgtagatgtaaaccttcttgctatctacatacttacatatttttctgttgttatttacttatgaatagcattttgattatagcagaaataaaatacattaaatgactaagctcagaaataagaaaaaaaggtcaatggtgatcatttatttggaaactatgatattttaatgatattaatggtgtaattgacatttagttaaacatatttcatcgtaagtagagcactttaactcttacggtccacttaaaatgtaatcatacatttatgtatttctagttaatgtatcaaactcaactgagtaatcaatgtacatcatttattttgctcctaagttaatacactaagttatgctttaaaattactaatttgctgcaatatccaatactctcttttaartcttacgtgtgcagaaaaggatataamcatttcatgacaccaaacccaagtatttttgatgcccttggcagtgtcagttgaacagacagtgtcatttaatgtttgagacagcatctgaattccttttattcttaaaattctattttaaaatgcagtttttggaaagtwaatgtgaatagaaaaatttctaacattttatgtgcatgtgttttgtttgttacaggcttagcatctcaaatctgaaaattcgaaatctgaaatgtttctaaaattcaactcttttgagtgctgatatgactttcaaaggaaaagctcattggagcatttcagattttggatttttggatttgggatgtttaaccagggtaaaatatagaatgcaaatattccaaaatctgaataaaattgaaatctgaaatgcttatggttccaagcattttggataagggataattaagctgtataacttataaaactgaatataacaaaatttcccaacatgtggaaaatgatgtcttttttcaaaaatgtcaatagcagatacatggtacagtaagttaggggaaaaaatgaggtttcatatcttctagtttcctaattaaaaggagcccattctgggttggaagaaagtgtcagtaagatcatttctcctatttgaaaatcatrcaaagcttgtcagagygactcaggccaggagtgtagctgggcgtgtagctaaatgatatctccccacatctatataataagctgttacctgctttaaaaggaaaagctctcagcatgactctaatgttgcatttctggaatrcagcttgaaaagctcttctcagggttgaacagagcatgaaggtaatggttattatctactcacattaaaaaaaaaaaaaaaaaaaactcgag

SEQ ID NO: 565 - DNA, 1280 bp, Homo sapiens
  misc_feature (893)..(893): n equals a,t,g, or c
gaattcggcacgagctcctgtggaggaatttctccctttggaactaagacctctaagccagtggggcataaaattatgagaacaggaagaataaattttgctagtgggtcaccagggttaataatgcatggtgccacttttgtttctaccccttgattcctggctatggagggaaaaaaagtaccatttattggatgctgattcagagcrtatatatagccctctggagaactctgccctccctgcmagtwattgccacctagctggtgctataactgaatcttcaaaaggccatcccatcatcctattaggccagcttctttagcatgataaggaacatagaccagtgaattccaggagcaatgactcatactgaaattyttttgctgtgaykgaktcttgatcasaagcaatgttgtatggaatatgacaatgggtaaagcattccatgagaccatggatgacaattttggcagaattttgtatgaggaagcaaatctgtatcgagggtctgttctagtaagaacaaaatgctaccccttccatgatggaagtagttcaatgtaatcaactacaaagctgactgagcacccagaggaatagtgccatacttggagtcagtgtygttktcwgctgctsactggttgggccctcagcagtggcatccaggttggccttggatagtggaaatccatattgctgagcctatgtatgamctccattcttgccactgtggccactttgttcatgagccatgaacaaagaggataccagttagcctctttccccagccctgttctgacaggggtggctggaatagagactgactggtttccacagacttgattatcctatattcacttcattattaaaatcctcctctgctaagatcncctttggtgagaattttatggcatacatccttcttttcttttcttcttttcttttttttcccattgagagaggtctgtcctgggtgggtgtgatggctcatgcctgtaatcccaccgctttgggaggttgaggcgagtggatcgcttgagcccaagagtttgagaccagcctgggcaacattgtcaaaccatctcttcaaaaaaatacagaaattagccaggtgtggtggtgcactcctgtggttccagctacttgggaggctgaggtgggaggatcacctgagcccgaggaggtggaagctgcagtgggctgtgatcgcgccactgcactgcagcctgagcaatagagtgagatcctgtctcaaaaaaaaaaaaaaaaaaactcga

SEQ ID NO: 566 - DNA, 1528 bp, Homo sapiens
aattcggcacgaggtttgtggaaacaacccttagaatcctattattttttaagaaggaaaaattggacagcctcctgagccagagtaggctcggagactcctgttgtttctaactgaaatagtaaataatgtatttccaccatttacccagagtaggctcagagactcctgttgtttctaattgaaacagtaaataatgtatttccaccatttagtagcttttcaagagtccttaaaaatttttggacagcacagaaacatggattacttagccctttagttctcagattgagttatatacttcccagcaatttctgttatttaagattgctatctcatttctggtgtaatacttacatggaagtctttctctatttgggggtggtggggttctggcacataggaatttcttaatggcagaatattctgaaattctcggcattaaagtatacttgataattagttcacttaatattaaagcatgttcattcttttcttcccaggtcgctattaaagcatgaagactttctgaaacctgccctagagctgggatattgtttgtgggcaatattttttattgtctcttgtttaaaaagtgaacagtgcctagtgaagttaggtgacttttacaccttttacgatgactacttttggtggagttgaaatgctgttttcattctgcatttgtgtagtttggtgctttgttccaagttaagtgttttcagaaaagtatgttttgcatgtatttttttacagtctaaattttgactgctgagaagtttctattgtacaaaacttcatttaaaaggtttttctactgaatccagggtattctgaagatcgaagcctgtgtaaaatgctaccaaatggcaaaaagcaacaataaacagtttgatttttacttttctttctaacatatcaatgcttagcagaactattcagattgtcagtagtaaatttaaagacaaatgcccgttttcctccagtccatgaaacataccatacttatatacctgcaactaagtgtttaaaattatgctctgtaactctgtactgctagtattagaactaaaaatcttaaaatacagccagtgcttaatgcttatatcaatgtggatttgtcggcttttatgtaatctgtaatatgtatagcaggaaatacgaagagttacacagtgtatgccttaaaaggctgtttcttaaaggtgttacaaggggataatggtatttcaactagttatcagcaagtgacaatacattccaccacaaatacactcttgttcttctagcttttagactatatgaaaaaaccgggtgcttcaaagtacatgataagggaacactatacctgtcatggatgaactgaagactttgcctgttcattttttaaatattattttcaggtcctttgcttaccaaaggaggcccaatttcactcaaatgttttgagaactgtgtttaaataaacgcaaatgaaaagaaaaatgttggtgcagctgttcacaaaaaaaaaaaaaaaaaactcgag

SEQ ID NO: 567 - DNA, 1458 bp, Homo sapiens
gaaaaaatgatctctgattcatcagcatgaatttccaagtttggggtacagggcaatgcactttcctcagtttatttatattattgtttttaaaaatttgcaatacttaccaaagataaaggatttgttagaaacagcttttggaagaggagcagtgatataggtttattttactaatgataatagtaagtaaattataaagaacctttaatgttttctgagaaagtaaagcctattcttggagtttataatcatttaagtggttctggacaaaacttaccaaattctttactgttattactaaaaagratgttaacaattttaagaaaacaaaaaaattattttttaagaattttgtttatcggttgatatactcattgccaaaccagattaaagtaatattccaattggattggcttcttctaagctctacttctaaggaaattgtttggattgatttgctgtctgtgctttgagaatgacttttttcccctcctccttttttttaaagcaaactttgcgtaacttattgagcaaggtttccccttccttttctgccgaacttaaacaactaaatcaacagtatgaaaaattatttcataaatggatgctgcaattacagtaagtattatcattacaaacccttgtaaaataaagaataatatttacatgaatctttatgttaaagtaagttaacatttttctttttacagtgagtttcagatatttagtcatatataaaaataaatgtaaaaatagacattatgactcagatatagaaatgtcactttattgtatgactcttcccagaaattctacagtttttaagaaatttgtgtttatcagacttgacagccattgataagataaatagcatttcttagaattatgttattggtttaaaaaacttgaatatttcctttgtcaagattaataaatataacaattagaaaaaaaaattataaagttttccacagcatagttctttaaatgaaaggataatatttactttaatcttatgtatgtgtactacagactttcagaattttatgaacagatttgttctataagcattattttactattttaacattatttcctagaatrttttttcactgktattattttcacacacctcagattaaattttaaatttccattaaaacacctagaagaatgattgaaatcaaaacataatactttctttttatgataattacttttatccttgcagttaaaaagacttgaacataaggaagtgcttaaaatgtacactaatgtgaatatacatgcacactcacagttacattgtcactgaggtaaataagaaggtagagccatggaccaggcacttggcctcccataatcccagtgctttgggaggccaaggcaggaggattgcttgagcccaggggtttgagagactctgtcttaaaaaaaaaaaaaaaaaaactcgag

SEQ ID NO: 568 - DNA, 1538 bp, Homo sapiens
ggcacgagctatagtattgtcttgacctctggagttaatttctctttaatgcagctccatgataagcagaggcatcacgatttacttgaccgttttgctgacttacactgtggttctattttatctctttaaaagtggcttctctgccttccattaatcatgatgggatgcttgcaatactttcagcacagaataacctttaaggaaagacatcgtaagtgattgtccaagaccagtttcccttagaggaaagtgggagggcattttcagacagatcgttcatggcggtcctgtccctgttcatgaatctatgaaggcgacagtttctcctgagaaatacctcgtccattttggtaactctggctcaaagcatggttcaggatttcttgtgagcatgtttcagtagcagccagtgacgtgtgggggcttgaggctgttgtgtcaagagagagcagaaaagtctgatgatgatcttcgaacagcttccatctcgcacttcccctgagtcctgagccagacaaaggatgggcctttctggatgcagagcgagggagatctatcatgtttgattctctgtgtccatcctcaaagtgccgtgatcttctttgaatacttggagcatcccaggaaaagaagagtcatttgagtaaagaaatagcctaacaacccatgtaaacatggatgaatgtctttgagaacagaggaagtcataaccatgataacccagaacttatgcagatgttcagtgcatggtttggtgcttgaagaattgctaaaagcctcttgttgcaaaggaaggtgcagtcaccacttttcatacacgagttgtcacctggaacctttttactcaaatgtcatcatcctgagatttttggtttcctggggagtccagtgactatgaatttagtgcagcacagttcgtcactgggaaagaagaatttgagaacatcaggtggaactcaaggagtctcattgtgtcgagtttttgagagctagagtaggtcaagagaaggaacactggagtaggaatctcaccatttgcaatgtaattgtgcctcttcctttgcactgatgttaggggcgctctgtgtgccactgtctccatccgcactggagatcatcactgacgtagctgaaatatggaggtcctttcatgcaagggtcataagtgccatcgctcccagtgacactctttttattaacatagtaatatttccttgaaatattgtcctgggtctgctgggtgcagtggctcatgcctgtaatcccagcactttgagaggctgaggcgggcagatcacctgaggttaggagttcgagaccagcctgtccaacatggcaaaaccctgtctctactaaaaatacaaaaatcagctgggtgtgttagcacatgcctgtaatcccacctactcgggaggcttaggcaggagaatcacttgaacccaggaggcagaggttgcagtgagccgagattgtgccattgcactccagcctgggctacagagtgagactccatctcaaaaaaaaaaaaaaaaaaa

SEQ ID NO: 569 - DNA, 557 bp, Homo sapiens
gaattcggcacgagtctgaggcctcacacaaaatcacccttaaccctctatttatggctttacaggctttttctagcctgctcctccatattctttcaacctctacccattacccagttccaaagccacttccacattttcaggcattatagcaacaaccccattcttggcaccaatcttcttagtccatttcgcgctactataacaatatttgagactgggtaatttgtaaagaacagagattttaggctaggcgcagtggctcacacatgtaatcccagcgctttggtaggccaaggcgggaggattgcttgaggtcaggagttcaagactagcctggccaacatggtgaaactgcatctctactaaaaatacaaaaattagctgggcatcctggtggcaggcccctgtagtcccagctacttgggaggctgaggcacaaaaatcacttgaaaccgggaggcagaggttgcagcaagcctagatcatgccactgcactccagcctgggtgacagagcaagactctgtctcaaaaaaaaaaaaaaaaaactcgagg

SEQ ID NO: 570 - DNA, 1568 bp, Homo sapiens
ggcacgagttttaaattaaatgggaatgccactgacgtgatgtcgtttgcactgcaggatgacagaactgttgtgtgaataccattgtatttgccaaatggtccactcgtcatttcagaacaaacaaatggatggtgtctgtaagtcggcaaacactggtgacatttagccttgtttatgttcctttccttttgctgcatatttttggctccaaaagctactggctgaatcaacagggcctctgaatcaggagagaagtctggtagcattaattttagttgctatgtccatattctcttcagactgcatgaatcctactgctcaggaccaagtctaggtgagaggagagggcaatcaacctctttggtttcggatgttgtgtgcaaagcccagggttcaaataagcagtaattatctcctattacttagtgctgatcaacagcacctctacgtctaattgccaacctgccctaatcatgttgactattcttgctttagccagagacagaaggaccaaattttataaataacactttattgtcattattccattaaacgattaggggatgtggccctgcccttgctttcaaatgcctctagccctgatggtttctggattatttaataaatctgcacattttcttgcaggtaagtgacactccctgtcctagtcggtctatctggacttgcccttgtctgttcgtggtcctcggtggttatctgcagcttgttaatcgtgtaaagtcaagagaagaatgtatacacatatgtgtgttgaataattactattggcataggtatgtgtatacacacggtgcaccaatctacagtatatatagcagagaatcagaggctaaaaatattaccccatatgttccagtattagtcatggattgcaaaggcttagtaacttgagcaggagagaaaactccctcaaagtcataaatcctgagtgacaactgctgctggatgacagatcccttcacctgtggacaacctggctgggggtggggggctgttccaccagctcacctgagcatgtagaggtgggtcctgcagtggtctcgtgggtattactgcttgtgtctgattgtcctgtattttgtaacactttagaagaatacagaaaagtgcagtaattctctttctccatagtatttaagcagaaatattgctagtttaatattgtgtcaggtcgtcctattaaccaggagcagatgacagtaaaatttcagtgaatagcaccttgacatctacaacttaaaaatggtgattgaagcaaaatatgtaaacttgtacggggtgatcgtgtgctttggaacagagtattgttgaagtaattagaagatatattaaggtgttcctggtaatgaaggcatgtaagttataataattgtagctttctgaataagtgtcaaactatatctttaagtgtgctgtatgctgagttacaagttaggtcatttatgaatggaatgtaaaataatactaaaaatgcttcaataacttatcttggtattgctaataaaaaaaaaaagctgtgaaacattaaaaaaaaaaaaaaaaaa

SEQ ID NO: 571 - DNA, 1228 bp, Homo sapiens
ggcacgagtggaaactcaacagagatttgtaaagtactatatgtgttttaccagttgtccagccgattaagtctttgtgggtttcttttgctgttttatgcccgggaagttaaatccatgccttctttggttattaatactgatgttatttaagaaatgcaaaaaggcctctttagtttctaagcggtcttggatttacatagcataaaaattagaatggatttaaatgggagtaaacagcaggagcttgcaaagtcaggcccatctgacattgttatctaggctgtgttctttgagtatggaaaatgacaaggaaacattaacacaatagcttaatagtttacttcctgtctttggtcaaaatgttccaaaaactgaattcttaccttgaagtcactggcctttgggtgatgaattcaattgtaatcactctgggtttgctcatgacagtaatgcagtaacttaaagttagaaaataatttcaacccaggagcatcttaaatagaagtcattattgtctctatgtaattcttgttggaatgtttctttgggcaatttaaactgcccacacattagggcagtgactttctgagcattttgtagcaattagagttgttgtttctcgttcttggcattgtttttgttgccttgtgagagaagatgtgtggcaggatgctgctcttaaaacttttcctttaaattgactcaagctgttacttccttctgaatgtctgatcttataagacatagtagatgctattaagaaagatttgttttactgttgtttagcacttaaaacatatattttgtagttatatgggttagctagggtcaaacatataaaaactcaaatgctggctgggcgcagtggctcacgccggtgttcccagcactttgggaggctgaggcgggcggatcacttgaggtcaggagttgaagaccagcccggccaatatggtgaaaccccgtctctactacagatacaaaaaaacaattagccaggagtggtggcaggtacctgtgatcccggctgctcgggaggctgaggcaggagaattgcttcaacccgggaggcggaggttgtagcgagccgagatcacaccattgaactccagtctggtcaacaagagcgagactgtctcaaaataaatatattacaataaaaaataaaaactcaaatgataccagaaaaaaaaaaaaaaaaaaaaaaaaaaaaaaaaaaaaaaaa

SEQ ID NO: 572 - DNA, 1715 bp, Homo sapiens
ggcacgagatcatggccttgttttttacaggcccaacgaaggaaccacttctgggaactcattgaggaaagagagaacagcaacccctttgacaacgatgaagaagaggttgtcacctttgagctgggcgagatgttgcttatgcttttggctgcaggtggggacgacgaactaacagactctgaagatgagtgggacttgtttcatgatgagctggaagatttttatgacttggatctatagcaaccttgcgtggcgtgtgaactggtctgctgacctcagacagcagatgtcccctgtggtggtgtggcagtgcctgtgttctctcctaggcaggcctctcaactccaggtgctgtcctaagaatttttacccagggctgtttctcaacccctcacctttccctgaggagtgtgttgttttccctgttgaaaaaagttacaaaaataaatcttaaagttagttttttgtaacacgaatttaactgtcagacagttagtgtaggtgtgttgcgtcatctgttttcaaccagattgcatttatggacttttcacacactcattttgaggaccccaggttcaaaagtaaaagcagtggccctgctttggggtccaagaataggagtgatgggtgaagggacctaagctggccaatagccctctgccccagacatgggatgtggatccttgaggtttctggtgaaatctgcacatctgtgtttttatatctgttccctaccctgtaatccctaccacgtgcacttgttctgtggttttggtctcttgtttaattgcacacaagtaatactactgggtaaccagaatcaggtgtgaatgtgttgagattttttactgttttgcatgataggaaaattgagaaagaatacgtataaaagatagagaggcataacatcaatgcagagttggaagttggctcccaagggctgacatggtgtgagtgtgtgggtgtgtgataagcttctcatccctgcatagatgcagtattcttagccttagtagaaaaacctggtttagtggtttaagccttgtgtggcagatagatcttaaagggcaaagcagtatattggtagttgtcaatatagcagtgctagctctgtctatataaatagagaaatggggttagccatagaggttaaaactacctggttatcccatataataacacaaactgggtcttggatacacagttgtatttaatgttttacgatctagcctttccagtacaggcactttctgagaaacctttgtcctcacttgaggcattttgttgtcgggtttttgtgtttgtttttgtgggtatttgcctcattccacccctgagctttcaggtagacagacgtgattcaaaactctgttctaaggtgtttattgtagtggagtaatgggtttgcagtgataagtcatacttttccaccgaaagggagggcttgggaatccctgagattagctaaagttaagttgttggaagaattccttgattggaaattgtacctttgtgttttgttgctctgtttcctgaaaataactcggggatgctcctggtttgtccatctactgctttgattccttggatcccacccattctttcactttaagaaaaaacaaataattgttgcagaggtctctgtattttgcgctgcccttttgtaagaagcacttttcccaaataaaacaattaaaaaaaaaaaaaaaaaa

SEQ ID NO: 573 - DNA, 1896 bp, Homo sapiens
  misc_feature (1871)..(1871): n equals a,t,g, or c
  misc_feature (1884)..(1884): n equals a,t,g, or c
gaaaggtgtaagaaactaggaaacaatgccttgctgttgaattctgtgatgtctgccttccgggctgagttcatcgccacaaggtctatggatttcattggcatgattaaagagtgtgatgaatctggtttccccaagcatcttctttttcgatcactgggattaaacttggccttggctgatcctcctgagagtgaccgacttcagattctcaacgaagcttggaaagtcatcactaagctgaagaacccacaggactacattaattgtgccgaagtgtgggtggaatacacctgcaagcatttcacgaaacgagaggtgaataccgttttggcagatgtcatcaagcacatgactccagatcgtgcatttgaagattcctacccccagcttcagttaataattaagaaagttattgcccacttccatgacttctcagttcttttctcagtggraaaatttctgccgtttctggacatgttccaaaaagagagtgtgcgggtggaggtttgcaaatgcatcatggacgcctttatcaagcatcaacaagagcccaccaaggacccggtcatcttgaatgcccttttgcatgtttgcaagaccatgcatgactctgtgaatgcactcactcttgaggatgagaaaagaatgctgtcatatttgattaatggatttataaaaatggtttcctttggccgtgattttgaacaacagctgagtttttatgttgagtccaggtcgatgttttgcaatctggagcctgttcttgtgcagttgattcatagtgtgaaccggttggcaatggagacaagaaaagtaatgaaaggaaatcattccagaaagacagctgcatttgtccgggcctgtgttgcctactgcttcatcaccatcccctccctggcgggcatcttcacacgtctcaatctctacctgcattctggtcaggtggccttggccaaccagtgcctctcccaagctgatgcttttttcaaagccgctataagccttgttccggaagttccaaagatgattaatattgaygggaagatgcggccatcggaatcgttccttctggaattcctctgcaatttcttttctactttattaatagttccggatcatcctgaacatggggtcctgtttcttgttcgagagcttctcaacgtgatccaggactacacctgggaggacaacagcgatgagaaaatccgcatctacacctgcgtcctgcatctcctctccgccatgagccaggagacgtacctttaccacatagacaaagtggactccaacgacagcctctacgggggagactccaagttcctggcagaaaacaacaagctgtgtgagacggtgatggctcagatcctagagcatctgaaaaccctggccaaggacgaggccctgaagcgccagagctcgttgggcctttccttctttaacagcatcttggcccatggggacctacgcaacaacaagctcaaccagctctccgtcaacctgtggcacctggcacagaggcacggctgtgcagacaccaggaccatggtgaaaacgctagaatacatcaagaagcaaagcaaacaaccagacatgactcatctgacggagctggccctcagactccctctgcaaacaaggacctgacccccgggcccatccccaggctcagggactctggtgccaaatccagaaagatctgctctgctgccctgaactcttacggcaatttaggtttctcatttttcttttctttttacatatgtacaaattgttttaagctttggcctctatccaggttattctgacaatgaagaaatgggagttgtcagagcattaaaatgcaatcttcactaaaaaaaawaaaaaanaaaatgctggagnatgaggaaaaaa

SEQ ID NO: 574 - DNA, 2075 bp, Homo sapiens
ggcacgaggtgtttgatgccattttggattctcccacatgttgattgtttgtgtgtatgtatgtttggagtgaggatgtgtgaaacattgctatggttctgggagtcagagctgtacagaacggtttacaaaatgtcactccctcatcacccctacagtgcccttctcactctcttttttccaccatcttcccactcacactctagtttctagtttatccttgctgtatttcttcacaaatgagcagatacagtacatgtatatattcttttatctcccttttttgtttgtctgtttctgtgtttttttggtttgatttgttttttgaggctagaaggcagtggcgtgatctcggctcactgcagccttcacctccctggctcaagcaattctcatgctgaagcttcccgaatagctgggactacaggtgtgtgccaccacccgtggctaatttttgtatttctagtagagatggggtttcgtcatgttggccgggctggtctcaaactcctgagctcaggtgatctgcccatctcagcctcccaaagtgctgggataacacgtgtgagccactgcgcccagccttatctccttttttatacatgaatagcagcgtgctatatatatagtctttgctccatgcaatwattttawtttawttwattttttagaaaggttcytgttctgtcacccaggctggagtgcaatggtgcaatctcagctcactgcagcttcgacttcctggctcaagcaatcttcccatcttagcctcccaggtagctgggactacaggcacacatcactgcacccagctaaattttaattatttttttagggacaaagtctccttcactgtgttgcccaggatggtcttgaactcctgacctcaggtgatcctacttccttggcctcccaaagtgctgggattataggcatgggccattgcatctggcctcattgtttatttgtttgttttcaagatggggtctcactctgccacccaggctggagtgcagtggtgtaatcatggctcactgcagcctcaacctttcctgttaaaatcagcctgcaaagcctcgaaattctctcccaccttttgccattttttctttctgtggaagtcatggggttctcccctgattatttagattgctcccttatctcacataatggcctggtaataaagtaagattcaaaccatatgcagaggtagagagatgaattacagtgaatacctgtcttagtccctttgkgttgctactaaggaggacttgaggctgggtaatttgtaaagaaaagaggtttatttggctaaaagaagcatggcaccagcgcttgcttctggtgaggatcccaggcatgtccagtcatggtagaaggcaaagcggagcaggcgttagatggcaagagaggaagcaagacagggagggaggtgccaggctctttttaacaaccagctcmwcagaaactaatagagtgaaaactcactcacatccccacattccgcattaatctgctcttgaggtatctgccctcctgacccaaacacctcccatcagaccacacctccaacattgtgatcaaatttcaacctgcacttagggtcaaatacccaaactatagcgataccttgtacacttttcacccagattttaacagttcaagattttgccatgtttgctttatctgtttatttctttttctttttctgaattawttawatatatatatcaccctatgtacactaaaaactatgcatctctttaaaaatgcggctattggggccaggcacagtggctcacgcctgtggtcccagcactttgggaggctgaggcgggtggatcacctgaggtcgggagttcaagaccagcctgaccgtcatgaggaagccccttctctgctaaagatacaaaattgcgggcctggtggtaatcccagctactcgggaggctgagacaggagagtctcttcagcctggggggcggaggttgcagtgagccgaggtcgcgycgttgcactccagcctgggcgacaagagtgaaactccatctcaaaaaaaaaaaaaaaaaactcga

SEQ ID NO: 575 - DNA, 1592 bp, Homo sapiens
  misc_feature (5)..(5): n equals a,t,g, or c
  misc_feature (805)..(805): n equals a,t,g, or c
  misc_feature (857)..(857): n equals a,t,g, or c
  misc_feature (1587)..(1589): n equals a,t,g, or c
ccccnataacaatgcataagttatagattacataccattcagtgtagcatgatgaaatctcttgccaatctgttccatccacctgggatgtgaatcatccctctctctggtgtattcayactgtatgtgctagccgtctctgttacgagatcagctgtcgtggaatcagtgctagtgttcaggtaactcttatttaataattgcctcaaagtgcattgtgctgtgcctaatttataaaataaacggtatcataggtatgtatgtatacgaaaaacatagtatatgcagggttgggtactatccacagtttcaggcatctactggggggtcttggaatatatccccagaggtaaggggtgactactgtatacagccatgccaacatgctggttctcagagagttataagagagattaaaaatacatgcagctgtttgggcactttcttcccaaataaaatacccagtaaaatgtaacatactacctatagcttgataatctatctgaggatgtttatgatgtctgtctatatactttaatttggccttagcttctttgtaggtatcaagttatcacttgcaaatttattttcaaaaagcatagtttcttgtacattttagaagattagtttttcttattttgggacacctacaccaatgttttaaatgtggataaattttaatgtggaatttcttttaaaaataatcctcttcatagagcaatacaacaaaaatgtgttgtatcttggagatttacattataaatgtagtaacatttatgagcttaaatttaatgaaacctttttntttttttgagacagtcttgcactgtcgcccaggctagagtgcagggcatganctcagctcactgcaacctccgtctcccgggttcaagcaattctcgtgcctcagcctcctcagtaactggcattataggtgtgcaccaccacacctggctaatttwrgtatttwtcataaagacgggggtttcaccatgttggccaggctggtctcaaactcctgacctcaggtgatcagcctccctcggsctcccaaagtgctgggattacaggcatgagccatggtgcctggccaaacgtttttattacaaatattacattaaactaaagctcacaactgttactatgcatcaggaattaacagtcatttctcatttgtgttatycyccwattkgatamcatatagtgactatctctttatgggttaaatatcagtttcttggccagaattcaagatctgcccctaactaatcctacttctcccagtacccttacagcactcctaccctactagtaactctgatatctcatagtcctcagatttatcaagcaaacgaaactgaatgagcactactataaggtaccacaaactacaaaaggagacagttttgcccttgttgctttcagttaaattattgtgctattttttgcttaatttctaggttttttttgcgtgtttatcatgtctccgtaggtaaagtggccagaaatctttttctactttacatttcctgtaagtgctgtttgtttgaataaagttaatgtgtgaggttaaaaaaaaaaaaaagnnnaga

SEQ ID NO: 576 - DNA, 1324 bp, Homo sapiens
ggcacgagaagaacagaaaaaagctaatagaggaaggtaaatctctaaatgagttaaataaggcttaaataaagtttgcatggtatattctctaaaagttgattggcgtggaggaggctgtatgtgtttgtgtgtgtatgcacatgggcatgtctatgtgtaaggtcagaagggggagcctgaattatctactgcttttttggttaactagtcctatttttaaaactttgtctaactcccaaaacttattaatgcgacatgtagtactgaattagaagttattgttaaactcaggacagctctgtggagattcacaaagtaatttcatgaaaacttatgaggaagttgttcagtactgtcactaattaacgcgcacaaaaaaaaaacttgttgtgagtaattatgggtgatttcgctgcaaaacaaattagtatacgaattattatttttcctcaaattgtaaaggttttgtttctattaagtctctaacatttcccagattaaaaataccaaaactatttttaaacttaaggaataaagtatcaaaattaaccattaaattaatagtccttaaagttgctatgtatatggtaagtaaaacaattcctattctaagttatacatggtattaaattctaggtacagtcgcatgaagcattattgacttttattaactcagtgttttaaaaggtttcatactaatctatgaatgctctgaatgctgcagggaaaaagaagcacaatcagtatttcattatttatgaattctcaatggaattatcctatccggtccacacacataatagcattagcatttcttcttataccatgttgaaatactttaatacaaactctcaatagaagcttaaacataagtggttaagtctgttgtctagtctcattcacctgcctcaacatgctttctttcattctatttgcatacaaaatgttcttatttcagttttgtagacaggatatgagttagcatactcgtgtttgttcagctgtccatcctgcatcgttactacaatgcctttttctgccatttaatggtgtttgtatcaatgttcccatatttgctgcattttaactccataaaaaggaaatgtgatttcgtattaatagttttgttgatcaactcaatatttctgcaccaatcagcatacctatatgcatgtagtagtctgtacaattgttcaacatcaaaatacttgtttactttatgtcaaaatgtctataaaattgctggcattgttctccatttcagtctggtagaataagcgagatagaaaataaatgtgtaaatgaaaaaaaaaaaaaaaaa

SEQ ID NO: 577 - DNA, 1214 bp, Homo sapiens
ggagaatattaaaataaatgcagaatgcgttggctccgcttctggtgtgtgttctcttcatgttctcaacttggccttggacttccaaagaggtggattagtgtctccacaaagatccagcagataatcactgtttctccctttaatccttttagagacaaagtaagaataatatacaatggtaccttggccctccaggggttatttacctggtacctcagttattactaacccagctgagaagcaggaaggaaggagatgggcctctgaacagccaaaacagatgtctaaagttcaagctcacctggatcatttattcttaatttagacaacaaaatgaggtttttccagctttggcacgttagtgaggatgctatggcaggttccttgagagcagccagaagtgatagcctggtttgagctgaggggtctgtggaatactgatactcaaacacaatagctcaagaagccggatggtctgggcccacactcggttttcacagtgagtaactgctgttcgtaatgacagtgctgcattattagagagaaattaattcattcttcatataatcttgcaaaggctcttagagtatgatatcatttaggaggtattaccaccagatatgattaaactccctcagtttttctgctaagttttgttttcatatcagtgccagaatttaacagtggtctctatcctacgagggaaagatagagtagctgcctttagttagaaatatacataaccaaaagtgacagacattaggaattgttcaaaaaggatcttaacctggaacagtggaatgatttcctacaagtgcattatttgccttttgartwaaataaggtccactatcatccatctttgsggcctgatgarttttagaattcararcttttcagattttttgaaaggaaatatgtatgtatacaaaaccacacatcacataaaagccctggcagggtctaaggtaacacactatgataaagcattaatatttctgcagtgaaatgtacgaagaactaattaggacaaactctgtagtttatttaaataataaaccagtagactgggtgcggtggctcacgcctgtaatcccagcactttgggaggccaaggttggcagatcacgaggtcaagtgattgagaccattttggctgatacggtgaaaccctgtctctactaaaaaaaaaaaaaaaaaaaaactcgtag

SEQ ID NO: 578 - DNA, 1338 bp, Homo sapiens
  misc_feature (266)..(266): n equals a,t,g, or c
  misc_feature (327)..(327): n equals a,t,g, or c
gaattcggcacgagctatacagggcttatgtgcatatctggatgggggcttcccagtgccctttcgcagcggccctccggcctctacacttcctcctctgggtagcagctctccttggtctccagcagccactccagaggctgcagctcagaaatgcctaggtaccagtgaccagcctgctcctcaacctccctggccagctagtcttggttgccctgttttctgaaacgtacctccacatcamaggccactcttggctgcttranctgcactgtragtaagttgttctgcttsctgtcctgtgcacagtcgatttctgtgacgggnaaggcctgctgctgtgtgtcctcactgacactcaccacgaagagcacttctgatgtcagcagcaagcacccttcatgctcctggcctgagcccctcaccagaaccacgtccagggccatgtggacttctggtctgcccagagactgaagcattttcctgtttaaaaggagaaaagtgaggccaggggccagctgtgaaaagatggtcacttatcagtgctcattatttaccaatggggcaacctccacaagggcaaagggccctcaccaatccagttacccattttagcttgaaatgtaattgtcagttctcagactgattctgattaacagaacctgcttcctcctgggaacaaagatttcccttggttttgcttattagctccttttctccccattagaaatagcacctctaattagagtgctggttccacagggaatctcaggccctctagcaagactgggtttctctgccaatgtatgaccttccttgagtggttaggtacggaacagaggagttgtgcagccagccccaaacctggcaacagcagcctcttcctgtccctctacagtgctcttgtgctgcctgagatgccagtgccaacaatggctactcctgggctycctggaagcatggcccattagcttgagagcaagccaggagctattracatacmatatggatgtaaagttgagcacgtatctcaataattttaccagacatatttgacatggctgtttggagcctggtcagcatgtagatcacttggctgatggcgctgtttgggaagctgagaaagtccagctccatgtaaaatacctgtggtaagagaagtaagggagttttactacttgttttctggaaaacagtttcatgctgcaatgatgtcatctgttcagagccatccataaaatgttacagatccaaaatgatgtcacatctttggaagcaagcgtatagataatcattaaacattacaatgctcttaaaaaaaaaaaaaaaaaactcgag

SEQ ID NO: 579 - DNA, 1686 bp, Homo sapiens
ttaaaaacaaagaaatatagctagtaagtccaaaatgggaaacaaaatcaaatcactgtgcccagccatttgtttattttcttaggaaaaatgtctattcaaattatttgctgcctttggttcttcctttatcttattacgtgccagaaaccctccttgccccttgactttttcattcttccctcttcggaggtataatataaccattgtacagtggtttagagtttaggctactgtgatgtggcacctatttctacctcttattgtaccaactattgtatcttgggctagttacttaatcctgcagagcctcagttttcttgtctgtaaaacaaagatatcagtacttccctcacaactttgttgttttgaatgagatgttgtatgtaacatggttagaataggacctgacacccaccaggtattccataaatgttagctgctagagtattctgcacctgcccatgaaagattaactgtcacaggaattgccctcctgccataaacaatgagaaaactagataaaatatatgaaaccacagtttttgacattgaacaacaggcaacatgggactgttatctctaagagaagggaaaaaaccaaggtgatccctacagttgccctggcttactgcttaggcacagtttctaggctacagcaaggaaagagaaccaaaaactgraactggcaaccttacttgactagagmcagagatgacagtctgagaagagtaaggcaaagtgctgaaaaggctggaactctctacagagmcakccccttggttttttgtatatatagtaatctgtgcatgaatgagatgaagttcctcaaagcccaagatggaaccttcagaaagcaattgactgaataattcacaaaattcatgatttgtattcccaccagccagtgtgaagagtagtgggactaatttagtctcagaataaaaactattctggagyttccataacwaagtgtagagcaagccttggaagaagcaaactgattagcaggttacataattgtgcaccacactaacaccaaataccctttaaaggaatatttaaaggagcacccttcaaacaaaacccactacccagaaaagtcacaaccttgcatttaatcagtaattatcgagtgtgcaaaaataccaacttacatgaccagtaagctgaggagggataatcaatcaataggtaaaaaccccagaatgacggtgataatagaatagaaaagaaccagcctggcacagtggctcatgcctgtaatctcagcactttgggaggcccaggcaggtggactgcctgaggtcaggagtttgagaccagcctggccaacatgttgaaaccccgtctgcatgaaaaatagaaaaaattagccaggcatggtggcgggtgcctgtaatcccagctactcgggaagctgaggcaggagaatcacttgaacccgggaggcagagcttgcagtgagccaagatcgtgccattgcactccagcctgggcaacaagagcgaaactctgtctcaaaaaaaaaaaaaaaagaatagaaaagaaccttaagccaggtatgatggctcacacctgcaatcccagcactttgggaggctgaggcaggaggatcacttaagccgaggagttcaattccagcctaggcaatatagcaagaccccatctcaaccaaaaaaaaaa

SEQ ID NO: 580 - DNA, 1634 bp, Homo sapiens
  misc_feature (311)..(311): n equals a,t,g, or c
  misc_feature (567)..(567): n equals a,t,g, or c
tcggttgggcatgctgcttaccgcagatgatggaagcgacggcccgtacaaagacagaagcgttggtttcactgagtcagtgctgattctctcaaatagagcttgaaggataaatcttcatttttgtttcaacaaaacttcgaaacaaaatggaagaaaataatctacagtgcagtagtgtggttgacggtaattttgaagaagttcccagggagacggcaattcagtttaaacctccactatacagacagcggtaccagttcgttaaaaatttagtggatcaacatgagcctaagaaggttgcagacctngggatgtggtgatacttcactcttaaggctgctaaaagtcaatccatgcattgaattgcttgttggagtagatattaatgaggataaattacgatggagaggggattcgttagctcctttcctgggggattttctgaaayctcgggatctgaatttgaaccatcacattgtatcatggctccgttgtggagagagactctcgtttgcttgggatttggacttggataacgtgtattgaattaatagaacatttggnattcaggtggatctggccagatttcctggaagtggtatttgggtacctgtctccatccatgattgtcatcagcacaccaaactctgaattcaatcccctgtttccatcagtgaccttaagagattcagatcataaatttgagtggaccagaatggagtttcagacctgggctttatatgtggcaaatcgctatgattactctgtggagtttactggtgtcggggaaccaccagctggagctgagaatgttggatactgtacccagataggaatcttccggaaaaatggaggaaaggcaacagaatcatgtctttcagagcagcatgatcagcatgtttataaagctgtttttaccacctcatacccaagcttacagcaggaaaggttctttaaacttgtgttggttaatgaggtgtcccaacaagtggaaagcttaagagtgagccacctgccaaggcggaaagaacaggctggggaacggggtgataagyccaaagacawtggtggctcaaaggcccctgtcccatgctttggaccagtcttcacagaggttgagaaggccaagatagagaactctcccacacccttctgtgttggagataaatttttcgtacctctgcagagactccttgcgtatcccaagttgaaccgcttatgtgctratgaagagatgatgagatcagtcattgctgactcaattcctctgagcagtgatggttctgcagtggtggctgacctgcgtaattattttgatgaacagtttgagttttgaaccatgtttatttcctgaaatttcagggtctcagcgatagttgtgctcacttagaatttagttttttttgtgtaatcctaattcaagtaatgtttttaaagtttcactgcaaaagtctatgttccaagccattggacagacctgcttgagatatggccagactgcagtgagccctgagaaagatatgagggtttaaaacgggtgctttcctttgattttggacttttttgttttctcaagaataaagaagttggatgtggtaatatgttaaaaaaaaaaaaaaaaaaaactcgag

SEQ ID NO: 581 - DNA, 2012 bp, Homo sapiens
tatgcaagctcgaaattaaccctcactaaagggaacaaaagctggagctccaccgcggtggcggccgctctagaactagtggatcccccgggctgcaggaattcggcacgagtgtagagctcaaagaaatctgccaacatgtatgtggactcttgagaggtgggctttcccagtacatgctaaacagacttgttatgccaagaggaagtgaatagaaatgatagcatcaaatatccaaactgacaggaagtttcttttgcatagcatagaacatggttgtcttctgagttccactaatgttccaggatatcttggccctctgcctctggctgctccctggtgtttggcaccatagcgttgtcacttacaaccattgccttgggacacacagagtgaactgtttgagtgataagtaatttaggtagaaactttacccttaatttcaaatgataccaaacagctcattactaccccaagggacgctctccgtagcttctggattccccagtttccttctagaaacaaggactccaatagcactataaccctaaacaggccctaacccagaagaatacaccacaaaatgcgattgattttctcaaaatatcacagtcttagacactatacaaataattcaagaaaattctttctaccctgcagtggatatagtattctattatattctccagcaaaacttttaggacttttcaaactcatttctaagccaaatagtttagataaatatttacccttatatttggggggaattcaggctcaccatttgccgaggcaagcccatcaacagtctagaggcatattctgtgtcattccttcccgtctccttcatagaatactactttttccttttgtctcctggccattctccatcatctgctgattattgctaaccacaggatgctggcaaagcttacagtgataggcacatgtgttcagtgatgtccaatacactcttatcacagtggttattgcttcttactcttttcaaatgcattattctacccctcaacctatatccaatcattagaactatacctgactggagcccagaacttgggaccaatacttaattcaaatagcaggggcttgctcacaaacattaagcccaaaaagaagcacagcactttgaaaagtcaaataggcctttggtagctctgtacatttgcaattttacatttgttattagtttatagcactaataacacttcagtcgtgaatctacagtctcaatatgataagtcttagaacatgttctagaaatagtggtaccttgctgctattatacttagtaacttataccccaatataataataagtattaaatacagattgtgtatgcattctttgtgtgtatatgccaactgtactacttaacctcactgatgagcaattagaaaaatacacaaattgtcatagtgaaaataagtcttggtcaattcagatgatacgtgaacctgataaatgctctaatagatatgctattttgtcctgtattgcttgttttacagtatggtgcatgttgtttgctaagtaaaatgataataataataaagtataccaattttaaggttagaattaaaattttgcacatatgcttcttgatattctgaaatgtattctgtggcttaattatcttattcatacacatttcactttggctttttacccctaggaaataactgtccaagtatatatctcgtcttctttcttgtaactttgattaaactgcttacttcaacttacaacattgtaaagccagaatacctcattttaacagtgaaaaaaaatatgatgacctgatgtgttctcttgtatttgatttgaactacctaaataggcttaactgtaataataaatatacaattttggcaggcattttttcctttgtttggatgaacattttgttattggtccacttctaattttgtcttaaagagttataaactcagtgtcaataaaacatcttgttatataaaaaaaaaaaaaaaaaaaaa

SEQ ID NO: 582 - DNA, 1322 bp, Homo sapiens
ggcacgaggtggggctagctggaacttagtttccaactgctggaatggattatttccttctggctagggctgatccaaatgctcttccatgggaacctgctgaattctgtcctgtgttgcttttggctgtgacagggcagcactgagttccaatgcaaagtttcacaattacttcactcttcctcctccaaacacacggactctctcagcaccacaaggtactgctggagaatggcggatgagtggtgtagacaactcaagaccatcttttctacgctcttcagtgcctctttccttggtaggatgttaaaactaagtactgtgatcactcacctgatttttggttcttatgaaggtgttttcttgtgtggatagttgttcaattttggtgttcctgcagtagagacaatcaatggagggttctgttcaactctcttgggccaccttctccaatcctgttctacttaatgtatcttggcaaactttccatatcagtacagagaaagcttcttcattctgactgctgcatagtatcccagtgcttgaaggtagcatgattaatttagccatccaattcataggcacaggttatttgggttgctttctattacttgtaattacaaacagtgctattctgttatatcttgaacatatatttttgtgcacattatagaaaatgtcaaagtgattttcatgtaggttgttccagtgaatgagagttcttattttgtcacatacttggcaaccctgagattatcaatacgatttaaatctgtctgccaaacagataggtttgtaaaaatgtactttattgttttaatgtgaatttctttgattataagtaacaattaagaatatttccaaatatttgtgaaccatttttctttttttgtgagctgccttttcttgtcctttgttcattttaaatcgggttgttttagcctcttttaaattgatttttaaaacttgtatatattaatgatatgatttagttgtgtccccactcaaatctcatgtcgaattgtaatccccaatgttggaggaggggtctggtgggaggtgattggatcataggggcagatttcccccttgctgttctcatgctagtgaatgagttctcacaagatttggttgtttaaaagtgtagcacctcccactttgctctcttcctccttctctggccatgtaagatgtgcctgcttcccctttgccttctgccatgattctaagtctcctgaggcctccccagccatgcttcctgtacagcctgtaaactgtgagccaattaaacctcttttatttataaaaaaaaaaaaaaaaaa

SEQ ID NO: 583 - DNA, 941 bp, Homo sapiens
ggcacgaggaaaaacagaaagagcatctggggagcgagtgaaaattccttaggtgattcctaagatttccttgggtatctggtttttgttttcatatttgagtgtgtgcatgtgtgcatgactttaatgacttttttaatggggtgggaggtggctggggtgctggggttgaaggaagtttgggttgatttttgtggtgttttgtttaatagagaattttttttttcctgttcccctgtcagctggtctgacagatttaagaactctcattcttaaaagactttggacttaaatctagcatttagactaggactgttctactgtgaagaaagttctgtctcctttagcccggtttgtttctccctgctcaggtctagaatcccaagcagtgttcttttctggtgaacactgtgagccgcagatgtgactttttttttaaagtcatctcttcagcaatccagaggttccttgacctcattatttgtcctatctctcccttatagtcctaagccaagacatttgacctttgacatttgacctttgcagtgtcatgtgagggcgtcagtatagaggcctttgcatctgggcctggcacccgctctctgcctctggaggctaaaccctgtctggatttctcttgggatctaacgtgggatcttctggacagacaaccgtgacatcagcagtgctggtgctgctgtgtgtggactgaacacctgcactttgtcagaggacacgctgcatgggccccgcttgcggttcattcaggcctgctgcaggagctctgagaacaagaaagagtggacacccgttcccctgcatcatctgtattgcgtgctatttcagagtggggaagtgataaactatttgccttctggagctctttgtgaaaaattaaaaaaaaacttagctcaaaaaaaaaaaaaaaaaaaaaaaaaaaa

SEQ ID NO: 584 - DNA, 1874 bp, Homo sapiens
gatgacttatatttcaggcctttgtttgtttcctgttaggtctcattttttgatatgctctttctcattagagaagataagatgttttatttttattagaaatcaggaatcattttaactcacattaccatgatctggagcattgttacatgttggatttgtgtgtgcactggtgtgtttatgcaagggagactgaattcacaagtcagaggtgaatctgagcctcattaggcagaatattcaacccagcagaaaattgaatttgtcgcacaaagcacttaaacctacaacccattgcaagaattgaaatcagatcagggataagtgatatcagaatctgggaaagccggaggtgagggtggaggggaagaagctgaaagtctcaaagcaagcatcgttttcaccttggtggggtgaaatttcaggacaggattttacctgaatgccacagctgaggaggaaggtcagttgcagctttaggcgatttaccagctttgagaaactagtcagtttaggaaatgattagggtattaaagctaaggtttaagataaagaaagaaaaggccacctagttgagatccaactggttggacttgggtttatgggaaagagagacagtggttatggttgctgtgggacaaggtctggaaacagattcctgagggacatagcagctggcagtgggcatagatggaaatcccaaatgcctctttcttctgacccctctgtcttaaacagggtagtgtggctgattttaggtcatgtgcctgatagcagtgcaagagaatatacaagaggtaattgggagataaaactctggtgcagttgttactgggggcactcatagtgtacacaggagaaaaatgtcatggaatgtttcattagctgcatccttggattagagaaaacacctttccagagcctccttcctcctgcccgttaggttacctgggcatcgactcccctgtctttgagatagtcagctccctgaggccaaggatgctggcttgagttggtttcttcacagcatttaacatagtgcctgacacataatagtctctctatttatgctaaataaatacaatcctcaagacttgacatcagctctggaatagtagagtgggaatgctgcagaaaagatccagagaggaaagaaggcaccgagatgttaaaatgcggcttgttgacagaatacttgggattgtgcagtgctgctatttctatttttcacttttggcaggtatttattatttcactgataggagacatcaagttccagcattttaatcctgtacttgaaacctacatttacaagcacttcagcgccactttggcatatgtgtaagtatgatctgaaggaactacatgttgttggatctttggatttgtactcttaggactggattgttgagaaacgagacggacctattactattcagtaaatacgcctgttaaggcagaactcttattctaagcttccgggtggaaaaagggaaccatctaagtattctaactctgaaagggggctaagatcagggccttcattctggatcaggcgaaatttccttaaggatccagaataggccaggcgtggttgctcatacctgcaattccagcactttgtggggaggattgcttgaggccaggaattcaagaccagcctaggcaacataacaagaacctatctttacaaaaaattaaaaagttagccaggtgtggtgacacacacctgtagtcctagctactcgagaggcttaggtgagaggattgcttaagcccagggaagtcaaggctgcagtgagctgtgatcatgccattgcactccagcctaagtgacagagcaagacttagtatctaaaaaaaaaaaaaaaaaa

SEQ ID NO: 585 - DNA, 643 bp, Homo sapiens
ggcacgagccccagaccccttacaaactctgtacctctcggtgcgcggcagcctcttgctgtagttcttcttttctggatatgactgtcagtttcgtcatgagatttcttgctctcatttcgaactctttctttcttccactttctttgggggcgacccccgatccatgccaggtcttcctgtgaagaccgttccaacctcgtttccatttcttgaatgttgagtattacaacatcactgcgctagggtgcttcatggtgctgttctcgaagaggccagttgggctgaatctccttcctcccactggctcctgatatcttgctgtattttgtcttctttctgatttttccctaggggtttggggtgggtgacttaggggcggcttttgtgttctccctctctctctctttcttttctgtatgtatgtatggactggttaaagtgagtttgggcagctgactttatggtatgggttggctgacttttgttcaacattaaagacaaaccaacaaattgtacagctgcacacagaacacctttgagtgtgaacttgaatggcaactagaggcttactttttgaacttcaggtatgtaactcaaaagtaaataaaaacactattttttcaaaaaaaaaaaaaaaaaa

SEQ ID NO: 586 - DNA, 1669 bp, Homo sapiens
  misc_feature (1601)..(1601): n equals a,t,g, or c
aggaaccacttgagcccggcaggtagaggttgcagtgagctgagatcacatcactgtactccagcttgggcgacagagcgagactccatctcgaaaagaaaaagaaaaagaaaagtctgtttcatcagaacaggtttctgtgttgacaggatttacctttcaggccattaattgtgttgctctgctctcttcctgacttcatattgcttcagaagagatgtctgcttccattctttgttcctttgtacatagtgtttttttcatctctggctgcttttcagtggtttttaggaaaatgattatcacattatttatgtagttttttgcacattattttgctggagttgtttgaacttcttggctctgtgtgtttatactgtttattgaattggataaacagttgtacacccatacagtgaatactgaacaacaaaaagtaatgaagtatttatacacgcaacaacacgggtgaactgtaaatcatgacctgagttaaagaagcccgggaaaataggtgccatatggattcatttatataaaacttgaagatgcaaactgatctacagacaaagatttgtggttgcctggggatggtggacagatggatcgatcacaaaggggcatagagacttttggtgaaaaaggaaatgtttttatctcgattgtcatgttttcactgacaaatatgtcagaactcaacaaattatatattataaatatgtgcaggttattcttcgccaattatgtatgtcaataaagttgttaaaggataaaaaatgaagggtttggcctgcacttttgggaatctgtagttctcttagtgacccatgtatacaaaaattcttaagtgtaggttatggtgtttttaacaatttataatactgatgaagtttaattagcaattcagaagtacactttaattaatttgatgcatacaaaagtgtgcaattataggtctaatgctatgctattgattgttcagttttgctgtagtgaatgtgaatttttattttagagatgaggtctcactctgtcgctcaggctggagtgcagtggtgccatcagagcttactcaacctcccaggtcaagtgatccttccgcctgagcctcccaagtagctgagactacaggctgaatgtgaatgttgaatgaatgaatgaattggtgttaaacaggctaaactgtctcagaacttgtggattgtgctgaaagcagtatggcctctggcagtgaagtaaaccttggcccagatactgccatgaggtggctatctagctgaacattttagtacaattctgagacttgcatatttattctctcatttcctagaaaataccggccaaaaaaagtatgaggtctataaggaggaggaaaaacatgaagtttaacatgcctatagaaaaatttacatcccatgaatgtatataatttgctgctgttttacacagcaaaagcacccctgtgactagcacccagatcaagaaatagaacaccacctagctctggcagcttttaacaattttattctggccgggcgtggtggctcacacctgtgatcccagtgctttgcgaggctgtggtgggaagattgcttgcgttncaggagttcaagaccagcctgggtaacatagcaagacctcgtctctactgaaaaaaaaaaaaaaaaaa

SEQ ID NO: 587 - DNA, 948 bp, Homo sapiens
ggcacgaggcggcctgggagtcagcggcccgagcgggaagcgccgggcgagcccactgtgcggccgtcgtgggggaagcgaaggttcctgattccacctacctcctaagtgaaggcttccgtccctggagaggaggcggcgccctgtatcggccttcgtcctccgcgggagctgcggcgccaagatgagtggagaggagaacccagccagcaagcccacgccggtgcaggacgtacagggcgacgggcgctggatgtccctgcaccatcggttcgtggctgacagcaaagataaggaacccgaagtcgtcttcatcggggactccttggtccagctcatgcaccagtgcgagatctggcgcgagctcttctctcctctgcatgcacttaactttggcattggtggtgacggcacacagcatgtactgtggcggctggagaatggggagctggaacacatccggcccaagattgtggtggtctgggtgggcaccaacaaccacggacacacagcagagcaggtgactggtggcatcaaggccattgtgcaactggtgaatgagcgacagccccaggcccgggttgtggtgctgggcctgcttccgcgaggccaacatcccaacccacttcgggagaagaaccgacaggtgaacgagctggtacgggcggcactggctggccaccctcgggcccacttcctagatgccgaccctggctttgtgcactcagatggcaccatcagccatcatgacatgtatgattacctgcatctgagccgcctgggctacacacctgtttgccgggctctgcactccctgcttctgcgtctgctggcccaagaccagggccaaggtgctcccctgctggagcccgcaccctaagcatcctgctgccttcccacaacattaaactctccttcctcagaaaaaaaaaaaaaaaaaactcgtag

SEQ ID NO: 588 - DNA, 2007 bp, Homo sapiens
ggcacgagctaaccttagaggtatcccaattggaatgttagttctgggaaacaaagtcaaagcagtgggagaggtaaccaattctgaagggacatgggtgcaactggatcagaacagcatggtagagttctgtgagagtgatgaaggagaggcatggtccttagctagagacagaggcggaaaccagtacctccgacatgaagatgaacaagctcttctggatcagaattctcaaactcctcctccaagccctttctcagtgcaagcttttaataaagggcaagttgcagtgcccaaggatttgattatggactcggaaatagcaaagttttgactgttttacccactgcaggtgaccaactgagtgccatattgaattccattcagtcacgacccaatctcccagctccttccatctttgatcaagctgcaaaacctccctcttccctagtacacagcccatttgtgttcggacagcccctttccttccagcagcctcagcttcagagtgatcgaggaaacatctcaacatcttctaaaccagcctctacatcaggaaaatcagagctgtcctctaaacacagcagatcgcttaaacctgatggacgtatgagccggactactgctgatcagaagaagccaaggggcacagaaagtttatctgctagtgaatccctcatcttaaaatctgatgctgcaaagttgaggtcagattcccacagtaggtcattatcccccaaccataacaccttgcagacattgaaatctgatgggaggatgccttctagctccagagctgaatccccaggaccaggttctcggttgtcatctcctaagccaaagactctcccagccaataggtctagcccatcgggtgctagttctccacgctcctcctcaccacatgataaaaatctacctcaaaaaagtactgctcctgttaagacaaagcttgatcctcctcgggaacgttctaaatcagactcttacacacttgatccagataccctccgcaagaagaaaatgcccctcacagaacctttgagaggacggtcaacgtcaccaaaaccaaaatcagtaccaaaggattctacagattcccctggatctgaaaatagagctcctctccccatgtggtacaggaaaacctccacagtgaggtggtcgaagtctgcacctcaagtactttaaaaacaaatagtctaacagacagcacctgcgatgacagcagtgaatttaagagtgtggatgaaggttcaaataaagttcattttagcattggaaaagcaccactgaaagatgaacaggaaatgagagcatctcccaaaataagtcgaaaatgtgctaatagacacaccaggcccaaaaaagaaaaatcgagttttcttttcaaaggagatggatccaagcctttagagccagccaagcaagccatgtctccttctgtggccgaatgtgccagagctgtgtttgcttccttcctctggcatgaaggcatagtacatgatgcaatggcttgttcttctttcctaaagtttcatcctgaactttccaaagaacatgctcctataaggagtagtttaaatagccaacaacctacagaggaaaaagaaaccaagttaaaaaatagacattcattagaaatatcatctgcactgaatatgtttaatattgcaccccatggaccagatatatctaagatgggtagcatcaacaaaaacaaggtattgtctatgcttaaggaaccacctctgcatgaaaaatgtgaggatgggaaaaccgagaccacttttgaaatgtccatgcataacacaatgaagtctaagtctcctcttcccttaactttacaacatttagtggctttttgggaagacatctctttggctactatcaaagctgcttcccagaatatgatttttccaagtcctggttcctgtgcagttcttaaaaagaaagagtgtgagaaagagaataagaagtccaaaaaggaaaaaaaaaaaaaaaaaa

SEQ ID NO: 589 - DNA, 1687 bp, Homo sapiens
  misc_feature (380)..(380): n equals a,t,g, or c
gtttaagaaaatgtttggatggggcgattttcattccaacatcaaaacagtgaagctgaacctgttgataactgggaaaattgtagatcatggcaatgggacatttagtgtttatttcaggcataattcaactggtcaagggaatgtatctgtcagcttggtaccccctacaaaaatcgtggaatttgacttggcacaacaaaccgtgattgatgccaaagattccaagtcttttaattgtcgcattgaatatgaaaaggttgacaaggctaccaagaacacactctgcaactatgacccttcaaaaacctgttaccaggagcaaacccaaagtcatgtatcctggctctgctccaagccctttaaggtgatctgtattnacattcctttatagtacagattataaactggtacagaaagtgtgccctgactacaactaccayagtgacacaccttactttccctcgggatgaaggtgaacatgggggtgagactgaagcctgaggaattaaaggtcatatgacagggctgttacctcaaagaagaaggtcacatctgttgcctggaatgtgtctacactgctgctcttgtyaactggctgcaaaatmcactagtggaaamcactctgatgtaatttctgcccagtcagcttcatccctcagtataattgtaaatcatcacagattttgaattcacacctgaagacatgctctcacatatagaggtacacaaacacaccgtcatgcacatttcagcttgcgtctatcatgattcctgttgagagggctttcattgtctgactcataatggttcaggatcaactatcatcaaacggaaggattaactagacagagaatgtttctaacagttgctgttatggaaatctcttttaaagtcttgagtacatgctaatcaataatctycactcatgcattcctactgcttggagtagctgtactggtaaatactactgtaggagtatctgcttgttaaaatggaaaaatgtgtctttagagctcagtattctttattttacaaacacaacaaaatgtagtaacttttttccagcatacagtaggcacattcaaagtggtccaagatggctcttttttctttgaaaggggcctgttctcagtaaagatgagcaaacatttggaatttacatgtgggcagacattgggataacaactttcatcaccaatcattggacttttgtgaagtcgacaccagctaaggctgcttaaaataagttctgatcattatataagaagggaaatgcctggcagacaccatgtaagttataagtgtctgtcttatctttactacacatattgtaacaaattcaatatcctagtcttcatttgtatgaatggtttgtattgtacatagtttaaccaagtgttatttgagctgcttattaatattaacttgtacttgtctctctgcttgttattggttaagaaaaaaggatatgaggaattcattttatcaatgtagctgtgaaggccattaaaaagacaaacttaatgtacagagcatttattcagatcaagtattgttgaaagctatacatatacaacattacagtctgtctgtatttagatattttatttctggaaaaaatgaaatgtacataaaaataaaacacttaaagttgagtttcaaaaaaaaaaaaaaaaaactcgag

SEQ ID NO: 590 - DNA, 952 bp, Homo sapiens
ggcacgagcttattttctggtggaggagcttagtaagtggtgctacaattgctgtgcaaagaaattccagaggggagaagaatgtaaaagtttggtggtgggtggcttggcattgcccctttttcccaccgattcggtggctggtgaaggtgggagatgtgaactccaattaagggactggagagaggtgaagaattttgcaggtgggagatttggatttgaatgtggacttgtaaatgacttgaccttgccatctgtgttcaaggtcacggtttgctgtggggttcctgggagagcttactcaccccggagtcttttctttctcttgctccaagaagagccctgttggtgctttaccaccgcttggagtctcccgaggacacaaacaggcagagagggacgtgtagggagagttctttcctgttttctgtgctttcctttttacaggactcccggaaggccactcatggccatgccaggagctttctcagaaacagtcataaacgatctcttgagtctctttcttgtcctcccagctgagctttcttattccaccctttctggtgtctataggaatgcatgagagacctggacgtttttctgctctcttctggcctccatggagccatgggctcggctcggcggctcctcacctcacaatttatttcctcctcccgtgccagcccttcttttgtgtctgaaaccggttttaaaatgtgactctcccagagaagaagccgctggctgtatgaaacttgacggcgcttttgtaaggtgccacccccaaactttaaggtagctaaaccaatttttaaaagattcaatggcttgttcatcctccagatgtagctattgatgtacacttcgcaacggagtgtctgaaattgtggtggtcctgatttataggatttcataattaaaatgtctgctgaataaaaaaaaaaaaaaaaaa

SEQ ID NO: 591 - DNA, 1410 bp, Homo sapiens
agggaaaaataacacagctactcctcactgcaaaaacatatccatgcgtagaatcaacaactccagtcatgggaccaggaggagctctgggacgcagacacattccttggatgttgattttttttatgatctagtaaaggaataggtaaagtctttgatgtcagtgaagtggcaacatagccaaaaagttgggtaccttttaggaaatgatgttgtaagtctccttaatgtatcctgaggtaagtttcctactggcagcagattttgtaagaattacttttaagaatttcattctttttgtatggtcatggagctccaaccatttttaataggaaagtcttttgtaaattgttgtcgttttaatgtcatttctgtctttataacttgatcaagaatgattggaaggcaaacaggtttacaaatcaattctgtgacttttaaaaagttgacaatgttgtcagatttaaaccagtgtggctagtaaaaagcagctcactcaatgtgggtggctccctattcctttacgctccccctatccctaccccacaagcctttcgattataaaatactaccaatcttgttataagattactgtggagtagtcaagtactccccgggccttctgagctggtggaatattttatttcagactgaaaacagagagcactctccttgggaagggaaagcggagcttgctgagtgagagatggagcctcatggtgtacaactgagggtagttaactcatcacttctcccaagcactcgatcccagcttcacccactggtgttgctttgcttgaactgttcaagccttttatagccttaccataagtatttagatatggtgtccttttctgtttttggggggggagttttgttgtgtttttttaaagtaagtgcttaagtattaactttgggttgtcccctctgtatgtttcgaaggggttttggttctttttgcttctgttttcttaaacatgttttccactcccacttgggcattttggaagctggtcagctagcaggttttctgggatgtcgggagacctagatgaccttatcgggtgcaatactagctaaggtaaagctagaaacctacactgtcactttactgagatttctgagtatacttttcatattgccttaatgtagcagtaatgtgtttatgcatttgtttctttgcacagacattttgtcaaatattaaaactctacttttttatggcacatattagcatataagcctttattccaagaggtatttattttttcacttgtaaaaaaataatgtttccacgtaaagaactctgttatatcctagaggactctgtcttttatattcgggataataaagactttaaagcaaaaaaaaaaaaaaaaaaaaaaaaaaaaaaaaaaaaaaaaaaaaagg

SEQ ID NO: 592 - DNA, 1759 bp, Homo sapiens
ggcacgagcacaagccctgtgagaggtgtgtttggaatcacttggtatccaaatcacatgtcatccctaggagcaaggagaccggttggatttggggctggtctggaatgaagaagcatctctcagcttccgaaggctgcatggctcacggcagtatctcaatcatgccctgcccgtttgcacatttggtcctgttggtagttacctctctggtgactggcaaagtcagcaaggatattggggtggagcaccctggctaagcaccctcttgattatagagctatggagtagaagacagatggagaatgagaggcctgtgagaacaatcagtcagttgccatctttcagagctgctcgagttcaaaagtgtgtcatacagggtattttaccattgctacctttaagggattcaggtgggaacctaggctgtggcttcacataatggaacttgggtgccatcctaccctgtgatgttgagctggccagcactggtgtaggaacctcaaggactctgtgcttctctggtttggggcctaggataaacacaggccctgcttgccccttggttctaggacacatcttcccatgccagcaaagttaatgaaccagtctacaagataactgttgaaagaattcttagagaaacaacccacaggaggggagccatgtcagagcccaagaaaaccatcccatcctgagctctgccttctgtgctgctctctgcatcctattctctgtcggaacaggaccccactgtgtccttgctcttctaggcagagttgtgggagagtgctaaatgcttttgagtggggcagcctgtggaatgggatctcatactggctccttagaccttgggcccatgaactcagtatggagcaggacctgcgatgttctgatggattatacccacagtgtattttggcacatctgccaaaagctacaaacaacccccaacaactacacactatatcttgtgagaagtgtcctacccaggagtcctgaatgtgatctgagtatgctctaaggcagccccaggaaaagcaattcagtccctctctctttgcctttagacctgcaggctgggacaatgaaaagaaaatagctattttacatgaaaattttacaaccgtgaagccggaagatgcatatgaagactttattgtgaaacctcccgtgagaaagctggtccacgacaaagagttggcagcagaagatgagcaggtgttcctaatgaagcaacagtcactccttgccaagcaaccagccactcccacgagagtttttgaatttcctgcaagaggaccttctggttctccaaggacccagggtcggggagggccagccagtgtgcctagttcttccccaggcacgtcagtaaaaaacccggacccaaacatcaaaaataatgcagcaagtgaaggggtgttgcccagcttcttcaacagtctgttgagtaaaaagacagtctctcctggaagtcctggtgctggtggggtgcagagcacagccaagaagtcaggacaaaagactgtgttgtcaaatgttcaggaagaactggatagaatgactcgaaagccagactctatggtaacaaactcttcaacagaaaatgaagcctgaacctccttaaaaagtgcatatgtcgaatgaccaaataactatgtatattgatctgctaagaccaggatttttctgatatggcacatgctatcagttttttggggcaggggagatgaactttaaaaaaaaaaaaaaaaaa

SEQ ID NO: 593 - DNA, 810 bp, Homo sapiens
gattactaacatttttaatatgacacaaattctgttttctgttttgaagattagcaccacagacaggtgatcattaatgaaatatggcccttaaaatacacattacaaaagagaaactgatggtaaaattgctggtgaagttaacttttatcatttctccactaattaaaagttcagattctgggatcacatctctaagctgttcatatcaaagagctattttttaaagatcctgattataggcaacaaaagcaaaaataaacaaataggattacatcaaaactgaaaagcctctgcacagcaaaggaaacaacagaatgaagagccaacctacataatgggagaaaatatttgtaaattatacatctgataaggggttaataatcaaaatatataaggaactcaaagaatgcaatagtaagaaaacaacccaattaaaaaacaggcaattccagcctgggcaacatggtgaaaccctgtctctacaaaaaatagataaaattggccgggcacggtgctcacgcctgtaaccccagcactttggttggccgaggtgggtggatcgcctgaggtcaggagatcgagaccagcctggccaacatggcaaaaccccacctgtactgraaatacaaaaaattagccgggtgcagtggtgggcgcctgtaatcccagctactcgggaggctaaggcaggagaattgcttgaacccgggaggcggaggttgccatgagccgagtttgcaccattgcactccagcctgggcaacaagagcaaaattctgtttcaaaaaaaaaaaaaaaaaactcgag

SEQ ID NO: 594 - DNA, 1675 bp, Homo sapiens
  misc_feature (465)..(465): n equals a,t,g, or c
caccgcggtgcggcgcgcctctagaactagtggatcccccgggctgcaggaattcggcacgagctgaaataagtattaatacctaacatttaatattaattctgtcctatgtgcacttacaaatacgtcatataagtatataaattgactttacctattatatgcagaaattgaaggggggaatttctgtgtttctagctttcttgttaatgtgaagggtggggcattttatgttttttcaggattgccttattcaatgaagcaagctgggtttcctttgggaatattgcttttattctgggtttcatatgttacaggtaaaatactatataatttcttatttctgcaacttcaactgtgcaataactacacacatacacacacacacacacacacacatgctgcaactgaatttcctagttaattaaaaagtgcatcaaagaatcctaaagaatttaagcatynatgcctgaggasatycacttttcttactaatcctttaaacagattwgaaaaagtagaaaagcattatatattaccaagcctaaatccttttcatgtgcctttttcactttttgcagaaagtagtagatggggaagtcattttaaagcttcattaaggctaagagacgactgtgctctgaaagtgcagatagcagggcttcgtgggcaggtgcgtgtgaatgagcaaccttattcagctgttgwttgtggaggtagaaatgaagctctggtgatcaaccagcagggctcatcaagcctctccgcctggcttatgcctgcccaaactcgctgcctgctactgtctttaaatgcagcaataagttgcttctgtatcacatcttctcttctgcttccccttcttcatgtaaatagttcattcacacccacgttttgtcactctcccatttaaatgcaggctttacaamtcataatcatctcctctttttgttgtcctcgtccccgccttgtcatcccaccatctcaccttatgacaaacatggcgtctcctctaccttaggatcactgtgaaagaggtggcaatgatcaaaaacagacaccactcacaggagttgctgctgtggtggattagatgcccttttaccagctagtgcaaaacacctcagctgccctttgctctggagtgttgccctgggcctccagggggtctccttgcytccacgggaccaatgtgtggtacagttggagctccagggctccaccactgcagtacttgctgaactctttcccctgccctgtcctctcattccccttcttctggagcatttcatccacagaccccttgcccaagaatgtctgtctcagctctgcttctagagatcctccaagatgccatccctcgtaaaacctcaggcttccaagacctgcccaacactcagctattttttctcaggctgacgaagacagagtaaagcatgaaatagttttcaaattcaaagctagagaggcattgagctccctgccttcttcctaccacctccacccttaagacctaaactgcttctagttattacagctcttaatttgtaacttaggacccataaattagcagcatgagacctaagtgtgcttattaagagttgctggtgtttaaaaattgcagtctacttattggggcatttattacactaaaaaaaaaaaaaaaaaactcgag

SEQ ID NO: 595 - DNA, 1205 bp, Homo sapiens
tgcaggaattcggcacgagcccgagtggtcgccaacagtggctttgatgtgctttgccatgccctggagtcatacaccaccctgccctaccacctgcggacccctgcccttcaaatcccatcacacggcctgcgtaccagggcagcaacccaatcagtgacatttgggctatccacgcgctgcggatcgtggctaagtatctgaagagggctgtcagaaatcccgatgatcttgaagcaaggtctcatatgcacttggcaagtgcttttgctggcatcggctttggaaatgctggtgttcatctgtgccatggaatgtcttacccaatttcaggtttagtgaagatgtataaagcaaaggattacaatgtggatcacccactggtgccccatggcctttctgtggtgctcacgtccccagcggtgttcactttctcggcccagatgtttccagagcgacacctggagatggcagaaatactgggagccgacacccgcactgccaggatccaagatgcagggctggtgttggcagacacgctccggaaattcttattcgatctggatgttgatgatggcctagcagctgttggttactccaaagctgatatccccgcactagtgaaaggaacgctgccccaggaaagggtcaccaagcttgcaccccgtccccagtcagaagaggatctggctgctctgtttgaagcttcaatgaaactgtattaattgtcattttaactgaaagaattaccgctggccattgtagtgctgagagcaagagctgatctagctagggctttgtcttttcatctttgtgcataacttacctgttaccagtataggtgggatatacatttatcttgcaggaaattccccaaagctcagagtccagttccttccataaaacaggctggacaaatgaccactatgttagacccccaggctcgacttcaggggtcagtgttcctgtcccaaaccccacacagaatactctgcctctgcttcatgtagcaaatgagcaaaaactcagtatctatcaaaagtgtaaattatatttcctatgcctagtaattcacttcatgtctaaaaatttatctgatagaaacactagcaccagtacatacagaagcatggcaaggatgtttctggcagcacttttctaataataaaagatttgaaacaaaaaaaaaaaaaaaaaaactcgag

SEQ ID NO: 596 - DNA, 484 bp, Homo sapiens
ggcacgaggggagacaataatgagggactttcagttttactttacataattttcttttaagtattggaatttaggtgatttttcctttggggttttctgtattttccaatcacaataaataaaataagttataaatatttgttgcatgaatgaaatgtataaacccatttatgtatgtatttttttaaaattagtatattattaagtctatacaatattagtatattgttatgtatgtataagctttttaacatgaagtttgcagaatatagtacttcttccaaactctatgacatggggggaactgaagtatggggatatcttgtaccagtgtaagaattcaagaagagaccgtgtgtggtggctcatgcctatagtcccagcactttgggatgccaaagcaggatgatctcttggagctaggcgttcaagaccagcctgggcaacatatcaagaccccatctctaaaaaaaaaaaaaaaaaa

SEQ ID NO: 597 - DNA, 1069 bp, Homo sapiens
gtttaaaagttaccttgatgacagagtcattgctatacttgcaacttattttattgtgggggatcagtgaaataccctctagtaatactgagatgtatagaaaatgcccctaaactaaatgcccccactgttttaagttaaactgtattgttggcctgggagcaagggtaatgggtagtttttccttgtagttaagctttgagctgtcatttcttattttagttattgtactgcctatgaaggctcttctaatttttaaattcttaactcgttttggtgaagtagatgaacaaccaagtttattgaagctttaatcatagttgaacatgtaattgagtcactgggatctgcataaaagtttgcagatyctgatatacagtctttataggagttagaatatgaagattgtagtagctattttcatcacccatcagacttatatgtttattcagtagagctgaaattattaaatgtatgaatattactggctttttcctgaccattcacacttcatggtgatttcacaagagaaggtatatgattctggtttccttgcagacttgttttttataatcacrtttattgaggcttaattttcatacaataaattttatatatattttaagtttacaatttgccactcagatcaagatacggaaaattctcatctattggagaaagtttcctcatacttctttgcagccatcctcccsracctgccacttggcccaggcaatcactaatctaatttttaacactacagattagtttgccacttcatctaaatagaaacatattttatgtagttgtttgtctggcttttttccttcaacaatgtctgccaataatattgcatttattgaaagttacttcatttttattgctgagtagtaagtagtctattgtgtaatggataccacagtttatccattcgtctgtggatggacatttggggtttttacgcttttaagttgcaatgaacatgcatacaagtattgctgtgatcattgtttttccttctcttgaataaataactagaagtggaaaaaaaaaaaaaaaaaaactcgag

SEQ ID NO: 598 - DNA, 1475 bp, Homo sapiens
cacaggccaggctccaccctctagtaaaggggaagaggctgctggttatgcccagragtctcaaagggaggaggccagctgagtaggcagcctggtgagggggggcaggggatgggcaggagggtgggagagtggatgaggggcttctcactgtacatagagtcactggcatgatgccctcgctcccccatgcccccacatcccagtggggcataactaggggtcacgggagagcagtctcgtctcctgtgtgtatgtgtgtgagtggtgggcaggccagtggcagggccggccccagcccctgcatggattccttgtggcttttctgtcttttgctagcttcaccagtttctgttccttgtgggatgctgctctagggatactcagggggctcctgctctccttccccttcccttcttgcctcaccattcccctaggcaggccctgcaggtcccacactctcccaggccctaaacttgggcggccttgccctgagagctggtcctccagcgaggccctgtcagcggtcttaggctcctgcacatgaaggtgtgtgcctgtggtgtgtgggctgctctaggagcagatacaggctggtatagaggatgcagaaaggtagggcagtatgtttaagtccagacttggcacatggctagggatactgctcactagctgtggaggtcctcaggagtggagagaatgagtaggagggcagaagcttccatttttgtccttcctaagaccctgttatttgtgttatttcctgcctttccgagtcctgcagtgggctgccctgtaccctgaacctcatgagcctctaagggaaaggaggaacaattaggacgtggcaatgagacctggcagggcagagtacaagcccagcacccagtgtcccagccttactgggtccttaccctgggccaaacagggagggctgatacctccttgctcttcctagatgcccacctcctacaatctcagcccacaagtcctctccaccctagggggcttgctgcatggcaataactcataatctgatttggaggtttgccctttacaggggcagattttctgctcagttcaacaatgaaatgaagaggaactccctctttctacagctcacttctatcagaggcccaggtgcctcagagccacattgagttgctttttctgggatgaggaagtagggttaaactccccagtttcctgagggaggctcctgacaggtgccctttgtcagaccctaccacagcctggataggcagccacattggtcctcgcccttgctcggcactccgtggtggtcctgcccttctccctgcatgcctgtgggtctgctctggtgtgtgaaggtcggtgggttaactgtgtgcctactgaacctggcaaataaacatcaccctgcaaagccaaaaaaaaaaaaaaaaaaaaaaaaaaaaaaaaaaaaaaaaaaaaaaaaaaaaaaaaaaaaaaaa

SEQ ID NO: 599 - DNA, 1475 bp, Homo sapiens
  misc_feature (1292)..(1292): n equals a,t,g, or c
cacaggccaggctccaccctctagtaaaggggaagaggctgctggttatgcccagragtctcaaagggaggaggccagctgagtaggcagcctggtgagggggggcaggggatgggcaggagggtgggagagtggatgaggggcttctcactgtacatagagtcactggcatgatgccctcgctcccccatgcccccacatcccagtggggcataactaggggtcacgggagagcagtctcgtctcctgtgtgtatgtgtgtgagtggtgggcaggccagtggcagggccggccccagcccctgcatggattccttgtggcttttctgtcttttgctagcttcaccagtttctgttccttgtgggatgctgctctagggatactcagggggctcctgctctccttccccttcccttcttgcctcaccattcccctaggcaggccctgcaggtcccacactctcccaggccctaaacttgggcggccttgccctgagagctggtcctccagcgaggccctgtcagcggtcttaggctcctgcacatgaaggtgtgtgcctgtggtgtgtgggctgctctaggagcagatacaggctggtatagaggatgcagaaaggtagggcagtatgtttaagtccagacttggcacatggctagggatactgctcactagctgtggaggtcctcaggagtggagagaatgagtaggagggcagaagcttccatttttgtccttcctaagaccctgttatttgtgttatttcctgcctttccgagtcctgcagtgggctgccctgtaccctgaacctcatgagcctctaagggaaaggaggaacaattaggacgtggcaatgagacctggcagggcagagtacaagcccagcacccagtgtcccagccttactgggtccttaccctgggccaaacagggagggctgatacctccttgctcttcctagatgcccacctcctacaatctcagcccacaagtcctctccaccctagggggcttgctgcatggcaataactcataatctgatttggaggtttgccctttacaggggcagattttctgctcagttcaacaatgaaatgaagaggaactccctctttctacagctcacttctatcagaggcccaggtgcctcagagccacattgagttgctttttctgggatgaggaagtagggttaaactccccagtttcctgagggaggctcctgacaggtgccctttgtcagaccctaccacagcctggataggcagccacattggtcctcgcccttgctcggnactccgtggtggtcctgcccttctccctgcatgcctgtgggtctgctctggtgtgtgaaggtcggtgggttaactgtgtgcctactgaacctggcaaataaacatcaccctgcaaagccaaaaaaaaaaaaaaaaaaaaaaaaaaaaaaaaaaaaaaaaaaaaaaaaaaaaaaaaaaaaaaaa

SEQ ID NO: 600 - DNA, 1067 bp, Homo sapiens
ggcacgagctgaatgagggttttgattttgaatgtttcaatgtttttgagaagccttgcttacattttatggtgtagtcattggaaatggaaaaatggcattatatatattatatatataaatatatattatacatactctccttactttatttcagttaccatccccatagaatttgacaagaattgctatgactgaaaggttttcgagtcctaattaaaactttatttatggcagtattcataattagcctgaaatgcattctgtaggtaatctctgagtttctggaatattttcttagactttttggatgtgcagcagcttacatgtctgaagttacttgaaggcatcacttttaagaaagcttacagttgggccctgtaccatcccaagtcctttgtagctcctcttgaacatgtttgccatacttttaaaagggtagttgaataaatagcatcaccattctttgctgtggcacaggttataaacttaagtggagtttaccggcagcatcaaatgtttcagctttaaaaaataaaagtagggtacaagtttaatgtttagttctagaaattttgtgcaatatgttcataacgatggctgtggttgccacaaagtgcctcgtttacctttaaatactgttaatgtgtcatgcatgcagatggaaggggtggaactgtgcactaaagtgggggctttaactgtagtatttggcagagttgccttctacctgccagttcaaaagttcaacctgttttcatatagaatatatatactaaaaaatttcagtctgttaaacagccttactctgattcagcctcttcagatactcttgtgctgtgcagcagtggctctgtgtgtaaatgctatgcactgaggatacacaaaaataccaatatgatgtgtacaggataatgcctcatcccaatcagatgtccatttgttattgtgtttgttaacaaccctttatctcttagtgttataaactccacttaaaactgattaaagtctcattcttgtcaaaaaaaaaaaaaaaaaaaaaaaaaaaaaaaaaaaaaaaaaaaaaa

SEQ ID NO: 601 - DNA, 1844 bp, Homo sapiens
gactaactgtaataaatgtatgacattattttgattgatacattaaaaaagagtttttagaacaaatatggcatttagctttattatttatttgcttttaagaaatattctttgtggaattgttgaataaactataaaatattattttgtattgcagctttaaagtggcacactccataataatctacttactagaaatagtggtgctaccacaaaaaatgttaaccatcagtaccattgtttgggagaaagaaacagatcaagaatgcatattattcagtgaccgctttcctagagttaaaatacctcctctttgtaaggtttgtaggtaaattgaggtataaactatggatgaaccaaataattagttcaaagtgttgtcatgattccaaatttgtggagtctggtgtttttaccatagaatgtggacagaagtacagtcatagctcagtagctatatgtatttccctttatgttagaagagactttcttgagtgacatttttaaatagaggaggtattcactatgtttttctgtatcacagcagcattcctagtccttaggccctcggacagagtgaaatcatgagtatttatgagttcaatattgtcaaataaggctacagtatttgcttttttgtgtgaatgtattgcatataatgttcaagtagatgattttacatttatggacatataaaatgtctgattaccccattttatcagtcctgactgtacaagattgttgcattttcagaatagcagttttataaattgatttatcttttaatctataacaatttgtgttagctgttcatttcaggattatattttctacaagttccacttgtgggactccttttgttgcccctatttttttttaaagaaggaagaaagaaaaataagtagcagtttaaaaatgagaatggagagaaaagaaaaagaatgaaaaggaaaggcagtaaagagggaaaaaaaaggaaggatggaaggaatgaaggaaggaagggaggaaggggagaaggtaggaagaaagaaaggatgagagggaaggaagaatcagagtattagggtagttaacttacacatttgcattcttagtttaactgcaagtggtgtaactatgtttttcaatgatcgcatttgaaacataagtcctattataccattaagttcctattatgcagcaattatataataaaaagtactgcccaagttatagtaatgtgggtgtttttgagacactaaaagatttgagagggagaatttcaaacttaaagccacttttggggggtttataacttaactgaaaaattaatgcttcatcataacatttaagctatatctagaaagtagactggagaactgagaaaattacccaggtaattcagggaaaaaaaaaaatatatatatatataaatacccctacatttgaagtcagaaaactctgaaaaactgaattatcaaagtcaatcatctataatgatcaaatttactgaacaattgttaatttatccattgtgcttagctttgtgacacagccaaaagttacctatttaatcttttcaataaaaattgttttttgaaatccagaaatgatttaaaaagaggtcaggtttttaactatttattgaagtatgtggatgtacagtatttcaatagatatgaatatgaataaatggtatgccttaagattctttgaatatgtatttactttaaagactggaaaaagctcttcctgtcttttagtaaaacatccatatttcataacctgatgtaaaatatgttgtactgtttacaataggtgaatataaactcagtttatcaattaaaaaaaaaaaaaaaaaa

SEQ ID NO: 602 - DNA, 2122 bp, Homo sapiens
ggcacgagggagatcagtgtgaagggcattgccaaagtggaatcagtaaggcttggcagttgaccttgtttgttggagagaagggataagattttaaagctacatgtctgaaagaatgatgctgctgattgaaataaaggaagaaaggatgcatttcgggctccaacctgtcctaggaaggcctagacctcaaacaccaacacctccatgcatttcctctttggctactatgtcttttccctgacttctgcctctccagctctctgggctgctgcttccacctgttcatctgacttagacsctccctgctgggtccttgttcacctactcatttggtgcttcgtctgccatcagtacctccattgcagctggtgggatgtcagtcaccatctcttatatttgcttcccactagaaagatcaagagaagttatttctttcccttgcgctccaatttttctctagacagttggtatccacaattttaaaaaatgttccatgttgtataaacaagcattcgctgagaggggctgttaatacacatcgtgccccttttataaaaattcatgcatggaatcctacattattatgcatcaaaatctccagaaatgtcttaggatttttgcagggagwwtwttaaatgcattgttttgctttgttttgaagagactagatgtgcagaggaagagaggtggcatggtgggagggtacatttgagttgtcaacagtctctgcagtgtcaggtcaattacatcagcacttggactggaccagggaaaggaatgattctgcttcctgggaatgtcagaaggacctgatgattatatttggcaaagccaggaggagtggctttgaatgtcattgctaagaattacactttgagtagcatttctggatgtctgagcttttcaaatgatacttcttttctgctgtggctttcctttctgttggactggttcccagagggtcctcttgtttgtccttgccctcgcttttatatcagttcatgttttctcttctgtcatcttccttcccagcgctgtttctccaccccctcctgctgcactcacaacagcttcccctctcctgtttagaggtggaagcatgtaagaatgcgtttgagggggatgcttgccaaaggacagcatattcaacatctggtatcaacaaggtaatgtttaaccttagactagccaaactagtgatgacctgcttccatgctgcatctgctgctttttgtgttgatgggactcagaaatcatgagaaaggtcttcagtgatccatgactgcaacaaattcttttcctaattgtgccgtatattatgcccctcaatacaacttactaatctctgcctcagtttctccatctgtgaaagtggtgtaatacttatctacctcccttgaatgttgtgaagattagtatatgttggtaaagcacttttaaaataaagaatgatataaagcaaaaaaaaaaaaaaaaaaaactcgagactagttctcctcgtgccgaattcggcacgagtgtcatcgggctcacagctcagagacatctgcatgtgatcatctgcatagtcctctcctctaacgggaaacacctcagatttgcatataaaaaagcaccctggtgctgaaatgaacccctttcttgaacatcaaagctgtctcccacagccttgggcagcagggtgcctcttagtggatgtgctgggtccaccctgagccctgacatgtggtggcagcattgccagttggtctgtgtgtctgtgtagcagggacgatttcccagaaagcaattttccttttgaaatacgtaattgttgagactaggcagtttcaaagtcagctgcatatagtagcaagtacaggactgtcttgtttttggtgtccttggaggtgctggggtgagggtttcagtgggatcatttactctcacatgttgtctgccttctgcttctgtggacactgctttgtacttaattcagacagactgtgaatacaccttttttataaatacctttcaaattcttggtaagatataattttgatagctgattgcagattttctgtatttgtcagattaataaagactgcatgaatccaaaaaaaaaaaaaaaaaactcgag

SEQ ID NO: 603 - DNA, 931 bp, Homo sapiens
ggcacgagctgcctcggcctcctgagtagctgggattacaggtgtgcgccactacacccagctaatttttgtatttttattagagacgtggtttcaccatgtcagccaggatgttctcaatctcttgacacgtgtctccctccagcttctgcccttatttacctgcctgttggctcttaaaggcatttttggttgagacttttgcatgtaaaataagaactttgccatctttggattcccccatgtttgtttgtttgtttttaataaataatatttaatattaaaaggagctgtggtttttttctctctaaagagcaggaaaggacagagactggtcgctctctgcagtcacacttgargtgaagaaaccatgggatagaattagcygttagttgagtcccyaggttcmgaggragaaagaagaccataccacctggtagggagtgcgaaggaggttccagggactgatccatagaagggtktcagamcaacttcmttaatwaaggaktgccttaatttycttggtcaaggggaaacttcctgtgtgcctttctatcctgatgacaccccctcactgaaatcctggtgttgtttccacagagctgtctggccttttgtccttgatccttggttaaggaaatgaccaaccaggtaagacctgtgttgaagggaaaaacatcaattggtctctttgccaagttcaagtccagtaggttttctggatgtgtagtcaagaaactagcatctcattcttgcccggctcctaaagagctgggtgaccctgggtacctagtcaccacagtgttaggtgggactagtgaaatgcaaatactgagaggaggattggttcatccaagtctttaccacaatttagtgagtaatagaagaagcttaaaagatgttgtacaaaaaaaaaaaaaaaaaactcgag

SEQ ID NO: 604 - DNA, 1683 bp, Homo sapiens
  misc_feature (1680)..(1680): n equals a,t,g, or c
cctagctcatctgggcggcggcggcaastggggacagggcgggtggcgcatcaccggcgcggaggcaggaggagcagtctcattgttccgggagccgtcaccacagtaggtccctcggctcagtcggcccagcccctctcagtcctccccaacccccacaaccgcccgcggctctgagacgcggccccggcggcggcggcagcagctgcagcatcatctccaccctccagccatggaagacctggaccagtctcctctggtctcgtcctcggacagcccaccccggccgcagcccgcgttcaagtaccagttcgtgagggagcccgaggacgaggaggaagaagaggaggaggaagaggaggacgaggacgaagacctggaggagctggargtgctggagaggaagcccgccgccgggctgtccgcggccccagtgcccaccgcccctgccgccggcgcgcccctgatggacttcggaaatgacttcgtgccgccggcgccccggggacccctgccggccgctccccccgtcgccccggagcggcagccgtcttgggacccgagcccggtgtcgtcgaccgtgcccgcgccatccccgctgtctgctgccgcagtctcgccctccaagctccctgaggacgacgagcctccggcccggcctccccctcctcccccggccagcgtgagcccccaggcagagcccgtgtggaccccgccagccccggctcccgccgcgcccccctccaccccggccgcgcccaagcgcaggggctcctcgggctcagtggttgttgacctcctgtactggagagacattaagaagactggagtggtgtttggtgccagcctattcctgctgctttcattgacagtattcagcattgtgagcgtaacagcctacattgccttggccctgctctctgtgaccatcagctttaggatatacaagggtgtgatccaagctatccagaaatcagatgaaggccacccattcagggcatatctggaatctgaagttgctatatctgaggagttggttcagaagtacagtaattctgctcttggtcatgtgaactgcacgataaaggaactcaggcgcctcttcttagttgatgatttagttgattctctgaagctctcatttcactcttcagtgttcctgttatttatgaacggcatcaggcacagatagatcattatctaggacttgcaaataagaatgttaaagatgctatggctaaaatccaagcaaaaatccctggattgaagcgcaaagctgaatgaaaacgcccaaaataattagtaggagttcatctttaaaggggatattcatttgattatacgggggagggtcagggaagaacgaaccttgacgttgcagtgcagtttcacagatcgttgttagatctttatttttagccatgcactgttgtgaggaaaaattacctgtcttgactgccatgtgttcatcatcttaagtattgtaagctgctatgtatggatttaaaccgtaatcatatctttttcctatctgaggcactggtggaataaaaaacctgtatattttactttgttgcagatagtcttgccgcatcttggcaagttgcagagatggtggagctagaaaaaaaaaaaaaaaaaactcgagactagcggcacgagggggggcccgtacccaanacg

SEQ ID NO: 605 - DNA, 1270 bp, Homo sapiens
aggaattcggcacgagcagaattcctttctcatatttcaagtgtccctgtgaattatgaggggaaaaaaatctttattaaagaaaaaagtgaaaataaatatgcatggatacttggatttttcttttagtaacaaagatatttaaattatttgtatacacacacacacacacacacacacacacacacgtatctgtacctagaaatgtttataggggaggtcagttttctgaagattaaatgcagccctaatgtcagattaatgttataaacacatcgtttaatcacaagttttcagagagcaggctccacagatagtctctaactttctatcattacaaatcgctatttttatatcattgctaatttaaataataaagtaaattatgaagaggaatcattggttgcaagtcaccatgggagtttagtccctgtgaaaatataaagcatttaaataatttgtattcttttaccattttttattacatctctttaatttttgtcacttgaatatattaggatgatgatgatactataatcactggaacaaagacatttgcttggacatcttttcttttttcccccatttttgttctgttaataatttttaactatagcttttcctttcttgtccttatctgtcccttatcgatcatagatagtttcactactatttttaagtttttattgttaaattgaagatgaatctgtacagttacttgtgaattaagatgcagctaagttaaaatcaagtataattttgaagctgattttacatttaactagatgattaaatatattttttcaggtgcttcttcaatttaaatcaagttttatggtttcagcaaaatttagaaaatatgtactttacctaaaaacttttcttttagtgctttggatatatacagaagcttaaatgagtagagtatcccaaacatccagatgcttctcaaaatagcatttccggccgggcgcggtggctcacgcctgtaatcccagcactttgggaggccgaggcgggcggatcacgaggtcaggagatcgagaccatcccggctaaaacggtgaaaccccgtctctactaaaaatacaaaaaattagccgggcgtagtggcgggcgcctgtagtcccagctacttgggaggctgaggcaggagaatagcgtgaacccgggaggcggagcttgcagtgagccgagatcccgccactgcactccagcctgggcgacagagcgagactccgtctcaaaaaaaaaaaaaaaaaaactcgag

SEQ ID NO: 606 - DNA, 911 bp, Homo sapiens
  misc_feature (265)..(265): n equals a,t,g, or c
  misc_feature (327)..(327): n equals a,t,g, or c
ggcacgagccacgcccggctaattttttgtatttttggtggagactgggtttcaccgtgttggccgggatggtcacgatctcctgatctcatgatccgcccgcctcagcctcccaaagtgctgggattacaggcttgagccaccgcgcccggcctgtcagatgcttttttgcatctgttgtgatgatcatatggtttttgcccttcactttgcttgtatggtttatcacatttatagatttgtttatgttgaaccacccttgtantcctgggataaatctcacttgatcatggtgaatgcttcttttatgggctgttgaattggttngttagtattttgktgaggattttkgcatattkgttcatcagggatattgacctgtaattttcttgtagtgtccttgtctcgctttggtatcagggtaatgccgacgtcgtaaaatgagtttggaagtgtatctggaagtattcgtcgtctttgatttttgggaagagtttgagaagaattggtactagttttaccttaagtgtttggcagaattcttctggtctcttgatgttttcattgccttgctgagcatagatccaggtacttatgagcaaaattctactcagtctgacaactctgcttagaattatgaatgtgattaaatgcagtggtcactctacctttctaaggtagttcagctcaagttacagcgatccagtcctgatagagctttgaaacctcaagtctattatataacgtaatgaaaaattggcttggtgaggtggttcacacctataatcccagcactttgggaggctgaggtgggtggatcacttgagttcggagttcaggaccaggctgggcaacatggcaaaaccccacttctaccaaaaaaaaaaaaaaaaaaaaaaactcgtgccgaa

SEQ ID NO: 607 - DNA, 1697 bp, Homo sapiens
ggaagaaaacaatgctggccccttcatctaaattctgagaattatttaacacttagtacccaactctcaagttgttatgaagattaaatcacataatgtgatgttcccggcacagtgctctgtaacatactccggagcacatagtacctgcttaataagcattgcataagtatatgtgtacatgttgtttttcagtgcagacttactcagacgttgttgccttctcctgtctctgaagttaaagagctagcaaagaatgtggtttttcaggatagagatcgattttttatttgatcagaagtatttgtgttgtgatgagtgatgagtgtaagagtttgttccatgcctgctttctctagctaaatgctactaatgatgggtctggggaagctacatcagcattgacaggagatgtgtttaaaatgcactttcatggatgcttttaaaacctgcagawtcacattmcatagtgtaggsccagggttaccaaatgatttatatgcacactgaagtttgagagscaatgtttagctaagtggttcttggcccaggcttctaattaagattccatggccaggttgcagaaatcttttcacttgtgcccttcccgcaggctctgtatattggtgtgggtgggagcatccttgttgatataattaagtgcctcatgtgactccaggttgaggccagggtcaaacatgaggaattcaaaatacattcatgagagttgagttcaaactttattccaaagggaggtccattccaatggttggatttggtagggacaagttagtgtggcccatatccccattgctgtagcagaaattgtggcatctgtggcaggaaaagagaaagataaattttgatctttgtggaggagctcactgtccttgaatctcacctgttataaagaacataaatgagtggacattttctgcatgcctggatctttctacctgtgtttgtggtggtagcaggtgaagagattgtgctgattcctttaaaggcatattcccaagatgcaggtgtgacttgtccagagaatatcacctgagaataaatcctagagaaggacgatgaagagaaaaatggctttttctcaggtgactgtgtctcagaccaggaacagtgttcactctgcctyctggaatgccatatgtttagaacttacaaacctgtacttcttgactttatgctgkttctccctataagtttgkttaaacactttttcttctcatgatagtcaaacaactctgaaaaaatattattttctatacactagagtcttctcgacattctcttcatcttggcttcttctctgctatgcagaattctcatcattaatttatgactcataatattaaaaatattccctttggctgggcgcggtggctcatgcttattatcccagcattttgagaggccgatgtgtgtggatgacctgaggtcaggagttcgagaccagcctggccaacatggtgaaaccctgtcactactaaaaatagaaaaaatagctgggcatggtggtgggtgcctgtaatcccagctacttgggaggctgaggcaagagaatcacttgaacccaggaggtggaggttctggaggttgcagtgagcctacatcgtgccgctgcactccagcctgggcaacagagagagactccatctccaaagaaaaaaaaaaaaaaaaaaactcga

SEQ ID NO: 608 - DNA, 1142 bp, Homo sapiens
gaggcaataggtcggggaaggtgatgaatgttctgtggggcatgtcaaattgggtggaacctctggggccttctgtgggaratgcccagggagcacagatttaggagatgggagcaactagtgtgatggtggtgagggctggttgaaaccctggggagtatgtggagctcatctgtgtttccacagagcttatctcccaggagatagccatcgggagtgccttgcctggcatgttcccctgctgaggtctgttacccaggagcctgcagacacaaagagcaggctggtaatgctgagaagcgaacattcagtacctgtcaccagaacccagcatgggtgttcaacactatctggtgactctgtgagaagaccctatgctcaggggatgaagtgtgttgcttgtgcaagagggatggagagagagtgttttccaagtatatgtgtgtgtgcatgtgtgtgtacccaggtggaaccctcctgcatgctcacatatgcctttatgaatactggaatctctaaacctaccatcatgcatctcgtcttagcttcctacctctctctttctacccctgcaacagccatgttattgccagtaacacatgagaagagtgagggagacctgtctgtagacaagctcagtgtgctgctaaggaagcaggcagcagttctgtcctcatgcgttcccattgtgccctgtcctgggatggcaaatgcaaggccagacaggctctgggstctctggtctgaccactaatagcatcttctcctcccgctaggctgaccagcctccaaggcaggactctgacaccagggttataaatgcatctgtctgggcacattatctaaattgttatgtatcaccctgggtaatggcaaaagtaaaaaccgctgttagctcagtgaataaatccttggtgctgatcaatcattgcacgacatagactcttttaataggcacaatttacacagaggcttggcagactgcttcgtcttctaattgctgatggaaaatggatgccgagctctgctgtgccgtaaaaatgtaaactataaatgacttaaaaacttgtgtgctcccttctccacccagcactcattttaaccttttatttagaaacaaaaaaaaaaaaaaaaaactcgag

SEQ ID NO: 609 - DNA, 976 bp, Homo sapiens
caaaaggtgagaaagacgtcatccgcctttttttaatccatttcttttgccaccctatatgtctgttcagagatgggctctcaagctgactttgattcttttagttgagaagtctcttaaagccatctagcccacctccctcaattccctatgtgaggaagcaaaaccccagggaagccaaagggctcctgtccaccctgacaccacaggccgggggagagtagggactctacccccctctccccttgtaggtgacacatgctctgccctctgaggcagtcagcgaaggcaaatggtctgacttctttatgtggtcaacattttgatagaatttctttataatttgatagagattatattatttttattttattttgagtgggaagaattttaaaacctttttatgtcaattaccatcttgtttctttcacctttgaaacaatgatttgtagcagagatgacattgtagcaacccagaattatgcttttggaatgtggtcctcactgtacaggagaatgtgtaatcttttgttaaaattcccagtgtgcatacattttctggttcctcggtccagttgctaaagttcttagtattttagcctaacatatttatcaccaacttttctttaaaagtgttccttttgtcacttagttactgattttcctgggtttgacataagtattctatgagatgatatatatgctttttttgaaagctgattctcatgaattcaagtagctgagttcctttatgtttcgtttattcactaaagtagctgacacaaaacacaccaaaacctagagcggtagttttatgtaaatgctcatgagtttgtatcaataatataattgttgatccacttataattcgtgcaatactgtatgtatgtagagattgagttgtcaattaaaaaaaatgtggcctctttgtgatcataaaaaaaaaaaaaaaaaaaaaaaaaaaaaaaaaaaaaaa

SEQ ID NO: 610 - DNA, 658 bp, Homo sapiens
  misc_feature (565)..(565): n equals a,t,g, or c
  misc_feature (571)..(571): n equals a,t,g, or c
  misc_feature (589)..(589): n equals a,t,g, or c
  misc_feature (596)..(596): n equals a,t,g, or c
  misc_feature (621)..(621): n equals a,t,g, or c
  misc_feature (643)..(643): n equals a,t,g, or c
ttcggcacgagtatacacaacattttgttttttttttgcaaatactctactgaatatttccccattctatttaatatattatgatctttcatactttatgaaactctaaaactgtaaaataatttttgggagggagagaagagttctattgcaaaaaaaaatgctttatgcacataatttttttatgctaaacaatttccttggaataaacttgcaggcatggacatctagattaagtwtgcaatttcttttgacatttgctacatattgctatgctaatttccaaaagaactgtactcagtaagacaattacacatttcagcctccgcactgtaactctgtcagcatttgtgtgtgcacacataattacacatagagttgacacagacattttgccaagataaaaaaaaaaaaaaaaaaaactcgagggggggcccggtacccaattcgccctatagtgagtcgtattacaattcactggccgtcgttttacaacgtcgtgactgggaaaaccctggcgttacccaacttaatcgccttgcagcacatccccctttcgccagcnggcgtnaatagcgaagaggcccgnaccgatngcccttcccaacagttgcgcacctngaaatggcgaatggcaaattgnaagcgttaaaaattt

SEQ ID NO: 611 - DNA, 1588 bp, Homo sapiens
  misc_feature (380)..(380): n equals a,t,g, or c
cttattttcaaatttgacattatcatccttgcctcttaaaaagatagattttaattgttttcatacttcatagaaatcaaagtctgtgtttgctacaaattgaatgctcacgttacctgaaataatactttggactgcaggacaggacagtattgattcctaagtagattgactataatctcatgataagtatgtatatgtgcatgggaaaacaacattcaataatagtctttgtgtttaaaactatcatggtatacattttcttatgtggtgcttgaggagtttcattctacagtttacaaggtgtagktttgcaccccaaattctcarggtatgctatttcacccaaatacttgaaagaaaaaggtgccctgtatttnatcagtactgttgagggggaaattttttgtgtaagtttgtttgataaaactgcttataaaaatcaaattcacaaaatatgttaggctttcacataatttctaaggagatatatgtagaaataagatatatattatcaagagactgcttatatattcttaactagcttctgggtcctaagtagacctcacaggtgcataaaatcattaataaagcatgtagcacttgctaattggtgccttaagcttgaatctaatcagaattgcagactcgggtcctctgggaaaaaaacatgtccgtctgtggcacgtgtgagtactaggcccaggggaagagtctgaaaattgaattcttttgtgtgtcctgtgtctcagaagagaactgaatgttcagagcagcgtttgtaagctattaacattcagtatttcgtgttgcaactagaacacattattagatttattcctgtttaattcataatggtgcmgawtaaamcacacacatctgatttgattycttttyctttttttaagtttcataattgcttttwatggctagtgttaatggcaaaaagtcctttccagggctccctgaataatctaccatacctgtatccatagcaggtgatgcttttttttatccccactttgaagacgtgtgtttctgtatttacacataaatcatactattgtatattaargmcagcagtggttgaaargaakgtgaacactgtagaagttatgttggaaaaaaggagagtaaattgtgtgattaatggggaaggatattggataatgttataccccggactatgaaaaaagctggtggtaaatgggaagaatgtgaaattttaaactgctctcaacgtaggaatcttggtggaaaagttcctacctgaggtctgatatgattcaattatagaatgcaatgagcttggccaaggggactttgaatccagccaaggaaactttgaatctcgacagctctgagaatcacattttcagtgcattgaatatggagtaaactatttagacaaggattctgtgagactaggctacttacctttaattgccagcatttgtaaatgattgtgcaatcttgtgtaatggtcttttattttgactgttttggaaaaaaaatgttttattgtttttttttcccagtaaaaattacttcaaagaaaacgtaaaaaaaaaaaaaaaaaaaactcgag

SEQ ID NO: 612 - DNA, 593 bp, Homo sapiens
ggcacgagcgcgatagccagccgcggctgcccttgcgcttcccgagctggcggggtccgtggtgcgggatcgagattgcgggctatggcgccgaagtttttcgtcagtactgggatatccccgatggcaccgattgccaccgcaaagcctacagcaccaccagtattgccagcgtcgctgcctgaccgccgctgcctacagagtcacactcaatcctccgggcaccttccttgaaggagtggctaaggttggacaatacacgttcactgcagctgctgtcggggccgtgtttggcctcaccacctgcatcagcgcccatgtccgcgagaagcccgacgaccccctgaactacttcctcggtggctgcgccggaggcctgactctgggagcacgcacgcacaactacgggattggcgccgccgcctgcgtgtactttggcatagcggcctccctggtcaagatgggccggctggagggctgggaggtgtttgcaaaacccaaggtgtgagccctgtgcctgccgggacctccagcctgcagaatgcgtccagaaataaattctgtgtctgtgtgtgaaaaaaaaaaaaaaaaaa

SEQ ID NO: 613 - DNA, 2355 bp, Homo sapiens
  misc_feature (766)..(766): n equals a,t,g, or c
ggcacgagcccctctctaaatattggtatttttatattccagagatgtacccaatagaaaaaattaaaaattaatcagtatctaatttaatatccataagtatttttccttagattttagtcacgtacagtgggctatgtggatgtcacttgtgcttcaccatagtttaccactaggtgtcactgtggctctgcactgcgcttgttttgtagcaaagaacagcggcatcccctcgggagagaggagctgcttccagggcaacaggcaagcgggctcagaggttcaggagaaggcaacagaggcctggaaggggtcttcgtgcatctgtgccagttgtgcaagacgaactctttgaacactacatgctttggacttcagccaggcagaggctggaagaaggttgaccagagctcccttgctctggtagagggatgggtacatggagaagccccttcttccccatgagcctccctcctgtcagttcctctcagcctccagcttttataactccagaagcgtcacagttgggtggtttgattcagagagagttatttttctactgcagaaatgccttggacaaaaccagtgctcactgaatctttgccacaaaatggaataggctatcccagggggcaagaggtgcccgcccctgtgcccagcctcctcttgatgctcccagtgcccagcagcctcgcacaccctgcctgtctgttcctgggctgcccatttctcaagaaaccgacctgcaaaggcagccggctgctgnctccacaccgagggctgtgcggtcctgctgctcgctcactgggaggtgcagctctttctcctcttcctctaggaattccagaccgaccatctaccatgactaacaacaatgaacaaagggcttaggggcaagagctacctgcaaagacgtgtcatggaacccttcaccatgcaatgccttgaactcagctctggctgctcccaagaaaaggtggctggctgggggcctggacacaagcacaatggggctggtggagccactgtgcagagctacttgaataatcactgggttttcatcaactccttttgtcatacagaccactcaagggctgaagtgttggtaaccttcatttcggtgtccaaagcctcacagcaggtgagccaccctgagatgcttgtggccacatggtggccacagtcagagctttgaaagtcagtaccaaatgaacgcataattggacaccaaaaatcaagtgttactttcatgtttcctcaccccatcatctcattgcctcctgctgactctgataccgacgctgagctgacttgccaggctgccgctggacgcgtagagatcaggccagcgccgcgctcatttttccaggtagacctactctgtggaacggaagtgccctagctgctttgtttttgtagcacttgctggctgaatttttcttttgctaatcgctaaccagaaagtctggttagagggggctcaactcaatccctttggtccccagcgccagacaagagttaattctggaaaattcagtacttgaatgtacctgccttattgcataccaatttactggggggaaaaaaaaagttaagagatgccggctccagatctccacttcattcacaggtgattttggaaatcctgtaagttacacttcctgttctggttttgttttgttttttgtttcctttggctgattcctgctgagtgaggccagttcctcatcaggctcagggcaggtgccttttcaggcgtggcctcctttccatctagcacagcatctttgtctctgttctgtctcctccaaatccaagatgattttaattagtacagacatgtacagtctacaattaaagagtgatttgtactaatatgattttgattcttcctcctctttgctgtcctttcaagacacttgctggaaaaagctttaatgcacttagttttcctttaggttttctatgactcagatgtaaaggactttctctgtacagtatattatccaatgcatgtttgttctctctcctgatatattgaacaccacacagttgtgaagccgtgcagtggggatgccccacaccccacagaggcatctacccctgtgtataaggaaagacattttcctttgctgtacttgcttgagcagttttattgtctgtacatgtgagctgtgtgagatagatgtgaaaagttcaaatgaatgcattttcctgccccatgtatacagattgtcatctgtacaaggaactgtatgtatgaaagcaaatgtacttatttataaatggctaacacttggaaaaaaaaaaaaaaaaaaccccggggggggggccccggtaccccatttcggccct

SEQ ID NO: 614 - DNA, 1437 bp, Homo sapiens
ggcacgagaaatattcttcctgaggttaatggaacataattttccacagccaatagcattcaatagtcaagactgcttttaatgattttccagtgcgtgccgcttcttaatttgcaaatatggtggatgttataattatataaccaatatgtatgtattagttaaacagatattggagggataactagggaatctaaccttaacctctaataccatgagaaaatcaattgcaaattaagttctgagatagaagctgtttgcaaatctgtatatggagagagcaacatgaaaacacaaaatcactgtattttttgcattgttattttattttctacttcagtgccacctttaatttggtcgtggcagtgtgtttccgtccattctttattttaaatagagaagtcatttatttggctcatggttctggaggctgagcagtccaagatgtagtggctgcatctggtgagggcctttgtgctgcaccatagcatggcagaagggccagcaagcccacgagacagagaaaatgggagccaaacttacccttttgtcaggaacccactcccttgataactaacacgctcctatgatagtggtattaatccagtcataagggctctgctctcaagatctaatcacctcttaaaggcccaacctcccaacctcctttttggcctgtcttttgtgtgtgcaggcgcatgtgtgcaaataaaatcacatcaggttaagcttgtcaaagtagggagcagctggctttaagataaactctctcatccacacatattttccccaccccaagcacagctgcctcttaactgctgttggaccataactccaagtgaagtggtcctccctcccccatctccacaaatagcaggaaaagtaatgttgtaatttacaaagttacttactccctgccatttcagagagaagatggagtataggaaagccctcccacccactgtccttgtgtgatgtgacacaacttgctccctcagtcttggaatacagcctcatgtggtccttggccagaggcagagaaagggccttcatctctctcacagctgaagggtgggaaacatggtcttcattccgtgtaaccacgtgctcagctagagatcagaggttctgctcataaattataaaggagaagagagatttggggatgattagcagcctctgacataggggcatctcccccagtgaggcgtgggcagattattaaaggaatggtactgggaataaaagtggctgaggataaattttaaattctcatattacttcttacaaaaattctaagttttaaatcaagtcgtataatttttaagaataggtcttcaattgatttctagatggcaaataatttatataaacaaaaacaatggagccttctccaaaaatgaatactcaattaaaaaaaaaaaaaaaaaactcgag

SEQ ID NO: 615 - DNA, 2050 bp, Homo sapiens
  misc_feature (1156)..(1156): n equals a,t,g, or c
ggcacgagggaatttgactggggagggatgtacagtgagcatcagttgttacctatgatcagggaaggatccaggttttgtggggcctgatgcttaaggtgtgtgtgtgtgtgtgtgtgtgtgtgtgtgtgtgtgtgagttaccctctaaaaaaaggactttacaataaatctgcctctcactggttattgtaagagtgtatgtgatgcactgagaagtcatttctgaagatacgtggggcgctctttgtagagaagtgaaaataacattcactatgacaatagctaacatttatcgagcccttaccatatgccaggcactcgggcaagcatttgcaggcttttctcattgattcctcacaatcagcctaggatacagatgctgcctattagtctcattttatggctgaggaagcagaggctcagaggggttaagtcatttgcccaaggccacacagctagtatatgatagagtcagggttcaagcatatggagcaaaacaggacttgtttcctatggtttaagcattccctacatagtgatctctcactgtcataattacatgcctactatgttctcttcagtaaagatctcttatttttagttgactagaggaagggcaatatgagcagaaaatttttcttgttttggggatgaggtctcactctttttccaaggctggagtgtagttgtgcgatcatagctcagtgtagcctggaattcttggactcaagcaatcctgctgcttcatcctcccaagtagctggaactacaagtgtgcaccatcacatctaactaatttttsymgagatggggtctggctatgttgcccaagctgatctggagctcctggcttcaagcaatcctcctgccttggcctcccaaactgttgggattacagtgtgagcctggaaaatatttgctaaaatattaaaaaataaagttttatttcttcccacttcacgaaggktatatttggaattaagacagtgtgttctttaatagtatttttcatagtaattgatttgatgagtaggcaagaatgatttgkgataagttaaaatgtcttagataagtgtatgattaaaaaatagctcatccgggtgtggtggctcatgcttgtaatctcagaactttgggaggccgaggtgggcggnattcacttgaggtaagtagttcgagaccagtctggccaacgtggtgaaacccatctctactaagaagataaaaattagctgggcatggcacctgtagtcccagctactcaggaggctgaggcaggagaggcaagagaatcacttgaacccgggaggcagaggttgcagtgagccgagatcgcaccactgcactccagcgtgagcgacagagcaagactctatctcaaaacarcaacaacaacaaaaacctcttgaaaattcttactactttatctgttggctgaactaatgccaagctcccatcatgaataatcaagaatttcaacctgatgacttcttggtaataataaagttcaatggggttcttctcatatggagtgtacataaaacactgtgagggcccagaacagcaaaacgtgcttaaaggtggacatgggatctgcttcagggtatctgctgaggktaggactctgtgtgcctgtgggcataaacatgtggacataccttcctttggatcctgaaatggccaattccacagtagggggaaaggaggaaggacagctgtgtttgaatctatcatttcttgagacagcttgcattaaaagtcaaaccaagaaaacccaaatggccacttggctttctgtggtgtttgggaaggcagtttgaggagtggtctgtgaagtccctgggcaggagggctcgggctgagggctcagctgtggcacccccagatgactgctgaggtcatgaaggagctcatagcaccattcatgtttctggactcagtcattgtgcctggggtccccatagcaaggaaagtagggaagtgaaccaaggtccagccagtgttgctcttggctgcagggaaggaaaaaaaaaaaaaaaaaactcgag

SEQ ID NO: 616 - DNA, 1968 bp, Homo sapiens
gcgggtctgcgaggtggggtaggcgggcaaggcgggcgccgaggtttgcaaaggctcgcagcggccagaaacccggctccgagcggcggcggcccggcttccgctgcccgtgagctaaggacggtccgctccctctagccagctccgaatcctgatccaggcgggggccaggggcccytcgcctcccctctgaggaccgaagatgagcttcctcttcagcagccgctcttctaaaacattcaaaccaaagaagaatatccctgaaggatctcatcagtatgaactcttaaaacatgcagaagcaactctaggaagtgggaatctgagacaagctgttatgttgcctgagggagaggatctcaatgaatggattgctgtgaacactgtggatttctttaaccagatcaacatgttatatggaactattacagaattctgcactgaagcaagctgtccagtcatgtctgcaggtccgagatatgaatatcactgggcagatggtactaatattaaaaagccaatcaaatgttctgcaccaaaatacattgactatttgatgacttgggttcaagatcagcttgatgatgaaactctttttccttctaagattggtgtcccatttcccaaaaactttatgtctgtggcaaagactattctaaagcgtctgttcagggtttatgcccatatttatcaccagcactttgattctgtgatgcagctgcaagaggaggcccacctcaacacctcctttaagcactttattttctttgttcaggagtttaatctgattgataggcgtgagctggcacctcttcaagaattaatagagaaacttggatcaaaagacagataaatgtttcttctagaacacagttacccccttgcttcatctattgctagaactatctcattgctatctgttatagactagtgatacaaactttaagaaaacaggataaaaagatacccattgcctgtgtctactgataaaattatcccaaaggtaggttggtgtgatagtttccgagtaagaccttaaggacacagccaaatcttaagtactgtgtgaccactcttgttgttatcacatagtcatacttggttgtaatatgtgatggttaacctgtagcttataaatttacttattattcttttactcatttactcagtcatttctttacaagaaaatgattgaatctgttttaggtgacagcacaatggacattaagaatttccatcaataatttatgaataagtttccagaacaaatttcctaataacacaatcagattggttttattcttttattttacgaataaaaaatgtatttttcagtatccttgagatttagaacatctgtgtcacttcagataacattttagtttcaagtttgtatggtagtgtttttatagataagatacgtctattttttcaaaattcatgattgcagtttaaatcatcatatgacgtgtgggtgggagcaaccaaagttatttttacagggactttattttttgatctttatttgagattgttttcatatctatctaaattattaggagtgtgtgtatcagaagtaattttttaatgtcttctaaggatggtcttccaggcttttaaactgaaaagcttaattcagatagtagcttttggctgagaaaaggaatccaaaatattaataaatttagatctcaaaaccactatttttattatttcattatttttcagaggccttaaaattctggataagagaatggaggraaatactcagagtacttgattawtttawttccttttattaaaaaattacttctatgtttttattgtctcttgagccttagttaagagtagtgtagaaatgcatgaacttmatcctaataaggataaaacttaaggaaaaccacaataaaccatgaaggtgtacacatcttaaaaaaaaaaaaaaaaaaaaaaaaaaaaaaaaaaaaa

SEQ ID NO: 617 - DNA, 754 bp, Homo sapiens
ggcacgaggaaatttgggggaacggtgttccaggcatagggaatagcagatgtaaaggccgtgatttgggaataaacttggtgtgatggaggaatggcagagagggcagaacagagcaagagggcaagatttgtaggagatgaggtcatcaggggcctggcaggccatggtgggggtgtggattctatttttaagtgctgtggaaagtcaaggcagggttttagcagagcaaagatgcaacctggcttgggctttataaagctccccctggctgcatggagagaaataaaatgtaggcagcaaaagtggaagaggagaggcagctggtgcactaatccaggtgagaggtaaagatggatgggtagggctgaaggatggtggggcaggtggtgagaagtgacttggttctggagacatatgaaggaagatggtcaggcaggccgggcacagtggctcatgcctgtaatcccagcaattttagaggctgaggtgggaggattgcttgagctcaggagcttgagaccagcctgggctacatagcaaaacctcctctctacaaataaaaaaaagtagtcgattgtggtggcatatgcctgtagtcccagctactgggaggcagagataggaggattgcttgaccccaggaggtcgaggctgcagtgagccaagattgcaccactgcactccagcctgggtgacagagccagaccctgtcttaaaaagctaaagcaaaaaaaaaaaaaaaaaaaaaaaa

SEQ ID NO: 618 - DNA, 1324 bp, Homo sapiens
cccccgggctgcaggaattcggcacgagctttgctatgaagtggcaaattacatgtagagtgtctccttccttttcagagaacagttaatcaaggcaaatcagcaagcccccaaagtgctgtaatttaacatcatgattaccaccttcgaagctatatattttgcatactttaaaatcacctaacttggactgcttgaattacattggcttttagaaccgaaattgtaactatgtattgtatttcatgggaggtatattttatgagctttttggctttcttttttcccacagcaactgccaatgaaggatgaatcccctttttaaaaagttgttgttgttgttgttatttgattttgagttaggagggataatagagaagtccatttaaaaattatttttagaagctaaagaaagtaattatgcttcctgtgaattgtcttttactggcatctttgttttcctctttgatgttagtaaatttggtgtaatacgtggggcttccatatttcaaagtggaagctttcttctctgaagtcgatatatggttttgaattactagagctttggtcagtatttccttccctatatgtcacagagggcaccactgagaactgcgtgcataggacctcaaaatacaaaattagcagggcctcacagtcagcttcctcatggctagtttttcccccttatattacaatttttgttttataagtcatttttttcctgatatttccaccacttttcagagtcatctacaaaatttttctttcctcaagaaaagagttccttttgccttattccttatgccttccccactggtattgaggttttgataataaattggtaggaaaaaaaagtacctcctagaaggaagccttccccaccatttccaggtgccaactgctaagcagatatattccaaaaatggtaactgtcatgtgcacactgttggttatttttaataagcctcttcctactagaacattttattttccttgttcaccatacaatcatgtactctttaacagaaattgcttttaaaaaatatctggaactatctttaaaaaaactttattaataatcatgtatttttactgatcacattttgaaatgcctaaaagactttattgttctaattatccagatgtacctttgtaaaatagctcttttatgaattagctgataaggctgtatgtttctggaacaaaatattggtcatctaaaaactttctgttttctggggtctgggaaaatagaaaataagatttcaaatattaaataagcttaaaggaaaaaaaaaaaaaaaaaaaaaaaaaaaaaaac

SEQ ID NO: 619 - DNA, 1182 bp, Homo sapiens
ggcacgagctttgactcagtttcttcatccattaaaatgccagcttcatgatgtggctgtgaagattaaatgcaatcatgtatgtaaggagctttgcatactgcctgatatgagataggcattcaagaaatcattacattgaagaaattttcaattttccttctcctataaatccttgtatgaaatcgaaatgagtgttgagatgaacaaaagacagctagttcaaggtgaaaggttggtaatttgcttacaagatgagtctcttcttcatttggcagctgactaaattgttaaaagctcagcctaattgtacctttgccaggacattttaatgacaccatttgtctcttcagttcttaagcactttggggaaccagtagaatacaaagtagaatgtctgtgctttttaccttactcctacatcatctttctaaaatttaaatgtactatcactaaccctgttttgatttagttgaggggagaaaaaaagcttaaactttactttcagggtctaattggctaaagccatttttccttttctgtttccaatacttttttaaaaaaattataagttagtaatatctttctctctgtctacatatttgaacttggatttaaagctttctatttttttctcttatatatgtctgtagtaatcaggttttctcattacgaagtgctaatgaaaccttcagcttcacactggaagcttctcaattattggcattctgggtgtttttctagacatttgttgtttcgaacgagttggccagtgtttgttgacagaattttaactgcctgaaaaatctgtttcagtaaccagatactcagtcatctgttgggaaaatcccagtcgtatggagtaatccttccttctattctatgttttataggtcaggcctaggtgaaagggctgggagttacaaaggcctgcctgtttactaagggaatatcagcctgtcttcatttcactgtttcctttcaggatttcaatgatgaattctcagatctggatggagtggttcaacaaagaaggcaagacatggaaggatatagcagttctggttctcaaactcctgaatctgagaactctcgaggtttgggaaattgttgtattttgactaaaatttaattcccctcaaaacatcctcaccccacccccttaaaaaaaaaaaaaaaaaa

SEQ ID NO: 620 - DNA, 911 bp, Homo sapiens
  misc_feature (353)..(353): n equals a,t,g, or c
  misc_feature (418)..(418): n equals a,t,g, or c
  misc_feature (891)..(891): n equals a,t,g, or c
  misc_feature (901)..(901): n equals a,t,g, or c
ctagggcctggagatgggaccagctgcctgcctgccccctaccccaggttgggcgccgctaagggctggagcggctctgggctccggaatcgcccgcagccggtactgcgggacccactgcggatatggctgtcttggctggatccctgttgggccccacgagtaggtcggcagcgttgctgggtggcaggtggctccagccccgggcctggctggggttcccagacgcctggggcctccccaccccgcagcaggcccggggcaaggctcgcgggaatgagtatcagccgagcaacatcaaacgcaagaacaagcacggctgggtccggcgcctgagcacgccggccggcgtnmaggtcatccttcgccgaatgctcaagggccgcaagtcgctgagccattgaggatcgcgacgcantggcggggaccctcatggaagcatcgccctcgcctcggaccttgcctggcgctatttttgcagggagctggggagcaggaacgcctcggacctgagtgctctccatattgtggggttgaagtctggatgggagcttgccaagtccctttttaggctttttaattaggaagcatttcgaacctgcgcaacagaccaaagaacagtacaaagaacatccgtgtacccagtaccctgactaccgactacctacaacccgtccctgccccatcctgagttcttttgaagctgatctcaggcatcggattatttcttctgtaaatatttcagaatgtatctctccaagatgagagctcattaaaagayaattacaaagcttatcacatccaaaagaattatcaataattttgaaatattattaaacgtgtaataaatgttcaaaraaaaaaaaaaaaaaaaaaaaaaaaaaaaaaaanaaaaaaaaanaaaaaaaaaa

SEQ ID NO: 621 - DNA, 1099 bp, Homo sapiens
  misc_feature (1051)..(1051): n equals a,t,g, or c
  misc_feature (1073)..(1073): n equals a,t,g, or c
  misc_feature (1076)..(1076): n equals a,t,g, or c
  misc_feature (1087)..(1087): n equals a,t,g, or c
  misc_feature (1093)..(1093): n equals a,t,g, or c
ggagtatatttcctgaataatatctgttttggagacttggacaaagttaacttttttgcttttttaaaagttgctgtttaaattaacttcctgcatttctaatgtagaaaaaatatggcacagtgatttgaattttgtttatggtttattatcttcctaaattatcagctctttaaaatatgggtctctggcctgtataccatctgataaattaggttgggtaaatttttcacctgaaaaaattcattcttttgacccaggttgtttggcttggaaaaaaaaaatcacatactcattgcatgattaaacttgtccatcagattgtgattttgtgcgttatgaggattgtagctggggtaattttaaaatgttggtatttggatagaactgccagcccaggattttgataaagatcaaaatatatactgtatctaaagtttcttttttaaaagttatttcacttataatcaaaaggtttaaataagtttagtgtatattttatgattagtattattttgtatcgattcagagagaggaaaactgcattcccatagacagggagacttggtgcattaatatccaaagcttagtttaagctggtgatgattagaaaagtggctttcatttgtgttctctggaagattctcagtagtcctgtgggcatgtgaacaagagcatgtgtaatcttcataatgtatgtcttgttagcagaaatgtctgaggcattgctgagatgtaggatgagctgaggtactggttttgtctttcatggttccctattatgttttttgagaaactgagcttttcctgacagtgtttagtttttcttggctatttactaatgctattaatagtaacagtttccattatggagcctcagtaggttcttgacatacattaacccattgctattatgtaattttctaataaaatgatgtgataaaacatattttctgtaatatactcatagaatatgtgattataagtaaataaatagatgttggggtaaaaaaaaaaaaaaaaaaaaaaaaagggcggccgcccaaagganccccgaggggccagctaagcgncancgaagcaagcncccccnaaaggg

SEQ ID NO: 622 - DNA, 1379 bp, Homo sapiens
cccgggtcgacccacgcgtccgcttcctcaggtccaagagaatgggaggagggtcatgttgaagtgtagccactggaactttcttgcatttatggagttgctttttctttcccaaggaaactgatgtttgcctgtccgctttatctttgtagtacatgaacagttcagccttagactatgtaactgttttctcatccttagctgaaaatgaggggcctactgtattgcgagactgttcaggggtaggggtggagggggtggtcccttaatggcccctgaagatgttggatgtgtttctcaaaagctgctttgtctctttcctgagtttaatagtgaaactactaaacattaatagatttgcacagccacaaagaatgagagttgataataccgaagaagtgatgcaaaaacaaaaaatcacattactgatcattgatagtattacaaataaatgtctcttcctttctcttcctcccttcctccccctgccttcctcttaacctatgtgctcatccttgctacttgaggctgttatttccctccgagtatttaaggagcccaaacaccttggtcttcctgggtgggggcataattaagggaagggagtgtataaggaaggaaacctcataccctccattcccatccctggatatattgccttttcagcagcctcgggttcagtgtgcttggggtcaggagtgccaggttcccaagagcagcgtaaaacatccctgtaccccttgacagttataagcatttctgcgttaaacttgaagattccagagattccccacgacctaatgatctaagaatgcagattggattctttgatgttcaaatttctcatttacttatgaaaatccctaattatatagttttatataatgtgtatacagagtaggattgttgatgaaattgagcggttggaacaccctcatggaacactggcaacatggaatgtagagagctgatgtcttccccctcatagaggccattggcttcctttgtataaggagagggagaagtgattctggaaggagaagttggtatgtctagcttcattgcggcccctcgggctacccagcaagaggattctgcatcaaggaactggacgagccgctacccaaactgccaccatctttactctttacaaaatggacccatcgagaatgttgaaaagcttggaagtatcacttttgaaaaaaaaaaaaattattttgcattcagcatggactcgaccaggcatctatggagattatttttttgcttcattttataaagttgtatttagaaaagtcttaagtattgtgctttgtaaagaagatgattaaaatgaaattttgtgagaataaaaaaaaaaaaaaaaaaaaaaaaaaaaa

SEQ ID NO: 623 - DNA, 581 bp, Homo sapiens
gaaggatatggactattgcaatacatttcttccttcaaatcctgccactgttttgttggcccacaactaataggacctcaaaataagccatgctgctttgcacacacactagccttcttttgtacttttcattctggatgggcttggccaaaacaggctcaggccaaagacctcccaagctgtatgtacttccagtatcctgaaacagtgtttggtgacataatgccaagggtaaacaagcctgatttaggcactgctttatccaggggcttcacccatgaaattaataaaacttatctgagtcacttgaaacttggttcccagaaaacacatttctggtttataatctccttttatgctcacctgacattaattatctatccttgatgatgtgtttaaactgagtagcagaaaacagaggccacactttctgggaaattttaaaggaagaaaccatttttaatgagatgaaaatatttaacgaatttaaaaagctaatgacaattttgagaaaaggtttgggatgtatattgctatgtaatttaataaactgattttatggatataaaaaaaaaaaaaaa

SEQ ID NO: 624 - DNA, 1284 bp, Homo sapiens
cccacgcgtccgcggagacaggacactcttcctgaagcggggcgcagatcagaggcagaagaggaggaggccaggaccatcagagtgacacctgtcaggggccgagagaggctcaatgaggaggagcctccaggtgggcaagacccttggaaattgctgaaggagcaagaggagcggaagaagtgtgtcatctgccaggaccagagcaagacagtgttgctcctgccctgccggcatctgtgcctgtgccaggcctgcactgaaatcctgatgcgccaccccgtctaccaccgcaattgcccgctctgccgccggggcatcctgcagaccctcaatgtctacctctgaagcctccttccctgcctgcccacccctccatgctccacgcaggcactcacgctaggacagcattaacacctcatctccgggtcctggtctgaatcccctcctacccctgtggccatcctgccatacatccaggacattgagttggaagactatgatctgggtgggggcaggataacatggcttctctttacccagtgggtcccttcgatgctgagggtggtgagtatgtcactatgcaagggccctgagactatttgctgtgggctctcctccagcctgcccagggcccacccagatgcctctggggttacccctgtctgcttctggtttttctgttggagatctataggtccttttcctgcctccttcacatttcctccccagcttttgcggccacaacacatcagtgtcatttgggtgttttggcaactcaggggccttcggatgatcttaaacctttgtgttcagccagagcccctgtgccctggtaggcgttggggttagtatctctcgggtgccctcagagccacctctgcctgtgatcgtctgatgaggctccctcccaacctgatccaaaagccagtctcaggagtttacccctgggatgggggatgcatctgcacctgactttggggccacgtgccctgtggcaccccagctcactgggagtctcaggagggataaccggatttctgctctttcccctgtcactcccacatcacacagaaaaatggcattcctctctgtctctccctggcatggagagggcagactgtgcacatttcactagggtccaaatacagaagggcccagggcccaggggcttgcagcttcgtgaggggtctctggcccagtttccaatgaataaagttctcttgacagctmaaaaaaaaaaaaaaaaaaaaaaaaaaaaaaaaaaaaaaaaaaaaaactcga

SEQ ID NO: 625 - DNA, 431 bp, Homo sapiens
ggacgctgggttcattaattacctttaaaccgttccttattttttttaagattttaaattgtattttggcttttgcctccagtatcctttctggttgctctggtttgaattaagttcctattatgctgcagcacatatcaaccttccctaagtaaccatttcctggaatgtgaagcatcggtgccattagcagaccatatgcagaaatgtcgtgtacttgcatttcttttttgtgcactctataaggctggttgtgactcagatcagcttaactttttatattatgttatttcactaactgctacagtcaaaatgatcaaatctttgtacaatagaaaattatttaaattttatttttctactgacatttctaattctagtgtaaatgtttatcaataaaaaattactttcaaaaaaaaaaaaaaaaaaaa

SEQ ID NO: 626 - DNA, 876 bp, Homo sapiens
ccacgcgtccggaaaaaaagtatggaaaaggaatgttgaccgagcttttatgcttaagcagcagatgaagatagaaccaagatcactgaaagcaagtgtttagaacagcaaaaagagtatcccaacatttcagcattggaactacagaaagttttcagacagaggggaagttaccaattttaaatgctaagtaaagcatgagattttgctgcttgatcttgcagatactgaccagattagttctaacaaaatatggaaggagtggcatacggtggaagaaagaaggcagtagctgctgttgtagttattcatgttagcctcagaggatggtgagacatccagatgaagaggttggtacgcaattctagaattgaggaggtgtctagatagagatataaattgtagtgacatcagtaaagagacaataacaggctttggaaggtgagtaagaatgaaaagggaaggtctgccacctaccctgaagacatacatttaaaggaactatagtagagagataagaggaaaacaagaagagtggagtttcactgaaccaagacaaacaagtttcaaaaaggaaggtgaagttggccaggtgtggtggttcacgcctgtagtcctggcactttgggaggctgaggcaggcggatcacaaggtcagatcgggaccatcctggccagcatggtgaagccctggttctactggaatgcaaaaattggccgggtgtggtggcgcgtgcctgtggtcccagctgctcgggggctgaggcgggggagtcgcttgggcccgggaggcggaggttgcggtggggtgggctctcgccactgcactccagcctggtgacggagcaggacttcatctcaaaaaaaaaaaaaaaa

SEQ ID NO: 627 - DNA, 2157 bp, Homo sapiens
  misc_feature (1334)..(1334): n equals a,t,g, or c
  misc_feature (1348)..(1348): n equals a,t,g, or c
ggcacgagcatgcctatcactgtccccgaaggccttccagtgggatgaaatgtggagatggaaggcagtgacactgatgatcctgaccctgtctaggtccaggctaatgtgtgcgtttgtgtcttggtttttaacaaagaagtttaaaaggtaaaaagaaagttaaaaaatttaaagtagaaaacagcttacagaataaaaatatacagaaaatatttttgtacagcagtacaatgtgcttgtgttttaaactgttattacaaaagggtcaaaaagctgtaaaaaaattttttaagttcatgaagtaaataatttacagtaagctaggtttaatttattattgaaagaaaaaagcgtatgaataaatttagtgtagcttaagcataccgtgtttatttttatttttcataatgtctgctcagtaacaagtgtacagtgtttataaagtctacagtagtgtacactcatatcctagggcttcacattcattcaccactcattcactcactcacccagagcaacttccaggcccacaagctccattcatgctaagttccctagataggtctatcattttttatcttttataacatatttttactttaccttttctatatttacatatgtttagatacaaaaatatttaccattgtgttccaattgcctgcagtatttagtacagtaacatactgtgtaggtttgtagcctgtagcctaggagcaacaagctataccatatagcctaggtgtgtagtaggctatgccatctacatttgtgttaagtacactctatgatgttcacatgacaaggaaatttcctactgacaatgtatttctactgttaagtgatacataactatatgtatattagtttgtattgttcagtaatggagagattgtgttagactcttggggccagggatcaagtaactgtactagggtccccaacacttaggtgccatggcaataaataaatgaagagctaaccaaatgcctgcattctggacagctctgtttaaaaggtatttcatggagtttttcatttaatcaatagaaatccaatcactaggccaggcatggaacctcacgcctgtaatcccagcactttgggaggtggaagcgggtggatcatttgaggtcaggagtttgagaccagcctggtcaacatggtaaaaccccacctttactaaaattcaaaaattagccgggtgtggtagcacatgcctgtaatcccaggtactttgggagcctgaggcaggagaatcgcttgaacccaggaggcggaggttacggtgagtggagatcgcaccactgcactccagcctgggcgacaanagcgaaactctgtntcaaaaaaaataaaaataaaaaaagaaaaaaaaaaagaaatccaatcaataaaagcagagaatagtttccattcagtaagtggtaaacaacaactaatgcatttggcactttctctttcacagcttctatctaaagccaatctcatgaggcaccaactttcataccaggcactatcacttctctgcttcctatatctccctcctctcccagagacagaatgtttcagaaagtagatttgctgcctaagattcatgtcattgaagctgcagtagaagagtcatttaatatatgaaatataaggcaagacttttcaaaaaaaattctctctcagaaaatacaagtcactttatattcaaatacttacaaagtacctcttgctgtaggaagttttgcaatttccttattttgaatacaaagtaccagctggggatgacacaataccctaaaacaacctcagttaaggctgctttggctaatggtaatcagtgaaacaagataaattaaacacaaatttagtaattatccctggagatataaactcacacttccatgtgtaaactgccattgtaaggccagctttttattttgtttattcattttttactttttttagagatggagtctcaccctgttgcccaggctgtctcgaatttgtgggctcaagctatccacccacttggccttccaaagtgccaggattacaggcatcagtcaccatgcctggccagtagaccaacgttttaaagatcattttagctgggcgcggtggctcatgcctgtactttgggagtccaaggtgggcggatag

SEQ ID NO: 628 - DNA, 1585 bp, Homo sapiens
ggcacgagggtgggcgctctttctttttctcttagaagagggtttagcacaggttttttcgttctcacttccacaccaccttaccgcctcccgaccccccctctccccctccccacctatcgtcatgacggcctctccggattacttggtggtgctttttgggatcactgctggggccaccggggccaagctaggctcggatgagaaggagttgatcctgctgttctggaaagtcgtggatctggccaacaagaaggtgggacagttgcacgaatctagttagaccggatcagttggaactgacggaggactgcaaagaagaaactaaaatagacgtcgaaagcctgtcctcggcgtcgcagctggaccaagccctccgacagtttaaccagtcagtgagcaatgaactgaatattggagtagggacttccttctgtctctgtactgatggggcagcttcatgtcaggcaaatcctgcatcctgaggcttccaagaagaatgtactattacctgaatgcttctattccttttttgatcttcgaaaagaattcaagaaatgttgccctggttcacctgatattgacaaactggacgttgccacaatgacagagtatttaaattttgagaagagtagttcagtctctcgatatggagcctctcaagttgaagatatggggaatataattttagcaatgatttcagagccttataatcacaggttttcagatccagagagagtgaattacaagtttgaaagtggaacttggtaagtgcttgagtactatttatttgagctttttaacttgttttttttttttttgtctgtttgtttgtttttgagacagaatcttgctctgtcgcccaggctggagtgcagtggcacgatctcagctcactgcaagctccgcctcccgggttcatgccattctcctgcctcagcctcccgagtagctgggactacaggctcccgctaccatacctggctaatttttttgtagttttagtagagatggggtttcaccatattagccaggatggtctcaatctcctgacctcgtgatctgcccgcctcgcctcccaaagtgctgggattacaggcgtgagccacctcgcccggcctttaacttgtttttgttccataattgtgcctcttaattcttgttatatttgagaaactttactaatccttttagctatcctttcttgctgttcggtcatctgtaaaagaaggttgtattacttagagcttgatattgggaataaaatgtaatgacttactggcatctttagtcaccctgaccttaagtatattatatgctcatatctgtgattgttattttggtctccccaaactatccaatctttcatttagaaaatttccaaaggagaaattgtaggctttaatagagttcacaatttttactgagataaaattttacgtacattctataagtacatttatttatttatttattttagttttgagacacttgctctgttgcccagctggaatatcgcagtgagctgagatcgcgccactgcactccagcctggtgagagagcaagactccatcttaaaaaaaa

SEQ ID NO: 629 - DNA, 792 bp, Homo sapiens
cagacatggctgaaatccagtcccgcctggcctacgtgtcctgtgtgcggcagctagaggttgtcaagtccagctcctactgcgagtacctgcgcccgcccatcgactgcttcaagaccatggactttgggaagttcgaccagatctatgatgtgggctaccagtacgggaaggcggtgtttggaggctggagccgtggcaacgtcattgagaaaatgctcacagaccggcggtctacagaccttaatgagagccgccgtgcagacgtgcttgccttcccaagctctggcttcactgacttggcagagattgtgtcccggattgagccccccacgagctatgtctctgatggctgtgctgacggagaggagtcagattgtctgacagagtatgaggaggacgccggacccgactgctcgagggatgaaggggggtcccccgagggcgcaagccccagcactgcctccgagatggaggaggagaagtcgattctccggcaacgacgctgtctgccccaggagccgcccggctcagccacagatgcctgaggacctcgacaggggtcaccccctccctcccacccctggactgggctgggggtggccccgtgggggtagctcactccccctcctgctgctatgcctgtgacccccgcggcccacacactggactgacctgccctgagcggggatgcagtgttgcactgatgacttgaccagcccctcccccaataaactcgcctcttggaaaaaaaaaaaaaaaaaaaaaaaaaaaaaaaaaaaaaaaaaaaaa

SEQ ID NO: 630 - DNA, 1351 bp, Homo sapiens
  misc_feature (864)..(864): n equals a,t,g, or c
  misc_feature (876)..(876): n equals a,t,g, or c
  misc_feature (883)..(883): n equals a,t,g, or c
ctttgagcccctctcattccactttagcaatctttttggtaagaactcttaaagccaaaagtctgctgaaaagatttgctgattattagtttaaaaatcttgtaacactcagcagtgctattttgagtcatcccagtttcctgaaagtaatgcccagtcttcctgaatcctccttaatagcagaaccttggtgattttgttggctcatatgaatgcttgtcatggatatgttaacaatttagtgtttgacattgcttcctctgccacaaagacaatactctggtgacacatgtctagacccagcacaggctgtaggcccaggagtgactcaaaggagtttttccctctttcttacggttcaaaggtgaccctggtggtggccagagcagtaatgcttgtttgatgctcttcatggctcatctgcttctcagaacccacccgttgagtttgtgggtaaccagcaggcaggccaaagactggtgcttttcatttcatcctttagagggatgaaacagttatttccgtctgatgagcattcggtagaatttttgaagtgagattttatgaagtcaaaggggactttacacagatctcgacctgctttgaaacctagaggtggccctttgatttgtgcgtgtccttgccctctggacaacttaatatttcaagtaatcgaataccaacttccctgccagcccacctgccttccgccccgcttgtgtaacagtcctgttttgttgagttgctgctattgcactgccagtgcagcccacaccaaatcacaacccaagatactcagataggaagactccttcctctcccagtactttaccaaaggaacccccgccaggacccacatggggnccacgtgttggncagtggnaatcagcctgtgcaggctggggatctcaggctgatcagtaggggccagctttggagccagccaagctgaatcccacactccaggtctgtgctcaagagaccagatggtgtatttccaaatggscctctctggtatgggcaataggcaagctcctggggtctggttatgtggaagattcttagtggatgttccgcctggttagctggttctcttcagagaatataaagtgaatgcctttaggggtagctctgaaagagaaacccaacaacttcattcctagccatgaaagtagcacgatcatattgtactgtattgttattgtaaaatgaytatttgccatgtcatgagtaggtagatgttttgccacaaatatgaatgtgtttgttgttcctgactttaagcaatgaagattgagacaataaatagcactcagagaatgaaaaaaaaaaaaaaaaaatgaccctcgag

SEQ ID NO: 631 - DNA, 1371 bp, Homo sapiens
  misc_feature (1351)..(1351): n equals a,t,g, or c
ctttgagcccctctcattccactttagcaatctttttggtaagaactcttaaagccaaaagtctgctgaaaagatttgctgattattagtttaaaaatcttgtaacactcagcagtgctattttgagtcatcccagtttcctgaaagtaatgcccagtcttcctgaatcctccttaatagcagaaccttggtgattttgttggctcatatgaatgcttgtcatggatatgttaacaatttagtgtttgacattgcttcctctgccacaaagacaatactctggtgacacatgtctagacccagcacaggctgtaggcccaggagtgactcaaaggagtttttccctctttcttacggttcaaaggtgaccctggtggtggccagagcagtaatgcttgtttgatgctcttcatggctcatctgcttctcagaacccacccgttgagtttgtgggtaaccagcaggcaggccaaagactggtgcttttcatttcatcctttagagggatgaaacagttatttccgtctgatgagcattcggtagaatttttgaagtgagattttatgaagtcaaaggggactttacacagatctcgacctgctttgaaacctagaggtggccctttgatttgtgcgtgtccttgccctctggacaacttaatatttcaagtaatcgaataccaacttccctgccagcccacctgccttccgccccgcttgtgtaacagtcctgttttgttgagttgctgctattgcactgccagtgcagcccacaccaaatcacaacccaagatactcagataggaagactccttcctctcccagtactttaccaaaggaacccccgccaggacccacatggggccacgtgttggcagtggaatcagcctgtgcaggctggggatctcaggctgatcagtaggggccagctttggagccagccaagctgaatcccacactccaggtctgtgctcaagagaccagatggtgtatttccaaatgggcctctctggtatgggcaataggcaagctcctggggtctggttatgtggaagattcttagtggatgttccgcctggttagctggttctcttcagagaatataaagtgaatgcctttaggggtagctctgaaagagaaacccaacaacttcattcctagccatgaaagtagcacgatcatattgtactgtattgttattgtaaaatgaytatttgccatgtcatgagtaggtagatgttttgccacaaatatgaatgtgtttgttgttcctgactttaagcaatgaagattgagacaataaatagcactcagagaatgaaaaaaaaaaaaaaaaaaaaaattactgcggnccgacaagggaattcagtgg

SEQ ID NO: 632 - DNA, 3397 bp, Homo sapiens
  misc_feature (1)..(1): n equals a,t,g, or c
  misc_feature (15)..(15): n equals a,t,g, or c
  misc_feature (24)..(24): n equals a,t,g, or c
  misc_feature (3081)..(3081): n equals a,t,g, or c
nggattcgcggccgntccgactgnccgccgggctagcactgacgtgtctctcggcggagctgctgtgcagtggaacgcgctgggccgcgggcagcgtcgcctcacgcggagcagagctgagctgaagcgggacccggagcccgagcagccgccgccatggcaatcaaatttctggaagtcatcaagcccttctgtgtcatcctgccggaaattcagaagccagagaggaagattcagtttaaggagaaagtgctgtggaccgctatcaccctctttatcttcttagtgtgctgccagattcccctgtttgggatcatgtcttcagattcagctgaccctttctattggatgagagtgattctagcctctaacagaggcacattgatggagctagggatctctcctattgtcacgtctggccttataatgcaactcttggctggcgccaagataattgaagttggtgacaccccaaaagaccgagctctcttcaacggagcccaaaagttatttggcatgatcattactatcggccagtctatcgtgtatgtgatgaccgggatgtatggggacccttctgaaatgggtgctggaatttgcctgctaatcaccattcagctctttgttgctggcttaattgtcctacttttggatgaactcctgcaaaaaggatatggccttggctctggtatttctctcttcattgcaactaacatctgtgaaaccatcgtatggaaggcattcagccccactactgtcaacactggccgaggaatggaatttgaaggtgctatcatcgcacttttccatctgctggccacacgcacagacaaggtccgagcccttcgggaggcgttctaccgccagaatcttcccaacctcatgaatctcatcgccaccatctttgtctttgcagtggtcatctatttccagggcttccgagtggacctgccaatcaagtcggcccgctaccgtggccagtacaacacctatcccatcaagctcttctatacgtccaacatccccatcatcctgcagtctgccctggtgtccaacctttatgtcatctcccaaatgctctcagctcgcttcagtggcaacttgctggtcagcctgctgggcacctggtcggacacgtcttctgggggcccagcacgtgcttatccagtkggtggcctttgctattacctgtcccctccatggtccatgaactcaaccggtacatccccacagccgcggcctttggtgggctgtgcatcggggccctctcggtcctggctgacttcctaggcgccattgggtctggaaccgggatcctgctcgcagtcacaatcatctaccagtactttgagatcttcgttaaggagcaaagcgaggttggcagcatgggggccctgctcttctgagcccgtctcccggacaggttgaggaagctgctccagaagcgcctcggaaggggagctctcatcatggcgcgtgctgctgcggcatatggacttttaataatgtttttgaatttcgtattctttcattccactgtgtaaagtgctagacattttccaatttaaaattttgctttttatcctggcactggcaaaaagaactgtgaaagtgaaattttattcagccgactgccagagaagtgggaatggtataggattgtccccaagtgtccatgtaacttttgttttaacctttgcaccttctcagtgctgtatgcggctgcagccgtctcacctgtttccccacaaagggaatttctcactctggttggaagcacaaacactgaaatgtctacgtttcattttggcagtagggtgtgaagctgggagcagatcatgtatttcccggagacgtgggaccttgctggcatgtctccttcacaatcaggcgtgggaatatctggcttaggactgtttctctctaagacaccattgttttcccttattttaaaagtgatttttttaaggacagaacttcttccaaaagagagggatggctttcccagaagacactcctggccatctgtggatttgtctgtgcacctattggctcttctagctgactcttctggttgggcttagagtctgcctgtttctgctagctccgtgtttagtccacttgggtcatcagctctgccaagctgagcctggccaagctaggtggacagacccttgcagtgatgtccgtttgtccagattctgccagtcatcactggacacgtctcctcgcagctgccctagcaaggggagacattgtggtagctatcagacatggacagaaactgacttagtgctcacaagcccctacaccttctgggctgaagatcacccagctgtgttcagaattttcttactgtgcttaggactgcacgcaagtgagcagacaccaccgacttcctttctgcgtcaccagtgtcgtcagcagagagaggacagcacaggctcaaggttggtagtgaagtcaggttcggggtgcatgggctgtggtggtgktgatcagttgctccagtgtttgaaataagaagactcatgtttatgtctggaataagttctgtttgtgctgacaggtggcctaggtcctggagatgagcaccctctctctggcctttagggagtcccctcttaggacaggcactgcccagcagcaagggcagcagagttgggtgctaagatcctgaggagctcgaggtttcgagctggctttagacattggtgggaccaaggatgttttgcaggatgccctgatcctaagaagggggcctgggggtgcgtgcagcctgtcggggagaccycactgctgrcagtgctagccaggaaacagagtgaccaagggacaagaagggacttgcctaaagccacccagcaactcagcagcagaaccaagatgggccccaggctcctccatatggcccagggcttaccaccctatcacacgtggccttgtctagacccagtcctgagcaggggagaggctcttgagacctgatgccctcctacccacatggttctcccactgccctgtctgctctgctgctacagaggggcagggcctcccccagcccacgcttaggaatgcttngcctctggcaggcaggcagctgtacccaagctggtgggcagggggctggaaggcaccaggcctcaggaggagccccatagtcccgcctgcagcctgtaaccatcggctggccctgcaaggcccacactcacgccctgtgggtgatggtcacggtgggtgggtgggggctgaccccagcttccaggggactgtcactgtggacgccaaaatggcataactgagataaggtgaataagtgacaaataaagccagttttttacaaggtaaaaaaaaaaaaaaaaaaaaaaaaaaaaaaaaaaaaaaaaaaaaaaaaaaa

SEQ ID NO: 633 - DNA, 2812 bp, Homo sapiens
aaagttcatgttgttgatctaaaggcagaatctgtagctgctcctataactgtycgtgcttacttaaatcagacagttacagaattcaaacaactgatttcaaaggccatccatttacctgctgaaacaatgagaatagtgctggaacgctgctacaatgatttgcgtcttctcagtgtctccagtaaaaccctgaaagctgaaggattttttagaagtaacaaggtgtttgttgaaagctccgagactttggattaccagatggcctttgcagactctcatttatggaaactcctggatcggcatgcaaatacaatcagattatttgttttgctacctgaacaatccccagtatcttattccaaaaggacagcataccagaaagctggaggcgattctggtaatgtggatgatgactgtgaaagagtcaaaggacctgtaggaagcctaaagtctgtggaagctattctagaagaaagcactgaaaaactcaaaagcttgtcactgcagcaacagcaggatggagataatggggacagcagcaaaagtactgagacaagtgactttgaaaacatcgaatcacctctcaatgagagggactcttcagcatcagtggataatagagaacttgaacagcatattcagacttctgatccagaaaattttcagtctgaagaacgatcagactcagatgtgaataatgacaggagtacaagttcagtggacagtgatattcttagctccagtcatagcagtgatactttgtgcaatgcagacaatgctcagatccctttggctaatggacttgactctcacagtatcacaagtagtagaagaacgaaagcaaatgaagggaaaaaagaaacatgggatacagcagaagaagactctggaactgatagtgaatatgatgwgagtggcaagagtaggggagaaatgcagtacatgtatttcaaagctgaaccttatgctgcagatgaaggttctggggaaggacataaatggttgatggtgcatgttgataaaagaattactctggcagctttcaaacaacatttagagccctttgttggagttttgtcctctcacttcaaggtctttcgagtgtatgccagcaatcaagagtttgagagcgtccggctgaatgagacactttcatcattttctgatgacaataagattacaattagactggggagagcacttaaaaaaggagaatacagagttaaagtataccagcttttggtcaatgaacaagagccatgcaagtttctgctagatgctgtgtttgctaaaggaatgactgtacggcaatcaaaagaggaattaattcctcagctcagggagcaatgtggtttagagctcagtattgacaggtttcgtctaaggaaaaaaacatggaagaatcctggcactgtctttttggattatcatatttatgaagaagatattaatatttccagcaactgggaggttttccttgaagttcttgatggggtagagaagatgaagtccatgtcacagcttgcagttttgtcaagacggtggaagccttcagagatgaagttggatcccttccaggaggttgtattggaaagcagtagtgtggacgaattgcgagagaagcttagtgaaatcagtgggattcctttggatgatattgaatttgctaagggtagaggaacatttccctgtgatatttctgtccttgatattcatcaagatttagactggaatcckaaagtttctaccctgaatgtctggcctctttatatctgtgatgatggtgcggtcatattttatagggataaaacagaagaattaatggaattgacagatgagcaaagaaatgaactgatgaaaaaagaaagcagtcgactccagaagactggacatcgtgtaacatactcacctcgtaaagagaaagcactaaaaatatatctggatggagcaccaaataaagatctgactcaagactgactctgatagtgtagcattttccctgggggagttttggttttaattagatggttcactaccactgggtagtgccattttggccggacatggttggggtaacccagtgacaccagcactgattggactgccctacaccaatcagaagctcagtgcccaatgggccactgttttgactcggaatcatgttgtgcactatagtcaaatgtactgtaaagtgaaaagggatgtgcaaaaaaawararaaaaacaacaaraaragctaaccttctattasawaaggggacaggggaatgagtaracttcttttattgcggacaaatgtgcacatagccgctagtaaaactagcctcaaacaggatgctcatagcttaataataaaagctgtgcaaaggccatgaatgaatgaatttcctgtttatttcactgatgcacacattacctcattgaacaattcagaagtaaatccaacgtgtgttgactcttggaaagcagcaaaarcaggagctgaagaaaagaaattcttggaaccagccgtaacccagtaaggaattgtgaagttgtgtttttattttgtttcattttttgcagagtattaagaacattattctggaacatcagaacgtttcccttagaccgatcccagcaggtggcagctcagattgctgcagtgttgtaattataactgattgtacttaagttatggatgtagagaatatgtttcattcatttattcagcatgtaaataaaattgatcctgttgagttatcataattgcagttcaactatctgccmtggttattcttttcacgtatcattcattctgtacatttgg

SEQ ID NO: 634 - DNA, 1145 bp, Homo sapiens
  misc_feature (251)..(251): n equals a,t,g, or c
  misc_feature (901)..(901): n equals a,t,g, or c
  misc_feature (1142)..(1142): n equals a,t,g, or c
  misc_feature (1145)..(1145): n equals a,t,g, or c
gccgcgctcctgcctcctgccccagcaggcaggaagaatgggggctgacctctacctcggtgctcaagagagaggccccagctggcagggacccagaagagcctggagatgttggtgctggagaccccaactctgatcagggactccctgtgctgatgactcagggaacagaggacctaaagggcccaggacaaaggtgtgagaatgagccactgctggaccctgttggccctgagcctctggggcctganagtcagtcagggaagggagacatggtggagatggccacacggtttgggtccaccctgcagctagacctggaaaagggaaggagagtctgttggagaagaggctggtggcagaggaggaagaggacgaagaggaggtggaagaggatggccccagcagctgctcggaggacgattacagtgagctgctgcaggagatcacagacaacctgacgaagaaggagattcagatagagaagatccatttggacacrtcctccttcrtggaggagctgcctggagagaaggaccttgcccacgtggtagagatctatgactttgaaccagcgctcaagacggaggacctgctggcaacgttttctgagttccaagagaaggggttcaggattcagtgggtggatgatactcacgcactcggcatctttccctgcckggcctcagctgcggaagccctgacccgggagttctcggtgctcaagatccggcccctcacrcagggaaccaagcagtcaaagctcaaagccttgcagaggccaaaactcctgcgtctggtgaaggagaggccacagacaaatgcgactgtggcccggcggctggtggcccgggccctgggactccaacacaaaaagaaagagcggcctgctgtccggggntccgctgccgccctgaggcctggagacccaactggcctggatctgcgtcccgacgtagctggcgcccccaacaccataagccttcacagacgccagagcagccccgcaccaccctcgagcttcaccatggggtgtggtgggctttagtttagtcccagaaatggagaaaaaataaaaactcacgttgttctaatgtgaaaaaaaaaaaaaaaaaaaaaaaaaaaaaaaaaaaagggggggnccn

SEQ ID NO: 635 - DNA, 1509 bp, Homo sapiens
ggcacgagtaactgcctactatccaatgtcagttaattggtgtcttcccccctcatttgctctcttccctaaaatgtgtcccagatgccttcatttgctgttttacttctatgttctgcttttcctcctctctttgttcccttcctgtctatccattgagtttatgaaatggaagagttaactgcatgcactagtgtttggagggtgttgtggtttgtctttctaattaggtgtatagcctattcactttcctagaataaatctcttaacctaaatttgagtagtctgcattttggcaactcctctagcagcttggtagcctagtacaggttgtttttttaaaaaaggaaaagcaggaaggaggagtgaattttattaacatgtttgccaaatgtattgagatttggcctctgaagaacactttttcagtgttaagtttctttaccttaagattcagaaatactttagaatattattaattttaagtcctgtctttacatccttttggaaaacttgtattaccatgagtttggaaaaaggacaacgaaaggcttttcatgtaaagataagatctttagctatctctaaccctgtccttttttcactgcattttttctagttttgcttcattgcttatcattaggatagggtaagtgaagtttgctatgctgctagcatcctaagatgatacctttgttgaaagaattgtgaatagcatgattcatttctagcagaggctgagtttaggacagcagcttccattgagaagtctttctgtgtcgtgaatagcattttaatgacctcttggctcacataagcaaacaacatagggacgtatctgctatgaaaatccacaaatttttcagatagtgccctaaaaacaattttatatgcctcactggttgttattcttaggttattcccacacttgactttatcattgtttactactagtaaaaagcagcattgccaaataatccctaattttccactaaaaatataatgaaatgatgttaagctttttgaaaagtttaggttaaacctactgttgttagattaatgtatttgttgcttccctttatctggaatgtggcattagcttttttattttaaccctctttaattcttattcaattccatgacttaaggttggagagctaaacactgggatttttggataacagactgacagttttgcataattataatcggcattgtacatagaaaggatatggctaccttttgttaaatctgcactttctaaatatcaaaaaagggaaatgaagtataaatcaatttttgtataatctgtttgaaacatgagttttatttgcttaatattagggctttgccccttttctgtaagtctcttgggatcctgtgtagaagctgttctcattaaacaccaaacagttaagtccattctctggtactagctacaaattcggtttcatattctacttaacaatttaaataaactgaaatatttctaaaaaaaaaaaaaaaaaa

SEQ ID NO: 636 - DNA, 1365 bp, Homo sapiens
  misc_feature (2)..(2): n equals a,t,g, or c
  misc_feature (7)..(7): n equals a,t,g, or c
cnctgtncggaaatctcttttgttgattyaacyaagactgaaaataaccacttgtaaacattcctatgattgttactaaaatgtattttcatgtttaaaatgtttttggatatttttgggttaataactactacattgaattgcatgttaaggtgcagaaataatacattaaaagattttcactttaaattaattagtaatattgagcgctcaccctgtgcgtggccttgtgctaaccattagcactgcatcatttcaattcttttataagggcattcaatactacaaaatcaacatgatttcataaggtgcaaataaaagttggtgacagatttaatataattttgatcacaatttacaaatgatctttgcaaatagtggtcagacggcattagtttttcccttagttaagctaaattaaagggactccatcctgttatgattatattattattattattattattatttttgaggtggagtttcactcttgttgcccaagctggagtgcaatggcgcgatctcggctcaccacaacatccgcctcctgggttcaagcgattctcctgcctcagcctcctgagtagctgggaatacaggcatgcgccactacacctggctaatttttgtatttttagttgagatggggtttttccacgttggtcaggctggtctcgaactcctgacctcaggtgatccgtccacctcagcctcccaaagagctgggattacaggtgtgagctaccgcgcctggccatgatgatattattaaacaccattattcacatttcaaataataacaatactttttgtttttcaaaaataaaatgcaatgttatataaagctataaactaagttctttatgatatttgagcaacaactcaggaatataacatataagggagatgttaatttaaaaatttccactacacttattatctattaaccaaagcttaaaattttgtattcttctgttagataagaccttttacccatttaatttgtctttaaggacagtcatttggcttctgaatgtttgaaacgattttaaaaaataagtagtgctatggttgtttctataattctaacctttgatagtaatcagaatgtattacatttcatttctgaatagcttttgaatttatgaaaaattattaacaatgaaaaattggtaattttattaagttatatgtgtttaaatattatattagcttatttctcttgcattaatagtactgctgtttttgttttgcttctttatatttatgtctagcttttatatgtaatttatctagtgtttataaaatgtgatttgtaataaatgttgttaaaatgaaaaaaaaaaaaaaaaaaaaaaaaaaaaa

SEQ ID NO: 637 - DNA, 1857 bp, Homo sapiens
ggcacgagcaaaaaataattcttttaagaaaaaatgtaaaaatgtttattctaaaaagctgcattaaagggacaacctataaaaagttttgctagctcatctttagaaggaagaaagaatattagcttgggtgatgtttaatttgggtggcgatagtttctgtaggctaaacttgatgagaaaagtgtacctactctataaaggtaataaatgtaaaacctcttgctgttattgaggaagctcttcaactaccctaaatttcacaaatgtaacttataacactatgaaaagattgaccaacaatttacgtttgctgtgtgcttagtttttgtttaagcatattctttgctgaattctgtgttcatgagagttaggtgttttatgctctgaactaatttataacatatttaatatattaccagttaagatataaaatcatttgtacatagcgaattgtaaagcagctattaaagtaggtgaaataaagtatatatttgccggttatccatatcttttagaagtcctgacagaacaaccagtttatttgcacataggtagcttctgtttgaaggaaggtaaagttataaggaaactcaaatactataagatgtgtcaaggtatttctccagaattaattgcaaagctagtgctgaaggattttaatcagcttctaaaattttcttctcaataaggcatatgttttgattacttagggaagattcctcatttttatttgccctttatgcatttaatccacatgataggacattaaaaattaatataaagaaaaatcgtgctcatactgtacatctgtttctgtgcttggaactacttgttaatagtttttatcgaagctgtcagcaataagggacataaaactgctgtattatacattgtggaattgaataaacagcctaattttttttttctagtatagggtacttaagcatttccacttttggaagaaaagtgtattagtattttatattgcatttcatttaaaaggacagtttttttttttttttttgtaaatccattcattgaaatggtttctaaactgtataatgtaatttggagcctatttagtaatagaattaaatgtcctatgtagtgctacaatttttgaattagaaagtgatcaaatgtaagaaaaaaatttaaaaattcagcccagaaaacaaaatagtgtattaaattagtttaatgtaaaaggaatttataagatttttttcctcaatatagatacctcacttgaaaagaaagcacagcatacttaaagtagttctagtaaacatgtcctagaaaacagttgctaaatgtaggacatcttttgaggaattagtttatgagaaataaaattttacttgtttttactatcctgttagaagtatttgtttatcctgataattttaagccaacatagtagtcttaaattacttttgaattcctaatctgtgaaggcagtaaatgaaatatctgttctgcaactgttgaaacaaataattggctacattgaccataattaaagttaaaattttgccaatgatgtacagttttatggttaaagttgctgtggttggttgcattacatgacacagaaaactgtcctctacctcacgtgaaataaatattttatatggttttactaaaaataagactcatgtatctggtcacctagtttacaaattttgaattatatttattgaaacatgacatactgtgctctgagcttatacctcaattgtattttgtgctgttttccattttcatgccttgtaaataacttgtatagattgtggatcaaatactaaataaaaacttttaatgccaaaaaaaaaaaaaaaaaaaaaaaaaaaa

SEQ ID NO: 638 - DNA, 1810 bp, Homo sapiens
cggcacgagctgcttctcagccaggtgtcttgcaaatgtgtggttttatccctatggggaaccccatgggaacgatggacatatggcagactgaacagacacaccccatcactggagatcctgtgcagaaatcatgagctgtgctctcacacacacagttccctcgactaggtctgctttcttgttcttactgattttgtaagcttttcagagctgatgataaaatttgtgcttataccaggaaaacagaaaaggatgttgctcttaagtcactggcaacattctaataacatgcacttaactggcttgatctttttgttcttggtttctcatcctaatcaagacccttggctgtcttgtcagaaagagagcagcagagaaaatagtgaccttgaatattaagacattgggcaagaaaaagatattcatccaggcttctcatataacaggatgtctagactaataccactttgttttattatgtccaatactaggaatctttgagggattaaaagagaaaagttcaccttggcttcttttttaaaaattcagaagattaaacataaaattttaaccagtgtttactgattccttttcaattttatattatgatcagttaaggtacaggagagaaatcctgagatccaagaggaatcaagagtagaaagagaagaaagaggcaagaggaaaggagaaatggtgctaagacagaggaggttgccctggctgagtgctgcctaaactcagcaactgctcctcatcccaccagtcatccccttcagatctgctggactgacaggactcttcctcttgctgcacctgggccccaggtcctaattcggtttacctggttccctgccaaaaattcttaaagcagtgttcaggcctcctccagcatgtgctccaggttaccaccccatcactgagaactgttgctccatgtgctcttagtggaagtcccacgtgcctttttttcttcccagtgtaaactttcctctctgcccccgagtgtcccttgttcatgttgtgttgtatttttgtgtgtggttatgagatgattaatgtttgcatcttcccacctctgtccatcgttcccaggtcttcccttgagagaggagaagagtggttcccaaataccatttaagcactagtgatagagacaaagttcttgtcagactatggcaaaatgagaaaaataaaggggaacatagaatatggaaacacatactgcattgtttataagtgcatatgtgtatgaaacctcattggtggaagcactctgaaaaaccatgaaatgttgtggaactgtgcattattgttgttgttgtttttttttttttaatctccatttaaccttagagtcttgcagctgccccagctaaccactagaatgcaaggcctgtggctgccatcgcttcccttcctctccagcgcacaaacttatttctgtcagcatttcctcctggggaagaattgcctcttgcctgggccacacctgttcagaggtatagcccatcaaacttacagacttggcctctaagaggacccaaaagaagtatgattttaggaaatttatactactctgccttcttttatcttagtgcagtagtgttatctttctaagacttacaagcatttcttgtttcttgtttgggattgtttgaatggaaggcatgatcccttccttacgttgcttacattccaaacgttttatcgtccttgtaagcaaacaagacaatttatggcattgccaaaaagtgtccgtgtaagctttaaaattacttacatgttcaaaaaaaaaaaaaaaaaa

SEQ ID NO: 639 - DNA, 1879 bp, Homo sapiens
  misc_feature (41)..(41): n equals a,t,g, or c
agacctttgataacataaccattagcagagaggctcagggngaggtccctgcctcggactcaaagaccgaatgcacggccttgtaggggacgccccagattgtcagggatkgggggatggtccttggagttttgcatgctctcctccctcccacttctgcaccctttcaccacctcgaggagatttgctccccattagcgaatgaaattgatgcagtcctacctaactcgattccctttggcttggtgggtaggcctgcagggcacttttattccaacccctggtcaytcagtamtstkttactccaggaaggcacaggatggtacctaaagagaattagagaatgaacctggckrgacggatgtctaatcctgcrcctagctgggttggtcagtagaacctattttcagactcaaaaaccatcttcagaaagaaaaggcccagggaaggaatgtatgagaggctctcccagatgaggaagtgtactctctatgactatcaagctcaggcctctccctttttttaaaccaaagtctggcaaccaagagcagcagctccatggcctccttgccccagatcagcctgggtcaggggacatagtgtcattgtttggaaactgcagacacaaggtgtgggtctatcccacttcctagtgctccccacattccccatcagggcttcctcacgtggamaggtktgctartccaggcagttcacttgcagtttccttgtcctcatgcytcggggatgggagccmcgmcygaactagagttcaggctggatacatgtgctcacctgctgctcttgtcttcctaagagacagagagtggggcagatggaggagaagaaagtgaggaatgagtagcatagcattctgccaaaagggccccagattcttaatttagcaaactaagaagcccaattcaaaagcattgtggctaaagtctaacgctcctctcttggtcagataacaaaagccctccctgttggatcttttgaaataaaacgtgcaagttatccaggctcgtagcctgcatgctgccaccttgaatcccagggagtatctgcacctggaatagctctccacccctctctgcctccttactttctgtgcaagatgacttcctgggttaacttccttctttccatccacccacccactggaatctctttccaaacatttttccattttcccacagatgggctttgattagctgtcctctctccatgcctgcaaagctccagatttttggggaaagctgtacccaactggactgcccagtgaactgggatcattgagtacagtcgagcacacgtgtgtgcatgggtcaaaggggtgtgttccttctcatcctagatgccttctctgtgccttccacagcctcctgcctgattacaccactgcccccgccccaccctcagccatcccaattcttcctggccagtgcgctccagccttatctaggaaaggargagtgggtgtagccgtgcagcaagattggggcctcccccatcccagcttctccaccatcccagcaagtcaggatatcagacartcctcccctgaccctcccccttgtagatatcaattcccaaacagagccaaatactctatatctatagtcacagccctgtacagcatttttcataagttatatagtaaatggtctgcatgatttgtgcttctagtgctctcatttggaaatgaggcaggcttcttctatgaaatgtaaagaaagaaaccactttgtatattttgtaataccacctctgtggccatgcctgccccgcccactctgtatatatgtaagttaaacccgggyaggggctgtggccgtctttgtactctggtgatttttaaaaattgaatctttgtact

SEQ ID NO: 640 - DNA, 1879 bp, Homo sapiens
  misc_feature (41)..(41): n equals a,t,g, or c
agacctttgataacataaccattagcagagaggctcagggngaggtccctgcctcggactcaaagaccgaatgcacggccttgtaggggacgccccagattgtcagggatkgggggatggtccttggagttttgcatgctctcctccctcccacttctgcaccctttcaccacctcgaggagatttgctccccattagcgaatgaaattgatgcagtcctacctaactcgattccctttggcttggtgggtaggcctgcagggcacttttattccaacccctggtcaytcagtamtstkttactccaggaaggcacaggatggtacctaaagagaattagagaatgaacctggckrgacggatgtctaatcctgcrcctagctgggttggtcagtagaacctattttcagactcaaaaaccatcttcagaaagaaaaggcccagggaaggaatgtatgagaggctctcccagatgaggaagtgtactctctatgactatcaagctcaggcctctccctttttttaaaccaaagtctggcaaccaagagcagcagctccatggcctccttgccccagatcagcctgggtcaggggacatagtgtcattgtttggaaactgcagacacaaggtgtgggtctatcccacttcctagtgctccccacattccccatcagggcttcctcacgtggamaggtktgctartccaggcagttcacttgcagtttccttgtcctcatgcytcggggatgggagccmcgmcygaactagagttcaggctggatacatgtgctcacctgctgctcttgtcttcctaagagacagagagtggggcagatggaggagaagaaagtgaggaatgagtagcatagcattctgccaaaagggccccagattcttaatttagcaaactaagaagcccaattcaaaagcattgtggctaaagtctaacgctcctctcttggtcagataacaaaagccctccctgttggatcttttgaaataaaacgtgcaagttatccaggctcgtagcctgcatgctgccaccttgaatcccagggagtatctgcacctggaatagctctccacccctctctgcctccttactttctgtgcaagatgacttcctgggttaacttccttctttccatccacccacccactggaatctctttccaaacatttttccattttcccacagatgggctttgattagctgtcctctctccatgcctgcaaagctccagatttttggggaaagctgtacccaactggactgcccagtgaactgggatcattgagtacagtcgagcacacgtgtgtgmatgggtcaaaggggtgtgttccttctcatcctagatgccttctctgtgccttccacagcctcctgcctgattacaccactgcccccgccccaccctcagccatcccaattcttcctggccagtgcgctccagccttatctaggaaaggargagtgggtgtagccgtgcagcaagattggggcctcccccatcccagcttctccaccatcccagcaagtcaggatatcagacartcctcccctgaccctcccccttgtagatatcaattcccaaacagagccaaatactctatatctatagtcacagccctgtacagcatttttcataagttatatagtaaatggtctgcatgatttgtgcttctagtgctctcatttggaaatgaggcaggcttcttctatgaaatgtaaagaaagaaaccactttgtatattttgtaataccacctctgtggccatgcctgccccgcccactctgtatatatgtaagttaaacccgggcaggggctgtggccgtctttgtactctggtgatttttaaaaattgaatctttgtact

SEQ ID NO: 641 - DNA, 556 bp, Homo sapiens
tgacctgtctgggcccagcatgttgcagatgtgtatttatgcgcaatggtatgcatatctctgtgtgactgtcagtgttgcaagctggctggatccaaccatctcttctgaaataatgcatccaaagggttgatattctgggggaggtcactgcagaaggatggaactgacctttattccccagtgggcagttactgagctttcctcctcagagccatgctggcagccctgggacagagaacggtgtggctttggctgcctctgcatggaatcttgccccggactcctgaagactgcacaaggaatgaggaagatcagggacaacctgggaactgaataactttcaaagccagtgctcagcttctctgctccgtactagcgtttacaggtcttaattcaaaccagatgcctgtactagtttttagaccccaagtcaacctttctgagccacagcttcccgctgggaataatgatgcctgccctatctacctcacagacttgttatgaggataaagtgagattaaactgcctcaaagtgaaaaaaaaaaaaaaaaaa

SEQ ID NO: 642 - DNA, 1632 bp, Homo sapiens
  misc_feature (244)..(244): n equals a,t,g, or c
  misc_feature (1116)..(1116): n equals a,t,g, or c
  misc_feature (1300)..(1300): n equals a,t,g, or c
atgtactgatatactataaactctaggagaaaacttaattgaaatagtgttattaagtgttgaaagtaccataaaaatataagggaaaataagctttcctagaatttttcagtgttctagtttataaacagtgatgttttttattaacctatttcatccattcaaagacaggcctttctccacaccacattttcctctaaaatcatgataacacttttaaattgatggtgtcttccagtgtgtntcagccagatggcagtgtgttacagttccaggaaaatcgttcacatcttccgtaagatcaagaaggctctggcatcagataagatcaaatgttgtctttctgttttaaatatgtgccgcaaagagatttgcttacaatctattgagaaagctaaaacagagcagacattgtcctgttgcggggtagatgaatagcctaagaatagtttagacaaattctgaaaacgaatttaccttagaagatgttcatgttagatctggtaaaagtaacatgttatttttctgtcaagccctttttgtacttgccgtttattacatattttagatttattttttattttcgaaacatccaaaaaggaatgctaattagtgaaatggaagaatttccatttcaacaccttaggaaaaaaaaaactgacttgacatacctaagaaaaggccaagttgatttactttgtcagtctcttcatttgtgatacgtaaagtccgttgttacctagataaatgtaggtttgatttcttggaagcaatcacttaagactttccattttcttcaaagcatcttactcaacctgcatgtgggatctgtactgagcaattagagattcaaaacaactgtcacacacgacagaggtggtaaccgcccaacaggttcacctcttccgccgcctacacagagccgatttatcaagacaggaattgcaatagaggaagagtacacagagctgcttgtgcaggagactggagtcttattagtactcaaatcgatctccctgagcattcggggatcagagtttttaaggataatttggtgggagggggaaggccagtgagtcaagggtgttgattggttgggtcggagatgaaatcatnaaggaattgaggtgtccttttgtgctaagtcagttccagggtgggggccacgagatcagatgagccagttaatcgatctgggtggtgccagctgatccgtcgagtgcaggtctgcaaaatatctcgagcaccgacataggagcagtttagggagggtcagaatcttgtagcttccagctacatngactcctgaaccataatttctaatcttgaggctaatttgttagtcctacaaaggaaatctagtccccagacaagaagggggtttgtcttgggaaagggctgttatcatctttgttttaaactataaactaaactaagtttctcccaaagttagttgagcctacacccaggaatgaacaaggacagcttggaggttagaagcaagatggagttggttaggtcagatctctttccccacctcagttacaattttgcaaaggcggtttcagaatcagagcacgaagtgttcctataaaaaaaaaaaaaaaaaacctttccttaattatgctcata

SEQ ID NO: 643 - DNA, 1380 bp, Homo sapiens
gggaaaggaagggatggtgggccaggtggctctctagatgggaggtgtccgggaacttgcaggtctcaagcctgggtgactaggaggatggtgcgcaaaacaggaaaggcaggacgcggctgctgggttcctttctcgagtgcacgcagggctgaaaggaggggagctgagatgagaacggcccttttccccactgaatgctgcctgcccatgtgtgtcgtcttagctgttttctatttgcccatcgtgtttagtagaataattgaatctgcagacagttttgactagtccattttgcctctcactccaccccgctgcctctcgtgctttctctctctcttccttacctgcctgctgccagctccttgcctcccctctgattactgcgcccccgcaataactcactgtttgatcttccacatacgggaactcgaaacccagctactgtctgcccagcaaggctgcagtgtccagggtgacccaggccatgtcctgcactgattgtaatcctcctctgcgcctaacacagagccttacgtgtataccgagtagaggagaaggaaggatgtcaaacatgtcactaccaccccccagtgcatgttggtctccctcacgctggactgtggcaggagtcttccaaaactgctctcagtgccccatcccctctgtgtgcaatcatatcgttgcttacttaaccaaccattcatctcctagggcctgagttctgttacccagcctcctcagaatcttcagcagttcctcatttccataggggaaagccagctgtttatttcctttacttatgcaacgaataagtcagtgtcagatagtatttttgttgataaagccwcagcggmgagcaaaacattttggtcctgcttcctgtgagctgactttctgcaagggagagagatgataaatgcacatataatatagttgagagtgatcagtgctgcaaggaaaagcagagctgaggaaggagcaaatggtggagagggaggagagggagtggtgctggcctagacggtcaaaggttgctgtggtaaggggacactggagttaagatctgagtgaggctgggtgcggtggctcatgcctgtaatcccagcactttgggaggatgaggtgggcggatcacttgaggtcaggagttcaagaccagctcgggcaacatggctaatccccatctctactaaaagtacaaaaattagcctggcatggtggtatgcacctgtaattccagctacttgggaggctgaggcaggagaattgcttaagcccgggaggggaaggttgcagtgagccgagatcacaccgctgcactccagcctgggcaacagagtgagactctgtcacaaaataaaatataaataaaaaaaa

SEQ ID NO: 644 - DNA, 1380 bp, Homo sapiens
ggcacgagaaacaattagccgagcgaggtggtgcacgcctgtaatcccagctactggagatgcaaaggttagccaggtgtggtggtgcatgcctgtaatcccagctacttgggaggctgaggcaggagaattgcttaaacctgggaggtggagattgtggtgagctgagatcgtgccactgcactccagcctgggagatagaacgagacttcctgttctgttgtttttccgttttgtcaaaatatctcctatgttcttggcttccttttcgtcgccaggttttcagctttcctttagctcttcttctaatatggcttctgcccacaaaagcctgctctgtcaggatctcatggttctccacttgccagaaccttcttcagcctcagttcctcggcctcaacttgtacgtttaacccattgaccaccaccccccaaattcaccttcatttctttgaccctgctcctcactccttttctgttgaggaatctgttgactaactccaggctcactcaggctcaccgtcctgctctctgcaccagcctttccagagcgtgccagttctcatggcttcactgttaactgttgatcgcttcagtcctgatttttagacctaaatggtttccttaacgccattctaactgcctgtgactcattttcacttacagtgtttattgtaacgccaaaccaacaaatcacaggtgcttgcttctctccataaatctccccagtctaactttttgtcattcaacatgactcgtttatccaacctgaaatcgcatatagccccaagtatggtgttttgtacacaggtatttaataagtgacttccagttttggctctgctatgaataaaaagagatttcagttctcttcactttgaaatctaacaactcagagaacattgaagaaattggaatttagttgggatgaaatacttgtggtttaaaatatttctgttcatattttctaatttgttgccggaggtcttgggttttctatttgagtgcttgcaaactcaatgtgatttctgtcagcatatcttaggtttgtttgttatgaaacttacgcagtgtgaggttctatctgaaaatgttatttagctatcttctgggactatttaatgaaagtggggtcatgaatccttaaaattcttgtgcgctttgagaaacatttctgttatttgggtatcagtttgtaagtgtggtaaagccaagatggaaacgagcactttgctttcttggttgttgttactggtctaacctgcttgaactagtctgctgtcctgtcaaatgcatctttttatttacatgtcccttaaattaaagctgatcatgaaagtaaaaaaaaaaaaaaaaaaaaaaaaaaaaaaaaaaaaaaaa

SEQ ID NO: 645 - DNA, 1048 bp, Homo sapiens
gccgtcctgcaggtggttgccatcgcggccttcaccaggtagctacggacacccgggaataccccacactggggccctcctcctgggcctgaccagtcccccagctgtcacctccccattcctggacaggaagggcacttttcctagtgaactggccatagatggttttggatggttccatctgttctggcaggagtgggagcaggagccagggcagaacaaactgctggaggccctggtgttgggaacagctgcggggagggtagggaccagacagaactgccttcaagatgagtcccaggagcgcacactcagccctgtcagtggggtctggctttagcagccaggcctccacagacccccatgggcccccagggccgagagggaggacagagcccttcagaacagaggcctcatctcactgcatcccccatcaccccctagttccccaatggtcctaatttgtgttctgagatcccagtttactccgtggccaggccccacctgtgtttccaagtcgggctggagacgcaggatggggtaggccttgtgctctgagcaaccccagctctgcctcacaggcaggcaggcccggtgcaagagtggactctgggttcctaaagcaataaatgcaaacaagccaacagctctgctgcctagcaatttccatcttagccacacttctcccttcaggggcttcggaggagaggtcagggctaaggccggggatgagactgcaggagagagagcagcggagggccacattcggagcctccgtccactccagttttatcagcttttgccttttgcacggagtgctaaacaaattctagctctgtgtttttttcccattcccagatttactatcagttctccttaaaaagtatctaagctgttacagtagctttcccttcacttgattctattgtgtgttttctatgtttggaataattacacccaaatatctagatattttctcttcaccgcattttgtaaataaagagatgtgtatgccwmmmwraaaaaaaaaaaaaaaaagggcggccgc

SEQ ID NO: 646 - DNA, 1882 bp, Homo sapiens
  misc_feature (1407)..(1407): n equals a,t,g, or c
  misc_feature (1412)..(1412): n equals a,t,g, or c
gaattcggcacgaggtaaatgtggtgtttctcctagctgtgaactgtgtcctaatcaggatggaattttcaaggagacagatgctggaagatgggttcatattgtttgtgccctgtatgttcctggagtagcctttggagatattgacaaattacgaccagtaacactaacggaaatgaactattccaaatatggtgccaaggagtgtagcttttgtgaagaccctcgctttgctagaactggggtttgcattagctgtgatgcagggatgtgcagagcctatttccatgtgacctgtgctcaaaaggaaggtctgctttcagaggcagcggcggaagaggatatagcagatccattcttgcttattgtaagcaacatgcagataggttagacagaaagtggaagagaaaaaactacttggctctacagtcctattgtaaaatgtctttgcaagagagagagaagcaactatcaccagaagcacaggcaaggatcaatgcccggcttcagcagtatcgtgccaaagcagaactagctcgatctaccagaccccaggcctgggttccaagggaaaaattgcccagaccactcaccagcagtgcttcagctattcgtaaacttatgcggaaagcagaactcatggggatcagtacagatatctttccagtggacaattcagatactagttctagtgtggatggaaggagaaaacataagcaaccagctctcactgcagattttgtgaattattattttgagagaaatatgcgcatgattcaaattcaggaaaatatggctgaacaaaagaatataaaagataaattagagaatgaacaagaaaagcttcatgtagaatataataagctatgtgaatctttagaagaactacaaaacctgaatggaaaacttcgaagtgaaggacaaggaatatgggctttactaggcagaatcacagggcagaagttgaatataccggcaattttgcgagcacccaaggagagaaaaccaagtaaaaaagaaggaggcacacaaaagacatctactcttcctgcagtactttatagttgtgggatttgtaagaagaaccatgatcagcatcttcttttattgtgtgatacctgtaaactacattaccatcttggatgtctggatcctcctcttacaaggatgccaagaaagaccaaaaacagttattggcagtgctcggaatgtgaccaggcagggagcagtgacatggaagcagatatggccatggaaaccctaccagatggaaccaaacgatcaaggaggcagattaaggaaccagtgaaatttgttccacaggatgtgccaccagaacccaagaagattccgataagaaacacgagaaccagaggacgaaaacgaagcttcgttcctgaggaaganaaacntgaggaaagagttcctagagagagaagacaaagacagtctgtgttgcaaaagaagcccaaggctgaagatttaagaactgaatgtgcaacttgcaagggaactggagacaatgaaaatcttgtcaggtgtgatgaatgcagactctgctaccattttggctgtttggatcctcctttgaaaaagtctcctaaacagacaggctacggatggatatgtcaggaatgtgattcttcatcttccaaggaagatgaaaatgaagctgaaagaaaaaatatatctcaggagctcaacatggaacagaaaaatccaaagaaataaaagattttctgtagtgtttttgaaaagtttgcagcttatgtaatagcagataaaatttctaattgtaaaatgttaaattgtaaaatctaatttgcaaaatgttctcaataaagtcattcaaaatgaaaaaaaaaaaaaaaaaaaactcgta

SEQ ID NO: 647 - DNA, 2254 bp, Homo sapiens
cgtgagaccagcggctgctgccctgccgcaagtacgagcagatcgaagagggcactgtccggcgcctcatcatccacaggctgaaggagacgatgatggtatctacctgtgcgagatgcggggccgggtgcgcaccgtggccaacgtcacagtcaaagggcccatcctgaagcgctgccccggaagctcgacgtcctggaaggagagaatgctgtgctgctagtggaaactctagaggccggggtcgagggacgctggagccgtgatggggaggagctgccggtcatctgccagagcagctcaggccacatgcatgccctggtccttccaggggtcacccgagaggatgctggcgaggtcacctttagcctgggcaactcccgtaccactacgcttctcagagtaaaatgtgtcaagcacagtcccccaggaccccccatattggcagagatgttcaagggccacaagaacacggtcctgttgacctggaagcctcccgagccagctcccgagaccccattcatctaccggctggagcggcaggaagtgggctctgaagactggattcagtgcttcagcatcgagaaagccggagccgtggaggtgccgggcgactgtgtgccctccgagggtgactacccgcttccgcatctgcacagtcagcggacatgccgtagtccccacgtggtgttccacggttctgctcacctttgtgcccacagctcgcctggtggcaggtctggaggatgtgcaggtatacgacggggaagatgccgtcttctccctcgatctctccaccatcatccagggtacctggttcccttaatggggaagagctcaagagtaacgagccggagggccaggtggaacctggggccctgcggtaccgtatagagcagaagggtctgcagcacagactcatcctgcatgccgtcaagcaccaggacagcggtgccctggtcggcttcagctgcccccggcgtgcaggattcagctgccctcacaatccaagagaagcccggtgcacatcctgagcccccaggacaaggtgtcgttgaccttcacaacctcgagcgggtggtgctgacttgtgagctctcaagggtggacttcccggcaacctggtacaaggatgggcagaaggtggaggagagcgagttgctggtggtgaagatggatgggccgcaaacaccgtctggatcctgcctgaaggccaaagtccaggacagtggcgagtttgagtgcaggacaagaaggggtctcggccttcttcggcgtcactgtccaagatcctcccgtgcacatcgtggacccccgagaacatgtgttcgtgcatgccataacttccgagtgtgtcatgctggcctgtgaggtggaccgagaggacgcccctgtgcgttggtacaaggacgggcaggaggtggaggagagtgacttcgtggtgctggagaatgaggggccccatcgccgcctggtgctgcccgccacccagccctcagacgggggcgagtttcagtgcgtcgctggagatgagtgtgcctacttcactgtcaccatcacagacgtctcctcgtggatcgtgtatcccagcggcaaggtgtatgtggcagccgtgcgcctggagcgtgtggtgctgacctgtgagctatgccggccctgggcagaggtgcgctggaccaaggatggagaggaggtggtggagaccccgcgctgctcctgcagaaggaagacactgtccgccgcctggtgctgcccgctgtccagctcgaggactccggcgagtacttgtgtgaaattgacgatgagtcggcctccttcactgtcaccctcacagagtcttaccaaagtcaggacagttcaaataacaatccggagttatgcgtcctcttgaaaaagccgaagacccggcggctctggtcccgcttccccccatggccacgaacagctggcactgagtagcagctgcccccatagtttggggcccacattcctctgtcccacctccctgccattgctttttgcctctccccagaccgcttcaccttccacccgggtgtggtaccaggtaagtgtacccgtttgcgacccctgtgttaaaccaataaacatgcaaataaatgtacaacgtcgtgactgggaaaaccctggcgttacccaactaatcgccttgcagcacatccccctttcgccagctggcgtaatagcgaagagcccgaccgatcgcctttccaacaagttgcgcagcctgaatggt

SEQ ID NO: 648 - DNA, 284 bp, Homo sapiens
ggcacgagattttcttcaaatatataatggcaattttcagatatctcaccttaccatatctttccttattttcactgcatgcatttaatcactgtattacttaatgtttgatttgttattatgggcatttcaaataggcaagcattgaattgtaatgacaaaaaggctattttatattaaggatatatgcatttgtatttcacacaccagagatgatattaaacactgattattttatgctgctgtttattaaaaatgtttactataaaaaaaaaaaaaaaaaa

SEQ ID NO: 649 - DNA, 1615 bp, Homo sapiens
  misc_feature (591)..(591): n equals a,t,g, or c
ctttctacttttctttggcactcttactgcctgtaaggagtagaactgttagggcacactgttgctatacagtttaactcccattttcatgttttgtctttcttttcccatttctggggcttacctcctgatacctgcttactttctggaagtagtgggcaagtaagatttggctcttggtttctaatttttaaatttctgaatactgccctagtctgaacttggcctttatagattaatctttgcttcacatttttagtgttgtatttaaactattttataatttaaaaatagattctaatctgaagatacttttcaagaaatattattaactgatgtcatcctcatcccagcagctcatctgttaggaatgaagttgagatgcttctattccatgtttttgtatttgggaaggattcaaagttgaaggtttattgtcgttgggtttttcagatggtgacatgtaaactcaggatagcaaaccctaatgttcacacagtgctctgcctctgcactcagttgggatagttgctccytttgagtgktttaatcatcgtataactaatcgtagtgycaagaagtycataatgnkgtatgtagctaatgtcactgaaaaacagtcctaccatttaggtaagaccaaacagagtctctaacccaaggacttgttacacctgacaacctatagtatatttgctttttctcacaaaatgaaaccaattttgccgaaagctagctgggataataggatcatcacaagttgcagtttctataactaaaattagattgaaatctcttctgacctagaacattttacttcaggcattcagcagatttcagaaagaattaccttattttaagttagtttctttgttagtttactgtgtgtctcttattcaataaacaagcagaatttgtgtcctgccctatccatgtcttaaagatgagaagttggatccactgagttagtttcattggggcgggggaaagaactgtaattaaacttgtttaatccttattttgtattgtagctattttttgtaaaagcaacttaaaatcttttaaaaattttatagtgacattagagacaatggtcatacaaattatcacataaacatggacttgaaaaattaggcttttcataaaacacatcacatgtcattgactgctttttagaaatacacttccaaggcagtacatctgtattgctactgaaaagtgccawttcacagaacacagacttctttttgcyctttgacatcttgaaaacatctgtttttcttttttaatacmaaactttgtgctcaagacmaatcttacatgaaactctcataaaccatgaaaatgtagctggccttcgggccttaggcatgaaataagcatgaggaacatattcccctaacttctacccccagcccagcaagttatcctttaagaaatctcctaggaattctggagtttgaaaacaattgctctatgttattcctgcttccagtctctaagtaacaagggcatttaaaagcatagtctcttaaggtccactatagtggttctttatttaaggaataactcagctgggtgcagtggctcacgsctgttaatcccagcactttta

SEQ ID NO: 650 - DNA, 1245 bp, Homo sapiens
gtagaatgccatggagttaatagcttctgtgatcctacatgttccaagataactgcagcagtccaaaaagccagtttcctttctggtgtttgtgggcatacactttgttctgctcctgagtaagtcacactttgtcttccaggtcctctaggatccctgcaatgttccatttgttgcctgggcattggagtaatagcagtgcttggtgctacagaaatagatggatggaagttgtggttactgtgacaccaaaaacttgtcccctgagctccctactcctctttctcctatattttttggtaattggctctgtcattcacctcactgcaggattcagaatcctggtactgggtcttgtatttctctttttcccttaccctccttatccaaattgtcaccaagttctgcttcatgctctcatgatttctcacctgagttaccctagtagcttccaaatagggccctctgatttcaaccttggacactcccactatcttttatattatggaaagatctaatcatgttaccccccatttaaaatccctcagagagcactgcagatacaattcaagccagttagcttagtgttaaggttttacatgcatttctgcagccatctgcccctattcttgcaccctaataatgccaaacttcttttaggccttaatttcatcatctgcaaaatgaggataataaatagtacctacttcatatgattgtaataaggsccctcaaaactgtttcatgcctcttttgcccactgcattaggctgttctcacattgctataaagaaatacctgaggctgcgtaatttataaagaaaagaagtttaattgactcacatttmtacaggctatacaggaagcatgatggtggcatctgcttggctgctggggagggctcagaaaacttacagtcagccgggcacagtggctcactcctgtaatcccagcacttggggaggccgaggtgggcagatcacctaaggtcagaagttcgagaccagcctgtccaacatggtgaaacctcatccctactaaaaatacaaaaattagccgggtgtggtggggcggcacctgtaactccagctactcagaaggytgaggcaggagaatcacttgaacccaggaggtggaggttgcagtgagccaagattgcgccactgcactccagcctggacaacagagtgggactctgtctcaaaaaaaaaaaaaaaaaaaaaaaaaaaaaaaaaaaaaactcga

SEQ ID NO: 651 - DNA, 1961 bp, Homo sapiens
ggggaaaatgaaagaaaagagatatgatgccagcaaagggatggaaagtctagaggacacctttgtatctcaagctaatgctctacaaaggaaaggccgagcaggcgttgttgcatctggggtctgcttccatttattcactagccatcactacaatcaccagcttttaaaacaacagctaccagaaatacaaagagtgccattggaacagctgtgtctaagaattaaaattttagagatgtttagtgctcataatctccagtctgtgttctctcggctcattgaacctccacacaccgattctcttcgtgcctcaaaaatacgattacgagacttaggagcattaactccagatgaaagattgacccctcttgggtatcatttggcctctctgcccgtggatgtgagaattggcaaactaatgttgtttgggtctatcttccgctgtttggatcctgctctcaccattgctgccagtttggcttttaagtckccgtttgtatctccctgggataaaaaagaagaagctaaccagaaaaagctggaatttgcattcgcaaacagtgattatctggcccttctacaagcgtataagggatggcagctaagtacaaaagaaggcgtgcgtgcaagttataattactgcagacaaaacttcttgtctggaagagttctgcaggaaatggccagcctcaaacgacaattcacggaactgttatcggatatagggtttgcaagggaagggctcagagcaagggaaattgagaaaagggcccaaggaggagatggtgtcttagatgccacaggagaagaggcaaactcaaatgctgagaaccccaagctgatatcagcaatgctgtgtgctgctttgtatccaaatgtagtgcaggtgaaaagcccagaaggaaaatttcagaagaccagtactggagctgtcagaatgcaaccaaaatcagctgagttgaagtttgtcaccaagaacgatggatatgtacacattcacccttcatcagtgaactatcaggtgagacactttgacagcccctacctgttgtaccacgagaagataaaaactagtcgagtattcatccgagactgcagcatggtgtctgtgtacccgctggtcttgtttggaggaggccaagtgaatgtgcagcttcaaagaggagagttcgttgtctccctggatgatggttggatccgttttgtagctgcttcccatcaggtggctgaactggtaaaggagcttcgttgcgaacttgatcagcttctccaggataaaattaaaamcccaagcattgatctgtgtacgtgtcctcgaggatcccggatcatcagcacaattgtgaaacttgtcaccacacaatrraaagcagtcttaragagtgcttgctactcacctgcttctagctcacctgggaaataacagcagaacctctacctcgaactaaagacctattggggctggccctggtggaggagcccagggcatgaagcccaaggcagctgaggcagtgtatatacccttagggccatttctaacaaagccttggccactcccagcacaatttggagtgtcaagggtgagagcctaaaacccagcttgcctgtctttgtctctgtgattgttctggagtgaattaagttcacctgataactcaaaagtgaatgtataatacaattctgttttaatctgtgtattctttttctcctactttttactggggtgagaggggcatgaagagaaatacgcctttttttttttcttttcctgtcgccaaggctcgactgagagaagtcagaacagagaaggggaaaaaaaacccaaaattatgtgaacaagcaaaattaaaatttcattttaggctattggctactgagtaaacttgacttgtgaggggtttttatttttactcattaaaagtcaacttaaaaaaaaaaaaaaaaaaaaaaaactcgag

SEQ ID NO: 652 - DNA, 936 bp, Homo sapiens
  misc_feature (699)..(699): n equals a,t,g, or c
gcggtgtgccacagctacctgggtgtgcctagattgatcggtataaggctcactctcccgccccccaaagtggttgatcgttggaacgagaaaagggccatgttcggagtgtatgacaacatcgggatcctgggaaactttgaaaagcaccccaaagaactgatcagggggcccatatggcttcgaggttggaaagggaatgaattgcaacgttgtatccgaaagaggaaaatggttggaagtagaatgttcgctgatgacctgcacaaccttaataaacgcatccgctatctctacaaacactttaaccgacatgggaagtttcgatagaagagaaagctgagaacttcggaaaaggctcatctgtcaccctggagaagggaaactgtacttttccctgtgaggaaacggctttgtattttctctgtaataaaatggggcttctttggaatttgatagccacatacttttgttttcctctagatgctgcctctactcatgtagactatgaagtcttgactcatcctagatcttaggatcttaggtttgggcttcacaccacttgccttttacagtctagctatacctaattcctttaaaaagaaaagttggtgagaatgttattggcgctttttgacataatgctgttatgtymatagtgtttctaaagagccttccacactgaaatgaaatataagnagaaaaatggagtcatacttctgtactactctcataaaatatttattaggcatattctctgagtaggaactataggaaaaacaaaaaagtgtgaggtgtcctttccatttaaatatgaaacattaagtaccatatgaatggtagagatggcggatactaagcctgactggtcatcagttttctgggtgttttaacatttcaaaagcctagtcctaacccctaaagattgatcagtag

SEQ ID NO: 653 - DNA, 3853 bp, Homo sapiens
  misc_feature (210)..(210): n equals a,t,g, or c
  misc_feature (3808)..(3808): n equals a,t,g, or c
  misc_feature (3819)..(3819): n equals a,t,g, or c
gcgctcccaacgtggtggaggatgagattgatcagtacctcagcaaacaggacgggaagatttacagaagccgagacccacagctatgccgccacggcctttggggaaatgcgtgcactgcgtccctctagagggggaagtttgttgccctggagaacatcagctgcaagattaagtcagggtgcgaggggcactcccgtggccgaatgnactctgtactaagtgccagccgagcgccatcacgctgaacagacagaagtacaggcatgtggacaatatcatgtttgagaatcacaccgtcgctgaccgctttcttgacttctggagaaagacagggaaccagcattttgggtacttatacggacggtacacggagcacaaagacattccccttggcatcagggctgaagtggctgcgatttatgagccacctcagattggtacacagaacagcttggagcttcttgaggatccaaaagctgaagtggtcgatgaaattgctgccaaacttggcctgcggaaggttggctggatatttacagacctcgtctcagaagatacccgaaagggtaccgtccgctacagtcgaaataaggacacctatttcctaagttcagaagagtgcatcactgcaggagacttccagaacaagcatcccaacatgtgccggctctctccagacggacattttggatccaagtttgttactgcagtggctacaggtggtcctgacaaccaagtccactttgaagggtaccaggtgtccaatcagtgtatggcactggtccgtgatgagtgtttgctgccatgcaaggacgccccggagctggctacgccaaggagtctagcagtgagcrgtacgtgcctgatgtgttttataaggacgtagacaagtttggcaacgagatcacccagctggcccggcccctgcctgtggagtatctcatcatagacatcacaacaactttccccaaggatccagtttacactttttctatttcgcaaaatccatttcctattgaaaaccgggatgtattgggtgagacacaggacttccatagcttggccacctatttgtctcagaatayctcatctgtgttcttggataccatctcagatttccacctcttgctgttcctggtcaccaatgaagttatgcctctgcaggacagcatcagcttgctgctggaggccgtgcggaccagaaatgaggagctcgcccagacatggaagaggtctgagcagtgggccaccatcgagcagctgtgcagcacagttggcgggcagctcccaggtctccatgagtacggcgccgtcgggggctccacacacacggccactgcagccatgtgggcctgtcagcactgcacgttcatgaaccagccaggcacaggccactgcgagatgtgcagcctccccaggacctagggcgcctgccctctgctggctaggaccgggcccagcccagcccttcctgaagccagaagcgttgctgagtgtgttccctgtaactgccccatagtgggcagccctggaggaacaaggggctggctgtcctgggctccctgacccactgaagcttctcagcacgttcctccctggagagcgggcgccacggctggtattctgcaggctgaatgcagtctccagactggaaacgcagagcggctcctcacgcctaatcctgttgacaagtcccccgccgtgttggaaagacctctcgcctctacgtggcacctggaattggggcgcacagggaggggcsgatgctgccaccacccagccttctctttattttcagtgctttttgtttggcctccctgcccccatgtttttctggctgggagctcctggttacccccttgtctgactgcttggtggcaggcaccctgcctgtgagggccactttcctcttctagtagctgttgtctggtggggacgcagtggccctggacacggctcccctctgcaggtctgcaggtcggtttgctgcctgccctcctcctctcacccgatgtccaggtgggattttaaagtctgcattggttataataacagttatcagtaattcctgcccagaagacttttatttatttttttttaagataaaaactgcacaaaaggggagtgagagagactagtttccacatccttccctcctttagtgaagcccccgaggttgtgtccagggtgatgagtgtggacgggggcaccagtcagttctcccttgaagtaaacctcagtgcctgagacttttctaccaagccacacagctgcagcaactgcagatactgcgggctgagcaggagcagtggtggcgcctgccctgaggctgccctgcgatggcctgggtgggagagctgggtcaccggtgccgatgctctggccctccccaatacgctgcttcgtcccactgcaccgcctggctgagggcgttaggggctgtgcctcttgtgagggccatttgggacctccctggggcactgcacaattgatagtgtaccaatagagggagactgggcgatctggaacagcacgtggtggggtcctgcttgtgtgctctgcgttcctctgtggcgtggccaggccggggcctggctcttacccggggagtggtgggcatctcgatgcttctttgccttaatgatggccacatctgggctgctctgcacccacgggagaggctggcccagctgcagactgcttagggacttctgtgtccatcctggggggtaagcccacgtgacccacattcttggcactatgaacagagaacatttgcctgttggcttctgaagtggtcagggccatggctgacacctccaggtccgcctggcatgggacaccaagtggaaggcccaagcagctcatctgctcttgggaccaggggccagttgggttgggtctggtcacggcagagctwttgtggagggtcaggaagggtggagaggagctgggttgaagcggactgctgcggatgcaactcccagcttgcccaccgcgggctgtctgctctccctcctagcagctgtcacactgaagttttgtcctctgctgtctcctctggtcctgagatgagctgtgagcctaggtggccaaggcttcctgcattgcttccctgtgagtccaaggccttcccccaccactgggcagaggctggacagcacggacttctagagagagccgcgttgccagttcctctcccactcgctcgtccttatccaccacgctattatagtttccgttgtcctccaccagcatttcccttactctgaagttccggcattcacatcattcatgttttcttttgtcttttagctaaaggaaaagcattggcgatttgtctgattctggttttgagttactctttgttcagtaatgcactttattttattgtccaaagagagtcagagctaagcatacaggcttgggggtgagccctgctgtgagagttcaggccctgggaggctcagccacctcctcttgtgggaaggaggtctcagccccacctcgcatcttcacctgcccttggtgtggacacaccctctcatgctaccagcaccataatccagtgggggtgactgggtgcacacctgcccaggtgaacacagcggctgccagtctcctggtcccgagaggaggtgggcctggccctggctccctccaaccagctgctcctgggacacaggtgctcctgcttcggctctgtttcggctcacaggtgtgcatcactgggcttggatttgcattacattgaccccagccctgcagtggaacctaataaaagcgcctgaagcaaaaaaaaarnaaaaaaactcnggggggggccccgaaccaattcgcccaaaagggg

SEQ ID NO: 654 - DNA, 1357 bp, Homo sapiens
ggcacgagtgacttaaatcatggctgtattatttcatttttaaagaaaataaagtataaaataatacatttaaaatacctgtcaaagttttaaaatataagatagaaccttctttttttgccttcttacacatgaatgtacttaaagtattgttatgtgatcttgggatacttatttatttttgaaatttttgtatatatagcatttctgaacttagcaaataatatgtgtaaaggaattaaccaaaaatgaaagaactggcattttcatatgggatacatatttgcttaaactaaataaaataacttagatttatttaaatcaggaatatttacgttgttgatcatttttaaagtatatttgttcaaatattcctaatttgtttttcagcacacttgtttaagttcttgcctttcaggtatactacagcgttatatgaacataatgttttaaaaaaatcttggttgtagtttctaattttcactgcataacaaatttgaaaccaaatgttgaatttctctgtgagggtacttattttgcctacagtttcaaatatattttcaaattcatctctttcttactagactgtgagctccttgtggacaaggatgttattttagttataatgacaactttaatatctagcaaagtgccaggcatagagtattcctttattgaaatgaattgatagatattgattattaaaatgctactacagtattctacgatgcaggctgaatgtatattacagtaattctctggctaattttaaaagtaagacatagaaaacaaaacacctgtagcattttctttatttaaaattgaaactctgttttgaatcctttttattttgtcaaacattctatgcaaatattgaaatatgcaacagctaaactttatggtacatattaattagttttattttccttttcaaaatcagaaatgctgtatttaagcttcctggaaatgtcgacaatcattttaatgaccaaaggtgctacttatttttcaacattgaccttgatcataagtgcttctatctgctgagctttatttattgtttttggacagaaagtttggtgggaaggttgcaataaaatcagaatctctcttgtctgaattatgcagtttaaccctgtccatgttcctctgtactctattcttactgtattttagttattgtttcttacttatcactaatttttactgcaggtctgtgctgtttcttagaaagtacatgcatatatatttctataatatgtaagaaaaaacctgtattgcttattaaattaaaattaaaataaaaaaattcatgttaaatttttgaaatgaaaaaaaaaaaaaaaaaaaaaaaaaa

SEQ ID NO: 655 - DNA, 810 bp, Homo sapiens
  misc_feature (5)..(5): n equals a,t,g, or c
  misc_feature (22)..(22): n equals a,t,g, or c
  misc_feature (26)..(26): n equals a,t,g, or c
  misc_feature (43)..(43): n equals a,t,g, or c
  misc_feature (54)..(54): n equals a,t,g, or c
  misc_feature (59)..(59): n equals a,t,g, or c
  misc_feature (88)..(88): n equals a,t,g, or c
  misc_feature (806)..(806): n equals a,t,g, or c
ggaangagcgccccaattacgnaaanccggctttttccccggnggggttggccnggatncattaatgccagctggcacggacaggttncccggactggaaaagccgggccagtgagcgcaacgcaattaatggggggttggctcacttcattaggcaccccaggctttacactttatgcttccggctcgtatgttgtgtggaattgtgagcggataacaatttcacacaggaaacagctatgaccatgattacgccaagctcgaaattaaccctcactaaagggaacaaaagctggagctccaccgcggtggcggccgctctagaactagtggatcccccgggctgcaggaattcggcacgagccgagaaggcccttaactcaaagtagcttatttatccaaaatgttctggatgcatcatctccaaccaaggaccccttatttatcatgcctttgttctcttttccctcagatgtatatttctttaaaaataattttcctaataacaaaacttatttctaaaacagcttaaaaattcaaagaaaaaccccaaacactgacattacctacacttccactacccaaagacaaaatgtgcccactgtgtgcttttgagtgtattttcttttagtttgttttttgttgggtgcatatttatgataataacaatgatggacttcaattgtactcactgttctattgttggttttaattagcagcaagttgtgatcactttcccaggtgaataaatcatttcaaagcaaaaaaaaaaaaaaaaaaaaaaaaaaaaaaaaaaaaaaaaaaantcga

SEQ ID NO: 656 - DNA, 811 bp, Homo sapiens
  misc_feature (23)..(23): n equals a,t,g, or c
ggcacgagctcatccagagatgnactgggcacagggaaagctttttttttcaagtagcagctgctattcattgaaatgttacaattttcctgccttagtatttcacacgtccttatactcctcataacattttttgcttgtgtagttttagccccatttcagaaatgaggaacccaggttcagaaggtttagaagcttgctcaagaccccccagctattaggtgccagagctgcaactggaatgcagctttgactccattgtgggtttctgttccattatcaagagtagcctgacagttggcaataacaatgactgaatgaatgaataaatgattctccaaagaaaatagttcatgtttccctagtatgagggaatacttgagatagttgttttgagaagggggccacagaccaggagacaccaataagtctttctcatttctggtaaatcgctttataatgaccgttattataaagtgtaaaaacaacaacaacaaaaaataataggcgcagtggttcacgcctataatcctagcactttgggaggcagaggcgggcggatcatttgaggtccaggagttcgagaccagcctggccaacatgatgaaaccctgtctctactaaaaacacaaaaattagccgggcggtggtggcgcgtgcctgtgtagttcacagctactcgggaggctgaggcaggagaatcgcttggacccgggaggtgaaggttgcagtgagccgagattgtgccactgcactccagcctgggagacagggccagactccatctcaaaaaaaaaaaaaaaaaaaaaaa

SEQ ID NO: 657 - DNA, 1010 bp, Homo sapiens
cttaaaatgtgaagaaagtgtgaattttagttttgtcacagttaactgtgtcaaagagaattaaaaaaaaaaacttcagattttgtttacatattttactacatttttgctggtataattccttagccacctatgtacatactgctttaagaaatgtttttttcctgtttatttctgtttggtttatattctggttgtctttttctttttgtaaagaggaaacaatgtacagaaaaacaataaactggttgtatggccatagctatccgaaaagcaagagacaaagcaagacaaatattcacacaaaaatgaagtgtgtcctctggagggtcatatatacaatttcttttgtacagatgaaaatcaatcagctgcttagatttagaaatctactcttgctggtctttgtaagttgcatgaatatttgactttgaaaaaatatcttaacgacatggggcaaaaagtgcaatctaaatggtagcctttactaatgtgtgtggaaagaggtgttcctcattatctaatatttcaatgtgttaagagtttaatttttttgttatcattaaaaaagacaggattataaagagatatcaaagcacgattttagataacctaaacggcccagcctatacgaagttgattatatctcgatgtctgtaaaagattgctgttcttggagtcttgaggtcttgtgaattgatttcctgctttctttcatttttttcaatttaagtaataatacatttgttatattcctttcagtgtaagtttctatttggacaattttatgggaacatgtgcattctctatgtgagcttctatcatattcctgttttattagcagaacctaaaggaatttatttaatgatgttgtgacattactgctttttcttttttcttttcttagttcatatttgcattttcgttcaaggatatgcttagcaataaaatgttcttcccaaaaaaaaaaaaaaaaaaagaaaaaaaaaaaaaaaaaaaaaaaaaaaaaa

SEQ ID NO: 658 - DNA, 1199 bp, Homo sapiens
ggcacgagacccattggagatcttcaacctttaccgattcaaaagggggaaaagacttttgttttgacaccagaacttagtcctgggaaacttcaggtcttaccttttgagaaagcctcagtatgtcattatcatggaattgaatattgcttggatgaccgaaaagctttggaaagagatggaggattttctgaacttcagtctcgtcttattcgttatgaaactcaaactacctgcaccagagaaagttttccagtacctactgtgttgagccctcttccatctcctgtagtttcgtcagatcctggaagtgtccctgacggagaagttttacaaaatgaacttcgaactgaagtatcccgactgaaacggagatctaaagatctgaattgcctttatcccagaaaaagacttgtgaaatctgaaagttcagagtctcttctttctcagacaactggtaatagtaatcactatcatcatcatgtgacatccagaaagccacaaacagaacggtccttaccagtgacttgtccattggttccaattcctagctgtgaaactccaaaacttgctacaaagaccagttcaggtcaaaaaagtatgcatgaatcaaaaacatcaaggcaaattaaggaatcaagatcacagaaacacacacggatactgaaagaagtagttactgaaaccctgaagaaacacagtattaccgagactcatgaatgtttcactgcatgcagccagcgtctctttgaaatctctaagttctatctaaaggatcttaaaacttcaaggggtctatttgaagaaatgaagaaaacagcaaacaacaatgctgtacaggtgattgactgggtattagaaaagacaagcaagaaatgatacataatcattctctttaagacaattataaattggatggagctattattcactacttcttttcttagtttgaaaattataaacaaattttaagctttattcaaagaatagatgttatatttctaaagaatttcatgaatatatattctatatttgtatagtttgagggatgctatgttaatgtatttttaattagatacatattttgtaaagtgttactatattttaaagttatttttatatgttttaaaatgtttactcttatttaattattacaataaacagaatttttttttttttaaaaaaaaaaaaaaaaaaaa

SEQ ID NO: 659 - DNA, 434 bp, Homo sapiens
cagaagacataccagtcaatgggttcttgaaatagtcaaggaatgtggcaattcacgctggatgtggaaggtggaaggaaagacaagtgttagcaaatgcagacctgtctgctgtggaacttgaagaccttgctagtagtcaggctgcttcctggcattccaggcctgaraggcttctattttgactcaaagcaaaaacaaatgctatgttaatgtcttcctatgtgtccccttcataagattttggtgaaatcatattaaaagtgcatttctcagtatcactctcagttatttagagatttcagttccccagtaccctggcaagggatttgacgaacgtagcaagaacgtcgtgaactttgagctaatttatatcatgttcattgtctgttaataaataaaagccaagaaaaccagagcaacaaaaaaaaaaa

SEQ ID NO: 660 - DNA, 716 bp, Homo sapiens
ggcacgagcaggattccgtctcacaaaaaaaagaaaagaaaagaaaaaagagaagagaaaagaagaaagaaagaaaggaaattttgtctaatagttgaatttactccatttatatgtattggtataacaaacattttggagcctacatcttaccatatttcatgttgtatttgtattgtaattcttttttattatatggtctgttctattctttctttttctattctccctttctgggaagactttggtatctcttttttatttttcctttttttcctaagggaatggcaaatagtgttctcacaggtttaggagcggtggagtagaatctaagaaactgagatgaaagtacatgaaccatgcaggttcagaaattgacaatgcagcttatggtgtagagagagatttacaacgctattaactttttatgtggattctttgctttatgttaaagtctttctttttgttctcttaaattgccttcacagataatttaagcctgtggctctggtctgtggatcctctttcatcataatcctgaaacatcatttgtcttttttactgatggtacagaaagcaatgatggatgataaaactgatgatgccttaccatgagtcaaggcagcggcaccaaactgtaatagtaaatgtagtaatagtcgtatgttctttagtaagaaccaagcacttcagtaaaaaaaaaaaaaaaaaaaaaa

SEQ ID NO: 661 - DNA, 2503 bp, Homo sapiens
  misc_feature (2497)..(2497): n equals a,t,g, or c
ggcacgagcccaaaccccaactctcagacttacctcccaaaccacagatgaaggacctgccccccaaaccacagctgggagacctgctagcaaaatcccagactggagatgtctcacccaaggctcagcaaccctctgaggtcacactgaagtcacacccattggatctatccccaaatgtgcagtccagagacgccatccaaaagcaagcatctgaagactccaacgacctcacgcctactctgccagagacgcccgtaccactgcccagaaaaatcaatacggggaaaaataaagtgaggcgagtgaagaccatttatgactgccaggcagacaacgatgacgagctcacattcatcgagggagaagtgattatcgtcacaggggaagaggaccaggagtggtggattggccacatcgaaggacagcctgaaaggaagggggtctttccagtgtcctttgttcatatcctgtctgactagcaaaacgcagaaccttaagattgtccacatccttcatgcaagactgctgccttcatgtaaccctgggcacagtgtgtatatagctgctgttacagagtaagaaactcatggaagggccacctcaggagggggatataatgtgtgttgtaaatatcctgtggttttctgccttcaccagtatgagggtagcctcggacccggcgcgccttactggtttgccaaagccatccttggcatctagcacttacatctctctatgctgttctacaagcaaacaaacaaaaataggagtataggaactgctggctttgcaaatagaagtggtctccagcaaccgttgaaaggcatagaattgactctgttcctaacaatgcagtattctcaattgtgttactgaaaatgcaacattagcaaagaggtgggttctgttttccaggtgaaacttttagctccatgacagaccagcctgtagttatctgtgtacacagtttacagctacaaaaacctactttggtatttattacagaaaagtgctcagttaaatgtaagtgttattccttcagcaaaatattcactgacccaaaactctttatggcattttacaatgcacacagcctcatgcaagtttagacaagtggatttatactgtcttatgagtgcccgcccctgatatattacctcattatgcaaaaataacatatctttcatgactattttgacaaaagtttaaaacacatatgaagttcaaatttcaggaaccaaggactgccagaaaatattagcctctacattacgcatgcatttagaagcttacctgaaatctgccttttataaaggaatagtatggataagtggaattgtacattttttaaacttgattgccattaaagcagaaattataaggttgcaacaatatttgtttctaatcactggctttctcaagagtatggattgacatattgtgttatgaatgcacatctctcagatgtgttgaagcatccattgcatccattttttattattttcttagttttgttcttggacaaatttaaacttttaaaagattattcaagatgaatttaaaagtcaacccttcacacagtttccctactgtatgtagaatccaggtgctgaaaccaagtgtttcttttcccatgctctttgttaaaccccaattatagataatttttccagtcttaagctctgtccaccttcaagtcaattcataaccaagtttttgaacgctgctatgaattgcactgtgaaaagcactcttccctctcagttttcttttcatcccagccatgtttatcagatccttaagaacattgtatttcagtcttttacatcagtctgaattttggaaaagaatgcaatagttgtactccacagtcagtggaactgttccctgagtccgaggctcatgtgtcattctggcactacatttgcttaaattgctattttggcaacagcacagaaaactaatatttttaagcagagaatcttggcaatgagtgagagatgttaatttcacagaagcacaactcccaacccaacccttaggaaaagccctcttccatcgttacagtgctcagtgaatattaatttagttctgcttaagtggttgctatacaaactttgaatagccacctaataaataaaccttgcatgacaaacctgcaaaatattttatcagctgttattggaaagtgattttaagcaattgcttcctcagtgtcagggcacatgtgaatttccacaccaaacagagcatgaggaaccagttgacatgctgggttgtgactggcagctttagcagcctcggtactgaagccacaccagtgtccggatggaagtctgcatctgaggttgctcagtgtcccggtcattcatttacacattttaacttgcattaaagagctgttcttttctgtggcctagactcttttcactgatctcaaaataaactggtttttttcaaaaaaaaaaaaaaaaaacycgggggggggcccggnacccat

SEQ ID NO: 662 - DNA, 1108 bp, Homo sapiens
ggcacgagctgggtgaaaagtagaatataaactcggtagacttctggtcccttcattggtcatggaatggaccagtgcttgcttcattgagcaacagttctgttgttcagaattcctggatttcacctcacttctgctctccctgcaggtgaatgtgatgttcatgcttgccattcttctgacattcttccacccctttctggtatatcgggaatgccgtacttggaaagaaagtccctctgcaattgcatagttcagaagccctcacttttcagccccgaggatggttttgttcatcttccaccacctttgaggacctcgtgtcccaaaagactttgcctatcccagcaaaacacacacacacacacacacacacacaaaataaagacacacaaggacgtctgcgcagcaagaaaagaatctcagttgccaagcagattgatatcacacagactcaaagcaaaggcatgtggaacttctttatttcaaaacagaagtgtctccttgcacttagccttggcagacccttgactccaggggagatgacctgggggaggaagtgtgtcaactatttctttaggcctgtttggctccggagcctatatgtgcctggatccttgcccacgggttaaattttcaggtgaagagtgaggttgtcatggcctcagctatgcttcctggctctccctcaagagtgcagccttggctagagaactcacagctctgggaaaaagaggagcagacagggttccctgggcccagtctcagcccagccactgatgctggatgaccttggcctgaccctggtctggtctcagaatcacttttcccatctgtaaaattgagatgaattttggtgttgaaagttcttcctggagcagatgtcctagaaggttttaggaatagtgacagagtcaggccaccccaagggccatgggagccagctgacctgcttgaccgaaggatttctgacagactatctttggggatgttttcaagaagggatataagttatttactttgggcatttaaaagaaaatttctctcgggaataattttatagaaaaataaagcttctgtgtctaaggcaaaaaaaaaaaaaaaaaaa

SEQ ID NO: 663 - DNA, 930 bp, Homo sapiens
  misc_feature (137)..(137): n equals a,t,g, or c
ggcacgagccaatctctgttttcagagattgttttattatatgctttaagtccacataaatgatctcatactgaatgtgtcactgtaggattttttcttcaaaattgtatttttgaactttctgtatatatatatanctttaattttaaccattttatgaattgtaaagtttatgtatttccccatcttaatatattattcccagttttttgattacaagcaatgtaatctaaaagtacatttttgtatggatttcttctgtatatgtgcaatattttgtctagggtatatacctagaagtggaattgttgttatagagtgtgtgctttttcagctttaccagatattggtaaattgctgtctgaagcaaatgtagcagttcacactgctgtctagaattttctcatatccttattagattttgaattgtcagaccctgcgatttttactcttatgatggctgtgatatgctttttgttttaatttgtacttcctttattatttatggggataaatatatttccatgtttaataagcatttggatttgttcttctgtcaacaacatatataaatctttgtcaccaaatcagcttttttgaggtatgacttacatgtaataaaatgtgccaattttgattgtaccattctctgagttttgacaaatgtatgaaactatatatccatcaccacaattgagttacaaaacattttcagaatgccaaaaaatgctccattgtggtaactgtcttttcccccattgaattaattgtcttggtacaatcgttgaaaattggttgaccacattatatgtgaatgtgtttctggattctattattctcttgatctataattatgccaataccacactgtcttgattactgtaactttagaataaatcttgaaagtaaaaaaaaaaaaaaaaaaaaaaa

SEQ ID NO: 664 - DNA, 794 bp, Homo sapiens
ggctaggcagagtgacctttcatctgatgctaagcccctacaagtttgagaaggtaagaaaagatgaaggagacatatattaggtcagctcttacttttgaaaatgttttatttgaagaaacacctgtagcattgaggtgactgaatgcctccacttatttcaggaaaacgtatccaaaaaaagttgaaatatttggacaactttttttttaagtgccatcgatttccctagcagcattctaaaagatagcaagtaaaatgatgtttgttatcctaaatgctttagttttaggtcatttattaattttcttacaggtgcactttctagtacatgaagtatcctttgtaattaatgtgtgccatatgtttattcccatttagtataactataaattatattttaaattatatatttttaggatagttatattttttttgggttctacgacattgaagttggactagtgatttatttgaatgctgaatcctagtataggggaatataatcttatattttaacaggggtcctctatgggaaaataggatgaactttgtttcccagaaattgttaagtgatgaaaaacttcaaaataattttcctgcattttctgctttatttacatgtaaagtgaattccctgaaaattggatttaaaaagcattctccttcaatgtgcctttaccttggagctttaacaacttttctgttaaatatgtagttttttattaaacaatgttattaaataaaaacatttatccactgaaaaaaaaaaaaaaaaaaaaaaaaaaactcga

SEQ ID NO: 665 - DNA, 1145 bp, Homo sapiens
ggcacgagaaacagtttaaattctggatataggatctcctatagcaaaacattttactttcatttttcagtatttgctgctttctagaattctattagataagctatgtcatttttctgaaaaagaaactgagttattgagtgtattaagacaaggcactgagaactacagtgtcaaaatcaaagggcataaatgggcatggcagtgctggtggaaaaatctgtggtactggtgatctggttagggcctgttgcacaggctgggagtaactggtttgctgtttcaagcctccaagagtaccttaaacaaggtgatagctcctctcttctttagcattatattcctttagtcaacaaagaactttctccactctgctgcccagctctgagagtatctgagatgagaataggatgtgtgtggaggggcttttagggaagaaagggtcataaatgaatagaagtacagtctgaaacatgaattaaatatccttcctcaagttataaaggatactttaatagaacacagtctccagaattcgctgctatcacaccaagtcatgctgttgccctgtgacctcacacttcccattccatggccttgtcttggcagggagtaaaaaatcccacttctttttactttagtgggtctcaactgcagcatttcagaaacaaattttgatttgacactcaggagaataaaaacaagttgagggcagaatgtatttggaaaagcttaagacaaatttactgatattattttatgatcatttaggattacagatcaatttacctccataaatctttgaattgtcactgtgaccacaggatgaaaatcctttattagccattttataggttaaaacaaaaaattgactacacagccgacttccctcagataactatgaagtctattatgagtactgaatgaccaaagaacatggaaaaaatgcatatgaataaatactgaaatgtttatgaaagatatttatgaaagatattaagacttctgtgtttaggtatgcacatatgataaaataaatctaaaaacattaaaaaaaaaaaaaaaaaaaaaaaaaaaaaaaaaaaaaaaaaaaaaaaaaaaaaaaaaaaaaaaaaaaaaaaaaaaaaaaaaaaaaaaaaaaaaaa

SEQ ID NO: 666 - DNA, 1927 bp, Homo sapiens
  misc_feature (1899)..(1899): n equals a,t,g, or c
  misc_feature (1922)..(1922): n equals a,t,g, or c
ttacatttttcatggagtccctgcttagtgcagtttccattggaatgggtggaagatgataaagctctcttttttatctactaataatgtgattgcaacttaaaatagcaaaacccaactctccctgtccctccaatccctctcctaaaaagttcagtttggaatctcattctggaaaagatggaatcgcatggagattctctagctgttaggtagacctaaataaaaagttctcaatagattcctcttttgagtaaatataagacctcttgtagctacaatgttttagagcatgtttcatcttcatttttaatatcctgaactgaatgatagtgtttttttagatgaagaactgatgtcagcctgccaggtactgtaatttattctatcatattattatattatatatcaagtaggacagtgaaaaatgtttccttgcaaacttgtagtccagtatcagttacttcctatttttatccttaaaagaccattgcaaatcagtgtaagggtttttccagtaattactcacagcactttgttaaagtttgcaatttcttcagccatttaataatatctttctgtgaagaaactttgctgagttaaccataaatgttcattcattgactgggtgggatgtgaatggaatgttagaaatgttgtgtgaattgaagttctgtattcattatagatgtagcccttatttaaaaaagtgaattccatactaaaactaggaatgaaagtgagagatttctaaacttttgcgaaagtgggtcattttttgtttgactataatagcaggaagaattatagcaatctgtcattttacctgaaacagacaagcctatgtattatgaatactttcaagcttccctttggaatatacaagacatgcgtttggagttacctttgtttttctatcgtaaatttagattctggaattggggtttggtggtgcaatgtgttgctcacaagtggccagaactcctattcctaaaaggattttgagatggaggaacacatatttaattcccctttatgccttggttcttgctcctctttccacgttggataacaattttttggttgttttgtttaagttggtgctctgaagcttaatctcagtaccctttactctgaattgtcaaattttgataaaacgtgccattttctttggtaagagaaagcaggtcttaatgtctgccagaacacaatttatatgccttattggcttcattaaacttttagaaaactttagcatttgttacttttttccattgcatttactttcaaatgcacctaatgaattygtcacccagtcgcaacttttcccttctctgtcccattgctttctcctttccccgacgcacagaataaacatgaagctcagcagtagaagcgtaatgatttccctcaggaaaaacttctgacagctaggtttttcaagggtttccctgtgctagctgagatgcaaaacaaatcatggaagattgcatacctgtgtggtattttaaaaacaagttgactttttcagtttcttgaacggttaagggtggatttaaaaactagacagtttagttttggggaacagaagctctcttcgtcttaagccagattctctgattcttttagacgtcatagctccttagttctgctcctgtcgccctaacttggcatgggcaagttgaagttcatccttagactgcagcgttctgagcatggctgaagtattaaaatgtttmatattttttagagcaaaattgatggaaagcatttggctgaatctaaagacctgcagtcagattcttcaatgtggtttacccaactggagtagtgataaacaccttaatcataaaatgaataaaaacaaaaaaaccaaaaaaaaaaaaaaaaaaaaaattnctgcggtccgcaagggaattcantggcc

SEQ ID NO: 667 - DNA, 1316 bp, Homo sapiens
accacgctcagctcagcttcaacctgtctgcaaagaaaagttttaccaagaccagaagttaaatatgrcatttcctaggtagttgtaactctaacatagtttaaaaagtatgtggcttcagattgcctatactttgttcacaaacgtgtgatttagatatgactgatttagaagtgaacaacttggtaacatccctagactccactcatgaacgcagaattattacctgctgtttgctttctgaaagaatttcagaaatcagagcaaatgtgtctttaggcagattcagctccttttaatatttttctcttggcccactctctttgcytcccctgaatctgtgtggtactatagcagctctactctgtgcaccatgctaggaagcttcctttttggcagaatatgtttggcagcaaagctatagagacaggtgcattcagaacatcctgggcaccagtcatgagtcttactgtgtcaaaaatctgaaaacacttgctgagaaccaaatttattccattggaaaaaccctctgtggagctataagcctcttggactcttcttcctagattaaggcttgcatttccctccctgtttcagtaaaagatgatgaaagccactatcaatcctcactgctgagtggcagggagaagcagcaccactctcagctcttttctaatcttgtaacttagtgctagaagtctctccaggctattaccatgggcatttgttctctgttggagctgtaagcagatgaacccaagtagagaagatagatcttggaaggagagatccattgagtccagaagccagatcagcaaatggaggaacctcggaggtgaccagaaagatctccatcggttgcccaaggctgtaagtagtgatggttttagcgatgaataacgtaattggctatgaagtactgtggcagagctgctgttttctgaaggtgagaagccatttttagctcagagcaacccttaagagaacttttggcagattttgttggcattattgaaatatatatagaaaagttgctgattgcaatggttatgggaatggaatttaatgacatttgtaatttattacactcattggtttttattgattatagtattgtctgactttttattttctactatggttcctttagcagaaaagtaacttttgtgcatatattgaagtggtttttcagctatgaattctttagggtagaaatttatttagcaaatgtgaattcttttgagaaagtatgaagttttgcagaaattgactgtgaaatgtcagagaaaaataaaagtcacttacttgaaacctaa

SEQ ID NO: 668 - DNA, 1340 bp, Homo sapiens
ggcacgagtcaagatgagttggtagatcatcgtttgacagaaagggaatgggctgatgaatggaaacatcttgaccatgcgctgaattgcattatggaaatggtagagaaaacaaggcgctctatggcagttctgcggcgctgtcaggaatcagatcgtgaagaactcaactactggaaaagacggtacaatgaaaacacagagctgaggaaaacggggaccgagttggtctccaggcagcacagccctgggagtgcagattctctcagcaatgattctcagagagagttcaacagcaggccaggtacaggatacgtacctgtggagttttggaaaaaaacagaagaagctccttcggccccatctccatcctcagcagatgacactgattggcctcacggggacttgggtaagcaacaggcggcattcaggactcttctcaaccctgctgttcagacttgataagatctcagagtccacaggaaagaagtcactgttgcaataaaagcacccgtagtagcaaaaacataaacaaataaaacttcccccacatcacagatgattttggacaagattttccaaccttgctggctactttagtttgggacctgttttttttctcatttgattttgcttgtgcagaaaatagtttccagcacatggattgatctgagagagaatgaggctcagttgtggatagtctgttttctctgagcatgttggccaactagtatcgtcaaattattgagtggatcatctcttggaaatgcagaacttctgccaccacttggctatttgcacagtcatcttgttctgtgtccttttatctctcagaccacacacatctggaacgctgtgggcatcttctgcccatgggctccatttggcacctgctgagccacagttgtcctgctggatgtgctgtgcaggttggtaggacttgccccactgtcaaggcctggtctcatctgaaaagccctcctggacctcaaagaattcttcagacctcatagttacaggtcattatatctactatgttgatttatcatcaggcacacaacttctgtttccttctcttgtgttatctgatagcgtccctccttgagctcatcagaaaggttttatgaaatgtgaaccattttgggaaaagctgatcaatttttcttcctagcttcccattttcaaatgggacatcactcatatccctttcagaatgttaggaactgcctcccacattcttccctgtctttttgggttttgttttttgttgttgtggtggttttttaacacaaagcctgggcaacagagcaaaactctgtctcaaaaaaaaaaaaaaaaaa

SEQ ID NO: 669 - DNA, 2097 bp, Homo sapiens
ggcacgaggagagacacagcaagccatcaactatggttaattttgaaaaatggaaaagttggattgggcttacagtcagcactcagttatttgcaagtgtatttctttgctttgtagagtatttttattgggtgttaactttgacagctgagagtgggcttgcaagaacacaatctaaaagtgtgtttcaattgagtatctctctagtagaataggagttcatcctgaaaagctgtgactcattaacccagtaaacatatacaaagtaagcttaaaacactataaacatgagataagggaaaatgaatccagagttctcatattaataggtagtgaaacaataaggctttttagagcagactttgttggcataaaataacctggcttctatccctaaccctttcctacctttcctctccgtcaacatgtcctcatactgaagacaaacttgtttcaatgatagtcttcattttcaaaaacaaaaaggcaggcagacagaaataatgatgttttcttgcactaagaaggtactacttgtacacatatatcaaaacctcattctgcaaagtttttgaaggtttcaatgggaaatttgattttattacaaaataaaacattttttaatgttaaagtttatatattccatgcttgttttctcattcactggcatggatgatcaggagctgcctatatatgaaggcagaatcagactatcaggaaaggagctggccagggccacagccagtcaagatctctgagcaacttagagacattggtgtcattatatgaagcttgcatttaatacatttatacataatacatttgtacatttaattcataacgtctcttggtcacagatgccttatatataaaataagttgccagatctctaagattgcctagtacacctttgtatctcatttgatgtgatacccagaagagatcattgtttttgtttttgtttttgttttttcaagaagatccttcgtgatcaccatgctgttctcatggtaagaactggagttatgtttttaaatttggaaatatgacattttatgtagcactttataaaaagtgaaagcgacaaattccaccgctgcttaatactgctttgcttctttttattgacatgatagataaatatgtatctacacagagtaataataataaaccacagtaaacattctatttctctatggtctacagcatgccagtaaataatatgtaggccaataataaattatcaattacacatttttgtgttaactaattaaaagcatagtgtataagtgagtacactctaattaacttgcttctgttgcactttagttttctacctgcatatggactgcatttttttttttaacacagtcagtatgtagaatgggatgtattcttctgctgctgcttattaaataaagaaagcctgagtgttcttagatggggttattctgagatgagggtcttagcctacagttctttttgaaatgaaaggtgctttgttttttaattatattcatcttttcagggtaaatttgtttttctgagtttctcgtaatgctcatttttacatgctgctactagcttttttttttaaaaaaagtaaaagttgctgctttctaaaatattaattgccttatatttgaaagtgccattgcaatcgtaagtagactatgtatttcctataatgatgtctgatatttaaataggaaatcagacaaacaatattcagaaagtttaagcatataaactttttatttttaacttgcctaaatccctgtattccaaaacctgctgcatcataataaatatatctatatatatttagcataagacgtgatatttttaatttcttttttaaaaaattatatttgtctcttagagttaaaattttctttatataatattgtcatatgtcatagttttaatacaattcacatgatttctatgtttcttaatgatattttgttgtgtaaaattgatcggattgattaaaaaacaaattctctggaatttgtgcgttcatgctttttcgtattctttatggcttttaaataaatatacaatggttaatagtaaaaaaaaaaaaaaaaaaaa

SEQ ID NO: 670 - DNA, 958 bp, Homo sapiens
ggcaagggaaatctgtaacctacatactgagctcactgctgtcaccaaagctttctacctgtgtctgctgttgtatgctaactgggacattgttcccaggattccatgtacgattgtgggcattgtcacctgcacaagcacaagaatgcctggtcgggggtgaatggagctgatatccatctcacactgagtcaccaagtcctgtacttcagagattgacccttcccatacagggtacatttttctaatttgcaagaaaggtgccctaagagctagtggcttccctgattgctcccctaacatcatgtggttaaattttggtatctcagacaagtagaggctgcagatctgcagggtcaattggcttcagatttagtcaatttcttgttttttaggcagtgaataaatatgtggttcccctcccccccagtttttttcttaaaatgaagctcatcaaacaaatgtaccattctgaggtgtgttctcaagtcatatattataattcatttcactcaaagtatatgattaaagctcattcaaagccctaagagttgggaatgaaggaagaattgtaggatgttctgctgtgccacaagacttaatttataccatttattagtcttaccaagtacattgaaaggaaaaagttgttgggggccaggcacgatggcttacatctgtaatcccagcactttgggaggctgagtggggcggatcacttgaggtcaggaattcgagaccagcctggccaacatggtgaaaccccgccttattaaaaatacaaaaaattagccagctgcagtgacatgaacctataatcccagctattcaggaggctgaggcaggaggatcgcttgaacccaggaggtggaggttgcattgagctgagatcatgccattgcactccagcctgggcgatagagcgagatctggctcaaaaaaaaaaaaaaaaaaaaaa

SEQ ID NO: 671 - DNA, 1302 bp, Homo sapiens
ggcacgagatatgtacacatttatgtgtgggtgtacaacatttttctgtgattatatgggtagttttgaaagaatatacttatgagccagagcaagaaattggaaccaatatgtgtagaggttattgcttttctctgcttagtgtgtcttggaaaaaagttctttacaggtaaataattttaaataccaatacccttagtatggatcagcaaattaggggctctgagaagtcctttcattacaagagttgtttagctttgatttattgttttctaaacttatttgagctgggatgctttttcagagcagacacattctagtatattcttgttttatctgcactatagatatgtattgttacataccttcagcttggcaaggcagactaataatcttaaggaggttccaagacttcccttggtttaatgagaacattcaaaaggtgcaggcatagggtaaggtatgtttgaggacttgaatatctattaagaatagacaaaggattataatgtggtagaagagtttagcattcatagtctgtatagatcaaactgtcaaaacttctcaggtcacatgatggcccttaaaccaggtaatttctgtgtaacgtaagccatgtttaaaattgcttttttcttgacaactattcagaagtatatgtatgataaacattttttgagtgcctagtacctactagtcttacatattctgtggattactccacataaaatctataataaaatccacagaaagctgttaaaatctttcctatttttttttgactcaactttccatcccctgaaatcactcacaagctgagtttgttaataggctctcaatattttatttcttatattctggccttgtttttagtatttcttaaggtgattttaataataattaattgtatatgttttactgtactagacttagtaaaacataagaaagacgtataacatagttgaacaactttaagttgctctaagaagtttcctatttgaggctgggtgccatggctcacgcttataatcccagcactttgggagaccgagatgggcgtatcacttgagatcaggagttcaagaccagcctggccaaccaaccccatctctactaaaatacaaacattagccgggcatggtggcacatgcctgtaatcccagctactcaggaggctgaggaaggagaattgcttgaacacaaaggtggaggttgcagtgagccaagatcgcaccactgcactccagcctgggtgacagagcgagactcctgctctcaaaacaaaaacaaacaaaaaaaaaa

SEQ ID NO: 672 - DNA, 558 bp, Homo sapiens
ggcacgagagaaataatctctcaagctcttcgtacaaagtttgattaagagagagtgtctgcaactctctgctttgctcccagctgggtctgctgttctagtgagcgccagcagttattctcgttttctgcagtattcccaggctgccaaaaggctctgctctgtaagctgagaaagactcaacagctacaacactggtgttcacagcagcaaggtttatttcctcacaagatgatattcctgggtttgcatacgtttgctcttttcagtgaaccatgtcctctaaatgtcaccttgcttccattcagcacggtctgtgttccgactgtccaggggcttccaggaacagcccacagattgatggcttgctgaaagctccctcgttatctttcactgtaaattcctttcatcagtaatctcttgtgccctggatgcagcacttctttgtacgcgtgctgtgaaataaaatctcagataatgtgaaaaaaaaaaaaaaaaaaaaaaaaaaaaaaaaaaaaaaaaaaaaaaaaaaaaaaaaaaaaaaaaaaaaaaaaaaaa

SEQ ID NO: 673 - DNA, 1679 bp, Homo sapiens
gatctttaggtttttcctatagaaaacattcttcctccatcagtagccctttatttgatattcagaagtggaaagctttttcattctccagtagaacttttaaaaattgttacagatacctagctcttcacagatatcatgtattgtaaacagtcatgtgtcttaattttattttctctatttgagtgcataattatcctaataatcccaaagacactgacaactcaaggaacagcagtacagtactattagaagttaagtatgttgttgttatttcacatttcatttaattgtggataaatgttagacatctgttgaaataagctcatatggtggaaacgacaactatattatgaattattttcagaaatggatctttgaatagcagatcaggatttaaataataaaattatctatgaatcacttttatggtcatacatatatgatacaaatccagagttattggtgcagaaatggctacccgagagcttggtaaatttgccttggtttcttatgttaaatgtattgtgcttcccttctgtctctagaatgtggctcttcagaagacagacaatcgacatttaaatttttccaaacaatgaaaaactaaattaaaaacattgcttgatatttcatttaaaattgcaccttgcttaaggtttactgaataactgaaatgtcagcaatttaaaataaattcaattgtgtgataaaatatctcacctataatagaagaaaaggaaaatcatattatttggcaattttgcagcattgtggttgcctaacaggtatatccagcagatgagaaacagtatgaaaggattgtattaacatggtaagttttgccctaaggaaaacgatcttgcattctggattcttgcagcaaagtctcagatacttaatacgttttcttgktttatcatctgktctatgattcggcttcactttgtgtggktattgaattatgtaacagagatttggktttcccaaaatgktatcacatttgaaactatgattgctttgkgktcagtccttttggaacacgtagcttycagcttaagggtagaggaaatatatacctaaaatcatcaatacatgaaagaaaaaggatggaaactatgtcctcagttttacttctaccaaaacatccctgtatgtgtgtgcatgtatgttggcgtgtgtgtgtgtgcatgcatattagtaaatgtgtgtttgcatgtgtgtgttggggagtgtatgtgatctgggtgtttgtttatctctgttattattcccctttagctttattttagtcaactctacattatgatgaatttcaaaatgaagctgtattaaaataattgtaatataacaattcaatctcacatgttactgcagatagttaacttttgctgcaatctattgtacatttgcaattttctgtgttagtaaacttagcagaatctggttawttattttwgtgtaggcttaatgttcactgaaagataagtcaattactgytagtaaaaaattaaggtactctcactgcagagatttaagcctgggcctaatgtgctgtattatgaagccttgtgactgaaaaatatgtttacatatgttgtctatttttttaataaacttttatagctggtctatttgctcagtaaaaaaaaaaaaaaaaaaaaaaaaaaaaactcgag

SEQ ID NO: 674 - DNA, 1335 bp, Homo sapiens
ggcacgagaaatgataataggcctcccccaaaactcagctgcttttgtaaagctaatgggaggccatcaggctgggggcaaggaggagagcccggatcctgctaaggtgcagacataaacgagtatcagccattattctggaggttataagatatgcaccttccccaattacccctgcaatcacaccattattgtagattggcccttagagtatcttttcaggttttttggcatgtctgacactcatggctctacttggacccaccaaccctgctcctatggctccacccagaagccattcagcctagaggacagctctgaccccccctgtgatttcatacaatcagcagcaagtaactgttacctcaccatccccaccccttctgccagactgcctttgaaaaacctctaacctgtgagcacgagatgattccagaacaaactctgtctcccatgtggcatgaccagccttgggtctcttaaactttttctccactataatgccatggtctttatgcagcaggcaggaagaattcaggtggttataattccgtatgtgctttttgaacatttttctactgggctattgctctcttcataatgatttttttaacttctctctataaggaactgatttcatctgaaattgaagagacaatcagagaaaaactatagaccactcatgatggttgttatatgtgcttggctgggccatgggtcccagtgtttggtgaaacacagcagcagatgtccctgtgagtagatgttgctttgaaggtatcttttagatgtgatgaacatttgtcatcagtagactttgagtaaggcagatagcccgtcacaatgtggatgggccttatccaattagttgaaggcctttgaaaaaagactgagatcccaaacgaagaaggaattctgcctccagacagccttccaactcaagtagcaacattacctcctccctgcggctctagcctgctggcctttcctatagacttcagacttgccagccccacaatcatgtaagccaattccttaaaataaattctctgtcctgtttttgccccctctctctttctgacagcacacacatgccctcttggttctgtttctttgaagaaccccaggaaaacacacaaaggaaaaacaactcgatagacagaagattcttcaatgacaacaatggaagccatcttcaccattcaactaaacttgaatgggatattatcaaacttaaaaaaaaattatcaactgatcgtgtaatcagtttcatcttttaagacaggaaatgaaataaagtatttacagatgaatgtaaaaaaaaaaaaaaaaaaa

SEQ ID NO: 675 - DNA, 563 bp, Homo sapiens
ggcacgaggaaagatttaataatcctgcctcttttgaagcctgaaacttacaatttaaagcctgaaatctaccataaggaacttggtaaattgtgtcagataccatgaaaatgcatcttttcatagttaaccacagattgtttatgtaaaggcaaattggtggtcaggttcaaggtaaaatggattattgggttgattagtagccaaaaactaaatgcatgttcaggtcaaaatgaatttgtttgttttagttggtgccatttcctttatattcagaactacagagtgtgcatttattaataggatgaaagctcatgctgaggattgaatagggtggatgtatatattttataaactcaagttgcaaaatatgtaaagtcactactttttaaatagaatataaatgttaaaacagacaaatctatgttatatattttttaatacatgtatcagacttgttagttgaatgcagattactttgctttatggaatttcataacttttaataataaagcagttgttattggaaaaaaaaaaaaaaaaaaaaaaaaaaaaaaaaaaaa

SEQ ID NO: 676 - DNA, 2418 bp, Homo sapiens
  misc_feature (138)..(138): n equals a,t,g, or c
  misc_feature (171)..(171): n equals a,t,g, or c
gctcgtgccgctgttgaccccactgagcagtgctaagtgttggtttagtggatgttcgtggaattgctgacccatccaagggcgtcctttggagccagtggagcctgccggcgcatctraggggcagaatgctgctancacttgaatctgggatctcgccttattctcaantagcaaggcatctcgacaagcatggtctargtctggtggccagcttgccartacctgagccggtcgggtcatctgcctctgagggaccgtcctcaccgagctcctgcatcccttgagtgttgatcaggaggcgtccacagcattgttctcgcctctgaatgatgcttctttctgtgttggagcctggcgaagttgtgttttcaagccctttactttttttttccaagtggggtaggagcttttggcagtgtttactttacctagatggcttatataatccagtaagagatgcaaagataaaattgctgcggttgttacagaagcatggcggcctccagactgacccattggttgccctttagattttgtaaggatgcggtgctggggaggtggtgcttccctaccccctagaaatgctgccttccaactaccactctcccagatgtgacccttgcgattatttcctctgaggtttgaggatgaagataagttggagggaaagagagtaactaataggggatgaaatatagcagaagctagaagaaagcggtgaggtgagagagatgcatctgcacgttttcttcaacagcaccaggtgattcagcatattcctaattacctttcactattcgtgtatataagatcgtttacttgcataatatatcatcaatttgacatattcttaaaactagagggtgtgagaagcacagcaataggaagtctctccacaaactaggggaacacaaatggggtcattcacgtgcctggactgtcactatgtggctgtcacgtgaagtgctggtgttgatttccatttcagccagtgggtagctgataagccagtgccagcatccagcatgagcagatgtcggggagactgggaagtctccagcgttactgctctccttcccttcatgataagccagtgccagcatccagcgtgagcagacgtcggggagactgggaagtctccgatgttactgcctgccttcctttcgtgtgaggggctgcacttgcttttcttgtgatctgttagtggacgaggtcttccaaggaagtgctttgcacactttctttgctcctttttacagtctttgtctttgcagcaagcaaatgaaattaagccactttgggataatgaacattcagtataattctactttgtctcattttggatctcactgttgtctttataaaaatggcacattttacaaagtagtttattcttattatactttctgctggagagtgccttgaaataaaatgtgagagtattctggtactctgtgttccagatgcatgaaattgggtgaggaataacccctagtctggaatctttgtgaagcatagggttattgcaaggcaaatgggaactaacacatcttgccatttgaatcagggtctccagtttctagaaaaggcagacactggttgggaccaaagtctccatggcacatgactgaagactggtggtcgtgtgtgtgcggagtccacrgaagcctcggggaggtggagctgctccttccattccgtcaggacgtgatctgaaaacatgtagagaagatgagttgaggacagcttttctaaggcaatgtgatgtctttgctttcttatttctctttctctgcgttgttagttttgaagagtggaggagctaggggctccagaaagaatcttacacatgtgttgaagacattgatgtcatagggagcggggagctgcattcccttctgggctgttactgctaaatctcagtatgaacagaccaggcggaaagcttggtggccaagcagtctgtgtgcttccccgctgatggagaacgttgcgttgttcacaatagggcctcatgggtgtagccgcatggcagacccatggctggcgcagctgcctgttgccgtctgtcttcagtaactgctgctctgttaactgttctattctgatactacgcgtgttgttttttacaacaggtatgtttttgtttcagaaatatgtattgcttttctcatattttttgcaaattgtattgtcaacatgggtcatttaaagtcctgtatgaaccataacctgctgtggtacctttgtacatgtttgattctgtattctttattccagtgtggcatatgtgcccctctgtatcttttgagaagtgcggaataggttgcttctaccacctgttcttaatgtaacagtaaaagttttcacatttttctcagaaaaaaaaaaaaaaaaaaaaaaaaaaaactcgag

SEQ ID NO: 677 - DNA, 1308 bp, Homo sapiens
  misc_feature (1291)..(1291): n equals a,t,g, or c
cccacgcgtccgcccacgcgtccgcactcgcgctcggctcaccatgtgtcactctcgcagctgccacccgaccatgaccatcctgcaggccccgaccccggccccctccaccatcccgggaccccggcggggctccggtcctgagatcttcaccttcgaccctctcccggagcccgcagcggcccctgccgggcgccccagcgcctctcgcgggcaccgaaagcgcagcgcagggttctctaccctcgagtggtccggcgccagctgccagtcgaggaaccgaacccagccaaaaggcttctctttctgctgctcaccatcgtcttctgccagatcctgatggctgaagagggtgtgccggcgcccctgcctccagaggacgcccctaacgccgcatccctggcgcccacccctgtgtcccccgtcctcgagccctttaatctgacttcggagccctcggactacgctctggacctcagcactttcctccagcaacacccggccgccttctaactgtgactccccgcactccccaaaaagaatccgaaaaaccacaaagaaacaccaggcgtacctggtgcgcgagagcgtatccccaactgggacttccgaggcaacttgaactcagaacactacagcggagacgccacccggtgcttgaggcgggaccgaggcgcacagagaccgaggcgcatagagaccgaggcacagcccagctggggctaggcccggtgggaaggagagcgtcgttaatttatttcttattgctcctaattaatatttatatgtatttatgtacgtcctcctaggtgatggagatgtgtacgtaatatttattttaacttatgcaagggtgtgagatgttccccctgctgtaaatgcaggtctcttggtatttattgagctttgtgggactggtggaagcaggacacctggaactgcggcaaagtaggagaagaaatggggaggactcgggtgggggaggacgtcccggctgggatgaagtctggtggtgggtcgtaagtttaggaggtgactgcatcctccagcatctcaactccgtctgtctactgtgtgagacttcggcggaccattaggaatgagatccgtgagatccttccatcttcttgaagtcgcctttagggtggctgcgaggtagagggttgggggttggtgggctgtcacggagcgactgtcgagatcgcctagtatgttctgtgaacacaaataaaattgatttactgtctgcaaaaaaaaaaaaaaaaaaaaaaaaacycggggggggcccggnacccaaatccccccaaa

SEQ ID NO: 678 - DNA, 1009 bp, Homo sapiens
ggcacgagattttattccccatacttatagtgcttgacatctggtaggcactcaatttgaataaataggtgaggggatatacaaactaaaactatcacttctctcctccacctgtcatttcagtttttcttctcgattaatggctttattgttacatttgactggtttaaaatgttggggtcatctctggcttctttgtattactgtgcacactcaggtagagcctgtatgttcatttccctttgacatgttcttctagtctattcctcctccgacttctctaattgagtctcctttgtcagactactgtgataacttcttaatggggttcactggcccccacctcaccttctgtttttcaaatctcaccagttataggacacttctgaacatgtcacactcagaattgttgatgtcttttgagttcaacctatgctaaagtgcactttttagcatagaattaacagcaattgatatttggcttcatcctgcttttctgactggattgtctaccataaccttttatctcctttttgctttagccagtccggactgctacttttcctgaatatggctggaatgtcccactgtatctgtttcaccgcatctatgagtctaagtcctatcttatctattgcacaaatatatcatgcctactatagaccaggtattgcccttgacactcaggctaaaaaggtaaatgacagggccgggcgcagtggctcacgcctgtaatccagcactttgggagagcaaggtgggcggatcacgaggtcaggaattcaggaccagcctggccaacgtggtgaagccccatctctactaaaggatacagaaattggcctggcgtggtggtgggcacctgtaatcccagctactcggggggctgaggcgggagagtggcttgaggccggaagacggaggttgcagtggggcgagattgcaccactgcactccaacctgggcaacaagagcaaaactctgtctcaaaaaaaaaaaaaaaaaaaaa

SEQ ID NO: 679 - DNA, 561 bp, Homo sapiens
cgaagctcgaaattaaccctcactaaaagggaacaaaagctggagctccaccgcggtggcggccgctctagaactagtggatcccccgggctgcaggaattcggcacgagacctcctgagtttccatgctcctttctgtaccaggtttaaatgtagtcttctggagaagtatttttgacattgagctctgggacaggacaccttgggtttgtggactgcagcccactatgatgttattacttctctggccaggcctccagtggaagtgcacaggcactcccaatgttgttaatgctctgtcttccatttgttctggaatcctacgtgttggtctgtggttccatgcattagctgtttgtaaataatgcatttgcatactgaaaaaggaatgccacctgccacagttgatggtgaggaagctccttgacgtggtgcaattttgatgagatgtctctgggggacacgaggatgccctaatgatgctgacttgtcatggttgcagcatttgaacttttggtgttaaaaaaaaaaaaaaaaaaaaaaaaaaaaaaaaaaaaaaaa

SEQ ID NO: 680 - DNA, 1718 bp, Homo sapiens
tttttttttttttttttttttttttttttttttttgccattatagttgttaacatttttattgcatatttacaatgtgtggaacattataaggatttacagtagaagccaaatttcccagcccttaaaattttaataggaaaaatcgaataaaccatacatatttttgaaaatgagcattagaaacacacagatgattataattctatagactaatacaggtgaatgctgtatggaatagaacagctgggagaggtaaaagagtggataagagagtcatcagagtgtgaaaaaactacagctggggggtattgaataaagagacaatattgaaaatatttttaaacggtaaaatgtcccggtaaaagcatagcttttcccccttatgcaaaacttgtgaggtaagaattttttccccaccccgttttctgctcttctggccaaccatttggggggacttccctgtcccaggtgactctctctcacatagctgtaccttggggcttactagcaatacatgctttccactaccccctcaacctcatcacagaaataaccttttctgttcaatgatcagtcttactttacctactgaaaacgggtggtgaaagttagtaacataaacaaaccagtgctgtttcttctagctaacatatcaccatggttgggctttaacctttcaaggagtgaaatattgctaaagtttcaggcataggaaccccttgaggagctgtctggggcagacaggtctttgctttcctcagatagttccaattgtcatccttgaccatgaacaatgccattgttattccaaactcacttcttctaatacttcaatatggatcataaaaatagtttacacctttatgcacatcaaaatacaaaatacagggcacaataaaactgaactggaaaaaggtatggcagtttcttttaaaactaccctgtgacccagcaattctaatccaaggaatttactgcaaagaaatgaaaacctatgttcacaaagacttacgtaagaatggtcatagcagctttatttataatggccaatcctggaaacagcccaggtatctatcaataataggaaattaagaaaacaaactgtaatattgtcatacagtggaatactactcagcaataaaaaagaacagcaataaaaaaatgaagccttgtagaaaagcgtacatgttgcgtgactctatttatataaagttttagaacagaaaaatcttatggtagaaaaaggaacagtggttgcctttgagggtcaagtagggacaggaattgactggaaagggcagtgtggaaactttctagggtggtgataacgtttcctatttccatagcactatatgcatttgccaaacctcagtgaacacattttctatgcacttcattgcatgctaattttatgtaaaaaagccaacaatgaactctagttaatgatatgcaatttaaaatgcatcaaataataatatgaaatgatgaatggatatgtgacaaagcaagcataggtaatgctaattagcatctaggtagtgagtacactataaaattattaactttttaatgtatttgataattttcataacaagatgttgggtaaaaatacagggtgcaatgtttaccaaatagttttgctgagaatttcattactgattttatgacagtaagatcatcaaattcttctaagtgtccattgagacggacgcgtgg

SEQ ID NO: 681 - DNA, 422 bp, Homo sapiens
  misc_feature (407)..(407): n equals a,t,g, or c
acgcgtccggtaagggatgagaaagtacctgatgggtacagtgtacacttttctggtgttggttgcaggaaaagcctggacttcaccacttcgcaatatatccgtgtaacaaaactgcacttgtacgccttatatttatacaaatttaattttttaaaagggaagagagaatcatattaatttctcaccactttttaagtaagcaaacagcagtatttcccagaggcaagaggttcagcaagaagtcaggaaatgtttttgtagataagcatctatcattctgatgggccatgactagtgtgttcacttgtaattcctttgcctttaaaaaaagagaatgatatcaaaaaataagtgccttatactgtgaaacgataaaaggacttcctgattctaaaaaaaaaaanaaaaaaaaaaaaaaa

SEQ ID NO: 682 - DNA, 2234 bp, Homo sapiens
  misc_feature (2157)..(2157): n equals a,t,g, or c
cccacgcgtccggctaaagtggtattgattttaaacttgactcaccaacttcacaggggttaatacagatgtgaaaaatcttgagttataagcttcctgcatgcatgagacttgtttttattttgctgctctagtgttattggttttattacgcaaggagaaagaaggcagggaatttatggtcaggagattcctggtcaggaggttcatagtcagaagatctagactgggtcacaagaaatgacagaatttaagcatttgagccagggaataagaatgtgtgtgctctgcctgtgttttccacattcattttactcagcattgcactgtcatcttgcttaagaacaattcagtaggtcagaaacattggattccaaagctgttaatggtttattttccatttcttgccttcgcaatatctgaaataaagttatatcccagataactgatgggaaaacagggttcaaagctataggatatatgactcatttaacataaaattattcaaattaatgaattagcaaatcctcttgtgcttataataagcaaatataagttttatcttgtctattataaaagaaatgtctaaacattaagtgcaaaaccaaactaggcagcaggagaaggaaattagttatgttgtttttataataaggattgtaaaaccaatatcttagtgaaattctcagaaagcttgatttaaaaatttatcaaaattcgggagtttttttgtttcatttggtctatttgtcagtggtttgaggtcttagttctgcagcgacatcttatggagttggttagtttgcacaaccatttaataatgtctgccagaactgatcattgtctaacagatttgatgcaaataggatccctgcctgcgctttgaatgtggaagtaattaaacggatgctatgaggacttttatttttttctctgttggtgcttatctaaaatttccttatcatggcaactgtataatttttaagacactccaaaatatgtactgaggtctgaaattctcactacatattccaagttaggataggaggggagaaggaagctgttgaatagtgaaataagacagcagtaaaagatcacagtacagctggtgtttgttggcaagagtttccacttaaaaatttgcagcagtgcaagtacctcaattattattggcgcttttcactgttcgtgatcaccaggagtgaaaaaaaaagaaaagaaaagaaaagaaaattgaattctttgaagctcagagaagtaaactgaaaaatttttgagtaccgaaatttacccatttcttcttctgattgtgttcttttgaacagaacacattgcattaaactctagaaagaaaaaaagtgactgttttcatatttttatgattggagtcacattcttaagatctataatgtagattacagcaccattttgttatctgctagaagaaatatagctaatcatctctaaattagtaatgttacattttattttgcttcctatttactagtgtggcacattttaatgacagaaaatttccttgaaggcaagagctttacacacagtaggatttcactcagtttttgcatatattgaccattgcagaatacaaacaactgttaagtaatttctcccaaagacaggccataataaagaggaaaaatataaactatatgacactaaaaatcctgttaatcttgatcaatcagtgaatgaaacactaattgtgccaaacaacacattctacctgaacaaaaggaggtaattgcagtatgtttctatgaatacatagcagctgttctatgccattattatcactggtgagtaaagatcatggtgaatcattgtctaatatcttgtgatcttgctcacatataaaaattgccaggggacttcattaattatgattgcatcttaagggctctggacattttcatgagtgccacaggacacctagaaaataattgcatcttttgagaaccatgtgccagtgacaaggtaaagctcaggttgtatattccagagattctctggcaaatgagcattgcctgccttaatattctaagcccatcagttagaaaaggctgaccctatgacttaaaattgcatgctgcatgattagaaagatagataacaatatattttaaagaattatttgtncctcacacatgcccaacaagattgaatgattttaattgaattgaatattggtaaatttgctagaaaaaaaaaaaaaa

SEQ ID NO: 683 - DNA, 307 bp, Homo sapiens
cccacgcgtccgagatgagtaggtgtctggtacagaagtcttagtggagagttggtactggaatcctggtctaaggtattaggttttaatttgctagacaaagagaactcaagcagtgctgtctaggagtgttatgtaagctagattggactttagagtccggagaccatgcgggaagatactgtgtgataagggcctgaaacatgttggttacagtgagactagaaatgggataaatccagagctgtttcaccagtagacttgcctgaatatcctgtctgactgagtatggatcaaaaaaaaaaaa

SEQ ID NO: 684 - DNA, 1758 bp, Homo sapiens
  misc_feature (1720)..(1720): n equals a,t,g, or c
tgtcccggcctgaggtgtcggccggatccctccttctcccggcgcctcaagcggaagaccattcctcaagaattttgtatccaaggcccaaaagtttgttacccaagatgatgaatgctgacatggatgatctctctgcaagagtagatgcagttaaggaagaaaatctgaagctaaaatcagaaaaccaagttcttggacaatatatagaaaatctcatgtcagcttctagtgtttttcaaacaactgacacaaaaagcaaaagaaagtaagggattgacacccttctgttttatggaattgctgctgatcattttttctttaaaacttggatagattccaaaagttacagtacctttgtggcttcattgaatatttatgaagataatgtcagatgtagacaaaaataacacaataacaggagacttccataagtttgtgtattatgttagtctatgaaaacgtgcaaatgtattgtagagactttatgattagaattgcatatatttatgaaacttaaagatgaatgttttattgaatttgtaggtttagcactgtcttttattataggattagtaagatatacaagaaaataaccaccgtgttgtgaaaaagtgaccaaaatcatgtactaaatgcacagctttatgtaccctgtccaccatcttgtgcctcttctccatttgcctcttccttcctatttcccttccgctaaggaaaaaaattggtgtcacatttgtaaaagtaattttaatagttaatcatctctgagagtaacctgtattttaattgttgaaacttaaccaaaataagatactgtctcagctagggcttgtcatttgtgtatttagtgttaagataggaatgctagtgtctctttaattaattggaaatagatggaggctaaaaatgaaggtttttctttgaaactgaattaacttgggaatatttgttgttaaaaacttctttttgcccaaaataactcattttgtattatctgaaaatatataatttctggtcatgtgtatgttaaaatagaaaattttgaggaaaaatggaaatagggtggaaaagtactcggtaaacagtagtaaccaaatattttcactccagatttgtgttttctctggcacagagtagatcttttgggaaatatatatgaaagtggattaagtttgactacccttatgttagccacatctggatgagaacagttacaaagagtttggtctctaagttgatttgtacccagtgggtcaacttctgcaaaattccgtaatggtgtattagtattagaatagtgaataaaatgggaaagttatacatgtatacttattatcttgctcagtattttatctcacttgttctagaattttctgtaaaccctgctactgggtttgaagagttttagtcatcctttaacaatttttaaaaatttagcttctagattccatttggtaaggaaatcaatattggaagtattgctaaaatcttataatatgaaaagagatccactaatgtagcttaaggttattagatttgggcttttaatcatggaataatcttatgtattggtgtaagagttgatgaatgactttagctgtgtgaatatataatagtcaaactgcaaacattttgcatcccttttgtgacctaatttacagacatttaaattgtgttgcagttctgctttgccgtttaataaaaagctatttcaganaaaaaaaaaaaaaaaaaaaaaawaaaagggcggccgct

SEQ ID NO: 685 - DNA, 1056 bp, Homo sapiens
  misc_feature (13)..(13): n equals a,t,g, or c
  misc_feature (15)..(15): n equals a,t,g, or c
  misc_feature (34)..(34): n equals a,t,g, or c
  misc_feature (46)..(46): n equals a,t,g, or c
  misc_feature (131)..(131): n equals a,t,g, or c
  misc_feature (1015)..(1015): n equals a,t,g, or c
  misc_feature (1035)..(1035): n equals a,t,g, or c
  misc_feature (1052)..(1052): n equals a,t,g, or c
cctcgttttagtnanccgtcaagatcgcctgaanacgccatccacncttgttttgacctccatagaagacaccgggaccgatccagcctccggactctagcctaggcttttgcaaaaagctatttaggtgncactatagaaggtacgcctgcaggtaccggtccggaattcccgggcaaattacgttgattattatttttattttttgtatagcttaccacttacgtgtatatctctaaaaaatacctttgcatgcttgaactttacataaatgtcttactatatgcatttttccacaacttcctatattcattcagtagtatgtttttcagtttcattcatgatgttgcactgaagattatatattttcactcccgtaaatttgattatccaaaagagttcatgtaagattggaatgctcacttctttgaatgtttgacagaactcagttaaattacctgggattggtgtcttccttatggaaatatttgaattatcaatctcacaccctcaatgattttaggactagtattattttcggtttcttgttgagttcattttgttattgcatttaattttctaagaatttgtctatattcactgaattttaaaaaatcattgcttgcattttataatattctctacctttgaaaatataaatgctgcatttgtctttattgctcctttctattcttcatattattaatttttaaattaatattttaattaattgaagccttctytatataacttagctgaaattcttgtacctttgcttcctattcactaattccactataatgtttattgtttgcttctttcttgtgtaaaattttgtgaatcttgtttttttttataatttcctaatttggttctaaactattaaatttaagtctttcctattttctaataaaatttttttgaaagcgraaaaaaaaaaaaaaaaaaaaaaaaaaaagggcggccgctctagaggatccctcgaggggcccaagcttacgcgtgcatgcgacgncatagctctctccctatagngagtcgcattataagcnagct

SEQ ID NO: 686 - DNA, 470 bp, Homo sapiens
ccggaattcccgggtcgacccacgcgtccggttttgttactttttattatggaaaattttaacatacaaatgagaggagagtgtaatgacttacacatacaatatatgttcatttcatggttcatcttgtttcgtctatatcccctttcctcccccttcttctcccagaatgttttgaagcaaatctcagacatcttatcaccttattatttcatccaaaagtattttagtatccctgaaagatacagctcttcaaaaaagaaaactacaataccattatcacacctgaaaagttaattcatcagctatccagcattcaagttaccttggttgtcttataaacattttgttttgttttacagtatgtttatttggatgagatttaagacaaagacaatacactacaaatagatgtcaaaaaaaaaaaaaaaaaaaaaaaaaaaaaaaaaagggcggccgctttagaggat

SEQ ID NO: 687 - DNA, 932 bp, Homo sapiens
ttgcaaaaagctatttaaggtgccactatagaagggtacgcctgcgaggtaccgggtccggwaattcccgggtcgacccacgcgtccgagagacatccatatttccagtgtctctctcatgtttaagcttttttcggaatcaagcccacattcttcagcacggcattgaagactcaggagccctcccagtctggccccatgcacagatggaaggctttctttcctggtccttatccttctctgcacaatactccagtcacaccacaccatggactgctctctgaccctcatggcattccagtggcgttatgctctcatacagccttcctcatttgcccaccttgcttgtctctgactcatattctattccaaggctaagctcaaatgtcatcatatctctcaaactgtccctcacactcccgcccccacatgatttagttgtattctgccttttgttccacaggtctttgtacatcatggtattatggtgtttaagtctgtacatatgtatttgtattgccatccccaacccaggctccaagccttctgaaggtagaaaactgtatcacataaatgaagaatgaatgaatgaatgaatgagtaaatatttagcctatctgtctgaactgcctgctctgtcttagccattggaaacatgcttagaactaaatcattttctaagaaacaatagtcttccttagtattaattttatattatttttctctcttctctccaagcccttatcacttggattcttgctattttacttttgctttaagatatccctgttgtcttattaactackttgagtcctacacagatttatgtaagtgagaaatatacaatatcctatgtacctcacctgagctaaataaaatcattttccatcaaaaaaaaaaaaaaaaaaaaaaaaaaaaaaaagggcggccgc

SEQ ID NO: 688 - DNA, 1953 bp, Homo sapiens
  misc_feature (500)..(500): n equals a,t,g, or c
  misc_feature (742)..(742): n equals a,t,g, or c
  misc_feature (946)..(946): n equals a,t,g, or c
  misc_feature (1028)..(1028): n equals a,t,g, or c
  misc_feature (1038)..(1038): n equals a,t,g, or c
  misc_feature (1229)..(1229): n equals a,t,g, or c
  misc_feature (1251)..(1251): n equals a,t,g, or c
  misc_feature (1264)..(1264): n equals a,t,g, or c
ggcaccggcggcgtgagggctccgggtcgctggcggcgtggacayctgagtcccggggtaggggtctcccgcgaggagtgagctgttgccgcakaatgggctgctggctcctgccctgcttcctgtgatcgagccggccctgaggactctgtggagatgcctgtaacccaccggaaatcagacgcatctgacatgaactcagacacgtcccccagctgcaggctccgagccttcagcagaggcggcagctggagagtcgaagcagcagctctcgctccagaagcttcactttggatgatgagagcctgaagtacctcacccatgaggaaaaggatgtgctcctgttttttgaagagacgattgactccctagacgaggactttgaggagccagtgctgtgcgatggaggagtgtgctgcctctgctccccgtctctggaggagagcacctccagtccctccgagcctgaagatgtcatcgacttagtgcagccagcaccntggcgccggggaarccgagggccttccagaggggacccaggcagmagggcctgcacctgctgggaaggagcacaggaaacaagatgctgagactcctccacctccagaccccccggctcccgagacccttcttgcgccaccacccctgcctagcacccccgatccccccaggagggactgcgcgccccctccccgccggtggagcaccccagactcctgcgctctgttcccacgcccctcgntatggcgcagaagatttccgagaggatggcggggaacgaagccctctcgcccacctccccgttcagggagggccggcccggggagtggaggacacctgccgcccgggggccccgcagtggagaccctggcccggggcccagccacccggcgcagcccaaggcaccccgcttccccagcaacatcatcgtcaccaacggcgcggnccgggagccccgcaggaccctgtccagggcggccgtcagcgtgcaggagcgcagggcgcaggtgttggccaccatccacggncacgccggcnccttccccgccgcgggggacgccggcgagggggccccagggggcggctcctccccggagcgggtggcgcgtggccggggcctgccgggccccgctgagagtctccgggcagggggtcaggctccgcggggcccggcgctggccaacggcttcccaagtgcgcacgaggccctgaagagcgcacccagytcnttcgcgcccgctgggaagtccntctgcttccgccntggcccggccctgcccagcackcgggcccgtcagagcttccccgggccccggcagcccaacggcgcccaggactggcgccgcgcagactccctgccccggccccagggcatcaccgtgcagttcgcgggccgcggctcctcggaggaggcgcgcagggaggcctgcggaagctggggctgctcagggagagttcgtgagggccgcgcgggctccagtccaccctgtttctccccaccctgaagagagggtgaaagagtcgctgcacccaggagctgtttggtctaaaatggaagtgacagcgggagcccctgccctctgtggcacatcggagtctagaggtgcctggctggggcctcctggctgagcacgcaccgcaagctccagccaccggcacagagaactcttccctaaaggaatctggccgagggcttgtctcccttttcccaagaactgagagagagagaataacctgttagacccataggtttccgtgatgtgtaaatgccatcttttgggggttgggaggagtaggactggtctgattatcattcttgagtctcatctaccctcttctcgaagtacatgacatgaaagttcagatcccttccactcaggattctcgccgccttttctaagaaaataataaaaaaaaatgcttgtttcaaaaaaaaaaaaaaaaaaactcgag

SEQ ID NO: 689 - DNA, 1008 bp, Homo sapiens
ggcacgagtgtcggtcccctccctgagccagcatctccatccaccaccccgtgccagctcccgtgccagccttcattcctcccagtgtccaagcccctccaggagggtcctggggtgggccagatgcctgcccacctctgtctcctgcctctgctcctctgcccttcttatagccagaacttgtatcttctcagcaaccttcactttgtccttgtccctttaccattccccatcaaagagtagtctgctatatcaatttgtgtagatatgtctgtctttttgggtcctcagagaaaatgcccattttctcggagaattctctgcactcctctctgcttcacattcaacttccctgttctcatctttggtaggattctgccagttgcttttgcatcttctgttcctgggtaatggtgggtcttaatggaggctgggtggaccactgcccgtccactcttcaacaggaggaacagcatgccaccacagtaacacacattagagaaaggacagaggtctgctccttcctgccacctttctcctggccccttagcattcccccagtccctccctcttcaccttgctccgtctatgtcttcccagctcagccttttccccactcttaaatactgtactacttcactgtaagaacgaaagaatagttaggataccaatgagtaaaagggttcctgttcactctgactctgtgcaaattgtattacagtagaccgctgacgttcccaagtgacagatccagggcctttcaaacatccccaaagtcatggccatactcaccattagccagtttctaacatctgtttcagggtatccagctgtagatgttcttatcccccatacttgtgagttcttggggttgctcacaaatactaggggtttttgttgtatttttaacaaatatatcctaatgtcatatttattctcttttgtaactgctgtctttacaataaagaaatcatctgcctttctatcttaaaaaaaaaaaaaaaaaaa

SEQ ID NO: 690 - DNA, 421 bp, Homo sapiens
ggcacgagcaccctgcagctggagctggagaccctgctgtcttctgccagccggcgcctgcgtgtgcttgaggccgaaacccagatcctcaccgactggcaggataagaaaggtgacagacgattcctgaagctgggtcgagaccatgaacttggagctccccccaaacatgggaagcccaagaagcagaaactggaagggaaggcaggacatgggccgggccctggcccaggacggcccaaatccaaaaaccttcagcccaagatccaggaatatgaattcactgatgaccctatcgacgtgccacggatccccaaaaatgatgcccccaacaggttctgggctagagaacatagaagggggcctcaaagttctggtggtggaggcactggtggggcaagggcgcccactcaggatttgg

SEQ ID NO: 691 - DNA, 1086 bp, Homo sapiens
ggcacgaggtgggatttgctttcatgtcctgtttcaaaaaccaagtgtctcttgacagcccactggttcttcctgtcctcttgctctagtctgtatcagaaagcagaatgactgtacttttgttttacaaacaaccacctgataggacggacactccacgagataaggaaaggcacgtgcccttgagcttgaatggaagcagcctctggagggggcagccactgcccttcgagggagagcagctcttcagcagtggccagagtgccacgtgactctgcagatgacccctgggagccgggtgatgggcacctgctggggcttttgttttttctttttcactggctggcttgatcctcagtggcaaaaggacccctgagccccttctccgagccctggagcactcctcgggacaccgagtggcctcagggctgggttcagagctcctcccgcaggggagcctcagaagtggaggcagctgctgatgggtgagtttacaacttcttatcctgcctaaggcgagtaggcgtttttattccgtttccagtccttgagctcagcagatcaaaataacagtgaccctgcaaccccacagagcccgcgacacgctcgctttcttccccgccctgcccctttagtccccgctctggaaggccaggcagtttaggtgtaaataggtatcttttatggtttccaaatgaattatttgtgtgagagtaattaaatctgtaagaaaacctgttgagattcttcactatgaattatgacttctacaacatgtattttagcaaaaacacgatgctggcctccactggatagctcagtatgctgattgccagtgatagttctgtacgcgttaccaacagcgtctttattaaccctcttccacatccagtggaaatcattgctaggcggtatttgttggttggctgttagctttgctttatgatttcatgtttcttttaaaggttgttttgcatgttgaatattaaattttttttttctgtgtcttcctctaaaaaaaaaaaaaaaaaaaaaaaaaaaaaaaaaaaaaaaaaaaaaaaaaaaaaaaaaaaaaaaaaaaaaaaa

SEQ ID NO: 692 - DNA, 1038 bp, Homo sapiens
  misc_feature (142)..(142): n equals a,t,g, or c
ccacgcgtccgcttactcaattttctacaagttcatccataaaatctgcctttatttacataaaattatataaaatatttgaattaaaagagatcataaataattctattttttcccagttcatgtggcattttagacatantcaaaatttgtagcgttatttttttttcttttccaaatctttaaaaagcatctataacccactgaataagatgggttagaagatgaagctgctgagaagtgctgcaaagctgatggtattgatatcaacacaaacatcatatgcttttggggaacagtgcactcatttgaccttattcctaataaattcaaacagtgggaaaattcctctaacttatttttaaaattctcttttaatctattacttccctattggtgaatgatacaaattagtttcttgacctctgttcagatactgggttacatacaatttttggccatttaagtatactgtaaatccctccagaaaactttcttatattgtcttgtgcttcacagctagttttcaggcatatgtactgcttacaaattagtttggtatttaaaaaggagttgtggcttgagttacaaagatttaaagttaaagcaatgctcttaataatttctattttctcactgaatcaattcacactagacacccctttaacttccatatacatgatcactcaccttctgtccaaaaatctattttaggaaagagcagaagtacaagaggaccttgtaaacaatactactaatattagtaggaatacggcaaggtttaagagtgacaactttagcttcactactttcaagctgcttactagctgggacaagttgtataaattctccgagcccattttcctcatttaaaaaaggggccatagacatttttccaaagacatacaaatggccaacaagcacatgaaaagatgctcaatatagttaaccattagggaaatataaataaaaaacacaatttcaaccacaatagtactacatacacattagaataattatgttaaaaaaaaaaaaaaa

SEQ ID NO: 693 - DNA, 765 bp, Homo sapiens
  misc_feature (757)..(757): n equals a,t,g, or c
caggacctggaacgcgcgggcctgcggcaggggagttagagcagcagctgcacgcccaggctgcggagcacctggaggcacaggcccagaactcccrgctgtggcgggcgcacgaggcgctgcgaacgcagctggagggggcgcaggagcagatccgcaggctggagagcgaagsacgaggccgccaggagcaaacccaacgagacgtggtcgccgtctccaggaacatgcagaaagagaaagtcagcctgctacggcaactggagctgctcagggagctgaatacacggctgcgggatgacagggacgcctgcctgggcccacctgctgctgctgctgttgctgggctcggccccccagacgcggctctggccaccttcccagtgcccggtgaccagccccgagtgactcacggaccatgagctagaagctgcccttgcaggaggcttgtcatgggtcgggggtgcccactcaggatgcaggctctccccagggggccccaggctcgcctgactgaagacatgaaggacctagcctaggagtggtcagggtcccgggagtggccagggtcccgtgtgtgccctctgccagtcttcgctctgtccccgttcaatcaaccccatctcagttcagcagaaaaccccctcgtcaaataaaacccactgactgcaaaaaaaaaaaaaaaaaaaaaaaaaaaaaaaaaaaaaaaaaaaaaaaaaaaaaaaaaaaaaaaaaaaaaaaaaaaaaaaaaaaattnaagggggg

SEQ ID NO: 694 - DNA, 668 bp, Homo sapiens
  misc_feature (11)..(11): n equals a,t,g, or c
  misc_feature (13)..(13): n equals a,t,g, or c
  misc_feature (19)..(19): n equals a,t,g, or c
  misc_feature (23)..(23): n equals a,t,g, or c
  misc_feature (35)..(35): n equals a,t,g, or c
ccgggggaatnanaggganaacntccccttactanagggaacaaaagctggagctccaccgcggtggcggccgctctagaactagtggatcccccgggctgcagrcggggctgtgctggctgcccgcagtggcccactggccatggtgggctcagcaatgatggggggcatcctgttggccctcattgagggcgttggcatcctcctcactcgctacacagcccagcagttccgaaatgcgcccccattcctggaggaccccagccagctgccccctaaggatggcaccccggccccaggctaccccagctatcagcagtaccactgaggaagccactgccaccatgggagctacttctcggttccctccccgatggtctacctcgaagggagggctggctcccagttagccctgggaccctccagagagggtttctactctgctccctagtcccagggtgggggtggggcaccccagctgccctgacagatgggtcccctttttctctctcagggcaccccagccccacactcacatgtacgaagttctcaccccagctcctttgtgtggcaccctgatgagtatttaaagcccgttttgaaatgccaaaaaaaaaaaaaaaaaactcgaggggggggccccttaacccatttgggccttaaggggg

SEQ ID NO: 695 - DNA, 893 bp, Homo sapiens
gggcttgactttcgaatgtaaaactgactgtgccttagcatcaccctgtccagtgcccctggggcagctggtagtgtccagaagaatggacacctgctccagatttagatgcccatctgggcttttgtttgatttgcggcgttcctgtcttctgtaaagctagtgagttgtcccaagagactgatgccacagcttgttcgcagtttacacaaactcagctttaaaattccaaatagaatctgacttgcaaactctagctgcagcatgtggagcttctagatgtttactaccttgaatggttgtcagtgtcactgaaccacaggggagaggagtatggggtagagcaatggtctgggccaaggaatggtgagcttagggtcttcctctgactccttactcctcaaggaggcagttagggtccctcttaagcaggcttctatttcttaccactaaattggtttcctttttcatccagaagttagaactccccagatattcacactataggatctgaattccgagattctaaaatatcttaaaccacaagagagaaaatctagttctgcctcagccccagtcagcaggccatctgtcccttcctctcctctgagtcagacagctctggcaagcaaggctccttggctagttcctaatgcactgacaggagccctcccattaaggacgacttctactcaaaatgcgactctccctctgaacttcagatgcctctgttagcaggaaaaggcattgattggattggatatatttatgtgactgcgggcatttgtggctgtagaatccgtgaccgtaatgttatatgtaatgggaactatcttataaacttgaaaaaaataaagtttttattttctawaaaaaaaaaaaaaaaaactcga

SEQ ID NO: 696 - DNA, 519 bp, Homo sapiens
  misc_feature (492)..(492): n equals a,t,g, or c
tcctcacctcacatmtggcttcctccaggggccctgatacagtgggtgatgggtcctaagggggcctccaggacccaccagccctatgaggaaagagttcttcctgatcctaccccttgacttccttttctttctcctgcaggtctcagaacggccccgaagcctccccctatcccctgaattggagagctctccttgatgccctctgttagggcccaccccaatcccagggcagaaggacatgagggagcaaagagcttgaggaatgccatactccggctggtccgggacatggaaattcggactcagggaggacccgggctgggcaatgactgggagacttgcctgggttcccaggacttgggggtcctgactcccagccctcatcctgccttacccctctgttcccagccccagcctttctaagccattggraatagaatggccccttttgttaaaaaaaaaaaaaaaaggctcgggggggggcccganacccaattcgaagttgcgagtgggctc

SEQ ID NO: 697 - DNA, 453 bp, Homo sapiens
ggaattcggcacgagctgagcttgtgtttaaagccgttggccttgctcccccagctttgtcagctcaggtctgtctacacccagatggtagcgcttgtgacactggcctggcagtcctgctcacagtgttctgtgcctgtgtgctcccaccctttcctcctgctgctgcagaaacccggccatccttccacacccagatctcttgtcctgtcctcaccccaccctgccaccatcagccctgcctggagccacctgccctttggcaacaaaaccaaacctttttgtgggcgttcaagatggtattgtgcccaccagtcagatcctgtgttttgagtcccaaaggccatgccaaggattggctttgggaggctttaatcaccaacccatcaacatcaagcctcccccaggccggttcaaataaatgtatttaaataaaaaaaaaaaaaaaaaaaa

SEQ ID NO: 698 - DNA, 415 bp, Homo sapiens
ggcacgagcagcggccggccgctctgctgagaaggcagagaggcaggctcaggcctcagcgtggacagcagggataaggggcacgaaggacggggactcggccccttcagaattcctcaggactctcaggtgcagctttgccaaaaaggaacttttcatgtcatgcagttgaggggacttagtctcaatcccaggctcctcttgactctgggcagcctctgtcttgggagctcagccccagggttcggtcgtcagcagtttcccaagaacaagatgtgatggcatctgctgctgaaaccctgatgaggaccaggccccctgcaccgctgtcagcctgaggaattaaagctttggtgctgggaaaaaaaaaaaaaaaaaaaaaaaaaaaaaaaaaaaaaaaaaaaaaaaaaaaaaa

SEQ ID NO: 699 - DNA, 674 bp, Homo sapiens
ggcacagggaaaccccggagcatgtttagaagatgacaatataatgatcattatgttagtcatgaaatgggaagaatctatcatttggcaccatttggtactgtgtgccaactctggcttaagcattttgctcatattaccctgtaaggtcaataattattatccccattttgctgtagagaaaactgagtattctgatacaactttaactttcctggggtcaaaaaaattatcagtatcactaggatttgaactccaggtcaatctgattttaaagcatgtactcttaagcattagaacagtggttcttttgactgggcatggtgctcacgcctgtaattccagcactttgggaagccaagggtggcagattacttggacccaggagtttgagaccagtccgggcagcatggcgaaaccccatctcaacagaaaatatttaaaagttagacaggtgtggtggcatgcacctgtggtcccggctactcgggaggctgaggtgaaaggattacttgaacctgctaggtggaggctgcactgagccgggattgtaccactgcactctagcctgggcaacagagtgaaattctgtctctaaaaaaaaaaaaaaaaaaaagagaaagaaagcaagaaagaaaagaacaaaagcaaaaacaaaaaaaaaaaaaaaaaaa

SEQ ID NO: 700 - DNA, 1246 bp, Homo sapiens
ggcacgagctcgtgccgaattcggcagaggtcaccttctcctcctttccctgctgggggtggcaggggtccctttaccccctcattcttgacccttctccagggatgcttgtgacctccttaccccaccccccatcacctctctgtcctgaagtgagggtttgtcaccgtccatggcaaggtgtggtgtctggtaggctctatgacctgccttctctcagggtgtttattctgcagcagagaggggtctgcggtctgagtgtaatggtggaaatccaggcttccttccatggcccaaggaggcctttccggagcaacagggttttcctgggactcagcctggcttttgttaaggcaggtcccggatttactcagaagatgggccccagagaggaggagaggaaaggaatacctgtcagtcaaacgtgaagcccactgatgacactgcctggcagagctgcctccggtcagcagtgacccttcaccccccagctcccaagtcctcttcctgagggagctggtccggctttatggaaggctccgcctgtgttcccccactgggtccctggtccctcacctgtcacgtggggcgatggtcaccctccctccctgcctgccctgaaggatacactgagatgaaggtcaggaaatctgctggctgcagaaccaggggccatgcaggagtgagggatggtctggtcaagttgaggctctgccccagcctcagtttccccacacaggcatgagactgtcttcctgactttcagaggacagggctgagatgggatgagggaacacagggaaagcgtttagcacctctgagtgctgtgtggatgcgacctggggggtcctggcctccactctttaattctatctggactgtgtgccctcctacctccagtttccctgcgggggcctttcacagggcctggcttgcggatacggggtttggcgtagggcagtgcttctcaaatgggaaggcgcactgggattcttcaggttggggtggggcctgaggttctgcatttctaatcagttgcctaggactggctctaattcttgttgaatttacaatcacttgtggagttaagaaaaacatactgggccttggttgggtgtggtggctcacacctgtaatcccagcactttgggaggccaaggtgggcagatcatgaggtcgagagattgagaccatcctggccaacatggtgaaaccttgtctctactaaaaaaaaaaaaaaaaaaaa

SEQ ID NO: 701 - DNA, 1510 bp, Homo sapiens
ggcacgaggtaagactatgatatttttattgattgttaattatctttcctttatagattatggaagagacctacaaaatggaattcatgtacagtggtgtggagaataagcaggtggtgattatacatcacatgaggctgcaggccaaagctttgcaacttatagtaacagcacgaactacacgagggtaagatgtggggttggccaaaatatgtggcatgttcctttcaaagatacttcaaatgcattcagacatcacacgaaagttaatgataagtgaaatgaaatttaggaaagactagctaaggaatgtgtgatctattcatttttttcagatattacaaattctgttgttggatcagattagacccttggaaatccaattgtgtctctcccttgctaaaaaccctctggtgactctccattacatatagcacaacactggactttatctggcaataaggacactctgtatcctcctacttgatagatttccttaagaatttagtgccagggacactttttctgtctgaaggactaataagctttttctcaggcaataaggataaattaagaggatgtactgggaagtcagactactttgttcaaatcttgtcttttctacttactagttgtttggttatgaacctttctgtaccttgtttccctgtacaaaatgaaaatgaagacagcatctacctcatggcatttctatgaagaataaatgagataatacatgtaaaaacacttagcatggtacttgatacgtaataagagctcagtgtaattatatctgtaagactttcagataactggaattgccacatttcattgattccaagatacacattttttattattgtaacttctctgaactcagatattttgatggtgtcccatagtgttttttgtttcttactatttcataaaataaaggtgcatcttaagaatgatggcatcatagatttgatacaaaaaagtacttaggtgactcattgccagctcacagacatgtttgatgctcagtccagctcctgtgtcaaaaaaaaaaaagtgccatagagatataaatatgaatgcttaaacacagaaacatactaggtcagaaataacatcctgaaaaataaaatattttatttcttcacgtatcttgatagtgacctcataaagtcaaagaatcatttaatcttaaagatattcatatgtggccgggtgtggtggctcacacctgtaatcccagcactttgggaggccaaggtgggcagatcacgaggtcaggagatcaagagcatcctggctaacatggtgaaaccctgtctctactaaaaatacataaaattagccgggcatggtggcatgcaccagtagtcccagctactcgggaggctgaggcaggagaatctttagaacctgggaggtggaggttgcagtgggccgaaatcacaccactgcactccagcctgggcaacagagcaagactccatctttatataaaaaaaaaaaaaaaaaa

SEQ ID NO: 702 - DNA, 1259 bp, Homo sapiens
  misc_feature (4)..(4): n equals a,t,g, or c
  misc_feature (18)..(18): n equals a,t,g, or c
gggntacaaaagctgganctccaccgcggtggcggccgctctagaactagtggatcccccgggctgcaggaattcggcacgagtccacacagggcctggtgttctaccccatctggcccctggcccatctcttctgtgccttagtcacatatgaaagcgcccctccctggctccccatctgtcccacacgctccctggggctcttagttcagctgctggcactcgcaggatcctgcagtgctgggcccagagcccttggacaggcctcaggagtggtcaggaccaccaagcccctcctctccccctccacacctctagacctggggcctccggaacccccagcaggctgggcttatactagctcctgacttaggaagagcctcgtgtcacaacacgtgtccctacaggcaaagtgtcctggcatttaaaacccagattatccctgggtttgggctgcagtcacctggagaagctggtagggtaagggagagggaccctgccggtgttcactggggattctttcttttggtccttcctggaatgaacaggttccctccctgccacctgtgaggagagttggggcccagccgtcttcctggcctccttcctttcctcgtggcagaggcctgcatgtgggtgccagaggccagctctccccctccatcttgggggggcggagcagttgggcccaagctgcccgggagggtgggtgcagacacaggctgaggaccagccctggccctgccccgccatctgctttcaccaagctgtctctccaccgtggcttcccttctccctccaggccaaagtgctgctgattcccactcccttggttttcgcctgcccagcgttgctgtttgcgtggagggtggggggagctcagtggcagggaatcagcggtccgtggggtcgtggggacgggaacatgtgcccgaccgctccatcccctcctcctccttaggatgcataacctaccttgtctttttttttttaaattttctttccaggtagagtagctctttgtacataaagaatacttgaaaaattaattgtatgatgtatgagaagacagagtctcctagttttgtatcttgttgtatgactgccatgagttccaccagaaagccactctattttggtctctgtgacattttaaatgcgtgacagaagtgagcaaataaagtgaggaagaaatctatatatgagataatatagattgtattgaaaaaaaaaaaaaaaaaaaaaaaaaaaaactccga

SEQ ID NO: 703 - DNA, 2101 bp, Homo sapiens; identical to SEQ ID NO: 445

SEQ ID NO: 704 - DNA, 725 bp, Homo sapiens
gtgcattgagtgcattgttcttgcccagttttcaggaagcagaaagaaaatacaggcaagaactgcaggactttgaattatctgcctagatcattctaagaattgaattgattatgcaataattggactccttttcctgtagattaattgaggcatgaggtggactgtctcctctggttactggaagaggacttcctgattgccttactttgaggcagccagggtgggggtcctcccgagagcatggggagggtcccagggggcccacttcagggttgcctttcatgaaaaacttgtcaaacctttgtacagatgtctttttaataacactcactgctttgcagatccaagtttggactctgggctgctccagyagtttgttgsctctgtttatggtagcttaagtgcaaggtttttatgtagccagtaargtctgtcccatggtcttgagtgaaatggggagcaggaaaacagaaagaaaggaaagtgccacgttgtagcaggggagggtcaggagaccaccttamctgggcattgtgggtgcagggtgccagcagagcaggagcttacytggtgggcaggggcactgccacatcttgggagggagtatgtgtgtagtttgaaaaagcttacttaatagtttagatttggaaaatggaaaaaacatccttttgaaatgttaaagatcgttaaagaagtttgtgatattttcataaatcaaaatg

SEQ ID NO: 705 - DNA, 926 bp, Homo sapiens
ggttgtaactcttggtccttctctctctccttttctcttcccttccttccccttccatctttctttccacatgtcctttccttattggctcttttacctcctacttttctcactccctatcagggatattttggggggggatggtaaagggtgggctaaggaacagaccctgggattagggccttaagggctctgagaggagtctaccttgccttcttatgggaagggagaccctaaaaaactttctcctctttgtcctcctttttctcccccactctgaggtttccccaagagaaccagattggcagggagaagcattgtggggcaattgttcctccttgacaatgtagcaataaatagatgctgccaagggcagaaaatggggaggttagctcagagcagagtagtctctagagaaaggaagaatcctcaacggcaccctggggtgctagctcctttttagaatgtcagcagagctgagattaatatctgggcttttcctgaactattctggttattgagcccttcctgttagacctaccgcctcccacctcttctgtgtctgctgtgtatttggtgacacttcataaggactagtcccttctggggtatcagagccttagggtgcccccatccccttccccagtcaactgtggcacctgtaacctcccggaacatgaaggactatgctctgaggctatactctgtgcccatgagagcagagactggaagggcaagaccaggtgctaaggaggggagagggggcatcctgtctctctccagaccatcactgcactttaaccagggtcttaggtacaaaatcctacttttcagagccttccagctctggaacctcaaacatcctcatgctctctcccagctccttttgcataaaaaaaaaagtaaagaaaaaaaaaaaaaaaaaa

SEQ ID NO: 706 - DNA, 1248 bp, Homo sapiens
ggcacgagtgaatagctacaatgttgggaatgtgttcagtatatctttaagaccactgttctgtaggaaaaaaaaatctagtatcatgtcataatatccccattgcctatstccatataccttttccttcttagagctcaaagactgtttcctaacatactgtgccttttgctatttcctgatttactaactggtttttttctccccatgaatttttaaaagctgatgccctgtattcctacaaaacaaattcgttgtgagtacaaaacttttatgtcctcaatggaagcctcggagtacaaaatgaaatttttccttgttttgtgacactttaccttgtacgtatttctgtcattgcatctgtaaaacctactaagtgcatgtatatacatgtatgcccctctcttagcctataacttctcatgagcagggtcagggttttattcattttggtctaccaggcaaccagtcacattcaggacaaatagtgtgatctcagtatgtttagcatgagattataagtaaatacaaatggatgtattttcagagagaattttatgcaatataaaacataaataaggaaactagtctgaccagtaaacattgtcagtactaggtctccaatatctagttctcacacatttccgatcacttcaggatgaactagagtatgcccttacagggatcagtgtcattcaaggatgtgactgtggacttcaccaggaggagtggcagcaactagaccctgctcagaaggcgctttacagggatgtgatgttggaaaactattgccacttcgtatctgtgggtaagaaacactcctgaatctttcactgtcatgcatctccttctaagaattcctgaaacatattggactttgaatttcagggattagaggtgattatttttttggcagaaaatattattttgccaggcacagtggctcacgcctgtattcccagcactttgggaaggccgagggcaggtggatcacttggaggcagggattgcaagaccaagcctggccaacatggtgaaacccagtctctactaaaaagtacaaaaattaggctggggtgtggtgggcacatgcctgtgaatccccagctactctgggaggctggaaggcacgaaaaccacttggaacctggggagaccaggttgcagtgagttggaggattgtcaccactggcactccagcctgagtgaaacagtggagactgtctcaaaaaaaaaaaaaaaaaaaaa

SEQ ID NO: 707 - DNA, 824 bp, Homo sapiens
gcacgagagtgtctacctatttatggtttttatttataaatgtacaactccctctttgcttagcatcaagatgaagaagaagagacagtctttcgagaggtggtcagttttccccggaccccctgccagatattatgacaaggacaccaccaaaccaatcagcttttacttgtcttcgctggaggagctcttggcgtggaagccccgcttggaggatggctttaatgtgccctggagccctggcgtgtcgccagccccctctgagcagccagaggccccggactttgttgtgtcatgacatgatgggcgggtacctggatgacaggtgaggacctggccttacattgatgttgcttacattgttctcctttgctggggtgggggctggaggggcgggagagagtgccatgtgtagaaagagcactgggcggggaatcaggagacgggcattggagggatggcactaactgcgagaagaaggcaggccccagtgtttcatctgtaaaaagggaagactgggctgggcttggtggctcacacctataatcccagcactttgggaggtcaaggcaggtgggtcacctgacctcaggagtttgagaccagcctggccaacatggcgaaactctgcccctactgagaatggaaaagttagccaggcatggtggcaggtgcctgtaatcccagctacttggggggctggtgcgggagagtcgcttgaaccagggaggcggagattgcagtgagccaggattgcactactgcactccagcctgggcaacagagtgagactctgtctcaaaaaaaaaaaaaaaaaaaaaaaa

SEQ ID NO: 708 - DNA, 2206 bp, Homo sapiens
ggcacgagccagatctgagccttgacgcaggccaagtggaaaaatactttcccgcccccctcccctgttcccacttcctcatctggcactatgcatgtctcactcaccctccacagcactcagtcccatcgacgttcactgaacattggctttctctttctgactcctgcctgttttagtccactatatattgctgtatttgcttaaatgctggaaagtaactgttaaaatgtgaaattgtaatttttaaaaaggctacaattaaattttagccaatgccactcaccaaatctttgcacctagtagatatatcaatgtaaaaacaaatacctaactgtacagtgagtgtgggggaaatgtagtaacctagttagtagtcttcaatataaccaattgtacaaggggaagtggtgtttacctacttgttcatcaccattactgaaagccgtactgatcagttagttgacaacgggcatttttttttctttgcttcatggaatgatttcttttcttaaccttcgacttatcctgaggtcaagccttttgtctttatgtgtaaccgacgttcagtctattctaggaatgaaccagcaagttgttcatttaaaactgaccaaagacaattaattcctggyctagtttcctgggccttgtggctcagctgccactaawgagctttttggataaaattgagaacaagctgtgcttcctaccccactctccccgtccccttttattcccttttcctcttaaagagctgctctgagctgtgggattctatgaaaaattcttgcctttccttgtttcagtgctaacgatttctcacctcgaagcgccttttgaaccccggacagagtgcacaatcggagggaattgcgagcttgggaattagactttggagtcttttctctgaagtcaccaggccaggggtcaggagagagatggattcccaagggatgaaaggtttctattcaatgaagaaatcggagtgggaagagacacagggaaattgagccatattttggctatcggctggaaccagcagttcagagatctgccttataaacatttaaaaccggtttgtggtacacaaagaggaaccagtgtgggaaggggcctttatgtggggctttcttctctgktggagtcccttggagtgccttgctgggtatatttctctgtcattcaggaggcacgaatgtggaggacttctcgtgacctggtcgtgatgtggcattcagtgcatgtccacagctaatggaaaaacacgaggactcgggtaatggttcttcctctcagtctttctattcctaacttttcacacatccagatggttccacactagtgcaaatgcctcactctcctgagaaacccagaaagaagagtggctggctcacaaccatggggttagcccctgctgggctgggagtcggggtggcggccaggaggaaaggcagaaaggggtgagccgaggtgttgcctagctgattttctgctgtgcagagctaatgctgacatttcatgtcaacttccccggttctctggggtctcctctcctctgagcagccacatagaacattccccacatatccaaagctgcccaggggagccgagagaagggactttgctgtcaggtccaagccctcctgacctccctgagattgatctgccagtgtcctgctgtccctctgggactggccacatggccatcgctgccccttgttgacacctcctttctgtgtgagttgtccccggccaataacaaagctgttccttgaaccagaacaaccagagtgcacttttccttccttagacggaagtagatcctggctagggtttctgcccaggcccttgttcccggcagtgtgactgtttacatggtttggcaataggtttgattctgattgcttcagagtggctggtctattttgtttcctttggtttccttcctccccaaattgtgacaggaaaaacagaccaaaaccaccctaggaaattgctggttgcctgtccccacgtgatgataaatgttgccctcttctggatatcgtttctctaccttacgaccaaacgcccgtcctatagagtgtctgattggatcctctgtcgcgtattctgatggtgcctgctggtttgacgtggagctatcctgtgaaataaaacagcttaacttttctcaaaaaaaaaaaaaaaaaaaaactcgtag

SEQ ID NO: 709 - DNA, 1421 bp, Homo sapiens
gaattcggcacgagttcaagtataaattgtttttgacattaagaccaactcctgttcattacaagcacctgaccaactgtcttaatagaaggtactctagactcagtagcttataaacaacagaaatttatttctcacggttctggtggctaagaagtctgagatcaaggccccaataaattaggcctctgatgagggcctgtttcgtgattcgtagatggtaccatcttgctatgttctcacataatggaaagggaaaggcagctctctggggcctctttttattagtgcacgaatcccattaatgaggaccccacccttatggacctaatcactccccagccacgcctcccaatasgwtcacattggtaattaggtttcaacatatgaattttgtggagagacaagcattcggaccataacaacaacattcttaaaactaccattgtaggccaggggcagtggctcacaactgtaatcccagcactttgggagcctgaggtgagagaattgcttgagcccagsakttcaaracctgcctgggcaacatagtgagacctcatctctacaaaaaatttaaaaattggctggggtggtakagcaagatgttgtctcaaaaaaaaataaacaccattgcaggctagtcagccactattasattgtggaatctactgtgtattttatgtaccagaaatccagggtcttaaacttttttgctgagctctgaagataccaccaccatgcatcatattttcaagtagcctctaggaaatgccttgtagaacccaaattgaaaactaacgtataactctttatgttgtgaaggtggtcctaatgaaatctaaccatccccaaaagtgtcttccatacctgactcatacctttagcaagtgacatcacattaaatttgtcaaaatcagtctttaataccttatttagaattatgcagctatagaaggaacatggaggaaattatagagctgtgctgcccaatatggctagccactarctcacatgtggctgtttaaatttaattgacttaattgaaaatataggtcctcacttaaactagccacatttaaagttcacaatagccacatctaartagtgactaccgtattgacaacgcagatgtagaactatgtagaacatttgacaatactgtctagaaagtactgatacaaaaagcactttagttgatarttgcttatatatttatataaaaatgcctatatgatgacttctcaagagaaaagattgtttataactggaacctataattttatttcattgtgccagaaaagtagcttttaaatttataaattctacttttttcccttaaactcctacctatctccccttttatactaataatcttataaaaaaaaaaaaaaaaaaaaaaaaaaaaaaaaaaaaatccg

SEQ ID NO: 710 - DNA, 630 bp, Homo sapiens
ggcacgaggcctttcattgcctgcctgtgctggccatgcttctgctaccaggctgggcctgctcatggggcccagtttctttttcctcttcagtgtggccttctctatcttcagggttcaccttgctcttcctcctaatctgataaagaatgtttcagacctgtgatttccccagattggactcctgtgttctttcattcgacattgatggttctcagtgaggctgcaatacagtctttctctcaactatcctacagattctcttttgcaacagctactaccttctactcattccttcctcctccacagtcctctcttctctcatgagtcttctgagactatcaggcggctggttctccaccacagggctatctctctacatctctgacttctttgcatgactgctgcacgctgggctctctgggccacttctcccacccgaactaagccctgcccccctgtctctgctgctttgattccttacatgcttgatttctgttttgagacttatctgacatttattgtttgtaatgatccttgtggaacccaaatcctttgatatgactacctgggcattggcccaaatcttctctgaaatttctatttgggttaaaaaaaaaaaaaaaaaaa

SEQ ID NO: 711 - DNA, 1408 bp, Homo sapiens
  misc_feature (1401)..(1403): n equals a,t,g, or c
  misc_feature (1405)..(1405): n equals a,t,g, or c
  misc_feature (1407)..(1407): n equals a,t,g, or c
ggcacgagtaatacagttaggtgccactgccttgattggtgccaaggcaccaggaattttacccaccattgcttttgcaccatcactgcatctctttaacacagtgaaagaggcaagtagcatgtcagtgtcattgaatatgaatgaaaaagttactagattccataatgctttcctttttccaaatcattggtattcgtgattcccttaattatgatcctttgtgttgtagatatttcaatgctaamaacyggttctagtcttctcaaagaggaggaggaagatggtcaagaaggcagcattcacaatctaccacttgtaacatcccaaaggccattttatgatggacccatgccaactccccggcaaaagccatttcagtcaggttctacaccgttgcatctcactcacagattcatggtgtggaactctattggaattattcgctgctataatgatgagcaagacaatgccatagatgtggagttccatgatacctccatacaccatgcaacacacttatcaaacactttgaattatacaatagcagatctttcccacgaagctattttgttggcatgtgaaagcactgatgaactagcaaggtaaactcaagattattaggaagaatttggcactgttgaactgttagatacagttgttgaaattaaagacaaaaagttaataaaacaaaatttattttttgtaatatgaaatttcagaagagtttggtacaaacaccagcacacccaaaatacctcagaacatatgtctgtttttgccataatgattccctcattacatgctctaactacatagcaaaatgacatggcatagttagtaatgcaagagatgggattttttttttacattgktaagtgctttttttttttttactattataagagtaatatacattcattgtaaagaaaaaaaaccagtatacagtatagaagtttcggaaaatgaaaactcctcccagaattctactctcagatataactgctatttacaatttgrtatgtatccttccagatttctttctatttgaacctcccttattttaatttactttattgagatgtaatttatttacaataaaatgcacccatttgatgagttgacaaaggtgtatatacacagataacccctaccacaatcaaaatacagaatgttctttatcacccgaaaatgttttcttatatccctttgcagttagttcaaccctagccttggccaactattagtctagatttttgtcactacgtctttatcacccaagaatgttttcttatatccctttgcagttaattcaacctgagccttggccaactgttaatctacatttttgtcatgatggattaaatttaaaatctctcttcgagaaaggaaaaaaaaaannnanana

SEQ ID NO: 712 - DNA, 785 bp, Homo sapiens
agagcggcacgagcggcacgagtcctggcctgcgcggcttccggatccttggtctgcgctccagcgtgggcccggctgtgcaggcacgaggtgtccatcagagcgtggccaccgatggcccaagcagcacccagcctgccctgccaaaggccagagccgtggctcccaaacccagcagccggggcgagtatgtggtggccaagctggatgacctcgtcaactgggcccgccggagttctctgtggcccatgaccttcggcctggcctgctgcgccgtggagatgatgcacatggcagcaccccgctacgacatggaccgctttggcgtggtcttccgcgccagcccgcgccagtccgacgtcatgatcgtggccggcacactcaccaacaagatggccccagcgcttcgcaaggtctacgaccagatgccggagccgcgctacgtggtctccatggggagctgcgccaacggaggaggctactaccactattcctactcggtggtgaggggctgcgaccgcatcgtgcccgtggacatctacatcccaggctgcccactacggccgaggccctgctctacggcatcctgcagctgcagaggaagatcaagcgggagcggaggctgcagatctggtaccgcaggtagcgccgccgccgccgccgccggagcctgtcgccgtcctgtccccagcctgcttgtgtcccgtgaggttgtcaataaacctgccctcgggaaaaaaaaaaaaaaaaaaaaaaaaaaaaaaaaaaaaaaaaaaaaaaaaaaa

SEQ ID NO: 713 - DNA, 1767 bp, Homo sapiens
  misc_feature (183)..(183): n equals a,t,g, or c
ggcagaggagccgccgggtcacccaatgccccagcctggcttcatcccaccacacatgagtgcagatggcacctacatgcctccgggtttctaccctcctccaggcccccacccacccatgggcttactaccccccagggccctacacgccagggcccctaccctggcccctgggggcaccancagccacagtcctggtcccttcaggagctgccaccacggtgacagtgctgcagggagagatctttgagggagcgcctgtgcagacggtgtgtccccactgccagcaggccatcaccaccaagatctcctacgagattggcttgatgaatttcgtgctgggtttcttctgttgcttcatgggatgtgatctgggctgctgcctgatcccctgcctcatcaatgacttcaaggatgtgacgcacacatgccccagctgcaaagctacatctacacgtacaagcgcctgtgctaacggagctgggactcgggactcccccgcctgtcagtctggccccctgtgctttgctccctgygctcagtggtcactttcccgctcccacttggggctgggagccgtgccaccatcccctagaagtcctgtcctcttcaccctgccctacctgagccgctgactcttctggcaaaaattctgttgggatttaaggccaagggtcagtgggtggcagggggctgrcaatgagcttgtgtgttgttggtctgcttggtgtgtgtgatcgggaagataagctgggaggggtctcctgctggggtcctgatgcctctgtttccaaacaaggtacaggttcagtccagactctttccccctgggaccaacagcagccagagcagttagccagttagtccccaggcctgtggcacaggcgtttctgacctgctgggccgagaatgggtaagttgtctggagtcaggtgggcccacgtaggacagggtcacaaagcctgggtttgtttctgggtactttgcgcctctggggtgctagaggtggggcatggtggctggaagtaaaactgccaactctggccctcagaactctcaggtatagaagcccaggatgtctaataccctgtcccagtgcccgagagctgcctggtgtcaggtagagaggacactgtacctgggtgaatgatcagaccctggtagctaagaaggaacttgtccctttgagtcagtgtgcagaccccctttcaggccatgcctctgtgaaccctgtattgctggggccggaaggagcccctgagcctagccccttcccgtctgccctgtgtcctcactgcgtgtgggtatgacctctgcctggtggctggtgtatcccaactgggcaagagatggcagagggtcccccttgtgggtgcgcttggatgtgcagagccttctccatggattttcttccctgtaagtgccgggcccctcaccccagctgacaggctgttgctgtgcctgctcacacctgctcctgcaggcacactgggctagggacgaggaaggagcagccacaagtggtagaactgccttggtggacaccagcctcgccctgtctttatttcctgaatggtttgtgaacttgctcacctggaccactgtatcctgccactgtccttcctggtctcgcactgccactgcatggcctcctgtcactgtgaatcgtggcccagtctcagtttgtagtttctcattaaattggccctttcactcccccgcaaaaaaaaaaaaaaaaaaactcgagggggggcccggtacccaatc

SEQ ID NO: 714 - DNA, 781 bp, Homo sapiens
ggcagagtgctaatcaccctatggaaagaataataaagcatggaatgaacaagcaaatagcaagagctcttcaaagaaagttgtcattaacactttacagagaatagaggtaggctcccccaggaaaagtttgcataaatagccctgggagcagctgagaaagaggaaatgaaatgacattcaattaactcctaatttgctgttgcagtttctcctgaactgagttcactccagaatttaccaagggatcaggctgcttaagaactaattacaatgaattctccatgagcctgctgacagtctgtcctttctatgtaagtcctggggttgttgccagccaaaaaaccttaggcaaagttgtcttcttttagtaaaggttttccagcctccctttaatttttaccaagaaaagcacagcatatcaaggcgttagacagctttattatttctcttaatgtcaagttatcaaaccccttagaagcctggagagagaggcaggtcatggtggctcacacctgcaatcccagcattttgggaggcctaaatgggcagatgactcaaggccaggagttcaagaccagcctggccaacatgttgaaaccctgtctctactaaacatacaaaaattagctgggcctggtggcgcatgcccataatcccagctactcaggaggctgaggcaggagaatcacttgaacctgagaggtggaggttgagtgagccgagttcatgcagcctgggtgacagaataaggctccatctcaaaaaaaaaaaaaaaaaa

SEQ ID NO: 715 - DNA, 2115 bp, Homo sapiens
  misc_feature (1310)..(1310): n equals a,t,g, or c
  misc_feature (1351)..(1351): n equals a,t,g, or c
  misc_feature (1861)..(1861): n equals a,t,g, or c
  misc_feature (2091)..(2091): n equals a,t,g, or c
ggcagagtgcgcccggcccaattacttctctgtaatttttttcccctgaggattggtggggaaaaaaaatgcttggcacataacactccatgttaagtttcaggattatttcttctttttacattattttagttttttgttcatatgtactcagggctcacactttgcttggctccgtaagtcctagagaaaaatggtatgagaaatgaattcacatgaagcattagtgccttagtctcttactgtttttacctttcccgtgaatatttgtgctacaaaatggtgtccagaaaggcagtgcctcagcgagataaatatgtttctaatcttagcatcttgggcagagtgaggctggcatctgaggtcagggaggccacagggccacgctactgaccgcattggtaacagactccattargttgacagaaaggttaaggttcctggaatctgtctctaaatyctccgtaccccctcattaggttagaagccaatgccaatacaagtaaccaataccaaaccctctcttgcttacagaggcattattaagttgggggctccctaagaacaattcattgcaaataattgttggcacatttattctcatggcacaactttcaaaagcaaattaattataaactggttgcaatttaattcagtttgyctggattatgtgtttgcaaggcctagagtacatttggcaccgttgctggcacatttggattttaatgtctttgacaagccacagcttccttggcctgggtaaacggcctactgccatacggtcatttaactagattgcgtcagagtgactctttagcttcgcggtgggtcttcagtttacaacctccacgccaccccatcagccgcacgggcatagatctcaacatgtatcaggaaactggaagaaagctgtgaacagaatactctgagaaaatgatggttaatcgtgtagaaaagtttaactatttgcatcagcacaatattacacaggcacatacgactttcagttccctaaacctgagaaaaggtttaacaacattgtgtgaaatctgacatcttgctattcatataaatgtgaaaggcagattgggaaaaatacagtaaaatccccgcttttgtgcagagaatggtgcatatttttcccctaattatggaaggtagccttttatttcttctgaattcattcatttctgagcctgtgttttcagcttgcttatgaaactcaattataaaaccagggktaaaaattaagtcaagtcacaggctatactcctctttgattctggggctcctgagaacttccagccctntgccactggcttgaaaaatctctacccttacaaatctctcnragctttcatrmacctytctacacagsagattaattaaggaaaaagatggaaaactcctggcaccattttatctttccaaactgtgatttgcctcttccccctaaatcttcccttccctctmttctgctcctttctcaaaaagaaagtgtatgattgtcaactttctgagttcaagacagtggaggattaaactggccttactgagatttgaacttgtgactcaagtcattggattttgtgaaagaggcccaaactctccggactggacaggttacagctccggtttctgtccctctgctgccttttcctgggtagcatgatgatctctggcatttatctatctatgaggcttgcaaaatcgcggcctgtcataatggtaamtaaaatgtgttaaagttaatatgaagaagaaaggagcaattacaactgcttaaaacagtcttcaaatatacttaagcagaggtttgccacgtaaacacacaattaaagcaggaatttgtgatggatgncaagggtttgacggtcccagacatactgtttactggtgtagttagcagatggataagtcaactgatcccagatgtgcagcttataaatataaactcatgtcttactagtgatgtatgtctgcaagtagcaacaaattactttctatttaactcttgactgtttactagggggagctttgtaatgctcacttgcttaaaaaaaaaaaaaaaaaactcgtagggggggcccntacccaatagccttatgatgaaac

SEQ ID NO: 716 - DNA, 1148 bp, Homo sapiens
gccattcacctattgatgaatattggagttgcttccagttttaggctactgtgaaaaagctgctctgaacattcatgtgcaagtgtttttgtggatatgttttattctcttgggtaaatatctaggaatagaattttgggtcatatggtaagtatgtgtttataagaaactgatgttattttttaaattggctatataatttttcagttggctttatatttctactaggagtgttccagaggctcctcatcccttgccaacgcttggtattttcagtcttttagccattctactggagcagtagtattttattgtggttttaattagcacttccctgataactaataatattgacccatttcccatgtttctttttattatatgctttattttgtgaaatgtgtctatgagttttttatatattctaggtacaggtactttacaaatatttcccatttcttaataatgataccttggaagatcagatggttttaatttttaggaagtctgatgtatacatttttctaggtcactaattttgtgccctatgaaaactttatgtaccccatagtcaagtacattttttcctatgattttttaaattttataattttagccaaatagttatagtttttatgtttaggtctgtgattcattttgagttaaattttatggtttaaggtagaggtttgaggttcatgtttttttcctccattttagttgttctgtagcagcatttattgcaaagatattctttctcaatggaattatactggcaatattgaaaatctgttatctggactctattctgttccattgatctatatgcattttctttgtatcattaccaccttgtcttgactactttagctttgtagtaattctcaaaatcaggtagtgagtccttcagctttgttctttttcaaaattgttttggcttatatctttcttatataaattttagaatcagatcatcagtttctgcaaactgagattgtgttgaatctgtagatcaattttgtgtcttaacatcccccagcaaagttagaaagccaggcagtaatatcagagggcacaagcccagattgaagctggaagacatagtgctccagaaaggtccttccaaaaaaaaaaaaaaaaaactcgta

SEQ ID NO: 717 - DNA, 1131 bp, Homo sapiens
ggcacgaggccttgtgtcagtagtcagtggtgttcctttagtccttgttatgttaataaaaaagctttggtttttgcaagactttgtttttagagattctggaaaggaacatattaaccaaaaagaagagctgacttcaattttacttgtcttgaaaataactgactactaaagggatgtcagggaacattagtgaaaatggagaacttaaggagttaaagttttagctgtttttttcaaaggatattgtccttcaaaatctttaccttggcatttttgttactgtgatttaagatggttgtaattatcattgattgatgatacctatcaaaaggcaaccctaaccaaccatttctggctggattctgaatgccgagaaagaaaaactgagaaatttgtgaactattacaagtcgtctgtaaaatgagataataatatcaacttcacaaggtaatttaggctttcgtgaaaactagagtgtgaaaatgcttagtaatgtgctgggcacactgcaggtgctctacaaataactactgataactactttttttcatgagtaattgtacattttctttcttccttcctttcttccttccttccttccttccttccttccttccttcctttcttttcttttcttttcttttctttcttttctttctttctttttttgttttcttttgttttgagacaagatcttgctctgttgcccaagctggagtgaagtggtgtgatcttggatcactgcaacctctgcctcttgggctcaagtgatcctccctccttatcctcctgagtagctgggacaacaggcgcacatcgtcacacccagctaatttttgtatttttgtagagatggggcttcacttggtgttgaattcctgggctcaagcgatccacccacttcgacctcccagcgtgctgtgattacaagagtaattgtaaatttaaaatgaatttctttcccatcccaaaccagtatcaaaatgcaaatatagtaaattactttttaaaagagagatgtttaatggcagttgttggtagtcttttgagtctttaagtgggtatattatagaaaaacaacatatctctgcttggagggaagatttaactaaaaaaaaaaaaaaaaaa

SEQ ID NO: 718 - DNA, 1117 bp, Homo sapiens
attgagcttggtttccgccggcacccagcccgaatcaatgtgcaactgcgccacacggcggtagtcgcgcttgaagaaggcaaacaggttgcgcgccaggtaatcctggtcttcaggggtgaggctgccgacgatgccgcagtcgatggcgatgtactgcgggctccacgggttgacggtgctgacgaagatgttgcccgggtgcatgtcggcgtggaagaaactgtcgcggaacacttgggtgaagaaaatctccacgccgcgctcggccagcatcttcatgtcggtgcgctggtcggccagggtcgcaaggtcggtgacctgcacgccgtaaatgcgctccatcaccagcacttttggccggcaccagtcccaatacacttgcggcacgtacagcaattgcgaaccttcgaagttgcgtcgcaattggctggcgttggccgcctcgcgcagcaggtcgagttcgtcgtagatggttttttcgtagtcggcgaccacgtccaccgggtgcagcaggcgcgcatcggccgagaagcgttcggccgcgcgggcgaggacaaacagccacgccaggtcctggccgatgatcggcttgaggcctgggcgaatgactttcaccaccacttcttcgccggtcttgagttgcgcggcgtgcacttgcgccaccgacgccgaggccaggggctcgacgtcgaagcggctgaacacctcgctgatcttctggcccagctgttcttcgatcagcgccatcgactgctgcgagtcgaatggcggcacgcggtcttgcagcagcatcagctcgtcggcgatgtcttcgggcaacaggtcgcggcgggtggagaggatctgcccgaacttgatgaagatcggccccaagtcctgcaacgccaggcgcagctggcgccacggctcaacggcgacggcttgcgcggcaaccagcgccacggcagcacataacgcaccgccagcaaaaaccacggcaagggcagggcaaacagcaggtcatcgagacggtagcggattacgacgcgctggatacgaaacaaacggcggacggcgagcagcttcatgcgttatcgcttggatcaagggaacggctcaagcgctcgaagcgggc

SEQ ID NO: 719 - DNA, 963 bp, Homo sapiens
ggcacgagagaatttcacaatatgcttacagtaaatatttcctagcttgttgaaatgttcaattctttgttggctttcttcttgattctgtgggggtgtataacaagcctgaaggacattgtaatcatttcttacaaggtgaaaattaagaaagattgtgtatgagagcctatatagttgttttatccattatcatctttgattaagactttaaaaaaatgctatttccagttaatgcatttggccctattgaattttcagggaccagaaaacattaaaaagttctgcatcttataatggtaaccaattaagcttgagattgttctgaaagtatcaattgctttaaaactgttgtaagtacagttggcaagatctccaagctgaaacttacacgttaaaacttttgcctgtaagaatttgcacatgaatgttaatggaaaacacaaaacttaagatggcccaaaacaaaagccacaaacagttcatcatttggtgcttagtctttgtaagggctctctgtggtttgacttactccagctaccgttaaatgagggcaaatcaccttaaaacatgttcatttgattcataacaaggaaaattgggtctatgattttttgccaatcttagcctaaaagaaattgctttagcttctggtcagcactgattaaaatgtgaatagtgaagtggctatcctaaactggtttatctccacccacactatcatagatttcttaggtaaatacaattcttatctagtggtattctacttgtattcagaatactgtattaaaattttactatttcatttttgtattctgtgcttattttttttgtcacgcatgtatgcttagtataaatgtgtcacttctaaagttttgtctctgacttttagaaataaatttcagaaaaattgtttcaaaaaaaaaaaaaaaaaaaaaaaaaaaaaaaaaaaaaaaaaaaaaa

SEQ ID NO: 720 - DNA, 2884 bp, Homo sapiens
  misc_feature (8)..(8): n equals a,t,g, or c
  misc_feature (18)..(19): n equals a,t,g, or c
  misc_feature (26)..(26): n equals a,t,g, or c
  misc_feature (52)..(52): n equals a,t,g, or c
cgaaaatnacccctcccnnaaggggnccccaaaacctggaaccccccccccnggtggcggcccctccaaagacctaaggggatcccccgggcctccagggaaatcggccccggagtacagagaaaaaaccaacaccttcctgtgcagtcctgttggaatttggacttgccatgaggtgttgaagccttgtttcactgagttggagagactggacctaaatggcgcacatgactttgctccagcctggcttaatttccctactccaccatcatcaacaaagtcgtcattgaattttgagaagcattctgaaaactttgcatggacagagaatcgttatgatgtgaaccgtcgacgacacaactcttcagatggctttgattctgctattggrcgtcctaatggaggtaactttggaaggaaagaaaaaaatggatggcgtacacatggaagaaatggtacagaaaacataaatcatcgaggtggataccatggtggaagttcccgttctcgtagcagtattttccatgcaggaaaaagccaaggactacatgaaaacaacatacctgacaatgaaaccgggaggaaagaagacaagagagaacgcaaacagtttgaagctgaggattttccgtctttaaatcctgagtatgagagagaaccaaatcacaataagtctttagctgcaggtgtgtgggaatatcctccgaatcctaaatctagagctccaaggatgctggtcattaagaaaggtaatacaaaagacttacagctatctggattcccagtagtaggaaatcttccgtcacagccagttaagaatggaactggtccaagtgtttataaaggtttagtccctaaacctgctgctccacctacaaaacctacacaatggaaaagccaaacaaaagaaaataaagttggaacttctttccctcatgagtccacatttggcgttggcaactttaatgcttttaaatcaactgccaagaactttagtccatctacaaattcagtgaaagagtgtaatcgctcaaattcctcttctcctgttgacaaacttaatcagcagcctcgtctaaccaaactgacacgaatgcgcactgataagaagagtgaatttttgaaagcattgaaaagagacagagtagaagaggaacatgaagatgaaagccgtgctggctcagagaaggatgacgactcatttaatttacataacagcaatagtactcaccaagaaagggatataaaccgaaacttcgatgaaaatgaaattcctcaagagaatggcaatgcctcagtgatttcccagcagatcattcggtcttcaaccttcccacaaactgatgttctttcaagttcacttgaggcagaacacagattgttaaaggaaatgggctggcaggaagacagtgaaaatgatgaaacatgtgctcccttaactgaggatgaaatgagagaattccaagttattagtgaacagttacagaagaatggtctgagaaaaaatggtattttgaaaaatggcttgatctgtgacttcaagtttggaccgtggaagaacagcactttcaaacccacaactgagaatgatgacacagagacaagtagcagtgatacatcagatgacgacgatgtgtgaaggatttcctaacagctttagaaatcttagtgtgatacatctctcatacagtttggggtgaattgtaaaaatgaagaactataatttatgtagtgaaataccccattagaagaggattttttgggggacttcaatatgaagaaaaccaagaatgttttgttgggctgtgttgaacattatttctttgtaaatgaatgttgtaggaatgaggacttgggttggtccaacattgactttcttcatcactgcaacatttctctgactagcaatgtgacgatgtaacaaatgagattttctcatttaataataaaaaattgtgtaatgttttgcaaagcttctgtcttaaaatgtccaggtcttaagaaaaaaggcagcttacactgttttgcttgcagagtcatatctttttcgtacaatggaaatcctcaagtccactttgtgcggtctccctctccttcccccaaaaaacaacaacaacaaaacaaaaaccaaaaaggaaaatgtagcatgttggctaaaactggagcaaagtgcactaaaacaatttcctgaactcacctgttgtactattcaccttttaaaccataaattgctctttagccatttgtagtgcagtaaatgttacaggaaaagacttggcacattttcttccaaatttyaagaggtgattttcaaaagctttattggggtatgttgtcagaccagggttttcagagttgatggaaaagagtcttgtgagaaaacttattttgataaattattacacacgcagaaaaactgatcacactgactggatctgtccacgacatggaaaataaactggattttcagaatatkgttgttttctgtagtgttcaaggtattgtttctaaacataaacatactctaaacatgctttattcacttgttaaagtcatacttttaaaagtaatmccttactaaagatggtgattacttttccgaggtcagaaaaggaaagctaagcgttttcattatcaaatacacaagcttattaaatgaatgactgttaactactttattttcatttgcacattaattttggaattgtttctgttttgctgctgacggaaatactattttggctctgtgtatatttgtattttgatttttctggtttgtttacccccatttgcttttagctcccccttatgtttaaatatattctaacttatgtaaagagcataatcttagagcaaaaataaaaaaaaaaaaaaaaaactcgag

SEQ ID NO: 721 - DNA, 1014 bp, Homo sapiens
ggccgagataattctggaagtgatggattcccaccatatgcctataaaatgttagaatatatttttctagggagaaggttcacacttgtcatcaatttctcaaagtatcggtaatgggctggggcagaaagcccaggggttaagatcagctgttccataaatttcaaactgagtcattttggttttatctcagtttggcagttactaaatagacttagtcaaaggaggataattgaaaaaggacaggcagtccaggaagagactaaggattcttgaatacagaagggaccttttgaacactttacatgcctacgcacctgaaatgttagtattaacttttgtttcagtataccatttgaatgtgtttatgtatctaatggtattttgtgggtgcttttcatgatcagcaatggcatttgtactgaattacatttttttctgttaataggacttaattaaaagtactgcctacagtgtagtttaaattttgtaaacgagagaaaaaattctgcataaaggttcatgaatgtgtgggcaggattaaatataccaaccaatcctgttaaaaatggctgggttttagttttatattttgcattctactgtgtcatggtatgtactggtagtaatggtagaaacgtagaatctatacacacacacacacacacacagacacacacacacagacatgtgtccatgttttaaagcacttagtaatggcaagagtcctttttatgtatgtaaagatgtgatttctgattacatttattactcaattttcttgaaaagttaaggatgcttaattgttaacagcagttagttaaaagcagaagatagcattttaagggagctgacatgggaggatcacctgagcccaggaattcaaggctgcagtgagccgaaatcatgttattgcacactacactccagcctgggcaagagagaaaagactctgtaaaaaaaaaaaaaaaaaaaaaaaaaaaaaaaaaaaaaaaaaaaaaaaaaaaaaaaaaa

SEQ ID NO: 722 - DNA, 743 bp, Homo sapiens
ggcacgagcagggctgtcctctctccacagccaacagccaggccttacagtggggcaggcttagtgactgtgcctcagttatgctgtacctgggagtgggcaggccctctcccatgtcaccatcaaaacccactgatgaaggctggtgggagtctgagggctgcacccgggtatggtgagttcccctcagggattgtgctgagcgccttggcctggcttcttggctccgcccacctgctctccctgccaccaagttgtcttccccgggtggcatgtgccacttggctgcctcgtgcctgggcacagtggtgcctattatgggccctccaggtggctctggtgctcagcctgctgtgagcaggaacagctgagtcccaggggttcttgcacacagcagggctcgggtttgaatccaggctctgctgcttggtcgctgcatgagcttctgctgtgctgacctctctggtttgtctcgtcatgtgtaaggtgacaccagatacctacctcttagggctgccccgagactaaaataagaccatgtgcatgaaccacttaccaaagtgcctgttgctctccaggtgtgcctaccgcatgttgccgctgctgtttctgctgggacgtctgactccagttccttctcccctctccagtgacaaggtcatttacaacttacatttacaatttatagtgtttaccagtattaaattctcagccactcctaaaaaaaaaaaaaaaaaaaaaaa

SEQ ID NO: 723 - DNA, 1118 bp, Homo sapiens
ggcacgagaaaaaacccaggagagaacacttgttaccgtgatacacagtttactgggaagtagtgcagaaattgattagtgtgacatggcgttttaagtggatcctcacaacacttgagcccaccacagcagcagcagatgtctgtggtagtaggacattattatcacagtagtacagtgtagtctatggtaaattttatgcagttgtgatacaaattaaaaagaaaaaaataatgaatttaaaaatatgcagttgtgagttaatattgcatctttacatttctgtcaactgcagatgtcaccatctatggtcagtaagtgattgtgtgcataaattttgataaagtttaactttgtataatagatttgtgttgattttatggtagtaaatggataaaataggctagtatctacatatattttatgccattcaggacatatccttttcctaagtttttttccaatttttgtaggctgtgggagttcatctgtgagttttycagattgttataaatcgccaaaaaattgcccaatatatttattgaaaaaaactctcttgtaagtggacccatgcagttcaaacctgtgttgttcacgaatcaactgtattgccaaatttcctacagaaattgtgcattaatattcttaccagtggtatatggccaatcatatccctttctctgctgcctagtcacccctaggtattgttacattattccataaatatttattgaacacttattatatccaggcactcttagaggtgctgggaatacatctatgaaaaccaagtccctgccgtcatggagatttcattttactgaggggacacagatagtaaacagcactttggaaggccgaggtgggtggatcacgaggtcaggatttcaagaccatcctggctaacacggtgaaaccccgtctctactaaaaatacaaaaaaattagccaggcgtggtggcagacgcctgtagtcccagctactcgggaggctgaggcaggagaatggcctgaacccgggaggtggagcttgcagtgagccgagatcgcgccattgcactccagtttgggcgacagagcaagactctgcctcaaaaaaaaaaaaaaaaaaaaaaaaa

SEQ ID NO: 724 - DNA, 1485 bp, Homo sapiens
ggcacgagcttaaattgctgtactagtaggacaagcaaggctgcgcacaacaaagttaatgggatataatccaaataaaattatagttccattagacaaacaacaaattcagcaggcttatattaattcccaggaatggcaaattaatatggcaggttttactggtgttcttgataatcattatcctaaatccaaaatattccaatttcttaaattgacatcatggatattgctttccattactcaaaaaacccctattgaaagggccattactgtttttactgatggatctagtaatggaaaggcctcatttgtgggacctcaacaagtttttcaaactgactttgcttctgctcaaagggctgaacttatggctgtgataacagtgttaaaaacttttaaatagccagtaaacattgtttctggttcagcctatgtagtgcaagccacacaaaatattgaacatgccttaattcaaaatgtgactaaagaccaacttaatgttttatttcattctctacagcaagcagtacaacaaaggcattcccctttctatgcactcatatgagagcacatactaacttccctggccctttaactaaatttaatcaaagggcggataattatatggggaagaggattttcttgtgtctctccaggtaacaatcaggcacctgtgtgggtgcccaccaaacatctggagatctatcatgagccacaccaggaagagagggctctgggaagagccagagctcctgatatgagtgatggtacaaatgaacatctcagagacaaaggagaagaccaatggagtctgtagatgcggaagccacctctggagagaaagccaccactgagagcaagcaatgatagctgtggcggttttgcaaaaaagaaaagggagacaagcgcccagctatagttaccaataaagcatggtactggtattaaaataggcatgtgttctgttccaatggaacagaatagagaacccagaaacaaagccaaatatttacagccaactgatctctgacaaagcaaacaaaaacataaagtggggaaaggacaccctattccacaaatagtgcagggataattggcaagccacatgtagaaaaatgaagctggatcctcgtctctcactttatacaaaaatcaactcaaaatgggtcaaagtcttaactctaagacctgaaaccataacaattctagaaaataacattggaaaaactcttctagacattggtttaggcaaaaagttcatgaccaagaacccaaaagcaaatgcaataaaaaggaagataaatagatgggacctaattaagctgaaaagcttctgcatagcaaaagaaataatcagcagagcaaacagacaacccacagggtgggagaaaatatttgcaagctatgtatctgacaatggactaatatccagaatctacaaggaattcaaacaattagcaagaaaaaaaaaaaaaaaaaaaa

SEQ ID NO: 725 - DNA, 1249 bp, Homo sapiens
tgctggtaaggcgctctcccccacaacccaccaacattttaacaaatatctctgaatgacaggattacacatgactttactcatttccttcatatatgtcagtactttttagttttttcagtgactatatctttcatactcagacatttttaataaaaatgagaagtaggatgctgagttatctacataggatgaaggtagtagtcaaatgtgaaaacagtttgtgcaagagtctcctcccttgactaacatcagctggggacagtgtggggacagtgtcttcttcagtgatgtcctcaggcctgggagaaccacttcacagagtggactttgatacgtgtttgtggcattaataattagggaaagatatatgatgaaaagaaaaaagcaattttggaggagacagctgtttggttttcaaatgattgctattgaagattcgctctacttgaataaagtgaaaaggatagtggtgtagaactaaaaggcttgactggacacaggcaggatttaataaaactctcatttttaaccccagtaatcttttaccagaaagaatattacaggggtcgggaagtggctgtctccatgaaaaacaaatctggcagatgttttttaaccaagaaagtcagtcctctgtgggaatcctaaatactggtcttcggtcacttgctagaaatacacataaaagcaagtgtgggatgtggggcagctccattttctctgtgtttaacaagcctgtttctttcaaggagaaatattaatggatttctctggtgcccaaacctacttgtggaaggaggagcctgaccttactgtctccccgttctacataatctgggtgttcagccaactggcacagatgggccagacgccaggctcagcaacgtgccctgtacgcagctttctacctccctgaaagcaatcacctataaatgtctggtgcgaagactacaaaagttgaactagttagtaaaatgctaagctgcttccaacaagacattcatctcagctattgctttgatgggtgaatttaaaactctgctaaaggaatctttccaggaattccatctctaaagcagcacactccgggaccttagtggtggagaatccacacccatatttttcccccaaaaatcacttgtctagttgccatgtctcctcaggactatattgtatcactctgatgtttctagaatattttgtgctgagtgacttgcttagaaaaaaaaaaaaaaaaaaactcgag

SEQ ID NO: 726 - DNA, 2082 bp, Homo sapiens
ggcacgagattcccagggtcctgtttgagaatgtggaggcttttgccatgggttttattgggctgatggttgccatgattttcattatgttgtttggttcctgggatcataaaaatgtttgcctcttcctagagtacctaggatcattgaaaagaaaagggataaaaaagcccctgcatttgtagctgctacatagcatacaaaccatggcttccttgagggaaaagggccagctctggctctgggctagggaaaatcatcaaactggaagggacaggacaagcagccacacccagtctccacctccctcccatccaaggacactgaggcccagagagatgctcatctaaagctggtctggaatcctggtcccactctcggtcaggtgctctttctctccctggtgacttgaggctgtgagtagagttgggaaaggtaaaggagtctgaattctgctgaactagtgctttgggacacctctaggagtggaagaaatggtcagatttacaggcagcatagctcaggaccttgtccaatcagctgtcttgaacacccactttggtccacggttcacgttcatgttatagtcatgagcccctgctcctccgccagtctagactcaaggaagcagtggcacaaatctcctggctgttgggttccatggagcagagagcctgaacccacccggaaaccaagtctagacaaaacagagctttgaggtttacacccacaacctttgtaccgtcggaagcagagggtgccaggggatccactacacgctccctgggaagcagaggccagaggtgtcgcatttagaagatgcgtcaggagaaatacacccacctaagttagttctcaaaaaaattaatagtaagagaagtctgaaacagccactggagcaaaatcaaacaatttcacctttatccacatatgaagagagcaaagtttcaaagtatgcttttgaacttgtggataaacaggctttactggactcagaaggcaatgctgacattgatcaggttgataatttgcaggaggggcccagtaaacctgtgcatagtagtactaattatgatgatgccatgcagtttttgaagaagaagcggtatcttcaagcagcaagtaccaccagcagggaatatgcgctgaatgtgggtaccatagcttctcagccttctgtaacacaagcagctgtggcaagtgtcattgatgaaagtaccacggcatccatattagagtcacaggcactgaatgtggagattaagagtaatcatgacaaaaatgttattccagatgaggtactgcagactctgttggatcattattcccacaaagctaatggacagcatgagatatccttcagtgttgcagatactgaagtgacttctagcatatcaataaattcttcagaagtaccagaggtcaccccatcagagaatgttggatcaagctcccaagcatcctcatcagataaagccaacatgttgcaggaatactccaagtttctgcagcaggctttggacagaactagccaaaatgatgcctatttgaatagcccgagccttaactttgtgactgataaccagaccctcccaaatcagccagcattctcttccatagacaagcaggtctatgccaccatgcccatcaatagctttcgatcaggaatgaattctccactaagaacaactccagataagtcccactttggactaatagttggtgattcacagcactcatttcccttttcaggtgatgagacaaaccatgcttctgccacatcaacacaggactttctggatcaagtgacttctcagaagaaagctgaggcccagcctgtccaccaagcttaccaaatgagctcctttgaacagcccttccgtgctccctatcatggatcaagagctggaatagctactcaatttagcactgccaatggacaggtgaaccttcggggaccagggacaagtgctgaattttcagaatttcccttggtgaatgtaaatgataatagagctgggatgacatcttcacctgatgccacaactggccagacttttggctaaaaaaaaaaaaaaaaaa

SEQ ID NO: 727 - DNA, 2294 bp, Homo sapiens
  misc_feature (2287)..(2287): n equals a,t,g, or c
ctgcactcagccctgatctactttctgggaacctttctgctatccatattgatcgcctggactgtgcagtatttccagtctgtctcagcaagcgatccccctccaagaccatcccttgccttagagctgatgaagaaagcagcttccaagggattgcatcaggcagtcaatggcctgggatggtattaccacaaattcaagaaaaattacgccaaagcagcaaagtactggttaaaagcagaagaaatggggaacccagatgcgtcatacaatcttggagtcctgcatttggatggcatcttccctggagttcctggaaggaatcaaactttagctggtgaatatttccataaggctgcgcaaggtggacacatggaagggaccttgtggtgttctctctactatatcacaggcaacctggagacattccctagagatcctgagaaagctgttgtatgggcaaaacatgtagctgagaaaaatggctacttgggccatgtcatccgcaaaggcctcaatgcctacctggaaggttcatggcatgaagctttgctgtattatgttttagcagcagaaactggaattgaagtgtcacagacaaatttagcacacatctgtgaggagaggccagacctggccaggagatacttgggtgttaactgtgtttggagatactataatttctctgtttttcaaatcgatgctccttcctttgcatatttgaagatgggagacctttactactatggccaccaaaaccagtcacaagacctggagttgtctgtgcagatgtacgcccaagccgccctggatggagactcccagggattttttaacctggccctgctaatcgaggaaggtacgataatcccacaccatatcttggatttcttggaaattgactcaactctccattctaataacatctccattctccaggaactgtacgaaaggtgctggagccacagtaacgaggagtccttcagcccctgctccttggcctggctttacctgcacttgcggcttctctggggtgctatcctgcactcagccctgatctactttctgggaacctttctgctatccatattgatcgcctggactgtgcagtatttccagtctgtctcagcaagcgatccccctccaagaccatcccaggcctccccagacactgccacgtccactgcaagtccagctgtgactccagctgcagatgcctctgaccaagaccagcccacagtaactaataacccggagccacgtgggtgaactgtgcactccagttctctccagatgagagagaatcttttcaacagctggtattgggaagctggggccagggcatgatcctgataaacaccttaaatgtcttgtcaactggatgcaaattttgcaattggtgtcattttttttaaagtcaaattacaaggaagtacccagatcaggcagtggtaataccaaaggtcatcaaacacatacaaggaacatcttgatcatagggcatgtggggaagtttactgggccatcacagacttttgttctagtgattgtatgtattaggagtcatagcatgccctacggcagatctggattcttatacactaagatgtgtcttaagaatcacagtgcgtgcttcatccctttattgaagaacagaaaattatgactactctacaaggtggataatattttggtacctgtgcttgccacagccctgttcctcaaagctgaattgatagatttctctttgacttccaagacctagcagttataaggcaccttgaaataaattgtttgtgcctggaaatgcagggagggcaatagctttgtaaattggtttacatttttctccttgaatttttctagggtcctagtgcttccgaatcatttaatggcattgtcggatatcttttacatttcaattgcaatccatgaaattacatttagaagattcttagtacttaactgtagtcttctccatgaattacacgttagaatagactggcagcaactgaatatgcagcaagtaagcctctagcttatagtttcatccctacccctcatgcctgcgtgagtctgtacagggatatgtgtgtgtgtgtgtgtgtgtgtgtgttagagaggaagaggaagagcagaatgtctgtatactacatgctgctaaggtagtgaataaatcagtaatgcaatattgtgggtccaaactactctttgcactactttatttacagtagtaaataaaattatttttatacaattgaaaaaaaaaaaaaaactcgaggggggncccgaaa

SEQ ID NO: 728 - DNA, 1255 bp, Homo sapiens
gaattcggcacgagacttgccagactcacatccgtgcagtttaaccacttcgttttccagaaaatcacattctgaattccgtgaaatcaggcttgcaacaagggctgtgtctgtctgataatatgtgtatctgtgtatcctatggaaatgcatttttaaactaagaagtgaaccattccaccagaacctttgattctgcacaagatttccttgctctgggaacaacccccaaatgcccttgggaggaacaacatgagctcaggaagcctctctttcttcacttaccattactaactctccaagcatagaaatccctgggaattgcgagaataactcccactattttaaaatttatattcagatttgtttcgtttcataagacacatcaaacaggcctatacaaaaggtttaggaaaagaaaacaatggtgagtcccggccctcttcgaattcactggcacctcatgcaagtgtaggaaggcacgctggatcgtctatctgattccaaagctgtcctttgccatctcatcccttggcctgccccccaaccctgaggatgcccctgccatccccccaacctcctcatattgcctctgaacccagatggcaatccatcccggttctctctgagggccacgggcttgggtagtggaaagggtgtttgggaaattgttaaatcagttacccgtagtagagctatttcttgtacttctaagttttctagaagtggaaggattgtagtcatcctgaaaatgggtttacttcaaaatccctcagccttgttcttcacgactgtctatactgagagtgtcatgtttccacaaagggctgacacctgagcctggattttcactcatccctgagaagccctttccagtagggtgggcaattcccaacttccttgccacaagcttcccaggctttctcccctggaaaactccagcttgagtcccagatacactcatgggctgccctgggcagccagcattcattgtaagttccctctttgaaaactggtgtgtgggtgttcagttctgtgtctggtgggtatggacagacagtaatctcctgtgatctgtgctagctgtgaggcagctctggaacgtgaagagctgtttggtttgaaccgtgaacaaaactgtgttttgagtttagctgacattaaagaaaaaagttcatcacgtgactgttaatgtaaacctggttattaaaataactatgaaattacaaaaaaaaaaaaaaaaaaaaaactcgag

SEQ ID NO: 729 - DNA, 895 bp, Homo sapiens
ggcacgagcagctctgcctgtagcaggagccctgaggaggaggaggaagaggatgtgctgaaatacgtccgggagatctttttcagctagggcataaactgtgcactgaactgtctgccgagagcagctggaggacagctgagcttccactggtgctgctgggccgcccgcctgtgggaatggggctctctgtgctcctacctttgtgccttcttgggcctggcagattcacctcaggccagaagcccctggacactccgggccttggggctgccgttctgagtgtgcggaaggcaggactcaaaatgagatcccatttgactccctctgtatgtactgtgccctctcctggctcttgaggctctggagtcccaattgtctgtgttagtcagtgaccaggttccagggaaaatgatgtcatgtggtggtccaacttactggaaccaaagagacagtactttgcaaagaaaaggatcactgccaggtgcactggaattgctacagtttagtccgcatgatctctcctgaaggaggaagcctgtttcaaaaatagtttccatcatgagtctatcaatgagctcccacctctccagccagcctagaaagcaaacgagctgcccacagttctctgccctgtctgggaggttgaggccacagtgtatagactggtaagccagacaggcctcctcccgcaagctgctaccttgctttcacctgtaccttggtccccgggcagctagctataaagcaagagggacaggagcccagaagagacactgaggacaagagatcacaccagagtacatgtctctgcctctgttttcagtgtggctttggacaggaatatatgaataaatcactgccatacaggttttccaataaaaaaaaaaaaaaa

SEQ ID NO: 730 - DNA, 1208 bp, Homo sapiens
  misc_feature (1164)..(1164): n equals a,t,g, or c
  misc_feature (1166)..(1166): n equals a,t,g, or c
gaattcggcacgagaagttatataccttgaaagtccctgccatgacacttattagaccagattttttgatatgttgttaagtcatcctgaccctgtttatgtacaaactcaatctttgtgtggttgatggtctacatgagatatgtcaagtgtttgtcaatggatttggtccatagtaaatgttcactaagaggaagaggcagtatttaggaacatatattctatgttaaacagcctaggttgaaatgttgacttctcttatttgctatgcgatcccgtgcaagttcctgaattttgctgtgccttggttttgtkatataactcctggaagtgtgacgatggccacatgagttcatacatgaaaacctcttagaaaatgcytgggrcacattaaaaactcagtaactgttagctactattaccttcaaaatataaccaagtgacaaaaggggagtacaactaatcctcagraaatcagattaatattctggctttgcgacctgtacaaagtacttaatttcccagtttagtgcctttgtctgtgaaatgatacgtaacttttatggcwattatgatgataaagtaagaaatgcatgccaagtgcctaacataaaatcaatgctaagaaatggtagctattattagtaataatgataaagaatktygcaaaaatttccctttgaatcctaggcgttggtcatattgaattacttgtagtttctcaaacatgttctcttgtttwcatgtgtacctgctgtcttgctttgctactccactgtattcttcacttgattgcctcctactagttcttcaagatgcaggtgtttccttccctggaaaacatttcctaaagtcaggggacgtgttttctgtttkcctctattattgtacttcttatactctctaattttctattgacctattttcttccaatataagacactttcttcttgtgtgattttcagataagctactaaagtcttggtttcctcatctgtgaaacagggatgtaaaaattaaatgagatgcacttggcacttaggccaatgtctagcaccttccccaatcccaagaacataataggcagtcaacaggtgtttacttatgaaatgaaaataatgatttacaaattttattcaatctaaaaaaaaaaaaaaaaactcnanggggggcccggtaccaattccccctatagtgaatcgtattaa

SEQ ID NO: 731 - DNA, 1165 bp, Homo sapiens
gaattcggcacgagaagttatataccttgaaagtccctgccatgacacttattagaccagattttttgatatgttgttaagtcatcctgaccctgtttatgtacaaactcaatctttgtgtggttgatggtctacatgagatatgtcaagtgtttgtcaatggatttggtccatagtaaatgttcactaagaggaagaggcagtatttaggaacatatattctatgttaaacagcctaggttgaaatgttgacttctcttatttgctatgcgatcccgtgcaagttcctgaattttgctgtgccttggttttgtkatataactcctggaagtgtgacgatggccacatgagttcatacatgaaaacctcttagaaaatgcytgggrcacattaaaaactcagtaactgttagctactattaccttcaaaatataaccaagtgacaaaaggggagtacaactaatcctcagraaatcagattaatattctggctttgcgacctgtacaaagtacttaatttcccagtttagtgcctttgtctgtgaaatgatacgtaacttttatggcwattatgatgataaagtaagaaatgcatgccaagtgcctaacataaaatcaatgctaagamatggtagctattatkagtaataaygataaagaatktygcaaaaatttccctttgaatcctaggcgttggtcatattgaattacttgtagtttctcaaacatgttctcttgtttwcatgtgtacctgctgtcttgctttgctactccactgtattcttcacttgattgcctcctactagttcttcaagatgcaggtgtttccttccctggaaaacatttcctaaagtcaggggacgtgttttctgtttkcctctattattgtacttcttatactctctaattttctattgacctattttcttccaatataagacactttcttcttgtgtgattttcagataagctactaaagtcttggtttcctcatctgtgaaacagggatgtaaaaattaaatgagatgcacttggcacttaggccaatgtctagcaccttccccaatcccaagaacataataggcagtcaacaggtgtttacttatgaaatgaaaataatgatttacaaattttattcaatctaaaaaaaaaaaaaaaaactcga

SEQ ID NO: 732 - DNA, 1021 bp, Homo sapiens
  misc_feature (977)..(977): n equals a,t,g, or c
  misc_feature (998)..(998): n equals a,t,g, or c
  misc_feature (1001)..(1001): n equals a,t,g, or c
  misc_feature (1015)..(1015): n equals a,t,g, or c
ggcacgagaaacaagctcattgttaattcatgcagttttaatttatgcataggagaattatgcaggataattacctgcagttgaaggaaaatgaatagcgtcagatgtggttaattcacgcatggtttacccttctatctctctatcagaaaagatttaaagtggtaaccaatctgaatgatatgcaaaattgcattggtttgctaagtagaagtattttttttatttgcatcacaaatagagttctcagatttggactgactagatttgaatataatttccagaacaatagctgtgattcactgacttaactcatatgttatctcttccagaagtgcccatttttcaaatcagtgcaaaagaagctatcttcatgggccccatgttagcctgagtatagtttcctttatgaggataattcaatgagaatgataattatttcctatatcaagatttgtgggagatttacggtaatgatcacactacttgttcccacattgtccctgaaccttcatgatccagtggcttccaaaaactgaaacaaacagctggaacaaattatggggcaatgaatggacatcagtggaaatttccttgtgacttttgtcaagcaatagatagctgctaaggcctctttgaactcacacctagtaattgagagaaggctaagaggtggttcaagtttactgaaaaaaaaaaaaaaaaaactcgagggggggcccggtacccaattcgccctatagtgagtcgtattacaattcactggccgtcgttttacaacgtcgtgactgggaaaaccctggcgttacccaacttaatcgccttgcagcacatccccctttcgccagctggcgtaatagcgaagaggcccgcaccgatcgcccttcccaacagttgcgcacctgaatgggcgaatggcaaattgtaagcgttaatattttgttaaaattcgcgttaaaatttttgttaaatccagnctcattttttaaaccaattanggnccgaaattcgggcnaaaaat

SEQ ID NO: 733 - DNA, 1661 bp, Homo sapiens
aaagatcttccagtgtaaagcaataggaatgaaacaagccatgagaaagcagaatattttgagtatattctcatgcctttctttaaaggagaagcgcctatctaaacagttacagaaacccaaattcaaagtagattaaacaagaagtaaatttgtaaactcttttaactgggagacaggaagtagggagggctccaggcacaatatcattagcagttcaatgtgaacgaagacccatgtcctttccaagcctccctctgccatcagcattgccctccttcccagggtcacagatggctatcaatggcaaaactggggttccgcgttctcttctcctcatctggcaagagaaaatgggaaatctctatcccaagcttggattaaaaattattttcatttttgtgttccagcaaacttgggtcctatgcccagccatggaccaaaaataggcttaatgtgaatgttatgtgctgattggattaaaataagttctgactctgaatctgggaatgtggtcaccttcctcagagacaagttgagaggttggcttatctgaataaaagcagagaatatgagatgctggagaggtgttcattaaggagaacattccctgaggtgaattaacggttagaattatctatctctgtatttatctatccacccatctatcatcatcatcacctcatctccctcctttctctctctctaaatatatacatgcgggtatgttgagtgtgtatatatttatttttttgtgtgtttatatggtgtgtgtgtgtgtgtattccaggcagatgtgtgcatatatacccaaactttcctgatgaccttgaaattaaatgggtcatgtgaagctaaagattatagaaccccttgattcctttataaacagtatttctaagataagatcaacactaatctttcaaattagttgactgtgtatagaacaacttgtttatttaaagtcatctagtctaatgcaatcaaggagtaaattataaataaccagttagcataaatggaaagaaaatagttccttttctttgaattcatttcatgtttaatttttcttgcgcacatatagaaatgaatagaaatattcccatttcaatgtgcaaattcagccactatatagtttgtttctttttggtagctaataataataaatttttaagtaagatctgattttgaaatatgaaaagaagtttatcctttcctgttttaataccacctgatacccgtttaacttactgtgtttgattcttggggacatttatgttcaaggttctgtcaaagcaatctattattcttgtttttacctgatggatcatggagaaaaataatggattcagttatgagaaacagtaatagatttttttaactgccataaatttctctccctgtattaaataaaaggatcaggaaaagataagttgaattttcctacaatgagccagctcttcttaaatttacctcccataaattgtagcaaagcacttttcatataatgttttatttatgtaattcagttatttggagatggtggtgagggatgtgagtacatcatttcatgttgtatttcaaatctcttttgacagaaaccctaagaatttgcaataaagaaaattcaatgttcaaaaaaaaaaaaaaaaaaactcgag

SEQ ID NO: 734 - DNA, 477 bp, Homo sapiens
ggcacgaggagaagtgacacagagtaaatggctgatcttctatattgtagtatattttgtccttccctcttccctgaggaacaaagcacgtatctttagtctctttgatatttattctgagaccaagggcttgcttgacctgatgattttccttcagctctctgaaggtgctttttccacaatccaagtgattctgatacacactaaagttgagaatcactgcactagatcactttgtgttttctgattttcaaggttgatacatagctttaatacagctcttctgttgacagttattactttaattttgcatttgttccttgtaagaatggctggaaactgtgtgttgacatttgaggatgggtatgcaaggaaaaaatatacttctgtttacttactctgactttgaaatagtgttatttttctatatctgaaataaatgcttctaccatagaaaaaaaaaaaaaaaaaaaaaaa

SEQ ID NO: 735 - DNA, 779 bp, Homo sapiens
  misc_feature (766)..(767): n equals a,t,g, or c
  misc_feature (773)..(773): n equals a,t,g, or c
ggcagagggtaaatctgatgtcctcccaaagtgctgggattacaggcgtgagcaccgcgcccagccaccacataatgttttataatctaagacctctgcatcttacgtaaatttaagtgaaagtagtaggttataaaaataggaccttcaccaaccatcatttgatatcaagtatatcaaatgctttcagtagcaactaacagaatatacaattcaaactgatttttacaataagggggattattcttaatcacctgagctttaagcatcagtagatctggtagctcaaattttttgaactatgttttttggattaaatgcttcaaatagcattttctcccccaaaccacctgctccttctaattgatggatttctcacatgagtcacaggcttgaaacatcatgagcatctttaacagtccctttgcatgcccccaacgtctgtcagttgccagatcatctgcattttgtccccatgctatctccttctctttctttcttcctgtttccaagaccaccacctaatcaagtcaaactggtgcagtaacttatcaactagttccctccccttccagcttttcttgctaattaatcttttcaaagcgtacattgcagctgggcatggtagctcatgcctgtaattccagcactttgggaggccagggcgggaggatagcttaaggaaaggagttcaacaccagccttgcacaacatagcaagacccctgggtctctgcaaaaaaaaaaaaaaaaaaaaaaaaaaaaannaaaaantccgag

SEQ ID NO: 736 - DNA, 972 bp, Homo sapiens
  misc_feature (62)..(62): n equals a,t,g, or c
ggtacttcaaaacccccgaggcctagatctgctatttctctcccaaggagggttatgcgcantctaggagagagttgttgtttctatgccaatcagtctggggtcataaaggatactctccaaaaagttcgagaaaatctagatagacgctaacaggaattggaaaataacacccctggtaccaaaacatgtttaactggaatctatggctaactactctaatcactggattggcgggaccccttctcctcctcttgttaggtttagtcttcgggccttgtatattaaattggtttcttaaatttataaagcagttcatagcttctgtcaaacttacgtatcttaaaacccaatataactcccttgttgtgactgaagaatcaatgatttgattacccaaaacatgagtggggaatgtgatacctaccctgttttaacctgccccaagtttacgtgtacagtgggtcagaagggtgacttctgacccttctgctcagagtgactctctcttagctgagatagctggacactctccattttagcttcttcacttgcagtccccttatccccctcccttaagggaataactagtgcaagctgactccaagcacatccaggaatgcacttactgataagatattgaggcaagctgtaccagcagctcctggggacgtgctcggcggatggtacccaagcccctgcatttatctctttgtgatagtttaagcccctgcacctggaactgtatttttctgtaactatctctgtaaccattaatttttttaactttttgcctgttctgcttctgtaaaaattgcttcaagtaggctccccctcccctatttagaccatggtttaaaaagaaatctatcccgttcttcgaggccaagagaattttgagctctagccatctctcggtcgccggcaataaaaggactcctgaattagcctcaaaaaaaaaaaaaaaaaaaa

SEQ ID NO: 737 - DNA, 1885 bp, Homo sapiens
gaaagctgaaaggtgctggaagcctcctgcactttgggaatatacagtcaggaacaattgtcaggagttctgtagttgattctgtaggttgggattgccataaggttggttagaaaaaagatgtgcgaaagctttcctgagggtttttgcccttgctttcacatgtcccataattgaaattaagaactgctggcaactggttagtgaccagtgttgaaatgggaaaatattactggcttatgcttttgcttatagatattgaaatttaataaaatttaaccatagttacatatgattctatgaaattaggtaggctcttcaagaaaaatgtgagcaatgtaaggcagggtatttttgggaggggggtgctttattgtataggcaagctctcgaacagtgtctgataattagtagtgtctgacaatatttgctgaatgagtgaactcatggtaacataactccagtatggcagattgattcttggtgcttttttccagtggcaaacttttatagaaattggagagtttcgtaaagacttttaaaaagttgtcagaattacctattatgtcctttcctagataatcmatttggaaacaattgctggtaccttaagcccgatgtatgcctcctattatagtgttgaaaatgttcytttgacaaatgcatcaatgaccaggcmcatgagamcagtgcacagctgtagaaaamcamcaatgaaggtcttcgacacaggagagagtctgcactgcatcacagctgatccgaaagttaaattcaatgaaaaggcaaatattttggtcaggagaggaattcttcctagggagtattagcacagtgtatttttagytgtgtggctatttatagctgcccaatggcttgcgtctgagtctttatttggtttttaggacatgctaaggattgagggtcgtgggccttaattgtatagaagacgcagttgcgtttggttgcctggaggcttctctgtgaagcctggtgggacacctgctggccagtttggcccttcttagtgaaggtgatagagacaagggcagaaggtcattgtatttataggatatttgaagcttatctkgtttacttkgttaataatactkgagtcatttttctaaacattcttkgcataacrgcaargattaaaargataagtaatgtaatatattagsccctagttgtcattcacctgttcttgtagagctgatacttttttcttgatcaaattttaggtttaatcatatttagcttagaagagtggtctgtcttaaragtatwctgattatttaggaacatctrgatgaaacttctttgccttagtccatcgtttcycctttaaattcctaaaggcaggaatgagtgtttcttaaaaccaacatgtataaagcaacwttttaggcaaactgggatgaggaaaaacatcttgaagggggcttcataatggtgttggagcctgttaaaaatgtggaatggaaagccgatcatgaaaacagatagtactgacttttggcaaaatgagtctttatgaaaacataccttaatgattatctgacaaatgcaagtgctttttgaggttaacagaattataaacaggagactgcagacactaaggtcactactgagcagcacgataattcgtgtggtgtgttctttttaaagattaacaatcttaagtcttttgtatgttatgttgctaagttatttgggggaaagtgttaaaataagtgctcttactttctttctccactgcttttgcacaaaaactttactgttcaaagaatattgtccattcagtttactttttatttttaagatgaagtatcccccaaactggtcatgccaggaaaaaaaaaaaaaaaaaaaaaaaaaactcgag

SEQ ID NO: 738 - DNA, 1251 bp, Homo sapiens
ggcacgagagaagaagtactactccaaaaactttggtaaagtgcttattcttccctagcagtaggctgttgctgagttgtagactggtggttttatgaaaaaaaaacaggttggggaggtgtgaagatggaaatgagggctgtgttatgtatatctggtatctacttctgttccaggtgcttaattcaccctcatactgatgtttaaagttagaggattcttgtccatttgtcttgtcttctgttggcaggtcacatgcaggtaataggctatgggaaggggaagatgcctagattacttctaggctggtctccaagccccaagttcaagcctcctgagtagctgagactacaggcacacaccatcgttctcaacttttcttttttaacataggctagctagctcccaccttagccttctagaccctccattataattcttattcaattgccttggcctcccaaagtgctggaattacaggtgtgagccactgcacccagctattttttctatatttttatgtagttcattgagggtaataattttatcctacaacaaacatgtaagttattgaagaatattggagttttatgataatgctgtcataaatataaaaggtagggtaagagggatccaaatagagctcacttatattgtcactgataggcagtcacgctgtgctgatagaatgtggcctgacacttgatggagtgcagcatatgtatacttgggcaatttgagcagatatatacggtcccgagtttaaagaagagaacaaacaccagtgcacagctatagtattcctaatataggatgcattttaaagaatttcacattctacaaatggagagagatggcaggagaagccttattttaagtcctgcactaaggcaggttaacctcatgggtgtaattacctggacctttttgtaaggacaaaatatttaatcattaaaaggccctctgtagggtttgaaatatctatattttatatatgaatgcttcttttattaatatttatggtaagatattttatactgctgataaacggacattaatgatatatagcctattgtttgaaaaaagcattttggattatagcccaaaactggaaataaccaacagataaataaatggtggtatattcatacaataaaatactactcagataaaaaagatgaacttaatctcataaacattatgggcaacatagtgagaacccatctcttttaaaaaaaaaaaaaaaaaaaa

SEQ ID NO: 739 - DNA, 1252 bp, Homo sapiens
  misc_feature (243)..(243): n equals a,t,g, or c
gagaagaagtactactccaaaaactttggtaaagtgcttattcttccctagcagtaggctgttgctgagttgtagactggtggttttatgaaaaaaaaacaggttggggaggtgtgaagatggaaatgagggctgtgttatgtatatctggtatctacttctgttccaggtgcttaattcaccctcatactgatgtttaaagttagaggattcttgtccatttgtcttgtcttctgttggcanggtcacatgcaggtaataggctatgggaaggggaagatgcctagattacttctaggctggtctccaagccccaagttcaagcctcctgagtagctgagactacaggcacacaccatcgttctcaacttttcttttttaacataggctagctagctcccaccttagccttctagacccctccattataattcttattcaattgccttggcctcccaaagtgctggaattacaggtgtgagccactgcacccagctattttttctatatttttatgtagttcattgagggtaataattttatcctacaacaaacatgtaagttattgaagaatattggagttttatgataatgctgtcataaatataaaaggtagggtaagagggatccaaatagagctcacttatattgtcactgataggcagtcacgctgtgctgatagaatgtggcctgacacttgatggagtgcagcatatgtatacttgggcaatttgagcagatatatacggtcccgagtttaaagaagagaacaaacaccagtgcacagctatagtattcctaatataggatgcattttaaagaatttcacattctacaaatggagagagatggcaggagaagccttattttaagtcctgcactaaggcaggttaacctcatgggtgtaattacctggacctttttgtaaggacaaaatatttaatcattaaaaggccctctgtagggtttgaaatatctatattttatatatgaatgcttcttttattaatatttatggtaagatattttatactgctgataaacggacattaatgatatatagcctattgtttgaaaaaagcattttggattatagcccaaaactggaaataaccaacagataaataaatggtggtatattcatacaataaaatactactcagataaaaaagatgaacttaatctcataaacattatgggcaacatagtgagaacccatctcttttaaaaaaaaaaaaaaaaaaaactcgaa

SEQ ID NO: 740 - DNA, 1256 bp, Homo sapiens
  misc_feature (22)..(22): n equals a,t,g, or c
  misc_feature (26)..(26): n equals a,t,g, or c
  misc_feature (34)..(34): n equals a,t,g, or c
acgtttcctgtcctgtggggtntccngcatgtgncaggatttccttcccacatccatgatagatgtgtgtcaaggggcctaattccggagatccactgcagaggagcaacatctaaagtcctttcacctgagacacaggacattatgaatcctccttggtgtcttggcagatggtgctagtggcataaacaaaaccaaatggcctacagctatacttacaatgagaattawtcatatttyattcggtagctgggactatgatgggcaagcatgccactcaagcaagtgcatgccctcttaatacagccctcctcagtcttggattcacaatcttttacatggatttctaagttttcataaaggttcttttgtcagggcataactgctgtattttcataactagaagttgtgggtagagaacctcctattctgccatcttgctatgtcactccccttgtatgtttcactttctgatatgttctatgccaaattatctgatttcaaattcaaaatttctgaaataaaatgcccaagtttacacattgtgtaataagtacatgtattgacatggctcattttcattagagcatttattaatattgagatgcattttcttttactgctttacatttcatgccaaagattcaaaatcctggctcttcaataagaacatagtcacagttaaaaactgtagttatttaaaggattgtttttatggtacatctgtatatatttaatattttgtgggttagaattttattgtattcaactccattttactgggcaatcttttttcatgtagatactccttgattatttaatttttttcacttctaatcttcatatttggtaattttcaaatctatacctttaatgatcaagtggtgtttaattcaaataaaaataattgggtttcacttgaggcaatttaaaatacatttataaatcagacatttttattgcctataaaagttaggtggtatttgcctgtataaatagtgcccctcctttgattataaattatttattttctttggtggtcatcagtgttttcttgtgtaggtgagtagtcaaaaaacagtgtaaagttaccatctgtttattgtcttattacatattattctgtgagacaaacacttttgcaatttgcaggtaatttctgaggaatgtaacctttttaagtaggtgtaaataatagttataaaaaaataaaattgccttcttaaacattaaaaaaaaaaaaaaaaaaactcgag

SEQ ID NO: 741 - DNA, 2858 bp, Homo sapiens
tcgacccacgcgtccggccctcagccgctgcccacggggccgcgctgcttagccactgggaccccacgctcagctccgactgggacggcgagcgcacgcgccgcagtgtctactccggatcaagcgggatatcatgtccatttataaggagcctcctccaggaatgttcgttgtacctgatactgttgacatgactaagattcatgcattgatcacaggcccatttgacactccttatgaagggggtttcttcctgttcgtgtttcggtgtccgcccgactatcccatccacccacctcgggtcaaactgatgacaacgggcaataacacagtgaggtttaaccccaacttctaccgcaatgggaaagtctgcttgagtattctaggtacatggactggacctgcctggagcccagcccagagcatctcctcagtgctcatctctatccagtccctgatgactgagaacccctatcacaatgagcccggctttgaacaggagagacatccaggagacagcaaaaactataatgaatgtatccggcacgagaccatcagagttgcagtctgtgacatgatggaaggaaagtgtccctgtcctgaacccctacgaggggtgatggagaagtcctttctggagtattacgacttctaygaggtggcctgcaaagatcgcctgcaccttcaaggccaaactatgcaggacccttttggagagaagcggggccactttgactaccagtccctcttgatgcgcctgggactgatacgtcagaaagtgctggagaggctccataatgagaatgcagaaatggactctgatagcagttcatctgggacagagacagaccttcatgggagcctgagggtttagaccctgctcccatctccccttcccccactcaagagtcccagcagaatcccttccccccaccccagggatggagaggcactgtgtatctccctccagactcgaagtcatcctgcaagatggcaagaaccaagcaagctccgatcccagggtgtgggagtgggggcctgttcccggtctgacctccttggcactggagcatctggggcttcgttcatccattcatcccgtatcaggggccaaggtacctttacaggagcacctagagcgagggcctttggcaaaaacaaaacaaccaacacacctctccacagggccagctccttagggataagtggaagatggaaattgcaattccaagagggagtgtgcccaaatgatttatggggatacctggaagggagcttggggtgggggctgtctgtgacacttaagcagtctgggtggttgtctatttgtctgtcttcagtcttgaagcagggcttcccaatgcccttttcctccctgccttccttcccccattatttcccacaggccagcataattttgtttttcctaatttatagtcactgttctagacagaccaaagagaaggaacagtggtggagtctaggctgctgatcagtaagctttacctagcacctgagcacctttctcccctcccctctttcctcacccttttctagatgtaagacagaargtaaatgtgactgggacttaaccaaggtcttggtaaagcctgcatggcaccgtaagaagctgaaaatactgtttgttcccgcaatcactgatttgaaaagttcccaacacaggcagctgctgtgtatatgggattagagccactacatagaatagtctcttacagattttcataaatactagtcacaataagggtatttttcttgggggtggagtaagggggagactgatgctagtccttgttgtattttgttgggctgtccttgtgtattttcaccccagcctgtagtcctcctcacttcaaccccagggatttttggggagcaagggtagccaatggcagagggggttggggctgggactctggaggctcctccccttctttctcttccttccgcctcccccgtgcccccagctgctcttgtcactgtctctgatgggtatttgcctggctttgttgcttctctatctgtatttagctgcagtgatcctttagctggttggctcagaaaaaaaaaaatgtgctttaggtgccctgtaatcctgggcatcaagggaatccatccttcccctttttgatatgttctccccgtacttccagatttattgttatggctcccagtgggtattggcgattcttgtgatgcagggcctcagtcagtgtccagccatgcataagggagaggatagtgtgtacctgccctgccctctgctatgaaggtctctgccttgtggatcatgggactccccttggaggatctgtgcaaaggggggctgggcacaaaggagaatgtcctatttgggagggcaggaagcaaaggaactggacagggattggtgggcttggggaacggaagtttatcttggatacccttgaagaggctgggtctcttcacatgaagatcgaaaagggaccctgcttccaatttccctcttccattcctcgagctactccagggcttagaagaatgctcttggtctgtgggtccagtgttgtctgtcatccatttaagtgttcccactttcaagtgacaatcctctccttggccctgccatagggcagagcatgtctggcatagcagcctgacttttatgccctaatcttgagttgaggaaatatatgcacaggagtcaaagagatgtctttatatctgactgtatataaatgaagtttttttgttttttttgttttcctttttggtgcaataaagtttgttttggcagaaaaaaaaaaaaaaaaaaaaaaaaaaaaaaaaaaaaaaaagggcggccgctcgcgatctagaac

SEQ ID NO: 742 - DNA, 1363 bp, Homo sapiens
ctgcaggattcgggcacgaggtcaagtgagggcagcagcaggtgaggtgagggatggaggtgaggccagatcacctggtggtttaaaagccgcagtgaggtgtttagacctaattttaaaaacaatgaaaagcacttgatttagtttagccatccatatgtggcttgtattagctcaattagactcctgccttttcgcaaggacagcagtctctctgtatcccatacacaagagaatgatgtgttttctctttttaaatgagatctgtttagctagttgtatggagaatgaattctgctggtcaattgtggaaacagagacttagttaagtagaccttcctgagcttaccccttgcagccttccctgagatggcaaacaggagggctgcaccaatcctatactgtcagcaaaggtctggatcgctttgcaaggattagaaagcctgcacatgtggggcctcagaccatctgtccccatgtctacagaaaagttccaactgctgaatggttttgaaatgcatggttatttcctgggcccaatccagtccttcataatttggccaaacctttatgcagagggctatgaggcatttttcctccagattctgagggtcaaagcagtcccaatggttcaagatacactgcagagtagtataagctgggggcagtwaagagaactggttgtccattttgaaagacagggaatagaggcatccctcattcagggtgtgatggggaaagcaagcaagtgtccttccttcactttccacctgttgtccctgagccttggtgaccttggcaggtactggccataggtaacaatacccacgaagcagggaaaacctggagaataggaattaaccaccctcagctgtgcctccctttctccctgctgccagcaacctttgagttccctgggcctgtttataccgtgaagcatggcctccttccgtggggtggggttcagtcagcaggaattggtcctgcgcatttacattttgcctgttgcttggctttgagcccctcagacctggtctgtctttctagggcctcagcctaaagcttggaattgagtttggaactgaaaaggtattttagaggctgtttgtatctgtttagagtgtctcaaatgtgccctgccgaatttgcggttatcagccagaaggggtttttcctccgttaacttccctgtcagaaacagctggtggggggtgggggaggcctctcacttagaaaaaraaaaaaraaaaacagtttaaggggcaaaaagggggaagttctgggggaagaaccccttgttagtgcaactgggcatttccaatccttatatctttcccctgggtcagactgaattgaattcctt

SEQ ID NO: 743 - DNA, 724 bp, Homo sapiens
  misc_feature (506)..(506): n equals a,t,g, or c
  misc_feature (512)..(512): n equals a,t,g, or c
gtgaggatccttttttctagtgtgtactgaaaacagctcttttaggaatttttcatttccattggtttttgtcttgtgatatatgtcttttcatgagggataaattttatttgcactcactgtttatggagtatcgagtaaaaactagaacaaagcagaacgaaccttcctatacaatgccttcccacaaaaacaaatacctccctcaaaaaatttctgctctgaacatgaaaatgcttatctgcagcttgacattattagtatgtctgagtcctagggtaggtaggagatccaggtattatcattcaaaaggaactgaaagtgtgagcactctttgaaaaagcactattagcaatgtaaatgccaagttacatctgataggcaaactcttaagcctgtttgtgtgatatttaaggtgagaaaatagttttgcctattctttatgactttgaatagccttaggactatttcatctgtttattactctgycttcatactagatttcntttttntcytttttgacacggagtttcgctcctgtcacccaggctggagtgcagtggcgtgatcacagcttactgtaacctccacctcccaggagaattgctttaacctgggaggtggaggttgcagccagccgagattgcaccactgcacatgagcccaggcgacagtgcaagactcagtctcaaaaaaaaaaaaaaaaaaaaaaaaaaaactcgag

SEQ ID NO: 744 - DNA, 1099 bp, Homo sapiens
  misc_feature (900)..(900): n equals a,t,g, or c
  misc_feature (1060)..(1060): n equals a,t,g, or c
  misc_feature (1062)..(1062): n equals a,t,g, or c
aagttctggataaatacttgatttgatgtgatagtgtgtattactctatcagaaatgcagagcgttgtatgatttttctgtgtacacgcgataagagcaatattagttgcaaaaggaagttttcatctttgaacattaaaggtatcctttattgttgatcactatagcatgcaaaaaagaaactatattttctgtcctgttctttgtattactgttaaagagttggtaaactgccgtcttgctgtgagactgggaagtcggcaatgaagttagatttgtattcatgaacatgatctgcctgtcatataggcttgctttgacttgttttttttttcagtagtggcaaagggttttctgccactcaatccacactttcctccgcattggtatctccgttgaccattttgcaaaatagtttattgagattaggggtctgatcttttgtataacctgttgtagtgaactgatcatatgcgacttgactttggccaatagtacctcgtcagtgtacagtactactatttagmcttactgatttgggtaatagaaaagctatgatgttagaaatgttgtcgttgtatattggagaaattttgaagttgcatattggagtaatttagtcctgtatgctttgtaaatgagtgcattctattgtcgagagtaaatacagtattttgtagtataaacttaagcttttagctgaagaaattggcagcatagttggagtgtggagactawtcttaaaacgcaaatgttttaaattacaaggaactgtagtggtgtgtaggctgtaacaattcctggtgccaaatttgggagattatttggttgagctactttctataaagaaacatattaagtatctgcaataaaagtggatttgtagctatacacaagggnttttacattataaataataactcaataaggcacctttctttgctctttgtgtatctgccagttaagaccaaaacatctcatattttcactggagcttcctgccaaaacaaatactggttttgcattggctttgctgctcagtttgaaagctaggggaatntnttagagcctactctggttctggaggctgcctgattaa

SEQ ID NO: 745 - DNA, 1703 bp, Homo sapiens
agagaaagttacgaggttcgtggccgcggtttccccaggcagctggcgctggaggcttcggcgtcacgtgctggtctggatttttctcgatgcactggggaaagcggtggactcttatcgtgggagggctcttgatctgtgatttatagataggcacagctactcccgttcgggaacccaacggcagacaggtcctagtgcccatcagatacccgcggccgggactcggagctgtggggtgtggggaggcggaggcaccaactaagagcgacctagcatcgcaaagccgccctcggggcgctcatggcgggacgctcctgggaaaggctttagccgcggtgtctctctctctggccttggcctctgtgactatcaggtcctcgcgctgccgcggcatccaggcgttcagaaactcgttttcatcttcttggtttcatcttaataccaacgtcatgtctggttctaatggttccaaagaaaattctcacaataaggctcggacgtctccttacccaggttcaaaagttgaacgaagccaggttcctaatgagaaagtgggctggcttgttgagtggcaagactataagcctgtggaatacactgcagtctctgtcttggctggacccaggtgggcagatcctcagatcagtgaaagtaatttttctcccaagtttaacgaaaaggatgggcatgttgagagaaagagcaagaatggcctgtatgagattgaaaatggaagaccgagaaatcctgcaggacggactggactggtgggccgggggcttttggggcgatggggcccaaatcacgctgcagatcccattataaccagatggaaaagggatagcagtggaaataaaatcatgcatcctgtttctgggaagcatatcttacaatttgttgcaataaaaaggaaagactgtggagaatgggcaatcccaggggggatggtggatccaggagagaagattagtgccacactgaaaagagaatttggtgaggaagctctcaactccttacagaaaaccagtgctgagaagagagaaatagaggaaaagttgcacaaactcttcagccaagaccacctagtgatatataagggatatgttgatgatcctcgaaacactgataatgcatggatggagacagaagctgtgaactaccatgacgaaacaggtgagataatggataatcttatgctagaagctggagatgatgctggaaaagtgaaatgggtggacatcaatgataaactgaagctttatgccagtcactctcaattcatcaaacttgtggctgagaaacgagatgcacactggagcgaggactctgaagctgactgccatgcgttgtagctgatggtctccgtgtaagccaaaggcccacagaggagcatatactgaaaagaaggcagtatcacagaatttatactataaaaagggcagggtagccacttggcctatttactttcaaaacaatttgcatttagagtgtttcgcatcagaataacatgagtaagatgaactggaacacaaaattttcagctctttggtcaaaaggaatataagtaatcatattttgtatgtattcgatttaagcatggcttaaattaaatttaaacaactaatgctctttgaagaatcataatcagaataaagataaattcttgatcagctataaaaaaaaaaaaaaaaaaaaaaaaa

SEQ ID NO: 746 - DNA, 1120 bp, Homo sapiens
  misc_feature (927)..(927): n equals a,t,g, or c
  misc_feature (968)..(968): n equals a,t,g, or c
  misc_feature (972)..(972): n equals a,t,g, or c
  misc_feature (1002)..(1002): n equals a,t,g, or c
  misc_feature (1053)..(1053): n equals a,t,g, or c
  misc_feature (1081)..(1081): n equals a,t,g, or c
  misc_feature (1113)..(1113): n equals a,t,g, or c
gtgacagcgctgcacctaaatgacaattaccttagtcgcattccacctgatattgccaagcttcataatctggtttacctggatctgtcatccaataaactcagaagtttaccagcagaactaggaaacatggtgtctctcagggaattgcttttaaataacaatctgttacgggttttgccttatgaacttggtcggctcttccagctacaaactctaggtttgaaaggcaatcctttatcacaggatattctcaacttataccaggacccagatggaacccgaaagctactgaacttcatgcttgacaatctcgcaggtaactgttagtgacaaagctgtaaaataaattctacagatattatgaactagctaatatatgttcctcaagagcatctgactgttttttataattgcctatgggtttggagttccttccattgtatatcctacgttagtggaacattcttcttttcatatactgaatgttttctatttaccaagcaatatgttaggagattagttgcattattttgtttaagaacctaggacataggaactttaactcacagtttagagatgcaaattctgagattcagagactggggagaatatttttgaaacgtcctgcagcaaagtggtacttttttgagacaaggtcttgctctattgcccaggctgaagggcaagtggcatgatcacggctcactgcagcctcaaatgcctggggctccaagagatcctcctggcctcagcctcccaagccagctgggattacaggcgcgcacacccacactcagtcccagagtggtccatttgttacagctgatgaatctacatggacacatcgtcaccacccaaagcccacagtttacaatggggctcactcttgatgctgcacattctctggctttggacaaatgtatnatgacctgtatccaccatcacagtgtcaggccagagcagtnttcntacgcctatagtcccagctactcgggaggntgaggcaggagaatggcgtgaacccgggaggcggagcttgcagtgagccgngatcgcgccactgcactccggcctgggngaaagagcgagactccgtatcaaaaaaaaaanaaaaaaa

SEQ ID NO: 747 - DNA, 1832 bp, Homo sapiens
ccacgcgtccgagaccagcctggtcaacctagcgagaccctatatctatgtgtatttaaaaattaagaattttgtaaaataataaaaataatagaatccaggctgcccatctttgtagtttagagatggtaggttcttctaaggggtagtaattggcctttgaaagttcacattcataacttctttcttaagttgggtggagagagggaagccaatggcgtttttttttttttggtttttttgttttttttaaacatcaaagtgcactgtcagagtgccgagtcctgattggtggaatgatgatggtatgatttgattctcccaaatcatctttgaaaaactgtgaaacatacaataagcttattccttgcctaattaccggttgctgggtcccagggggttgctggaacacggagactaatcagatgattcttgtctttaaggagcatgtggaagaggggacagatgaataccccatcttcctgctctccatcagtccgccctggtgtgatgtgcctaagcagttccgagtaatcttctggaaaaaataaataggcaactgcgatgagtttgtgcaaggatcctaatggaatgaataataataacacaccactgacagcgaacgctgagtggtcactggtgctaggaccatgcaagggttccctacatgtactttagggtagaaagaggccaagaggaaagtctattaggtcagatctgtgactctgaatagccatccaccattgagctcagaaccctcagggacctggccgatggcaggctgcatgctgctgcaccatgagtcagcaccagactgggagacgcagccactcagggatccaagggactcaaacatctgcaacctggccccaggccaagagaccaaactgcaggctccggatttgcggccctgtaggataggctcaaaatgaaacatgtttgttatttctaagtggatgggaactgaaagaacccgaacaatcagtgtacaaggattcatgaatggaccaaacatgcttgctttttgttcttgaaagatgtttgttgtatttaatatataacgagaagagtggtcaacgctgactgggtgctgagcactttaagtgcattacctgggtggctggctgggctgtgccagggttgaagggtgtggggagcttctttcaaggtgccccttctgcctcctggcacaggactctggctccagcacaccccaagctgaccctggtgggggtagggcccctcacccaaacctggcctctcccgtctcttgttctgctgcctcagctttctcctgtctgtggtagagtctgcttggacagactctgggcagggcagggggcagggcaagctggagagagaattcgttctaggttgatgtgggatgatagtggctggtagggcgcttgtatcctattggaaatccatgatgagatcccattcattcccacccttctcttaacaatgtctccttaagtccaagtctcaagtcgggtgcccagtttcataccatccttcctctccctctcacaaccttcgggcaggaccaaccccctcagaggaacccctgctgccccagccctttcaggctctgtgcccaggatctcccctccactccctggaaattccacatttggccaggtgtggtggtgcacacccttgttcccagctactcaaaaggttgaggtggaggtcgaggctgcagtgagctgtgatctcactactgcactccagcctgtgcaagagagtgagaccccgtctctaaataataataataataataataataataataataataaatttaaagaaaaagaaaaaaaaaaaaaaaa

SEQ ID NO: 748 - DNA, 1247 bp, Homo sapiens
ccacgcgtccgggcagatgccatccaggatgtacaaggtgcagccaaggcaggccatgcaggggccgggcctgtctgcagctggtggatgcctgtgggcatggctttctctggggaccccattcctgtcagtagcaaccctggcagtgtccggagcggctctagacaactttggtcataggaactctggaggtgggttctggtcatctgaggtggctactcaacaggtttgaggccccacagcaacagaagtccaggacccactaggttgcctcagaagccctaagactgatgagctggagcgcgcatttgagagaagcctcgcacccactgtgtactggccccgctcaggccggcctggcacaccgttgcctgctggcggctctcatggggaagcgcctgggcactggggattgcttgtggcccactcaactcttggggcagtggcccgtaaccctagtttgcctgaggcccttatgtccccttatgttcctggtactggagcttgagctcttgcctggaacgctgcagctgcacccaccctgcttgatcccacctgggaggccaggacactgaggagctctgaacccagcccacagggaagcagaggaaggtgagcccccgccgccccccagcccttcccatcccttccctgctccctggtggtctaaggacccaagctccctagacttcctcttccaccgtctgtacgtttcaaattacactggtgtaggcctgtactgctggtggggctgggcccctaaacgccagaaagtgaatcttaagaagctctgccctaaactgagaaccacatgctgagggaagggctgaaaggtgaaggctcagcctccctcacatgggtcctgggttacattaggtaccgggctgattgataggcatttggccatggttccttttcgtctacctttgggggccttctcaggcccagaacaaggctgttgttactatgtggaaaagctgaccagtgctgcacactaggggcacacacctttccatgagcagctcctgccctgtggcgacagccagcgtgcacccagacgctggtgccatggcgaagcaggcgttcaagaccatggagaagccaactcctcatttagaaaatgaggccccctcagtgccaaacccccctttttataccaatcagtatcctctgttcattaaaactggcttccaaaaaaaaaaaaaaaaaaaaaaaaaaaaaaaaaaaaaaaaaaaaaaaaaaaaaaa

SEQ ID NO: 749 - DNA, 621 bp, Homo sapiens
  misc_feature (32)..(32): n equals a,t,g, or c
  misc_feature (54)..(54): n equals a,t,g, or c
  misc_feature (451)..(451): n equals a,t,g, or c
agcagagaccagcaatgagccctctatatggnactgttccttggggtgttcagncagctacctgtggcaggttgattacattggaccacttcattatggaagggacaggatttgwtcttactggaatattcttactcaggatatggatttgcctttcctacatgcaattcttctgccaagagtaccatccatggacttgcagaactgccttgtcgactgccatggtattacacatagcattgcttttgaccaaggaactyactctacagacagaaatgcggcaatgcattcgtgatcatggcgttcactgktcttaccatgctccccttgatcctgaagcagctggcttgagagaacaatagaatggctatttgaagtcataattacaatgccaaccaggtgacaatactttgcagggctagggaaaagttccccagaaggctgtatatgntctgaatcagcatctagtatatggtactgtttctcccataggtaggattcataggtccaggaatcaatgggtgaaagtagaagggacaccactcaccattacccctagtgagccactagcaacatttttgcttcatattcccatgacattatgttctgctggcttagagc

SEQ ID NO: 750 - DNA, 866 bp, Homo sapiens
ccacgcgtccgcggacgcgtgggttggaagcgaacaggccgcccgccttctgggcagcccctgcttacggcgcctctaccatgcctggctggcagcagtggtcatctttgggccgcttctgcagttccatgtcaaccctcggactatcttcgccagccacggcaacttcttcaacataaaatttgtgaattcagcctggggctggacatgcactttcttagggggctttgtgttgctggtggtgttcctggctacacggcgcgtggcagtaactgccagacacctgagccgactggtagtaggggcagccgtgtggcggggagccggccgggccttcctgctcatcgaggacctgactggctcctgcttcgagccactgccccagggtctgctgctccacgagctgcctgaccgccgcagctgcctggcagccggcaccagtggcgaggctacaccgtctcctccacaccttcctgctcaccttttgctgcctgctcatggcagaggaagcagctgtgttcgccaagtacctggcccatgggcttcctgccggcgccccactgcgccttgtcttcctgctgaacgtgctgctgctgggcctctggaacttctgctgctctgtaccgtcatctatttccaccagtacactcacaaggtggtgggcgccgcagtgggcacctttgcctggtacctcacctatggcagctggtatcatcagccctggtctccagggagcccaggccatgggctcttcccccgtccccactccagccgcaagcataactgaaagaaataaaaaccatcgggcctgaaaaaaaaaaaaaaaaaaaaaaaaaaaaaaaaaaaaaaaaaaaaaaaaaaaaaaa

SEQ ID NO: 751 - DNA, 3057 bp, Homo sapiens
  misc_feature (712)..(712): n equals a,t,g, or c
  misc_feature (1252)..(1252): n equals a,t,g, or c
  misc_feature (1453)..(1453): n equals a,t,g, or c
  misc_feature (3041)..(3041): n equals a,t,g, or c
  misc_feature (3048)..(3048): n equals a,t,g, or c
gaacagtggaactcacactcctgggcttctagaagatctaagtaagaatggtaggctccctgagattaaacttcctgtcaacggttgcagtgacctggaggatagcttcaccatcttgcagagaaagacctcaaacaagaacctctcgatgaccctacttgsatagacacatcagaaacatctctttcaaatcagaacaagctgttctcagacattaatctgaatgatcaggagtggcaagaattaatagatgaattggccaacacggttcctgaggatgacatacaggacctgttcaacgaagactttgaagagaagaaggagccagaattctcgcagccagcaactgagacccctctctcccaggagagtgcgagcgtgaagagcgacccctctcactctcccttcgcacatgtctccatgggatctccccaggcgaggccttcttcttctggtcctcccttttctactgtctccacggccactagtttaccttctgttgccagcactcccgcagctccaaamcctgcaagctcaccagcaaactgtgctgtccagtcccctcaaactccaaaccaagcccacactccaggccaagctccacctcggcctggaaatggttatctcctgaatccggcagcagtgacagtggccggttcagcgtcagggcctgtggctgtgcccagctctgacatgtctccagcagracagntcaaacagatggctgcacagcagcaacaaagggccaaactcatgcagcagaagcagcaacagcaacagcagcagcagcagcagcagcagcarcagcagcagcagcagcagcaacagcactcaaatcagacttcaaattggtctcccttaggacctccctctagtccatatggagcagcttttactgcagaaaaaccaaatagcccaatgatgtacccccaagcctttaacaaccaaaaccctatagtgcctccaatggcaaacaacctgcagaagacaacaatgaataactacctccctcagaatcacatgaatatgatcaatcagcagccaaataacttgggtacaaactccttaaacaaacagcacaatattctgacttatggcaacactaaacccctgacccacttcaatgcagacctgagtcagaggatgacaccaccagtggccaaccccaacaaaaaccccttgatgccatatatccagcagcagcaacagcagcagcaacagcaacagcagcagcagcagcagcagcagccgncaccttcacagctycaggcccccarggcacacctgagcgaagaccagaaacgcctgcttytyatgaagcagaaaggagtgatgaatcarcccatggcttacgctgcactttcattccacggtcaggagcagcatycagttggacttycccgawccacakgscccatgcagtcytccgtgcccccaggctcargtggcatgnkctcaggagccagtcccgcaggccccggcttcytggscagccagccccaagcagccatcatgaagcagatgctcattgatcagcgggcccagttgatagagcagcagaagcamcagttcctgcgggagcaaaggcagcagcagcagcagcagcagcagattttggcggaacagcagttgcagcaatcacatctaccccggcagcacctccagccacagcggaatccatacccagtgcagcaggtcaatcagtttcaaggttctccccaggatatagcagccgtaagaagccaagcagccctccagagcatgcgaacgtcacggctgatggcacagaacgcaggcatgatgggaataggaccctcccagaaccctgggacgatggccaccgcagctgcgcagtcggagatgggactggccccttatagcaccacgcctaccagccaaccaggaatgtacaatatgagcacaggcatgacccaaatgttgcagcatccaaaccaaagtggcatgagcatcacacataaccaagcccagggaccgaggcaacctgcctctgggcagggggttggaatggtgagtggctttggtcagagcatgctggtgaactcagccattacccagcaacatccacagatgaaagggccagtaggccaggccttgcctaggccccaagcccctccaaggctgcagagccttatgggaacagtccagcaaggagcacaaagctggcaacagaggagcttgcagggcatgcytgggaggactagtggagaattgggaccattcaacaatggcgccagctaccctcttcaagctgggcagccgagactgaccaagcagcacttcccacagggactgagccagtcagtcgtggatgctaacacgggcacagtgaggaccctcaacccagctgccatgggtcggcagatgatgccatcgctcccggggcagcaaggcaccagccaggcgaggccaatggtcatgtctggcctgagccagggagtcccaggcatgccagcgttcagccagcacccagcacagcagcagatacccagtggcagctttgctccaagcagccagagccaagcctatgagcggaatgcccctcaggacgtgtcatacaattacagtggcgacggagctgggggttccttccctggcctcccggacggtgcagaccttgtggactccatcatcaaaggcgggccaggggacgagtggatgcaggagcttgatgaattgtttggtaacccctaatcaagagaggccccaagatccacaactcgagtggttaaagcttaaaaagtgaaaaagaaacaggatgttgacccatccttgttttttgtttttttgacccacgtaaactgagcaaaactgcagctggctgacaatggaagatccaggtgccaatccacagccccaccaggcctcatttcacctgattttcacacagcaatcgagatgagacgccatgcagatcccggctgcgagagagggagacacccggaggagcaggtgggaagatgaagccggccagagcccctctgccagcatgccctgtgatcgcctggcccagcaggaactgnttcaccnaaaaggact

SEQ ID NO: 752 - DNA, 5279 bp, Homo sapiens
  misc_feature (1371)..(1371): n equals a,t,g, or c
gcggccgccgagcgtcgagctcagcgcggcggtagcggcggcggcccaggcagccaacgatggcggcggcggcggcggcgggcgcgggcsckgagatggtccgcgggcaggtgttcgacgtgkggccgcgctacaccaacctctcgtacatcggckakggcsctacggatggtgtgctctgcttatgataatgtcaacaaagttcgagtagctatcaagaaaatcagcccctttgagcaccagacctactgccagagaaccctgagggagataaaaatcttactgcgcttcagacatgagaacatcattggaatcaatgacattattcgagcaccaaccatcgagcaaatgaaagatgtatatatagtacaggacctcatggaaacagatctttacaagctcttgaagacacaacacctcagcaatgaccatatctgctattttctctaccagatcctcagagggttaaaatatatccattcagctaacgttctgcaccgtgacctcaagccttccaacctgctgctcaacaccacctgtgatctcaagatctgtgactttggcctggcccgtgttgcagatccagaccatgatcacacagggttcctgacagaatatgtggccacacgttggtacagggctccagaaattatgttgaattccaagggctacaccaagtccattgatatttggtctgtaggctgcattctggcagaaatgctttctaacaggcccatctttccagggaagcattatcttgaccagctgaaccacattttgggtattcttggatccccatcacaagaagacctgaattgtataataaatttaaaagctaggaactatttgctttctcttccacacaaaaataaggtgccatggaacaggctgttcccaaatgctgactccaaagctctggacttattggacaaaatgttgacattcaacccacacaagaggattgaagtagaacaggctctggcccacccatatctggagcagtattacgacccgagtgacgagcccatcgccgaagcaccattcaagttcgacatggaattggatgacttgcctaaggaaaagctcaaagaactaatttttgaagagactgctagattccagccaggatacagatcttaaatttgtcaggacaagggctcagaggactggacgtgctcagacatcggtgttcttcttcccagttcttgacccctggtcctgtctccagcccgtcttggcttatccactttgactcctttgagccgtttggaggggcggtttctggtagttgtggcttttatgctttcaaagaatttcttcagtccagagaattcctcctggcagccctgtgtgtgtcacccattggtgmcntgcggcagtatgtacttcagtgcacctactgcttactgttgctttagtcactaattgctttctggtttgaaagatgcagtggttcctccctctcctgaatccttttctacatgatgccctgctgaccatgcagccgcaccagagagagattcttccccaattggctctagtcactggcatctcactttatgatagggaaggctactacctagggcactttaagtcagtgacagccccttatttgcacttcaccttttgaccataactgtttccccagagcaggagcttgtggaaataccttggctgatgttgcagcctgcagcaagtgcttccgtctccggaatccttggggagcacttgtccacgtcttttctcatatcatggtagtcactaacatatataaggtatgtgctattggcccagcttttagaaaatgcagtcatttttctaaataaaaaggaagtactgcacccagcagtgtcactctgtagttactgtggtcacttgtaccatatagaggtgtaacacttgtcaagaagcgttatgtgcagtacttaatgtttgtaagacttacaaaaaaagatttaaagtggcagcttcactcgacatttggtgagagaagtacaaaggttgcagtgctgagctgtgggcggtttctggggatgtcccagggtggaactccacatgctggtgcatatacgcccttgagctacttcaaatgtgggtgtttcagtaaccacgttccatgcctgaggatttagcagagaggaacactgcgtctttaaatgagaaagtatacaattctttttccttctacagcatgtcagcatctcaagttcatttttcaacctacagtataacaatttgtaataaagcctccaggagctcatgacgtgaagcactgttctgtcctcaagtactcaaatatttctgatactgctgagtcagactgtcagaaaaagctagcactaactcgtgtttggagctctatccatattttactgatctctttaagtatttgttcctgccactgtgtactgtggagttgactcggtgttctgtcccagtgcggtgcctcctcttgacttccccactgctctctgtggtgagaaatttgccttgttcaataattactgtaccctcgcatgactgttacagctttctgtgcagagatgactgtccaagtgccacatgcctacgattgaaatgaaaactctattgttacctctgagttgtgttccacggaaaatgctatccagcagatcatttaggaaaaataattctatttttagcttttcatttctcagctgtccttttttcttgtttgatttttgacagcaatggagaatgggttatataaagactgcctgctaatatgaacagaaatgcatttgtaattcatgaaaataaatgtacatcttctatcttcacattcatgttaagattcagtgttgctttcctctggatcagcgtgtctgaatggacagtcaggttcaggttgtgctgaacacagaaatgctcacaggcctcactttgccgcccaggcactggcccagcacttggatttacataagatgagttagaaaggtacttctgtagggtcctttttacctctgctcggcagagaatcgatgctgtcatgttcctttattcacaatcttaggtctcaaatattctgtcaaaccctaacaaagaagccccgacatctcaggttggattccctggttctctctaaagagggcctgcccttgtgccccagaggtgctgctgggcacagccaagagttgggaagggccgccccacagtacgcagtcctcaccacccagcccagggtgctcacrctcaccactcctgtggctgaggaaggatagctggctcatcctcggaaaacagacccacatctctattcttgccctgaaatacgcgcttttcacttgcgtgctcagagctgccgtctgaaggtccacacagcattgacgggacacagaaatgtgactgttaccggataacactgattagtcagttttcatttataaaaaagcattgacagttttattactcttgtttctttttaaatggaaagttactattataaggttaatttgsagtcctcttctaaatagaaaaccatatccttggctactaacatctggagactgtgagctccttcccattccccttcctggtactgtggagtcagattggcatgaaaccactaacttcattctagaatcattgtagccataagttgtgtgctttttattaatcatgccaaacataatgtaactgggcagagaatggtcctaaccaaggtacctatgaaaagcgctactatcatgtgtagtagatgcatcattttggctcttcttacatttgtaaaaatgtacagattaggtcatcttaattcatattagtgacacggaacagcacctccactatttgtatgttcaaataagctttcagactaatagcttttttggtgtctaaaatgtaagcaaaaaattcctgctgaaacattccagtcctttcatttagtataaaagaaatactgaacaagccagtgggatggaattgaaagaactaatcatgaggactctgtcctgacacaggtcctcaaagctagcagagatacgcagacattgtggcatctgggtagaagaatactgtattgtgtgtgcagtgccagtgtgtggtgtgtgcacactcattccttctgctcttgggcacaggcagtgggtgtagaggtaaccagtagctttgagaagctacatgtagctcaccagtggttttctctaaggaatcacaaaggtaaactacccaaccacatgccacgtaatatttcagccattcagaggaaactgttttctctttatttgcttatatgttaatatggtttttaaattggtaacttttatatagtatggtaacagtatgttaatacacacatacataygcacacatgctttgggtccttccataatacttttatatttgtaaatcaatgttttggagcaatcccaagtttaagggaaatatttttgtaaatgtaatggttttgaaaatctgagcaatccttttgcttatacatttttaaagcatttgtgctttaaaattgttatgctggtgtttgaaacatgatactcctgtggtgcagatgagaagctataacagtgaatatgtggtttctcttacgtcatccaccttgacatgatgggtcagaaacaaatggaaatccagagcaagtcctccagggttgcaccaggtttacctaaagcttgttgccttttcttgtgctgtttatscgtgtagagcactcaagaaagttctgaaactgctttgtatctgctttgtactgttggtgccttcttggtattgtaccccaaaattctgcatagattatttagtataatggtaagttaaaaaatgttaaaggaagattttattaagaatctgaatgtttattcattatattgttacaatttaacattaacatttatttgtggtatttgtgatttggttaatctgtataaaaattgtaagtagaaaggtttatatttcatcttaattcttttgatgttgtaaacgtactttttaaaagatggattatttgaatgtttatggcacctgacttgtaaaaaaaaaaaactacaaaaaaatccttagaatcattaaattgtgtccctgtattaccaaaataacacagcaccgtgcatgtatagtttaattgcagtttcatctgtgaaaacgtgaaattgtctagtccttcgttatgttccccagatgtcttccagatttgctctgcatgtggtaacttgtgttagggctgtgagctgttcctcgagttgaatggggatgtcagtgctcctagggttctccagggkgggttcttcagaccttcacctgtgggg

SEQ ID NO: 753 - DNA, 931 bp, Homo sapiens
  misc_feature (234)..(234): n equals a,t,g, or c
  misc_feature (490)..(490): n equals a,t,g, or c
  misc_feature (906)..(906): n equals a,t,g, or c
gaattcggcacgagaaatactccagtaaaatgaattaaattagcatgttaataagagtgataatatttaaaagttttagtcaatcttgcatttccatacttgcattatctaaactagttgaacttttcagtgttttacttgatatattgcattcttgagcattaggcttctaggtgatttgttaaactcatagcaggttttagtacacagtgctgtttatgacagaaaaaattntatcctacctctggaaataattgtactttctgtggatcagataaaaacttatagaaactccctaatggaaaatattggaagcataaccagaaaaggagtcagctttttgtttccaaggagcaacagggaaaacctttaactacttataatcccgtatagtcaccatcaccacgagtattggaaaatctgttttctcttttactaagtgtctgccggtcacttatgtatmcccaaagccagaaagwtatttttatcncgggaaattccagaaaggaaacattttgtgtaatatkgattcatttctgtctcaccaaagatgtgttttccmcgtagcaaagaacatcagccccacgttatrgggamcaagcgagtcccmaatcgtaccatctgctgagcctgagaaaggatatggacaagtcagtcagcattcacaattaagagaaaaacatctgtgctttggaaaatgttcttcaaggatagagaattgtgccctatgtccaccaaatttgcatgagatctttataagattagacagccagtggataaggccccttatctttcttcatggatggctgaggaaattctccgccttccctgacatcagctgcataactgtatttctgcctcgtggaaataaagtagatgatcaggcaaaaaaaaaaaaaaaaaaanaaaaaaaaaaaaaaaaaaaactcga

SEQ ID NO: 754 - DNA, 1162 bp, Homo sapiens
ggcacgaggaaaagtaaaaggcccccatgaatggacattaagatacttccgatgtgttttgttttctattgctgcagtatttgttactgtacttgtgatggtacatgtgcatatattgctctaaaacaaatttctagaagttgaattccaaacagtgactgttccagatgtcttattttttaggaccccaagcctcttaaattcaggtctttccgttattcccttaccttctcccttatcccttcaaatctttgcccactgccatcacattaatgccttctttgaccttattttatctgttatagtaatgagctgccctgttctttctatctttaatctccccactccaccttgtccttattatctcagctagtttaattcttaaaagtgagtatattaatccttggaatctttcttttttatatatatataagactgatatttcagttagtagcttctgattataacttcccaaattgaggctttcatttccttagaacaaggaactgccctggctgggcagtttagtcaaaggcttgtcagggtgtttagtagacagttgtgcaagtggagctattcacagggactgtattactatgttcctttgttactaaaaaaaaattcttgcagtccctgtagttcgcaacagatactctgactcatatttctctacataggagaaagagtatggactttggagtgatacatctatagctcggttaggatctagactctgctcccaaactggtagtgtattttggggtgcactgctatgtttctgagccttcatttcttccttataaagagtttattagtttgtagccaggcgcagtggctcaccctgtaattccagcactttgggaggctgaggttggtggatcacctgaggtcaggagttcaagaccagcctggccaacagggtgaaaccccgtttctgctggaattacaaaaattagccggacgtagtggcacatgtttgtaatcccaactactcaggaggctgaggtgagagaatcgcttgaatccaggaggcggaggttgcagtgagctgaaattgtaccactgcactccagcctaggcgacagagtgagactccgtgtcaaataaaaataaaaaaaaaacaaaaaaaaaaaaaaaaaaaaaaaaaaaaaaaaaaaaaaaa

SEQ ID NO: 755 - DNA, 807 bp, Homo sapiens
ggcacgagggtgaaatccctgtcttaatcaatcaatcaataaacaaacaaatacacatactacaataaatgtacttatttatcttgttatacttgtgcttttattttagcagttctgaaaatggcttccttgtaagcgaagtctatctatatttaaaattttaatagatattagtaggtaaaaacatttttaaaaacttgattactaataaaaatttaaaatgctacaccaatttatatttctaccaataatttatagtaatgtggtgcatcctatcttaccaggagtggatgctgccagtcattaaatttttgccatcctgggccaaaaatgatatctaattttgtttcctttctatgaaaattggtattcagacatattccaatgtttgtagctatttacaatgcattcttgctgtattggccattcatatcttttttattattaattgttttctttttaaaatcagttcataaggcttttcaaaaattcttacagaggctggggatggtggcttgcacctgtaatcccagtgctttgggaggccaaggtgggagaattgcttgagcacaggaattcgattgtagcctgggcaagatggcaagacccctgtctttacaaaacattaaaaaatcagcatggcatcatggtgtgtgtctttagtcccagctacttcagaggctgaggccacagtatcccttgagtccagtagttcgaggtggcagtgagctatgatcctgccactgcacttcagcctaggtgacaaaatgagaccctgtctctaaaaaaaaaaaaaaaaaactcgag

SEQ ID NO: 756 - DNA, 2284 bp, Homo sapiens
ggtttgacaaataaattgcaaggaaaaaaaaccaacaacagatggacagaatacctgtgggttaaaagaaacttaacttatcgcttaattcattgcaatatgtggcccttactatttgcaatatgtgtatctgttgcatacggtctgtcctgtatccgataggctggaacagtggaacaaacaaaacatacacgtatcttttaccttcttgataaaattgtttagtgattcctaaagctcagatgcagtattgtcacctgatgattaaacagacacatcagcaatagcaaaaacagagtccagggctcagcctcaggactgctgattctgaacttgacggggtgaaagtgtagcacaggagtctgcattaaaaacaaaaatctggcctcatagctactgtgttggttgttgcttctaggccttttcagtgggcagaataagaactttattgttttcaaaagatgtaactgtaagtggaacaatatcctccgatcctcctttttccttttttgataacgacacagcattcctctgtgtggatataccgtgtgtcttaggccatttgggctgctattttgtatcttagactgggtaacttataaacaacaaacatttatttcttacagtactagaggctgggaagtccaagatcaaggcattggcagatttggggtctggcgaggacttgctgtctgcttcatagatggtgccacctagctgtgtccccacaaggcggaaaggggcaaacaagttccctcaggccactcttacggggcattaatccctgacttaatcacctcctaaaaagggtgtcctcttgacactatcacattatggattagggttcaacctatgaattacgtaggcacagacacattcagatcctggcactacatgtaggatattcagttagcccctggttgaggggcgtttgtgttgatactggttttctgctattacacataaccctttaatgaattgccttacgcatgcatgtttttgagtgttcgtcagtctctctttggaatagactcccagaagtggaattgctgagtcaaagggtaaatgcatacggaattttgattgatacggccatttcccatccatgggggttttactgttttatattcccgccagcagtgaatgagtacccttttttccccaacagagtattttgtcaaatttttcaatttttgcaggcttatagatgagaagtgatattatctcactgtacttctaattgcatttctctcttttcatgtggttaagagccatttgtattttctgtgaactatttaacctatttttctatagaatttttggtctttttcaaccattttcagctctttgtatactaggactattaaccctttgtaatgtttgttgtacatatttttcccaatttgtcatttatcttttcacttggtttctgcaaagatttactttatttctgtgttaaatgtgttgattttttcttattgcttctggattttagagtcataggaaggttttcttcattcccagcttttacaggaatttatcgtgtttttttcaggcagacttttatagtttctgtttttacatttaaatctctctatccatttggagtttttcctggtatagatgtgaagtatggctccagattgtctttttccacatgctatccagttaccatttcatgcttttcaaacgccatcctgcatggaaggtggacaggaattacctttcatttagagatgagaagatgggaacctagaaggagatgtgagcagcccaaggtcaccagctcacgtggagcagtgctagggcttgagcagagctctgctgctgattctgggcttctgtgaagagtgattcatgctcagtgagcctgtaaatatgatcttacctgaacaagagagtttttctcatgacccacgaggaaacacttccttgttactcacagtagagacctggttagaaagtgctggagagggctaggtgtggtggctcacgcctgtaatcccagcattttaggaggctgaggtgggcagatcatttgaggtcaggagttcgagaccagcctgggcaatgtggtgaaagtgaaaccccatctctgctaacaatacaaacattagccaggcgtggtagcacgcacctataatcccagctactcgagaggctgtggcaggagaattgtgagcctgggatgcagagtttgtagtgagctaagatagccccagtgcactccagcctgggcgacggagcaagactgtctcaaaaaaaaaaaaaaaaaaaaaaaaaa

SEQ ID NO: 757 - DNA, 4043 bp, Homo sapiens
cgaacagacagacttgaggtatgtcgagagtaccaacgtggcaattgcaaccgaggagaaaatgattgtcggtttgctcatcctgctgacagcacaatgattgacaccaatgacaacacagtcactgtgtgtatggattacatcaaagggagatgctctcgggaaaagtgcaaatactttcatccccctgcacatttgcaagccaagatcaaggctgcccaataccaggtcaaccaggctgcagctgcacaggctgcagccaccgcagctgccatgggaattcctcaagctgtacttcccccattaccaaagaggcctgctcttgaaaaaaccaacggtgccaccgcagtctttaacactggtattttccaataccaacaggctctagccaacatgcagttacaacagcatacagcatttctcccaccaggctcaatattgtgcatgacacccgctacaagtgttgttcccatggtgcacggtgctacgccagccactgtgtccgcagcaacaacatctgccacaagtgttcccttcgctgcaacagccacagccaaccagatacccataatatctgccgaacatctgactagccacaagtatgttacccagatgtagaattttcatcactaaacaatcatgctaaagaggaaaggacagtgtgcttggttagagtaaaggacgaggtcattagccatattgtatatatcgtcaagcaacacacacaaaagttcctcagccacaagacatccacatattgcatgttaaccagaagaaaagacaacattttccggaaatccactgcacactgttgcctatacactttgtacatttaattgatatttgtgctgaggtgatattcctgtctaaaagaacaacattgtctttcttttctagcacagagttatgcattcaaagatgcatacctagttagtttccyatatattcatgccatcttgaaaagacagactatggtgtaaccatgattctattatgtattggtacgtctgtagaccaagatataattttttaaaaataagtttatttctttcaaggtttacaaataacaaaggtgcaccttgtatttaaaattgccattatagatgagagcgtgcatgcacagtcatttttgtttaagagtaatatttttaatgtaatagattgtaagacgtggtgagggagggatctgacagagatgaatgtgccaagcaaaaccacaactgtgtatattttaaagcacatcatggctttaagtaccatgttgttaaggattctcatgaagtgccatagactgtacatcaaattagagtattatttcttcagtgttattgttttcagagccacattttgttgcatatttgctagtactaatcagtcaaagggcaccattctttttttttttttttgaaaccaaagctgtctcagaaatggccaatttaactttacagtaacaatagacagcacaacacaaactctctcaatacagataaactcacacatactggagatatatatataatagatatatataaaattattttaatgcattgtagtgtaatatttatgcatactatactgtataacatgttattcaaaagggattgccatttctgagacacagtaacaaaaaaatgaggaaattattttgcttctatttatagcctctgtcaaaagtcaaaagactataaatgctttgcaaaaatggtttcacgtttgcttaaatgcttcatcacagtcacattcaaaatagtgactctaaacaaagaagaaagcagcactgtcatcagatgcatgataaaccaaaatatgaaaatgggaaatgtttaattaacctagtaattgggtgggttaagtacatgggtgaattttatatgtgatttttgttttgttttgttttgttcagattaactgcttatagccttagaaagccttttacaaaattaaaaaaaaaatagatgtgcattcagtttttaagaatggaatcatccaaaggaattcctttttttgaggtttggatgttgcagctagtaaaggatatttttgctctgttcagcagttctaaaaattgctgaagtaggggccaggtcactggtagttatagtatggaatgggagaagtgaaagttcagttatagaactttccatacttccaagtttactgcaagtttttatgcttgagagagatgctttctaatataagactgatgtgttgattttactgattgtactgtacatctattaaagccttagattattacattacgggttggaacccataccaatgtaatttcaatcgtgttaagaaagtaatggtgacttcacatgttattgtagttagttacattatagaatattacttatttttcttgttaaaatgtagtttttcatttcctacatttattagattttcattttctattaacaattgaataccatttcagtttatagacttgttttattagattttaccaatgaatttttcaaaatacaaaaaaaagtagtttttccttcataacatactcagttttgaattacatgtagtgtcacatgaatattcgtattgttaactaaatgatttatattttactgatttaatattacagtgtaagaatgtcagtcattgttagttcttgtctagttttcattaaaagaacaaagatcttttatatggatatcttataaatatataatcattgctaagtaagaagttaagttgttgctatcgcaacaatcctggcagacaattgagtaatattttgatgatttattttgtttgtaattagttattataagaagatctagatcctagatattagaataaaatttattttctactgtatccatttcaaatgttaaaatattgtttaatatttttgaaatccctgagtatcaggccttgttataaataagctgcataatcaataaatagaacaagggactttttgttgataatccaaatactcaaagtttacgtaatgaaaattatagcgtgtgtgcaaactcttgagggttgattatgctgcaatttagcatgttggaacgtctagggagaaggttgactttttgcacttctgtatatagtcaaaagagagaaacctgtataatagtaagatcttattttgaataaaaacgtctataattacaaggagttttgttaaggctaatacaatgacagactgagcaaaattgcttgcaaaagtggcacagagttagcactccataccccttcaaacatgttgctttgctttcttgtggacagcttgtagtttgccaggattttttcagctggaaagatacgccatcctttcaaaccctcatgactgacaaaaactccatggggccaaatctgcctgaagatcattaccaaaaatagcaggtacttctaccattaaggtgaaatcatggatcagatattccttacatttttcaaaactactgcatgtttaaaacttcaacaaaaaaagagagaaagaactatactaagaacatatattattcagatcagtttctgccaatttcagtggtttattgttcacaaaaaaatcttcaaaacaagtattgactttcacaaaatttaaatcataaacaggcaaaccaaacagcacactgtagctatagttgttatgtgattgttttttaattgctgtaggatcctgttctttcagcaggtgaaaaataaaacgcagttcaaatttcatggttttaattttcaactcagaagcactcaaaaatgcaaaatgtgataatgggcacttgtttaaaagaattagtgtatccagccttcactccagctggttaaaaatgttgcacttatcagcaaccctaccactttcatctgctgaaaggacaaatgtgcttggttttactattatgtaatcacaacttactttctgcttgtagttgcttaaaattatgtattttgtcttgggctgcaatttgttttatgcttattttattattactgcagtagttgaccttgctgtatggaaaaataaagtgaaattgccctaataaaacttctctttcttaagtaaaaaaagggaa

SEQ ID NO: 758 - DNA, 4044 bp, Homo sapiens
cgaacagacagacttgaggtatgtcgagagtaccaacgtggcaattgcaaccgaggagaaaatgattgtcggtttgctcatcctgctgacagcacaatgattgacaccaatgacaacacagtcactgtgtgtatggattacatcaaagggagatgctctcgggaaaagtgcaaatactttcatccccctgcacatttgcaagccaagatcaaggctgcccaataccaggtcaaccaggctgcagctgcacaggctgcagccaccgcagctgccatgggaattcctcaagctgtacttcccccattaccaaagaggcctgctcttgaaaaaaccaacggtgccaccgcagtctttaacactggtattttccaataccaacaggctctagccaacatgcagttacaacagcatacagcatttctcccaccaggctcaatattgtgcatgacacccgctacaagtgttgttcccatggtgcacggtgctacgccagccactgtgtccgcagcaacaacatctgccacaagtgttcccttcgctgcaacagccacagccaaccagatacccataatatctgccgaacatctgactagccacaagtatgttacccagatgtagaattttcatcactaaacaatcatgctaaagaggaaaggacagtgtgcttggttagagtaaaggacgaggtcattagccatattgtatatatcgtcaagcaacacacacaaaagttcctcagccacaagacatccacatattgcatgttaaccagaagaaaagacaacattttccggaaatccactgcacactgttgcctatacactttgtacatttaattgatatttgtgctgaggtgatattcctgtctaaaagaacaacattgtctttcttttctagcacagagttatgcattcaaagatgcatacctagttagtttccyatatattcatgccatcttgaaaagacagactatggtgtaaccatgattctattatgtattggtacgtctgtagaccaagatataattttttaaaaataagtttatttctttcaaggtttacaaataacaaaggtgcaccttgtatttaaaattgccattatagatgagagcgtgcatgcacagtcatttttgtttaagagtaatatttttaatgtaatagattgtaagacgtggtgagggagggatctgacagagatgaatgtgccaagcaaaaccacaactgtgtatattttaaagcacatcatggctttaagtaccatgttgttaaggattctcatgaagtgccatagactgtacatcaaattagagtattatttcttcagtgttattgttttcagagccacattttgttgcatatttgctagtactaatcagtcaaagggcaccattctttttttttttttttgaaaccaaagctgtctcagaaatggccaatttaactttacagtaacaatagacagcacaacacaaactctctcaatacagataaactcacacatactggagatatatatataatagatatatataaaattattttaatgcattgtagtgtaatatttatgcatactatactgtataacatgttattcaaaagggattgccatttctgagacacagtaacaaaaaaatgaggaaattattttgcttctatttatagcctctgtcaaaagtcaaaagactataaatgctttgcaaaaatggtttcacgtttgcttaaatgcttcatcacagtcacattcaaaatagtgactctaaacaaagaagaaagcagcactgtcatcagatgcatgataaaccaaaatatgaaaatgggaaatgtttaattaacctagtaattgggtgggttaagtacatgggtgaattttatatgtgatttttgttttgttttgttttgttcagattaactgcttatagccttagaaagccttttacaaaattaaaaaaaaaatagatgtgcattcagtttttaagaatggaatcatccaaaggaattcctttttttgaggtttggatgttgcagctagtaaaggatatttttgctctgttcagcagttctaaaaattgctgaagtaggggccaggtcactggtagttatagtatggaatgggagaagtgaaagttcagttatagaactttccatacttccaagtttactgcaagtttttatgcttgagagagatgctttctaatataagactgatgtgttgattttactgattgtactgtacatctattaaagccttagattattacattacgggttggaacccataccaatgtaatttcaatcgtgttaagaaagtaatggtgacttcacatgttattgtagttagttacattatagaatattacttatttttcttgttaaaatgtagtttttcatttcctacatttattagattttcattttctattaacaattgaataccatttcagtttatagacttgttttattagattttaccaatgaatttttcaaaatacaaaaaaaagtagtttttccttcataacatactcagttttgaattacatgtagtgtcacatgaatattcgtattgttaactaaatgatttatattttactgatttaatattacagtgtaagaatgtcagtcattgttagttcttgtctagttttcattaaaagaacaaagatcttttatatggatatcttataaatatataatcattgctaagtaagaagttaagttgttgctatcgcaacaatcctggcagacaattgagtaatattttgatgatttattttgtttgtaattagttattataagaagatctagatcctagatattagaataaaatttattttctactgtatccatttcaaatgttaaaatattgtttaatatttttgaaatccctgagtatcaggccttgttataaataagctgcataatcaataaatagaacaagggactttttgttgataatccaaatactcaaagtttacgtaatgaaaattatagcgtgtgtgcaaactcttgagggttgattatgctgcaatttagcatgttggaacgtctagggagaaggttgactttttgcacttctgtatatagtcaaaagagagaaacctgtataatagtaagatcttattttgaataaaaacgtctataattacaaggagttttgttaaggctaatacaatgacagactgagcaaaattgcttgcaaaagtggcacagagttagcactccataccccttcaaacatgttgctttgctttcttgtggacagcttgtagtttgccaggattttttcagctggaaagatacgccatcctttcaaaccctcatgactgacaaaaactccatggggccaaatctgcctgaagatcattaccaaaaatagcaggtacttctaccattaaggtgaaatcatggatcagatattccttacatttttcaaaactactgcatgtttaaaacttcaacaaaaaaagagagaaagaactatactaagaacatatattattcagatcagtttctgccaatttcagtggtttattgttcacaaaaaaatcttcaaaacaagtattgactttcacaaaatttaaatcataaacaggcaaaccaaacagcacactgtagctatagttgttatgtgattgttttttaattgctgtaggatcctgttctttcagcaggtgaaaaataaaacgcagttcaaatttcatggttttaattttcaactcagaagcactcaaaaatgcaaaatgtgataatgggcacttgtttaaaagaattagtgtatccagccttcactccagctggttaaaaatgttgcacttatcagcaaccctaccactttgcatctgctgaaaggacaaatgtgcttggktttactattatgtaatcacaacttactttctgcttgtagttgcttaaaattatgtattttgtcttgggctgcaatttgttttatgcttattttattattactgcagtagttgaccttgctgtatggaaaaataaagtgaaattgccctaataaaacttctctttcttaagtaaaaaaagggaa

SEQ ID NO: 759 - DNA, 711 bp, Homo sapiens
gtgagaaaagcagtttgggtgacaaatcctgtgtggcacaagttggatcgcttcctagaaataagcaacacctctcccaaaaagcagcccacaaggcaggggcccagcagcccagccatcactcatctttgaggaaatgagttggtagcctctgtgcactgtttggtggccacatcacaggtgatgtcctgttcacatacctgcttgtatttaaagccctcagtctgtcctgttgtgtggggcgaagtgatggactctgccaggtggacatgctgtgggtggatgttcccggcgtgtgccgggcctgaatggacaggggccacttcacagcatgtcagggaaaatcactgtcacacaattccaatggattttgtgctctttttgaaaaaaaaaaaattctttagcgtaaacatgaattttttttcaatgtagcccctggggaatgaatgaaattttgagcttcttcaatacgtaaaattaaatttataccactgagggagagaccctttctgaaagaagtatggccaaaagcactttaatgctgctgacattgttgtttttatgttcatttgctggagcgcaagacgtgctgacacagtgagttttctctgatgtatttaaggtgatgtatttgcttgagttactcctgtatcattgctcataatattggaaactaaaataaaacctagttggaaaaaaaaaaaaaaaaaa

SEQ ID NO: 760 - DNA, 1113 bp, Homo sapiens
  misc_feature (119)..(119): n equals a,t,g, or c
  misc_feature (121)..(121): n equals a,t,g, or c
  misc_feature (1098)..(1098): n equals a,t,g, or c
aattcggcacgagggaagaccaggcagcccagctgaaggcagtaagctcggctcacagtcgcaggagagttctggggtacacgggcaaaggggcttgagaaggcccggaggcgaagcgnangagaagcaactgtgccccggagaagagaagctcgcccattccagactgggaaccagctttcagtgaagatggcagggccagaactgttgctcgactccaacatccgcctctgggtggtcctacccatcgttatcatcactttcttcgtaggcatgatccgccactacgtgtccatcctgctgcagagcgacaagaagctcacccaggaacaagtatctgacagtcaagtcctaattcgaagcagagtcctcagggaaaatggaaaatacattcccaaacagtctttcttgacacgaaaatattatttcaacaacccagaggatggatttttcaaaaaaactaaacggaaggtagtgccaccttctcctatgactgatcctactatgttgacagacatgatgaaagggaatgtaacaaatgtcctccctatgattcttattggtggatggatcaacatgacattctcaggctttgtcacaaccaaggtcccatttccactgaccctccgttttaagcctatgttacagcaaggaatcgagctactcacattagatgcatcctgggtgagttctgcatcctggtacttcctcaatgtatttgggcttcggagcatttactctctgattctgggccaagataatgccgctgaccaatcacgaatgatgcaggagcagatgacgggagcagccatggccatgcccgcagacacaaacaaagctttcaagacagagtgggaagctttggagctgacggatcaccagtgggcactagatgatgtcgaagaagagctcatggccaaagacctccacttcgaaggcatgttcaaaaaggaattacagacctctattttttgaagaccgagcagggattagctgtgtcaggaacttggagttgcacttaaccttgtaactttgtttggagctggcacctcttgaaataaaaaggaggatgcacgagcaaaaaaaaaaaaaaaaacncgagggggggcccgg

SEQ ID NO: 761 - DNA, 982 bp, Homo sapiens
  misc_feature (970)..(970): n equals a,t,g, or c
agcgccaggctgcctactggtaatctgtgtatagtatataaacatgtaaaaataggttgtattktactctatgtatgatgctaatcaatgaacactttatttattttacagagaaaacttatctgtgaactttactatatatctgtttattttactttattttttttttaaataaaaagggttttaaatgctatgcagtcattagtagaaaattttttaggactctgcctgctctgtaactatcttaatatgatctggcagaaactcgcatgtatccaagtaaagtagtttagctaaagaaaggttcttcattgcttttctgttcacagttgtggctctgttttttaagaatgtaacttgtttttagattatacttgcatctgtgactttactaccagccacgttgacacaaaacaggttctggttcaggtaaagttgcgtcagtcacctgcagcagaaatccctcttcattcctcttctctgtgttcattcctcttctgtgctgttctgaagcttctaccaatactctttccatattgtctttttcagtgaagagaaatgcattcaagattaggtccctcctgtctatccagtttcaggattttatgttgttttatacacagttatttcagtatagaaactggctttattgccaagtgtttttttaaacatgttttaactctcatatgagcaaactgtccaacttcagtttttcataagattaaacttcttacgatcaaatttgtctcttgcaatgatgtgatgagttgccaaataattgagattattttaaaatgttttgttcatattcttgttttataattaaaatttacattcagtgtgtatgggtttttttttttattttgactcttaatgtaaggtggatatttctgtcattttacatggtttcttactgagattttatatataaattataaaatgtttaccaaaaaaaaaaaaaaaaaaaaanaaaaaaaaaaaa

SEQ ID NO: 762 - DNA, 778 bp, Homo sapiens
  misc_feature (445)..(445): n equals a,t,g, or c
  misc_feature (655)..(655): n equals a,t,g, or c
  misc_feature (690)..(690): n equals a,t,g, or c
  misc_feature (699)..(699): n equals a,t,g, or c
  misc_feature (733)..(733): n equals a,t,g, or c
  misc_feature (746)..(746): n equals a,t,g, or c
  misc_feature (771)..(771): n equals a,t,g, or c
gaattcggcacgagtctttatgcactttcctgtttcgttctcaccacagtgatgatctcggtcgtccacgaacgagtacctcctaaggaggtgcagcctccactaccggacacattttttgaccattttaaccgggtgcagtgggccttttctatttgtgaaattaatggcatgatccttgtaggactctggttaattcagtggctgctcttaaaatacaagtaagtcaagtaaaaaaaaaaaaaaaaaactcgagggggggcccggtacccawttcgccctatagtgagtcgtattacaattcactggccgtcgttttacaacgtcgtgactgggaaaaccctggcgttacccaacttaatcgccttgcagcacatccccctttcgccagctggcgtaatagcgaagaggcccgcaccgatcgcccttcccaacagttgcgcanctgaatggcgaatggcaaattgtaagcgttaatattttgttaaaattcgcgttaaatttttgttaaatcagctcattttttaaccaataggccgaaatcggcaaaatcccttataaatcaaaagaatagaccgagatagggttgagtgttgttccagtttggaacaagagtccactattaaagaacgtggactccaacgtcaaagggcgnaaaaccgtctatcagggcgatggcccactacgtgnaaccatcancctaatcaagttttttgggggtcgaggtgccggnaagccctaaatcnggaacctaaaggggagccccccgantttagag

SEQ ID NO: 763 - DNA, 1234 bp, Homo sapiens
gcaaagcctcttctaagaatagctgtgaagggagctggaagctatgagatcagaatgaataataatttttgcatttcacacaaaagccaggtaggaagtaaagcataatgggggcctcttggatgccaggtgtttaacacctgatggcatctaatcctcacaaaaaccttcactggtgccaccatgcccagatgagacatgagagggtctgagaggctgaggaacctgcccgttgtctcaccacaaatgctgacccagccaactgctcaccctggccccccgcccccagcccccaaacccagtcctttctacaacctgctctctctccaaatagcagtagtcagaggctgtgctgaggcctcccagaaacctttcccctatgtggatgtaaccttctcgagacctgcttttggagttcaacctgtgctgaaggggcagagaaaaatcctatgtcatgaggggcacttgagataagcctcataggaggagagaagcttctccctgtgtggaaggaggcagcacacaggccacagagaggcgcagaagggacaactgaggccaagagaggcggaaggtccccagacgggttttctaaaatatctttctctgaatagcatttttacttaaatttgatatgcaaatgcagataattggtattcatgtaaatatttactgcttaaaacagaaagttacttgtaataggccaggcacagtggctcacgcctgtaatcccagcactttgggaggctgaggcaggcagatcacgaggtcaaaagatcgagaccatcctggccaacatggtgaaaccttgtctctactaaaaatacaacaattagctgcctcaggaggctgaggcaggagaatcacttgaaccagggaggcagaggttgcagtgagccgagatcgcaccactgcactccagcctggtgacagagcaagactccatctcgaaaaaagagaaagttacttataatagaaagcctgttcaaatgtggcaagtgcaacgtattcttttggaggctctaaacccaagcctgcaggtccctgatacgtcttctttgccatctagtggtagccattagaactgcatgtgtgggcccggcgccgtggctcacgcctgtaattcccgcattttgaggggccgaggtgggtggatcccttgagcccaggagtttgagacagcctggacaacatggcaaagcctgtcaaaaaataaaaaaaaaaaaaaaaaaaa

SEQ ID NO: 764 - DNA, 876 bp, Homo sapiens
ggcacgagctggcccccatcgccgtctcagtgcggcgattcttcctggtggaggcctccgtctacgcctacaccatgttcttctccacgttctaccacgcctgcgaccagcccggggaggcggtgctgtgcatcctcagctacgacacgctgcagtactgcgacttcttgggctccggggcggccatctgggtcaccatcctgtgcatggcacggctcaagacagtcctgaaatacgtgctgtttcttctgggtacactggtcatcgccatgtccttgcagctggaccgcaggggcatgtggaacatgctggggccctgcctctttgccttcgtgatcatggcctccatgtgggcttaccgctgcgggcaccggcgccagtgctaccccacctcgtggcagcgctgggccttctacctcctgcccggcgtctctatggcctctgtgggcatcgccatctacacctccatgatgactagcgacaactactactacacccacagcatctggcacatcctgctggccgggagcgcagccttgctgctgccgccacctgaccagcccgccgagccctgggcctgctcgcagaaattcccctgccactatcagatctgcaagaacgatcgggaggaactgtacgcagtgacgtgacactggcctggggacagctgctgctctgatgactcttcagccaggagctgtatcgaggggagcgcctggtccagccctggacagattgatttccagctgaataaattggcctagataccctcaaaaaaaaaaaaaaaaaaaaaaaaaaaaaaaaaaaaaaaaaaaaaaaaaaaaaaaaaaaaaaaaaaaaaaaaaaaaaaaaaaaaaaaaaaaaaaaaaaaaaaaa

SEQ ID NO: 765 - DNA, 822 bp, Homo sapiens
ggcacgaggctttgggcagttatggcagtatggcattagctgagaggtgtctgccacttctgggtcaatggaataataaattaagtacaggcaggaatttggttgggagcatcttgtatgatctccgtatgatgtgatattgatggagatagtggtcctcattcttgggggttgccattcccacattcccccttcaacaaacagtgtaacaggtccttcccagatttagggtacttttattgatggatatgttttccttttattcacataaccccttgaaaccctgtcttgtcctcctgttatttgcttctgctgtacaagatgtagcaccttttctcctctttgaacatggtctagtgacacggtagcaccagttgcaggaaggagccagacttgttctcagagcactgtgttcacacttttcagcaaaaatagctatggttgtgacatatgtattcccttcctctgatttgaaggcaaaaatctacagtgtttcttcacttcttttctgatctggggcatgaaaaaagcaagattgaaatttgractatgagtctcctgcatggcaacaaaatgtgtgtcaccatcaggccaacaggccagcccttgaatggggatttattactgttgtatctatgttgcatgataaacattcatcaccttcctcctgtagtcctgcctcgtactccccttcccctatgattgaaaagtaaacaaaaccccatttccaaaaaaaaaaaaaaaaaaaaaaaaaaaaaaaaaaaaaaaaaaaaaaaaaaaaaaaaaaaaaaaaaaaaaaaaaaaaaaaaaaaaaaaaaaaaa

SEQ ID NO: 766 - DNA, 513 bp, Homo sapiens
ggcacgagctgcacccagccgaactgtgtcttctagttctttttttaggaccttaaacattgtttacttgattgaaatttaaattttatattacatttgtaataaaactagaaagcatagataagctatcaatcaaaatcacccaaatcctgtgactactactcactgcaaacattttaatgtgcaatttgtacttaattctttactttgtaatacatacaaatatgtccagacactgtgacatatgcttgtgaacttttcaaaggtgatatcctgctgtgtattatattttgttcttttcatgtggcacattacaaatgccctgtaatacagataattatcaaatacttcttagcattcttttatgtataaatgtaccatagtagtaaatttcttccttcacattgagactttttttaaaactataaacagtactctgaattgctataaaatatgttctatatcaattcattcaaataaatatatagaagttgaaaaaaaaaaaaaaaaaaa

SEQ ID NO: 767 - DNA, 888 bp, Homo sapiens
  misc_feature (99)..(99): n equals a,t,g, or c
ggcccggctaatttttgtatctttagtagagacggggtttcgccgtgttggccgggctggtcttggactcctgacttaggtcatctgcccaccttgtgnctcccaaagtgctgggattatggtsatgagccaccatgcccagcctgcataccttttttttattgttgccttttgtttttatgcctgtagcttttacattacattaaacagtttttgaaaattgtcagactgttaataacattagttttatcttgtttgaaaattatttagtaaggagaaagaaaaatacaaattcatgttttaattgatagttgtacgagcctcatagcaatatttccatgtgctatattcagttattgcttaaacaattttgtaattaacacttatatgtcaggatctgttttctcaagtaaacttcggtttttccaccaaaatggtgtgggtttttttttttttaatatattgtaatctgtatttcctactactgccgtgtcattggagaaacagtaaattaaacctgaagaactcctgaataacttaacttcttcgtttagaaatgcttgaaaatagagttgcaggccaggtgcagtggctcacgcttgtagtcccagcactttkggaggccgaggtgggcggatcayttyaggccaggagtttaagaccagcctggctaatatggcgaaggtccgtctctgctaaggatagaaaaaaattagctgagcgtggtggcacacacctaatcacagctaataaagagtctgagacacaagaattgcttgaacccaggaggcagaggttgcatgcagtgagccgagattgtaccactgcactccacacttcgcgacagagccagattctgtctcaaaaaaaaaaaaaaaaaaactcgag

SEQ ID NO: 768 - DNA, 1064 bp, Homo sapiens
  misc_feature (116)..(116): n equals a,t,g, or c
  misc_feature (309)..(309): n equals a,t,g, or c
aattcggcagaggtcttgcataatgaaatccttttttggctaagtatttaattcgaacatatttgcctttttaaaaagtgcttggcctaaacttattgtaactgcatgaaataagncatttgcttaaaacttaacattgtaaaattgttctctctgaaatgagtgcagaatttaaatcatggccaaatgtattactattaccctatttacagtaatttsctttgcagaaaatatttctycatcatggaactgtgaaatcaaattgaagatcttactggtaaaaatgacaaattaacaaaaggactaagnacaagtggtgcccaaacaacctttttattctgcagttccatcatcataatagaccagttaacccaggagtcctaatgttttaaaacatcattgtggtgatcttgtttattctatctcactaaggatatccagtttcctaagctcttactggctagcaatttcgtcttaattttattgctaaatgttcaaattttgcttccaaactcactttatttttgcagatgtgtacatctgctaartactaattttatgtaaatgattttgttgattatctttccacatcttaaaatgtttctaacagctttgagattttatctcaacaggctctctctgaccccaaagtagtacttaccttcgtgactactgacaaagtcacaaaatgcaggcgatgtcatgtatttcggtacaactaaatctaggaaacggttttttcattgcattactgcatattttcattttcatttaaattatgtcccctttttctcttgcttgaaacagtgctcctcgaactttgtcttccagcacattttaaagagaaccaattaaagaacaatcacacattctgcttattaaaggctatttaaaaagaaacattttgtattagaaaatggccaactttaaaacactattttttacactcataaaaatgttttttaaatcgccttgacaatcatcagcttttgaaatgtgaattcctattgccagagtaaaggtctcgtttttataccaccaaaaaaaaaaaaaaaaaactcgag

SEQ ID NO: 769 - DNA, 1282 bp, Homo sapiens
attttacacttaatttataatatttattgagtatattatgtcctcaacaagtaactataaaatgaaatacttaactcggtgaagactattttatgcaaagtttttttttttttttttttttttagcaatttcagtgtaatgaaagaatttaagctttgaatttataatttgctgtggtggggttaatttctgtcagtatttgagattgtattatcagtcttgcataatgaaatccttttttggctaagtatttaattcgaacatatttgcctttttaaaaagtgcttggcctaaacttattgtaactgcatgaaataagcatttgcttaaaacttaacattgtaaaattgttctctctgaaatgwgtgcagaatttaaatcatggccaaatgtattactattaccctatttacagtaatttgctttgcagaaaatatttcttcatcatggaactgtgaaatcaaattgaagatcttactggtaaaaatgacaaattaacaaaaggactaagacaagtggtgcccaaacaacctttttattctgcagttccatcatcataatagaccagttaacccaggagtcctaatgttttaaaacatcattgtggtgatcttgtttattctatctcactaaggatatccagtttcctaagctcttactggctagcaatttcgtcttaattttattgctaaatgttcaaattttgcttccaaactcactttatttttgcagatgtgtacatctgctaartactaattttatgtaaatgattttgttgattatctttccacatcttaaaatgtttctaacagctttgagattttatctcaacaggctctctctgaccccaaagtagtacttaccttcgtgactactgacaaagtcacaaaatgcaggcgatgtcatgtatttcggtacaactaaatctaggaaacggttttttcattgcattactgcatattttcattttcatttaaattatgtcccctttttctcttgcttgaaacagtgctcctcgaactttgtcttccagcacattttaaagagaaccaattaaagaacaatcacacattctgcttattaaaggctatttaaaaagaaacattttgtattagaaaatggccaactttaaaacactattttttacactcataaaaatgttttttaaatcgccttgacaatcatcagcttttgaaatgtgaattcctattgccagagtaaaggtctcgtttttataccaccaaaaaaaaaaamagaagtaagagaaaaaaaaaaagtcgac

SEQ ID NO: 770 - DNA, 1154 bp, Homo sapiens
ggcacgagcttctaagagcagccatcaggtccttgagagctgcttgcctctctgctgacttgacctcgttgagaatgcttggcatccctgtctccatggtatcaccatgcatgcctcctgctttccaaactccttcacctccagcccttagcagtggctgactcataggaaggtgcttgagtgttctttcctgaattctggatctgccttccccaaatgcacaagcatcagccatgccttccacattcaggaaggtttgatcaagccagcagggaggtgcaggtgaaggtgaacctcaggcagagctaggaagcctgaaaatctcctcagtcgtcctaacgtggagcttaaaagagtggattctatttcaaatcctaactgtgccattcaatagctatatctttgggtctgtagctaaacctctgtggtgctcagattcctaatctataaaatgagaaggctaaatgtggctatcccagtacagctcttttgtgtgttaaatgagagaagtcagaaagcactttgcacagggcttttctgtggaaaggcccagtaatattagtccttgatgtcattttaccattatacttgttaaagtctaaagttgttcagcgtttttctttacccttatcaaatgtcactgtgagttaacagctcttgaaaaagtagaagcctggggtaatcatttcacaatgtttatgtatatcaaaatctcacagacgtaccttaaatatacacaatatgtatttgtatatattatacctttctaaaatattataccttgatacaattatacctcaatacagctgaaaaaattagaatttttttttttttttgagacagagtcttgctccgtcacccaggctggagtgcagtggcgtgatctcagctcactgcaacctccgcctcccgggttccagcgattctcctgcctcagcttcctgagtagctgggactacaggcacacaccaccatgcctggctaatttttgtatttttagtagagctggggtttcattatgttggtcaggctggtctggaactcctgacctcgtgattcgcccgcctcggcctcccaaagtgctgggactgcaggcgtgagccaccgcaccgggccaaattatagaaaattttcataaaaaaaaaaaaaaaaaa

SEQ ID NO: 771 - DNA, 1810 bp, Homo sapiens
ggcacgagggtgtgatgtcgtttttacatagcacctttatacacgatataaaaaagtaggttttttgcatcaactgcaaacatgttttgtactctgtggatcggaatcttggtgaggaagagcattgcatcccgcaaaaggctgatgagtcagttagctggagagacagtgccatcattctgggttgcagttctggtgaagtaagtaggatgttaacactgcagatggaaatggttttcagattgccacatggaataatagtatggaacgtgaaatttcaggaataggaggagattcttttattattttcctccttccactttgtacatttttttaatagcctgcaactagttacatttatctttttttttttttttacatttttatccataatacaagtaacttgactaaagccagtgtctgtttcatgtaaatatattaacaggtccaaaatcaccaactaaaattagctttatactgactttttctaaagtcagtccttgtctcacccaaatattttaacaagtccaaaaatagcacatagctacttggaaccatattaaaatctcattataacatgaatttcaggtattccatgttgtagacttctccttgaaagataatgacattgaaaaatgctcttaagagagttgttaattctgtttcccaaaacttcctggataaaacaattctaccttaatgctattaagactatggtaggtggtttttttcttaaagtaacaagactgacgtataaaatatgaatgcgacatttaagatgaaagtgttcataggcacacctcgctttattgtgctttgctttattgcgcttcgtagatactgtgtttttactagttgaaagtttatggcagccctgtgaaaaataagcctgtccgtgctgtgaagcgaacagcatgtgctcacttcatggctctgtgtcatgtttcggcaattctcgcagaatttcacactttttcattattatctgtgactgtgatctgtggtcagtgatcttgttgtttctaatgtaatcgttttggggcattacaaaccatgcctgtgtaagatggcggattagtacattctcacaccgctataaagattctacctgagactgggcattttatgaagaaaggggggttataaagatactacctgagactgggcattttataaagaaaggagggttaattgactcaaggttctgcatgtctggggaggcctcaggaaacttacagtcatggcagaagatgaaggggaagtgaggcacatcttacatgatggcaggagagagagtgtccaggagaaacagccacttttagaactatcagaactcatgagaactccctcactatcatgagaatagtgtgggagaaactgtgcccacgccaatcacctcctaccaggtccctccctcaacacatggagattacagttcgacatgagatttgggtagggacacagagccaaaccatatcaaatggccaggttaattggtaaatgtcgtatcttctgactgctccactgactgactgttctcctatgtctccctctcctggatctccctattccctgagacacaacaatattgaaattttaggcgaattcacaaccctgcagtggcctttatgtatttaagtgaaagacagagttgcacgcctctcactttcagtcagaagctaggtgctcacgcctgtaatcccagcactttcagaggccaagtggggcggatcacttgaggtcaggagttcaagaccagcgtggtcaacatagtgaaaacacctctctacttaaaaaaaaaaaaaaaaaa

SEQ ID NO: 772 - DNA, 1345 bp, Homo sapiens
  misc_feature (1014)..(1014): n equals a,t,g, or c
ggcacgagcctctctgggatggtcattctcctagcacatccatgtattcaccaacctggaatctcccttaacctgtttgcttcagaatttttattgacttttcagtacataggtataattgattaaatcactggccattgtgattgagctcaatctccagccccttctctttcccagaaagtggcagtaggatgagttgaattgggggctggtaagttcctaaccctctcatcatgtggttgggttcctcctgggtgactaagggcctatgctgaagctatctaagggcttgcaaagagacacctctagcataaacttaggtatgatcaaaaggggctcgttagaaataacagacactcctatcaggaaatcccaagattctgaggacctgtgtgcaagaaactgggtctttgtagaccaaatatatatttttcattataccacaatgctccataattaatactttcttattctacctagtcttcctgggagatctcccagagaaatccacatgtaaacccaaactctcacagtagactttggattttgattttctttcctcttgagtttttccacttgtgtagaaattacctcaggtacaccatgtgaattctgaattcattatttctactctgccccaactgttttttcctcctatgttctctttctccatttgtgttgatatcagcctaagccagagacacatgattctgaattctgtcttccctcttatccattcagtaaccaattcttacctattttgcttcctttgtaattcttaaatttaacctgtttccccatccctcaccattactaggtatatccactcaaacctattttccacacactggctaggttgttttcctagaatatgaatctgaccatatcatttctctgcttaacagcttctactggatcttcattagccagaagaatatttaggtttctaagctggacgtgcagagtcctcaacagttttggttttgattctaccatgtctttgagattcaactnacataacacttcattgagaaagcccattttaggctggacacggtggcccacgcctgtaatcccagcactttgggaggctgaggcgggtggatcagttgaggtcaggagtttgagaccagcctggccaacgtggcgaaaccccgtctctcctaaaaatacaaaaattagccaggcatggtggtgggcacctgtaatcccagctactcaggaggctgaggcaggagaatcacttgaacccgggagggggaagttgcagtaagccgagattgcaccactgcactccagcctgggcagcagagccagactccatctcaaaaaaaaaaaaaaaaaa

SEQ ID NO: 773 - DNA, 1831 bp, Homo sapiens
ttttttttttctggtgttggagtcttatttagaaaacaggataaatgacgctgttatcaaaagttgcctggggttctgtatttcttctctgccctccaatccccgactgctatgatgtttactacagtgaacccagcccatggtaaacacaggcttcacctgttcttgtttgttagccttgactgtgaggcaggacttccctcgcttgaactgttacacatacgatgtgtgtgtcacatcacatattgtgcagctgttggttttcatgtagtgccctgcgatggaaattagatatatttcatgtatttttccattgaaggtggagtttttcaatgatcatgtgttttgtcctcctaaacagtataccaaagtttgtttttatagttgaggattgtattgataaccactggggttccgcattgaagcaggaacaaattgcctctttttctggccttctctgtgggacctctgcttttgtgaagcaactatttatttgaagaccagggtatgggcacttttgccttctctcctctctgacttttgagggtattgagggcgcccttagtcatagtctcgactccgccattgccttctcctcggcgtcctcacaactcttaattgggcctagtgaaaatgggggcaggtgagaagtccattttgagaatcagcatagtaaattacatttctaatcccagaggacttaatattttcttttgtcaccccagaggtgaaaaatcagcagttgaagcctgacaggcctgcagtggtgaccaggaacagaagcagccttcctgttagtagatgggggtacttctgtggtgggcagaagccttactaaaggggaagacagactttgaagtttctagacgagaaggaggctagcttctagcctgggtggccattattccaaaaggtcattgtttctcactagaccccagggcaccagatgaatttccaagtttaaactctttcctgcaggtgattactttgaaaaaggttggtccagaccattttgatcaagaacctgtatatgtgttgtgttagaggcatctgcctcaagtctatgtacagtgtttgctgcgggtgtgttccaatattcattttacctctgcttgggggttttgtgtgttcccctccccccatgccctgcctacccccttttccctgaaccacgtccttttgaataatttccagatggatttctgtagccataccaaagccagggtgttttcattcatgcggatactagtatttatagatgtctgactacctaacttaatttttgtttttgaacttctaattggggccagtgtaaggtcgatcccagaggctgatctgcaaatcaagctacatgtatttgtgtataagaccctgtgttcaggactgggtgacttttctaagaaatatggggtttagaatggggttgactgtattttttaacctaattctggagagaagattgtattttttacagttttttgggtttggcttccttctcacatttctttagctttgaatttttactaaataaatttcctcctgattaawtttttttttctcatctgggaatttgaaatctcggtgcttactgttacaccaatttgtccaaagagttgaaatcactttaatgccagaacatggtaaatttgcagccatttcaagcaggtggtggtctttttttataacatcgttaacgggtaccattaaatattctgagaggtgaatgtaaaatataaaaggtataggkttttttttttttttaaagaaaacaataaactttcaaagagaaaaccaaaaaaaaaaaaaaaaaaaaaaaaaaaaaaaaactcga

SEQ ID NO: 774 - DNA, 1139 bp, Homo sapiens
aattcggcacaggttgggtgcctacccaccagtctcatgtgtgagtgtatctgtataagtgtgtgtatgtgtgtgtactcacgtgtggctctccctctgccactgagtttctgtgaccaggcccacctggtcactaagggaggggactgatccctggggtttcctcgttcctgctgtggagtgagctggggcttggtgagcaggccagcagagggaggctgtatggtgcatgtgtgatatgtgtggttgtgtgtgtgcgtgtgtgtgtgacagtatccaacccaatttcctgcctgtctgttgccccttcccatctccttgaccaagcagcttgagggaggggggatgcccagacagagcccccagtacccagccctgttcagcctgcatgacagcccctccctcaccagaccttagtgtcagtagtagcgatgggggagacaggggtgggggatgattcagagctgtgactgcagggcgctgacaccatttagctggcacagtttagattaaaattagaaataatttaaagtacagacaaaaagataaagccaaggatgcctctgcccccagggaatggtgatgggggtctccagctgggggaggggttcacatctggggagcagaatctttcttagaggcttgagctggccttcagagaaaatgcttaggcctttcagccaggagacacagagtaccttgctacctttgccatttcttcctcccaggatatctccaggcctcagttttttcagctgtgtaatgggcacaatagtaatgtgagaatcacctgaactgtaaggcacaagagattaaaaaatgtcactcttcagtctgggcacggtggctcacacctgtaatcccagcattttgggaagccgaggcaggtggatcacttggtcaggaatttgagaccagcctggccaacatggtgaaaccctgtctgtaccaaaactacaaaaattagctgggtgtggtggcgcgcacctgtaatctcagctgctcaggaggctgaggcacgagaatcacttgagaccaggaggcagaggttgcagtgagccaagatcgtgccattgcactccagcctgggcgatagagtgagaccctgccacattaaaaaaaaaaaaaaaaaactcgag

SEQ ID NO: 775 - DNA, 618 bp, Homo sapiens
ggcacgagataaagatagactcttttctcttttttggtagcatcttatatgaacaagcctcacagtgctaatgagtaccataatgttcagtctatggacaatatgtgttggcctgcccccagccagatccctcctgtatccacaccagtaactgaactttctcgaatttgttcccttgttggaatgccacaacctgatttctcctttcttaggatgccacaggtatagtatactactgttctatttatataaattatttaacattaagcttaaataaattggttgaaaatgtttagctagaaaaaataaaatggggcctatttttcttaactttatgagcagcatagatttatgcttcttaccctagctctaatatttatacataaccaaagccctaagagaagctgacagggaggaactggggcagcaggtatcctggcaagattcctcaaactaatagagccagggatcttggcctacagtagcaattttcaaactttttggtctcagaaacttcacactttttttggaggaccccaaagagattttgtttacttatatccatatttactgtgtttgaaattaaaacaaaaaaaattgaaaaaaaaaaaaaaaaaa

SEQ ID NO: 776 - DNA, 1121 bp, Homo sapiens
ggcasagctcaggggctacatgcagatacttcattggcagtggctcttatgtgtaaagtactttccatttggtcttatttttatccacatagtttccttgaacaaaggagaaactacatataggagaaactgaggctcagaaaggtacaaggtgacttagcaggtcatgtgcaaaatctgttatagaactcaagtcatttgattcttgacctgggctcttttctgaatgcagtatttaccactcatgttgccaaacaactaaacaaacaaacagacaaaaactcagttgttcaatgagtgttacaggagattttgttcttcttagttgctctggatccttctgttggccacccttgtggggctgctgctccagcggcttgcagctagactgggagtggttactgggctgcatcttgctgaagtawgtcaccgtcagtatcccaaggtgagcaatgtattgtcctgtttgtctctcacccatgccataggaatctgtgtgtctggyggtatgtgctggcctcattctatagtgagacagtcaaggacttgggggtcagtggccctgaagacagacrgtaccaacggaaatactgtagctcctcctgctgccaggccatgttttccccctctttcaaaatctaacttgagactcgcatttcctagaaggttttcttagaaaaactgtgttaccattcactctggcttccagtatctagcaatgcccagcccaaggggaggaggatgctctctctaagcacttttattcatacctccatgttactccatcagtttgcattttatatatgttctttttttgtttgactttgccatcactttgaaaaagtaattttttttctttttagtacaaactatatgtggcaagatctttggatttgctaataattatttttcagtttcccctcccaccgggggctacactgtcctctgcagcttcttctggacattttgggcctttcttaccgttgcctaaggcaagaatgaacactatgtctggaagatatttttaacttagttttgtctcttgttttgtttcttttcctgggtgtgagcaaaaagtatccttatctgcttttcaaaaaaaaaaaaatcttgataataaa

SEQ ID NO: 777 - DNA, 1233 bp, Homo sapiens
gtctgaggcagtctcatgacactggcatttgtagtcctagccctctggccaaatgggaggrcacatgttcttgtacacatgtgctggctcctgttccttaagagctggcagtgtcagcatatgggtggcatctaacaggtaccatagaaactggatgtatgtgttctcattgcctgcctgcaacctagaattcctgcccaggaggagttcttcaaacgctatgaaagatgttcccaccccctgccatgcagctacactaaaaggacatattgatttctctccagaattgtgtttatgctgaccactaaatatcaacttattaaaaaaaaaaacttacgtggttttaatttttttttcgctcccccctcgcccacaggagaactaatgacagttgccagatggatgagggagtttatcgcaaaccatcctgactacaagcaagacagtgtcataactgatgaaatgaattatagccttattttgaagtgtaccaaattgcaaatgaattatgtgaatgcccagagttacttggatcagcatttaggaaagtaaaatatagtggaagtaaaactgactcatccaactagacattctacagaaagaaaaatgcattattgacgaactggctacagtaccatgcctctcagccagcccgtgtgtataatatgaagaccaaatgatagaactgtactgttttctgggccagtgagccagaaattgattaaggctttctttggtaggtaaatctagagtttatacagtgtacatgtacatagtaaagtatttttgattaacaatgtattttaataacatatctaaagtcatcatgaactggcttgtacatttttaaattcttactctggagcaacctactgtctaagcagttttgtaaatgtactggtaattgtacaatacttgcattccagagttaaaatgtttactgtaaatttttgttcttttaaagactacctgggacctgatttattgaaatttttctctttaaaaacattttctctcgttaattttcctttgtcatttcctttgttgtctacattaaatcacttgaatccattgaaagtgcttcaagggtaatcttgggtttctagcaccttatctatgatgtttcttttgcaattggaataatcacttggtcaccttgccccaagctttcccctctgaataaatacccattgaactctgaaaaaaaaaaaaaaaaaaaaaaaaaaactcgag

SEQ ID NO: 778 - DNA, 426 bp, Homo sapiens
ggcacgaggaggtggaaggccatacagaatggagccgtgagtatggccagcctccagctctcagccaggaggtccccaaccccaaggaaggaagaaactggaaattaggaactgcttcctcatttaacaaggtgcttcttttcatgtgatgaggccctgtgaagaagggacaggatatacagacgggggcagctggagacagttatgatgagtgccggctttgtgtctgagcattctgctcccatggacatccccaacaacagcagggaccaacctatgtcactgtcaaagggcagctgagaagggcctgagccccagggacccctcacctgatgggaatgagagtgtggggagcttgcttcttggctgaatggtctgctggggtctggcatagaaagcagatggcttaaaaaaaaaaaaaaaaaa

SEQ ID NO: 779 - DNA, 3244 bp, Homo sapiens
  misc_feature (343)..(343): n equals a,t,g, or c
ggcacgagcaaagggggaaaaaatggccattatgttgcaagcctgagtacatcttacctggatgccatgcccttcgtagcctggttttgtttttgtgtctttagcaccatwcactttagtattttggcctcccggaaagaaaaccagccttctagacttgccagattgaaatgacacagtgatctgcccatcaactttttatcatttcccttcactttaattgggtcacaacacaaatgacttagaaaatgtgagcgcactagattataagaagccttagcagacagtgtctgaggattaaagttgcttttctgctawgkttcaggtggttaatggaatgaangggttgcctgtcctgtagctatatcgagaagtttactgactttcttcggctctttgtgagtgttcacctaagaagaatcgagtcttactcccagttccctgtggtggagtttttgacacttttgttcaagtacacatttcatcagcctactcatgaaggttacttctcttgtttggatatctggacgctgtttttggactatctgacaagtaaaattaaaagtcgtcttggagacaaggaagcagttctcaacaggtacgaagatgccctggtgctcctgctcacagaggtgttgaatcgaatccagttcagatacaaccaagcccagctggaggagttggatgatgagactctggatgacgatcagcagacggagtggcagcggtacttacggcagagcttggaggtggtggccaaagtgatggagctcctgcccacgcacgccttctccacactgttccctgttcttcaggacaatttagaagtttatttgggattacaacagtttatagtcacttcagggtcaggacacaggttgaacatcacggcggagaacgactgccggcggctgcactgctccctgagagacttgagctccctgctgcaggccgtgggccgcctggccgagtactttatcggggatgtgtttgctgcacggttcaatgatgccctcacagtcgtggaaaggttggtcaaagtcactctgtacggatctcagataaaattgtacaacattgaaactgctgtgccatcagtattgaaacctgacctcattgatgtgcatgctcagtccctggctgcgctgcaggcttactctcactggttagcacagtattgcagtgaagttcaccggcagaacacgcagcagttcgtgacactcatctctactaccatggatgcaatcacacctctaatcagcaccaaggtccaagacaagctgctgctatctgcgtgccacttactggtctcactggccaccaccgtgcggcccgtctttctgatcagcatccctgcagtgcagaaagtattcaacagaatcactgatgcctctgccctgcgacttgtcgataaggcccaggtgttggtgtgccgagccctctctaacatcttgctgcttccgtggccaaaccttccagagaatgagcagcagtggcccgtgcgctccatcaaccacgccagcctcatctctgcactctcccgggactatcgcaacctgaagcccagtgctgttgccccacagagaaagatgccactggatgacaccaaactgattatccaccagacactcagcgtcttagaagatattgtggagaatatctcgggggagtccaccaagtctcgacagatttgctaccagtcgctgcaggaatctgttcaggtctccctggccctctttccagcttttatccatcagtcagatgtgactgatgagatgctgagcttcttcctcactctgtttcgaggccttagagtacagatgggtgtgcctttcactgagcaaatcatacagactttcctcaacatgtttaccagagagcagttagccgagagcatcctccacgagggcagcacaggctgccgggtggtggagaagtttctgaagatcctgcaggtggtggtccaggagccaggccaggtgttcaagcccttcctccccagcatcatcgccctgtgcatggagcaagtgtatcccatcattgccgagcgtccctcccctgatgtgaaggccgagctgtttgagctccttttccggacgctccatcacaactggaggtacttcttcaagtccaccgtgctggccagtgtccagagggggatcgctgaggagcagatggagaatgagccccagttcagtgccatcatgcaggctttcggacagtcctttctccagcccgacatccacctttttaaacaaaatctcttctacttggagactctcaacaccaagcagaagctgtaccacaagaagatcttccggactgccatgctgttccagtttgtgaacgtgctgctccaggtcctggtccacaagtcccatgatcttctgcaggaggagattggcatcgccatctacaacatggcctcagtcgactttgatggcttctttgccgccttcctcccagagttcctgaccagctgtgatggtgtggatgccaaccagaaaagtgtgctggggcggaatttcaagatggatcgggacctgccctcattcacccagaatgtgcacaggctggtcaacgacctgcgctactacagactctgcaacgacagcctgccccctggcactgtgaagctctaggcctgctactgcctggggacacggacttctgctgctgccacctgcgccagccctaccttccaccacagatgtctcccagatgggccttggtcacactccttggcttctcccaccgcaagcaacgctgcctgcctctgccgctcctccacatcttgccgctgcccagcagagctggcttctgggtccacctgagcactggacggtgctcccagggcgttggagcaggcggaggggtgtgtggccaggtactaggaggcaccaggaaatcccgcggggtggcccatgcagaccaggcgcacgtggctcatggggcagaattgccaaggacagctcacgacagtgccaccttctcaccattccagccaaggagagatgtgacgttggaactgctctggcacttctgtcaagcctcccccgccccaattgccttgagatctctgctctttgtcagagatttgcaaagactcacgtttttgttgttttctcatcattccattgtgatactaagaaactaagaagcttaatgaaaagaaataaaatgcctatgttgttgttctagaaaaaaaaaaaaagtcgagcggccaagaatttagtagtagtag

SEQ ID NO: 780 - DNA, 894 bp, Homo sapiens
  misc_feature (824)..(824): n equals a,t,g, or c
  misc_feature (831)..(831): n equals a,t,g, or c
  misc_feature (852)..(852): n equals a,t,g, or c
  misc_feature (876)..(876): n equals a,t,g, or c
  misc_feature (890)..(891): n equals a,t,g, or c
gtgcagagtgatggacagcaggtggcatcttacattgtgatttgtggtgcacagttaaaacacttcccttcgtttcagaaggagacaatgtgaatacttggaaattatagtgaataagatgcctcccaaacttgaggaaaaggtcagattctaagagctaaacgttaagatgtaatgttccagaacaaagaggcccagagtcactgaacggggccccagggctcctagcttgagtgtaatctgagtcagcttatgaaaaggccccaaagaagaaagtggaatgtgtgctgggcacatgggacagccatggcactgagactttggaagtggccttgccagcgctgtcctgtctttctggcccacagatgagggctcctgattgtggaaggccacggaagggacctgaacacgatggcacgagacaagttatctcctgtgactgctcctctccagcaaccctcagctcaggctagactttccccctgtgttgagaatgccctgccctgtgtggaagcctgatgcatttagtgacagtgtgttagctttgttagtttctagtctggccagcaggctttccatgtgatctgccattggcttgcttcagtggccagtggagccaggggtgtccaccagagtcttggacacagacttctgaggtggcagcgggagggagcctgctccctgccacacacgtacaatttctaatccatacaggcctatgtagtatatacacacatacgcagagccttaggaattgtgaaaggccaatcaaaacttggggccctaatttcactctgccaaaaaaaaaaaaaaaawaactcganttttttnttttcggtaccccaatttcgncctatagtgatttgtattacaatnctttttttcgtcgnnttt

SEQ ID NO: 781 - DNA, 1778 bp, Homo sapiens
ccggtccggaattcccgggtcgacccacgcgtccgggatccaattgtagttgtgaactgcttgaggtctctagaggaaattctgaaacaggaaggaggcgttgtcatcaataagcccattgctcaccatctcttaaatcgaatgtcaaaactggaccaatggggccaggctgaagtattgaactttctgctacgctaccaaccccgcagtgaggaagaactatttgacattctcaatctgttggatagtttcctcaagagcagtagcccaggtgtggtgatgggagctaccaaactttttctgatcttggcaaaaatgtttccccacgtacaaactgatgtccttgtgcgggtcaagggacctttgctagctgcctgttcttcagagagccgtgagctctgttttgttgctctttgtcatgtacgccagatcttgcatagtttaccaggtcactttagcagccactacaaaaagtttttttgctcctactcggagccccactacatcaaactacagaaagtggaggtgctgtgtgaactggtgaacgatgagaatgtgcagcaggtgctagaggagcttcgagggtactgcacggatgtgtctgcggactttgcacaggctgccatctttgccataggtggcattgccaggacttacacagatcaatgtgktcaagattttaacagagttgctgggtcttcgacaagagcacattaccacagtggtggtgcagactttccgagacctggtttggktgtgtcctcagtgtactgaagctgtatgtcaggccctgcccggctgtgaagagaacattcaagatagtgaggggaagcaagcacttatttggctacttggtgtccatggggaaagaattcctaatgctccttatgtgttagaggactttgttgagaatgtgaagtcggaaacatttccagctgttaagatggagctgctcactgcttygctgcgccttttcctctcccgacctgctgagtgccaggacatgctaggacgtttgttgtattactgcatagaggaagaaaaagatatggctgtacgggaccgaggtctcttctattatcgcctcctcttagttggcattgatgaagttaagcggattctgtgtagccctaaatctgaccctactcttggacttttggaggatccggcagaaagacctgtgaatagctgggcctcagacttcaacacactggtgccagtgtatggcaaagcccactgggcaactatctctaaatgccagggggcagagcgttgtgacccagagcttcctaaaacttcatcctttgccgcatcaggacccttgattcctgaagagaacaaggagagggtacaagaactccctgattctggagccctcatgctagtccccaatcgccagcttactgctgattattttgagaaaacttggcttagccttaaagttgctcatcagcaagtgttgccttggcggggagaattccatcctgacaccctccagatggctcttcaagtagtgaacatccagaccatcgcaatgagtagggctgggtctcggccatggaaagcatacctcagtgctcaggatgatactggctgtctgttcttaacagaactgctattggagcctggaaactcagaaatgcagatctctgtgaaacaaaatgaagcaagaacggagacgctgaatagttttatttctgtattagaaactgtgattggaacaattgaagaaataaaatcataacagagwmaaaaaaaaaaaaaaaaagggcggccgc

SEQ ID NO: 782 - DNA, 2498 bp, Homo sapiens
ccacgcgtccggtgtgctgcaaggagctaaggccttcagtgtccccttccttacccaggtttctcacagaatggattcccagcgggaacttgcagaggaactgcggctttaccaatccacccttcttcaggatggtctaaaagatctcctggatgagaaaaaattcatcgattgcaccctaaaagcaggtgacaaaagtcttccttgccacagattgattttgtcagcttgtagtccttacttccgtgagtactttttatctgaaattgatgaggcgaaaaaaaaggaggtagtgctagacaatgtggatcctgctatacttgatttaatcatcaaatacctgtactctgccagtattgatctcaatgacggaaatgtgcaagatatttttgcattggccagccgctttcagatcccctcagtgtttactgtctgcgtttcttatcttcagaaaagacttgctcctggtaactgctcctggtaactgtctagccatcctaagattaggacttcttcttgactgcccgagactcgccatttctgcccgtgaatttgtgtctgatcgctttgtacagatttgtaaggaagaggactttatgcaactgtctccacaggaactgatctcagtcatttcaaatgacagcctaaatgtagaaaaagaagaagcagtatttgaggcagtgatgaaatgggtgcgaacagacaaggaaaacagggttaaaaaccttagtgaagtgtttgattgtatccgttttcgccttatgacagaaaaatattttaaggatcatgttgagaaagatgatataattaaaagcaacccagacctccagaaaaaaaatcaaagttctaaaagatgctttcgcaggcaaactcccaagaaccctagcaaaaatgccgcgaaagactggggctggtgaggtgaatggtgatgttggtgatgaagatttacttcctggttacctgaatgacattcccaggcatggaatgtttgtaaaagacctcatcctcttggttaatgacacagcagcagtggcttatgaccccacggaaaatgaatgctaccttactgcactggctgagcagattcccagaaatcattccagcattgttacccagcaaaatcagatatatgtggtaggaggactatatgtggatgaagaaaataaggatcaacctctacagtcatacttcttccagctcgatagcatagcatctgaatgggttggacttccacctctgccttcagccaggtgtctattcggtctgggagaggtggatgataaaatctatgtagttgcaggcaaagaccttcaaacagaggcttcgctggattcagtattatgctatgatcctgtggctgcaaaatggaacgaagtaaaaaaactccctatcaaagtctatggccataatgtgatttcacataaagggatgatatattgtctaggaggaaagacagatgacaaaaaatgtacaaacagggtgtttatcttcaaccccaaaaaaggagattggaaagatctggctccaatgaaaattcctcgttccatgtttggagtagcagtccataaaggcaaaattgtgattgcaggaggtgtcactgaagatggtctttcagcttcagttgaagcttttgaccttacaacaaataaatgggatgtaatgaccgaatttccccaagaaagaagctccatcagtttggtcagcctggctggatctctgtatgcaattggtggttttgctatgattcaactggagtctaaagaatttgcacccactgaagtcaatgacatatggaagtatgaagatgataaaaaagaatgggctgggatgttgaaggaaatacgttatgcttcaggagctagttgcctagcaacacgtttaaatctcttcaaactgtctaaactgtgaacaaggtgacaaaacataatagattgggaggtggtttgtttggtgaatggggctttaatttattctgttttttaaaagcttgtacagacactcatgtagaaattattcaagaagttattgtctaagagatgagcagtaggtaagaaaacctcagtcattgactcttcaatgtaatgatcagagtttaaaaccattttctaataataaattaaatcttcagttgaacaaattattttgtgaatctgtttcactcaatggattgtaaagaaggctcctaaatttgagttgtttgctaatcatttcatttgcatcattagggtatccttaaactgattttctattacaattggaagtggagaatatgtgcatctacactaaaaaaatgtttaagatatcaaaaacctctcctcgtgcttcaaaatgacaggaatcctgtgcattatactaagaattacatgccataagatgacttcagaaatcctacttcagaagtgtaataaatggatggggaaatcgtttgatggggaaaagtctcttgtaagtaaaagtagtcaaattcaaatggcaaaaaaaaaaaaaaaaaaaaaagg

SEQ ID NO: 783 - DNA, 195 bp, Homo sapiens
ggcacgagctcatgagtgttgatgctcagtacattttaaaagagctagtgcaagcttgcatttaacgtctatcatgatgttcctcttgatatttgtgtggtacctccagccttatccttaacattcctttacacagccctcatggaataaacagcacaaaacagcaacgacaacagcaaaaaaaaaaaaaaaaaa

SEQ ID NO: 784 - DNA, 1262 bp, Homo sapiens
  misc_feature (1041)..(1041): n equals a,t,g, or c
ggaaaaaaacagaaattgaagatctgccaactgccatgcctagcataataaaaatgggcttccttccccccacatcccccatagggtctcgctctgtcacccgggctggagggcagtgatgcagctgtggcttaaaagtgggcttctcttgtccttcatcctcattcttccttgagcttgctcagggcttcctgctccacgtggggcctcacaacacgctgtgtgtggtgcccagtgagtactgtgcactcagaacaaccatgtagtgtctagcaactcagagttgtgtgctgtttttgatcctttactaaggatcattttattaaaatgatcatctttgagtttacaaagtatttaaatatagtgaatgtacaaagttggtaccaagttacctttatttcagaaagaagcatagactttctttaatatggaaaaatctgcctctttaaaatatttggtgctagggcaaacaccattgtcatcagtggaataaaggaggaggcccacgtatgtctcgggtcaggcagtgccccaggaggacgctccgcccccaggaggacgctccgcccccaggaggactctccccactgggctgataccaggcttcgtgagggtcggagccttgtgcyrttgtccagtgtccccagcaccgagcgagtttgagtccatcagtcagtggatgccattttgaaggtgcagtctggtttcatggttagctgccataacatatgccaagtatcctgctcacatttacgtctctgaacaaatacgcatcagtctggtttcatggttagctgccgtaacatatgccaagtatcctgctcagatttatgtctctgaacaaatatgcattctgctttgttgtgagttccagacaagcactttaaccaaattggcaggcagtagagatagggaaggagtaattgaaaagtattagaaaataaaatgatccaggccaggtgcggtggctcawgcctgttaattccagcagtttgaaaggcccaggtgggtggatcccttgaggttaggatttcaagaccnccttggccaacatggtgaaaccccatctctactaaaaatacaaaaattaattcgcgtagtggcacacacctgtaatcccagctactcggaaggctgaggcaggagaatcacctgaacccagatagcggccgttgcagtgagtcatcattgcaccactgtactccagcctcggcaacagagcgagactccatctcaaaaaaaaaaaaaaaaaaaaactcgag

SEQ ID NO: 785 - DNA, 1371 bp, Homo sapiens
  misc_feature (1155)..(1155): n equals a,t,g, or c
gaattccagtgctaagtccactgctaataacagaaacagttaaagctgattgtgtgcttctacgtgccaggtccttactaggcatgtcaccttcactcactctaacttcacaacgtctctataagatagccagttattttgtgcacatttagcaacaagaacactgaggttctgggagattacgcaatttactctcatgataaaacttatatgtggcatagctaggatttgaacccaggtctctctgacattagcacttgtttggggttttgtttgtaccatgctgcttctcttggtttccttctgctaacttaagaatgcaaggaacctataatccaaaaccatactctaaacattaaatctcataacttgtaacttatgtcaccgatttggtgagcaaacagaattaagtagtccagggccaacagcagaatcttcagggacagaaaccagataactccaattaggtgggctaaacggataaattccacatcaaaggaacctttactaggaaaatatccggtgaccttcagcctctgataagacttcatctcatcatttctcctgtcccaacacccctacacttcaactagcttcaaatattctgtatccacaccaaagactgattcaacactttgcaatcacaaacccaaaggcaagttctctgggattgcatcagtatgaagattttattttgcaaagttacttccctgaccagcctccctgctgcagacctcttcaaatttcccagattaagaagacattcgaagtgacaattccaggccttatcatgttcaacaaactggtcacaatgtgtcagatgaagggcaagatcaattctctgggcctcttgcttctacatctcttatagaaagttaccatcatcaaaatctttcgcatcactcaaatcatcaacaatagttagaagaacaatarcacacacaaaaaaattagtagcaaagataagccagtacaagtaagtgtgacacagtccaaaccaacctgggcacattctcacaatcccttggaaatgactttacctgaaggctacgtgactcatttaactcggcactaagatggaaaggtctagggctctacagaagttcctagtaggaaaacttcattcttttccaagccaggtctccagggcctggntctgacatggttaccacttccacggagaagctgacaacagctggtcacattcttttctctaccctattcctccccatcaggtgaagatagctaactgccatgtatcttatctaaggaggctaacttgcagcaatgatgtggcatgacaagtgaaaagtaatggggatcttgaacagggaattcgatatcaagcttatcgataccgtcgacctcgag

SEQ ID NO: 786 - DNA, 2345 bp, Homo sapiens
aattcccttgaaggagcaggggaaaacaaacaatgccttatcagaggaaaatcatgagatgactccagatcatcagaaccctctgatgctggggaaagtagcccttttaaagaagtgggactttctgttccatcagtagacagcaaatggctcctaattgttttcagaaaacatgagtggcatgacagacaatgagcaggagcattgtagctgcatttgtctaatcctccctctgctaatcctttggtgactcacacagacagggtgaaaggggacccaggccagtcctcagcagagatttactggctgagccagcagcaggtctctgattaaccaagccttcatcagtcgagggaacagactccaagacacatccctgtgtgcgatgagccactatcataaataattaaagccacatgcatcttggcatataaataagtggagagtatttatggtgtggcagataaggccagggtcactcctttagggggatggcaagaaccaggaaggttaagagaataaaaatgctcacattgtgaatcccccagggggtctcctcattctgattcccttctttgtcccatttaaaaatgtgtaatgtggggtggaattgcatgaacataatgctacctgacttcaccccttatttccccatccccccagtgatggattaagcacaaatgtgcttttctttctgtacttatgtatttattataaacagtgggatctttctgatggaaatgattaggatgctggtcctctccttgcttctcactttctatctgctttcaatctggtccatagcatttttcctagcatgtcaggctgcaaggatatttagagatcacctggtacaatcccttatcagatgcttgcatccccacacctatgttcccagcaagggctctgcatttgacattgtctttattctgcatttatttagcctttccagggattccgaaagagcggaataaagatgctcctagtttgcaatgtatacagaacccaaagccggaattccgacaaagtcttgctctatcgcccaggctggagcgcagtggcacaatctcgggtcactgcaacctctgcctcctgggctcaagcgattctcctttctcagcctcccaagtagctgggattacaggtgtgtgccaccacacccagctaattttttgtatttttagtagaggtggggttttgccattttggccaggacactggtgtgtcttatgtccttgaaacaaatccagatggcgttgaagctccctctcatcaccaaatgcttggggacaatgctcacatttatatggcaaattgttaccatgtttagacttaatgtgagttttcagatttgattgatctgcacacctgaaaatacaatactgacactgatatggcttctcaccagtatgggatctcatatgtttcttgagttcagaaggatgtcgaaaacccttcccacactcaacacaaacatgaggaaaattcttgctgtgaacggccaacaaatgcctgtttaacagtccttgttctgcagtttcatagtcacagtatttgcacttgtgcatcttcggctccttgtctcttaaaataagtttattggaactcagtggactagcctctctgtatcttcgtgtgtattctgtaaattcatgggttttgtcgactttgtttatgagcttatggctttctaagtggttatggaaactcactttcttgttagttgtaaagtcacaatctgtacactgatatttttttctcattaaatgatcaggatgattcttcatgtgtctttttaagaatcccctggatttaaacttttttgtgcaaatatggcaagggtacactgtgaggggctgtccatcaggacctattataacagctgtttgccactgcctggtttctccccttctcctctttttggctttttgtttaagtactttatttgtattaatgccgtcacaaatttgaaggtactgtgctgctgtactacttctgctttctaatgctgagtccaaagtatttcctgatgcttgacaatcttcataccttcgggaaactcttctttcatctccatatgccgcagcctctgtgaacataggatataataattgttgatatacagggacattttgtttctccttgctctaagataaacttcagtctccttcacccaaccgtctcttgcgtccttcacccagctagcatctatgcatatgcaagatgcaaagcctctctcagttactcccaggcctccacagcgccccatgattgacactacactgtcatagtgaagaacattctttggaattcgatatcaagcttatcgataccgtcgacctcga

SEQ ID NO: 787 - DNA, 1015 bp, Homo sapiens
cgcagaagaaaaagagcataaaatttacttaaatagatgtctattcagttacagttatgagaggactccattaagttacacattttttgaaaaaacctaactcttaaatgagccaagcatacatcactaagtattctatttaagaggattcaacgtttagagaatcaagaagtaccagtggctgcattctcacaatttcctgcaagaatgagtctctcacttatctactttagtgtctcatttaccacttttggtgtgaaaagttcccatgatttatacatacctagactcttactgctaaagattctttacatactttgatgataatgattataatgataacccatacatagtgtttaatgcatgccagacactgctctaaggtttttgcatttaacgctcacagggatgcaattgtcctcagttttcatttacagatgaggaaactgactcatagagagttaagtaatttttttcaagggcatgtagcttacaaatgatagaacaaagattggaccctggacaatctggttccagggtcctgtcttaaacattaccttttcctgcttcttacagaaattattaaatgtttactgtttacaaggctaatatttatgaagtcattagaaatgatgttggaaaactgctttgaatcacataagtagctattaacaaatgaggttctagtagaatttgacaataatgacatggtaggtgccatttggctaataaaggaaataaaatgaagccctgaaatagattttttaaattactttcattatggttttgctatgcacatcttgtgttaagtaaagaatgttgcatggtgctattgggcaggggtttttttgtgctttttaaaactttatttcaacataactatgcttacagaaatacagtcatattggttaatagaatgcaacttaggtttaacttataatacacaatttggaccaaaaagttggtacatggtttaagattggaattcgatatcaagcttatcgataccgtcgac

SEQ ID NO: 788 - DNA, 1708 bp, Homo sapiens
ggcacgagcagaagtgaccatctcaagcatccggcctatttcagaaagagccacaaaccggagggaagtggagarccggagctcaggcctcgagtctagtgaggcgcgtcagaaattcgcaggagccaaagccatctcatctgacatgttctttgggcgggaggtggatgcggagtatgaggccaggtctcggctgcagcagctctcaggcagcagtgccatcagctcttcagacctctttggggacatggatggagctcacggagcaggaagtgtatctctggggaacgtgctgcctacagcggacattgcccagtttaagcagggtgtcaagtctgtggctgggaaaatggctgtgctggccaatggtgtgatgaattccttgcaggatcgctacggttcctactgatccgagctctgtgactcaggcttacgatggtgacggcaacaagaactccacagttcccaggctggggatgctttgccttgtggaagctggggaggatttgttacttcgtatgtgtggtgtgtgtgtggggtggcctttgaggcgctcactcctgtgaggggaatggtcagtaccagcccttgtcctctgcctgtggactgagccctttattccctctcacaccaccctccgtgtgttagactcttgtccttctgtcctgcccccacagctgctgctcacttatcctgccatactgggaaagggggttcccccacgatggcttattctgggtccagactttccccaggtagggaaagcggaaggtagaaggctttttttgctggctctagggttcttctagttcgaggccttgggtccccatcctctggaaccagggggaggcctggaaggagttcactgtagacccgtcccatggggaaagaggctgcggacttgctgctgctgctgctgccagtggcctcttctgggtgccaggagaggggaaggacctttgtctgggcgttaccaagggctggaaactttacctggtacctaaaggtttcatttggtatcagaccggagacccttgggttctcccgtctcaccacccctttctacagtaagcacttggaagattgtttcagggtgtctcagggtccctctgtaccatctgctgtggaatgcaggaccctctgtgacattctttatcccttcttccccgggttggtggccatggagggtcttgtctgctgtgattcgactctggatgctgtgagcttgatgctggccagggaagcagaggatgtgagaggcagaggcaggctcctggggctgagctccttcctctgcatcattctgggcttggcctggacagcacccgccagtgagagctgtgggcctcaccctctggcagctgagccaagcactgtcattcttggtgccatcttcccctgccgcaccggcagtctcagcccagcccccacctttgggttgtaggttgggctcccaagcaacacagaccactcttccccttgcccctcccccagagggacttgactttctttctggactgtttgtattgaaacaaagtggtgtcaaaataaagcccctgcagggcctggctccctgttggtctgagtgaaaaaaaaaaaaaaaaaaaaaaaaaaaaaaaaaaaaaaaaaaaaaaaaaaaaaaaaaaaaaaaaaaaaaaaaaaaaaaaaaaaaaaaaaaaaaaaaaaaaaaaaaaaaaaaaaagaaaaa

SEQ ID NO: 789 - DNA, 540 bp, Homo sapiens
attcggcacgaggtttcagggtgtctcagggtccctctgtaccatctgctgtggaatgcaggaccctctgtgacattctttatcccttcttccccgggttggtggccatggagggtcttgtctgctgtgattcgactctggatgctgtgagcttgatgctggccagggaagcagaggatgtgagaggcagaggcaggctcctggggctgagctccttcctctgcatcattctgggcttggcctggacagcacccgccagtgagagctgtgggcctcaccctctggcagctgagccaagcactgtcattcttggtgccatcttcccctgccgcaccggcagtctcagcccagcccccacctttgggttgtaggttgggctcccaagcaacacagaccactcttccccttgcccctcccccagagggacttgactttctttctggactgtttgtattgaaacaaagtggtgtcaaaataaagcccctgcagggcctggctccctgttaaaaaaaaaaaaaaaaaaaaaaactcgaggggggg

SEQ ID NO: 790 - DNA, 1494 bp, Homo sapiens
  misc_feature (1434)..(1434): n equals a,t,g, or c
  misc_feature (1439)..(1439): n equals a,t,g, or c
  misc_feature (1479)..(1479): n equals a,t,g, or c
  misc_feature (1490)..(1491): n equals a,t,g, or c
gacaggactgacaacaattttcctctcaccaagtgacctcagttctctgccaccactggccttggtggtggtgggccttggggtggaggcagaagggcacgtgggtcgtgttgacagttttgtattacctgtgtttttttctttaatagctatcatggcttgcttaggctgtatgcctgtttctgaggaatttatgaagcagttgtcctttggacaaatctataactttcttttcctagccaattatactcaaagaactaggggattatagagargttaggcatattttgttgggtgtcaggagatgctgaacagagggcttgtatatctgtacattgctctttctccactgtgaggtccatcctgccttaatttgggttcctgcagcctcagggcattctagggctctcttagatcctgctggactgagtcccctctagaaaagaagcaggaacaggctaaccaacagcagactgttagaagttggtggagggcactgacaggagtaccagccagctgttcagctaggatcctgggtccccagagctgacagcctcataggaacagacttacagtaactcagtgtgagctggatgcatacttaggtgccagtgcattcctttagtgggtgctgccctcccttcctgagttgggggcctgagtgagcacctctgtacagggcacccctctacagagggaggtagctggtatgtttgtcagtggagacttgcttctccacctgccacgaggcgggcatccatccggcagtagactcctagctcagggtgctcctgtgatggctgccttgcaacagagagaggatagcccaggaatggcagctccctcctttctcaccagtttccttcttccgtcctccctaccccaggtgctcagcagggagaccccctttcccgctatatcttcaggaaggctggggagatgctgggcagacacatcgtagcagtgttgcccgagattgacccggtcttgttccagggcaagattggactccccatcctgtgcgtgggctctgtgtggaagagctgggagctgctgaaggaaggttttcttytggcgctgacccagggcagagagatccaggctcagaacttcttctccagcttcaccctgatgaagctgaggcactcctccgctctgggtggggccagcctaggggccaggcacatcgggcacctcctccccatggactatagcgccaatgccattgccttctattcctacaccttttcctagggggctggtcccggctccaccccctccaagctcagtggacactgggtctgaaaggaaggagtcttttgcttcctttctcctttttacaaaaacaaacatagaagaaaataaatgcactttatccactccccaaaaaaaaaaaaaaaaaaactcgagggggggcccggtaacccaattcgncctanaagtgagtccgtattaaaaattcattggccggtcgttttnaaaaagtcggnnact

SEQ ID NO: 791 - DNA, 1504 bp, Homo sapiens
  misc_feature (1462)..(1462): n equals a,t,g, or c
  misc_feature (1480)..(1480): n equals a,t,g, or c
  misc_feature (1486)..(1486): n equals a,t,g, or c
  misc_feature (1493)..(1494): n equals a,t,g, or c
aacataagctggagctcgcgcgcctgcaggtcgacactagtggatccaaagaattcggcacgagactagttctctctctctctctctctcttgtaaattgcccagcctcagtcaggtatgtctttatcagcagtgtgaaaacagactaatacatatttgttccttttttttctcattatttatggttgcagtttggtggttttctttagtgatgttgtttgaatcctttcttctttgtgtgtctgctctaccagtgagttttatattttcatacattttcatgatggtagatattgttcttttgcttcccaatgtargactcccttaagcatttcttgtaggaccacaacaaacaagacccaaacaaacagtcttttgcttatctgggaaatacttttttcccttttatttatttatttatttttttagcaatggagtctcactctttcacccaggctggagtacactggtgtgatcatagctcagtgcagccttgaactcctgggtcaaatgatcctcctgcctcagccttctgagtctctggaattacagatgtgagccactgttccaggctccttcatttgtgaaggatagctttgctgggtatagtatttttggctttttttttttttttttttttaacttgtagtatacatctccttttctcctagcctgtaaggtttctgctgagaaatcctgtcagcctgatggagattctcttataaatgacttgatgttttccccttgctgttttcagcattttctctttgtctttcgacaattttaccataatgtgccttgragaagacctttttgagttgtatttatttggtaatctttgagcttcctgtrtttggaagctttcaggaagttttcagttattattttattaaataggttttctatgcctttacccatctcatctccatccagaactcccagaatttcagtttttggtcacatatgtgtcccatatgtcatgtagccttgcttcattcttttttctttctttttgtctgactgrattattttaaaagactattcttcaggttcagaaattctttgttttgcttgatctattctattgttaaagctgtcaattatcttttgcatttctttcaatcatttattccttccagggtttgtgtttggttctttgttatgctgcctatctctgttgaatttctcattcagattatgtattgttttcctgatttttttgtattcattatgtgtgttctcttgtatctccctgagtttctttaataacattattctgaatttttttcaggcatttcatagattttcttttcattggaatctgttgctggagaattattgtgcttctttggagatgttatgcttcctttttcayatttcttycatccttatgtgcggcacraragtacwwmtagagcggccgcgggcccatcgattttccacccgggtggggtacgaaatnagtgtggaagtattcccnttaaanccccccnnaagtcccggt

SEQ ID NO: 792 - DNA, 1759 bp, Homo sapiens
  misc_feature (699)..(699): n equals a,t,g, or c
  misc_feature (741)..(741): n equals a,t,g, or c
  misc_feature (777)..(777): n equals a,t,g, or c
  misc_feature (1643)..(1643): n equals a,t,g, or c
  misc_feature (1673)..(1673): n equals a,t,g, or c
  misc_feature (1677)..(1677): n equals a,t,g, or c
  misc_feature (1726)..(1726): n equals a,t,g, or c
  misc_feature (1751)..(1751): n equals a,t,g, or c
  misc_feature (1755)..(1755): n equals a,t,g, or c
gcgggtccgcatcatcgagccgctgctggtcttcctcctcgcctacgcagcctacctcactgctgaaatggcctcgctctccgccattcttgcggtgaccatgtgtggcctgggctgtaagaagtacgtggaggccaacatctcccataagtcacgcacaactgtcaaatatacaatgaagactctagccagctgtgctgagaccgtgatcttcatgctgcttggcatctcagccgtgggactcttctaagtggggcctgggattctgggctggtgctgggcaacctcatcttcatcctgttcttccgagccctcggtattgctggcaccctctgctttcccactctccttcctgtcccgcccctccctgcagctcatctccctatstgaagtccacatctttgtcaattcctaaagcctcctcttgttgctcacctgtcccagccctgtwagacctcagcccagatamttggtcccatcsggtcccamgtcctycactcccaacgctttgctcccactggcctccctcccgctgtaggcgtagtcctgcagacctgggtgctgaatcagttccggctagtccctctggacaagattgaccaagtggtgatgtcctatgggggcctgcggggggctgtggcctttgctctcgtcatcctactggataggaccaaggtccctgccaaggactactttgtngccaccactattgtagtggtcttcttcacagtcatcgtgcanggcttgaccatcaagccactggtcaaatggctgaangtgaagaagaatgagcatcacaaacccaccctgaaccaggagctgcatgaacacacttttgaccattttctggctgcartggargacgttgtggggcrccatggctaccactactggarggacaggtgggarcartttgacaagaaatacctgagtcagctgctgatgcgacgatcagcctaccgcatccgggaccagatctgggatgtgtactacaggcttaacatccgggatgccatcagctttgtggaccaggtgggccagcagcttccaggtgggccagtggtgggtgggcagatggtcagcagagcaggacagaaaggggtggcaagcaggctggccctgagcagggagttgggaattcctagctggctccatggtctggtgaagtggcagcggcaggaagcagctgggtctggtgctgacattcagagtctggcaggcagtccagagaggtgggaaacagctggactctggggtcagctcaaccattatcacttccaagcttgtgaccttgggtaagcacactctctgagcctgtttccttagctgtaagaaagcaggcataagaggctgggcacggtggctcacgcctgtaatcccagcactgtgggagcctgaggtgggtagatcacttgaggtgaggagtttgagaccagcctggcaacatggtgaaaccctgctctactaaaaatacmaaaactagccaggcatggtggtgcatgcctgtaatcccaactactctggargctkargcaggagaatcgctaaaatctgggaagcgggctgggcacggtggctcacacctgtaatcccagcactttgkggggccaaggcgggtggatcatgaggtcaggagttcgagnccggcctggccaacatagtgaaaccccgtntaanactaaaaatacaaaaactagccaggcgtggtggtgggcacctgtagacnggggggtcttggtagaaaaaaaacngggnggaa

SEQ ID NO: 793 - DNA, 2406 bp, Homo sapiens
  misc_feature (35)..(35): n equals a,t,g, or c
aattcggcacgaggagaactagtctcgagtttttncttctaccttttttttgttaaagagttacatctctcacaggaggaaagaattcaagagtctatatgattagttacagagaatattttcatcccctctccctgaatagaaaagcaggggtcaccatttgtatccttacccttgaggtgtttttgaagatgctgtaactcttgaagttgagctgaggcagaaaggttggaaaaatgcagccctctgggwattgtggggagggatgtgatgtagtaagagggtgttttgtggtgctaggattcccacgccaccaacttgcagctttataasagcgctaccaagaaccaccrctggggaaaaggttcttattcattgtttctgttggaatgtgatcttgctttctggattttaggaattcaggttactcagtataaaactctgagaaatcagtgtgacttagtccttcacctcctaagataaagtgaatatttctttacaaaataattcatgtccttaatgttaaagatgtaattttattttcaaaacatctataacatgactttcagaagcagttcatttttccaagattcctcacattatactagataaataataggccctcagttaatacccttcagttattgaattaatctagtttgtggaatgaggtgtatcctgccaacttccctctgctcccaagtacactctgagaggtaaaatgctctgggaaatggaacaagaatcgagtggatgctgactctgtgtgcccacctcctcaactgattgataatggttgaccttgggcaagtcacttctttcaatgcctcagttccccatctgtcaaatggggttaataatactgacctacctcacaggggtgttgttgtgaggcattgtaaatcaaagttaatagaatacttcagggtcctctgtggaggatgtcttgagccagagtttaagcctgacacacaggctttggtcctcactgagctgtctccaagactggaactacttagtgactcggcaaattttctgccccccacccctcatcaaagctgctagttcagatgttgacagtgttttcatgaatgttggaatcttactagtccagacttacttaggatgttgttggggaaggcacttgggattttctgtgtcttgcattcacagagggaggccatttcagattcaagagcattggattagggaatcgtgaggcagggatgctactgcgtatttctctctgcaggttggggattaaagttcctttccccatgggtttgaagcagactcagactgtctcaggatcaaagcaaccctcaatggttttgatttatgtcattgcttaccactccccaaccaatcccaggacagctgggtcactgtacccctttgtggtatctgtacctgggcctctccttcctcatagggaccagctgattgaataaatgtgaccaccttatttccaccccccacccccaaaagctacattggaattatttttcctagaaatgtgtataacactcagaattgggcattgatccttaaagcttcatcccattcaccgtattcaacatctgtcatctcttagtgtctgcagtctgaacctaaccttgaccttttttccctctggtttgagaaaactttggacactatttctacttggccaggtgtgggctcaagagccttactctttccatctcagtttaggggcgcagcagctcctcttcccaatagggctctttctgctttccctctccttggccctagatttgtaatccatgaaaaagcacaaggtcctggctccttgcggtcacattctggttctctgtgttttgtggactctgctctcactgttcacccagcactagcagtaccagatggttctgtggagtcctggggaatggagagagcacagtctgactccctgccaagtagccaggagttgacttgcccatggtccgctggctttcccaccacttcctacaggatgggatctaagagactcaagagctgggtttctttcagcactctgtactgtcccaaatagcaaacaaatcactttgtagccagatttctgaatggaaatgagaaattgaattctccatggacttttaggtttatgggggagttttagctgtgtttcttggttttatttcagccaaacatgtctgcttttgattttttttttaaagtataagtggtctatatatatgttcaccttttaaatgtaaatgtttaaaaagtaagcatttatgtgtttccataactgacatctgatgcagacctcattctctccccctcttctaccctcctcttttcccccttttcatactcttgtattggttctaataaatggttgcttttcaaaaaaaaaaaaaaaaaaaaaaaaaaaaaaaaaat

SEQ ID NO: 794 - DNA, 1377 bp, Homo sapiens
gcacgagttgactcggaaatcttcatcccaccctccaaaaggttactattggcattctttttaagcttctttgttcatatgatagttcgggagaggaacagagattcagatagagagacagcggaagacacagaaagagacaaagagagaaatgccttctcctctcttgagttccgtgaatacaaacactttccctactcctctttgcagtcgtagacccgttgcagggagattctcagtgccagttgtctggattttgtgaaggtgctcagggtatatagtgcagtggttcagaattgggggtgattttgccccccctccccagagacatttagtgaggtctggagaaattttgggggctgctacagacatctagtgggtagaggtcaggggtgctattaaacatgctgcaatgcatgggacacccccaaacaaagaactacctggcccaaaatgtaaatggtgctgaaatggaggacccctgatctagttggaatggagacagagcattactggaacatagtgagttgccaggtttaactcatcttcacataagtaccattgagcaccaactgtatacagaacatagtgccatgcatttcacagaacgcctggtttaaggagcttcagtctataatgggaagaggaaatgggaaagcagtgcttatccaggagacactgttggacaccatccatatgtgttctgaaccaacatcacaacagccatattatgagacaggcatgattcatacccattttaaagataacctgaagcccaaatcactcaactataaggtggtagaggaaagatttaaacctggagctaagtgattccaccacccatgttctcatgatgctcttgattaggcagatgaacaaatatacaaataattatgatacaggacatagtaagagcagtgctacaagagagatgcaaatagagcttagagcttagggtgggattaacagactacatagaagaggtggcttttgacatgcattttgggtgagctgtaggatgaggggaagaagtttcagacatggagatgcatgaatgtatatacacagagaggccacgcgtggtggttcacacctgtaaccccagcactttggaaggttgtggagggcagatgacttgagcccaggagttttgagaccagactgggcaacatggcgaaactcatctctacaaaaaatataaaaattagccaggtgttgtggcagtgcctgtagtcccagctacccagtaggctgaggtgggaagatcacttgagcccaggaggtcaagctgcagtgaactgtgatggcatcattgtactccagcctgggtgacagagcaagtgaagaccctgtctcaaaaaaaaaaaaaaaaaaaaa

SEQ ID NO: 795 - DNA, 2043 bp, Homo sapiens
ggcacgagtagtacagacgtgtaaatccttccaccccgacccgcacacacacccacactgctgccctggcgggggccatgggggtgatgaatgaccctccaacagccccacatgggttgtttctgtttctttggcttttctcgctccgcagtggagggtttactaggatttaagcttttgagtgcattgagaaccaagacagggcctggctccaactctgtgggccagaggtgggggactgctaggtcgagtctgcagcttcgccagtttcttggttgggacactcctctggcagccccagcaccaccacaaccccttgcagtgtgccccagtcccctggattcgctggactgcaaaaaggagcaccagggaaagctcagcaaaggctcaggaggcctcccgggtcctcgggagatgaagcatccgtgcctaggaaaaggggacagagggcaaggagagaagtgagagctacaattccagcattggagaagcgaggggcggggcgtcaaaggcactgcttcaggacgcgcttgctgaaacgactccaacagctagttcacagcccagcttgtacgttggttaccatagctactgctgtcactgtagctgctcccgtagggtcgttgattcctgaacgtatcacatctcacctgcccccttcctcgtgggacgtgtcaagttgactttaaagcctaaggtggcttgtggggactgcaccagaaagtgtctaaccttgtgttccccgaaatcctttctctgacttaggaaccagcgccccctgctggagaagttttttcattttgttagccgacttctggtagcttagcaaagagaccagctgactgtctctcggcccagcccaccacgccgagtagcttgtgtggatgcagtcctgtgagggtgtgcataaccgttcccaggtgtacgcacgcgcgcgcgcgcgcacagacacacacacacacacacacacacacacacacagtaaccacgggtaggcaccaggggctttgtacattcaggagctgcagagaggaaaggtctcccatgtaccagagaaggaaaagtctgatcccgaaacagcttgaacgaaaggtggttaacacgtgaccaatccccatggcagacagcgggctggtgaacaggaagagcacagaatctctgtggggcgatgctgcagcggctgaaaccacgtcaagtcccccagagcccggcattctatgtaagcatccacctgtgacgccgtggagcaggatcttcattcatctcaccagagcaacagcccagtcctgaggatgggagggacgtgacttagccttgggattccacgctcgccgccctcccttggccgccctactccccagtttcctggcgatgagccatttattgtgtctcacaccagcctcatttccaactccgacttcctacttagaatgtggcagtggctttgtgagtgagaatcctgatgagttttccagtggcctctgcagaagctggcccccttctaagggcatagctaacccccttcccactcctgagtcactgaattcgaggagggtggggcagggaaagggctggcccccctgctgaaatcttgattctgcatttgaggaaggtcagggtgccgctgggggagcagggagcggggagggaggaagaggggaatgcacatcttttgcgccactattaaggcacctgtcaccttacatctcaatctggaatcaaagtgccctgggttgagaagcagacctgggctctggtcacactttggtcactcattagctctaggaccagtcactaatctctgagactccattttctccagggaaacgaggcttgcccagatagactaacaaccctttagtgctccaagaagtgagaatttccgaaaaagatctgccggcccagagcactccctcttgccctaatcctggcagggtctggatgtatttaccaactctgatcttgcgtgcagggatgcttgctgatggatgaaagaccacaataaaacaagattagcagcaaaacaaaaaaaaaaaaaaaaaa

SEQ ID NO: 796 - DNA, 713 bp, Homo sapiens
ggcacgagttacgtgtctgttgtggtgtctatctgcaatgtgcagtcatatgtgtgctgttctcgtgtatgttcccgtgatcatgtgtatgtccacactctgtgttttgtatgtgtgtggtttggggctgcgtgtgtgtgtgtgtgtgtgtgtgtgtgtgatatttgttatgcgtgtgtttgtcagtgcgtgctgggtgtgcctgcgcccttgagttggcggtgaggctcacgggtaactcggtgggtgtctgtgtggttcgtgcacgatggcctgcaggcccctgagtctcagtgagcgtgggcctgcggctccgtgggaactgcaggtctgggtcctctgtgtgccccggggccaggccaaaaccaggctggaacccgccggcagggcccccgaggcgcctctgcctgctctctccgttcttgccggcggcagcgattcggactcccgctttcgacaaagtctcagctccgcagcagcacccggcgcggactcgctgggcgcgcggactgagctccgggtggaaccaggaccctcgcgccctcgccctcgccctcgcccgactggaccaccgcgagcaacgccgacgccaccgcagaccgcgggtcgcggggaagaggaaacgaaagcgcgggctccggagctgaagtgagaatgagcagaaagtgaaaagagaatccatcgggaaacagataaaaaaaaaaaaaaaaaaa

SEQ ID NO: 797 - DNA, 2791 bp, Homo sapiens
  misc_feature (355)..(355): n equals a,t,g, or c
  misc_feature (1007)..(1007): n equals a,t,g, or c
  misc_feature (2028)..(2029): n equals a,t,g, or c
ttttttttttggattagctaagaaaattttattttgctccgtgcgttcaaggagctcacacacatgcacatgcatatgcatgcacacacacacatacacacacactcacatgcatacacacacggctaatactgctcaaggcatggctcctgggcacagagttctggggccagaattctgctctgggccctcctcactctgtcatctcctgcactgcagtccagggtccagatagatttccgggatacagcaccttcacacctccaggccaggacccttgcttagtcccagtgcctgcaccaggtcatctccgagcccactcttcaacgtccttctcaaagacttgcggttgccngcggaacgcttgcgttccctagcagctaaggcacgaggactgctcttggtcactgactgcaccagaaggtccatgatctcatctgatgtatcactgggtaaactggagcctgggggttcttctggggatgcagtggagggccccactgtgggcatgattggggagctgctctggaccatgcctctgctgcggcgattgtgtgtggtgtcctcaggcctgctggtcagcagactcttcatactagcatgactgtcagcatctccccggcctggcccgctgctcactgctactgggacagaggggttgctgggggcttccccagccacacctgagaacttctctgtctcggtgatcatgcgtccccgggtcttgttgcgctcacggtatgtggcctgcttctgctgctgctgtagcactcgttcccggcaagtccgatactcaagcgcaaattcccgcagcgtgtggcagaactgcatgatgcgcacttcacgggccgctgcggggtgtagcccaggtagagcaggaaggcatggaacctattgcagacacggcggtgcactatccttagcatggcaacacggcgggcacactggtccaggaagtgggtgaggcgggcacgcagggctggggccagctcatgcttggccaartncgcaggctctcctcggctgcccggctccggcgctccagctgccccaggttctcagtcagctgttcaaagtccaccttggcacagcgggtcagggcagggatttctgaatagaggtcagaggactcaggccgggtctggagcactagggagcagagatggtgtagcagtgactgtcgacgcaccgtgtccttcacctytgacaccttctccaggtagctcagctyaaagccgctgctytgggagccattgaggaagttgcccaccgctaggagggtagccaggatgcagcggaaggtggcattctgtaccagctgttccatacccactttcaggtcaaacagtggctcagcaatttcccgctccatgctgtcatagtccagcttgaaggcccaragttgtagacgagcagcgaggccgccaatggaggcaagagtcatcaggaagttctcggctgggcccaggggtatgtcagggttggccagctgggcttcctcaatcttctgccgctcttcctccgtgggcatcatggtcagtagcttctcaatgccatccttgctgacagcaaactcatcaaagttgagcagagcagccttaatgacatgcacaggtggcagtgtggttaggccgatgttgatggcgttgctgcgcttggggtccagcactgtggtcattgtccggcggccctctccagctttcttggagggcagcacctctttggcacgagactcaaagaggtgttccagtcgggccgtgtccactgagacagggtccagtgaagcccagagggtggcgcagggcccaaagcggcttgcagagactccatggcccccagccagcttcagctcacgccagaaaagttttactgtcttcctcttagtggggagggctgagctgtcaggcactgaatggggaagaggggcagccagaggtagaggtggaggtggtgggaaggggcctttgatgggtgggggaggtggaagtgggggaggggggggtactcccgagagcaggggcagtgggnntgagggagctgggatgtctttcccagcctccacagactctacattcagcatgtcctggtcttcatcctcccctagatctgaaaagtccaggtccccaatagagagcctgggtgcacgggtagggagctcccagatgggctcagccttggggcttgctggtatcagtggctccttgggctctggtgcaaggcttcgctgggcccggagcaggacacagggggcagggctctggggtgttctggctgcaggggctgtctctggggagtcccagagttgccgggcawctaaagaaagggaaggagctgtcartgccatgccccctgtggggcaacaaarcaacaggcaggctctgcctgctcacccacctactcacctgggtgtccacccgcctcattgggcatggccccggcaagtgtctctgcccggccctgggccagcgcaacctgcttctctgtttctgctgccgccacattctccaggaaccgggctctgagggaaggtgcttgtcactgacagcgtctgacacaccccagcccaggtgtacatgccttgctgagcccctggacaccacccccaattgcaggcacgcacagacacacagggaacagtccatgcgctgagcagaccagaaccacaccccccccaaggccmscccctcttcagtcctccacatctggggaggattactaccaacccagcattcccaggtgaaaacacagggagaggatctacttaacatctaacttgcaacctcgttcatgt

SEQ ID NO: 798 - DNA, 2017 bp, Homo sapiens
taagctggagctcgcgcgcctgcaggtcgacactagtggatccaaagaattcggcacgagcagcgctacgttgtcctggaaacagccacctctgtccacggtccccgccgatggatacattctggagctggatgatggcaacggtggtcaattccgggaggtgtatgtggggaaggagacaatgtgcactgtggatggtcttcacttcaacagcacatacaacgctcgggtcaaggccttcaacaaaacaggagtcagcccgtacagcaagaccctggtcctccaaacgtctgaggtggcctggtttgctttcgaccctggctcggcgcactcggacatcatcctctccaatgacaacctgacagtgacctgtagtagctatgatgaccgggtggtgctagggaagactggcttctccaagggcatccactactgggagctcacggtagatcgctatgacaaccaccctgatcctgcctttggtgtggctcgcatggacgtgatgaaggatgtgatgttaggaaaagacgacaaagcttgggcaatgtatgtggacaataaccggagctggttcatgcacaacaactcgcacaccaacagaactgagggagggatcacaaaaggggccacaattggggtcctyctcgacttcaatagaaaaaacttgacattttttatcaacgatgaacaacaaggtcccatagcatttgataacgtggagggcctcttcttccctgcggtcagcctgaacaggaacgtgcaggtcacgctgcacaccgggctcccagtccccgacttctactccagcagagcatcaatagcctaaggatgtgccgtggaggcgccagctgcctgttcttacctccgcctgcgagagccacagcaaggagctcagccagccgtggtggggtgcagagttggcaggagtgggagaaggaggagagaaaagctggtcctctgcagtctttacacccacagctctgcccttttccctttcaacctctcctccgctgtcatgcctgcttccgcttccatgtccaacaattctaaccaacaaaggacctagacagcccaccaagtcacttggttcccactcccagattttgcttttatttaacttaattttttatgtaggtgagttatattttctttcttttctgatcaggttattggtgacttactggactggcaccgccagragaaaattctcctgctaacttttyttcttaagctttctgtcaaacaatgaggttgtagggggaggtagggaagaatgagctgaatttgtagcatacagcttacctgctagaatgttcttaccctcttacctctcctgtagcgttagctctgcagagctaagctttgggagaatgaatctatcactgagaagttttactactcattgaagcacaaaaatatccgctacacaggttcacatcagggtaggatcgttaggatggctctataattaggacaggccagaaccctggccactgtataaaattggaaagtctctaagacacaggcaaaccaggggacttaatgatttggttcgtttatttaataaaagcttttaattgagaacctactattgaccaggcactgttcaagacactagaacattatgttctagacactgtggggacacagtggtgaacagacaggcatggtctctgcccttcggagcttatattccagtaggagaaaaagcaaaaataaaataattataaatggtcatatgtactagaaaggaaatgggcaagggtcaaagagactcatgggcaagatctttcaggcttcctagaatgatgctaaaaatccacacattctggccatagcaccagaaatgtaccaactcaatgccttttcagctgcactatttaattatggtacctgctgccactcatcacagagcccttcttggtagaaatgatgtcagcattcttatttgctgatgctgctatgataccacgccttaaaaattgacagttgaaaaaaaaaagaaaaaaaactcgag

SEQ ID NO: 799 - DNA, 1273 bp, Homo sapiens
aaagtttctatatccatctttacttattggtagcttagtcttatacttagccttttcttacagaataataaatatctattaagcatgtgtagaaaaagggtaatgaacacatgttcattgactccagaagaaactacaactacaggactgtattctttacactgtgccaaactttattcctaaaagctacattagattttgccattcccagactttaaaacctttgtcacctataggaaaacatacagacttcgggggtcataaaacaggtgtattatctgctttaaaaaaatcactttgtttctatttcccacctccattactcttctactccataggtaaattctgatgtttctgatctgaatccttttatttgtatgtgtgcttgtaagacatgtagatttattttgtgtgcagacaaatactggatgtgcctgtattttaaatttgtaatacttgtgttatgctctagacattatttattttgacctcagcactcttttaaagatctgtctatatcaatggcatacatctggattgctactcctaactgctgcatagtattctgtagacagcacttgcttcattttatttattctatgtattggtgactttacattacaaggccttttttaataactgaccccatatttttaagttatctcttggaattacacttcatgcaccttaaatcctagctgcatgaagcccatcattcctgcatgaaaacagtgtccttttttatattgccatggctttgcacatgctgttccctaggatacttccagtcttctaatgactgcttcctcacgactcaactcagatgtcatttccttgatgaagacttaagcagctatttcatgcttgagctagttgctctgtactctgctcacacagcacttatttttatcttgggaatatagaagcctacaattccacctagcagtctatatttctgtctagattccttgaagacagcgactagatagatctcaggcatctttgtattctttactctagtttggtgaattgcatatagatggcaatcggtaaaacattcattgaatgaatgaagtgtgtggagttccttaaagtgaaataccatataagcaaaaatgattctcgtaagtaagaaaaggttgggacacaaatacaaatgtcttataaaactgagagaatggcatacaggaagctgaatcctaaaatgaattgaggcttgtaaagatactaagtactggaacatgttcagatcatgaaaaaaaaaaaaaaaaaa

SEQ ID NO: 800 - DNA, 1879 bp, Homo sapiens
gctcgtgccgaattcggcacgaggatttcctgacatctgcatgtacctcgtggaattcagccagcttcatgttgcaaatcagaaagctgaccccaagactgcaaatcaatgaaggtattggcattgttaaggwcgtagcgtagacaacagcagtcataaataattaggcaggaacttaacccaaatctagttctttgaccacctctaccaccagaacccagcagacactcacatctcctgataagagttgctggactcgatgtttttgttttgcattttctcctctccttccccacttactcagagaatttaaagtctgtagagtcagcacagccccatcagtccaggaacttcccaccaccagcccttgactgtcccattaactgacatggtcagatttccagctccccctactccctgctgtgaaacaatccctctccctgtgagaggaaactgtggagcgtttcttatcgaaggttaaatggactctgctcataaacctcttactgagatgcttcctgatagccaggctggccagagaggggtgcaggggttagatagtaagtggtggtcgtttgtggtcagttacctcaattctgttcattgcagtgcccgtaaaccatgtagaaagctcccagcactgaaaggcaggagtgttagcatctcgctttatccaccataacgtaaagaactgcggtgtgataacagccttcacggggccacggtggaaccaagacagcaggcgaggccatgcctaaaacaagtggtctggcacgggcactggccagctgctctctccaagcaggtggcccagatcccacccacgtggactttctcatcaggtgcagcgcctgccactctcagycwctgggtgtgtgactctcctcttcatctcagcattctccatcacttcccctccagaaaaacggatggaaggaagccytctgtgacactgcttctgagaagaagcatttccgggaccgatatcatctgtctggtctctgtgaacagcaaggaatcttcttgaccgttcttgggcactggaggctggctaggagttcagtaataaacgtggccttcgtgctgtagggcagagtggatgcagtttgtagctttcagagtgtctcattgagtctagatcattgaaccaacacttaaccaaatgtcccactcccatcacactaggacttgtcattccatgcccctctcctagtggtcatggtttcatatgggcatacaactgctactgaagttatatagccttgaaaactcagtgcaggttgcccttaattttccccaaacccctccatcggcaagtctagttgccctttagcacctaaagatctgcaccccaaaccaatgtcaccataaagagggcacgaagaagagtgggtgtgatcccaacggggttttgtaactgaagaagcccagtgtgagcttctcatcttttcatatacctctaacccccggtactcattgaatcattgatgaggtatctcaattgagatttgcaaggactttgataccatttgaaatggaaaaattttgaacgggctttaacatgtttaagaaatatggatggggccggccacagttgctcacgcctgtatcccagaactctggaaggctgaggcaggcggatcacctgagatcaggagttcgaggccagcctggccaagatggcaaaaaccccgactctactaaaaatacaaaattasccagcgtggtkgcgtacgcctgtatcccagctactcaggaggcaggagaatcgcttgagcctgggaggcagaggctgcggtgagccgagatcgtgtcactgcactccagcctgggtgacagagactccatttaaaaaaaaaaaaaaaaaaaaaaactcgag

SEQ ID NO: 801 - DNA, 2520 bp, Homo sapiens
acttttctttcttcattaggaaatcttattgcacaggaaccacccccacccccaccccccacaccttcccaaggcagcatcccagtgagatagagtgggaaaggtcccagagggctcactcacctctaggcccagagaggctttctcctcactttatacactgcaaaaacagaagaattgtgtcaataacaccctctgtagtggagaaacttaaaaagctggttaggaagctctcgtgtatatttagagacaattacaagaaagctggacttgccgctgtggtctcaggagaaatgagtgttcttgatgacaggcaaagggacatcttagttgtccagaagcggcactcttccctggaagccgccatgttaataggattactaagcctggctccagacagtgcctgctcatggctgccagttcttaccgatcacatctgtcactgccaccgtatatcatctgccagtgcatcagcttaaggggaggtcacgagtgcaaaagaacctgacccttgacaatgagggagaagggacatggaccacctgtctgggaattcctgggaatcactggcagggtggaggctgggctggggattagccgcggtgtgcgtgaatggctctgtctccagcaagtctctctccatcaaaccccaggtctgccccataagcaagatctttaacagatggatgtctccatgaggaaaacccaaggcgagaagcccaagccatggcggggttgcttgacgtcctcatggagtcactctgccccacatgctcaaatcttccctctggccccacatccctaggagggcctgacccctgtaaagatacaggaggcagctccctggcctccaaatggcccatggagatggcagtcgggagacagggttctgtgtttgctgcggtgaagggaggagaaggcaggaggaaaaaggatggcttctagccctgaagaggactccagcatcccaggcaccgggtgcttctggctgcagttttccctatggaggcccctcagcctccagccctaacataaatgtcggttaaattcagttttcaagcctctctcccttttcagtgtcagagcagtagatggtccagggcattggaggcctcgaccactctgcattgcagattacagtgacttcctcggggttgccccatcttggtctcctgtggtttcttcatcagctttttttttaccagcatctctcaaataacaatgaaagatagatatgcccattaatgtctgattaaggagcaaaggctggatttctggccacagcgcgctgcactctccctcctgcctcagccggggtccgtcttagcagtttggaaaggggaaaaagatgccggtcctcactgcttaagttttgtgtccaggcggccgctcagaactagtggatcccccgggactgcaggacattcggcacgacctcgtgccgcgccccactgcacagatgaggaaccagaggctcagaggagtgaagttgccttcctgaggtcacacagcatgaaagtgatgagctaggatttgaatctgggaagttgggctctagagccagactgtactgccttctgccacactgtactgccttctgtgactgggtggcacctccagggcacatttacacaaggccctgaatctgcagaggctgtttctcaagatgcccgtcatggtgtggcctgggccagctctggcttccacaggtccctgactgtcctcagagtggaacatgctcaacctcccgcccactgctctctcttctgcccagatttcaggggtgccggtccccaaggcctgccccctttctttaagactgaactcaagtctccttggaaggccccggtgaagctcccagagactggttttcttgggatgcaggcagaaggggaccctccctggccaacacccaggagcccagcagaagcacccacacgtagaaagaggctcactacagccagaagtgcagagtcagagtcctgggaccatcttgttctgcaaggtgaccccaggctccccaggacaggggagagggatcgtcctcattcagactctagctggggcctctgtactggcttctccctgggtggggttgcctgttacatagctgtgcctcagagaaagggtcctgcattttctggaatgttctctgtgcttacccctctgtgtgcccctccattgctcctctacaagcaattaggtgattcaaaagagcaacttaggctgggtgcagtgactcacacccgtaatcccggcactttgggaggccgaggcgggcagggacaggagttcaagaccagcctggccaacatggtgaaaccctgtctctacaaaaaatacaaaaattaaccagacattgtggcatgtgcctgtaatcccagctactcaggaggctgacacaggagaattgcttgaaccaggaggcggaggctgcagtgagctgagattgtgccactgcactccagcctgggcaacagaacgagactctgtctcaaaaaaaaaaaaaaaaaaaaaaaa

SEQ ID NO: 802 - DNA, 968 bp, Homo sapiens
ggcacgagaggcagcgatggcgatttttagtgtgtatgtggtgaacaaagctggcggcttgatttaccagttggacagctacgcgccacgggctgaggctgagaaaactttcagttatccgctggatctgctgctcaagctacacgatgagcgtgtgttggttgctttcggccagcgggacggcatccgagtgggtcatgcagtgctggccatcaatggcatggacgtgaatggcaggtacacggccgacgggaaagaggtgctggagtatctgggtaaccctgctaattacccggtgtccattcgatttggccggccccgcctcacttctaatgagaagcttatgctggcctccatgttccactcgctctttgccatcggtcccagctgtctcctgaacagggaagctcaggcattgagatgctggagacagacacattcaaattgcactgctaccagacactgacagggatcaagtttgtggttctagcagatcctaggcaagctggaatagattctcttctccgaaagatttatgagatttactcagactttgccctcaagaatccattctattccttagaaatgcctatcaggtgtgagctctttgaccagaacctgaagctagctctggaggtggcagagaaggctggaacttttggacctgggtcataggctgaacctgttatggacccccaaattctgagagttcctgcaacaagaatactgctgttgacactccagtggaaatcccagcagccttgttagtgcacttgaaagtgggagaatgctgaccctgatgacttgtactgattcctgagccttaacactgtgctctttccttctgtatataccatggtcttactttccaactctgtacagatttatttatggaggagctaggtccataaatgttgtaataaatattcctttgatcttggtgtttgcaaaaaaaaaaaaaaaaaaaa

SEQ ID NO: 803 - DNA, 1235 bp, Homo sapiens
ggcacgagcaaggctgtcaggttgttttgggggaagagggggtcatggatggctgagcagagagcggggaaaatgcaggctgagtggggcgacctcctgcctgccaggagccccctttcaggacacagcgggggtctcacacttgctgtccccatccatggcccgagggggaacctggtggtctcttctgagcttttggacttggggatgccaaacacgtgctcaccctcacactcgccccggcccgctgcgcccctaattgccaaagggtagggaaatggcgaagccagccaccaggtcgctggtgacagggccagggttatgcaggaaggtggtgcggcattgccttccacatatgtaagtctctgggcggcgccctcccagctccctgcctctgtttccccatgtgggccgtggggaactcccagagctacctcttgggggagcgtggtggcagcgatgatggggagacgcctggaagctcacagaacttgggtctggctggctcctgcccgtgacgccttgcccagcagcaaggtgcgcaacatggctgccagccccgcctcccacccccaccccgagtcctgagctcactttcgccttctccatcccctgccgtgggggccacagccacacctcaccgcccagtccagctgtctccagaaggggacaggcagtccgcggtctctggacaatcaactcaaggtacgcccactgcaaggcctccctcccaccgcggcccctgcctggccacctggcctctctgcaccagggtgacaaggggtctcgtctgccccttaatgctccagggcccagtcctaaggagctgagggtctgaggacgcagggagggtggaggtgtcctgaggctgatggacagtgaccgccactggcccccaacatgaccacacgtgggtgctgaactcggggcgccgtgcccaccggcatggtcctcccgagctccgacagcattacctcacccggccccatctgttgccccggtccagccctgatggcgcgcgcctggtctgtctgattcccctagccgccaccccacgtttctgtaccgggtctctgcagtgttaaacggacgtgtaaatagtggtaaatagtgaaagcctgtccttccctaaatgtaaagccatctgtccggcgtaaggacgacaccgtcagctgtccgactcgcacacatttaataaactgagctcttgcattgccaaaaaaaaaaaaaaaaaa

SEQ ID NO: 804 - DNA, 2311 bp, Homo sapiens
  misc_feature (2301)..(2301): n equals a,t,g, or c
  misc_feature (2311)..(2311): n equals a,t,g, or c
catacgcaagtcacatgaccatttaaatgtgcaaatgtaagaagattcaatgtgtttacatcaaatgacatattttattgatttattgcagattcagtgcatatgagccaaattgttgagtgtgtaagagctatattgtgtattttattaaattaatatatagttgtgttgcaaaaatatttgggcttatattgtaaatggcaagtgttgccttggtagctgtcgaactctatgagttttgttttttcctgcttccttttccccatggagtgtgggaagcagtgcctcagagcaaagtctcttgtttaatgtatagtctaccaagtactacagtacataatctgttcaaaatgtgtttgagtgagctgatggagctaactgaaaggtcaaaaattacatccatcagtcatggttatgtgcaagtccttgtagaagcttttattaaagtcatgctaaatcacaagaattgacatttgtaccaatatctgaaacttcttcatgttttttcaataacatacagcttctgcctgtgtagatattatgccatcagttggttctcaaaagtattttaagtgcttcagatgtgtgttcccattatattttgaaaacatgaaaaatgctttaatgcatgtatgtaccagcagtggttacttgcattgtgtagtgtttttcaagaggtctgggtcttaacaaaatgttttcctttatctcagtgctcttctgcctctttttgttggtgtcctttgagaacaatacaccttctattccttcatttggttacacctttccttgtgacatttagcgagtttcaaacttacttccatatgaggctaagaaacctcaaatttcaggaattgggaaaaataaaattagcacttgcagaagtagcagcagatgggaaaatgccttgattgacattttctttcagcatttaaaatttttggcattttacagcttcatgacaaacagttttgtgcccataccttagaaaatgtggtgctgagttaaataaaggctgtttgagcactggagcagaaaaatgcattatttgcaaactggtggataattttgtgccttctcttctggccaccaagccagtgtagaaacagcaaaaatgtcataaaaattcttatatttaaaacaaaaacaaaagcaaaaacaaacattgaattaaattaagttttgtaattttaaactttaaaaacttctactgaaaatatttccgccaaatgccatcaatattttagactgtacctcgtttgcaaaactgctttgagagggaagagtggacaactcccatcagccttattctcttgagaactatattttggttcctagtaacagcctttccaaagctctactcttggtttttattactcataaatgtttaaattagaaaagaagggaccttgtacatgtgaaacctaattgactctctatattttggacaatttatgtatctgaaatgtgttgtctctgttatatgatgttatttttgccaggagactacaggttgatttagcttgatagctgaaatttgatggaaaactgatttccatttagtcttaccaagtgttgcttctctcttactagacagatatccacttagtaaaatctaaagcagtatgtaaatgaaaccagcaaagagagtagggtttattttataaacattcttaatgctaagtaaccagttgttcaatttattatatgtgtctgaggacattaaaacaccataagrttgtaataattggttgtgccaatgtgtgagggatttacctttaggctctctgtcaccagtgatttactagtgttagctgtttaacacattatctgtatttagtagtgattatttatttacaagttggtggtaattcagcagtcaggactctaagcttttatagttgaattgaggaaatctcgcttttattcatttagctggcaactgcctttattgcagacctctggtgcttggctttcaaggaagcctatgagatgccaaaatcacacctttagagagcaccttgctctaataggtgatgcatgagcaaacagtgagatttgaaggggttttaacataatttagaatgtgaaaaaaatatcaattcatatctttcaagtactaacccctcaaaaaagcccacacatacaaaatatgtgatgtgataccactttgtcttttaggtctttaagtaactgaagttaagcacagaaaaaaaaatcacttcatggaaatttcagtaagaaacccaaacttctaaaaattgcttgcagatgagctaaaaaaaaaaaaaaaaaaaaaanctcgggggtn

SEQ ID NO: 805 - DNA, 2311 bp, Homo sapiens; identical to SEQ ID NO: 804
  misc_feature (2301)..(2301): n equals a,t,g, or c
  misc_feature (2311)..(2311): n equals a,t,g, or c

SEQ ID NO: 806 - DNA, 1057 bp, Homo sapiens
ggcacaggatgaggacaactgtgctgacaacccatgttcttgcagccagtctcactgttgtacacgatggtcagccatgggtgtcatgtccctctttttgccttgtttatggtgttaccttccagccaagggttgccttaaattgtgccaggggtgttatgaccgggttaacaggcctggttgccgctgtaaaaactcaaacacagtttgctgcaaagttcccactgtcccccctaggaactttgaaaaaccaacatagcatcattaatcaggaatattacagtaatgaggattttttctgtctttttttaatacacatatgcaaccaactaaacagttataatcttggcactgttaatagaaagttggggatagtcyttgctgtttgcggtgaaatgctttttgtccatgtgccgttttaactgatatgcttgttagaactcagctaatggagctcaaagtatgagatacagaacttggtgacccatgtattgcataagctaaagcaacacagacactcctaggcaaagtttttgtttgtgaatagtacttgcaaaacttgtaaattagcagatgacttttttccattgttttctccagagagaatgtgctatatttttgtatatacaataatatttgcaactgtgaaaaacaagttgtgccatactacatggcacagacacaaaatattatactaatatgttgtacattcggaagaatgtgaatcaatcagtatgtttttagattgtattttgccttacagaaagcctttattgtaagactctgatttccctttggacttcatgtatattgtacagttacagtaaaattcaacctttattttctaattttttcaacatattgtttagtgtaaagaatatttatttgaagttttattattttataaaaaagaatatttattttaagaggcatcttacaaattttgccccttttatgaggatgtgatagttgctgcaaatgaagggttacagatgcatatgtccaatataaaatagaaaatatattaacgtttgaaattaaaaaaaaaaaaaaaaaa

SEQ ID NO: 807 - DNA, 1948 bp, Homo sapiens
  misc_feature (1913)..(1913): n equals a,t,g, or c
ggcacgagctcgtgccgtttaaatgagaagtactgactttgtaattaaaaacaaaaactattttaaaatgtgctaaattttggacctatctcagcctgagaaggtttttttctaaaaaggttcaggcatctttttattttcctactgctctccttacctgtgcacacctcattgcctgtatctgtgatgcctctatttggagggaacctgggttatgcctgggcctggtttactcccataacatgggttgctgtacttgcccacttaattgtgagctctatccatccaggaaagtaatctgttccttattttgaatagcgtgttcttagaagttcatgggttctaattgaaggaaactagagggaccccttccatccttcagcaagggtccccaaagataggcagggtgcccagagaatgcctcaactgctgagaactccaccctttcaggtccaatgcaggctcatctccagaaaagctgggttagagttgtctcactgtttgggttggaatattgtgatttctaggagtggaaatgcacttgctaatttagctatctcctctttataagacgctcatggaaataaagattagccataaaatacctttaatgagcttccaaattttatctgcaaggaacccagggcctgtggcattatactggtttgtagaagactcctgtggtgtctgcagaaactttctctggtgaatatctagaatttccattactttgaatgtgtacatgttattaatcaaggaattaatcatccccattctctttgattgaaagtcacattaccttggaaggacaaggtgttgtcaaatgggcaaggcagatcatatgttttcttttactggactccttatttttctaattacagcctgtgtatcctgtgctagagagcctcttgaaattaacttaatttactatcacacttgtaacatacccatttatttgggcctgtgaatatgtgtgcactccatttgattacatctaatgttctccctaaataaagagtacaattaattcattagaggatggtttgtttccaggggtaagtgccagtttatgatgattccatcaacacttgcaccacattaatttatttccaatttaatcagtgtttaaattgaactgggatcaggcagaacaaaacacatggttttgcataattataatggagcaaatggaaatagtcatagcacttcagcattagaaacctcactgcagaagcacagatgggttaggagatgttgattaaaaaagatgtctaggaataaatcctctgtaagcactgtattaaaatccaagtgcctgcaggacaagcgactttgcattaattactaaaaaatttcttattctgggtatagctttctgtagaaatcctacagattgagtaaactgtggaggcactccttttcatgctccatttaacttaaattattagctggttcagaaagttgtttcttcccagacttgtctaggaagttcaatatttagcaattacccctttgtgcttctcgaaccttctccaagccagtgtcgttgaaggacagatttgccatgtgggaaggtgggctaccttggaaaacagatttttggttcggagcttgtctgaaactctctagattaagaattgtggccgggcgcagtggctcgcgcctgtaatcccagcactttgggagaccgaggtgggcggatcacctgaggttgggagttcgagaccagcctgaccaacatggagaaaccccatctctactaaaaataggaaattagctgggtgtggtggcacatgcctgtaatcccagctactcgggaggctgaggcaggagaatcactggaacccaggaggcagagattgtgttgagccgagattgctccattgcactccagcctgggcaacaagagcaanactccatctcaaaaaaaaaaaaaaaaaaaaaaaac

SEQ ID NO: 808 - DNA, 622 bp, Homo sapiens
  misc_feature (5)..(5): n equals a,t,g, or c
  misc_feature (18)..(18): n equals a,t,g, or c
  misc_feature (23)..(23): n equals a,t,g, or c
  misc_feature (33)..(34): n equals a,t,g, or c
ttccngctcgtataaaantgganttgtgagcgnntaacattttcacacaggaaacagctatgaccttgattacgccaagctcgaaattaaccctcactaaagggaacaaaagctggagctcgcgcgcctgcaggtcgacactagtggatccaaagaattcggcacgagctcgtgccgcgcccgttcaacgtccggagcatcggtgcagtttcgagggtaaagcctttggcgcggtgatgtggacttttgttctctaactacaactcccagcatacgtcacccctcacgtgggcgctaggtcaccagtgaaaagttgtgcagagcccaacatgagcttcatttccaagctgccacctatctctgcctcctgcgtagcatccggaaacatgtggccctacatcaggaatttcatggcaagggtgagcgctcggtggaggagtctgctggcttggtgggtctcaagttgccccatcagcctggagggaagggctgggagccatgaacatggagaatatccttggatgctgcattcataggagaattgaataatttctatcaatatgtatttatcattaaattttttttaagtttaaaaaaaaaaaaaaaaaaaaaaaaaaaaaaa

SEQ ID NO: 809 - DNA, 1647 bp, Homo sapiens
  misc_feature (89)..(89): n equals a,t,g, or c
  misc_feature (170)..(170): n equals a,t,g, or c
  misc_feature (603)..(603): n equals a,t,g, or c
  misc_feature (751)..(751): n equals a,t,g, or c
gatcactaccaattttcctgttttggggtgtaatgaaaattttaggctgtgccccaatttttagtttcttacgactatctttgattttngataggcatcttggagtagttttttgaatttttgactcattaattttcagaagggtgtctagactatttacactataagtngttcatttacctgagagtctaaacattataagttatcaaacaaaagatttatatgctggtcattccgtttctaaatcaaatggtaatacttgaagaatttttgctttaatggaaggcagcttgtgtgacagtgcgatcttaaaagtgtgcagatcccagtctcagtcaatcaatgtgggctgattgctgtggattgtaatagacagtcacatcatagcaatcttgcagataacgtttgctgctgtttattgtcagctttagcttctgctattttatttaaataatattatcttatttctccctatctttttttctccccttttcctttcttcatttctccctatctttaacttaacctgtcttctcccttttccacttccattttttttgttattttcttgataatgtagaaatattatgacatttatattgngttcttttaacttaatctcccacattttaaaaatcttagttctagagttaaatatattcagtgcttgcagctggtccttttgctctggtttatttgcctagtatttgctggttggctaagctttgactgtttttctttcttttatagncatcttagtcaaatttgtaatcgtttccttaatggaatggggtgttcaaaggccagtgtttatggaaactgactaggtaacatatatagtgaaattagcctgaatttggggggtagagttggactctggtcgggtagagtacaggcacttcttctaaagggacagctgcatcagtggattgttgtcatatggaaaaatgggcccaaaattctcaggtctgctcatagttcagtagaagctggagtggcyatgtgatgtctctgaagtggtggcagctaatagtttttwrggcacctaactcaaagctttaaaaacacagccaaacaaaaggtgtctgagctattacttttcaccttctttatagattctacatkkggtgcaagtttatttaatcctaaggtttttaaaatttattcaactacatgctgacacagttttgtttttttgaaaaacaattaaatctgtaatctgtctggtacttacttttcaatgtgtgaagtggagtcctgttttgggttttttttcctctattttattttagcatatttttctccccaaccttggcttcctttaaaaagccatacttgggccaggctcggtggctcaagtctgtaatcccagcactttgagaggccaaggcgggtggatcacttgaggtcgggagttcgagactagcctggccaacgtggcgaaactccgtctctactaaaaatacaaaaaattagccaggtgtggtggtgagcacctgcaatcccagctacttgggaggctgaggcaggagaattgcttgaaaacccgggaggcggagcttgcagtgagccgagatcgcgccaccacactccagcctgggcgacacagtgagacattgtctcaaaaaaaaaaaaaaaaaactcgag

SEQ ID NO: 810 - DNA, 598 bp, Homo sapiens
  misc_feature (550)..(550): n equals a,t,g, or c
tccaaagattcggcacagattgcaggtaagtgcagtggcataagcagaaggaagggaaggacatatttgggcacagtcattctgctaccaccaaaagcatctgcctattggtgaactttccacatggcttttctttcattttgctgctgcgcctttgctttgtattattggagctcagccttctccctttctattgtttttttttttctttatcgtatatacacacctaagtttttccatcttgcatcttcccacaatctcacttctccctctggctcctgccccgtctttctccttttgttcatactcagtctcaaaggaagagtctatagtcactatctccacttctccacctgccatttagctttccaccctctgcagccagaatttgaccctcagaactccactgaaactactctgtcaaaagctacaaattattgcctaattgtcaaagtcaatgggttatttttcatattcatcatatatggcatttaacattatagctctagattttgcccccaccttcctttatgaaactcaataccaaaantctcacacagcaactcaatagcaaaaaaaaaaaaaaaaaaaactcgag

SEQ ID NO: 811 - DNA, 1467 bp, Homo sapiens
ggcacgagttcatcttcatcttctcagcttgctccaaatggtgcaaaatgcattccagtacgagaccgtggcttcctggtgcagacaattgagtttgctgaacagcggatccctgtattaaatgaatattgtgtggtttgtgatgagccacatgtgtttcaaaatggccctatgcttaggcctaccgtatgtgaacgggagctgtgtgtgtttgcttttcaaaccctgggagtaatgaatgaagctgctgatgaaatagcaactggagctcaggtggtagatctactagtatccatgtgtaggtctgcgttggaatctcctagaaaagttgtgattttcgagccatatccttctgtggtagatcctaatgatcctcagatgttggccttcaaccccaggaaaaagaactatgatcgagtaatgaaagcactggatagcataacttctatcagagaaatgacacaagcaccatatctggaaatcaagaagcaaatggataaacaggacccccttgctcatcccttactgcaatgggttatatcaagtaatagatcacatattgtgaaactgccagttaacaggcaattgaagtttatgcatactccacatcagttccttcttctcagcagtccaccagccaaagaatccaattttagagctgctaaaaaactctttggaagcacctttgcatttcatggctcacacattgaaaactggcactccatcctgaggaatggtctggttgttgcttctaatacacgattgcagctccatggtgcaatgtatggaagtggaatctatcttagtccaatgtcaagcatatcatttggttactcagggatgaacaagaaacagaaggtgtcagccaaggacgagccagcttcaagcagtaaaagcagcaatacatcacagtcacagaaaaaaggacagcaatcccaattcctgcaaagccgtaacttaaaatgcatagccttatgtgaagtgatcacctcatctgacctgcacaaacatggagagatatgggttgtccccaatactgaccatgtctgcacacgattctttttcgtctatgaagacggccaagtgggagatgcaaatattaatacacaagaaggaggcattcacaaagagatcctccgagtaattggtaatcaaactgctactggttaaaggaccaccatttaattaacatgattcgaaagccttcctcgggttcaaagctggattttgaactgaagaagattataaaattatttattgttattataaacaaaattaaccctttgaatactgattttttttcttagtatttctaagtatctcattaaatacctaaaatggtataagatttatcaattgtagggttatggaatctagtaataaaatttcaacagcacttaaactgaagtttgggttgctcatacaataaacagattgaaaaaacaaaaaaaaaaaaaaaaaaaaaaa

SEQ ID NO: 812 - DNA, 1551 bp, Homo sapiens
caaagattcatgtgtggatatgtttctggactttcttttttgtcctgttggtctctttgtaagtctttaagtcactctcttcattctcataacttgaaggtcttgctatctgatagtgaaagtcttccactgtgttgcttctccaagagtctcttggcttttcctggtcctttgcatttcatttaattttagaattagcttgccaatttctaccaaaaaaaaaagtgatggaattttgatacatgggatgaataaattaattggaggagaactgctatctttacaagattcagttttacaatccttgaacgtggtatgttcctccatttaaccaaatgttttatagttttccgtgtagcggtctcatacatcttgtgttagatttagtcctagagaactatactaatataaatggtaactttttaaattttccttttttttttttttttttgagacagcgtttccttcttgttgcccaggctggagtgcaattgtgtgatcttggctcactgcaacctctgcctcccggattcgggcgattctcctgcctcagtctcccaagtagctgggatttcaggcacccaccaccatgcccagctaatttttgtatttttagtagagacggggtttcaccgtgttggccggactggtctccaactcctgacctcaagaggatcgggggacctcgacttccccaagtgctgggattcgggattgcaggtgtgagccactgcacctggcctaaaatgttccatttctaataaaatttttagaagagtccatttacatgatttactatttatatagagagatgtaattccttttttttttcctttttctttcttcttttttttttgagacagcatcttgctccgttgtcaggctggagtgcagcagcatgatctcggccactgtgtgatgtgttagagatactctttattagttaagaaaattcccttctcttcctaagttgctgaaagggtatgggtattgattttgccatgtttttttctgcatctatgaagctatataattatataatttttcatctttattgatatttatctttattcccatttattgatttggggatgttaagtcaatctgtctttcctgaaataaacttaacttgacagtgttatattattctacccataattatttttaagattttttttgcatctgtgttcatgagagattggtttctaattttcttatcaagtttggtatcaaggttatgctaaaaatcagctgggtgcagtggctcacgcctgtaatcccagcattttgggaggctgaggtggccggatcacctaaggccgggagtttgagaccagcctggccaacgtggtgaaaccccgtctctactaaaaatacaaaaattagctggctgtggtggcacaagcctgtaattccagctacttgggaggctgaggtaggagaatcgcttgaacccgggagctggaggttgcagtgaggcaagatcaggctgctgcactccagcctgggtgacggagcgagattcgtcccagaaaaaaaaaaaaaaaaaaa

SEQ ID NO: 813 - DNA, 1252 bp, Homo sapiens
ggcacgaggtgaggaagagagcagctcgcttctaactggactgcacgttggtgacagcgtcccaagctggtgacagacccactctgtaactttcagctagattcagccaccagatcccagaaacatgacccttgctgcctacaaagagaagatgaaggagctcccgctggtgtccttgttctgctcctgcttcctggccgatcccctgaataagtcgtcctacaaatatgaagcagacacggtggacctgaattggtgcgtcatttccgacatggaagtcatcgagctgaacaaatgcacctcgggccaatcctttgaagtcatcctgaagccaccctcctttgatggggttcccgagttcaacgcctccctgccaaggcggcgagacccatccctggaagagatccagaagaaactagaagcggctgaggagcgaaggaagtaccaggaagcggagctcctgaaacacctagcagagaaacgggaacatgagagagaggtgatccaaaaggccattgaggaaacaacaacttcatcaagatggctaaggaaaaactggcccagaagatggaatccaacaaggagaacagggaggcccacctcgccgccatgttggaacggctgcaagagaaggacaagcacgccgaggaggtgcggaaaaacaaggagctgaaggaagaggcctccaggtaaagcctagaggccaaagaactttccaggtcagccggacagctccagcagctccacgttccaggcagcctcgcccgccggtgcgctcccagcactggggtttggggggaggggggtggccaaggggcgtttcctctgcttttggtgtttgtacatgttaagaattgaccagtgaagccatcctatttgtttccggggaacaatgacggggtgggagaggggagaggagagagtttgggaaagggagatggagaagaactcaaggacattgcaaccctgcccggcgcagatctgattttcacatctctacctggacattgagcctccaggcaccatgttgaggagagatgaaaaccagggcggtagaacttcagggtgaaggacagagtcctgggtggggcagcggctgcagggcgcaccagagaacccagccagagggggtgtgagtaccagtggtgttgcttccaccctgcagcaggtgggatgaggtctgtgtgtgtgtgtgaaccatcattttttgatcatcatgaccaatgaaacattgaaaaaaaaaaaaaaaaaa

SEQ ID NO: 814 - DNA, 2516 bp, Homo sapiens
actagtggatccaaagaattcggcacgagcaggaccggcagccggcaagatgcgaccgccctgcccagcatgtcctcaactttctgggcgttcatgatcctggccagcctgctcatcgcctactgcagtcagctggccgccggcacctgtgagattgtgaccttggaccgggacagcagccagcctcggaggacgatcgcccggcagaccgcccgctgtgcgtgtagaaaggggcagatcgccggcaccacgagagcccggcccgcctgtgtggacgcaagaatcatcaagaccaagcagtggtgtgacatgcttccgtgtctggagggggaaggctgcgacttgttaatcaaccggtcaggctggacgtgcacgcagcccggcgggaggataaagaccaccacggtctcctgacaaacacagcccctgaggggccccgggagtggccttggctccctggagagcccacgtctcagccacagttctccactcgcctcggacttcacccgttctctgccgcccgcccactccgtttccctgtggtccgtgaaggacggcctcaggccttggcatcctgagcttcggtctgtccagccgacccgaggaggccggactcagacacataggcggggggcggcacctggcatcagcaatacgcagtctgtgggagcccggccgcgcccagcccccgccgaccgtggcgttggccctgctgtcctcagaggaggaggaggaggaggcagctccggcagccacagaaggctgcagcccagcccgcctgagacacgacgcctgccccaggggactgtcaggcacagaagcggcctcctcccgtgccccagactgtccgaattgcttttattttcttatactttcagtatactccatagaccaaagagcaaaatctatctgaacctggacgcaccctcactgtcagggtccctggggtcgcttgtgcgggcgggagggcaatggtggcagagacatgctggtggccccggcggagcggagagggcggccgtggtggaggcctccaccccaggagcaccccgcacaccctcggaggacgggcttcggctgcgcggaggccgtggcacacctgcgggaggcagcgacggcccccacgcagacgccgggaacgcaggccgctttattcctctgtacttagatcaacttgaccgtactaaaatccctttctgttttaaccagttaaacatgcctcttctacagctccatttttgatagttggataatccagtatctgccaagagcatgttgggtctcccgtgactgctgcctcatcgataccccatttagctccagaaagcaaagaaaactcgagtaacacttgtttgaaagagatcattaaatgtattttgcaaagcctaaagttatatatttaacagtttttatatgttgtatatttgtagaaaatcctatttaacaattaacgtggcagtcccggccgtcctgagagtcgggccgagccccgtgtgtttctgaagactctgggggtgggacacggcggggaggtggtgccccgcggaccccggggtgccaggcacggaaggcgggactctgggagaagcgtgcggaggaccgtggcgtcggcgtcccggatgtgtcggtcgtgcccggggaggccgggttcccctcgctgcgggccaggcttggctcctgattccctctctggtccctgtattggtcaacacttgagcgtacaatatcttgaacatgcttcttccaatgggttttgtttcccatttcctgcccctttcgccactcacggaccttgaggccagttgacggcccttctccccacgcctgtgtccccgcgttctgagaagtcctctgtcttcgtgtcactaggtccagaaagtcgcgccgggcagaggcgcaggcggggccggcagggccgaggaataagcgacaattctggtttttctcccctggccgtcgttcgccagcctccttcattttcctgagttcccgctgaagtatatactacctatgagtccaattaacatgagtattatgctagttctatcctactaaaaaaaacgtaaaaaaataactatatagaagctgttccagcaaccatagactgaagatacgaaagaaaatccatttatttaagacctgttccggtatccatgaggacataatttacctttcagtcaccacaaatttataggcatttgtatcctggactaaaagaaggggctgaggttgggtttgtcatcacagagggggtgggcctggaaagggtccttcccaagctgccccggctccggcggcccgggccggcagcctctgccagccagcgtcctcacggcctccccctcgcctgtttcttttgaaagcaagtgtagacaccttcgagggcagagatcgggagatttaagatgttacagcatatttttttttcttgttttacagtattcaattttgtgttgattcagctaaattatgaaaaataaagaaaaactcctttgataaaaaaaaaaaaaaaaaaa

SEQ ID NO: 815 - DNA, 2483 bp, Homo sapiens
ggcacgagcaattttttcacttctgtcctggcaacattggtggtgtttgcagttctgggcttcaaagcaaatgtcataaatgagaaatgcattacacagtatgaatattaatttccatttgccttttttcttagtttttatcttgttatttatacttttattgatacatgatagctatacatatttatgagatacatgtgatagttcgacacaaacatacaatgtataatggtcaaatctgggtaattgggatagtcatcacctcaaacattaatcatttctttgtgttgggaacattgctcattcattagcttataatggcatagtcgttcacaaactatacaccaaagaactcttatgtgctcatttgtatgttgttttatttttcagaaattcagagacgatcatgaaatttttgaaaatggggaacattagtcaggatattattccccatcatatcaacctttcaactgttactgcagaagattatcatttagtttatgacatcattcaaaaagtgaaagaagaagagtttcctgctcttcatctcaattcctgtaaaattgaagaagagctaaataaagctgttcaggggaccggcttagcttttattgcctttacagaagcgatgacacattttcctgcatctcccttctggtcagtgatgtttttcctcatgctggtcaatctaggccttggcagtatgtttggaaccattgaagggattgtcacgcctattgtggacactttcaaagtgaggaaagaaattcttactgttatctgttgtcttctggcattttgtattggcctgatatttgtgcaacgctctggaaattactttgttacaatgtttgatgattattctgctacactgcctctgctaattgtagtcattttggagaatattgctgtatgctttgtttatggcatagataagtttatggaagactaaaagatatgctgggctttgctcccagcagatattactactatatgtggaaatatatttctcctctaatgctattatcattgctaatagctagtgttgtgaatatgggattaagtcctcctggctataacgcatggattgaagataaggcatctgaagaatttctgagctatccaacatggggactggttgtttgtgtctctctggttgtctttgcaatactcccagtccctgtagttttcattgttcgtcgcttcaaccttatagatgatagttctggtaatttagcatctgtgacctataagagaggaagggtcctgaaagagcctgtgaacttagagggcgatgatacaagcctcattcacggaaaaataccgagcgagatgccatctccaaattttggtaaaaatatttatcgaaaacagagtggatccccaactctggatactgctcccaatggacggtatggaatagggtacttgatggcagatattatgccagatatgccagaatctgatttgtagctgggggaaaagtcagtgggttttatttggttcatttttaccaatgaacattggccctagtaggagaagcattaggcttcacttatcagagggcaatctcaggtgttccgtggctgtgatctttaatcctaacagtatatgtcagttcaacttgagcattcttttggattctttggtttacatttgtgcagaaaggattgcagacaaatcttaggagggctgaggtacatgtttgccaggatttttttttaagtacctttggtgtattttcaaatatttctatctcttaaaaaaatggtattacctcagtttctaataatttctgggtttagtagtgttgacaattaaaaatggtatacattaaaatttataagtttgccttcagggtaacttccagtgtcacaatgagcagttctgtaagtgggtgcctctcagcacatttctatgaatatattatgtagataggctgtattgattttggtagcattgacaccttcttaggcaattagttgaagaaaactgcaaaatattttcttatgtaatagctgtatagagcaatagcaatcaaagcatgagaaggcactaacgctgggatgaaagatgagattcagaggtgactgagaatcatgtgagtgatggctgtatattttgtgtaaaatatatgtgtgaaaatgaactaagagtgagttactcagcactctcaagaattatgcagattctgcatttttcttatgccgtgtgcctaaaaacctacttgatatttattgtggtttcaagattattcatagtatatttatacaatatacttgcaatgcatttaagtacttaaagtactaatttgaaaacttgaagcaagatggcattttaattaatatatttctgttttgcttctgttttatgcaaatataaatcatttttaagtgattgttaaaattgtaatgcattacattttaatctacaaataaacaaagtttaaaaatgaaaaaaaaaaaaaaaaaaaaaaaaaaaaa

SEQ ID NO: 816 - DNA, 1663 bp, Homo sapiens
ctcgtgccgtttctattcctctctcctctggttgtatactcagtaatgggattgctgggttgaatggtagttctgtttttagctctgaggaatcgccacactgctttccccaatggttgaactgttttacacacccaccagcagtgtgtaagtgttcccttttctccacaaccttgccagtatctcttaatttttgactttttaataatagccattctgactggcgtgagatggtatctcattgtggttttgatttgcatttctctaatgatcagtgatactgagccttttttcttatggctgttggctgcatgaatgtcttcttttgaaaagtgtctgttcatgtcctttgccttctttttaatggagttgtttgttttcttcttgtaaatttgtttaagttccatatagatgctggatatttgacctttgtcagatgcatagtttgtgaatattttctcccattccgtagttgggctgtttactcctgttgatagtttcttttgctgtgcaggagtgcttaagtttaattagatcctatttgtcaatttttgcttttgttgtgattgcatttggcatctttgtcatgaaatctttgcctgttcctatgtccagaatggtattgcctagattgtcttccagggttttttatagttttggcttttacatctaagcctttaatccatcttgagttgatttttgtacatggtgtatgtaaggaaggggtccagtttcagtcttccagagcagaactttctaacttgtgtgtgggtgttgtgccctgggcaggttaacagatccctccaactcgaggagtctgggtggctggagctctgcactggtcacctttggggtgagtagcctggccccaaagtgacatacaaacatcattttctgtgtgtgtcacagcctggagaaaggtgagaagtcccagatgatatcagtctaagagttttgtacttgacagaaaaagagaacaaagagccagtctggaggaaatcagcaagtgccttacatttttttcccaagctaggcttggtggctcatgcctgtaatcccagcactttgggaagccaacgtggaaagatagcttgaggccgggagtttgggaccagcctcggccaccgagcgagaccctgtctctacaaaaaataaaaatgaactgggcgtggtggtgtgcacctatcatatctagtctttggactagaaaaatctaaaatggtttggtaagactttgctgttgctttaaagcaatggtccccaacctttttggcaccagggaccagactggttttgtggaagacagtttttccactgataaagttgggggtatggtttcaagataaaactgttccacctcagatcatcaggcattcgattctcatacgcagcatgcaaccgagatcaccacgtgcacagttcaccgtaggttcactctcctacaagactccaacgctgccactgacctaacaggaggtggagctcaggcggtgatgttcgctcacctgctgctcacctcctgctgcgtggcccaattcctaacagaccacagacggatctgctggggactcctgcatataaagtaagtgtgtttggagggaaagtaactaatttaaagagattcccaccagccaattagaacaagaaaaaaaaaaaaaaaaaa

SEQ ID NO: 817 - DNA, 1531 bp, Homo sapiens
aaagagggggcctccttccctggaggccatctgatgagggtcgatgggccagtttgagaaccatttgtggcaagcgtttaaatcccaggctgctttttgccccagtacctggtatccagccatcgattgatgtgctacgagagaagatgaaccaattttattattagcctgaacaaaacataattaggaggagaaatttgcttctgctgttgcagttgctgcagcaaagaagttacataaggttcattcggatgacttgggaacaccttccctacttccctattcctgttcccgtttctctggcttgaaccaagtaaatagaggtccagagcctccactctgccttctagaaattcccaagacagaaatgtgctcaaggagcagatctaagaccctcagcctatagcggacatggaacaagggcacaaatcgaataagtcagtgcattgtcatgatgaacatgtggacaaaggcaagaaaagggagaagggacaagagagaggagcagactggaggagaaggaataaagagctgaggcatagctctgctcctgtgatgttagaggaagggaaggtggaaaaaaaaggcattgaattattctcagacaatttcagaaggaccagatggattctggaaggaattaactctgttatgtcctgtactagtatcattactacactctaagatgggcaaacgaaaggatttggagcattttggcagatactctttgggtgattgagagggggaggtaggaggtcatggctgttggggtgactatatgggggtcgcatttgggctgaaagttaagactctgtctcaaaaaaaaaaagaaagcaaagaaaatgtcaactactattttaagtaaacaaataatacaaattgtttctaatctttattttaggagatgttgcaaatatggaccagagactgcagaaagctagccagatcaaaggccagcagttaaaggcagtaactatagttaactcccagttgacccaatagaaggaagagccttgacccgagtaacacccagccactgatttttttttaatcttttctttttaactttgggatgcatcatggtgataataatgatgataaataatcagatttgccttgcttattagagttgacttggtctgctatttaaatgagtttctaattccctgctcacaccagactgacaaccgaaaccttctgggtggcaaagggaatcagcctgcctgggattaagatttttccatggttaatctccaaagtgaggaacctacgtgtgagtaattgagagctgacagcatttcgttggatcagttttgcctagtcagacagggagagggctaagccttggaaagacaatagggtaagacaagaggaagttgacagagtgtgacttctatccatttctcagccttgcttgcacaacctgccctagctcaggtgaagttggccctgcattctttgtctcttatttgctcatttccaacaaacctttcatttggtccaagggtaaaaagaaaaaaaaaaaaaaaaa

SEQ ID NO: 818 - DNA, 223 bp, Homo sapiens
ggcacgagatgagatccttggggtccaccctagtctctgacacctgggacaggggtgcttttgctactttggttgtggtcactcccccacacctgcctgcctccttcacggactcgaagtgaccttcctggaggaggtgggcagctcagactccacatgctggtggtgcctgaggtctgatggcctctaataaactgtgtcctataaaaaaaaaaaaaaaaaa

SEQ ID NO: 819 - DNA, 2015 bp, Homo sapiens
gaaaaatgcgaagactgctttatattttgtttgctcctctacactgttaattgatgaacataaatccaccagggaatgtgcaagatgtttaatctgccattccttttgttggtctcagttgctttatggtgcaagcaactgaaaacattgaatgtttatactataaggcctcgaaggcaaatgaaatacttcttttagggctcaactgaagaattagtaatttttcccaattgtggaggatttctaaatatttgtcagtattaagctaaaattaatgagtgaaaaaatgtatacagtctttacttcacttttaatttatgggatatgtactttattacatcatttttaataatatgaaataatttaaacacatagataatatacaacgtatacgatgtataaagagtagtgaaaggaaccacccaggttatgaagaagaagatctctaatattatcaaagccccaagaatagtttttctctattcaatcacttaccttgatccccagggtagcatcaatctgactttgttgcttcccattgtctttttttaataggtttatatacatatatgtatatctctttaacaatttctttaattataagtgtttttacttttacaaaattggtatcttatatatggttttcatacttgccttttttactcaatattgggtgtctgagattcctccaggtttttaatcagttttcctaagataaatattttgaagttgttttcagcttttcactattgtaaacaatgctgcactggatattcttattcatgtttcctgatagacatatgcaaaagtttctttaggcaagggattattggtccataaggtatgcacctgtgtaactttattccaaaatgccaaaatgcctttaaaagaattttgattacactcttgccatctttttatgacagttctacttcctccattcctcgccaatagttggtattgtccattattttattttacttttaaattttattttatattatacttttgtcaatgtagtgagtgtaaagtaatatttcattatgtgtttagctcagaagtacaactgccggattgcaggatatactaaatagttttccaaggcttcctttaccaccctctgctcctgtatctaatttccgctctacaatgagggtaaaattatatcccattgtggttttaatttgcatcttcatgattaccagtgaggagcttttcatgtattatttagctattcatgtttcctttcatgtagaataactgctcttgtttttgcctatatttatagaagtttttgtatgttctgaataatcttttttaggtcatatgtgtggcacatattttatcctagtttttgtcttctctttttatttgcaatgtattgtcttatgataagcaaaagtttataattttaatgcatagagcttttaatataattgttttcacattttctgatgtgcttaagaaatcctcaatgctgtggtcatgaagttattctcattttttttcctaaaaaatttaaggagttgtttttcacatttcagtgtttatttggagaatgtgtgtgtatgtgtgagcaggtgtgtggtaggaggcaggaatccaatttccctttttccaacatgagtcctagtaccccttgtcaaatatgccccattaatgtgcaatgacaactctgtcgtatatgagttgccatatgtgtttgggtgtgtctgagttcccaaatcaattccatttgtctttttcttccatatccataataatgtgccgttttcattattacaactttattataggtcttaatatacagaatgggcaagtcacactacttgttcatcaggaaatcttaactattttccttttatcttccatatgaatattggaatgagctcactaatttccatgccaacattgtgactggaattacattgagactaaagatcaatttgggaagaaatgccatccttataataatatatcaataaatccttaatattaaaaaaaaaaaaaaaaaa

SEQ ID NO: 820 - DNA, 1964 bp, Homo sapiens
ggctgcaggaattcgggccgaagcttagaatgactaatttggtcataagttttacacttagattttcttctttcccagtgttgcccttttgccttcttttatgtaacatagcatttgggttaaataataccttttcttagtagaaacacacatgattatctgtagtgaatgtaatttaatttgtaaactccttttgtgcggcattcctgcaggactgtgcactgtgacatggttttctattcatcaatcccttgccttgtatttttcaagtgttggttgaaccaattcttacaagtgaattattacaccctcccttgcagctcaaaacaaacaaaaaagttctcctttccaagttgaaacctataatttgatcagtttgcataaagtagttacagctattctcttccttagtgtcatctattgagagtacaccttagggaaagaagttctggagaatgagctgctcctgtcctcacggtagagatagaaaggtctgctcaatgtctccaatgccctctaatattctgaacagtaataaccttaaagatattaagataccccacttgaccatgccccttgggggtcctctccatcagtgctatctttctgtgaagatagagatgttctataatctgcaagtccattgtggtaaccagtagccacatgtggcttttgagcacttgaaatgtagggtaatgcaatagggggactgattttaacttttatttaatgttaagtaatttaaatgtatatagccacatgtggctaatggttaccacatcaaacagcatagctctagacagttgtgtggttctgaagaatctcaatgktcaaaaaaaaaaacattgacctctcttaccctcatattttattacaaacaccctgagtaaattagtattgaagacttggctgtcgaggcactctggtttgtgaaaaggtgggatttggagtcacaggccttgggtttagttctagccctaccaatcactgatcgggtggcctgggcacacattgtcccctcacatcagtttcctcatatataaagtagaaatgatggcacctatctcctaaggctattgkgaagatgaaatgaaacaacacgtgtaaggcactgagtgtaccctgtctaaattatgctggtctgtgtccacatctgactcaggcagagatttctcagttttccttatgtttaaaaaataaacaaataacagatcatctctgaagccaagcatgtttccaaagagaactctgaaaatcagctttattattttaatcctgtgctgtctgtgactgtctccagatgtgtgtctgtggagaaatagatcttcataagtctgagaaaggtatttagtctgtccgaaaatgtgtttctaagtatactcatctataattttattactgacatcttactagtaccactaacaagtaaagggaagttagtttaacataaagattattgatattgtttcctgagctatcagtgttacttcatttaattggatagagaggcttacttttctagattatctttgtaattgtttacttccctttaatgtgtctatgctatggtagagaataatggaaggcattaccatgctactccattttcatttggcctatgaagactggcacagtaagggctttatagaaatggaagttgtagaaaattgaaagtttaaacttattaagcatcaggacattaactttaactgctttttaaatagaaatattcctgaaatgtagaatgtttttgtaaattagaagtgttttaccagcctcctaaaaaatctgttgtttgaaaacttgggtcataaaagagataaaatcttaagtgcagagttaagcatcacaagaccagattgacttctagtacctggtgcatcaaacaaaaattctgatattggcagcctgggcaacatagtagaacttcttcccccacaaaaaaaaaaaaaaaaaaactcgag

SEQ ID NO: 821 - DNA, 1650 bp, Homo sapiens
ggcacgaggttcctgctccgcttgaggagaagcgccaagtgcgcatggggacgctatagcaattcgtttgctgtccttcctctccttcgaagatgacaaggcctaccatcgtttcttcctgcctttgggccgtcaggcagttggttgggacccgctccaaccctcggttcttcctgcaatacagtggatacaatttgtcatggctactctgagtgttataggttcaagttcacttattgcctatgctgtattccataatatacagaaatctccagagataagaccacttttttatctgagcttctgtgacctgctcctgggactttgctggctcacggagacacttctctatggagcttcagtagcaaataaggacatcatctgctataacctacaagcagttggacaggggagacggggtttcgccatgtttgccaggctggtcctgaatgcctgacctcaagtgattcaccgcttgggcctcccaaagtgctgggattacaggtgtgagccactgcacctggcctccttaaatgtatctttatggcctaattttcacctttgcacccagttgatattctacatttcctcatttctctacaccgtcaattacatctggtatttgtacacagagctgaggatgaaacacacccagagtggacagagcacatctccactggtgatagattatacttgtcgagttggtcaaatggcctttgttttctcaagcctgatacctctgctattgatgacacctgtattctgtctgggaaatactagtgaatgtttccaaaacttcagtcagagccacaagtcttacttatccgagcccagacattgtataagaagtttgtgaagtcaactggctttctggggagtgaacagtgggcagtgattcacattgtggaccaacgggtgcgcttctacccagtggccttcttttgctgctggggcccagacgtgtgtggaggaacctgatacttcagacagtcagggctgacaagaaggtttacactttgtgtattcacagctgtcattctaatgatcataaagctgactaagccacaggacaccaagcttcacatggccctttatgttctccaggctctaacggcaacatctcagggtctactcaactgtggagtatatggctggacgcagcacaaattccaccaactaaagcaggaggctcggcgtgatgcagatacccagacaccattattatgctcacagaagagattctatagcaggggcttaaattcactggaatccaccctgacttttcctgccagtacttctaccattttttgaaactacaatactggaacatccaggaactggagttattctacgctaatggattggaaagaatgttgggaaaggacatcttaaatcttttctaactatgccctaaactgcagaactcaaaggaaatatagtgccattgttagtagtcattctagatgaattgggagtatctctccagttattcccagattcactagtgatccttaaagtctctattcagggagaggaagacactttccatctcagagatagactcgtgttaccttgatggatattggatttgtctaagtctcttctagaaaaaataaattctagattattaaaaaaaaaaaaaaaaaaaaa

SEQ ID NO: 822 - DNA, 924 bp, Homo sapiens
  misc_feature (924)..(924): n equals a,t,g, or c
gctgaccaggaactgctgagaaggaagggaagaggggcttgaagcagagcatccagcgagaaacctggcctggactgggatccgggaaggcttcctggaggaggtggcaggagccaggatctgaatggtcaccgacgatgagggcgcacctgctgtcctggagcttccgatctctgttcggggaccctgtgarccttctggccggctgcgtgcagagcccactgggcacggtggtcggcctggtgtgaggccccccggggaccggcagtgtgtccagggaggggatggcctkagcccagcggctcctcccgctgagtgtatttcttcccaccactcagcgcatggctgccctggctcacgaggcagtcgggactcgtgacttgctggctgctggctgctgctgcctcgcgcgctggggttccatggaggaactgggcctgccgccccggcctgcacctgctgcccgcatgctggggtcccatggaggaaccaggcctggcgccccggcctcgcccagcggctggtgtgggcagctgttccctgcctcgcagtgtcctggaggcagctgtctcgcagactcagcttggtctcccgcaggcttcagaaaaacccaattgcacgtgtgggattcttccccagcccttgggtgcggggtctctgtgcacttgagagctgggggacccacccaccgtctcccactccaagttcatcccagagcgtgggcccgctgggcacctggcacctggcctgcagatgctgctacgagtgaccagtgctgtgtggaggagccaagggcggcccctgggaaaccgggcttcaacagtacaaggaaaagaaacttgctctgttttgtaagagcgtgttccttttcctcttttttgtcactttaaagaccaaaaagaataaagaaagaaaagaaaaaan

SEQ ID NO: 823 - DNA, 1015 bp, Homo sapiens
ctactggaatccccagctggagctycaccgcggtggcggscgctctagaactagtggatmccccgggctgyaggaattcggcacgagctgaccaggaactgctgagaaggaagggaagaggggcttgaagcagagcatccagcgagaaacctggcctggactgggatccgggaaggcttcctggaggaggtggcaggagccaggatctgaatggtcaccgacgatgagggcgcacctgctgtcctggagcttccgatctctgttcggggaccctgtgagccttctggccggctgcgtgcagagcccactgggcacggtggtcggcctggtgtgaggccccccggggaccggcagtgtgtcagggaggggatggcctkagcccarcggytcytcccgytragtgwatttcttcccaccactcagcgcatggytgccctggctcacgaggcagtcgggactcgtgacttgctggctgctggctgctgctgcctcgcgcgctggggttccatggaggaactgggcctgccgccccggcctgcacctgctgcccgcatgctggggtcccatggaggaaccaggcctggcgccccggcctcgcccagcggctggtgtgggcagctgttccctgcctcgcagtgtcctggaggcagctgtctcgcagactcagcttggtctcccgcaggcttcagaaaaacccaattgcacgtgtgggattcttccccagcccttgggtgcggggtctctgtgcacttgagagctgggggacccacccaccgtctcccactccaagttcatcccagagcgtggggcccgctgggcacctggcacctggcctgcagatgctgctacgagtgaccagtgctgtgtggaggaggccaagggcggcccctgggaaaccgggcttcaacagtacaaggaaaagaaacttgctctgttttgtaagagcgtgttccttttcctcttttttgtcactttaaagaccaaaaagaataaagaaagaaaagaaaaaaaaaaa

SEQ ID NO: 824 - DNA, 803 bp, Homo sapiens
ggcaagggaaaatgttacgtgttttcttctttagcttggttgtgggcacttctacagcaaggaccatatcatattcatctttgcatccctggcacatgcatgagaacataagtacttaataaatgcagttgaatggataatgaattagtgttatttatggattagaaaaagcatgtttctatttaagtaagctgtaaaaagtattattgaatatttactgtaaatatatgttcacataaaaaaataacttggagggtctttgtgtccctgggcatattatccatcttccatgggaaagaatccactgtggtttctgaagagtgattggaaaatggattattttgaggattgaagaagtgttctttctgcgttgtcactttgttcaacagtaaaactttattctcaggttcaactcgcattgtaacattttgacagttttttttaatcacctacaatctgtaaagaatgtatatattcttttcagcatctcagtttgaaaagacatgcagttaaacttgaccttttgataatcgctcttacaggtcattgtctgttctaacagcaaattgtaaacatgtgcttcatagatattgtggctctcagtcatcactttgtcctatggtatttattgaatgttcacatactaatggtgcacaggtgtttttttctataaatcttctgactgtcctgtaattcattcttaagctttaacttgaaggtatcgtaattgccggcatttgatgtttagcaataaaagaataaatgtgtaccagcattttatgtttaaaaaaaaaaaaaaaaaa

SEQ ID NO: 825 - DNA, 665 bp, Homo sapiens
atataagctctaaaactctcctgtaatatctctgacccaatttagcaccacttttttccatttcattttttaggactgaaacataaaagaaccagtgtccagaggcaagtgacatatgtcttacacttgtggccatccttcatttcttcataaactttgcttaaaagactaaaattcccaattccttataaaaaatatactcttgccctcagccccagtggccactggcaaagactgttatttcccaatggataagagagcctccttcatcttcttggccatagttgggatgaggtgcgtgtggtcatccacacacttggtcacacaaccgtccagctgctgcttcacctgaagctccttactcccagtatccattgaatctttggctttgttgttgcaatgcatggcgcaccgggccaggtggtgccggaacttctccaactcactggtgagcaaagcccgggcttgagccagaggcacatggcagtgctttgatgtactggtgcacctactgcatggaggcctggctgtcctcacaacagctggtgctgcaccggaacatgagaccctgcatcttccagatgttctctctytccagactyttcaccatggagtccaccacctcctgcacccacagctgctgcagctctgccatggcgtcccca

SEQ ID NO: 826 - DNA, 1454 bp, Homo sapiens
  misc_feature (668)..(668): n equals a,t,g, or c
  misc_feature (676)..(676): n equals a,t,g, or c
  misc_feature (695)..(695): n equals a,t,g, or c
  misc_feature (705)..(705): n equals a,t,g, or c
  misc_feature (720)..(720): n equals a,t,g, or c
  misc_feature (814)..(814): n equals a,t,g, or c
  misc_feature (821)..(821): n equals a,t,g, or c
  misc_feature (828)..(828): n equals a,t,g, or c
  misc_feature (881)..(881): n equals a,t,g, or c
ggcacgaggcaccctacgcaaaatagcggaggtcggcgccaagaaaagcactgcaggttcagggcgcatgcgcatttccgctccttgccggttttccggacctctacgagtggctgccccacaaaatgcctgcttctctgcggaatcctactgttcttcacatgctctctaataccatcttttcatatccactttctcttccatgttgaaaaattaaattgacaggctggattctgcaaagatctttggacatttaagtatcttcgaccggcgcgaaaagaggcggcctgaccttggaagtgggacggggtcctgcagcgggtccttccggcgggtgacattcagccggcggttcggggcgacggactctccattccagaaccatggcccaatttgtccgtaacccttgtggagaagaaccccggcgctggtgaacgctgctgtgacttactcgaaagcctcggattggccacattttggtaactaacgccaaggttgagctggttccttcccaacccctgctgaaatccctaaagctattcaaagcctgaaaaaaatagtcaatattgctcagactggtagcttcaaacagctcacagttaaggaagctgtgctgaatggtttggtggccactgaggtgttgatgtggttttatgtcggaaaaattntaggcaancggggcatcattggctatnatttttgaanaccatgtgtgatcanactgctatctgaataaaataaaaatttgtcaaaactcagtgtttttctcccctcaaaataccccatgaaaaaggtccccaattttcctctttgnaaaattnaaacccnggggtttgtcttttaaaaacacccctaaaattaccccgtctggttttggcccngccaattgggaagggttatatggtggccaatattaacccgggtacctggaattattatgggggataacctttttaatttgaaggtttggatatatatatttaagctttatttccagaacagtgagggttaggtcttgggaaaactataactgccaaagtagaagaaatagtagtaccatatgccaagtgatagagatgaatcatgtcagtagttagaataacatttcaactgttttctttgctaaaatcacagaaagaccctattgacaacatctatgtctgtaaaaatgttagagtacttgtcatcttgaatatagcctccccaagagagaacagggtggtattctaagtatgtttctttgtaacatctttagcagtaggacagagccatacatgtgaaatctgatttttatgtgtgttattcgtttgtctggttttactacctttgcaaaaacaaaataccccaaagatatttaaacaaggttataatttagcatcttccctggatctaaatagtatattatatcctgaaataaatgaaatgattgctataaaaaaaaaaaaaaaaaaaaa

SEQ ID NO: 827 - DNA, 853 bp, Homo sapiens
  misc_feature (225)..(225): n equals a,t,g, or c
  misc_feature (851)..(853): n equals a,t,g, or c
gagtggtgtgaggatagctcactgctgcctttaactcctgggttcaaatgatcttcttgcctcagtctcttgaataactagaacatagtagctgaagacatggatgtcatcatctatttctttatattttttgtaacattttaaagctattgcctagtttaataattatttcagtttgtgtatgtaaggacaatcaggcatttaaatttataaaacatgtttganaatctttaaaagttacacttactgactagttgcttgtctgttgcactaacaaaatttattattcatgtttcgggaatwycctctttaggtttygtttgttttttttttcatagtaaattatcccagtacaagtgtctttgtacaaaattttgatttctaagtttctttaaaaatatcaatgccagctgggcccagtggctcacacctataatcccagcactttgggaggtcgaagaggatggctgaggaggttggatcgtttgaactcaggagtttgggatcagcctgagtgacatggtgaaaccccatctctgctaaaaaatatgaaaattagggctgggtgcagtggctcatgcctgtaatcccagcagtttgggaggccgaggtagacggatcacttgaggccaggagtttgagaccagcctgggcaacatggtgaaactccgcctctactaaataaaaaaaaaaattagcctggcatgggggcaagtacctataatcccagctactcgggagactgaggcaggagaatctcttgaacccaggatccggaggctgcagtgagctgagattgtgccactgcactccagcctgggtgacagtgagactgtctcaaaaaaaaaaannn

SEQ ID NO: 828 - DNA, 1117 bp, Homo sapiens
  misc_feature (800)..(800): n equals a,t,g, or c
caaaattccggagctccaccgcggtggcsgccgctctagaactagtggatcccccgggctgcaggaattcggcacgaggtgctgatgagcgagcgggtratgggcaccgagcaccccaacaccatccaggaatacatgcacctggccctgtactgcttcgctagcagccagctgtccaccgccctgagcctgctgtaccgcgcccgctacctcatgctgctggtgttcggggaagaccaccccgagatggcgctgctggacaacaacatcgggctggtgctgcacggggtgatggagtacgacctgtcgctgcgcttcctggagaacgcgctggccgtcagcaccaagtaccacgggcccaaggccytcaaggtggccctcagccaccaccttgtcgcccgagtctacgagagcaaagctgagttccggtcggccctgcagcacgagaaggagggttacaccatctacaagacgcagctgggcgaggaccatgagaagaccaaggaaagctccgagtacctcaagtgcctgacccagcaggccgtggccctgcagcgcaccatgaacgagatctaccgcaacggctccagcgccaacatcccgcccctcaagttcacggcccccagcatggccagcgtcttggagcagctgaacgtcattaacggcatcctcttcattcctctcagccaaaaagacctggagaatctgaaagccgaggtggcgcggcggcaccagctccaggaggccagcagaaacagggatagagccgaggagcccatggctaccgagcccgcgccagngggggccccaggagacctgggctcccagcccccggctgccaaggacccttctccgagcgtgcagggatagagagggagccagacggacagccagccagcggccccgtcaccagggagcccgactgcgggagaagggggcgagcctgcgggcggaagaggaagcaaggccctcttcctccacgtctcaccccaccccacccccgtgtcctcctgggagcctggcctgcctgccccgcagaaggtgtttttgcgctggttcaatgaatagatgatgcagaggcaaaaaaaaaaaaaaaaaaaaaaaaaaaaaaactcga

SEQ ID NO: 829 - DNA, 685 bp, Homo sapiens
  misc_feature (17)..(17): n equals a,t,g, or c
  misc_feature (28)..(28): n equals a,t,g, or c
gggccgctctagaaacnagggacccccngggctgcaggaattcggcacgagcttgtatttgtgtgtttatgtgagttctgtctaagagatcagataagctctggaagcttcatcatctgtacctacatgtaactgtatctgggttacatgggcaggcggtaccaagtcctgctcttcgatggggtggctgagagataaaggttcctgaactctccttgctgtgtatgcaccacatctgtacttcagagaggtggaaaatcatctacaacactgcgtttcttgtggttgtgctgttactggtataaagtcaagtgccttcaatgctaaaggctcagaaatttttcttaaactgatttcatgtcctatgcaagtgttttctacaacctgcataaccagtactttgtaaaacttgtttacgcttcaattgtacatagtgatttttaaagaaatatatagtatttttatttaggtacctccaaacttgaattcgtctgtgtgaagcattgtaaaacgatacatttctcttttgagtaccattacagttgtacagaggttttcactgcttctatttttctactgttactgataagcatgtaacactgactttatcctacatatagttggcatttcaaataaatggcttgtatagaaaaaaaaaaaaaaaaaaaaaaaaaaaaaactcgag

SEQ ID NO: 830 - DNA, 2630 bp, Homo sapiens
gctgcacttcccaggccccaccagccgcggctccggctcgtagcccacagcccactgccggcggctgggcgctgccgaggctcggggcgcgcgcagttggcgtctgccagtgccaagactgtgccgcccccacagccgaggcgcgaaagggggacgcccggcctctgggccgctgccttcgctttctcttcgttgttgcgaacgccgtccgctcaggaggcgccccgcgaccggcgcgatgagtgccaacgaggaccaggagatggaactagaagcattacgctctatttatgaaggagatgaaagtttccgggaattaagtccagtttcttttcaatataggataggtgaaaatggtgatcccaaagccttcttaatagagatttcctggacagaaacatatccccaaacacctccaattctatctatgaacgctttttttaacaacaccatatcatcagctgtaaagcagagtatattagccaagctacaggaagcagtagaagctaatcttggaaccgctatgacctatacattgtttgaatatgccaaagacaataaagagcagttcatggagaatcacaatcccatcaattccgcaacatcgataagcaatatcatctcaattgaaactcctaatacagccccatcaagtaagaaaaaagacaaaaaagaacaactttcaaaagcccagaagcgtaactggcagacaaaacagatcacaaaggagaacttcctcgaggctggaactgggttgatgttgtgaagcatttaagcaaaactggctctaaggatgatgagtagcacttggaatttgagacaaggaaagagcattctttaaagagtaaaactgggttcaaaatctttcattactattttctggtattgaggcgactttttataaaacacaattttttgtatgtttcttacattaaaaaggttgtaagttgaaagttcatgaagagatcttgttgtattaaattattttcacaaacttgccttaataaaaggtgaaaatgttactgtttagtatactttatgaagccccttgagctttataaatggacaggcatggggaataagaatcagtgttaatttaaatgatcttatcctggtggatgtgctrttttcttaaaggagtatgaagcccttttcaaactatcatcccagtggagcggagtactcagtgaacagttactccatagtgcaatccatattaataggcttcttctcttaagtcttcatctcttcttttgcttaattactgaaccgtaaattacttcagagaaatttaaatgctggtatttgaactttatacatgatactttttgtagtttcttttaatttttgaaagatgaactgcttccttttaataaattaatatctatttatacttttctcttgatttgggtcaagatgtttgatcatgagtgctttgagtggtatgtggaataggagaatataaaaacaaatctgccaaatacactagaaagcattttagtaagaaatgctggccctttcttaaaacatttctcttgcatataccaggatgggagtaaaagatgccttaatatttagtttttgtattgttggagacattgattttaataaaatcctatttatctgctgttgtgtgcttttagttgttggataactgaggtctcctaaatggttcaacataaaaccacatttcaagtcttgtttctttttggagtgtcttttcaagtattcaaatgtatttctcaacctgagcatctttttaatcatatacatgggagtcttttaaatgctgaactgttacacatgcttgatttaaaaataataataatagaggaaactattggtctagttgtgccaagaaaagtttctgatgtttatgtgtgatgtacagtgattttgtatatgcgcccagctttaagaacacataaaactattacgtctggtaggaagattgttagtgcctcaagttacacctgtgcagcttgggtctgagttttgatagaacagtaaacatttaaagaagttaagagcagtttgagctgtatccgcggtttttactcgttaactgacttcagctaaatagtttgaattatagagtaagtataattacagcaaaggagttaatctcattttcaaagctgtttctcattttatttcttgaattaatgtagagcaaaacatgttaaaattcaggacmactggaatatggcaacttatgtttcagggttgtgtgtgggtagtatttgtggttgtattggtttgttttttgtttttggagaaacatctgctagtggaataaaatactttgttttgctctgaagagactgaaattgttcaggcttattatggctcatagattacagagaatgatgctagttacatgccaatgaactatttttactctttttatatgaaatgtaaaaatttgtaggggttctggtgatggtggtacctcttattaccttatgtaaaacacttgaacagcctcatcaatattgccgtcatctgtttaacactcccagtatattttctcaatgtctgtttacttaaaattttgtggagtgacataattaataagcaataaagtctgaattatacacagaaaaaaaaaaaaaaaaaaaaaactcgag

SEQ ID NO: 831 - DNA, 677 bp, Homo sapiens
  misc_feature (53)..(53): n equals a,t,g, or c
aactggtggatcccccgggcctggcaggaattcgggcacgagaactgtatggngttggtgatggatgaactgcaaggatcagtgaaacagctgcaggcctttatggatgaaagtacccagtgcttccagaaggtgtcagtacagctcggaaagagaagcatgcaacaattagatccctcaccagctcgaaaactgttgaagcttcagctacagaacccacctgccatacatggatctggatctggatcttgtcagtgactttatgagagtttctgccacaaggtgcccaagaggagaggaatgggaagagtgccccagcacgtggtgactgcgtgatttctgctcgttgcctttaaagrtaactggcaggactgactgtagaacactttgacttttttcaaaaagtgatggaatttgtacatccaaatgaatattgtatagacaattttcccaggaatgtgcaaaatgcttgaaagttcaaacttcttttttgaaatgatcttcagatccagtggcccattcttttatctttatcctgtgaaggtgtttttcaggttttgaaacaatccaaaaatcatttaggaccaagtctaaggaaacattttagtggccaagttggattccgattgtaaaggaatgatactaattttctagcatggctctgaaggtgattttag

SEQ ID NO: 832 - DNA, 858 bp, Homo sapiens
ttttttttttttttttttttttttttttttttttttttttttttttttttttttttttttgaaaagaaaaagagtttacttgaaaaggttcaagggagtcagacttcagaaaaactggataagcaagtgaaaaatataacaggtatttaaagaaaaatataaagaagattaccatgattactaagtttgcattaatttgttcatggagaaaaaacaaaatcttatcacatgatgatcatattcagaaagatcttgcaacatgagctaaataaaagtcaagaataaaatggtgtttgctggggatctgggattataagaaatactcaatgtttcattattttgggaccagaaattgacagggtaacgctgttatttttggttaatcttagggtacaaggtgcttcatcatgatggaaacaaacagggcatgatttctgctttgcttccagaagcataaagcaaatgtcactactacaaaatatagataggatatttcttataactctaatcactgttgtaagtaaataaaaatccaaagtcaaatcatagactctcaattaccatggtttttacacatttctaccatcccttcctggtgcactgtattgagccatactgagctatatttttctacttcacaacttttcacttacgggaagacagctattgtcccccacaccaccctaatgtgggcaagaggaccacttgaccctcatatatttaacactcttgaccctcatatatttaacattcataattatgtattgcctaaatactcactgttgtagtcactgaaatgcctgtgaaataatttttaaaactgtatttacaaaagaaagcctatttctagctcgtgcc

SEQ ID NO: 833 - DNA, 1538 bp, Homo sapiens
  misc_feature (724)..(724): n equals a,t,g, or c
  misc_feature (889)..(889): n equals a,t,g, or c
  misc_feature (975)..(975): n equals a,t,g, or c
  misc_feature (1008)..(1008): n equals a,t,g, or c
ggcacgagcaaataatcatctgttgaaaaatatgaagaaaattgtggatcaaaacacaaagcttgctcctgagaccaaggctgtcattcattggattatggatattccttttgtgctttctgccaatctccatggaggagaccttgtggccaattatccatatgatgagacgcggagtggtagtgctcacgaatacagctcctccccagatgacgccattttccaaagcttggcccgggcatactcttctttcaacccggccatgtctgaccccaatcggccaccatgtcgcaagaatgatgatgacagcagctttgtagatggaaccaccaacggtgtgcttggtacagcgtacctggagggatgcaagacttcaattaccttagcagcaactgttttgagatcaccgtggagcttagctgtgagaagttcccacctgaagagactctgaagacctactgggaggataacaaaaactccctcattagctaccttgagcagatacaccgaggagttaaaggatttgtccgagaccttcaaggtaacccaattgcgatggccaccaatctccgtggaaggaatagaccacgatgttacatccgcaaaggatggcgattactggagattgcttatacctggaaactataaacttacactcagctccaggctatctggcaataacaaagaaagtggcagttccttacagccctgctgctgggggttnattttgaactgggagtcattttctgaaaggaaagaagaggagaaggaagaattgatggaatggtggaaaatgatgtcagaaactttaaatttttaaaaaggcttctagttagctgctttaaatctatctatataatgtagtatgatgtaatgtggtctttttttnagattttgtgcagttaatacttaacattgatttattttttaatcatttaaatattaatcaactttccttaaaataaatagcctctnaggtaaaaatataagaacttgatatatttcatnctcttatatagtattcattttcctacctatatttccccaaaaagtttaggaaaggtttaagaatttttgccatccctaggcttaaatgcaatattcctggtattatttacaatgcagaattttttgagtaattctagctttcaaaaattagtgaagttcttttactgtaattggtgacaatgtcacataatgaatgctattgaaaaggttaacagatacagctcggagttgtgagcactctactgcaagacttaaatagttcagtataaattgtcgtttttttcttgtgctgactaactataagcatgatcttgttaatgcatttttgatgggaagaaaaggtacatgtttacaaagaggttttatgaaaagaataaaaattgacttcttgcttgtacatataggagcaatactattatattatgtagtcccgttaacactacttaaaagtttagggttttctcttggttgtagagtggcccagaattgcattctgaatgaataaaggttaaaaaaaaaaaaaaaaaaaa

SEQ ID NO: 834 - DNA, 1085 bp, Homo sapiens
ctgcaggaattcggcacgaggtgcatcttgcccattgatttctaaatgtattaactacttaaattaatcctgaatcttttcccaggcttaagtgggataatgttttattgtagatgcatatttcctggctctacccagtctttctttgaagactttatcatcctattttctgaatccagtggctgactttaatcttctctggaggaactagataatttctagactaatgcttacactcatgatccagattgtaatttctgaactccttcttccaaatagaatcaaaacaagaaaggggaaagcctctcaaagcaactgtgcgttaataatgaaacactctttttttctaatccaaggagggtttcatactttttcttagtttcttgccctcttcccttctgatcaataattgtaataggaaatttgcaattgtgccaatactcagattcaatactgaactactttcttgcattgtaattcaaattccaaggttaacaactagctgtatgtttccaaaacaatcttattgtatatgtattttcttaggtgaagtttccagaaatgattttttttttttgcagagccaaacacacatggtaatttaaaaaaataatgcacgtatgtggtaaaaacagtaaaagcaaggtatcaagtaaaaagtgaagagtcctccctttctcattcccattcctactctctaattttttatatatccattttgtaagctataatacagagattccatatactcttcacatactttccccagtggtaacctcttgcataactataggacaataacacactataggacaaaaatcaagaaattgacattgatacaatccatctccaaaaaaagaaaaaagaaaaagccagacatggtgatgtgtgcctgcagtcccagctaattgggaggctacagtgggaggatcccttgagcctgtgaggcggaggttgaagtcagctatgatcacgccactgcactccagcttgggcaacagagccagaccctgtctcaaaaaaacaaaaacaaacaaaaaaaaagaaaaaaaaaaaaaaaaaaaaaaaaaaaaaaaaaaaaaaaa

SEQ ID NO: 835 - DNA, 1046 bp, Homo sapiens
ggcacgagcttatttgttgctagtggcaatgtcagctactactgacaacattatttgaaaggcaatagtgtgtatcaggacctttaaaatatatggacatatttatcctttaagtctaaccttcatcctttcttcataagttttacaaatactgtatgcatttctgtggtaggtaagtgataaacttactaagcttaaaatgaacagaatcttagatgaggtttcttttcattttctgtttttaagaggagttgctttggtttggcctctaaacaagaagagcacaaatcttgctgcctacacagttgatatttggaactattctagtggttctatttaattttcaaaaccgggttatgaaatggagaattaaccactttttacagataaggaaacaagattagaagtattttacatgtggttttagaagggtgtttactgaatgaactgttttataagatgtattactgctggtctcatgttttattatcatactgtacccctggtggaaatcaacctaagaaactcttttgtatttaaaaatggaaataattactgtgcctttgaattgaagtaatctacaaaagaaatgtggtccagactttagactttgttgggactgtgatgatcatttctggcttttggcaatctggatctgaacctttggttttatttagctttccagttctcagggaacaatagaaaccagtcttcaggatatcgacagcagattatctccaggtggatcactggcagacgcatgggcacatcaagaaggcactcatccgaaagacagaaatgtagaaaaactacaagtcctgttaaattgcatgacagagatttactatcagttcaaaaaagacaaagcagaacgtagtaagtaaaatttgctatttgttaatttaataaatccctcttagtaattagttataattcagttaaattaatttggtatatctgtaagggtagcttcttaagctgtttttttcagagatgtgattctgtcaggaaaaaggttgattgtgtttaaaaaaaaaaaaaaaaaa

SEQ ID NO: 836 - DNA, 1422 bp, Homo sapiens
  misc_feature (44)..(44): n equals a,t,g, or c
gttgtggatgcgcggagaggccggcagcggtggcagcggcacgnaggaggaagctgagcagggcggcggcggcggtggaacctgcggggctggggcgcgcgccatgggccgcctgcactgcactgaggacccggtgccggaggccgtgggcggcgacatgcagcagctgaaccagctgggcgcgcagcagttctcagccctgacagaggtgcttttccacttcctaactgagccaaaagaggtggaaagatttctggctcagctctctgaatttgccaccaccaatcagatcagtcttggctccctcagaagcatcgtgaaaagcctccttctggttccaaatggtgctttgaagaagagtctcacagccaagcaggtccaggcggatttcataactctgggtcttagtgaggagaaagccacttacttttctgaaaagtggaagcagaatgctcccacccttgctcgatgggccataggtcagactctgatgattaaccagctcatagatatggagtggaaatttggagtgacatctgggagcagcgaattggagaaagtgggaagtatatttttacaactaaagttggtggttaagaaaggaaatcaaaccgaaaatgtgtatatagaattaaccttgcctcagttctacagcttcctgcacgagatggagcgagtcagaaccagcatggagtgtttctgctgatttctgtccctgcatctcccctrgccccgttccctgccctcctcccttccctgggtgactgctctgagaggcacttcactcacaggcctgtgggatgctccatggggccctgctggctccatggggcccaggtgcaaagggtttctgaaaaacagcaggattaagtactgaaagagcccaacacaattaccctgtaaactctctgttagggcaaccaccaccacctgtcttccaggacacatttttagatactctgacaggccactgcatctcagattcaggggagaaaataagttgtcacctccccttcaaagttccagagtaaacaaatggtgccatcattcaagataacatgctgatcaccctcctcccaaaaagcaagagcttgtttatggctgaggaatcggcggattgtctgaatgacacatatacagagcccccacggatttctgcacactctgggtctgtgctggtggaacattgccaatcagttcttaatgaggcacctgtgtgtaaatacatgcttggtcttctctgcagagaactgaggctaaactctgtccctacttctggttttgccctgtcatgtcgtaacgaggtgggccttttgaggccattttagtttgagttcgagccaaccacctctgttggttagatgatgaataaaaaggttctgaagaaaaaaaaaaaaaaaaaaaaaaaaaaaaaaaaaaaag

SEQ ID NO: 837 - DNA, 419 bp, Homo sapiens
ggcagagcatgaacttgcgtctagtttctgttccctctcaaattgcccaggctgtcctgtgagtgacagcagctatttcgtgggcctcctctggaatcatgagaagtcacccaaacaatctcagttttctagctcactccgtcttgacatttctacactgtcatccttggttttcttggaaattaatttgcttttcttcattgtctttctttggagctgctttccttttgttggttactattttatttttagcttctcacaccataccgacatatgttggttattcttttagacatgttttttgttgttgttgtcacctggaacttttgtatcttgaataaatttggggatcaaatacaaaaaaaaaaaaaaaaaaaaaaaaaaaaaaaaaaaaaaaaaaaaaaaaaaaaaaaaaaaaa

SEQ ID NO: 838 - DNA, 1691 bp, Homo sapiens
ggcacgagcctaaattctatttctgtcatttcagccagctcagcctggataaacactcttgttagagaatttgtatggtcatttggagcacatatgacactctggccgttttaatttttggagttcttgcgttagttctttctcatctccatgtgtgggtgttcctttaactgccatatagattgagtacagtcaatagatttctggctgttttcactaggctgaggccttgtgcagggtctttttttgaagctgacttcttgtctctagtttcagaggtgagtatgttagtgaggtattcttggtgttgaagctttggggtgtgatccagtaggtggcacttaggcttattggtcaactggtagactcttgctcagttgtgtggctcctctgtgttttctcatagttacagctgtgttcactctcaatgctctgaaagtgtgggttcctctcccccttcagtgccagctgtatggctacagattgtggtttgacactcctggctgcccactgcagctctggggcaatgtcagtgtttacgttccttcctcaacttggcggcaacagaggaaaggaccttagtagtggttgtggtcaagggtcttttgcttgtatcctgggagctccacaccagagagatgtaggtcagcaattcctcagtgcaatcaccccaggatgaagggtctgtgctgtgggctcaagccaggggttctctctggtgatgagtgggggttgggggtgtgggaaccatgggagacagactggcctcctcttcttgggttgattgcagcttgttggaggtataaataaggtacttagggtcttttcttcttcattagtctgagggtagcaagggcagttctactgcagagacagtggcagagaggctttcaggaacagtatttattaaccatcctcacctccctacccgccccacccctattacactacccagcctctggtagccatccttctactctctattttcatgttttcaattgttttgatttctagatccaaaaataagtgagaacatgtgatgtttgtctttctgtgcctggcttatttcatttaacataatgacctccagttccatccatgttattgcaaatgacaagatctcattcttttttatggctgaatagtaatccattgcagataagtgccacattttctttatccattcatctgtgaatggacacttaggttgcttccaaattttggctgttgtgaatagtgctgcaacaaacatgggagtgcaaatatattttctatatactgatttcctttcttttgagtatatacccagtagattgttgggtcatatggtaactctatttttacttttatgagaaacctccaaactcttctccatagtggttgtactaatttacattctcatcaacaacatatgagggtttccttttctctacctcctctccagcatttgttactgccctggtgttattttgcttcttaagtattagaactatacttagtgttatatgttctgtgattataagtaaaactgcctttgctatatagtatgcatagaatattttaaagttattactagaagctgacacattgttgttttctattacaaacaataaaattagtttccatttaaaaaaaaaaaaaaaaaaaaaaaaaaaaaaaaaaaaaaaaaaaaaaaaaaaaaaaaaaaaaaa

SEQ ID NO: 839 - DNA, 1744 bp, Homo sapiens
ggcacgagcaggcgccgggcgcactgtcctagctgctggttttccacgctggttttagctcccggcgtctgcaaaatgaagattgaggaggtgaagagcactacgaagacgcagcgcatcgcctcccacagccacgtgaaagggctggggctggacgagagcggcttggccaagcaggcggcctcagggcttgtgggccaggagaacgcgcgagaggcatgtggcgtcatagtagaattaatcaaaagcaagaaaatggctggaagagctgtcttgttggcaggacctcctggaactggcaagacagctctggctctggctattgctcaggagctgggtagtaaggtccccttctgcccaatggtggggagtgaagtttactcaactgagatcaagaagacagaggtgctgatggagaacttccgcaggccattgggctgcgaataaaggagaccaaggaagtttatgaagtgaagtcacagagctaactccgtgtgagacagagaatcccatgggaggatatggcaaaaccattagccatgtgatcataggactcaaaacagccaaaggaaccaaacagttgaaactggaccccagcatttttgaaagtttgcagaaagagcgagtagaagctggagatgtgatttacattgaagccaacagtggggccgtgaagaggcagggcaggtgtgatacctatgccacagaattcgaccttgaagctgaagagtatgtccccttgccaaaaggggatgtgcacaaaaagaaagaaatcatccaagatgtgaccttgcatgacttggatgtggctaatgcgcggcccaggggggacaagatatcctgtccatgatgggccagctaatgaagccaagaagacagaaatcacgacaaacttcaggggagattaataaggtggtgaacaagtacatcgaccagggcattgctgagctggtcccgggtgtgctgtttgttgatgaggtccacatgctggacattgagtgcttcacctacctgcaccgcgccctggagtcttctatcgctcccatcgtcatctttgcatccaaccgaggcaactgtgtcatcagaggcactgaggacatcacatcccctcacggcatccctcttgrccttctggaccgagtgatgataatccggaccatgctgtatactccacaggaaatgaaacagatcattaaaatccgtgcccagacggaaggatcaacatcagtgaggaggcactgaaccacctgggggagattggcaccaagaccacactgaggtactcagtgcagctgctgaccccggccaacttgcttgctaaaatcaacgggaaggacagcattgagaaagagcatgtcgaagagatcagtgaacttttctatgatgccaagtcctccgccaaaatcctggctgaccagcaggataagtacatgaagtgagatggctgaggttttcagcagtaagagactccccaggtgtgcctggcctgggtccagcctgtgggcgcttgcccctgggcttggggctgccgtccccactcaggcgtggtctgcagcgctgtcagttcagtgtggaaagcatttctttttaagttatcgtaactgttcctgtggttgctttgaaagaacccttccttacctggtgtgttttctataaatcttcataggttattttgattctctctctctctctctctaagttttttaaaaataaacttttcagaacaaaaaaaaaaaaaaaaaaa

SEQ ID NO: 840 - DNA, 957 bp, Homo sapiens
gagattaaggccttttccacacgcattaatagtcccatttttctcttgccatttgtagctttgcccattgtcttattggcacatgggtggacacggatctgctgggctctgccttaaacacacattgcagcttcaacttttctctttagtgttctgtttgaaactaatacttaccgagtcagactttgtgttcatttcatttcagggtcttggctgcctgtgggcttccccaggtggcctggaggtgggcaaagggaagtaacagacacacgatgttgtcaaggatggttttgggactagaggctcagtggtgggagagatccctgcagaacccaccaaccagaacgtggtttgcctgaagctgtaactgagagaaagattctggggctgtcttatgaaaatatagacattctcacataagcccagttcatcaccatttcctcctttacctttcagtgcagtttcttttcacattaggctgttggttcaaacttttgggagcacggactgtcagttctctgggaagtggtcagcgcatcctgcagggcttctcctcctctgtcttttggagaaccagggctcttctcaggggctctagggactgccaggctgtttcagccaggaaggccaaaatcaagagtgagatgtagaaagttgtaaaatagaaaaagtggagttggtgaatcggttgttctttcctcacatttggatgattgtcataaggtttttagcatgttcctccttttcttcaccctccccttttggcttctattaatcaagagaaacttcaaagttaatgggatggtcggatctcacaggctgagaactcgttcacctccaagcatttcatgaaaaagctgcttcttattaatcatacaaactctcaccatgatgtgaagagtttcacaaatctttcaaaataaaaagtaatgacttagaaaaaaaaaaaaaaaaaaa

SEQ ID NO: 841 - DNA, 1032 bp, Homo sapiens
ggcacgaggttaattaactgctctgtgctgtagtttctccatctgtaaaactgtcaaggtagtagtacatgtcattaggattaagtaaattaagctatgtaaaacacagataacattggatgacaccaatggttaggcagcagatacatttattagtaaagtgcaatggaaattttcctcttgctggataagagtaaactaatgattagacttgaggatggcttaactaagaaagaaagtgatcaagaaggtaagagtagtaatgattggttttgagaatttaattttctgtgcttatcatggaataaatttagctgaattaaaatgcattataattacaagagttaggatatcttaaaatatctagtgaggctgtataacctagcaagatcaaacaaactcattgctattggattttaagaaattggattgtcaagaagataagtaatcaatatggcttggctgtgtccccacccaaatctcatcttgaattatagctctcattattcccacatattgtgggagtgacctggtgggagacaactgaatcatgggggcagttttccccatactgttctcgtggtagtgagtaactctcacgaaatctgatggttttataaggggaactcccttttgcttggctttcattctgtcttgcctgctgccatgtaagatgtgcctttcgccttatgccattattctgaggcctccccagccacgtggaattgtgagtcccttaaacctctttttgtttataaatcacccagtcttgggtacatctttatcagcagtgtgaaaatggactaatacagtaatcttgcaagcctgcacaaacttgcgctttgtataaaaagccacaataataaaacttgttgagaatatcctaccaaaattactatgaaagttatctctcccttttactatgagcagaggtggcccattagaataatatgattgtctctggattatgtataataagaaaatgtgtgtatacaaataaaatgcatttattatgaagtaaaaaaaaaaaaa

SEQ ID NO: 842 - DNA, 1390 bp, Homo sapiens
ggcacgagggagtctgatggggagaagaagtacccatgccctgaatgtgggagcttcttccgctctaagtcctacttgaacaaacacatccagaaggtgcatgtccgggctctcgggggccccctgggggacctgggccctgcccttggctcacctttctctcctcagcagaacatgtctctcctcgagtcctttgggtttcagattgttcagtcggcatttgcgtcatctttagtagatcctgaggttgaccagcagcccatggggcctgaagggaaatgaggcagctgctgtgtccccacggaaacaaccatctggggactgctgggaaatgctgtgaatgcggagggaagtgatgtttgggttctgtagctgagagatttttattcatttttaactgccccccaaccccactccaactccttctccaccacccattctcccaatggtctttagaaatagattttcatctgatattctgcagaaatatcaatgagacttggtatgggacaggggcagaaaacactacataggcctccaaggcaaaaccagtcccagtttctttaatgggaagaagctggaattcctggtgctcaattcttagtgaccccaatcctatacccaaatctatgatattctgggacctcagtgattttggtcccctcccacttctctagttcgtcatcctcccttcccatatccttcaaaagaaccacactagggtctccacctacttatacaatgcggatgcccaactgtttttaaggaagccagaagcatcccatggaccatggggtgagtgtcctccaagagccccctgagctcagccctctgcctggagggctccagacctttctgagccctgcttggaggcgagcattttcactgctaggacaagctcagctgttgaggacacccccaccccaaatttcagttcttacgtgattttaaccattcaacatgctgttgggttttaattctctaattattattattattgttattattttttaggaccagttgtagtgaattgctactgaaagctatcccaggtgatacagagctctttgtaaaccgcagtcacacattagggttagtattaaactttgtttagatgtaccataattaacttggctagttgattgtttgaagtctatggaagaaatagttttatgcaaaattttaaaaaatgccagtctggtcagggaagtagggggtttcaatgctgttgggaaccaggaaggtgggacagccggcaggtagggacattgtgtacctcagttgtgtcacatgtgagcaagcccaggttgaccttgtgatgtgaattgatctgatcagactgtattaaaaatgttagtacattaaaaaaaaaaaaaaaaaaaaaaaaaaa

SEQ ID NO: 843 - DNA, 1590 bp, Homo sapiens
ctgcaggaattcggcacgagcggcacgaggttctgtcctcacctcactctggtactcgcctcttggggcggctcagcccattcatggggatggcaccaagcggccatgctcagtcttccagccccgctgagggtaaaccgaggcctctggcagctgtgcacaggtgctggcctctggctccttcaaggagcactgcctgtcactcgctcctgggctgtctagccatgtctcccacccccactttaccgcagccagctgctgggatcaaagcaagtctgttcttatgttatttgcctgtatgaaatcatttctcattttatcacaattccttcaactcagcttactcgcgtggctgcctgttcatatttgaaagcagccaccgtgctgtggctttggtttggaaaagcatagcacgcacttcccttggttttcccttcccagagccgaccgcagctggtcagccctctcttcccgctcctgaacctttacttactgactttgagctctgtgactccgtcggttctcgcaggaattaactaacttaccaattggttcaatccacttgagcgccatagctctgagctcctctgtgtgacatgccacagatgactattgcacacctgggwcctgccccagcaggccatgcccctcccatgtgccgtgcctgttgctgcagctgccccccgaccccgccactggctgcaggaattcagcctttagaggcagaggcagctgcagcggcccctgaggtcaaaccccagtgtgactgcatagcagtgttagctggttggtttcaaactactggattccaggcaaaggcctacagattgaccttattatttttgaaaatatgttaagggttttttcatagagagagaaagaatggatttttttttaactgggaacctcctgattcttacggaaaattatccttctataagaagataccagagagatttattcaaggtaatttgataacctaaaatcaattctccattttttatcatatgtgggatttgttgctaagtcgtgttcaacaatagcttttatgttcctaacatatctgaaagcttatttatgaatggatatactggattattgatatactgattttttttttaatggggacatttgccattttcttcccagaaatatgtaatcccctggctgactaggactgttaaacatagtgtggactggatgatgccttcgacaaaccagagaagccaagttggggggagctggtgcctggagtgggccctgtgcacctcacctggcggaggctgggggggctctgtcagcaggaccctagaggagactctcattcgattttaaagaagcacaacgggtcattttcctttgtatgttcctagcgcagaactgtttctaaaacaacttgaagtatagttttgttatctaagcaatttttgttttaagtaagtaagtgtactagaatgcgaagccgttatggttcaggtttttaaaaactggtacagtattgtatytgtctcatctgttgcactgtatttcaatcatctgtaattaaaatgatcatatgtttaaaaaaaaaaaaaaaaaaaaaaaaaattt

SEQ ID NO: 844 - DNA, 1461 bp, Homo sapiens
gctcgtgccgcgaagtgctgggatggcaggcgtgagcacctcacctggcccttttctgcgttatttgcccgcctgcctgcctgagctcacttgcaggccgaggaagatgcttacggaagtcctccttgaggtagccccagcctgagatcaggcacttcttgctgggtgggaagatgtgtgtggcagccgggaggcacacgggctggatgtgccggccgaaaggcagagggctggtcagctccagcacagccacgtcaaagtcggccgtgtccgcgttgtacagggggtgcttgacgatctggaccacctgggcccgcacggtgctggcctccgarccgctgaggtaggtcgcacccacgtaggccacccacttcgtcgggtcttggaacctgcaggagcagaccccagctcagaagccaccgagggtcagagccgtcgggggaggcagacgggacactcgccttgggtgcaaaatgtaaggggtatccccccacattaatatttatgaatagtatttataaaaatcaggccagacacagtggctcatgcctgtaatcccacacttttggaggctgaggcgggaggatcacctgagcccaggagttcaagacgagcctgggcaacatagcgaaacacagtctttaaaaacaacaacaaaaaacaggccaggtgcggtggctcatgcctgtaatcccagcactttggggggctgaggcgggaggatcacgaaggcaggaattcaagaccagcctggccaagatggtgaaaccccatctctactgaaaatgcaaaaattagccgggcatggtgatgggcgcctgtaatctcagcctyccaagtagctgggatgacaggtttgcgccccctatgctcgactaatttttttgtgtgtttttagtggagacaagtttcgccatgttggccaggctggtctcgaactcctgacctcaagtgatccccccacctcagcctcccaaagtgctgggattacactcatgagccacaagctcactatagcctgtccaagtatcaacattttaaacaaagacaggatgagacagagttgggattagggtgaggggagccagccatgagccttgggcacaaaatttaaagagttgccaaaaatctcagccatcaagataaatgatatcgagccgggtgcagtggctcacacatgtaatcccagcactttgggaggcagagacgggcagatcacttgaggccaggagttcgagaccagcctggccaacatggcaaaaccacgtctctactagaaatacaaaaattggccggccatggtggcgggtgcctgtaatcccagctactcgggaggctgaggcaggagaatcgcttgatcccgggaggtggagcttgcagagagccagaactgcaccactgtactccagcagggcgacagagtgagactctgtctcaaaaaaaaaaaaaaaaaaactcgag

SEQ ID NO: 845 - DNA, 1651 bp, Homo sapiens
cggcacgagcggaccaccagcccccgaaatgataccttcctcggctctacggagtgcaccttgggccagattgtgtcacaaaccaaggtcactaagccattattgctgaagaatgggaagactgcgggcaagtccaccatcacgatcgtggccgaggaggtatcaggcacaaacgactatgtgcaactcaccttcagagcctacaagctggacaacaaggatctgttcagcaagtctgaccctttcatggaaatctataagaccaacgaggaccaaagtgatcagctggtctggagaactgaggtggtgaagaacaacctgaaccccagctgggagccgttccgcctgtccctgcattccctatgcagctgtgatgttcaccgacctctcaagttcctggtgtatgactatgactccagtgggaagcatgacttcatcggcgagttcaccagcactttccaggagatgcaggaagggacggcaaaccctgggcaggagatgcagtgggactgtatcaacccaagtatcgggacaagaagaagaattacaagagctcagggacggtagtgctggcccagtgcacggtggagaaggtgcacaccttcctggattacatcatgggtggctgccagatcagcttcacggtggccatcgacttcaccgcctccaatggggacccgaggagcagccagtccctgcactgcctcagtccccgacagcccaaccactacctgcaggccctgcgtgcagtgggaggcatctgccaggactatgacagtgataagcggttcccagcttttggctttggggctcgaatcccccccaacttcgaggtgtcccatgactttgctatcaactttgacccggaaaatcctgaatgtgaagaatctcaggggtcatcgcctcctaccgtcgttgcctgccccagatcaactctacggccccaccaatgtggcccccatcatcaaccgtgtggctgagccggcccagcgggagcagagcaccggccaagccacgaagtactcggtgctgctggtgctcactgacggtgtggtgagcgacatggctgagactcgcactgctatcgtgcgtgcctcccgcctgcccatgtccatcatcatcgtaggcgtgggcaatgctgacttctctgacatgcggctgctggatggcgacgacggccccttgcgctgcccccgaggggtgcctgcagcccgagacattgtccagttcgtgcccttccgagacttcaaggatgctgccccctctgcactcgccaagtgtgtcctggctgaggtgccacggcaggtggtggagtactacgccagccagggcatcagccctggggctcccaggccctgcacactggctacgactcccagccctagcccgtgactgcctccctccggaccgacactccctcagcctctcagtgcctgtcctgaccctcgtgactccagtgaccaatgcctccacctcttggaccaggtgtgccccctgggttctggacgtgagtggtgggtcctgctcctatctctccaaaccccatacccttcaatgctgtggcccctcagtgacttccttgggtgatcctgactttctagccattaataaagagaactgctcctagcacctcagcctctaaaaaaaaaaa

SEQ ID NO: 846 - DNA, 1720 bp, Homo sapiens
ggcacgagcaactctccaggaggttgggagggtgcccgcttctctgctctgtgcccattagcctcgccgcacaccctaggaccattgactttggaggaggttgggagggtgcccacttgcccactcctccgcagacagccctggcttcacctcagcgccacaggtctacaccggacccctgtgcctaggtctgtggcggctgcaaacatcaggacctgcttcctgtcagcacgtggagtctcctgtgctcatggcatctgctggcagtgagcactggccatgtggctctgagccccaggctttcgggcatgacaggcgggcagtaggacagcgcagtctgtccccttgcacgcgtcagggtccgagcctttcgccattgcactccagcctgggtgacagggagagggactctgtctcaaaaaaaaaactgaggtcagggagggtgagatgacggtgagagctcggacttgaacgcaggtcccacccagaacagcagccctaactctgagcaaggtctgtgctgttcagtagctctattgagatgtgatttccacactgtgtaattcattcacttacggtgtacagtccagtgggtcttagcatgctcggtgttgacagtcacatcgtcttcacccccaaaaggaaaccccgtgcccatgagcagtcgctttgtctgcccctcgtccccagccccaggcaaccacaaatccatgctctgtctctgtagatttgcctgttccagacgtttcacagcaatgggccttttctgcctggcttctttaacgttgcatcacatcttcaaggtccatcccagctgcagcgtgtcagtgcctcctggcttttcactgctgagtagtgcccgttgcatggacagaccacgttgtgctcacctgtttgccctaatgggcccctgcttggtgctttccacctttgggaggctgtgaatcgtgctccagccacactctgacccccgcccggctccaagagatgacaggattggcagcttcctcaccaaccagggactctgtggcctgcgcatccgccatcctgttggctgtggtaccctgtgctcaaccgtggcctttgtgctgcctcgcctgctgcacagccaccccctgcagcacccacctagagggcactggccaggagtctgtttcccacgagaccgtgaggcagtcctttctcataccacgatggaggccgagtcactgtgcgctccacgatgaggctgcaagtcactatgcgttccacgccctccgtgcactctgggctctgccaccctactctgcagggtgctggtcatctgggcatcgccgagctcaggctggcacgacaggctgctcttgggagtaacagaccttttggtgcctttccagagccttaaacgtaatgcgtataagaaaggcagggaggccaggcacagtcactcacacctgtaatcccagagctttgggaggccagggcaggaggatcacctgcgcctaggagttcaagaccagcctggtcaacatagcgagaccccatctctacaaaacattttataaaaaaattaggcaggcatggtggtgtgcacctgtaagtcccagctacttgggaggctgaagtgggaggatcacttcagccgggagtttgaggctgcagtgagctgtgagcacaccactgcactccagcctgggtgacagagtgaggccctgtctcttaaaaaaaaaaaaaaaaaaaa

(The sequence listing continues in the following parts.)

1-12. (canceled)

13. A polypeptide comprising an amino acid sequence at least 95% identical to a sequence selected from the group consisting of:
(a) a full length polypeptide of SEQ ID NO:Y or a full length polypeptide encoded by the cDNA Clone ID in ATCC Deposit No:Z corresponding to SEQ ID NO:Y as referenced in Table 1A;
(b) a predicted secreted form of SEQ ID NO:Y or a secreted form of the polypeptide encoded by the cDNA Clone ID in ATCC Deposit No:Z corresponding to SEQ ID NO:Y as referenced in Table 1A;
(c) a polypeptide fragment of SEQ ID NO:Y or a polypeptide fragment encoded by the cDNA Clone ID in ATCC Deposit No:Z corresponding to SEQ ID NO:Y as referenced in Table 1A;
(d) a polypeptide fragment of SEQ ID NO:Y or a polypeptide fragment encoded by the cDNA Clone ID in ATCC Deposit No:Z corresponding to SEQ ID NO:Y as referenced in Table 1A, wherein said fragment has biological activity;
(e) a polypeptide domain of SEQ ID NO:Y as referenced in Table 1B;
(f) a polypeptide domain of SEQ ID NO:Y as referenced in Table 2; and
(g) a predicted epitope of SEQ ID NO:Y as referenced in Table 1B.

14. The polypeptide of claim 13, wherein said polypeptide comprises a heterologous amino acid sequence.

15. Use of the polypeptide of claim 13 for identifying a binding partner comprising:
(a) contacting the polypeptide of claim 13 with a binding partner; and
(b) determining whether the binding partner increases or decreases activity of the polypeptide.

16-18. (canceled)

19. An antibody or fragment thereof that binds a polypeptide comprising an amino acid sequence at least 95% identical to a sequence selected from the group consisting of:
(a) a full length polypeptide of SEQ ID NO:Y or a full length polypeptide encoded by the cDNA Clone ID in ATCC Deposit No:Z corresponding to SEQ ID NO:Y as referenced in Table 1A;
(b) a predicted secreted form of SEQ ID NO:Y or a secreted form of the polypeptide encoded by the cDNA Clone ID in ATCC Deposit No:Z corresponding to SEQ ID NO:Y as referenced in Table 1A;
(c) a polypeptide fragment of SEQ ID NO:Y or a polypeptide fragment encoded by the cDNA Clone ID in ATCC Deposit No:Z corresponding to SEQ ID NO:Y as referenced in Table 1A;
(d) a polypeptide fragment of SEQ ID NO:Y or a polypeptide fragment encoded by the cDNA Clone ID in ATCC Deposit No:Z corresponding to SEQ ID NO:Y as referenced in Table 1A, wherein said fragment has biological activity;
(e) a polypeptide domain of SEQ ID NO:Y as referenced in Table 1B;
(f) a polypeptide domain of SEQ ID NO:Y as referenced in Table 2; and
(g) a predicted epitope of SEQ If) NO:Y as referenced in Table 1B.

20. (canceled)

21. A nucleic acid molecule comprising a polynucleotide sequence at least 95% identical to a sequence selected from the group consisting of:
(a) a polynucleotide fragment of SEQ ID NO:X as referenced in Table 1A;
(b) a polynucleotide encoding a full length polypeptide of SEQ ID NO:Y or a full length polypeptide encoded by the cDNA Clone ID in ATCC Deposit No:Z corresponding to SEQ ID NO:Y as referenced in Table 1A;
(c) a polynucleotide encoding a predicted secreted form of SEQ ID NO:Y or a secreted form of the polypeptide encoded by the cDNA Clone ID in ATCC Deposit No:Z corresponding to SEQ ID NO:Y as referenced in Table 1A;
(d) a polynucleotide encoding a polypeptide fragment of SEQ ID NO:Y or a polypeptide fragment encoded by the cDNA Clone ID in ATCC Deposit No:Z corresponding to SEQ ID NO:Y as referenced in Table 1A;
(e) a polynucleotide encoding a polypeptide fragment of SEQ ID NO:Y or a polypeptide fragment encoded by the cDNA Clone ID in ATCC Deposit No:Z corresponding to SEQ If) NO:Y as referenced in Table 1A, wherein said fragment has biological activity;
(f) a polynucleotide encoding a polypeptide domain of SEQ ID NO:Y as referenced in Table 1B;
(g) a polynucleotide encoding a polypeptide domain of SEQ ID NO:Y as referenced in Table 2; and
(h) a polynucleotide encoding a predicted epitope of SEQ ID NO:Y as referenced in Table 1B.

22. The nucleic acid molecule of claim 21, wherein said nucleic acid molecule comprises a heterologous polynucleotide sequence.

23. A recombinant vector comprising the nucleic acid molecule of claim 21.

24. A recombinant vector comprising the nucleic acid molecule of claim 22.

25. A recombinant host cell comprising the recombinant vector of claim 23.

26. A recombinant host cell comprising the recombinant vector of claim 24.

27-32. (canceled)
